United States Patent Application Publication US 2004/0031072 A1 - sequence listing, part 40

SEQ ID NO: 243489 - protein, 132 aa, Glycine max
  Clone ID: PAT_MRT3847_61899C.1.pep
MKTITKAREFRCIEYLSSLRRSFSFSSSSSSHSRHFQFRNDKRNHLNPKDLVSEDNKFEEAVDVLCQQKRVKESGELLHRTDHRPSARVYSTLIAACVRHRALELGRRVHAHTKAFNFVPGVFIFNRLLDMY

SEQ ID NO: 243490 - protein, 60 aa, Glycine max
  Clone ID: PAT_MRT3847_6189C.1.pep
INTSIFSYLYIIDNLVLSLVSFCFWFEIECNNAFVGSDVCMVHFLSVLNSDASFIIYIIL

SEQ ID NO: 243491 - protein, 46 aa, Glycine max
  Clone ID: PAT_MRT3847_618C.1.pep
QTEKTFNFLEGSTVVPLYISNLNTHASIFVLYIRCNYVREMHKTTE

SEQ ID NO: 243492 - protein, 82 aa, Glycine max
  Clone ID: PAT_MRT3847_61900C.1.pep
RRLDFSTQNSSDICLSIICDLIIGRSKVYESDTTQPILTAKNNLKLKKIKEKELDEKGTQNMGGDIAGWSARPVRPITTNET

SEQ ID NO: 243493 - protein, 245 aa, Glycine max
  unsure (1)..(245): unsure at all Xaa locations
  Clone ID: PAT_MRT3847_61901C.1.pep
MAAAAVAEVRKAPRPGKGGYEAHGLSEEEARVRAIAEIVSSMVDLSHKGQNVDLNALKSAACRKYRLSRAPKLVEMIAALPDAERETLLPKLRAKPVRTASGIAVVAVMSKPHRCPHIATTGNICVYCPGGPDSDFEYSTQSYTGYEPTSMRAVRARYNPYVQARCRIDQLKRLGHSVDRVEFILMGGTFMSLXPVDYRDYFIRNLHDALSGHTSANVEEGVAYSEHGATXKCIGLTIEPRPDYW

SEQ ID NO: 243494 - protein, 61 aa, Glycine max
  Clone ID: PAT_MRT3847_61902C.1.pep
PGLIVTVYLVNVINPSWLKYSWKQLEDYTCGSDSQYVHQQDSAIDASSQQSVSESLHYCPL

SEQ ID NO: 243495 - protein, 56 aa, Glycine max
  Clone ID: PAT_MRT3847_61903C.1.pep
GETLRRCLLMQTPFHGTLNKLIQLVLHTLTRRTLHSLILYDSSDVLSSSLRYPDKS

SEQ ID NO: 243496 - protein, 45 aa, Glycine max
  Clone ID: PAT_MRT3847_61904C.1.pep
NVLLLALSFLHKIHLLTGIDFFSYLVYKYFSLKVILLFYSIRIGT

SEQ ID NO: 243497 - protein, 242 aa, Glycine max
  unsure (1)..(242): unsure at all Xaa locations
  Clone ID: PAT_MRT3847_61905C.1.pep
MDELFSNREGSSAQKGLLKSPALLKYIFERSGYPKEHEQLKQLREITVQKYGXRSTMSVPVDEAQFLSILLKIMNAKKTLEIGVFTGYSLLSTALALPSDGKIIGIDVDRQAYETGLPFIQKAGVEHKIDFIQTDALSALHDLINGKHEETFDYVFVDADKKNFIKYHELLLKLVKKGGIIAYDNTLWLGTVAMSENKDKIEDSLWQNREPTLEFNNYIANDTRIESTILSIADGVTLCRCL

SEQ ID NO: 243498 - protein, 83 aa, Glycine max
  Clone ID: PAT_MRT3847_61906C.1.pep
RIPSAWCDVVLLPNGASAERGLVLWNGVMHGCSVKTAYNRLLWEWLMRKRTVSGNLYPVLKYLKRRRHKFSKAKFLAATKILI

SEQ ID NO: 243499 - protein, 64 aa, Glycine max
  unsure (1)..(64): unsure at all Xaa locations
  Clone ID: PAT_MRT3847_61907C.1.pep
LTLSESIISVFPFSILNVFSYSLCSLSSXNLIEYTSEGQPSPPLELAVGVELGLDSHSKESKKN

SEQ ID NO: 243500 - protein, 52 aa, Glycine max
  Clone ID: PAT_MRT3847_61908C.1.pep
GNKILLDYIKQTYIGHMYFSSAVYTFFFLHSFSAPFCPPLPNDAPILSDADF

SEQ ID NO: 243501 - protein, 196 aa, Glycine max
  unsure (1)..(196): unsure at all Xaa locations
  Clone ID: PAT_MRT3847_61909C.1.pep
MANYGTTQRIPTSSTPQSTADTYEPEPKAPHEKFYSDFRIYCPINIPSTSEAAGVRIMRNMCNFGLYYTLFVWIILFITLIPQRKVSLILFVIMTYVTTLYFLLLRAFPNSVVLHRIIDKRVVLALLAIATAVQLILTXAGIHLAVTLASSVPVLLGHAGLWASYDAFEVEDSSAKGELAPLAGHSESVLEPIRLE

SEQ ID NO: 243502 - protein, 96 aa, Glycine max
  Clone ID: PAT_MRT3847_6190C.1.pep
CGSSIFGHSLTLSLYFSLLLRLWVRWGLSPSSFLQSSYSLSSLMDTLLVLASKEWFWPWVFGTYGAVFVLGKQILRDGILLTLLICWVTTLMTLIS

SEQ ID NO: 243503 - protein, 72 aa, Glycine max
  Clone ID: PAT_MRT3847_61910C.1.pep
MPLQLFDGSDSENEDISKIKIDEKYARRFEHNKKREDLQRFEELKKKGVIDSPSPSHSEGEEESESESSSDD

SEQ ID NO: 243504 - protein, 217 aa, Glycine max
  unsure (1)..(217): unsure at all Xaa locations
  Clone ID: PAT_MRT3847_61911C.1.pep
MRSQLVKSNIKTPPRPKRRRQPLKSWPVTFSPFARALALSRITSLSPPNPTPTLSAKKPQPSHGSVHADLSQPEHSESSDEDFDGVVQADFSFFDPKPNDFHGAKTLLQTYLDDQEWDLSAFVDLILAQTTVGSVVKIEDDEDEGLFALVTALNLYRYREHKCIATVKGFXXHKVRQEKSXHDQLKFAVGSKRMMWSPGSQRMVNLPPRFCNSYDAL

SEQ ID NO: 243505 - protein, 606 aa, Glycine max
  Clone ID: PAT_MRT3847_61912C.1.pep
MLNDSPSHGGGSVVFDGKFSLDAVHQEIDMAKNKNLEKDDEYNLSNSKSKNDQSNLLEPDCRGGWARADGPVPLWPSSSDTSHAKWTGENHSGYGIQKDNSSVNPDILMADALTTSAQKEIYYLGDRTEDQKGHDIMENSSTWLGMPFLNFYRQFNKNLFASTQKFDTLVDYNPVYVSCFRKQELQGGARLLLPIGVNDTVIPVYDDEPSSIIAYALMSPEYHFQLNDEGERPREGNEFTSSYFSDSGTLQSFSSVDETAFDSQKSFGSIEEMIFSMSGSRNSSILDPMLYTKAMHARVSFGVDGPLGKVKYSVTCYYAKRFEALRRVCCPSELDYIRSLSRCKKWGAQGGKSNVFFAKTLDDRFIIKQVTKTELESFIKFGPEYFKYLSESIGTGSPTCLAKILGIYQVTSKHLKGGKESRMDVLVMENLLFRRTVTRLYDLKGSSRSRYNADSTGKNKVLLDQNLIEAMPTSPIFVGNKAKRLLERAVWNDTGFLASVDVMDYSLLVGVDEEKHELVIGIIDFMRQYTWDKHLETWVKASGILGGPKNTPPTVISPKQYKKRFRKAMTTYFLMLPDQWSPPSIIPSHSQSDFGEDSTQPRTPAE

SEQ ID NO: 243506 - protein, 97 aa, Glycine max
  Clone ID: PAT_MRT3847_61913C.1.pep
VGVDEEKHELVFGIIDFMRQYTWDKHLETWVKASGILGGPKNTSPTVISPKQYKKRFRKAMTTYFLMLPDQWSPSIIPSHSQSDFGEDNTQPRTPAE

SEQ ID NO: 243507 - protein, 259 aa, Glycine max
  unsure (1)..(259): unsure at all Xaa locations
  Clone ID: PAT_MRT3847_61914C.1.pep
HASAETLDAKWTGENHSGYGIQKDNSSVNPDILMADALTTSAQKETYYLGDRTEDQNGSKSFYSSFKGHDNMEDSSNWLGMPFLNFYRQFNRNLFASTQKFDTLVDYNPVYVSSFRKQELQGGARLLLPIGVNDTVIPVYDDEPSSIIAYALMSPEYHFQLNDEGERPREGNEFTSSYFSDSGTLQSFSSVDETAFDSQKSFGSIEEMIFSMSGSRNSSILDPMLYTKAMHARVXFGVDGPLGKVKYSVTCYYAKRFEA

SEQ ID NO: 243508 - protein, 113 aa, Glycine max
  Clone ID: PAT_MRT3847_61915C.1.pep
YRYSNIDYNITGGRRYPIPDKSAPIYITIGDGGNLEGLASSYLDPQPEYSAFREASYGHATLEIKNRTHAIYHWYRNDDGKKVPADSLVLHNQYWGSNGRKQNEVIDEVVNVK

SEQ ID NO: 243509 - protein, 57 aa, Glycine max
  Clone ID: PAT_MRT3847_61916C.1.pep
TFQGQKQFVGAPPVSGGANFFWAKILTTQTSYFFKKKKPFCPLGPLLKVLKTHLSSL

SEQ ID NO: 243510 - protein, 221 aa, Glycine max
  unsure (1)..(221): unsure at all Xaa locations
  Clone ID: PAT_MRT3847_61917C.1.pep
GIEVYFDMMRSFRTEFDDLFAEGLISAVEVGLGASGELKYPSFSERMGWRYPGIGEFQCYDKYLQHSLRRAAKLRGHSFWARGPDNAGHYNSMPHETGFFCERGDYDNYYGRFFLHWYSQTLIDHADNVLSLATLAFEETKITVKVPAVYWWYKTPSHAAELTAGYHNPTNQDGYSPVFEVLRKHAVTMKFVCLRXHLSSQEAYESLIDPEGLSLHVLNSA

SEQ ID NO: 243511 - protein, 49 aa, Glycine max
  Clone ID: PAT_MRT3847_61918C.1.pep
KFISLREIKQLHDACVYLYTPTRRVPQKLPMRNGRLYIYLAFSYTTFCA

SEQ ID NO: 243512 - protein, 65 aa, Glycine max
  unsure (1)..(65): unsure at all Xaa locations
  Clone ID: PAT_MRT3847_61919C.1.pep
XXYXXXATTXHITTQDXGDSCHWQQQFDIMLISIIRRSSSAVNFTILIRPYFQQKSKLKEREGER

SEQ ID NO: 243513 - protein, 59 aa, Glycine max
  Clone ID: PAT_MRT3847_6191C.1.pep
PSIAILQWYMQSVPKAYMFLLCKIVKVLNERTGEIPRINISVNLLNVKWLHHRHSKIVK

SEQ ID NO: 243514 - protein, 137 aa, Glycine max
  Clone ID: PAT_MRT3847_61920C.1.pep
WGILLLVPFIIACLQKNLKITWILCCNFLFVRCPKSYPEVQMFGKIVDKLRRHILGLLSLRVYSYPTYLDFDGGSRRSTLETRIHKIRRCREAFVGRTNLKDGRIISEDFKIRRCRKQLPCFCSTHFFLSNGESSSF

SEQ ID NO: 243515 - protein, 319 aa, Glycine max
  Clone ID: PAT_MRT3847_61921C.1.pep
MERDFLGLSSKEPLAMMKEEMNIDIGSKDTGFTNGAVVKWPFMNKVYVHPLLMSFNPPQVNSVNHPHGMKMFSVPNQAISVSMGHPSLKNHFATVGQNMNVATVKQPLLGGIPVTVPHSVHPIVGAVAGMTETRVKPSVPAPKLTIFYAGTVNVFEDISPEKAQAIMLLAGNGLSAGSNEASPNVQAPCLKLAVGDGVPVSQPIPPCSGLSSPSSVSSHTGSPSGSGSSSNDEFLAAKTSGGTTSSVNKVETPKVVNTTTMLTSAVPQARKASLARFLEKRKERVMNAAPYNLNKKSENVPQQNTMVSNITASAGDYFR

SEQ ID NO: 243516 - protein, 74 aa, Glycine max
  unsure (1)..(74): unsure at all Xaa locations
  Clone ID: PAT_MRT3847_61922C.1.pep
LPRRTRPSCCCETTTRGGKELLSLLDILAIXVMAVRRIQELLTTRFPPESFPVKVAIPXVVLTVRVVVTFTKFV

SEQ ID NO: 243517 - protein, 50 aa, Glycine max
  Clone ID: PAT_MRT3847_61923C.1.pep
IGISKNPIEGSLQLKNPPHLTYWNSKRQKPTKLELARPFTRESKVGRIQT

SEQ ID NO: 243518 - protein, 80 aa, Glycine max
  Clone ID: PAT_MRT3847_61924C.1.pep
SAKSMPPTPAPRPPPPLVWRTRTPLPPVSEPPPHVPPPPPPSPCPPTCLSPPPPEESGETPLPRLEVPTNRPVIENSGKS

SEQ ID NO: 243519 - protein, 60 aa, Glycine max
  Clone ID: PAT_MRT3847_61925C.1.pep
LLFSAYGYAPGSFSTVATRAAFCACWPVLFVLDPQYVGRVRRPNDWRLNFRDSLHYRPAH

SEQ ID NO: 243520 - protein, 61 aa, Glycine max
  Clone ID: PAT_MRT3847_61926C.1.pep
FPTEPAPWLMQKLLKWGITLATPTIAQTTLQPWGMWPQKVCEMNVNTACDITQVTSSQTRI

SEQ ID NO: 243521 - protein, 62 aa, Glycine max
  Clone ID: PAT_MRT3847_61927C.1.pep
GVGPPPVVQAPPPQVGGVYIFLQGAPPPLRGDALKGPGPGPFPIFHKGSPIGGGPLDLGPVF

SEQ ID NO: 243522 - protein, 60 aa, Glycine max
  Clone ID: PAT_MRT3847_61928C.1.pep
NVFMGNAHMAHPAFQVLLYLVVCGQQRVLHRLFIWGCGHVKISHPPVFLSCKCCANGLEF

SEQ ID NO: 243523 - protein, 69 aa, Glycine max
  Clone ID: PAT_MRT3847_61929C.1.pep
KRAIRPTPIMLGWSLLWPPRVFPFWLRVVFCVEILTDYHFPPGTTFALVSPRFYSAPYKENLVPLQVPA

SEQ ID NO: 243524 - protein, 55 aa, Glycine max
  Clone ID: PAT_MRT3847_6192C.1.pep
IVVCVNMIFPALVAQLFLMSLCPLKFGIFLLFASLIIFMSFFVFFLLPETKKVPI

SEQ ID NO: 243525 - protein, 117 aa, Glycine max
  unsure (1)..(117): unsure at all Xaa locations
  Clone ID: PAT_MRT3847_61930C.1.pep
LKEFSTTAQSGRGETFTCDINGAGSHLSDEFPETEEQEKPSMSGAQTRQRIDSHSIEVQADTCTNVLRLPVEDEETXKGSMLDLKISEHKSALTKNTCGCTITCRALWGDFLIAGIF

SEQ ID NO: 243526 - protein, 41 aa, Glycine max
  Clone ID: PAT_MRT3847_61931C.1.pep
KTPQKNSRNIGLLDITCIADIKNKEALLPNNNLTLKGGKIV

SEQ ID NO: 243527 - protein, 44 aa, Glycine max
  Clone ID: PAT_MRT3847_61932C.1.pep
MAEQNLNQTTGAGRHQNVGNKSLLHSDALYQYMLATRVYPREPE

SEQ ID NO: 243528 - protein, 366 aa, Glycine max
  Clone ID: PAT_MRT3847_61933C.1.pep
FDNVDLPPGVEASLPWLKDISSSECKQAIAFSRTESSSKAKVDETDDIVMQKFQQFKQFDTVDSFPDHHYDKEGTKDAQKPKNWAKKIQEEWKILEENLPETIFVRVCESRMELLRAVIIGPQGTPYHDGLFFFDCLFPSTYPAGPPKVHYHSGGLRLNPNLYNCGKVCLSLLGTWHGSNSENWIPEKSTMLQVLVSIQALILNEKPFFNEPGYTSTYPGAEGQRRSKEYNESTFILSLKTMMYTLRKPPKHFEELVAGHFRTRAFEILRACKSYTEGAPVGSVLHNLAPSCGNSSTANAQKEFESAVSRMMNTMIAFFTKNGSTDCDEFRSPEIYSLSAVATSNLEVYKIESGTTTSTSTSLTQV

SEQ ID NO: 243529 - protein, 263 aa, Glycine max
  unsure (1)..(263): unsure at all Xaa locations
  Clone ID: PAT_MRT3847_61934C.1.pep
MFYPCIGCHIGKHDPKQVPGKSQQDCFDRIHCDYMTPPETQPRXRAKTLKSSPIHQFSISASKLLKPMDKTARRSNVLKPKNIITQKSVDKLLQRHLKVDLDREGDIFSVLEPNTDFSTNALQPSEALSTPKQQKENKGFPQNCTETSSSSHKKPPSRLSGSCVTELVSPPVLKKVKNRVMHEKYINQLRCRESRRRAAATKIIGEGTSIQKRDVVKGAKVALVSEARDAINKFQQSQVNLMDNTCSSDEDNGDGVEFEDESQ

SEQ ID NO: 243530 - protein, 175 aa, Glycine max
  unsure (1)..(175): unsure at all Xaa locations
  Clone ID: PAT_MRT3847_61935C.1.pep
MAFNQELEAVTQAFSGHGVDEKSLVTLLGKWDPLERESFRKKTPHLFSEDHERHFQRWDDQYVRLLKHEFVRFKNAVVLWSMHPWERDARLVKEALKKGPNAYGVLIEXVSCTRSSEELLGARKAYHSLFDHSIEEDVASHIHGIERKLLVALLSAYRYEGKMDRDLEGATRISC

SEQ ID NO: 243531 - protein, 78 aa, Glycine max
  unsure (1)..(78): unsure at all Xaa locations
  Clone ID: PAT_MRT3847_61936C.1.pep
NIMKSLVCTGCMERASPAPTLASPLRNLXSLSXSSPGLVMPAMGTPSSSTGAALIAGVLVSMRSVCDTTAADVLCGNV

SEQ ID NO: 243532 - protein, 516 aa, Glycine max
  Clone ID: PAT_MRT3847_61937C.1.pep
MASLACNTFIVSSTLRSVVTRAEPPKPGPLFDLSSFNRHSFPAGFTFGASSSAYQFEGAAKEYGRGPSIWDTFINQHPGKIADGTNGDRALDQYHRYKEDVQIMKGMNLDAYRFSISWSRILPNGKLSGGINREGINYYNNLIHELQTKGLKPFVTLFHWDLPQALENEYKGFLSESIIDDFGDYAKFCFEEFGDRVKHWITFNEPHIFSSHGYAYGTKAPGRKSQGLRPDSGGTEPYRVSHNILLAHAKAVQLYRNSYKESQNGEIGITLDSRWFVPYSDASSDIEATERALDFEIGWFMEPLTSGKYPESMQLYVGRRLPEFSKEEAELVRGSFDFIGLNYYTTNTARVATGYTDSVHHHPDLSTDPNVELGLTRLNGSSPIGPVPGLGWLCVYPKGIRELLLRIKNLYNNPLIYITENGINELDDPTLSPEESLMDFYRIDYHYRHLLNVDYAIRDGVRVKGYFVWSLLDCFEWSNGYIPRFGLIFVDHKNNLNRSPKLSAKWFRKFLQNRLL

SEQ ID NO: 243533 - protein, 48 aa, Glycine max
  Clone ID: PAT_MRT3847_61938C.1.pep
SSILHSFIQIRNHFCYDLPPLRSSTVLAKLGGMVFGLSLSIHTSTLSF

SEQ ID NO: 243534 - protein, 57 aa, Glycine max
  unsure (1)..(57): unsure at all Xaa locations
  Clone ID: PAT_MRT3847_61939C.1.pep
SGIQDCLPNTDGRGVNPXVCFMRYSETPFFADNQTTDISPYLKQGTNAITSSLHLIN

SEQ ID NO: 243535 - protein, 49 aa, Glycine max
  unsure (1)..(49): unsure at all Xaa locations
  Clone ID: PAT_MRT3847_6193C.1.pep
FVNLQYKILWWQPGXRYVKLRLSHKALKAIEKNALEAVANKSAIDLSTI

SEQ ID NO: 243536 - protein, 79 aa, Glycine max
  Clone ID: PAT_MRT3847_61940C.1.pep
FPSRLMFHQSGQPVESCGRQGLLAAVKHEVTMVVLWVRLKMGNDHCQCKSRLFAFFTVRHITAKSPSSALKCCISPRTL

SEQ ID NO: 243537 - protein, 46 aa, Glycine max
  Clone ID: PAT_MRT3847_61941C.1.pep
ILEVTKITFKDTQNFHHYGSRIFSKLKSNFIKITCNNTIFYLILLY

SEQ ID NO: 243538 - protein, 77 aa, Glycine max
  Clone ID: PAT_MRT3847_61942C.1.pep
RCFMCCVDSSGGFDDLKRLLGHQKGLYREFTVLRTFMIVSLALNLEEIFLFDIYLAIFIAKSCIIFISFESTPPVRE

SEQ ID NO: 243539 - protein, 93 aa, Glycine max
  unsure (1)..(93): unsure at all Xaa locations
  Clone ID: PAT_MRT3847_61943C.1.pep
SRVLVNFSLFSLLPHLFILRHRTATKSTIHSFFPFCNSAMARRSLPLLKHSSSRGXSRPDRXRXCXXRXTGPPRLXRXPGXGDXAXXXGAXRK

SEQ ID NO: 243540 - protein, 160 aa, Glycine max
  unsure (1)..(160): unsure at all Xaa locations
  Clone ID: PAT_MRT3847_61944C.1.pep
MASCSIGTPNIKALNLHFGGKKVGLSRQFGTRSWISKLQYTSLVMSRQTVRFLASSNGPSTEIQFAARSEGSEEIRSSGLTSELIPNIIEVEFLLTKLCDTSSIGELDLKLAGFHLHVVRDLTEKTKTLPPLIPASVSIINVTETPXTXGSVPTTSLAVS

SEQ ID NO: 243541 - protein, 142 aa, Glycine max
  Clone ID: PAT_MRT3847_61945C.1.pep
MASCSIGTPNIKALNLHFGGKKVGLSQQFGTRSWISKQSLQYTSLVMSRQKVRFSPTEIQFVTRSEGSEEVKSSGLTSELIPNLIEVEFLLTKLCDTSSIGELDLKLAGFHLHVVRDLTEKTKTLPPPIPASESIINVTETP

SEQ ID NO: 243542 - protein, 278 aa, Glycine max
  Clone ID: PAT_MRT3847_61946C.1.pep
KGHVVAVTGDGTNDAPALKEADIGLSMGIQGTEVAKESSDIVILDDNFASVVTVLRWGRCVYNNIQKFIQFQLTVNVAALAINFVAAVSAGKVPLTAVQLLWVNLIMDTLGALALATEKPTMELMHKPPVGRTKPLITNVMWRNLLAQALYQIAILLTLQFKGESIFGVTSGVNDTLIFNTFVLCQVFNEFNARKMEKRNVFKGIHRSKLFLGIIGITIILQVVMVEFLKKFADTERLNWGQWGICIGLAAVSWPIGWVVKLIPVPDKPFLSFLSKKK

SEQ ID NO: 243543 - protein, 49 aa, Glycine max
  Clone ID: PAT_MRT3847_61947C.1.pep
TKCVQLSIIAWQLKHHVPICSRTGCPCGACNYTMAIEVRTELTIRFSYH

SEQ ID NO: 243544 - protein, 57 aa, Glycine max
  Clone ID: PAT_MRT3847_61948C.1.pep
DPLNPQYNERNTFYGPFEEDFLEDFVRQNLIPLAVPVSYETLKLMKADGRKIVLTIV

SEQ ID NO: 243545 - protein, 59 aa, Glycine max
  Clone ID: PAT_MRT3847_61949C.1.pep
SGRGQRTARKSPGSRKARQNRSTPEQTREWTRWTKHSYFKSISTMSICTDNKPLVHFFL

SEQ ID NO: 243546 - protein, 56 aa, Glycine max
  Clone ID: PAT_MRT3847_6194C.1.pep
LIRMYTSRKLIHINNDAYPTDFYETVAQYLFYSHNTNHQSILRLVRSLHKSCNSNG

SEQ ID NO: 243547 - protein, 87 aa, Glycine max
  Clone ID: PAT_MRT3847_61950C.1.pep
NLSGKSTLYTGHMSIHRTRFLQHNLESRYHASLHGCPLGTSHHLYTSPSIQQGLASGSHLAIRDTSTVPWPRPLGFCALRCEKDPDI

SEQ ID NO: 243548 - protein, 76 aa, Glycine max
  Clone ID: PAT_MRT3847_61951C.1.pep
ELRHLSLFLRDSNFSSLHDYDDAHDHSSPAHSRFYIVLILPPETKVHSSQLHGLWEDNVTHGAPASTVLPECNIYY

SEQ ID NO: 243549 - protein, 80 aa, Glycine max
  unsure (1)..(80): unsure at all Xaa locations
  Clone ID: PAT_MRT3847_61952C.1.pep
LIRHSVMHRCGAGIRLITAFTGLYVGLXVGLNGPDAANLVTSTACIVVDPETGAYFGGKLQSSXFWFGLVGFLVTSYGLM

SEQ ID NO: 243550 - protein, 85 aa, Glycine max
  Clone ID: PAT_MRT3847_61953C.1.pep
GARSHLPKTLFIPFSPPTPMFSPVPTTPGSGGKTSPVWGGVFPSGGNSPPKTLGGQMFFKPLSPPPPVFDWVSRGGAQNRPPLKD

SEQ ID NO: 243551 - protein, 52 aa, Glycine max
  Clone ID: PAT_MRT3847_61954C.1.pep
GKLIDRPGQGPDNTPGCWGTQTEARFLNSFYHWIFPIFILLKFPLLSSSRSR

SEQ ID NO: 243552 - protein, 51 aa, Glycine max
  unsure (1)..(51): unsure at all Xaa locations
  Clone ID: PAT_MRT3847_61955C.1.pep
KSAVSPNQLPGQFNSGTWRTIKNQSSGNLLDESKESSAPHTGRTHIXETHR

SEQ ID NO: 243553 - protein, 343 aa, Glycine max
  unsure (1)..(343): unsure at all Xaa locations
  Clone ID: PAT_MRT3847_61956C.1.pep
MDADPPQLDDHLEPFRVSVNQILTTVNKLEKQVTEVEQFYESTDNVQGNNSKGGSLAKEKGREKHITGTKKPLQDASHTEASSAKRMQELMRQFSTILRQITQHKWAWPFMDPVDVEGLGLHDYYEIIDKPMDFGTIKSKMEAKDGTGYNNVREIYADVRLIFKGKMAATFTXNDVHVMAKTLLEKFEEKWLQLLPKVAEEEKRQLEEEAQAQLDIQLALETTYANKAKDISTELCEIDMHLKSLKEMVIQQCRALDIIAETNPMFQPSSTEDVVLDLDAQSDYTLWRLKAFVKDSLEEQVKVNAGAGINPNDNPDDKKNKKRRDSGDSSGKTNPKRKKLSTL

SEQ ID NO: 243554 - protein, 59 aa, Glycine max
  Clone ID: PAT_MRT3847_61957C.1.pep
KGNGCGFFGLIGLRNETNPCLNNLGLIGLNPKKAQKRVPKHEKGVSRPVYEKKEREREG

SEQ ID NO: 243555 - protein, 71 aa, Glycine max
  unsure (1)..(71): unsure at all Xaa locations
  Clone ID: PAT_MRT3847_61958C.1.pep
VAIPXSENMMNTWNLRSAKFLCKHLADPTYWLVEEISYMGDRICVSKEPICSQMTLLHGGQALVLNDILAD

SEQ ID NO: 243556 - protein, 48 aa, Glycine max
  Clone ID: PAT_MRT3847_61959C.1.pep
VVENYKKERIKLINANKFPLWHLIRDYEFVARGSGLVIECNSDFCICC

SEQ ID NO: 243557 - protein, 99 aa, Glycine max
  Clone ID: PAT_MRT3847_6195C.1.pep
PLPINYTLTLPNPFKPTTPPPHINTQQTNSLPPHNTLRQSTIVMPKPPFSLAGFTWFSCLLWFGLHRPLYSLWATFCGWLARWLAYDGSFFADGLWTMR

SEQ ID NO: 243558 - protein, 60 aa, Glycine max
  unsure (1)..(60): unsure at all Xaa locations
  Clone ID: PAT_MRT3847_61960C.1.pep
GAARYNRLKPGFESXIEEGEAEVKCNLKKIEWLPGWNCLTPKVQIAGSRAYQKKKTLPNG

SEQ ID NO: 243559 - protein, 90 aa, Glycine max
  unsure (1)..(90): unsure at all Xaa locations
  Clone ID: PAT_MRT3847_61961C.1.pep
WTKTKPHSWELIFPIKGCGPHNGXKRQKYEWAKKPFWXLSFLIDNPIQSTVFGIVLGISHXFEMLLILSMPAFYDSHATARTSXRAEYYS

SEQ ID NO: 243560 - protein, 351 aa, Glycine max
  unsure (1)..(351): unsure at all Xaa locations
  Clone ID: PAT_MRT3847_61962C.1.pep
MKPWDNLAGFAALGPAMGTVVGESVTGFAAENPAILAGGVAVLAVPLVLSMLLFKLTKXSQLLDISALVEIKQVGSPDVGGLLIKGLWIPYKGDDKPGFLKKLALKFKEPENTTLFILDKFDGNSELVAELVTINGFKAAYAIKDGAEGPRGWKSSGLPWIAPRKTLSLDNLTDAISEAIGDTSDGVAVTLGIAAAAAGLSILAFSEIESILQVVGSAALIQFASKKLLFAEDRKQTVKQLDEFLNTKVAPKELVDEIKDIGKALLPSSTNNKALPAPEEKSSELATADSTVQNAVATPEPKADAVAPEVNSVPKTEVKAEESFPAQPRPLSPYPYYPDFKPPTSPTPSQP

SEQ ID NO: 243561 - protein, 112 aa, Glycine max
  unsure (1)..(112): unsure at all Xaa locations
  Clone ID: PAT_MRT3847_61963C.1.pep
APKELVDEIKDXGKALLPSSTDNKALPAPAEKSSELATADSTVQRAVATPESKAEAVATPEPKVDAVAPEVNSVPKTEVKAEESLPVQPRPLSPYPYYPDFKPPTSPTPSQP

SEQ ID NO: 243562 - protein, 296 aa, Glycine max
  Clone ID: PAT_MRT3847_61964C.1.pep
MEALNAAGLTPLSVLSDTKTTRTKHPSVSVCKVSNFSTSTNKKQTLLQSCISKTLHGGLILAASVVNGGAATALTYDEALGQPLSLPGAGDFDVNGFVESVTGFAAENPAILAGGVAVLAVPLVLSQVLFKKPKAWGVESAKNAYAKLGADGNAQLLDIRALVEIRQVGSPDVGGLKKKAVSIPYKGDDKPGFLKKLALKFKEPENTTLFILDKFDGNSELVAELVTVNGFKAAYAIKDGAEGPRGWKSSGLPWIEPRKTLSFDNLTDAISEAIGDTTDGVQILLGMLQLLHDLVY

SEQ ID NO: 243563 - protein, 166 aa, Glycine max
  unsure (1)..(166): unsure at all Xaa locations
  Clone ID: PAT_MRT3847_61965C.1.pep
MITRPPWSLHRTYLYPANKALPPPSPISSRSTIGTPGSRAFISIMSCSLHHALQQSRPKTELIYKRYMSRPNTIAEAYSLIHKNFAYFHVNYLTLIVMALAVXLITHTDSLFVLFXLLASWSFLYLFRPLDQPDDLYGRTFPDHETLRILVVLTEFAILLTSVGSL

SEQ ID NO: 243564 - protein, 81 aa, Glycine max
  unsure (1)..(81): unsure at all Xaa locations
  Clone ID: PAT_MRT3847_61966C.1.pep
HGLICGSDDYLVIVAAYSTAICKAQRGGSKDTLSDDLLATGLKAVIEKTYVYPAXVGDIVVGTVLTPASDKGIECRRTDFY

SEQ ID NO: 243565 - protein, 68 aa, Glycine max
  unsure (1)..(68): unsure at all Xaa locations
  Clone ID: PAT_MRT3847_61967C.1.pep
REIYDQYGEDALKERMGGGGGHDPFDIFSSFFGXGSPFGSSGXILSKMHKRXKYVIHPLKVSLKNLYL

SEQ ID NO: 243566 - protein, 64 aa, Glycine max
  Clone ID: PAT_MRT3847_61968C.1.pep
KPINENTRALMILFVLLLLITLRNGFCFLSFFFFFSKAIIATFLYSQQQQQTPQIPQQHYLTEK

SEQ ID NO: 243567 - protein, 58 aa, Glycine max
  Clone ID: PAT_MRT3847_61969C.1.pep
MRSIRNSPFDNKRRPYSFHGDLRFTPLYTKNTKCKCIDVVTSLHYLISLHTHTRVHSF

SEQ ID NO: 243568 - protein, 45 aa, Glycine max
  Clone ID: PAT_MRT3847_6196C.1.pep
SVFLLAQINQPENLVTRYSRGVKQSRILIQLLFCSNNIFFLWHDV

SEQ ID NO: 243569 - protein, 290 aa, Glycine max
  Clone ID: PAT_MRT3847_61970C.1.pep
MRKKLDTRFPAARIKKIMQADEDVGKIALAVPVLVSKALELFLQDLCDRTYEITLQRGAKTMNSLHLKHCVQSYNVFDFLRDVVSRVPDYSHGHGHAEAGPDDRAIAKRRKAVGDDGNDSDEEAKRSKMHELGHTGSPGRGRGRGRGRGRGRGARTFERDIYHQQVESEPCTSILQSSNDIPNTSVPIDNGPQSKELPKENFVISEESTQSFRNIDLNANLNENEDKNAGTAVPASLPEPTSMDTAMEIKHEEIPGWSLSDVDKMGIDTMQLANLGSRLEEDEEDYDEEG

SEQ ID NO: 243570 - protein, 49 aa, Glycine max
  Clone ID: PAT_MRT3847_61971C.1.pep
HACAHTYFHFSYLTSLFRQGSFYPKSTLHTITLTSRIVVFLTFCVIKND

SEQ ID NO: 243571 - protein, 332 aa, Glycine max
  Clone ID: PAT_MRT3847_61972C.1.pep
MAGNSGSEGLGDDFFEQILAVPEAGTVGMLQLGSTTGGFRGASGLMPLGLNLEQAAFLRHQVNVDDDVVHVNVDDATIHQHHLTLHNNNTSSSPSSTAPITDRDSMHMRGLFSAFGQLHTPIRPTLPLPPPPRQPQLHLHHHNQQFQGQAAAAPASMAAMPQPPGIRPRVRARRGQATDPHSIAERLRRERIAERMKALQELVPSINKTDRAAMLDEIVDYVKFLRLQVKVLSMSRLGGAGAVAQLVADVPLSAVEGDQDIEGVSNEQAWDKWSNDGTEQQVAKLMEEDVGAAMQFLQSKALCIMPISLASSIFRMPQSEASTGIKPESNSH

SEQ ID NO: 243572 - protein, 75 aa, Glycine max
  unsure (1)..(75): unsure at all Xaa locations
  Clone ID: PAT_MRT3847_61973C.1.pep
DLMCLSPXXPRSQDVFHTYYMSHVRRQLXFSREFFYYNLSFTHIIXLVQIFTEEKIAGLHKHRTDLECKDKNPFI

SEQ ID NO: 243573 - protein, 94 aa, Glycine max
  unsure (1)..(94): unsure at all Xaa locations
  Clone ID: PAT_MRT3847_61974C.1.pep
AXYXXGGLLNPFPISCRQQIXFXPXSXXEXXIPPXXSHXXXXTISXLYXXSGRKRTTXXXDXKXFTLTMVIVXKLXVNRXIXSGLPINREMLXF

SEQ ID NO: 243574 - protein, 118 aa, Glycine max
  Clone ID: PAT_MRT3847_61975C.1.pep
RARLGEPPVALDQKPETPWGGVRGGPGNFGAGKSPLGGSTQRGFEKDFAKSVAGLKAICPKPGGFPLEDPRWDPPGGIRGGCIFRLGGKKGARPSPPWGDNPPVKKFWAGGGVPFFPP

SEQ ID NO: 243575 - protein, 668 aa, Glycine max
  Clone ID: PAT_MRT3847_61976C.1.pep
MEFEFSPRFASQDHINPQPSPKNESNDIGTGFAMFNQNFGEFSSGSGPGPNQNLEAPKKAGICATNMELLKFNGATPHGTIDSSLTSESHQSDEWNFGFNFNSSYVGEDNHSSDSYFKTKNNQDDNNRNNASPTNIDVDSHVNFFDSESDVTQHEKPLTSPENRREALPLSIFGDETPDTDEHPVSQDLSPYTPSSPIRNSFTSPGSNFSINDIWNLYNQAENQSSSNVTPKASENQIHAPPEVSGSSLVTGNDDLDDDFWDYKDAATETRFTNESAQKTSSPQVNENGLQSSPTFLNSDLTNGDDDFEDDSWEFKEATSGTINQDHTSTLDHRGLPQLSTKLEQVDYAEFYSKVKDELCNYVLFHLQNLKKTQNVAALSGEDAKAKALQEEISEFSKILHQDTMSIPNEYLSEDYCPRNVRFNELLEVLKEPKFQPVESEYQLASRLSMAEKDIKYGMELLKDTVSTLRILKLGSREEQSSYLTIWSKIAFVCSQELKHGAYVWKQAVLQNVHDQILSSQKGVQYILALGEIYRVAEIIEASAKLHKPWMLSGAIDHKSLCALLNECYSIWLASGLEEALLSIANQNNFELDGISRELVESIKYIHELDEHALQSFVISGEQTTCQLSALPAGFIPGLNLVKWNGKHYIVKLANLWINLISSDPPKK

SEQ ID NO: 243576 - protein, 44 aa, Glycine max
  Clone ID: PAT_MRT3847_61977C.1.pep
ARIGVVLDIPVHCVHYRLIPTRQLSMTLFNIMTLAQFKNFRTSG

SEQ ID NO: 243577 - protein, 46 aa, Glycine max
  Clone ID: PAT_MRT3847_61978C.1.pep
DVINNGWEKLLIKSDCQNDDNIAGECHQTAGQWNGDSDDICSHSSE

SEQ ID NO: 243578 - protein, 56 aa, Glycine max
  unsure (1)..(56): unsure at all Xaa locations
  Clone ID: PAT_MRT3847_61979C.1.pep
XSXPAIXXXGXFLCPVXCLEMTTXXXIRYPXSXRGVRSSXETENYXRLTTGXXRNG

SEQ ID NO: 243579 - protein, 135 aa, Glycine max
  unsure (1)..(135): unsure at all Xaa locations
  Clone ID: PAT_MRT3847_6197C.1.pep
PIPPPSSPPPSPPTLLLPSTSPIPSLSLPPPTLPRPPPXLPPLSPLILPPYHYHYPLLPPXRCYKYPSPPPPVYKYKXPRPPYKYPCPPPPPYKYPFAPPPPAYYYKSPSPPPKKPYKYSFTPSPHYVYALTPPP

SEQ ID NO: 243580 - protein, 78 aa, Glycine max
  Clone ID: PAT_MRT3847_61980C.1.pep
PRSPVTTVIELVLRATSLFKILFSHGSSCVFLARWASTVFLPPKGSIVSARQLCSRDEYVYGVLSVARCRHSVGCELQ

SEQ ID NO: 243581 - protein, 144 aa, Glycine max
  Clone ID: PAT_MRT3847_61981C.1.pep
QNERFPVRAVIQVLLSEQSKLNRHVDWSGSLVSGTRSPGGLDLPTRCLSKREANAQQLEIKRLKEDVYRLQSQCSAMHAQMERMVEKKKGFFKWKKFAFGKSEHDKMEQELEGNGMYTPADLKTRLVNAKGSSKNTHKWRKSMS

SEQ ID NO: 243582 - protein, 68 aa, Glycine max
  Clone ID: PAT_MRT3847_61982C.1.pep
YHSKGRDISTPLLISLCLDTNYNYSTLLQIPNNLHESTTYTHSYIPSIIGNLHKLDIPSLHDQLWHLP

SEQ ID NO: 243583 - protein, 76 aa, Glycine max
  unsure (1)..(76): unsure at all Xaa locations
  Clone ID: PAT_MRT3847_61983C.1.pep
PQVPSKMVSPFSKXRRYYXNNQKLSKAPLERFLFSNGLSENVFXIASKSLAALKGQCRLKNSPYVLVGKPFPPRSE

SEQ ID NO: 243584 - protein, 69 aa, Glycine max
  Clone ID: PAT_MRT3847_61984C.1.pep
GLHSDQFGIEFLFSLSSGHHRDIPIGDREAFPPTSTSTGLISNHCFLPGFRPLRPIGSFSYIQVGLESE

SEQ ID NO: 243585 - protein, 59 aa, Glycine max
  Clone ID: PAT_MRT3847_61985C.1.pep
KKKKKKKKKKKKKKKKRNKKKKKKKKKKKKKKKNKIKKKKKKRGGPFKKNKFYYPVFQS

SEQ ID NO: 243586 - protein, 65 aa, Glycine max
  Clone ID: PAT_MRT3847_61986C.1.pep
VQGFLGVSHHILVFGSCWSTRLDFLSAFFSIARVYGLFLVSGFSCLSLSYSTWVIMYSGIFNLIM

SEQ ID NO: 243587 - protein, 136 aa, Glycine max
  unsure (1)..(136): unsure at all Xaa locations
  Clone ID: PAT_MRT3847_61987C.1.pep
LSFWPPAGSFRLRCWALGLVSSWSFLAFLPPVPVALPWVLCCCRCSSFSALVSFSALPSGFACXVVVPSFLPFWPLAALGSLALVRGRCFLCXXWXGGGSLSSCAPCLSCARFPGACTAALSPRVFRXGSCGRSCL

SEQ ID NO: 243588 - protein, 129 aa, Glycine max
  Clone ID: PAT_MRT3847_61988C.1.pep
LPIGEVNQIMDPVVESTYRYIWMATAKTNTTIYQDVFSCVPNDLIHTRLAFRQSVAFWKERIGHTTIDLGIAPEKLESYYDGGITNTDPLERLASVKGHLVSFPLEFMCQESLRPAFNESEYYATQVFH

SEQ ID NO: 243589 - protein, 133 aa, Glycine max
  Clone ID: PAT_MRT3847_61989C.1.pep
MPIALIAIGNTSEVNQSDALKAALAEFMTMLIFDSAGEGSGMAYNKLPNNGSATPAWLVAGSLSHALALFVAVSVGANISGSHVNPAVTVRAFDGGHITLFRSILYWIAHVLSSIVACWLLKFDTGGLETSAF

SEQ ID NO: 243590 - protein, 77 aa, Glycine max
  unsure (1)..(77): unsure at all Xaa locations
  Clone ID: PAT_MRT3847_6198C.1.pep
TCRVRQRTESDESADAALXFLGIIPGSEMSSTTAEGGSDGRGDRIPENTSLDRNNEKNAGMAEFVSPTGDAFIYVNR

SEQ ID NO: 243591 - protein, 125 aa, Glycine max
  Clone ID: PAT_MRT3847_61990C.1.pep
RAAPFGQLHFSFLSIYTPGSLHALLKKDNDLTVSPADRERERNSICVFSSNIAREKVKKEEKKGFFFFSFLEERKKIKNGGKCFDSFWCLRTVCFVFLGLSFWCCSKELFFGEIGLWVWVVGGNG

SEQ ID NO: 243592 - protein, 44 aa, Glycine max
  unsure (1)..(44): unsure at all Xaa locations
  Clone ID: PAT_MRT3847_61991C.1.pep
RXHAYXSSEFGXXKPKNSXIRYIXHFSSLFIFYVLXHRYSRYPL

SEQ ID NO: 243593 - protein, 89 aa, Glycine max
  Clone ID: PAT_MRT3847_61992C.1.pep
KLVTKHIAYPKMKKSHWGSKYILCKKVIHKILRYLSYAQSIDKKIDFLLLVLIDKNNLVQYFIKAVMHCILVKSECLFIYISAIFNIQE

SEQ ID NO: 243594 - protein, 44 aa, Glycine max
  Clone ID: PAT_MRT3847_61993C.1.pep
LMFCCFRISATSIADDIFKPEAGELNNKIYHLLLTNLLFTIISL

SEQ ID NO: 243595 - protein, 112 aa, Glycine max
  Clone ID: PAT_MRT3847_61994C.1.pep
MAGADNGDGNGSERELAGNSDNGSVEVAEASVSDSGCEGNDSVSYANVLRSRNKFVDALAIYERVLDSDGADVEGLIGKGICLQMQNKGRLAYESFSEAIKVDPQNACALTH

SEQ ID NO: 243596 - protein, 344 aa, Glycine max
  Clone ID: PAT_MRT3847_61995C.1.pep
ETVIYIYIYIYFFFLRLQLTRANAARETSEYDEERVMEWEAGLPTANDLTPLSQPLIPPELASAFSILPEPHRTLLDVNRASRNTLSTLRGGGGSVHQAFSSSNNNHNYDGDGDGGVEEEEEEDDDRDGSGPDSRKQRKIDCGAAEEADSAVQTETSAERTAVKRPRLVWTPQLHKRFVDVVAHLGIKNAVPKTIMQLMNVEGLTRENVASHLQKYRLYLKRMQGLSNEGPSASDQLFASTPVPQSLHDSAPPSNHSNGHGHGHGHSNGRGHGHGHGHGHLSVPMMSMPYPPPLMSMPYPPPMMSGMPHGHMGIPMPNSSATSAYHPYNMLHQRDWPHLAPNDK

SEQ ID NO: 243597 - protein, 161 aa, Glycine max
  Clone ID: PAT_MRT3847_61996C.1.pep
LVWTPQLHKRFVDVVAHLGIKNAVPKTIMQLMNVEGLTRENVASHLQKYRLYLKRMQGLSNEGPSSSDQLFASTAVPQSLHDSAPPSAHSNGHGHLPVPMMSMPYPPPMMSMPYPPPMMSGMPHAHGHMGIPMPNSSATSAYHPYNMLHQRDWPHLAPNDK

SEQ ID NO: 243598 - protein, 174 aa, Glycine max
  unsure (1)..(174): unsure at all Xaa locations
  Clone ID: PAT_MRT3847_61997C.1.pep
MEVVRRVVPKVLEKGVVMSRREMSSGSGWLAGKLAKIVKAGEAVLHSRAEEVEAIEIKSERVQKIIDDMVRVMRKAPGVGLAAPQIGIPLRIIVLEDKIQYMAYYSNQELKAQDRTPFDLLVILNPKLKNTTTRTALFFEGCLSVPXYSAVVERYLDXEVAGFDRYREPIKIMQ

SEQ ID NO: 243599 - protein, 56 aa, Glycine max
  Clone ID: PAT_MRT3847_61998C.1.pep
VKKKMKEALDQNIVRFNFQGKMKSPDNEPDGQLVGNISWVNLDGFNSVLFRCRCFP

SEQ ID NO: 243600 - protein, 36 aa, Glycine max
  Clone ID: PAT_MRT3847_61999C.1.pep
SDMRLTNISLLLLTTGHYCVGVTLKDDRARGVHLSL

SEQ ID NO: 243601 - protein, 77 aa, Glycine max
  Clone ID: PAT_MRT3847_6199C.1.pep
SRPNQTKHQFVTSVQRQIQRRAGNHKNIRYQRSIFDEITCLYIIPASCDILALPTTHPTLLPKAIMEPKWDIQGQFY

SEQ ID NO: 243602 - protein, 46 aa, Glycine max
  Clone ID: PAT_MRT3847_619C.1.pep
IPLHSSALFSLSYSPSLICSSSSARFLVSIIRLLSLSHSSVIQHVI

SEQ ID NO: 243603 - protein, 104 aa, Glycine max
  unsure (1)..(104): unsure at all Xaa locations
  Clone ID: PAT_MRT3847_61C.1.pep
CYGIDTYGSPRYDRVQSPXIXVSTAEARVDEALGAVCKLKFVTVPDRLNAVGDVNKLVKTVGHDTGTKLMAELNSKLSCDSSSAMARYKRLNEWHVIEFGYLCV

SEQ ID NO: 243604 - protein, 70 aa, Glycine max
  Clone ID: PAT_MRT3847_62000C.1.pep
LSQLRTPKTCLSRLLKSKLGPDQLTQAPKPLSGVSGPLNSGSVPNYWPCTCTVVASFFPRACLKGISTPT

SEQ ID NO: 243605 - protein, 44 aa, Glycine max
  Clone ID: PAT_MRT3847_62001C.1.pep
DFCPGVIVKELNLNSPMYFQTVKNGLFIKQEFSWEKRKELKLSF

SEQ ID NO: 243606 - protein, 47 aa, Glycine max
  Clone ID: PAT_MRT3847_62002C.1.pep
KINGCIMSFLILFDIILITKLKLLFYFISFFLFKLRCDIYHTGCQFL

SEQ ID NO: 243607 - protein, 341 aa, Glycine max
  Clone ID: PAT_MRT3847_62003C.1.pep
KIGEEMERERERQKDRMAVDSAMLEAERERERELDTMTVDKATLEARDRTYADARERAERAAFERATAEARQRALAEARERLEKACAEARDKTYADKAAAEARLKAERTAVERATAEARERAMEKVKVDRAAFESRERLERSVSDKFSVSFRNGGTQGSSSSDMLDPRCQNSTSFTHSRYPYSSVYGASSFSERSEREGESAQRCRARLERYRRTAERAAKALEEKNMRDLVAQKEQAERNRLAETLDTEVRRWSSGKEGNLRALLSTLQYILGPDSGWQPIPLTDVITSAAVKKAYRKATLCVHPDKLQQRGASIQNKYICEKVFDLLKEAWNKFNSEER

SEQ ID NO: 243608 - protein, 47 aa, Glycine max
  Clone ID: PAT_MRT3847_62004C.1.pep
LCEDMSLGCYVHCDWRTQLITCEGFGLGSAHGAMYPVPLWHPIPTSP

SEQ ID NO: 243609 - protein, 56 aa, Glycine max
  Clone ID: PAT_MRT3847_62005C.1.pep
TLTKHGFFHLHRNVHLQSLLLLLHLLLSHPPSHQLLTYLQTQPLLLNLHHNQLISL

SEQ ID NO: 243610 - protein, 33 aa, Glycine max
  Clone ID: PAT_MRT3847_62006C.1.pep
SASQQILRRYHLLSRIIAPHYLMPMQRQGSYGF

SEQ ID NO: 243611 - protein, 245 aa, Glycine max
  Clone ID: PAT_MRT3847_62007C.1.pep
MGLCSSVHRNEQTNMKHLTLSFESKTESLVIPPSPFKDKDKAINGNFVVVDDDAAFKAQQWSPSRSTTTFSVTDCGDNDGKEESFFDSKAWLDSDCDDDFYSVKGEFTPSRGSTPVHHIFLNKTTPSEPGSVPEPSPTTQKKKLLDLFRESVRENQSDAENTSEIEKKEVKPTTVHDPKSAHSTPYVSGGNSACSSERTMNDDHAPIREKPVKSVQCCLPSLASCRSFSERKRKTSPAITDNGKA

SEQ ID NO: 243612 - protein, 55 aa, Glycine max
  Clone ID: PAT_MRT3847_62008C.1.pep
FIFFSQTHLHHSPITPNPQLNQPDVAITEIESFSIYLLTGGSVEFSNCRWMHSLV

SEQ ID NO: 243613 - protein, 67 aa, Glycine max
  Clone ID: PAT_MRT3847_62009C.1.pep
MNPRASCSWIICILVLDDENFFSNDRLIENELSNELLTSENHVCYISTELTKIRGVATTAASDADTS

SEQ ID NO: 243614 - protein, 88 aa, Glycine max
  Clone ID: PAT_MRT3847_6200C.1.pep
SVIIKGKQSKRSESKRKKNSHTLFLLFCFTVYYSTSRVLLNNRKFIFGIFIFSSCSEIISSMIISLVLSKESMLCLYISSFFLIELSN

SEQ ID NO: 243615 - protein, 56 aa, Glycine max
  unsure (1)..(56): unsure at all Xaa locations
  Clone ID: PAT_MRT3847_62010C.1.pep
TKRNLGLLILNAEQSTVIDIVXGICEEDVIAANTNMPAICGPQATGRSYQHAVCHA

SEQ ID NO: 243616 - protein, 414 aa, Glycine max
  Clone ID: PAT_MRT3847_62011C.1.pep
MAFTESSLLLPSVSGTNKNKNKVPEDKWYLAYIVYFTLGLGYLLPWNAFITAVDYFSFLYPDASVDRIFAVVYMIVGLVGISLIILYSHKSDAYVRINVGLALFVVSLLVVPLLDAFYIKGRVGFYSGFYVTAGAVGLSGVADALVQGSIVGSAGELPDRYMQAVIAGTAASGVLVSALRIFTKAVYPQDASGLQKSANLYFSVSIVIVFLCMVFYNMVHKLPVMKYYKELKVEAVTANEDNGPLTGPVWRSTVWNIVRRIRWYGFGIVLIYVVTLAIFPGYITEDVHSQILKDWYPILLIAGYNVFDLVGKCLTAVYLLQNAKVAIGGCIARLLFFPLFLGCLHGPKFFRTEIPVTILTCLLGLTNGYLTSALMILIPKIVMLQHAETAGIVSVLFLVFGLAAGSVIAWFWVI

SEQ ID NO: 243617 - protein, 44 aa, Glycine max
  Clone ID: PAT_MRT3847_62012C.1.pep
LLSEVWEHITHTMINLPQVNIGVYHKSSITIGNNILTHNPSMFY

SEQ ID NO: 243618 - protein, 81 aa, Glycine max
  Clone ID: PAT_MRT3847_62013C.1.pep
GDQSRTLRIMHMRKAQHGNVHSTPIFPTKYNQKGILILRQAILKNGTHGVGPGPHFKDLLRKKLTRLFIIIPQVGISLLMV

SEQ ID NO: 243619 - protein, 81 aa, Glycine max
  unsure (1)..(81): unsure at all Xaa locations
  Clone ID: PAT_MRT3847_62014C.1.pep
HKPCLLVLQGSIGKWYRCTFHIYXNKEDIPISFEYHVNLSRKGYRSLIYSGDHGLNVLFLXTEAWIRSLXYSIVDDWRPWL

SEQ ID NO: 243620 - protein, 87 aa, Glycine max
  Clone ID: PAT_MRT3847_62015C.1.pep
NALVFFLNPIQKVFNIPNPQNGTLSIPGGKKEETPPFHFGGGKMEKFPFSAVKKDFYVGGFFPQKEESGPLLVFLETQPPKQSLKAV

SEQ ID NO: 243621 - protein, 142 aa, Glycine max
  unsure (1)..(142): unsure at all Xaa locations
  Clone ID: PAT_MRT3847_62016C.1.pep
LPGGAHGAAASQGQVALSGFSGFGLSGQTFPQTPGPHCPGPAFLGGASGASPPLFFLYTRDSFLQRLFSCRGPPAPRRFSFAGVFFGGFFFLPPSPGVPPGGPFFFGVFFLGVFLGFFPPFFFPRVVFYKVLSXQEIKALNF

SEQ ID NO: 243622 - protein, 73 aa, Glycine max
  Clone ID: PAT_MRT3847_62017C.1.pep
VVSPSLLRVFISTHTHKNTNTLSLSILLAFSALSLSKRLGPADGGCLLKESKCTHTARTTPQHCLLLFHFLSL

SEQ ID NO: 243623 - protein, 78 aa, Glycine max
  unsure (1)..(78): unsure at all Xaa locations
  Clone ID: PAT_MRT3847_62018C.1.pep
LESPRAAAXXXXXXFFFFVLTPQPIPNLSGIYKFLMVADIYLLXEPLPSTLPPPPKVIRVTTSPNHPPPPFQIKILLL

SEQ ID NO: 243624 - protein, 74 aa, Glycine max
  unsure (1)..(74): unsure at all Xaa locations
  Clone ID: PAT_MRT3847_62019C.1.pep
GPSRMVKGCLRTEVRGSVWSTRVLGVLIADGASRPVTKXXXSXQIXTXXXXXXXXXRVXECVEWWKRESRNVFG

SEQ ID NO: 243625 - protein, 101 aa, Glycine max
  Clone ID: PAT_MRT3847_6201C.1.pep
DVIFAVMPLTFRAQADSAAKVQSQHLLWVQAMLAAYPARCRCPLVATGLRRMMSSVYQRRSRERLLTRVTVHRPEHKRCLQDIKVAISRRTRRSLRHVPSS

SEQ ID NO: 243626 - protein, 94 aa, Glycine max
  Clone ID: PAT_MRT3847_62020C.1.pep
PDVWRPPSPDDARRPTRPTARSKDGAWAARGSTRPAPRAAKPNSRVSTGTGKKGKDNNKYESPDGELAEMLERDVLETSPAVRWDDVAGLTQAK

SEQ ID NO: 243627 - protein, 39 aa, Glycine max
  Clone ID: PAT_MRT3847_62021C.1.pep
PSARELTYLVLMGVLPWWFHTIEGCGCYMRPSIFWQGPP

SEQ ID NO: 243628 - protein, 188 aa, Glycine max
  Clone ID: PAT_MRT3847_62022C.1.pep
MARLAIAVAAVLLVALSASTATARPCRTFIISSYSFRNPNSNTFATITEIRSFTPLYITDKPTGKPSSSYDLFFPHATHLPEPERVNPRAPLGFASAYDFSSLRDRTKDILSVALALLFGVGCGALTAATMYLVWSVFSTRHPTAAFDDFSSDEDEIESPKKLGYVKIPATETTAAVSTAPAPAKGSV

SEQ ID NO: 243629 - protein, 181 aa, Glycine max
  unsure (1)..(181): unsure at all Xaa locations
  Clone ID: PAT_MRT3847_62023C.1.pep
MAVRSFSYDVFLSFRGXEDTRYGFTGYLYNVLREREIDTFIDDQELNKGDEITXSFEEAIEKSKIFIIVLSDNYAYSSFCLNELTHILNFTEGKNDLSVLPVFYKVDPSDVRKHTGSFGEALANHEKKLKSNRLEXKLQIWKMALQQVSNFSGHHFQPDGYVPFLTYFILNSLILTCLITL

SEQ ID NO: 243630 - protein, 90 aa, Glycine max
  unsure (1)..(90): unsure at all Xaa locations
  Clone ID: PAT_MRT3847_62024C.1.pep
RXXXNXXXXXAQXXXVASAXHXXXPCXSVRSXILLNXVVXQCKXFLXNCAGPXSCXSSXVXEYDPXIXGPKRXXGXXMXPAELEXXXXXF

SEQ ID NO: 243631 - protein, 74 aa, Glycine max
  Clone ID: PAT_MRT3847_62025C.1.pep
VRPLQGLMDSHSLSRVHVSHPKKPIKAPQRGHALEVACNGNPIKMGGILIWLLGDYMALQQVSQDTTGSLHWGL

SEQ ID NO: 243632 - protein, 40 aa, Glycine max
  Clone ID: PAT_MRT3847_62026C.1.pep
CEKTTEGFNLKTTTQCFFIFFYIEVLFKFKKYLCILFKTW

SEQ ID NO: 243633 - protein, 82 aa, Glycine max
  Clone ID: PAT_MRT3847_62027C.1.pep
PRVREEQRFSDTGEAVVEEVEFVFFLHSTSTPLTPTPANTATQSFDFITAILFTHTSTFYPLSPDISTMCLNLIPRKHHIDI

SEQ ID NO: 243634 - protein, 54 aa, Glycine max
  Clone ID: PAT_MRT3847_62028C.1.pep
GKVPQPKIFFHSLGQIKFASPKISWGNLYQNNKNKRPKVLILIIKKSPKKKDQV

SEQ ID NO: 243635 - protein, 121 aa, Glycine max
  unsure (1)..(121): unsure at all Xaa locations
  Clone ID: PAT_MRT3847_62029C.1.pep
HSDRNPRDRPEGELERKRGTNADXGETXDTPDASGRGTPHTTKXTENTRREGHEPTAGPPTSNNKKAEEKQPEPHEXATEEGPEEHKGAAAEPPGTRRGQTPDTQGAGPEGTTPPKXKNPN

SEQ ID NO: 243636 - protein, 119 aa, Glycine max
  unsure (1)..(119): unsure at all Xaa locations
  Clone ID: PAT_MRT3847_6202C.1.pep
MPGPSMYRQAFSLCEKVKGKLSKPNDYQTILKSLHILSNGIIKRNDLQKLVTDLLGKKSDLMEEYNDLLGRREKNEGLPAGDMRKKSPSTEAHLSRSSHLVEKDKXHKPDLDGARQNER

SEQ ID NO: 243637 - protein, 121 aa, Glycine max
  unsure (1)..(121): unsure at all Xaa locations
  Clone ID: PAT_MRT3847_62030C.1.pep
XXXFXXXFXFXXXKTQXXQGGGLKKKKGGQPPPETQDRDRNWGGDPTPKETERRPAWSTQTSPKKQPRRPHPARKGQEPTARKRDKPTGAHRRRTDRPNPRANHETLNRNNLKTPHGSGNH

SEQ ID NO: 243638 - protein, 64 aa, Glycine max
  unsure (1)..(64): unsure at all Xaa locations
  Clone ID: PAT_MRT3847_62031C.1.pep
PIQPSQPSPTRPPTPIIKKATQGPFPLKKLFIQGPQNLRGQFTRAQESTELNPLLGPSXKTKFK

SEQ ID NO: 243639 - protein, 71 aa, Glycine max
  Clone ID: PAT_MRT3847_62032C.1.pep
WSAERPGKVKTSFLALLYHLFVKQREHASANCLHILQYGPHYINYYIGSLYFQVSTNLHMMIPNDLLLILF

SEQ ID NO: 243640 - protein, 53 aa, Glycine max
  Clone ID: PAT_MRT3847_62033C.1.pep
IAWEVANKVRGIYTVLKTKVPVTVHEYGDRYCLIGPLSYKTAPMEVESPKFWG

SEQ ID NO: 243641 - protein, 242 aa, Glycine max
  Clone ID: PAT_MRT3847_62034C.1.pep
KGDAMWCLLMSDLHVGRASAMEIPVPDNGSTVPATGDGGANSAGVMAPALCRFHGGWGFGNGGGLEFPVNGIFSCGAEMNLQLQRDIEFPKRFNLSPSMKSLLKRNVAMFAAGFRANSKQLQAQVKVVPGRSTVPSLDSSAVSGTEVPAEQSGGNSQNLDSQDAVNSVQSKFGDLNLDENLELVAEDQKDEVIVTLFHQIKDLEKQVSERKDWAHQKAMQAARKLSSDLTELKMLRMEREET

SEQ ID NO: 243642 - protein, 63 aa, Glycine max
  unsure (1)..(63): unsure at all Xaa locations
  Clone ID: PAT_MRT3847_62035C.1.pep
LTNWRPXXWPHSRXLRLLWLSANTXHGQGHALPGPIPAHVHLLSPXXSPHPQPTSTLPALRLP

SEQ ID NO: 243643 - protein, 90 aa, Glycine max
  unsure (1)..(90): unsure at all Xaa locations
  Clone ID: PAT_MRT3847_62036C.1.pep
MLNACSASCNSITVMFFAEETLDGKLIEVEKRSLKQISMPFQQGLXQKFRQPSGTXFEISMLEETGLTKEGDAEVYPLLPKAEAETFKPL

SEQ ID NO: 243644 - protein, 109 aa, Glycine max
  Clone ID: PAT_MRT3847_62037C.1.pep
PKKNTRESRLEGFLSRPMTPRAFRTMPNNILARSALSRRRKTVTGGRFFNGARPVSGPAGAAKSDPSWEGLDWLLGAPDQDSRAVSACPFRAPLAPNKPRGAAGQTRST

SEQ ID NO: 243645 - protein, 125 aa, Glycine max
  Clone ID: PAT_MRT3847_62038C.1.pep
SPHLTSSKWWIGSLGRTANHAVVMAQLIIEGKPYGPHPFVVQIRDLKTHQPLENIHIGDIGPKFGYNTMDNGFLLFNHVKVPHISMLAKFSSIDPKTNRYTRPASPALVYGTLTWVRSNIVMQAG

SEQ ID NO: 243646 - protein, 96 aa, Glycine max
  Clone ID: PAT_MRT3847_62039C.1.pep
IMEPRLPVHGTPGLLLCIPPLLGGRRSLLCSLSTTPPATTNFVSLRSHNTPRFKVILYPPGYVIRLYLIVGPLTAYTAMQFLIPCVTYEFSTPFLL

SEQ ID NO: 243647 - protein, 58 aa, Glycine max
  Clone ID: PAT_MRT3847_6203C.1.pep
LPGAPYLQCLPLFLSLSLQKLRSCVLILQIRYSIDLFLLCPLAILPLPTCVLSITLQV

SEQ ID NO: 243648 - protein, 259 aa, Glycine max
  Clone ID: PAT_MRT3847_62040C.1.pep
MTGEETTGKKRVVTESLGWLTESSIMPKKHRAIAGVGASSILELKAELYKSQEDSKKSRELAGPDAEYQRAKNKIAPKDKFSVKNRGVDARAHKDKLELKAVSDGTASYVALERKAELYDKLVKGDLSDEEDQEKYCVDFFRKGIEHDELPPLLQPLSHNVLVENEDGAVNDDDSLMFNMKPVGPGRTAGAVDNADYKRNIREVHEEVNRAREKASEIKLRRQEQVAAHREKLKQAYLRKRLEQLKATSIVSGSENKQT

SEQ ID NO: 243649 - protein, 69 aa, Glycine max
  Clone ID: PAT_MRT3847_62041C.1.pep
EEHLKTPRNFRVLPKGFLSPLKKNRFIPFNALYNGGFEIPSLLWTNFQWRPNSGFPLKPRNGFQSKNKT

SEQ ID NO: 243650 - protein, 96 aa, Glycine max
  Clone ID: PAT_MRT3847_62042C.1.pep
AQDCLLNLAVALRVESEGFRFKVEEGASLGKEGDLWDDSSLINAFDQAISTFNVLFITLFFPRVRNNSEPEKINGSETDLAAVLNAWYSAGFYTGK

SEQ ID NO: 243651 - protein, 73 aa, Glycine max
  unsure (1)..(73): unsure at all Xaa locations
  Clone ID: PAT_MRT3847_62043C.1.pep
PKKIPPKKPWFWEPLPFENRLFWANPCPXKNPFPPEFFYLKKYGPWQINFRPWPKKNLIKKKKKKKKKIKKKK

SEQ ID NO: 243652 - protein, 51 aa, Glycine max
  Clone ID: PAT_MRT3847_62044C.1.pep
QASIHASDVIKHGRNSGMCAANSTLPQDISNLMSLRHDDCSPSEEPIQERL

SEQ ID NO: 243653 - protein, 78 aa, Glycine max
  Clone ID: PAT_MRT3847_62045C.1.pep
QKSKKGSLTPLMRPLWLDTGSYPGVGDFHIIHLWTARRPFLFSKVAIAPVNRAAPLFCLNYPMERRTKLLRGIPFEDG

SEQ ID NO: 243654 - protein, 48 aa, Glycine max
  Clone ID: PAT_MRT3847_62046C.1.pep
VEIYLSLLYHYSIIGYNYFAFCLKLCQQGENRRRKKKRDLIGRIVYLI

SEQ ID NO: 243655 - protein, 159 aa, Glycine max
  unsure (1)..(159): unsure at all Xaa locations
  Clone ID: PAT_MRT3847_62047C.1.pep
GSRLDNQFQVQSEDDTHGIFGTSVKYDQDTNRLTDKTQRRLAQNREAARKSRLRKKAYVQQLESCRVKLLQLEQEVDHAKQQGLYIGNGLGSNNLGFAGSVNSRITLFKMEYGNWVEEQNRQILELRTAXSSHIGDIQLGTLVQGIMNHYTXLFGMKSA

SEQ ID NO: 243656 - protein, 370 aa, Glycine max
  Clone ID: PAT_MRT3847_62048C.1.pep
MDATSSQFVSSRRMGVYDPIHQISMWEETFKSNDTNNLTVSTSIIGEVEMKLDNQVHVQSEDASHGIFGTSVKYDQDANRLTDKTQRRLAQNREAARKSRLRKKAYVQQLESCRLKLVQLEQEVDHAKQQATKLQGLYIGDGLGSNNLGFAGSMEYGNWLEEQNRQILELRTALSSHIGDIQLGTLVQGIMNHYTKLFSMKSAAAKADVFYVMSGMWKTTAERFFLWIGGFRPSELLKVLVPLSEPLTEQQRFDAYGLEKSCQQAEDALSQGMEKLQQMLADSVGPGQLVEGTHIPQMDTAMERLEALVSFVNQADHLRQETLRQMYRILTTRQTGRFLLDLGEYFQRLRALSKLWANRPQELTKSVIKH

SEQ ID NO: 243657 - protein, 238 aa, Glycine max
  Clone ID: PAT_MRT3847_62049C.1.pep
MISISTIAIKLLMLLSFGNIWISRDFDFFYFVQQWPGSFCDTKKSCCFPLTGKPVSNFSIHGLWPNFSNGSFPSNCNIAENPFNQSKITDLIPRAEKGWASLSCAGSKKTENNKTSSDNTRFWKHEWDKHGTCSDLILDQHAYFEATLNLKDRVDLLQILQYNGIKPDGNLYSIVNITKAITQAIGLEPGITCNTDPSGNRQLNEIYLCADKYASSFIECPILPSRKSCTDMVEFPIF

SEQ ID NO: 243658 - protein, 86 aa, Glycine max
  Clone ID: PAT_MRT3847_6204C.1.pep
KKYHDGFLRLVLHGSSGAQVMLFDTSRKLLDSRFLKKDDVIKSGESIAFDSYLIDIGKQQGSCTPDSNVLADKCTDVKAMKMVRQK

SEQ ID NO: 243659 - protein, 65 aa, Glycine max
  Clone ID: PAT_MRT3847_62050C.1.pep
NKSSMVVSVPVDPKKAGDGDVDVDGIMRPKSLSRIFVVGLNERVKYVPSSGGLPRGFPHLGAGFV

SEQ ID NO: 243660 - protein, 95 aa, Glycine max
  unsure (1)..(95): unsure at all Xaa locations
  Clone ID: PAT_MRT3847_62051C.1.pep
SRTXTPPXSICFVRREVLDAYSGYRPLXSXXRNSWXAXXXXXISQKXINXPYIXHXXIXQXKNKXAXHQPFLXXLNXLXHXKXYFSQSPXRXIST

SEQ ID NO: 243661 - protein, 55 aa, Glycine max
  unsure (1)..(55): unsure at all Xaa locations
  Clone ID: PAT_MRT3847_62052C.1.pep
MXSLKLQKRLAASXLKCGRXNXWXDXXEVNEISMXNSRXXXRKLVKDGFXIRNPP

SEQ ID NO: 243662 - protein, 145 aa, Glycine max
  Clone ID: PAT_MRT3847_62053C.1.pep
TSNEHKCSTTSAFWCYFAALVAKIATTANGLNTTASPAYGAPRAFGLLITSPRGKTPLLAPVAHGWYLGRHIWCSTTMDVGQIAIQSPQLGLAAYDQCFSLLTTWPSRACTMVLLKGMAVCLPHPSPVFLYVWVSSLSAGLCARE

SEQ ID NO: 243663 - protein, 152 aa, Glycine max
  unsure (1)..(152): unsure at all Xaa locations
  Clone ID: PAT_MRT3847_62054C.1.pep
WAECPLEFNGSNFKLXSSLCSNLGDRGKXCRFLNIKVAISVARFANATGNLGVPXNASDTCLXNLFQTLQLNGVAQNATAFCGFGTKIPVNYECRGRTSVAQMLQSXRFXEVTXNCKAPLGKESKCKKCLNXXLXYLHHIGIXEYISLSTWP

SEQ ID NO: 243664 - protein, 269 aa, Glycine max
  Clone ID: PAT_MRT3847_62055C.1.pep
AMAPTTSQRATLARLCSSKDWSKAIRVLDSLVSQSGAIQDICNRAFCYSRLELHKHVIKDCNKALQLDPSRLQAYILKGHALSALGRKTDALLVWEQGYEHAQHQSADLKLLLELEELLTTTKQGNSALYETNGSPVSQSESDSPSDGNLTEICENQDRLSVQDELCDNASDKSLILLKSADNFDLRNELNIEDRESNKSDSQVNGSPDVIDKLSYNSESCNDSSDTSESCDKDKVFTNSGESSSDSLDVAEILRKLSSKFNFPHEKNW

SEQ ID NO: 243665 - protein, 91 aa, Glycine max
  Clone ID: PAT_MRT3847_62056C.1.pep
YFLSCIKNIECAPNEDAVKPNKQPVIVSVPICHYDDTESAKVSRQQLKEAIYASLFDINVPVVCAINQVVIRVAENGENTLIWLDSGWMGV

SEQ ID NO: 243666 - protein, 209 aa, Glycine max
  Clone ID: PAT_MRT3847_62057C.1.pep
MTTSEQQVPPKTPAADIVGNAFVDQYYHMLHESPELVHRFYQDVSKLGRPEQNGIMGITTTMLDINKKILSLGYGELSAEIVSVDAQESYDGGVIVLVTGFMIGKDDIKQKFTQCFFLAPQEKGYFVLNDVFRYVDENGIQGSAHDIGSPAPPDTVSNPSVLETQVSEQISVTAEDGDEEVVYNPENGQAAIEEEEAPVPEVLDEIPDD

SEQ ID NO: 243667 - protein, 200 aa, Glycine max
  Clone ID: PAT_MRT3847_62058C.1.pep
AAPPPSSISETNGSVINTNEVGNIQEAEAEGYSIYVKGLPPTATPAVLENEFKKFGPIKSGGIQVRSQKGFSYGFVEFEVASAAQSALEASPISINGRLVVVEEKRSTNRGRGRFSSGRAPSFRGEGARGRGNYGNGRSYGRGGDFNGRGEYGYRNGNRGGFSSRGGDGYQRNDHMGTGGGRMNRAGGSAVNPAVKTAGV

SEQ ID NO: 243668 - protein, 464 aa, Glycine max
  Clone ID: PAT_MRT3847_62059C.1.pep
MATSEQQVPPQTPAADIVGNAFVDQYYHMLHESPELVHRFYQDVSKLGRPEQNGIMGITTTMFDINKKILSLGYGELSAEIVSVDAQESYGGGVIVLVTGFMIGKDDIKQKFTQCFFLAPQEKGYFVLNDVFRYVDENGIQGSAHDIGTPAPPDTVADPSVLETQVSEQISVTAEDGGEEVYNPENGQAAIEEEEAPVPEVLDEIPDDSQMVAGLASQIEEVPKKSYAYIVKVMKEGAAPSSTVTPVSVKSAHKSQEQQGIAAPPPSSISETNGSIINTNEVGNNQETEAEGYSIYVKGLPPTATPAVLENEFKKFGPIKSGGIQVRSQKGFSFGFAEFEVASAVQSALEASPILINGRQVVVEEKRSTNRGRGRFSSGRAPSFRGEGARGRGNYGNGRSYGRGDFNGRGEYGYRNGNRGGFSRGDGYQRNDHMGTGGGRMNRAGGSAVNPAVKTAGVRVPASA

SEQ ID NO: 243669 - protein, 59 aa, Glycine max
  Clone ID: PAT_MRT3847_6205C.1.pep
GTVADFLTVKHANHWTGKSKKLTLLHFYPCSIPHLKIRGAVWPLTLTGVHFPLGNLQMC

SEQ ID NO: 243670 - protein, 301 aa, Glycine max
  Clone ID: PAT_MRT3847_62060C.1.pep
MPLSRFAAGAFSVVTICLVAILLLLGFVCIAYSYYFRSRIHHDQFSYFSGPWIIRIAFILIAIWWGLGEIIRLSLLRRGLHLQWQWQEESICKWYIVSNLGFAEPCLFLTIVFLLRAPLHLQTGGIINTKWNVKTAGYILLYCFPLFVLQLFVIFVGGEFKSSSSSSCTYPLLSTLLLGLFALILTSYLFWLGSRILKLVINKGLQKRVYTLVLSVSGFLPLRVVFLGLSVLSGPEDFMFEAFAFLAFLALASCAGVCMCMLVYRPLADCLALDINDTTSLIKGDRDATFLQLSLFSPTPN

SEQ ID NO: 243671 - protein, 129 aa, Glycine max
  Clone ID: PAT_MRT3847_62061C.1.pep
NPLLADSGLYKLLTNDIVFSALKGSAAKGYLAPEYATTGRFSETSDVYAFGVMLFQILSGKHEITSSIRLAAESSKFQEFMDPNLHGRYFEYEAAKLAKIALLCSHESPFERPSMEGIVQELGNCSSCF

SEQ ID NO: 243672 - protein, 49 aa, Glycine max
  Clone ID: PAT_MRT3847_62062C.1.pep
IRKEVVNTFRKWFQLGMIKVQSVMQLEGHAEGEPPFLYSLVKRSVDGYF

SEQ ID NO: 243673 - protein, 38 aa, Glycine max
  Clone ID: PAT_MRT3847_62063C.1.pep
FGFPQHLQKLLSKYVHQINSDLREISDSRLFGVFVFLM

SEQ ID NO: 243674 - protein, 94 aa, Glycine max
  unsure (1)..(94): unsure at all Xaa locations
  Clone ID: PAT_MRT3847_62064C.1.pep
MDQHSLLRPNTFSDRQSIGTEWHRHQDRKDYQEPAPAPLIDQTELTSRSFHRAXLANFVTNFSVVSITTLTGMGGXGAKAKEGTVWIKSFGRAF

SEQ ID NO: 243675 - protein, 50 aa, Glycine max
  unsure (1)..(50): unsure at all Xaa locations
  Clone ID: PAT_MRT3847_62065C.1.pep
PFPSPKEMXMEDQLIFRAWGIFLPIFKAEEVRQMFFPAIVPASIKNPPAQ

SEQ ID NO: 243676 - protein, 52 aa, Glycine max
  Clone ID: PAT_MRT3847_62066C.1.pep
TRENFDATLNKHISIQTLKYINLSYFSLFVVFNIQIHSIICTELNYTRGLFG

SEQ ID NO: 243677 - protein, 60 aa, Glycine max
  unsure (1)..(60): unsure at all Xaa locations
  Clone ID: PAT_MRT3847_62067C.1.pep
EFSPLTTDTPPFSTPPPNNTPTPFPPPVXPQNLSFGTKFSKMAPIQSKNGKPQPFFCTTP

SEQ ID NO: 243678 - protein, 41 aa, Glycine max
  Clone ID: PAT_MRT3847_62068C.1.pep
LCCLAEHAYSKPIYDNFFLYHHICLCIIILNYHIVVQEFCV

SEQ ID NO: 243679 - protein, 128 aa, Glycine max
  unsure (1)..(128): unsure at all Xaa locations
  Clone ID: PAT_MRT3847_62069C.1.pep
SSQLAGSQAKEVAVLLSLIGARPNAVGPGLAMNAIDHAGRRKEGLSNXWGEIACMIIGGLIWMNQIYESGLDGWLRMVWEALXLLYFSPGKGPVPWTVNSEVYPAEYRGIXAGKSATANRDQNLIVGQ

SEQ ID NO: 243680 - protein, 82 aa, Glycine max
  unsure (1)..(82): unsure at all Xaa locations
  Clone ID: PAT_MRT3847_6206C.1.pep
RNICEMHWELRTDGMLDYKRESYPLSWEGLNTIIESTVSQSPENFIEATSTFGEEKMILSLXTCYEPREQRLILKGKEREDD

SEQ ID NO: 243681 - protein, 37 aa, Glycine max
  Clone ID: PAT_MRT3847_62070C.1.pep
NVGKGIWCKTFKFEDFWLFPVLKLGNKGQLIEVFSNI

SEQ ID NO: 243682 - protein, 115 aa, Glycine max
  Clone ID: PAT_MRT3847_62071C.1.pep
RDPISHKRDPEQGQTLKKGRTFKTLNYPLIRGADRGKKQETLTYKLTKEPHGSPFKALKHWEPKGYGIHYHRGEKMEPPRGGGAMAPSKSPKLFPSHFFWGKKNKKTALKEEFVF

SEQ ID NO: 243683 - protein, 59 aa, Glycine max
  Clone ID: PAT_MRT3847_62072C.1.pep
TAPASISLQSKGASRPVGAPTGLSYPDQCIPRLPHFRSEMNAIYRAHPSLQSSVLRSTQ

SEQ ID NO: 243684 - protein, 77 aa, Glycine max
  unsure (1)..(77): unsure at all Xaa locations
  Clone ID: PAT_MRT3847_62073C.1.pep
VWILFFRKMVLGFLKGGRGDPYVYGVGSFLIWGTGFCPLFVFENVKESYIKNDHYFWFPLQLVYSFPKKKKKNFFXX

SEQ ID NO: 243685 - protein, 53 aa, Glycine max
  Clone ID: PAT_MRT3847_62074C.1.pep
CYKIWGIEILLNKGSLLFFTNSYSDYPEIVSLLAPTVLHERVNNVVTDLSLGL

SEQ ID NO: 243686 - protein, 73 aa, Glycine max
  Clone ID: PAT_MRT3847_62075C.1.pep
GADQNHKGLILMDPCIKATFPLTIPRVVFKSSPKGSTPPSIGILLQGVLIGLSHLRWVPTATSFRGPPSLFFY

SEQ ID NO: 243687 - protein, 557 aa, Glycine max
  unsure (1)..(557): unsure at all Xaa locations
  Clone ID: PAT_MRT3847_62076C.1.pep
MIQKERMLEKDSWSHTPEGVFSSCGSDSSKEAKRLTSDDTGMPDHCFKSSNLDSGGCELCEDDIILGDKCVVENDSVCQYPTSHISQVDNELSXLDNDGWLDIGDFEDVDRMLSCDLTFGAGSLNNEEEFCWLSSSHGAEGSDDAFKSDFKFSYAEMCHSKNLSFYNMDSTESIVGLPINDSKKRSSPVDEKIRSQMDVIDDCVPAPLSMFSESDSDMKSVNIDDLLPKEKLQRKLPKPSVGRRKNGYLQNGGSVHPYAAPEQYADTKQSFGSSSICIQTQIPMTRPDYSHAPNHTPLFPTLSGSRSEHDGHLSPLKESSYASNMESSNGHSLEPAALKTNENREKLYHCCDGTLLSSNFKNENMPNQMPFHSLGSAQQVGHQFENENEGFSPEIDSSTVQESSSMGSALDQASLEATSFCHLQQIMDQLDIKTKMCIRDSLYRLAKSAEHRHNNSNANGCIGGDETCKAMMAQDANRCAGLMDMETDTNPIDRSVAHLLFHRPSDPSVLLPNETLPFKSSATMHHGSVINPPVKTEKQVCQEDSTGVEKKVLRGNT

SEQ ID NO: 243688 - protein, 200 aa, Glycine max
  unsure (1)..(200): unsure at all Xaa locations
  Clone ID: PAT_MRT3847_62077C.1.pep
LLFKLSKTYVYFLVYISKKNSTLASVSSVLTPFTRLDGNVAIITDGASGLGATTARLFSNXGAYLALPDIQDNXGLSEAKTLQSAPYVXHCDGTHEYDFDCCWTTTVSTAGTLDVLFIYAGVCPETYSDFLHCHKSDFDRLISVHLMGPFLGTIHAARVMIPAIEGCLTYPGDVARCIRAGAPHAYSSXLHPLVGLTNNT

SEQ ID NO: 243689 - protein, 124 aa, Glycine max
  unsure (1)..(124): unsure at all Xaa locations
  Clone ID: PAT_MRT3847_62078C.1.pep
MIQKERMLEKDSWSHTPEGVFSSCGSDSSKEAKRLTSDDTGMPDHCFKSSNLDSGGCELCEDDIILGDKCVVENDSVCQYPTSHISQVDNELSFLDNDXWLDIGDFEDVDRMLSCDLTFGAGSL

SEQ ID NO: 243690 - protein, 239 aa, Glycine max
  Clone ID: PAT_MRT3847_62079C.1.pep
MVVEEPPLPSALGTPKTKVPGNISLGSRQISDGVIAHSVSQGTPERKTRRASNKTAGKETSRKGNKGKTPGRQSERGDRSTSVSVSPSPGFQVQSNEMQQFGHFDCISTKPFAILSASTSSLPDLNSSASPPVLFQQPFGAMQQVQLRAQIFVYGALIQGTVPDEAYMISAFGGPDGGRSIWQNAWSSCMEKQHGKKSHPMNLETPLQSRSGPRTTDVAVKQNALQGKGICSPLMLASS

SEQ ID NO: 243691 - protein, 86 aa, Glycine max
  Clone ID: PAT_MRT3847_6207C.1.pep
AQLMATLPLLRRMSGNAYWCKPMLSKSVVEHFNGAVVMPMPTIAAEHGGMITFPRHLDATVVPDTLRPPSHRHRPPSLSFECILEP

SEQ ID NO: 243692 - protein, 48 aa, Glycine max
  Clone ID: PAT_MRT3847_62080C.1.pep
KNQDQDSRLKIQESREGLIKISMKSFSQKLSSTLFFSKHVYQRVFTLW

SEQ ID NO: 243693 - protein, 67 aa, Glycine max
  Clone ID: PAT_MRT3847_62081C.1.pep
CKKDLKFRKKEKIGFTSSFYPENFFKLKPFGFFKKMSINKSLVILRGEKTYYWGIHYVKTENPTICL

SEQ ID NO: 243694 - protein, 100 aa, Glycine max
  Clone ID: PAT_MRT3847_62082C.1.pep
MSGVWVFKNGVVRLVENHGSDRKVLVHTASNEIITSYAVLEHKLSSLGWERYYDDPDLLQFHKRSTVHLISLPTRPNKFRSMHMYDIVVKNKNYFEVRDI

SEQ ID NO: 243695 - protein, 491 aa, Glycine max
  unsure (1)..(491): unsure at all Xaa locations
  Clone ID: PAT_MRT3847_62083C.1.pep
MEVGSVLNFLQDKTILIVGATGFLAKIFLEKILRVQPNVKKLFLLLRASDAKSANYRLQNEIIAKDLFIVLKEKLGANFKSFISEKVTLVPGDISYEDLGLTDSILREEICNQTDVIVNLAATTKFDERYDLALGLNIFGVKHVMKFAKQCAKLKILLHVSTAYVCGERGGLILEDPYXFGDSLNGMSLXLEIGAERTIVCDKVDVLXDLGTAEREKEIVKRNXRISKAVGYSXLNTXVFTNSIRDKQVXSEKEXISNVIIRDSSDQSTYHDFYPIRSPVVRTVXSSNITYVKGKXKCFFGNINGVVDVVPADMVENAMLVAMVAHAKHPSDIXYHMGSSLRNPLTYVKLQEYGLKYFTAKPWINKDGTPVKVGRVTVLTDMDSFQRYMFIRYLLPLKGLELANTALCQYFRGTYLELHRKIQVVMRMVELYRPYMFFDGVFDDMNTEKLRMAAKQSGTETDLFYFDTKEVNWDDYFMKTHLPGIVKYIFK

SEQ ID NO: 243696 - protein, 82 aa, Glycine max
  Clone ID: PAT_MRT3847_62084C.1.pep
TILDFEIGGGRRISEFSTVRMMYNIGIQGVSWKFELHRAGQKLIIPVLLSTDLNAIFVTSAFAIPSTLYFLLQTYVVKPTTL

SEQ ID NO: 243697 - protein, 130 aa, Glycine max
  Clone ID: PAT_MRT3847_62085C.1.pep
SEGISNAGVEAFGEKIPSGVPQPLTLPSIALCVVFCRLLFSFSVEYSTIIWQLKKLGKAGDSCNGCFIVASVFGEDLSSEKSGPSHSTDLPCVFFLTIFCFCDEFTSSVLVEPPKLLLLEAPYANHLQHP

SEQ ID NO: 243698 - protein, 108 aa, Glycine max
  unsure (1)..(108): unsure at all Xaa locations
  Clone ID: PAT_MRT3847_62086C.1.pep
MPISRNLLLALFTLSTLLHGSSSQTRHIILNTTVWIIPTNYTSTYTAXSTNKTYTVNYTLFFNIVNYQHNLSKVTKSSYLHLQPPKHPFHPYLLSINLDPEPNTVTIL

SEQ ID NO: 243699 - protein, 84 aa, Glycine max
  unsure (1)..(84): unsure at all Xaa locations
  Clone ID: PAT_MRT3847_62087C.1.pep
CQYFRGTYLELHRKXQVVMRMVELYRPYMFFNGVFDDINTEKLRIAAKQSGTETDLFYFDTKEVNWEDYFMKTHLPGIVKHVFK

SEQ ID NO: 243700 - protein, 61 aa, Glycine max
  Clone ID: PAT_MRT3847_62088C.1.pep
GLGNFGSNNESVLELSASKLMKFMLGGVTAGVVKLMYSKKVIPVAVLCPMPHNKPLVVSVY

SEQ ID NO: 243701 - protein, 114 aa, Glycine max
  Clone ID: PAT_MRT3847_62089C.1.pep
MIGNFIDDIDCGNFFDHIDDLLEFPDDAAAADTSAAAPVPPPANFWSAESDSLPATDTVFSDNSVTDLSAELSVPYEDIMQLEWLSNFVEDSFSGGSMTMKKEEPQCTTTTKED

SEQ ID NO: 243702 - protein, 160 aa, Glycine max
  unsure (1)..(160): unsure at all Xaa locations
  Clone ID: PAT_MRT3847_6208C.1.pep
MANQGHDLPLYEKVWLKRRLQRVIDTLILFLLLLLLNYRVLSSNSFTFPWFLALLCESWFTFTWIVILNSKWSPAVTITHPDRLLQWVSELPPVDLLVTTANPILEPPIITVNTVLSLLALDYPANKLACYVSDDGCSPLTXYALVEASKFAKFWVPFCR

SEQ ID NO: 243703 - protein, 71 aa, Glycine max
  Clone ID: PAT_MRT3847_62090C.1.pep
TVPPSSGTRARQLTVATLGTVSSQALVPFSTGTQVPRAALKPGGNRPDQRALAQGNSSNIYCKRSVRSSQA

SEQ ID NO: 243704 - protein, 72 aa, Glycine max
  Clone ID: PAT_MRT3847_62091C.1.pep
KSTRSSLHLSRSPISNRRVFSKYTKYVKENDSRSLWPAHRVIFFPFRNRTQKSRKKLKNSCESSHDCFCFRL

SEQ ID NO: 243705 - protein, 49 aa, Glycine max
  unsure (1)..(49): unsure at all Xaa locations
  Clone ID: PAT_MRT3847_62092C.1.pep
KTIDINRXXFHLPKXANLLHWQVKFLSIDIXRXEFXXQXSXXATXAXEX

SEQ ID NO: 243706 - protein, 76 aa, Glycine max
  Clone ID: PAT_MRT3847_62093C.1.pep
NKGKSSWGHPAKGGGCCLVMRRTGKNAHTWSNYALKIFLKILPGKKAPPKMLEAPVSEERISDEIFTPTHGKKNFG

SEQ ID NO: 243707 - protein, 38 aa, Glycine max
  unsure (1)..(38): unsure at all Xaa locations
  Clone ID: PAT_MRT3847_62094C.1.pep
MSNTCGNCDCADKTSCIKGNSYGXIVYTDKSYIDTVVM

SEQ ID NO: 243708 - protein, 72 aa, Glycine max
  Clone ID: PAT_MRT3847_62095C.1.pep
TDISLLFHQPASASSLRRHVAAPLMQHHRAIERNNHALQPLSPASYGSSMEVSINLAPDLSFSFLLANTFKT

SEQ ID NO: 243709 - protein, 81 aa, Glycine max
  Clone ID: PAT_MRT3847_62096C.1.pep
LDYQVSWIPFPRSASSRRSGGHCQCLVPLPAPFHRSLTRMTYNLMTSIACRPARLQSLHGVLTYSGNPYLTHALHHPCYLC

SEQ ID NO: 243710 - protein, 96 aa, Glycine max
  unsure (1)..(96): unsure at all Xaa locations
  Clone ID: PAT_MRT3847_62097C.1.pep
PEYGVHLGLAANNNSPSRSNPQAHAENLICXGANTHSNAQNTAGVITMAREGVRDFDTPTKELSPILACKPGLNIRGETNLASGIQAAQQAIKSLR

SEQ ID NO: 243711 - protein, 34 aa, Glycine max
  Clone ID: PAT_MRT3847_62098C.1.pep
LFTEFFIFHILKLFNFKYYLDLGIQNFAIFICKN

SEQ ID NO: 243712 - protein, 64 aa, Glycine max
  Clone ID: PAT_MRT3847_62099C.1.pep
IILTFRIQVHGDKQSCKPLVPEFSILVPPGRQLRSLKMLSLPCYIEIFAYIKKKKSSMLHLLCM

SEQ ID NO: 243713 - protein, 191 aa, Glycine max
  unsure (1)..(191): unsure at all Xaa locations
  Clone ID: PAT_MRT3847_6209C.1.pep
MAAGYASGYSLEHTPTWAIALVSFILISVSIILEHLIHLIIKWLKKHRRSDLVEAIERLKSELMILGFMSLLLTVTQDAIIEICIPVMAADTMLPCRKRTNNATSILDSCSAKNASKVALVSKHGIHQLHMFIFVLALMQIVYSFLTVSLARAKMRHWKAWDEETQTVEYEIANDPNRFRYTRQTXFGRRH

SEQ ID NO: 243714 - protein, 435 aa, Glycine max
  Clone ID: PAT_MRT3847_620C.1.pep
LAAVVQACHDMVPPDAVEPLFKHIVNQFVHDRSRPEAITVGINAVREICMRMPLLMNEDLLQDLALYKKSREKAVSIAARSLIGLFREVCPSLLVKKDRGRPIDPKARPKAYGEQNVATDVPDVELLQTAIDNDDEQESDHSDGSACSVSDNDQENDLMSINDDDDNDDENQLCSDDPESDDEAKDSDVISDDDDERSSDDEADVSDADEVKGDDIEDNEQADGEDSDVSEHEEDGDLHSLSDDGLVTKSTMKDSAKKRKFTDFNGQLIAADTSLRALKKLAGRQMGDVIPESNDGILSNEDFKRIKELKAKSEAKNALAQQGLAKSAATKVPSSGQLNLKRVDGTMLEAHIRKKLNKDERLALVRAGREERGKYQARTAVKQNKTGGLSNRQKEHKKKMPLAAKRDKVSRTRIEKKRKNQRSGKQFRGKKAWKQ

SEQ ID NO: 243715 - protein, 56 aa, Glycine max
  Clone ID: PAT_MRT3847_62100C.1.pep
MVPKGGAPIPEKHKHFDRPTPLAKNQLPANFLKGKKPRHGPLTVFARIKINTYSLT

SEQ ID NO: 243716 - protein, 52 aa, Glycine max
  Clone ID: PAT_MRT3847_62101C.1.pep
IRKLLIGYFLKLQLIIVKKFVFVYVTLNGVLFLTLINQLKFVFVFVTFDLYS

SEQ ID NO: 243717 - protein, 139 aa, Glycine max
  Clone ID: PAT_MRT3847_62102C.1.pep
MIGKGICEAVVALHLEGLVAGCLGLSCFSFDELGGICVDLNEALMLARKFVNVVSVEHEEEAMCKDCLENEVFAKNEVLYGLLHKRGTAPDSGHSRYPTGYGSDVWSLACVLLRLLIGNALPWNTLEMKEENDGDSSAS

SEQ ID NO: 243718 - protein, 116 aa, Glycine max
  Clone ID: PAT_MRT3847_62103C.1.pep
MASESGKDGAGVPRKLKFKPRAPPRRVIKQEVKAEVADDVDVDADAEHAAKENLLKRFHERESAVKAKYKGEKKVLASQIAFGYGGESTSMKSYGIPRGGSSININQSSASNGAKE

SEQ ID NO: 243719 - protein, 235 aa, Glycine max
  Clone ID: PAT_MRT3847_62104C.1.pep
MDVCVLSNHKVLSQIQILFVCGGLINNTQKGYLKNTTTLEIMELAQKKGFLVHHEYDDLVGSFYSSSTSSSVSGISSGSSLESDSFEEVTSPASSSPSSSVDDQLVVVADPLSDMSSLFQQLPIKRGLSKFYQGKSQSFTSLTNVRSLEDLVKPENPHNKRLKSYKSYAGGLAESHSTRVVSKGGMMHSTSSRGSCSSLGRGSVTNFMGSNSRPSIPSHRSTSTNTIPNQTVLFA

SEQ ID NO: 243720 - protein, 95 aa, Glycine max
  Clone ID: PAT_MRT3847_62105C.1.pep
LSQSTCCLHRGLSKQTSAPTHKCFSNKTTLSGNADQSEQESERKYSNRRVCPRSPIPDRRVGALIPDFASLNLRLNRQLTKKHKKFASDPKSNIK

SEQ ID NO: 243721 - protein, 36 aa, Glycine max
  Clone ID: PAT_MRT3847_62106C.1.pep
CSSSQGTSYSVISGHCTVMYYSVPRLILKLAIIREL

SEQ ID NO: 243722 - protein, 86 aa, Glycine max
  Clone ID: PAT_MRT3847_62107C.1.pep
SSGPFQFQWYRFSFGGMSPYFIMFFNLSWFRNSVNYSPNFIPPARSPSLVMGTEVLQPSLGAYLNIILLSGGSARFSRIVFINRTV

SEQ ID NO: 243723 - protein, 98 aa, Glycine max
  Clone ID: PAT_MRT3847_62108C.1.pep
RSTNLVNLHHPHTPNPFLTLPFSPTLPSNTKQILTRSRFYEENSYLISSALRTVSHGTCFIFIHIAFSVFKRLSNVNNVVKGTSEKGYAVFDYIVVFF

SEQ ID NO: 243724 - protein, 115 aa, Glycine max
  Clone ID: PAT_MRT3847_62109C.1.pep
WSSEDDRRGPPNQVSKAGTEGINSSGDNARVGAAYSRTRTKATAVTDESEGSPHVSKRVSDNSPIITVIAGEVLLFENDGTAPPAYAEFKAYNHAHFTGFGGVVPHFVIAAADLA

SEQ ID NO: 243725 - protein, 102 aa, Glycine max
  Clone ID: PAT_MRT3847_6210C.1.pep
PAASHILNQGSCYLRGVSTLRHTNHRCRSTITKFPQSRDNTILFIYFNVNLRCVRYDIRHFPLRHPPYFYGGFLTFRHEPPSAINNIENNRNFETEYHLSLL

SEQ ID NO: 243726 - protein, 230 aa, Glycine max
  Clone ID: PAT_MRT3847_62110C.1.pep
MATNEERDMENKKSEEELKHLGFVKIAAMKALVCVSNLYGFAKQNSGLLRSAVGTVEDTVTTVLGPVYHKFNAVPNHILLFVDNKVDEAAHKFDEHAPSLAKQVASQVTCLVQEVTHKAEKVVSEAQSGGARAAANYVATESKQIVLFGSVKLWTGLNQYPPFHAVAEMAVPRAAHWSEKYNNVVKGTSEKGFAVFDYLPLIPIDDIAKAFKQGEGNVNEDEACSVGDCS

SEQ ID NO: 243727 - protein, 54 aa, Glycine max
  Clone ID: PAT_MRT3847_62111C.1.pep
APPPSLLTSETLVASNSDLTGHHLSGGHQLSTFPCARIWPHHGTIFHKNAYCNS

SEQ ID NO: 243728 - protein, 272 aa, Glycine max
  unsure (1)..(272): unsure at all Xaa locations
  Clone ID: PAT_MRT3847_62112C.1.pep
MGVGNNMSAVLNFIALLASIPIISAGVWLASKPDNECIHNFRWHVLVLGLLVLLISLAGFVGAYXLVGLLAFYLCCMAILISLLLFLLVFSFVVTRPDGTYHVPGRGFKESMLVGFSPWLRNHVFTASSTTSWNKITTCLAHSYVCIKLTQDYASADHFFNSSNISPLQSGCCKPPTSCGYNYVNPILWINPVNPMVDPDCYLWSNDQSQLCYNCNACKAGLLGNLREEWRKANIILTVAVVVLIWVYLIACSAFKNAQTEDLFRRYKRGWV

SEQ ID NO: 243729 - protein, 124 aa, Glycine max
  unsure (1)..(124): unsure at all Xaa locations
  Clone ID: PAT_MRT3847_62113C.1.pep
ALWSIEWGIAELVNHPXIQQKLTDEIDTVLGTGHQLTESDIQKLPYLQALVKETLYFRMVFHLLVPHMNLHDAKFGGYDLPAETMISVNAWRLANNSAYCKNPXELRPMTFFIDESLVEAIGDD

SEQ ID NO: 243730 - protein, 127 aa, Glycine max
  unsure (1)..(127): unsure at all Xaa locations
  Clone ID: PAT_MRT3847_62114C.1.pep
MYKNQLQELAQRSCFNLPSYTCIREGPDHAPRFKATVNFNGEIFESPHYCSTLRQAEHSAAEVALNSLSNRAPSHSLAARILXELAGIMFTGEPAKNKKQAEKNAAMAAWSSLKXLAKKLQGLFTDP

SEQ ID NO: 243731 - protein, 411 aa, Glycine max
  Clone ID: PAT_MRT3847_62115C.1.pep
MYKNQLQELAQRSCFNLPSYTCIREGPDHAPRFKATVNFNGEIFESPHYCSTLRQAEHSASEVALNSLSNRAPSHSLAARILDETGVYKNLLQEIAQRVGAPLPQYFTFRSGLGHLPVFTGTVELAGIMFTGEPAKNKKQAEKNAAMAAWSSLKQLAKETARSSTEPENNDELEQITIARALLNYRLKEKISMSNSNAPVPFPKKFQIQNPRPTSPQPPPATTSKILPLICQKGAHRSRHLVAASPAPASSDNSVMPQLPATPDSRGIRRPKFPAAGAAPYVPIRQMRPCQGMAPPVTIRTAIPVFSPPPPPAAAAVSHQVLRAPHVRVAPPVTIRQAVPVFAAPPPPVRKDEPVPIPKDEPVAVPKDDSPTISAPSLEDKLPTKTPETETKTENIPPEPETVQSLEQLKI

SEQ ID NO: 243732 - protein, 61 aa, Glycine max
  unsure (1)..(61): unsure at all Xaa locations
  Clone ID: PAT_MRT3847_62116C.1.pep
IEFSIMFSVISVYYSAKHQPLQGPLNGILIFFCLLXFYIXNIIXNIIEFFFLPFHDLIPSX

SEQ ID NO: 243733 - protein, 46 aa, Glycine max
  unsure (1)..(46): unsure at all Xaa locations
  Clone ID: PAT_MRT3847_62117C.1.pep
XRPENYYYYTPKWTQSGSETSPTPLVVAICNGSIYRLDSLGSHCKQ

SEQ ID NO: 243734 - protein, 65 aa, Glycine max
  Clone ID: PAT_MRT3847_62118C.1.pep
SSRLPLTILAEWHLNIILIDSQTRSGASLLHWGDDKASIMPKHLSLHSTHITNILTEADAHPSYH

SEQ ID NO: 243735 - protein, 138 aa, Glycine max
  unsure (1)..(138): unsure at all Xaa locations
  Clone ID: PAT_MRT3847_62119C.1.pep
MSMSERKTIDLEQGWDFMQKGITKLKNILEGLPEPQFSSEDYMMLYTTIYNMCTQKPPHDYSQQLYDKYKESFEEYIVSTVLPSLREKHDEFMLRELVKRWANHKIMVRWLSRFFHYLDRYFIARRSLXXLXEVGLTC

SEQ ID NO: 243736 - protein, 46 aa, Glycine max
  Clone ID: PAT_MRT3847_6211C.1.pep
IFPGPIFVSQHAFSEQVAIRSLTSRWRKFSHFPLTLIFYILIHKIT

SEQ ID NO: 243737 - protein, 72 aa, Glycine max
  Clone ID: PAT_MRT3847_62120C.1.pep
LVDSMVNSRVYRVYLEFIKFMQSLLKKEFTQESTRKLVRVSELTREFDNHDHSGYSSQWNNKSGSPSRTYCP

SEQ ID NO: 243738 - protein, 116 aa, Glycine max
  unsure (1)..(116): unsure at all Xaa locations
  Clone ID: PAT_MRT3847_62121C.1.pep
LKRLKKGARMGPRMCPKFNAVYAEVEADMXQSSIEEPVADEGTMLGFKMDLKNIELTMDTAGSTIVRTVLFIDLLADFFTKGSVRSHGAHRINHLIKRMIKMGVTDSTPVTTACAV

SEQ ID NO: 243739 - protein, 62 aa, Glycine max
  Clone ID: PAT_MRT3847_62122C.1.pep
INNIIKFAPGNLDKGPPFWLSQNINPGRVDYFYWLFPALSIINFAIFVYSGHRYKDRGPPVH

SEQ ID NO: 243740 - protein, 138 aa, Glycine max
  Clone ID: PAT_MRT3847_62123C.1.pep
MEIVTGDRYLEKLAQFVENQAGPLIEGALVSKLNPAGLHYVQSRLEALHELESLLAGAPVDYLRAYVSDLGDHRALEQLRRILRLLTSLKIGSVLPHPIRDPTPLSFLPFGRLKVLELRGCDLSTSAAKGLLELRHTL

SEQ ID NO: 243741 - protein, 39 aa, Glycine max
  Clone ID: PAT_MRT3847_62124C.1.pep
DFVGRLFYFSPFFHSLLSTNPHYRSKWSYMKHSWALVHM

SEQ ID NO: 243742 - protein, 100 aa, Glycine max
  unsure (1)..(100): unsure at all Xaa locations
  Clone ID: PAT_MRT3847_62125C.1.pep
IPPRRRRTSPPPAQSPPPASTPPPAPLSSPPTASPPPSSPPPASPPPASPPAASSPPASPPPASPPSASPAPATAPAASTTPFSPPPXATPAPATPAPAL

SEQ ID NO: 243743 - protein, 79 aa, Glycine max
  Clone ID: PAT_MRT3847_62126C.1.pep
FSLAGPLRCIEFWVRGPFGETIFFCLSAHVFNRAVGGSSPCRVLFCYLGWLFFCHSNGAGYAVWLASLSGPVFLNFPME

SEQ ID NO: 243744 - protein, 49 aa, Glycine max
  Clone ID: PAT_MRT3847_62127C.1.pep
GSSKYVVFFLKVHGTDLYNEGHASGTVPRKTVLIANHTCLYPCHWKTDD

SEQ ID NO: 243745 - protein, 62 aa, Glycine max
  Clone ID: PAT_MRT3847_62128C.1.pep
HRTKIRCAFFYFKLGRMARERITNIKMGTNGIVPCTSIVASYTFHYILESSFQIPKCKCSLI

SEQ ID NO: 243746 - protein, 44 aa, Glycine max
  Clone ID: PAT_MRT3847_62129C.1.pep
LLLVLALQQCLELESLSWAFSGDSSSARSTTTRPHPPRAAPPDP

SEQ ID NO: 243747 - protein, 613 aa, Glycine max
  unsure (1)..(613): unsure at all Xaa locations
  Clone ID: PAT_MRT3847_6212C.1.pep
LSFYFHKGINHVMKEVEIGPCKLTLQKLEANRSTLSEISHHYCDLIERQLSVPGLSSTTRLGLTHQVMTWELIRVLFSDREQKGQVESLGADNEEDMMQDIKEICQDVDREALPLMRRAEFSYWLRESVSYHVQNQISSLNDSDYLQHIFVLLTGRQLDEAVQLAVSKGDVRLACLLSQAGGSTVNRSDIARQLDIWRNKGLDFSFIEKDRLRLYELLAGNIHDALHDVKIDWRRFLGLLMWYKLPPNTSLPIAFQTYKHFVDEGTAPYPVPLFIDEGTSEEVISWNTDNHFDISFYLMLLHANEETKFSFXKAMFSAFSSTPDPLDYHMIWHQRAVLEAVGVINSNDLHILDMSFVSQLLCVGKCHWALYVVLHLPLREDYPYLHVNLIREILFQYCETWSSDESQQQFIEDLGIPTDWMHEALAIYYNYNGDHSKALDQFLQCANWQKAHAIFITSVAHRLFLQAKHAEIWRIATSMEDHKSEIENWELGAGIYISFYLMRNSLQDDTNAMTELDSLESKNAACQDFVSQLNESLAVWGCRLPVDARVVYSRMAGEICDLLLSGVGEGATRDEQFNCFDTAFSAPIPEDQRSGHLQDAVYLFTSYLSEIAT

SEQ ID NO: 243748 - protein, 213 aa, Glycine max
  unsure (1)..(213): unsure at all Xaa locations
  Clone ID: PAT_MRT3847_62130C.1.pep
MALSMHKDSANNQMDSSKYVRYTPEQVEALERVYAECPKPSSLRRQQLIRECPILSNIEPKQIKVWFQNRRCREKQRKEASRLQTVNRKLTAMNKLLMEENDRLQKQVSHLVYENGYMKQQIHTASAGTTTDNSCESVVMSGQNQQQNPTPQHPNRDANNPAGLLXIAEETLXSSTGTAVDWVQMIGMKPGPDSSYPHVAWQRACSLSLEPST

SEQ ID NO: 243749 - protein, 200 aa, Glycine max
  Clone ID: PAT_MRT3847_62131C.1.pep
MFLFLFLIRERRTESMKLSFSVPSSKPHSKPKAVSNTFDDNSTSQNDTGGTKYLITEFDPSKPAPTSVPKTLIPPIQNQWQPFKKMKNLHLPTAADVESLAFELHTDGDQPESDISYGLNVRADNNPEGNNKDDSDGAAPRRRVPLEATALLAGYGWKEGMGIGRNAKEDVKVVEIKRRTAKEGLRFVCDAPAALGLSNN

SEQ ID NO: 243750 - protein, 58 aa, Glycine max
  Clone ID: PAT_MRT3847_62132C.1.pep
HACGTACVHIVCISQPPVFIWSNSCLRGCQSECPSTLFSESVLVPVEFYLEACVCVCE

SEQ ID NO: 243751 - protein, 56 aa, Glycine max
  Clone ID: PAT_MRT3847_62133C.1.pep
YFTLPPIPFSTSGYCGKHPKKHKPGKTPKTPKTPVVKPPVTIPPINVPPVVLPHIV

SEQ ID NO: 243752 - protein, 43 aa, Glycine max
  Clone ID: PAT_MRT3847_62134C.1.pep
LSNEIIEFSNVVTLVFAAALKDPTLPTLSCHVTALPQSHFNSI

SEQ ID NO: 243753 - protein, 406 aa, Glycine max
  Clone ID: PAT_MRT3847_62135C.1.pep
MVGKLVVVRLVLAISVLSSLLLTTSAQTACKGQAFTENKVFTTCRDLPHLSSYLHWTFDQATGKLDIAFRHTGISGTDKWVAWAINPSNNLNSAMTGAQALVAIIPSSGAPNAYTSSIANPGTTLAEGAISYNHSGLTATHQSTEVTIYATLTLPSGTTTLVHLWNDGPVSSGTPAMHSMTSSNTQSKESLDLLSGSSQAGSGNSLRRRRNVHGVLNALSWGILMPVGAIIARYLKVFKSADPAWFYLHVTCQTSAYIVGVAGWGTGLKLGSDSVGIKYNTHRALGITLFCLGTLQVFALLLRPNKDHKIRIYWNIYHYAVGYSTIIISIINVFKGFDALETSTSVGDRYNDWKHAYIGIIAALGGIAVLLEAYTWIVVLKRRNSENKTAHGVNGTNGYGSRGQQV

SEQ ID NO: 243754 - protein, 86 aa, Glycine max
  Clone ID: PAT_MRT3847_62136C.1.pep
AFFLNPTNKATIIEPWEWYNERKETQRKKKEWKPRRGEEQNRNDAKPGHCWASNFWFQSITLLGHLNQAHTFSPQYLLHINFTDAW

SEQ ID NO: 243755 - protein, 196 aa, Glycine max
  Clone ID: PAT_MRT3847_62137C.1.pep
FVQVHGVLNALSWGILMPVGAIIARYLKVFKSADPAWFYLHVTCQTSAYIVGVAGWGTGLKLGSDSVGIKYNTHRALGITLFCLGTLQVFALLLRPNKDHKIRIYWNIYHYAVGYSTIIISIINVFKGFDALETSVGDRYNDWKHAYIGIIAALGGIAVLLEAYTWIVVLKRRNSENKTAHGVNGTNGYGSRGQQV

SEQ ID NO: 243756 - protein, 63 aa, Glycine max
  Clone ID: PAT_MRT3847_62138C.1.pep
SPRQKKPSRFKSKLKAFNSRSRKKWPIFSKKKTYPLFPPGVPPPFWHCMPLGKKKPQQIPGKT

SEQ ID NO: 243757 - protein, 321 aa, Glycine max
  Clone ID: PAT_MRT3847_62139C.1.pep
MAELNTLVVRKPCFGLPTGCTQSLSAYIYLKFAQIPFQLDFHLNNPHSDQIPYFEVGDSVAYNNEKEGIIECLKKDVGVVDLDSGVSSLPEWISTKAILTTWLADALTYELWLGCEGSSAYSIYYPDLPWPLGKILSWKKALWVKLKHGITNDNAEVKKEEIYERAKSAYDALSSCLGEQNYLFENRPSSLDAIFLAHGLVVLHALPESSMLRIKFSEHANLVRYVQQCKTELIDAAPSPSSAPQFHTDATSSASKSHSSSKPKSRPRRPSTRGQNTFWWHAWLLVVAPSLAGLLFLTLMSSLVVAVVVFADDDGSYDYDE

SEQ ID NO: 243758 - protein, 52 aa, Glycine max
  Clone ID: PAT_MRT3847_6213C.1.pep
YHMFYALLAVFSHQVENVLKFIEKWTAYFMRAWGLMPLPYWPWTVVIATNIL

SEQ ID NO: 243759 - protein, 71 aa, Glycine max
  Clone ID: PAT_MRT3847_62140C.1.pep
FNCSILTFGPHAVYYPATRSSEYDTLGTSIKVAAAYLATALVKIIWLATSIKVSERDRYDPDQEFVKALTG

SEQ ID NO: 243760 - protein, 56 aa, Glycine max
  Clone ID: PAT_MRT3847_62141C.1.pep
KTQIFRLQLKCRSLSRAKLTLAITLPHKNLILSPDMSEFIERYQLSKLIKPSRCIS

SEQ ID NO: 243761 - protein, 161 aa, Glycine max
  Clone ID: PAT_MRT3847_62142C.1.pep
GNLALEAKNSSPGFMNSDYSEAHSVTSEVSHLAYTDPLLGEMSIIENMNEEAFIDLLPIEMERIEKEKEEAFKIHEQKILQLQSDYEKEVEKLSVKYKMLLQNVNTEVALKRTELETQCELVLRNKVLAQVWTHNLDSCEGDVVQCSEQEAMPSSHKTAQD

SEQ ID NO: 243762 - protein, 50 aa, Glycine max
  Clone ID: PAT_MRT3847_62143C.1.pep
THVELYRIVIQSRLISQFAHGYDPQKPLHRHPCKNLNRHLIGENPISSHS

SEQ ID NO: 243763 - protein, 98 aa, Glycine max
  Clone ID: PAT_MRT3847_62144C.1.pep
MASHYSCIILAFVIAISFSSIDMALASRNLLQTTLPTLPQGNVPPLPVFPNLPLPPFSFPNIPIPKIPNIPNIPSNPIIPTIPTIPFLSPPPSTTTTP

SEQ ID NO: 243764 - protein, 73 aa, Glycine max
  Clone ID: PAT_MRT3847_62145C.1.pep
VLNGNPYNRKCDVYSFGICLWEIYCCDMPYPDLNFSEVTSAVVRQNLRPEIPRCCPSALAKVMKRCWDANPDK

SEQ ID NO: 243765 - protein, 90 aa, Glycine max
  unsure (1)..(90): unsure at all Xaa locations
  Clone ID: PAT_MRT3847_62146C.1.pep
MEKKRLDDYEPGPVPSPRALDRFGFVKQDVNTSEGLFKNRAAYEYERYREERRVRKWRRGLXGGGSDXKHYLRRKLMLLXRRIRKGSPDA

SEQ ID NO: 243766 - protein, 733 aa, Glycine max
  Clone ID: PAT_MRT3847_62147C.1.pep
MDIKTFAFAPSSPPLPVIAAAKLAGISPSIDTSLSPDSPPAFIFSDGLKLHGAYALLRYIGRVASLPNFYGQNALESSQIDEWLDYAPILSSGPAFENACKYIDEYLEKCTLLGGYSLSIADLAIWAGLAGSGKRWESLRKSKKYPNLARWFNSIVAEHGTVLNEVTSVYAGKKGLGEPTATKSKDQSVNTDKVKKVNGDVSENNKGGSKPSAEIDLPDAEVGKVRLRFAPEPSGYLHIGHSKAALLNKYFAERYKGQVIVRFDDTNPAKESNEFVDNLIKDIDTLGIKYEQITYTSDYFPELMEMAEKLIRQGKAYVDDTPREQMQKERMDGIDSKCRNNSVEENLKLWKEMIAGTERGLQCCVRGKLDMQDPNKSLRDPVYYRCNPMPHHRIGSKYKVYPTYDFACPYVDSIEGITHALRSSEYHDRNAQYYWIQEDMGLRKVLIYEFSRLNMVYTLLSKRKLLWFVQNGKVDGWDDARFPTVQGIVRRGLKIEALIQFIVEQGASKNLNLMEWDKLWTINKKIIDPVCPRHTAVIADRRVLLTLTDGPEKPFVRIIPRHKKYEAAGDKATTYTKRIWLDLADAVSLSAGEEVTLMDWGNAIVKEIEKDQDGNIIGLSGVLHLEGSVKTTKLKLTWLPEIDELVSLTLVEFDYLITKKKLEEGEDFIDVVNPCTKKETLAYGDSNMRNLQRGDLLQLERKGYFRCDLPFIRPSQPIVLYAIPDGRQQTSLK

SEQ ID NO: 243767 - protein, 171 aa, Glycine max
  Clone ID: PAT_MRT3847_62148C.1.pep
MARATNWLSFSLSPMEMLRTSEPQFLQYDAASATSSHHYYLDNLYTNGWGNGSLKFEQNLNHSDVSFVESSSQSVGHVPPPPPKLEDFLGDSSAVMRYSDSQTETQDSSLTHIYDHHHHHHHHHGSTSYFGGDQQDLKAITGFQAFSTNSGSRVDDSAFIGKAQASEFGTH

SEQ ID NO: 243768 - protein, 36 aa, Glycine max
  Clone ID: PAT_MRT3847_62149C.1.pep
FNFPIASFQILANVEQKLCAVRIQTRFGEFGISKPS

SEQ ID NO: 243769 - protein, 138 aa, Glycine max
  Clone ID: PAT_MRT3847_6214C.1.pep
MDLDLRKSGHGIGSNASLQSNLVLYSYCHSSCSWRIRFALSLKGIPYEYKAVDLSKGEQYSPEFERLNPLHYVPVLVDDNVVVSDSYAIFLHLEEKYTQKPLLPVDPQLKALNLQVASIIHSSIQPLHMLNVLKDMEK

SEQ ID NO: 243770 - protein, 130 aa, Glycine max
  unsure (1)..(130): unsure at all Xaa locations
  Clone ID: PAT_MRT3847_62150C.1.pep
KKREXXXXKKKXXXXXHTPKSNKKGXKTPSXKGETXRGQQKTRGETHFFFSXQERGNRGTAGGPXETAPPANPPGGTKRTGXGXPREEKGGXXGDXAXRDDAGGSXXKRAGRKRGRNPRAXXGXPXAGGT

SEQ ID NO: 243771 - protein, 276 aa, Glycine max
  Clone ID: PAT_MRT3847_62151C.1.pep
HASGDFGAFLAVIKLFDSSTVYLGGYDKEEKAARSYDLAALKYWGPTATTNFPVSNYSKEVEEMKHVTKQEFIASLRRKSSGFSRGASIYRGVTRHHQQGRWQARIGRVAGNKDLYLGTFATEEEAAEAYDIAAIKFRGANAVTNFEMNRYDVEAIMKSSLPVGGAAKRLKLSLESEQKALPVSSSSSSNQQQNPQCGNVSASINFSSIHQPIASIPCGIPFDSTTAYYHHNLFQHFHPTNAGTAASAVTSANANALTALPPTAAAEFFIWPHQSY

SEQ ID NO: 243772 - protein, 510 aa, Glycine max
  Clone ID: PAT_MRT3847_62152C.1.pep
MARASTNWLSFSLSPMEMLRTPEPQFVQYDAASDTSSHHYYLDNLYTNGWGNGSLKFEQNLNHSDVSFVESSSQSVSHAPPKLEDFLGDSSAVMRYSDSQTETQDSSLTHIYDHHHHHHHHHHHGSSAYFGGDHQDLKAITGFQAFSTNSGSEVDDSASIGKAQASEFGTHSIESSGNEFAAFSGGTTGTLSLAVALSSEKAVVAAESNSSKKIVDTFGQRTSIYRGVTRHRWTGRYEAHLWDNSCRREGQARKGRQVYLGGYDKEEKAARAYDLAALKYWGPTATTNFPVSNYSKEVEEMKHVTKQEFIASLRRKSSGFSRGASIYRGVTRHHQQGRWQARIGRVAGNKDLYLGTFATEEEAAEAYDIAAIKFRGANAVTNFEMNRYDVEAIMKSSLPVGGAAKRLRLSLESEQKAPPVNSSSQQQNPQCGNVSGSINFSAIHQPIASIPCGIPFDSTTAYYPHNLFQHFHPTNAGAAASAVTSANATALTALPASAATEFFIWPHQSY

SEQ ID NO: 243773 - protein, 38 aa, Glycine max
  Clone ID: PAT_MRT3847_62153C.1.pep
KIIIFFMKFKILIVFVNTCIKILNYLIKLNRESILLQT

SEQ ID NO: 243774 - protein, 94 aa, Glycine max
  unsure (1)..(94): unsure at all Xaa locations
  Clone ID: PAT_MRT3847_62154C.1.pep
NLIMSIFDEPQEVLAQHGIVRRGFHYKIAHETPLTISTIXKHIHFHCQSFSSQVRARKNKLTPAEECQFFKXLITNNNCPDLAHHFCGDHSLLW

SEQ ID NO: 243775 - protein, 59 aa, Glycine max
  Clone ID: PAT_MRT3847_62155C.1.pep
HHLNLLPSSLISMRLVYFYIHCSSLLPPYDHPSHHSHNTKPILQHDNLSYYHNNHLHQH

SEQ ID NO: 243776 - protein, 201 aa, Glycine max
  Clone ID: PAT_MRT3847_62156C.1.pep
MILRFAAAAASASASVSRISKPHNPPFLSLPHPNTLKFHNQPSHNPRNNVLLPLPSRSQRCYIRAISDATVEPEISKKEQNESPKDWKIKMLYDGDCPLCMREVNMLRERNKSYGTIKFVDIGSDDYSPEENQGLDYETVMGRIHAILSDGSVVTDVEAFRRLYEHVGLGWVYAITKYEPIAKIADSIYGVWAKYRLQITG

SEQ ID NO: 243777 - protein, 108 aa, Glycine max
  unsure (1)..(108): unsure at all Xaa locations
  Clone ID: PAT_MRT3847_62157C.1.pep
WTLTLCAIDYYCRYAATAIGLVAEVGISYRLIANNLTTQHDADAXVRSILATMVNLYDPDARVTKAFENTAEKXTVGLRNKYLSIVKDPKQAQAWIKDNLLPYLRAAK

SEQ ID NO: 243778 - protein, 126 aa, Glycine max
  Clone ID: PAT_MRT3847_62158C.1.pep
NSFSSKASHSLNIMANSKLGFMVSAIFLSLMIFHGTFSASGKATEIGHKGARVTTHKNIIEEIAKVAEYTATWHRHTLEFEASTAPETRNPQYDMVTNDFQPTDPGHSPGAGHSSPHANIVSISKP

SEQ ID NO: 243779 - protein, 72 aa, Glycine max
  Clone ID: PAT_MRT3847_62159C.1.pep
GTVLLDPLGWFCYGVDNLIYMNKGYVWILLGSEWSLQCCQPLLEVINHCYLRPCVCVPTLQVTSAAQLARTV

SEQ ID NO: 243780 - protein, 136 aa, Glycine max
  Clone ID: PAT_MRT3847_6215C.1.pep
ARGGGLLVGIRRTTLFSPGKGGDVGTRIKVDEEEEEEEEVREVFSRDGRGKLSAKVVAEAAELAARSMPFEVVYYPKGGWSEFVVKTEAVNEAMSVEWSHGMKVKIATETDDSSRVSWCQGTVGNQENVCLFHFNC

SEQ ID NO: 243781 - protein, 67 aa, Glycine max
  Clone ID: PAT_MRT3847_62160C.1.pep
GEKKNLVLFFEKAIGDKKKIIGGLTAGVFIRAHQLCTNGSEVLWSKILNSSFPRRDPRVPKNLEFNF

SEQ ID NO: 243782 - protein, 116 aa, Glycine max
  unsure (1)..(116): unsure at all Xaa locations
  Clone ID: PAT_MRT3847_62161C.1.pep
LNECLLYSRYETCLSTDDAGPIAEKLXLTNLFWDXDLPRTREGFYTFKGSLXASHVIRRAFAPHAXVIWMETGRPNVIDCTQLSEGDMSXLPEMMLTYNLSTFFNXDAFVMSDEQM

SEQ ID NO: 243783 - protein, 330 aa, Glycine max
  Clone ID: PAT_MRT3847_62162C.1.pep
MQRFVDNVLAVTKESVKTFTYESLNNVATVINGVSALVLTLLPGKVSILEGIQGWELRPTLRGPRFPRWMDKGVSSFNHFIHELSVDSDVSSLEYSSAEDSDDGYEEYPESPSSQCSRASKPNWILAPIHFLLGIPFRLFHLAYSGSRLSEPPVICGNEHPSQPHFSNRVQSLKDQIIHRTTDRRRGIIEDLHLATEIFIEAVFDVVHKAIHLLLSPSEAFGTLSRLFSSHERRILVDNDVVEEASTSSDTLGENEPTPTDRNTSYRSSLNTDARTCQDVITELGYPYEAIHVITADGYVLLLERIPRRDARKAVYLQHGVFDSSMGWVS

SEQ ID NO: 243784 - protein, 47 aa, Glycine max
  Clone ID: PAT_MRT3847_62163C.1.pep
GPLQTTRVGGVLALILSRFTYHGYAFHFMRRCMFAQSKHYLTLSSIQ

SEQ ID NO: 243785 - protein, 100 aa, Glycine max
  unsure (1)..(100): unsure at all Xaa locations
  Clone ID: PAT_MRT3847_62164C.1.pep
XXXXXAXXXXXXXXXXXLXXXXXXXXXXXXXXXXXXRVLXXXVXXXGXXXSXXXXXVXVXGXAXXXGXRXXPWXLCGXXXXXCXAXXGGGXXXXAGVGXV

SEQ ID NO: 243786 - protein, 64 aa, Glycine max
  unsure (1)..(64): unsure at all Xaa locations
  Clone ID: PAT_MRT3847_62165C.1.pep
GFPEFVRVEPLFTPPKVSGFVVDVFXQVLKALPFSVSYEFVPLENYGALAGPIANNQVHGVFCS

SEQ ID NO: 243787 - protein, 129 aa, Glycine max
  unsure (1)..(129): unsure at all Xaa locations
  Clone ID: PAT_MRT3847_62166C.1.pep
LLVRPRVRPHGRKILTYSASDCRTAMVSKNIKLYATAMQAGAIEIMIESLLSLDCNRGGAMLLVDSYHTNPEKAICXIVVAPYRGGRPIRMDTFSNTIVQIEPDMNSWFKILSPTTNGEFVQGKESPNG

SEQ ID NO: 243788 - protein, 68 aa, Glycine max
  Clone ID: PAT_MRT3847_62167C.1.pep
AKLVLLCFCVKLQVGIVLMCKVTQYVSIYLMYLILTCCDHCKKVNPSLFLAPQALAARQLQNQGLDQS

SEQ ID NO: 243789 - protein, 232 aa, Glycine max
  unsure (1)..(232): unsure at all Xaa locations
  Clone ID: PAT_MRT3847_62168C.1.pep
MAGGVIRAVIYGGNSNLIAPNSSFKSSIIAKKDGADSTGSNSLRVLAFVGAGVSGFLGFATTAFADEAEHGLACPSYPWPHKGILSSYDHASIRRGHQVYQEVCASCHSMSLISYRDLVGVAYTEEEVKAMAAEIEVVDGPNDEGEMFTRPGKLSDRFPQPYANEAAARFANGGAYPPDLSLVTKARHNGQNYVFSLLTDYRDPXAAVSIRERIALYSLVFLDGLLAMPKNA

SEQ ID NO: 243790 - protein, 125 aa, Glycine max
  Clone ID: PAT_MRT3847_62169C.1.pep
MTMADDAQHEHTFESADAGASQTFPMQCSALRKNGFVVIKNRPCKIVEMTTSKTGKHGHAKVHLVAIDIFTSKKLEELCPSTHNMNVPNVRRQEYQLLDVTDDGFLSFMSDDGTTQDDVKLPDGE

SEQ ID NO: 243791 - protein, 103 aa, Glycine max
  Clone ID: PAT_MRT3847_6216C.1.pep
MTAALAAARAAATMASGSSGLAAARLLSRAFLLQQNGIRHCSYTTSRKHLYVDRNTKIICQGFTGKQGTFHSQQALEYGTKLVGRTTPGKGGKTHLGLPVFNT

SEQ ID NO: 243792 - protein, 153 aa, Glycine max
  unsure (1)..(153): unsure at all Xaa locations
  Clone ID: PAT_MRT3847_62170C.1.pep
MVNTSPKMLSLWKRAIQSSKALLLDEFNLGPDALLEKVEEFDTVSXALEHSHPAFSLSSKENDAEGSSANFENSYSSDGLHTEEDYAKFEDSYSSDALQTEEEEEEEEDEDEDEDEDYYDDEDDDLYAVDTSAQPGSLPVDMIVKKLKQRPLE

SEQ ID NO: 243793 - protein, 36 aa, Glycine max
  Clone ID: PAT_MRT3847_62171C.1.pep
HDLINILDTLVMIGILCIFCCFSLLFRLQLFLFFIP

SEQ ID NO: 243794 - protein, 126 aa, Glycine max
  unsure (1)..(126): unsure at all Xaa locations
  Clone ID: PAT_MRT3847_62172C.1.pep
MQIXXKTLADLTMALEYXSINTIDNVKAMIQDKECIPPDQQCMIFAGKQLVNGRTLAYYNIYNELTLYFVLKLCXLSLNNLSLLFWLCKFNHYKMICRXAYSPLHPIAFNCFTKNFCNINYLRSYN

SEQ ID NO: 243795 - protein, 177 aa, Glycine max
  unsure (1)..(177): unsure at all Xaa locations
  Clone ID: PAT_MRT3847_62173C.1.pep
MRWVKRAMFVGRALRSNSNSGVCSHGHGCLTPSNPNPNPNPSVSDTGFRYLSAYAADTYLVQDALTKAFKPKELASFNTXACPFCNKXFLDYYDIPFKAGEVNPINKKEIKWSDYKKVPILTVDGQQMVDSSDIIDKLIKRIHPDYDLYAQDENKLRYYVLLIILRLLGCIHTSGYI

SEQ ID NO: 243796 - protein, 366 aa, Glycine max
  Clone ID: PAT_MRT3847_62174C.1.pep
MGNSHGHRHRKHGNSVPPNTVPPPYKYNPHPTTSNSTMLSLPYTHVDTTLRSLAAQAEGFGRFAIGGLHGPLHPVTSLADDGPGSLRDACRRKEPLWIVFEVSGTIQLSSYLNVSSHKTIDGRGQRIKLSGKGLRLKECEHVIICNLEFEGGRGHDVDAIQIKPNSKHIWIDRCTLSDFDDGLIDITRESTDITISRCHFSQHDKAMLIGADPTHVGDRCMRVTIHHCFFNGTRQRQPRVRFAKVHLYNNYIRNWGIYAVCASVESQIFSQHNIYEAGQKKVAFKYLTEKAADKEVGATGTIRSEGDIFLNGAQKGLMTEDVGCNMFHPSEHYPSWTVEAPTDDLKQILHHCTGWQSLAKPADQTL

SEQ ID NO: 243797 - protein, 97 aa, Glycine max
  unsure (1)..(97): unsure at all Xaa locations
  Clone ID: PAT_MRT3847_62175C.1.pep
SXXLVXXPPXXCRLXDRPILFIPSRKNHAHXVPENNNSNRKYPDKKRIYLYETPTQFYGKLRFSRGIILDHLTKKYLKKLQQLINQLEKEQSKFGGL

SEQ ID NO: 243798 - protein, 498 aa, Glycine max
  Clone ID: PAT_MRT3847_62176C.1.pep
MVKSCCVMCLCLILLHIFLRFVPIQSAPESAIVTQIPGFSGTLPSKHYAGYVTVDKSHGRNLYYYFVESEGKPSEDPVVLWLNGGPGCSSFDGFIYEHGPFNFEAAKTRGGLPTLHLNPYSWSKVSSVIYLDSPAGVGFSYSENKTDYITGDIKTATDSHAFLLKWFELYPEFLSNPFFIAGESYAGVYVPTLASEVVKGIDAGVEPKLNFKGYMVGNGVTDEQIDGNALVPFVHGMGLIPDELFEEVNRECNGNFYDPTSANCSSKLSKVDELVDEINIYNILEPCYHGTEAEKITESYIRMPSTFRKLGETERPFPVRKRMFGRAWPLRAPVRDGIVPTWPQLMNSKSAPPCTDDEVANSWLNNEAVRTAIHTAQKSVVSSWDLCTDRIYFDHDAGSMIKYHKNLTSKGYRALIFSGDHDMCVPYTGSQVWTRSVGYKIVDEWRPWSSNGQVAGYTQGYDKNLTFLTVKGSGHTVPEYKPREALDFYKRFLAGLPI

SEQ ID NO: 243799 - protein, 74 aa, Glycine max
  Clone ID: PAT_MRT3847_62177C.1.pep
WLDTVGNIECDRLMDIQILLSCNLGNNKYVSGACCLHPNDIKSTFYLKKKIEMVQKFIFRVPTRIKKKHIPIIQ

SEQ ID NO: 243800 - protein, 143 aa, Glycine max
  Clone ID: PAT_MRT3847_62178C.1.pep
CNGNFYDPTSANCSSKLSKVDELVDEINIYNILEPCYHGTEAEKITESYIRMPSTFRKLGETERPFPVRKRMFGRAWPLRAPVRDGIVPTWPQLMNSKSAPPCTDDEVANSWLNNEAVKTAIHTAQVRFLVRFLYFGYKNTKL

SEQ ID NO: 243801 - protein, 49 aa, Glycine max
  Clone ID: PAT_MRT3847_62179C.1.pep
LPYRVHLNGCEGGALKLLSSVLITHQLIDNATMVMHIELQGLFGRCLNL

SEQ ID NO: 243802 - protein, 147 aa, Glycine max
  unsure (1)..(147): unsure at all Xaa locations
  Clone ID: PAT_MRT3847_6217C.1.pep
GFPILGVEWQKMENPELRMSMGMGPDQKGVRIRRIEPTAPESHVLKPSDVILSFDGVNISNDGTVPFRHGERIGFSYLVSQKYTGDRALVKVFRNLQILEFNVKLATHKRLVPAHIKGRPXSYYIIAGXCFTACSVPYLRSEYGKDY

SEQ ID NO: 243803 - protein, 104 aa, Glycine max
  Clone ID: PAT_MRT3847_62180C.1.pep
YVNMIASIFRENLELEFPEEFRSHFLWLQDRPYKKTSNCKSSMNNSASLFLANVELEFPEEFRSHFLWFQDRPDMKTNHSNSYMNMIASLFLENVELEFPEGIV

SEQ ID NO: 243804 - protein, 252 aa, Glycine max
  Clone ID: PAT_MRT3847_62181C.1.pep
DAHEFLNFLLNELVDILEKEAQAAKTDQETSPPSEKAVNGPKNGQANGVHKEPLVTWGILTNETRCLQCETVTARDETFLDLSLDIEQNSSITSCLKNFSSTETLNAEDKFFCDKCCSLQEAQKRMKIKKPPHILVIHLKRFKYMEQLGRYKKLSYRVVFPLELKLSNTVEDADIEYSLFAVVVHVGSGPNHGHYVSLVKSHNHWLFFDDENVEMIDESAVQTFFGSSQEYSSNTDHGYILFYESIGSGNRS

SEQ ID NO: 243805 - protein, 102 aa, Glycine max
  unsure (1)..(102): unsure at all Xaa locations
  Clone ID: PAT_MRT3847_62182C.1.pep
GKERRPGPDRNARADPRHRLTKARTTRPTGRETRGPPSQHEHGAXKEHTPEGRTHQKTRKKTQETEPAQTHKQDRRAPKTAPQRRGPPRQTGRHATKGRDRE

SEQ ID NO: 243806 - protein, 145 aa, Glycine max
  unsure (1)..(145): unsure at all Xaa locations
  Clone ID: PAT_MRT3847_62183C.1.pep
THGVGKETLDLFNEMQKGAVKPNDITFLSVISACSHSGFVEEGLLLFKSMQEDYYLEPTMDHYSAMVDLLGRAGQLDDAWNFIXEMPIKPGISVLGAMLGACKIHKNVELGEKAAXKLFKLDPDEGGYHVLLANIYASNSMWDKV

SEQ ID NO: 243807 - protein, 44 aa, Glycine max
  Clone ID: PAT_MRT3847_62184C.1.pep
YTGYRRTYSNTRLYPQVAHFIRIFIPVSASSNVNIKKKYWNRYA

SEQ ID NO: 243808 - protein, 161 aa, Glycine max
  unsure (1)..(161): unsure at all Xaa locations
  Clone ID: PAT_MRT3847_62185C.1.pep
EAAXTKXVVGXYGYXXXEYAXXGLFSVKSDVFSFGVIMLEIIIGKRNSGFYMTELAPTLLAYAWRLWNEGKELDFVDPMLLESCDASEIVRCVHIGLLCVQENPEHRPTMSNVVVLLGSESMVLPQPRQPPLSLGRVLRADPSTTTNPSVKEMIFSDILPR

SEQ ID NO: 243809 - protein, 110 aa, Glycine max
  unsure (1)..(110): unsure at all Xaa locations
  Clone ID: PAT_MRT3847_62186C.1.pep
VSPRWLRIVENANGTKEDVVTIQSTINLHKRLHXGCTFKNTAPKAMQEIQKFAHNAMGTNDVTVDVKLNTFVWSHRIKTLPQMIKVLTARPRNDNYNAKEDLYSLVTVVE

SEQ ID NO: 243810 - protein, 122 aa, Glycine max
  Clone ID: PAT_MRT3847_62187C.1.pep
PERSARGAEMPATAEAPPLVAVVNNELYAADYADTEVKKYDKERRVWVTIGRLPERAVSMNGWGLAFRACGDMLIVISGPRTHGEGFIELNSWVPSEGPPQWNLLARKRSGNFVYNCAVMGC

SEQ ID NO: 243811 - protein, 126 aa, Glycine max
  Clone ID: PAT_MRT3847_62188C.1.pep
GNLHDKNGEPARPRRPPPAPAPTPGNPAPPAPDNPALADNPAPTPGNPAPPTPCNPAPTPGNPAPPTPCNPAPTPGNPALTPTPGNPPPIPTPTPCNPVANTSEEIRSNMANTPRIGNICILEVIF

SEQ ID NO: 243812 - protein, 103 aa, Glycine max
  Clone ID: PAT_MRT3847_62189C.1.pep
VVGFTFLGKYVHFIPVVRAKNHGNPKKTKPQGERRNQKATTPPSQKKKTPTPRTKKARRQRRQKTKPRKQEGKKKKKLNPREGKGKAKARHKQNRITGYPTLL

SEQ ID NO: 243813 - protein, 516 aa, Glycine max
  Clone ID: PAT_MRT3847_6218C.1.pep
PRDHWWRRLERCSSRLADSKGDCTAAVKVVPSMEAVVKVFCVHTEPNFSLPWQRKRQYSSSSSGLIVGGRRVLTNAHSVEHHTQVKLKKRGSDTKYLATVACYPYGDGSAMLTVSDDEFWEGVSPVEFGDLPALQDAVTVVGYPIGGDTISVTSGVVSRMEILSYVHGSTELLGLQIDAAINSGNSGGPAFNDKGKCVGIAFQSLKHEDVENIGYVIPTPVILHFIRDYEKNGAYTGFPILGVEWQKMENPDLRMSMGMGPDQKGVRIRRIEPTAPESHVLKPSDVILSFDGVNISNDGTVIIHYIAATFDLVRENIQGGGPIRHGERIGFSYLVSQKYTGDRALVKVFRNLQILEFNVKLATHKRLVPAHIKGRPPSYYIIAGFVFTAVSVPYLRSEYGKDYEFDAPVKLLEKHLHSMAQSVDEQLVVVSQVLVSDINIGYEEIVNTQVLAFNDKPVKNLKSLANIVESCDDDYLKFDLEYQQKVVLKTSTAKAATLDILTTHCIPSAMSDDLKT

SEQ ID NO: 243814 - protein, 41 aa, Glycine max
  Clone ID: PAT_MRT3847_62190C.1.pep
MLLKLKLGQFCTFQQPQQTEAGNALLQLGFQLQKSIPYYYS

SEQ ID NO: 243815 - protein, 87 aa, Glycine max
  Clone ID: PAT_MRT3847_62191C.1.pep
LEKGVFRFVYRTATPWLTVLMHGPGRNKYSHRYMDGETTRVMQEPCPAQLTDDVEPAGHVHAYERSEPCTTSSCNIANGSCAPVNDK

SEQ ID NO: 243816 - protein, 51 aa, Glycine max
  Clone ID: PAT_MRT3847_62192C.1.pep
WVPNHSSCEVICSCKKTSLNLKLYRDVFNSRPKKKKKERPPPIVLVDRRGN

SEQ ID NO: 243817 - protein, 236 aa, Glycine max
  Clone ID: PAT_MRT3847_62193C.1.pep
MSLTSKLVIPKMGTPTLGLVLVLLLSFLTWPASVSSSLPMSLRRQASILVSLKQDFEANTDSLRTWNMSNYMSLCSGTWEGIQCDEKNRSVVSLDISNFNLSGTLSPSITGLRSLVSVSLAGNGFSGVFPSDIHKLGGLRFLNISGNAFSGDMRWEFSQLNELEVLDAYDNEFNCSLPLGVTQLHKLNSLNFGGNYFFGEIPPSYGDMVQLNFLSLAGNDLRGLIPPELGNLTNLT

SEQ ID NO: 243818 - protein, 45 aa, Glycine max
  Clone ID: PAT_MRT3847_62194C.1.pep
TFGGPKLWAYPTAQRAILQKNTIEGNRRGLLNRASHMTIRACIHI

SEQ ID NO: 243819 - protein, 40 aa, Glycine max
  Clone ID: PAT_MRT3847_62195C.1.pep
VSDDRHRYRLAMGFIPLSPPQRNHAFQNFPLLCCRIRLCL

SEQ ID NO: 243820 - protein, 55 aa, Glycine max
  Clone ID: PAT_MRT3847_62196C.1.pep
DNYTIMISDHKLVHKHYNVIQKSKLKSEHNYLTEEMHPMNAKDVLLPQSIYLRGS

SEQ ID NO: 243821 - protein, 55 aa, Glycine max
  unsure (1)..(55): unsure at all Xaa locations
  Clone ID: PAT_MRT3847_62197C.1.pep
EKEEEGGFTRLASXFCDCEPLTDDELGAIEAWCCSYKKRPFNDHTYTPCRRLPKS

SEQ ID NO: 243822 - protein, 539 aa, Glycine max
  Clone ID: PAT_MRT3847_62198C.1.pep
MGFFGTILGFLGFGVGISIGLVAGYFLFIYFQPTNVEDPEIKPLAEQEQETLQRMFPEIPLWIKNPDFDRLDWLNKFVEYMWPYLDKAICKTAKNIAKPIIAEQIPKYKIDSVEFETLTLGSLPPTFQGMKVFVTDEKELIMEPSVKWAANPNVTVSVKAFGLKATVQVVDLQVFLLPRITLKPLVPSFPCFANIYVSLMEKPHVDFAIAPIGADLMSIPGVYRIVQELIKDQVANMYLWPKTLEVQVLDMSKALKRPVGILHVKVLQAIKLKKKDLLGASDPYVKLKLTEDKLPSKKTTVKHKNLNPEWNEEFNMVVKDPDSQVLEINVYDWEQVGKHDKMGMNVIPLKEVSPEETKRFSLDLLKNMDPNDVQNEKSRGQIVVELTYKPFKEEDLGKGFEETQTVPKAPEGTPAGGGLLVVIVHEAQDVEGKYHTNPHVRLIFRGEEKKTKRIKKNRDPRWEDEFQFMVEEPPTNDRLHVEVVSTSSRNLLHQKEPLGYIDINLGDVVANKRINEKYHLIDSKNGRLQIELQWRTLEA

SEQ ID NO: 243823 - protein, 45 aa, Glycine max
  Clone ID: PAT_MRT3847_62199C.1.pep
RNCPVNTFQLLTINHELFLLLQIVLKIISLKMLLDCLSVHILYYV

SEQ ID NO: 243824 - protein, 85 aa, Glycine max
  unsure (1)..(85): unsure at all Xaa locations
  Clone ID: PAT_MRT3847_6219C.1.pep
IITRSVNSFIWPCAIEEEWMEIQLEQQQESWSETSSTGSRSTRXGFXGPMSGPLVTPNNKKSSKKSTRFKDQEEEDFVEITLDCA

SEQ ID NO: 243825 - protein, 56 aa, Glycine max
  Clone ID: PAT_MRT3847_621C.1.pep
HAQPPTNHTNSASSSGLRRTQIKPSLERQTRSRRHVFLRCLRRRLERRLYFQSLAR

SEQ ID NO: 243826 - protein, 139 aa, Glycine max
  unsure (1)..(139): unsure at all Xaa locations
  Clone ID: PAT_MRT3847_62200C.1.pep
RYSMTELALAWTKPSLGERXPGTAGKQYTWIHDKRITDEESVNENTETRDLCFKSPQMFKEYCKLSEATQESFTEDGSFNTGDADATNNEGYXLTLRRHNADIINAEGNKLFAVEIEEGIIKHPGVXQCCGISLPDKHY

SEQ ID NO: 243827 - protein, 69 aa, Glycine max
  unsure (1)..(69): unsure at all Xaa locations
  Clone ID: PAT_MRT3847_62201C.1.pep
SGDPPYFFFVFATFGPPNASVCSSPSQFINWDGVLLTEAXFIVISCLFLQGNFPLPRFNFLLGKKERVG

SEQ ID NO: 243828 - protein, 72 aa, Glycine max
  unsure (1)..(72): unsure at all Xaa locations
  Clone ID: PAT_MRT3847_62202C.1.pep
MGTMEDLPASVLAEILSRFTDTTDVARCRVVSKXLNAASYEVHSLNLVCSMSRYLKSRSPETKHLVTPFKTV

SEQ ID NO: 243829 - protein, 36 aa, Glycine max
  unsure (1)..(36): unsure at all Xaa locations
  Clone ID: PAT_MRT3847_62203C.1.pep
LDSASGEIPKSGGVSSTPSMRGTVCYVAXECGXGGG

SEQ ID NO: 243830 - protein, 34 aa, Glycine max
  Clone ID: PAT_MRT3847_62204C.1.pep
KNNIITSMQSSNDRMNHMSIPTKEQVHIYKSKIN

SEQ ID NO: 243831 - protein, 320 aa, Glycine max
  Clone ID: PAT_MRT3847_62205C.1.pep
MSNLVQIRVAADASDGFDSPAKQKAANRSSYSNRPFLSLRRAKQFLGAAKFKLFLVLFALSIVVFVSSRLSSWMGWNPHHSSSVSSTSRGGYTVLINTWRHKSLLKQTVAHYASCRSAEAIHVVWSESEQPSERLKTYLNKIVVLKSQKAHKPNFRFDINADGEPNSRFKPIKNLKTDAIFSVDDDVVVPCSTLDFAFSVWRSVWWMGTYSMVRTHWLYFHRKYLDLYTHEMSPSIQDYVSRERTCEDIAMSLYVANATSGPPIWVKGKIYEIGASGISSLRGHSNRRNKCLNDLISLYGTLPLVSTNVKAVSARKEWLW

SEQ ID NO: 243832 - protein, 352 aa, Glycine max
  Clone ID: PAT_MRT3847_62206C.1.pep
MSNLVQIRVAADAGDGFDSPAKQKAANRSAYSIRPFLYLRRAKQFLGAAKFKLFLVLFALSVIVFVSSRLSSWRGWNPHQSSSVSSTSRGGYTVLINTWRQKSLLKQTVAHYSSCQSVDAIHLVWSESEQPSEKLKTYLNKIVVLKSQKAHKPNFRFDINADGEPNSRFKPIKDLKTDAIFSVDDDVVVPCSTLDFAFSVWQSAPFTMVGFVPRMHWLDKEQNNAAYYRYGGWWSVWWMGTYSMVLSKAAFFHRKYLDLYTHEMSPSIQDYVSRERTCEDIAMSLYVANATSGPPIWVKGKIYEIGASGISSLRGHSNRRNKCLNDLISLYGTLPLVSTNVKAVSARNEWLW

SEQ ID NO: 243833 - protein, 87 aa, Glycine max
  Clone ID: PAT_MRT3847_62207C.1.pep
PSIQDYVSRERTCEDIAMSLFVANATSGPPIWVKGKIYEIGASAISSLRGHSHRRSKCLNDLISLYGTLPLVSTNVKAVSARNEWLW

SEQ ID NO: 243834 - protein, 34 aa, Glycine max
  Clone ID: PAT_MRT3847_62208C.1.pep
KVSSNVLSIKRNLMNAEASYDNFGREARMQPYCT

SEQ ID NO: 243835 - protein, 31 aa, Glycine max
  Clone ID: PAT_MRT3847_62209C.1.pep
KGHSCLIIYSVLVGNQHAPCGHASYLFHIKP

SEQ ID NO: 243836 - protein, 149 aa, Glycine max
  unsure (1)..(149): unsure at all Xaa locations
  Clone ID: PAT_MRT3847_62210C.1.pep
MPPSPVEENVLAMNYYTESCSEAENIVKEQDXLLYKRXRNTACSRLRNIFHXCAGDSCDAKLMLXARYRAXSDKETDRSYGMRNYRNSETIHEAXEGECPRAELCADMRDLSDEDGLGSLRRPHIPIHSRRKDGXRSIYRVDYHFLPDH

SEQ ID NO: 243837 - protein, 55 aa, Glycine max
  Clone ID: PAT_MRT3847_62211C.1.pep
HTLHLIIPKLPILPLKRTQTKNFPTLHFPTPVTTTLHQTRLTLSPLNHTPPHTPK

SEQ ID NO: 243838 - protein, 69 aa, Glycine max
  Clone ID: PAT_MRT3847_62212C.1.pep
MVADHYSPSLFSVAPMMDWTDYHYRTLARLISKHAWLYTDMLAAETIVYQKGNLDRILAYSLDHHPIVP

SEQ ID NO: 243839 - protein, 66 aa, Glycine max
  Clone ID: PAT_MRT3847_62213C.1.pep
LSIAQLTPTEMSTYKDPLTNLNNFQETKQTQRKRSQKQKKKKKLHRRICAELLIKPTVSAVSFNEP

SEQ ID NO: 243840 - protein, 45 aa, Glycine max
  Clone ID: PAT_MRT3847_62214C.1.pep
INSLSPRFVNGNGKVIGAIDMKIWIPITIMTFLSILDIFVVEHAH

SEQ ID NO: 243841 - protein, 73 aa, Glycine max
  Clone ID: PAT_MRT3847_62215C.1.pep
QFFHSNNTRNLLATTNSSNYWDILKQKLVLGNRKNIYTLGWTKGPCPVKGALIRLGEGGPPNLRGGFKAIEIL

SEQ ID NO: 243842 - protein, 82 aa, Glycine max
  Clone ID: PAT_MRT3847_62216C.1.pep
ISSRFLKMAPKELPRPIREHACFVMTILSECYDPTTFFGRTFEPQEQRTLSRMKHNTPILHRYGSPVKKKTNLVAPCVPGKP

SEQ ID NO: 243843 - protein, 108 aa, Glycine max
  Clone ID: PAT_MRT3847_62217C.1.pep
IVSKRRNGRLIRILHLLYLTHTITQFLPKGGHPSTSQSPPQLILDRLLYAYQPFLSSTPLQPPPSTFIAAPCVTLLSPPNSSQHTSRNHIMQSPPCPMSELTPTTCFS

SEQ ID NO: 243844 - protein, 112 aa, Glycine max
  Clone ID: PAT_MRT3847_62218C.1.pep
MPEVRIIAKNFMDMVASMPAMKLDKLYENGFICEAILRSLLPLAKKYVIQMLHIDVSVAAKLLEEWVLPGGVSKHRVAIDRLVQLRVFLEAVDRMKRLTKLIQHFREVSKNF

SEQ ID NO: 243845 - protein, 60 aa, Glycine max
  unsure (1)..(60): unsure at all Xaa locations
  Clone ID: PAT_MRT3847_62219C.1.pep
IKKKKKITFSPNLSQTLPCEFLFLXSFYFFRQILPHFFFFPIHINHHFFGVLFFCQGVAI

SEQ ID NO: 243846 - protein, 111 aa, Glycine max
  Clone ID: PAT_MRT3847_6221C.1.pep
LERFGINCNLKPSSESQPSVSTEACDETDNVLAQLNNETSDNMDESSIPNGIHECSPREDHTLPILKKILDLSTKIQNLKKQHVALSNQVKLTTESFPSLNVLKICSASWC

SEQ ID NO: 243847 - protein, 221 aa, Glycine max
  Clone ID: PAT_MRT3847_62220C.1.pep
MASTTPSADSASADEVTAKAVNKRYEGLVTVRTKAIKGKGAWYWPHLEPMLLHNTETGLPKAVKLRCSLCDAVFSASNPSRTASEHLKRGTCPNFNSAAKPISSVSSSSAVAAMALSPPSSPTNHNHRKRISSSYDAPSQQQQPNLVLSGGKDDLGALAMLEDSVKKLKSPKTSAGPTLTKSQVDSAFDYLADWVYESCGSVSFSALEHPKFRAFLNQVGL

SEQ ID NO: 243848 - protein, 63 aa, Glycine max
  Clone ID: PAT_MRT3847_62221C.1.pep
GILPSQFKFLGFLPEFLDPIPWREEPPFFTTPHFYFSPGYSFLSPKPKAFKMAYLNPFGKEPP

SEQ ID NO: 243849 - protein, 80 aa, Glycine max
  Clone ID: PAT_MRT3847_62222C.1.pep
FSARGGRPGNSPREPGGKPGPPKGNPKKRGENKGQKQSPKKKRPGKKNPQTKRPQRKNEKPWGAKGGRPPKKMGNRSGPL

SEQ ID NO: 243850 - protein, 109 aa, Glycine max
  unsure (1)..(109): unsure at all Xaa locations
  Clone ID: PAT_MRT3847_62223C.1.pep
VFAQDKDLILNSSSFKDSFSDNEGXSHPYAALRFLRDHFPTSDHSPXGNYPHYSXKDVENPVYNDTLPHHILXHHYYVQYHLHLQLLEAADYARKKGVILKGDLPIGVD

SEQ ID NO: 243851 - protein, 68 aa, Glycine max
  Clone ID: PAT_MRT3847_62224C.1.pep
CEEGPSMGPQQTSLKHWMGLMRLRSVYSTEDKSDLNDLSTLYPENDDERNDGSVPNDGMPVFQIVLKD

SEQ ID NO: 243852 - protein, 75 aa, Glycine max
  Clone ID: PAT_MRT3847_62225C.1.pep
MAFLRAASEVLAIYTLVFTIFSPAVLEAQSLSLAAAPAPSRDGTSIDQGIAYVLMVVALVLTYLIHPFDASSHHF

SEQ ID NO: 243853 - protein, 68 aa, Glycine max
  Clone ID: PAT_MRT3847_62226C.1.pep
ISLMRASIKVEVHKLTSTYGKIMFFHFIFFSYKYDVEFRWESKYIWRTLSKQGLKGLGSIWLLERPGF

SEQ ID NO: 243854 - protein, 153 aa, Glycine max
  Clone ID: PAT_MRT3847_62227C.1.pep
NSAREVVFAYNVRESSPSRVTLLGHHSFLCGASDSPSRPLALPKHTYPFPSTKPILPNLTNTTSIGAITLRRRLAPPSPPFVSQSTHPLIVFVLLSLSFFAKFVFFLHLLPDFSSPQIIFCGSFPPPPFNFSEELNRFWGFLSSSLSFIIFSF

SEQ ID NO: 243855 - protein, 100 aa, Glycine max
  Clone ID: PAT_MRT3847_62228C.1.pep
MLWNIPKAHSGEESLFALVVMVYSFPNGFCLNFMIIGSVTKVVTIPNASLFLTGSTDADVELWDAQSTKLIHPWSKIHELHTFLQPSSRGFGGVVRVIFS

SEQ ID NO: 243856 - protein, 42 aa, Glycine max
  Clone ID: PAT_MRT3847_62229C.1.pep
QIKHANGLMVHNSFVHLWNSRLFNSHYICSLQSLRNRNDDSE

SEQ ID NO: 243857 - protein, 153 aa, Glycine max
  Clone ID: PAT_MRT3847_6222C.1.pep
MMKNVSWFWTRFGRGSSSNFSTVSIASSSSNDSVDSSIQNQNYRYDVFISFRGPDTRNTFVDHLYAHLLRKGIFVFKDDEKLQKGESISAQLLQAIQDSRLSIIVFSKQYASSTWCLDEMAAIADCKQQSNQTVFPVFYDVDPSHVRHQNGAY

SEQ ID NO: 243858 - protein, 112 aa, Glycine max
  Clone ID: PAT_MRT3847_62230C.1.pep
GHGPYGHRVAKKVRDSFPLKLNAQWDVHHKNRDRLSDHCSATGSYKSEGNGFRLVDEKTSPFDHEHEETDTMLTLRESLLKACKIMDKELKLHPDIDCFCSGTTAVTLVKQG

SEQ ID NO: 243859 - protein, 100 aa, Glycine max
  Clone ID: PAT_MRT3847_62231C.1.pep
PTLRRCRNSKGGVVYSNQKGRGAVFCECVTQTAICSRHIERGLGLEGLTLRLFLFSFDPSLIPNPAIQPPDPYTYIYTYLNAYLPSYGFKAHTLGAHGLA

SEQ ID NO: 243860 - protein, 106 aa, Glycine max
  Clone ID: PAT_MRT3847_62232C.1.pep
PPELQQQWHLKYGCPKANIVSSRHYMNLMHPTFRYADTDPALPRPIHNRPPHSPVCQHGIPTCLPAAVFHTKILIKPSMVRAPPAHENHARRPLEVGGSRSCARAE

SEQ ID NO: 243861 - protein, 76 aa, Glycine max
  unsure (1)..(76): unsure at all Xaa locations
  Clone ID: PAT_MRT3847_62233C.1.pep
ALMCLQDQCLVETQYLLYQASATQVMLCGSCAPYPIRSPDAHQCXSVVRVSVNNYLSFERNIVMKRTRGVAPAIQD

SEQ ID NO: 243862 - protein, 68 aa, Glycine max
  Clone ID: PAT_MRT3847_62234C.1.pep
LIKNISINRTRYHFFFGRLKIYILLIKKTSTSGTRDYKYKAPRCYPPTRPSQKPNNSQIPLLSSSRSR

SEQ ID NO: 243863 - protein, 56 aa, Glycine max
  Clone ID: PAT_MRT3847_62235C.1.pep
TGINPARDHLLGFGRPIYCAELLSFKHIALFGGGTTMEKREIVSHLAKLTQQEAHA

SEQ ID NO: 243864 - protein, 52 aa, Glycine max
  Clone ID: PAT_MRT3847_62236C.1.pep
NADLEADDEPWKSHRLDLKLNGQVFLNCKYGRTSPVSIHSVTVNKNQLLVVV

SEQ ID NO: 243865 - protein, 106 aa, Glycine max
  unsure (1)..(106): unsure at all Xaa locations
  Clone ID: PAT_MRT3847_62237C.1.pep
FEKKFIFTSSRMMTKPAMSAFLVVALPLLAEVGPMAEAVTCTPTELIPCLPTNTSGAKPSKACCTKLKQQKPCLCGYLKNPCXKQYCNFSYARKTVAFCGISFPTC

SEQ ID NO: 243866 - protein, 73 aa, Glycine max
  Clone ID: PAT_MRT3847_62238C.1.pep
DQGLWSQVWAGSLMQTECCLDAEGDDVDVAVAVAGAGQRSYRVNSLHRRHSACACLRESAVARADSLEREPNA

SEQ ID NO: 243867 - protein, 91 aa, Glycine max
  Clone ID: PAT_MRT3847_62239C.1.pep
LLSYNLPCPLTAERKHKRNQRHHQRHGSFYDHRNTTWTKHEKDFAQTDDETMGEIRKRGTTPNAHEQGAHEYDQHVANEILMDQNTAADKT

SEQ ID NO: 243868 - protein, 82 aa, Glycine max
  Clone ID: PAT_MRT3847_6223C.1.pep
YLFQKKNIGLPRSIIIWTKKNLQIFPGRRNPFTTPTHQKIFPFGRGQIVPQTNCCPFLNNILWETFFPFTLGTKKRVSFFPS

SEQ ID NO: 243869 - protein, 50 aa, Glycine max
  Clone ID: PAT_MRT3847_62240C.1.pep
DSCTGPSNRSQPQSALKELTNGGQVGVEQKRLLPWRDHKRWSILAELFLT

SEQ ID NO: 243870 - protein, 46 aa, Glycine max
  unsure (1)..(46): unsure at all Xaa locations
  Clone ID: PAT_MRT3847_62241C.1.pep
PLGILSMCIGTGKSTADXFESTDCTDELCNAPKVYNLNLSNDARLK

SEQ ID NO: 243871 - protein, 70 aa, Glycine max
  Clone ID: PAT_MRT3847_62242C.1.pep
LIYYSKIFYLFITNLNLQHDRLHRGYKSSYNINNHILTHTHHLLLSLFLLTHLIYIHHTITTNNTLDFIY

SEQ ID NO: 243872 - protein, 55 aa, Glycine max
  Clone ID: PAT_MRT3847_62244C.1.pep
GGFFTLQTLCNYLLFIFMNFCLSNNNKSILWRENTITLYLSHCMSPRGIQGKSYY

SEQ ID NO: 243873 - protein, 28 aa, Glycine max
  Clone ID: PAT_MRT3847_62245C.1.pep
CCIFVSKDECKREIFFNLWICLVWIFVS

SEQ ID NO: 243874 - protein, 47 aa, Glycine max
  Clone ID: PAT_MRT3847_62246C.1.pep
DVCQSFKKMVTWVILALGGWFLGGSFGGIFNCLGEQGISSFCYLKCI

SEQ ID NO: 243875 - protein, 332 aa, Glycine max
  unsure (1)..(332): unsure at all Xaa locations
  Clone ID: PAT_MRT3847_62247C.1.pep
MDREQEEMQFLGFFDIYKEASKIILSWRKIFTQITSTLILPLSFIFLIHMEISNLLFRKILINEIVMDETRRNTPQYNKLDRMISSELITLVLFKIAYFTLLLIFSLLSTSAVVYTIASIYTAKEVTFKRVMSVVPKVWKRLMLTFLCAFAAFFIYNIVTMLVMFLSIVTIGISSGGVVVLVLITVLYFIGFVYLTVVCHQASVVTVLEDSWGIRAMSKSKELIKGKMVLSLFSVFTVLXTCVSIRVLFKVMVVDGWRVSSVDKTAYGVLCFLLLSCLFLFGLVLQTVLYFVCKSYHHENIDKSALADHLEGYRGEYVPLTAKDVQLEQYQV

SEQ ID NO: 243876 - protein, 38 aa, Glycine max
  Clone ID: PAT_MRT3847_62248C.1.pep
LEPNRLEYGCEKTTDGHHIMRDMLHHLNDSFEQKIKCV

SEQ ID NO: 243877 - protein, 211 aa, Glycine max
  Clone ID: PAT_MRT3847_62249C.1.pep
IRLEVAFYSPNLFQSVGMGHDAALLSTVILGIVNLASLILSTAVVDRFGRRFLFITGGILMLFCQIAVSALLAMVTGVHGTKDISKGNAMLVLVLLCFYDAGFGWSWGPLTWLIPSEIFPLKIRTTGQSIAVGVQFIALFALSQTFLTMLCHFKFGAFLFYGGWIVIMTLFVIFFVPETKGIPLESMDTIWGKHWFWRRFVKGEVAQENLP

SEQ ID NO: 243878 - protein, 46 aa, Glycine max
  Clone ID: PAT_MRT3847_6224C.1.pep
GAYTHLALRYGSLFTLTLYSILNSDFFTHQGCYPSPKLLVRYRTPY

SEQ ID NO: 243879 - protein, 137 aa, Glycine max
  Clone ID: PAT_MRT3847_62250C.1.pep
KHWRGIKPRTGAPYSCDIGYERFLGPEIFFNPEIYGSDFTTPLPVVIDKCIQSAPIDTRRSLYKNVVLSGGSTMFKDFHRRLQRDLKKIVDARVLLSESRLNGEIKSQPVEVNVLSNPIQRFACWFGGSVLALTPEF

SEQ ID NO: 243880 - protein, 83 aa, Glycine max
  Clone ID: PAT_MRT3847_62251C.1.pep
LKTHNYIMFNYLKRQQITTQMPNEKPILDVQVQVDKKHQTSLKMQHSSFQIWTIWMAATTVFFVMITPSFNPWKNYQYRGSKN

SEQ ID NO: 243881 - protein, 43 aa, Glycine max
  Clone ID: PAT_MRT3847_62252C.1.pep
VQSLHFYYWGNVNERGKTINVGGALQAWQISHAMFEIPTPLCS

SEQ ID NO: 243882 - protein, 57 aa, Glycine max
  Clone ID: PAT_MRT3847_62253C.1.pep
ISILQSSLRDHRQRRRAMECTSSYTTAASSSSASALSTNGKLGLGPGVGPRVRPRDA

SEQ ID NO: 243883 - protein, 66 aa, Glycine max
  Clone ID: PAT_MRT3847_62254C.1.pep
LIILWYVCEISKCFLQIDILQVIPPRKPPMILIYKKRGQKTEKKKSVNFSLFLLDFILTHKNFAHA

SEQ ID NO: 243884 - protein, 69 aa, Glycine max
  unsure (1)..(69): unsure at all Xaa locations
  Clone ID: PAT_MRT3847_62255C.1.pep
NPHYISHPSNPLWDKHRRRENNTPFTKPXYDAQLSYHRTTNIFYTHLYENVSPSFLFPPKLKAPNLIIL

SEQ ID NO: 243885 - protein, 93 aa, Glycine max
  unsure (1)..(93): unsure at all Xaa locations
  Clone ID: PAT_MRT3847_62256C.1.pep
NXPYRCXRGXDXXXWXHSPXQXTSRRNPQDIVMVRIXFKQYFNSESCXIXGLFXLSFINMILCVRLYLKNCYLNNDXISYKHLLNVXTKDTGA

SEQ ID NO: 243886 - protein, 61 aa, Glycine max
  Clone ID: PAT_MRT3847_62257C.1.pep
DVAWKHGVSVEETRRIQCKYCPKVVKGGAYKLKHHLFQTNKDVEPCKTVIDDVRKEVWDIV

SEQ ID NO: 243887 - protein, 76 aa, Glycine max
  unsure (1)..(76): unsure at all Xaa locations
  Clone ID: PAT_MRT3847_62258C.1.pep
XXFXDSLADAWANHLQFKNRALNICLVLTLYSIIILLTTVLPYTVSSTSTLKKHQVPRIMCDECKLPPTPTAAKPI

SEQ ID NO: 243888 - protein, 70 aa, Glycine max
  Clone ID: PAT_MRT3847_62259C.1.pep
NTFDYFCTKGEKKKVKGLDIKGPTKRRKDIRPKKAGQSKDTKLFSSSSKTGKTIQTPLERGEKKMKSPTS

SEQ ID NO: 243889 - protein, 69 aa, Glycine max
  Clone ID: PAT_MRT3847_6225C.1.pep
TPTPLTETGRQKDRGSTEENNGRKPNPAHNDKQPKEKAKQEGNTPHDKKSRSRTEKASPTKAHPASAKT

SEQ ID NO: 243890 - protein, 107 aa, Glycine max
  Clone ID: PAT_MRT3847_62260C.1.pep
DVIDAEIGGALEHRDRVERTRVRVAGQIEGHVRELNVTDATFDGGSAADDHAGSRLAHEHAGMARVAAALQHVDEDGAALSVRSVAQEVSGIRWIRGVRSVSARCVR

SEQ ID NO: 243891 - protein, 98 aa, Glycine max
  unsure (1)..(98): unsure at all Xaa locations
  Clone ID: PAT_MRT3847_62261C.1.pep
KKVLNCFSLGQCGFPGGPGKKIFSLSQLRGFLQGXRMFSPFKIKIGIXFFLGIFPWEFFFKPSKRLKILRGFKPFVLPPGPLENFKTGFWGSRVFFFF

SEQ ID NO: 243892 - protein, 55 aa, Glycine max
  Clone ID: PAT_MRT3847_62262C.1.pep
ILLLLVLHCALDYLHIATETCLSILRIDHDATYPPNPYGYGYQKSLYLTPVDTEY

SEQ ID NO: 243893 - protein, 132 aa, Glycine max
  Clone ID: PAT_MRT3847_62263C.1.pep
VISASVRLREDDRRGNNSLSTSKEDKKEENGVSRVNSIDANDDSVSNNISTNQSEESANARKDEMPSSFRFWVIFLWAFSGVGFLVVIFVVYSGHRRRGTRLKHGRRRRSLHTGFMETNSRDRHSRGVDVPL

SEQ ID NO: 243894 - protein, 60 aa, Glycine max
  Clone ID: PAT_MRT3847_62264C.1.pep
CLLGCPLRIDNTKASEDPQALSVSSHVVTEVCRFCELPFGLFFYLHLHFCLCGCCLCCCS

SEQ ID NO: 243895 - protein, 72 aa, Glycine max
  Clone ID: PAT_MRT3847_62265C.1.pep
SPRNCPRCLAMLLGINKGKVRWMLYSFWQVGSWQHHVLGSPLSSPPFFVLGILTLPRMQVGARVGLPGGSGP

SEQ ID NO: 243896 - protein, 57 aa, Glycine max
  Clone ID: PAT_MRT3847_62266C.1.pep
NKLGFFPSNSTRSINCIVPTQSLQRQMSRLLRTLRKLLMLKLSFKLYTFSFLFCLCL

SEQ ID NO: 243897 - protein, 79 aa, Glycine max
  unsure (1)..(79): unsure at all Xaa locations
  Clone ID: PAT_MRT3847_62267C.1.pep
MSCCSGNCGCRNSCKCCNGCRSYMMXPDLSYTESTTIDTMVIGVGPAKAQFEGAKMGVLTDNDRYKCGPKCSCNSCTCK

SEQ ID NO: 243898 - protein, 241 aa, Glycine max
  unsure (1)..(241): unsure at all Xaa locations
  Clone ID: PAT_MRT3847_62268C.1.pep
MAEKVTIMRLKVDLQCHKCYKKVKKILCKFPQXIRDQVYDEKNNIVTIAVVCCNPEKLRDKICCKGCGTIKSIEIVEPPKPKPPPQPEKPKEPEKPKEPQKPKEPEKPKEPEKPKEPPKPKEPEKPKEPEKPKEPEKPKEPEKPKEPEKPKDPRSPRSPRSPSLNALLRCRFVRHRCQCVRHSQHLRHRWWFRLGCAVFHAMKVGPVGHALMGTAVGPHHVMTLIMEGLFMIVTVGAGLVT

SEQ ID NO: 243899 - protein, 83 aa, Glycine max
  unsure (1)..(83): unsure at all Xaa locations
  Clone ID: PAT_MRT3847_62269C.1.pep
FWSIVVPFLPSNFPGNPSCLLLFTSRVLILRPFHLILILCLWGVQRARPLVPVTAPCMFLLKEVAKDTFKMTPQALLPAAREX

SEQ ID NO: 243900 - protein, 74 aa, Glycine max
  Clone ID: PAT_MRT3847_6226C.1.pep
MITSSLWFSGVARGGGYGGGEGAGQGAGGGYGGGAVGGGGGGGGGSGGGGARGGGYGAGGGSGEGGGHGGGYYP

SEQ ID NO: 243901 - protein, 129 aa, Glycine max
  Clone ID: PAT_MRT3847_62270C.1.pep
MAEKVTIMRLKVDLQCHKCYKKVKKILCKFPQIRDQVYDEKNNIVTIAVVCCNPEKLRDKICCKGCGTIKSIEIVEPPKPKPPPQPEKPKEPEKPKEPQKPKEPEKPKEPEKPKEPPKPKEPEKPKEPE

SEQ ID NO: 243902 - protein, 247 aa, Glycine max
  Clone ID: PAT_MRT3847_62271C.1.pep
SARANSHFAHHDEVMLLGHDDKYLPDRGMQVTIAFNHFGEGLVQRMPRCKIGLMHVVNNDFTQWKMYAIGGSANPTINSQGNRYTAPADPDAKEVTKRVDTDDREWSGWNWRTEGDIMVNGAFFVPSGAGQSAQYAEATSVQAKSAVQIDQLTMYSGVFGDPRDNGDLYPGFNGGGTVTGATSKGNTEGSSSDDGDFFGMIFRGSSSSQAAPPSPSSSIVFVSTFLSLLIIFILDTTTNHAILLSLL

SEQ ID NO: 243903 - protein, 195 aa, Glycine max
  unsure (1)..(195): unsure at all Xaa locations
  Clone ID: PAT_MRT3847_62272C.1.pep
MASLDSLDFSLFRLSTDFCSPFAIFVQAQGCIINLILAFGWACAAFVRNREINRIKKSMRNGNNFAFLCHDISELEHSNQADLPSVTVIMPLKGFGEHNLHNWKTQLTSLYGGPQEYLLVVESTEDPAYHAVAKLITELEDSVKARIIIAGLSTTCSQKIHNQLVGVEAMHKDSKYVLFLDDDVRLHPGSXGALV

SEQ ID NO: 243904 - protein, 199 aa, Glycine max
  Clone ID: PAT_MRT3847_62273C.1.pep
MSVKVGEGEFIVSVTKQKVVVPEIPMHEHWLPLSNLDLLIPPMDVSVFFCYKKPLPEKYYCFGTMVGSLKNALAQALVYYYPFAGEMVANTMGEPELFCSNRGADFVEAVAEVELQCLNLYNPDDTVQGKFVPRKKHGLLAVQVLLTTMGPLFFFFTSFAMPVGRAEQKNSYILFEQLYGRIFISNFSEDLRKNERSLY

SEQ ID NO: 243905 - protein, 66 aa, Glycine max
  Clone ID: PAT_MRT3847_62274C.1.pep
LPILEECNHQAFLFLHEFHSLCHHEKRFLLVDRTQLATLAPPFASFWSHISCSMPVSGQGRIFLSN

SEQ ID NO: 243906 - protein, 80 aa, Glycine max
  unsure (1)..(80): unsure at all Xaa locations
  Clone ID: PAT_MRT3847_62275C.1.pep
PTVADKWRNKGNESALPRTLTNYXKWECLGLKSICXEGRTLDKQAEGKANDMKAGCQAGEKRGLMDLQDPSTSECGANKT

SEQ ID NO: 243907 - protein, 83 aa, Glycine max
  unsure (1)..(83): unsure at all Xaa locations
  Clone ID: PAT_MRT3847_62276C.1.pep
AEADPTIIALLFETRIPYFAESMTYVSRDREITDPMSRPFSFGKESHCGLLXKHMLDDPHLIDMMINAXIRALIEMAMLFKSG

SEQ ID NO: 243908 - protein, 81 aa, Glycine max
  Clone ID: PAT_MRT3847_62277C.1.pep
LSICIIEHDDKYLIPRFHLHPHSYLRPASLSKVKKFIHPISRVYIYMSHVHSVSLRVTITSNFIGSTPRNKNDYNIKIINL

SEQ ID NO: 243909 - protein, 54 aa, Glycine max
  Clone ID: PAT_MRT3847_62278C.1.pep
GLLSLIFIIENFSFLNRPNLIRIMVKHNNYCPNNPQYTHPTQFVSPKLLSTPSI

SEQ ID NO: 243910 - protein, 51 aa, Glycine max
  Clone ID: PAT_MRT3847_62279C.1.pep
KTEHDTGQMAITYLFTQDSTALGYTCRCVYTLTAIYDADSETPSQADAPGQ

SEQ ID NO: 243911 - protein, 224 aa, Glycine max
  Clone ID: PAT_MRT3847_6227C.1.pep
MHLSSIVDEGQKVKQAQQELKRCATRLRAAGVTIRKVERHSKLVNWFGFDIRFSKGVLEIPPLHVVDTTEVYLRNFIAWEQSRIGINRQFTSYALFLRGLMCSVQDIELLVENGVLVKGTKISNRDLLTLFGTITKGVDQMDNSYSKLCEDLNAYSAVNPLRKFPILMLHCCNLCVECIRYSCKHSYKILIRDHIPNVWKLIGIVVAAALLALTIMQTYYSARG

SEQ ID NO: 243912 - protein, 119 aa, Glycine max
  unsure (1)..(119): unsure at all Xaa locations
  Clone ID: PAT_MRT3847_62280C.1.pep
LTGDICEKTCILFIGVINCLSGGRASACIYTILCQALLMXNPACPXAFSMSLCLNPWSDPCSLVSLNRTGFPGDIICVPGWAVTPMQDVHVSIDWLISFHECVPRTYCCLNSQNSFCVK

SEQ ID NO: 243913 - protein, 107 aa, Glycine max
  Clone ID: PAT_MRT3847_62281C.1.pep
RKVIAEGLKSIGNKYQTGHDSILRSKDLSLTLTASFVLRDENRSKLIRKQQTPASVVFYVLMFDLKISMHASLIRRVNKHALNLLKSQSQFSSHQKSLQEQFPSLKW

SEQ ID NO: 243914 - protein, 104 aa, Glycine max
  Clone ID: PAT_MRT3847_62282C.1.pep
EKNGGIEDESFLFCHGHADHGSISCRFTSSKSHIGCYHLIRANSGCFTRCSCFWDSLLSFSTMKQTTNCIVWDSLCFHHYYDPYYFMTHSFPTVLLYLLCLYGL

SEQ ID NO: 243915 - protein, 83 aa, Glycine max
  unsure (1)..(83): unsure at all Xaa locations
  Clone ID: PAT_MRT3847_62283C.1.pep
PXARTRVCHXHXXRKXAHRRFPCEFEXHRIHVAILXLPEPCSLKXLAXNILSPNRMETLDLXRKTPFAFSVCVCCFWFLERER

SEQ ID NO: 243916 - protein, 53 aa, Glycine max
  Clone ID: PAT_MRT3847_62284C.1.pep
TNRIPSNQRCVSLMLFLLNPTLMPLIMCLVVNPYITKHSNSGISLGWLSLLRH

SEQ ID NO: 243917 - protein, 75 aa, Glycine max
  Clone ID: PAT_MRT3847_62285C.1.pep
TFSPSIISQQHTKQIMDNTLIWSIQNLTILSSGDRQHHHRTCQSQKSHLPPHNRNTQSTNPCTRVLLREHAGMQA

SEQ ID NO: 243918 - protein, 362 aa, Glycine max
  Clone ID: PAT_MRT3847_62286C.1.pep
LELVMVSAKEEPDCSIPPAVDGLLRVHKQVVNVDPHPADSASGAGRPVVTRLLVADTQAGSLIGKQGSTIKSFQDATGCNIRILGSEHLPVFALRDDSVVEIQGESSGVHKAVELVAIHLRKFLVDRSIVVVFETQMQRPDVRVNQNVPPGPPHQPWGPPQGFQAPGPGSGGGPAFPPNPQYMPPSHNYDNYYPPADLSPMDKHLHQGPAPAYVRDASMGIHSSSAQPQQSVVTKVTQDMQILLTYADAVIGASGTNISYIRRASGASITIQETRGVPGEMTVEISGTSSQIQAAQQLVQNFMAEAASATQDPMGGSVSQGYSAYPTTAPVYAPPTSAGGGGHTGHAPSADYGPLYGTNYGY

SEQ ID NO: 243919 - protein, 228 aa, Glycine max
  Clone ID: PAT_MRT3847_62287C.1.pep
LKRNLKIMINMGLSAKQEEDNRFQQIKKEVVDLIKMQAPTLESKQQLKGEASGDFQEFGPDGKPITKRKFTMDAALEDKICDLYDLFVDGLDENAGPQIRKLYAELAQLWPSGYMDNHGIKRGICRAKERRRALYNKHKDQEKIKRKKLLAPKQQENVRFDTNTITSQQNLRERSAPESSSHAYTSGNKQASNTSTTGRVPCPMNGLKQEKAKGSSSSSVDDVRAADG

SEQ ID NO: 243920 - protein, 55 aa, Glycine max
  Clone ID: PAT_MRT3847_62288C.1.pep
GSLKTSAPLTLILLSVVTYMSNPRIIHRLRLHLHNIAHQPYHMCITRHNSNASAI

SEQ ID NO: 243921 - protein, 44 aa, Glycine max
  Clone ID: PAT_MRT3847_62289C.1.pep
RDANAVYEISMANSRQNIRKLVNDWSIITMPSKHHSRSRAPRMK

SEQ ID NO: 243922 - protein, 63 aa, Glycine max
  Clone ID: PAT_MRT3847_6228C.1.pep
ICKSKNTFGKTTLGRVTIQIDKVVSEGVYSGLFSLNHDGNKDGSSRTLEIEIIWSNRISNDDI

SEQ ID NO: 243923 - protein, 98 aa, Glycine max
  Clone ID: PAT_MRT3847_62290C.1.pep
QPSSPRGVGGFFLIDPAAFFLFCEGGRARHPSQVSLSALEPPPAIHFIAPSGLWWGILIGKNFFSGPSFGRFRPSSYIPHYKERWRALRRRSGFFFRV

SEQ ID NO: 243924 - protein, 46 aa, Glycine max
  Clone ID: PAT_MRT3847_62291C.1.pep
CHKPCSPSSLRVIRHPPAMTFPVRRNKPLHVPPLWCCHRIARNIIY

SEQ ID NO: 243925 - protein, 89 aa, Glycine max
  Clone ID: PAT_MRT3847_62292C.1.pep
NNSISCFFFNSCYKMLARVLEFSCLEDLVFTQVRILTVSTWILCFIIVIWHCFTKTTISFELETSFKLHKPHHHLANLGGIIGSYITIY

SEQ ID NO: 243926 - protein, 131 aa, Glycine max
  Clone ID: PAT_MRT3847_62293C.1.pep
MEHRLREDDRREMKNKGRNVVWSIAMDKCLIEALAAQAKRGNKIDKCFNENAYTAACVAVNTCFSLNLSNQKVINRLKTIKKRYRVIKDILSQDGFWWNPNTKMIECDSDELWKNYVAVSNVSFFSTLECV

SEQ ID NO: 243927 - protein, 486 aa, Glycine max
  Clone ID: PAT_MRT3847_62294C.1.pep
MAFVLLILLSALRYSSAEQAFDVRKHLSTVSRYGVVKDIADTNFVPSKIPEGCVPIHLNLVARHGTRSPTKKRIKELDNLSERLEVLVRDSKERNLPFQRVPSWLNGWKSPWHGRRKGGELITKGEEELYDLGIRIRENFPNLFDEEYHPDIYPIKATQVPRASASAVAFGMGLFSGNGSLGPGHHRAFAVTSESRASDIVLRFHDCCHNYKAYRKSQESAVSKLKEPILDEITSALIGRHGLNFTRQDTSSLWFLCKQEASLLDITNQACSLFSPLEIELLEWTDDLEVFILKGYGKSLNYRMGLPLLEDVVQSMEQAIMAEEERHVPGSFEKARLRFAHAETVVPFSCLLGLFLEGSELKKIQKEQPLQHPPKPPQKRKWRGSTVAPFAGNNMLILYSCPAPDKSTSKHFVQVLHNEHPVPLPGCDGSDFCPFEVFKEKIVAPHQKHDYHTVCNEKLEQEPSGNKERSLKSYALNNSDMSAYSF

SEQ ID NO: 243928 - protein, 568 aa, Glycine max
  Clone ID: PAT_MRT3847_62295C.1.pep
MSNSIMAFVLLILLSALRYSSAEQAFDVRKHLSTVSRYGVVKDIADNNFVPSKIPEGCVPIHLNLVARHGTRSPTKKRIKELDNLSERLEVLVRDSKERNLPFQRVPSWLNGWKSPWHGRRKGGELITKGEEELYDLGIRIRENFPNLFDEEYHPDIYPIKATQVPRASASAVAFGMGLFSGNGSLGPGHHRAFAVTSESRASDIVLRFHDCCHNYKAYRKSQESAVSKLKEPILDEITSALIGRHGLNFTRQDTSSLWFLCKQEASLLDITNQACSLFSPLEIELLEWTDDLEVFILKGYGKSLNYRMGLPLLEDVVQSMEQAIMAEEERHVPGSFEKARLRFAHAETVVPFSCLLGLFLEGSELKKIQKEQPLQHPPKPPQKRKWRGSTVAPFAGNNMLILYSCPAPDKSTSKHFVQVLHNEHPVPLPGCDGSDFCPFEVFKEKIVAPHQKHDYHTVCNEKLEQEPSGNKIMDQLLINVCQHEVLPLEADSHWSFCDGDLVLGDLASMEAGGRMQPPPCCSGDDTRFAVFTIGVKLEKLRRRRTSTSNDARLHDSFTNYKNKFLLQ

SEQ ID NO: 243929 - protein, 48 aa, Glycine max
  Clone ID: PAT_MRT3847_62296C.1.pep
VGGWTKVYGNHLTYTTIRGASHGTPATQPKRSFVLFNAFLQGKPLPKA

SEQ ID NO: 243930 - protein, 528 aa, Glycine max
  Clone ID: PAT_MRT3847_62297C.1.pep
MSDTKLKAQTTSYCTNGGVDTIVLDGTHPGTEQINHPGEDKIDVYYATTSQARKNGIESGLEDNNVNDSCKSESHADKVKSTSSPCQLKDQSPLHEAKHKDGKIKLQEKFGFKPDQNEIIHAGKKDYTGKNESRKKENHSNRGHDFQDVSTDAPCKQEVFHAPIQNQFPDCDTERSTKRSLLERTDQEVHGKGKPLSSLPYEGSQVEILGRCPRPVGLLKGNGDMEVDPSKVDDVSKLQKKQLKKTDHQNGNLQIGSRNPILNGHKSKELDAPSPARRDSSSHAANNALKEAKDLKHLADRLKNTGSSVEGTSLYFEAALKFLHGASLLESGNNDNAKHNEMIQWLQIYSSTAKLCEFCAHEYEKSKDMASAALAYKCMEVAYMRVVYSSHTSASRDRHELQTALQMAPLGESPSSSASDVDNANNSTAADKVTISKSVNSPQVAGNHVISARNRPNFVRLLNFAQDVNFAMEAARKSRNAFAAANSSLAVDKNADGISSIKKALDFSFQDVEELLRLVKVAVEAINR

SEQ ID NO: 243931 - protein, 80 aa, Glycine max
  Clone ID: PAT_MRT3847_62298C.1.pep
AALVLFFFFFYFPLLVLSQELLRNIFKSSTIFHGGLHQIITFWGRFTEPRKPNKWKRIKKKGRITDNTCSFWGFLVQNQE

SEQ ID NO: 243932 - protein, 243 aa, Glycine max
  Clone ID: PAT_MRT3847_62299C.1.pep
MMLDGTEDEEKFLAAGIAGLQQNSFYMHRALDSNNLRDALKYSAQMLSELRTSKLSPHKYYELYMRAFDQLRKLEMFFEEETRRGCSIIDLYELVQHAGNILPRLYLLCTVGSVYIKSKEAPAKDVLKDLVEMCRGIQHPVRGLFLRSYLSQVSRDKLPDIGSEYEGDADTVADAVEFVLQNFTEMNKLWVRMQHQGPAREKEKREKERSELRDLVGKNLHVLSQIEGVDLDMYKDVVLPRVL

SEQ ID NO: 243933 - protein, 171 aa, Glycine max
  Clone ID: PAT_MRT3847_6229C.1.pep
TVAALAIHVTRSHSCCASVTGKKNLKFLPSAQSLGFFTFFLPSFILVPFRHYPSMEETPEHVSYCPLSLPPEDENNSGAKLAKSVNELNDLAVAIQAFKNRYDELQKHLEFIEQAIHTRTKELRALGANSAQGTAENGVVQLDSNPEAEVPLPERREEKKKKTSFLRFGKR

SEQ ID NO: 243934 - protein, 223 aa, Glycine max
  Clone ID: PAT_MRT3847_622C.1.pep
MPGLAQRNEHQLTNGSSTPTCSLSANRFWSKNSDEVCYNQLQKFWIELSLQARQKLLRIDKQSLFEQARKNMYCSRCNGLLLEGFLQIAMYGKSLQQEGVDAHFPCNRSGGLKKLNNDESSIINGCQDEIQDPSIHPWGGLTTSRDGSLTLMSCYLYSKSLKGLQIVFDGARARERERELLYPDACGGGGRGWISQRIVSYGRGHGTRETCALHTARLSCDTL

SEQ ID NO: 243935 - protein, 77 aa, Glycine max
  Clone ID: PAT_MRT3847_62300C.1.pep
LHLNFRATSKWATSLAKILRDPWPRPLGWANSLKSGPQGPLGDIQFFTGPGKKLRGGNHPTSKTGKRAKGKPRFLVL

SEQ ID NO: 243936 - protein, 337 aa, Glycine max
  Clone ID: PAT_MRT3847_62301C.1.pep
MSYGAVVTHQSGSCTSLIQSNQRVALPSVDGRGRIMRSGEAVREMEMGSVVVEKVGGRSSVTSCFSRYPLKFVIPKKVGSSKTDAVWVYALNYGGGIVSGDNISCKFSVGDTCTMVLTTQGSTKVYKSVGSKCSQQILEARVGSNALLAIIPDPVTCFSTARYCQKQVFCVLPDSNLVMVDWITSGRHESGEKWDFDLYRSSNNIFLEDGQPLFLDTMLLDKEKIGCVQEHMHNYQVIAMIVLLGPKVQYVQNLVQDHVKKVMSEQLQHPSAAWSHQRDKADHFITKPSFIASCSAFGPKKIGLLVRVAAETTESVYKFLRHQLAPLEPMIGVPPYR

SEQ ID NO: 243937 - protein, 61 aa, Glycine max
  Clone ID: PAT_MRT3847_62302C.1.pep
KVRWLMTSGVIRRIRGLHEVLTGRSLESVPASYLVSTNDEVLSPKEAPKAQPQTQKHPSME

SEQ ID NO: 243938 - protein, 124 aa, Glycine max
  Clone ID: PAT_MRT3847_62303C.1.pep
KLNLFLTEEKQKSFSVKTLGPRENLSLPFLKGTFFFLKTGGKNCTPLLMLGSRFDILLGTTTNNHWGLSLQGNRNFFGLPFCKEINQGPSHKFFLGPTFFGGEQTHPHCGACLAPRAPHFGGLA

SEQ ID NO: 243939 - protein, 154 aa, Glycine max
  unsure (1)..(154): unsure at all Xaa locations
  Clone ID: PAT_MRT3847_62304C.1.pep
VGFFPKNVFVIPLENLTTLAFTKGSKNLRVPRELLXNFLFPPSYHPWFFNLGECGGLTYXVRPGQPFSCHQRLFWGLQELFLLFLGNLDNFVLLNQPFGLAKNSLXAHVGIEATRTFLDRVPSLEIKLQRDLDAVFALLAYDAKXGSVISTLGL

SEQ ID NO: 243940 - protein, 75 aa, Glycine max
  Clone ID: PAT_MRT3847_62305C.1.pep
QLRCHKNRCLQRSTLSLELFNNHSQELTLWTRCVSRDLAPTLILVITGHAFFRVFCSLNNIRIPKKKKKGRAPAE

SEQ ID NO: 243941 - protein, 133 aa, Glycine max
  Clone ID: PAT_MRT3847_62306C.1.pep
MGRRNGGRSLQETLRRRLESCKSKYSTAEEFANHLRSTYPDYHRTKHQTLIRFVQEALHSTAKLNHTPTPKHCDGDDDDDEEGEAQSASRKRRKKIDGSEERLQRMEALHVRSKVQRSSSSSSASESDDEDEE

SEQ ID NO: 243942 - protein, 51 aa, Glycine max
  Clone ID: PAT_MRT3847_62307C.1.pep
VSYLMLDFAGFNLLFLRSLPVLTGCSCSLIINANGHKFVRVGCSILVYCIF

SEQ ID NO: 243943 - protein, 56 aa, Glycine max
  Clone ID: PAT_MRT3847_62308C.1.pep
RGYGFRCTLLISDSQDPVDWLNSQIKLCLQLHCLQIWIIRSLITVYRIHSHDEELR

SEQ ID NO: 243944 - protein, 55 aa, Glycine max
  Clone ID: PAT_MRT3847_62309C.1.pep
NETRALLNKNDQTGHFITKNRHHHYQLKANLPNKKSPNKTIMEQLNTRICNNFIP

SEQ ID NO: 243945 - protein, 144 aa, Glycine max
  Clone ID: PAT_MRT3847_6230C.1.pep
MRRLQTLKQVSWASDLDLCQVRLFLSEESPSQVGLNSQDNLQAKTSLSLRPGGARSDDILPPGFEGTHASSQFEIKPSQIPVIKWITPQKIVLNVTWRVVSGEESKEAEDQCQREMRVLEAIYPRISSIPLNPSVSMDVEESIA

SEQ ID NO: 243946 - protein, 94 aa, Glycine max
  unsure (1)..(94): unsure at all Xaa locations
  Clone ID: PAT_MRT3847_62310C.1.pep
GSPIRAKIIPPPVSWFPGEPIQGHKFEDLEAHEHHQNXKRPIMKIKSXHPHDDDPHHDEEKTNPQKKSSPPKKSGRPPLGYAPQGDPPPQSNPP

SEQ ID NO: 243947 - protein, 94 aa, Glycine max
  Clone ID: PAT_MRT3847_62311C.1.pep
RVGYPERNCAVDLKKRSVNRVGAFMLNALLNHGKAFEKFVFKTDPGDANETYAVEVLEWVVGDREALKGHSGDAFCDLPYKVQKMHNCVCELGG

SEQ ID NO: 243948 - protein, 79 aa, Glycine max
  Clone ID: PAT_MRT3847_62312C.1.pep
GLLVCCVSLLALVSGFVEQRRKDGNFEEIGERVVELLGLEEHAHEGIKVVGGVKRWKIETFERLVLRGCNEGSAIDDAI

SEQ ID NO: 243949 - protein, 41 aa, Glycine max
  unsure (1)..(41): unsure at all Xaa locations
  Clone ID: PAT_MRT3847_62313C.1.pep
IKISTPIPKISLICFILPTVIKLPHPRSHWFWGKRXSQHNQ

SEQ ID NO: 243950 - protein, 48 aa, Glycine max
  Clone ID: PAT_MRT3847_62314C.1.pep
RPTLYIYRYYVSIYYILYRVAITLDFKIVSDPTFGGVFIVLLHFNVYM

SEQ ID NO: 243951 - protein, 51 aa, Glycine max
  Clone ID: PAT_MRT3847_62315C.1.pep
WIGRRNSNVMVSNGFCNLFVLLAKPPPTTLLTTTITKTSWCLRIRSHWTKP

SEQ ID NO: 243952 - protein, 68 aa, Glycine max
  Clone ID: PAT_MRT3847_62316C.1.pep
YLCCHVDDDKVMNKSKEPLEGLGGLMARAKIKKVKEAFQQVLTMLFKFRSTLQVEKFRIVNCTMFQEE

SEQ ID NO: 243953 - protein, 123 aa, Glycine max
  Clone ID: PAT_MRT3847_62317C.1.pep
VDVMTISFVRDSRRLASLPNDHASLTNAINTAKALIAAVITTRSKSNFSSSSRCAARITSFYCSCCERQPHSIISLRSCFAFAGSICRCIRRSRDCLIHTILLRGSSYLLRHASRSAAPAVRA

SEQ ID NO: 243954 - protein, 67 aa, Glycine max
  Clone ID: PAT_MRT3847_62318C.1.pep
FGSTQIDHATTSGISLGSKSSDNRECVVCIRWRKLVTLRGGVSLGSDDETTSMQDSAIDWSTRGAVL

SEQ ID NO: 243955 - protein, 82 aa, Glycine max
  unsure (1)..(82): unsure at all Xaa locations
  Clone ID: PAT_MRT3847_62319C.1.pep
MASSQXEVTLLGATGSPFXCRVHXALKLKGVXIQICXRNLRNKXGLLXLKSXPVXKXVPVFIHNEKPIAXSXVIVEYLMXXW

SEQ ID NO: 243956 - protein, 93 aa, Glycine max
  Clone ID: PAT_MRT3847_6231C.1.pep
SISLIISPWLGLEGECFCFFQVSQMQKRTWVTRCNIGGGSSLLLSFFTIVFLFLLALSLLCTSSPPRSHLVMRQTIIIQINNSFVFPSFSPTS

SEQ ID NO: 243957 - protein, 99 aa, Glycine max
  Clone ID: PAT_MRT3847_62320C.1.pep
PTRPAKLVDATDLIGLSLGMETYQVRTFKFRETLEFTKGNPEPNPVFRKQRKVHKVIIKKGYGEIGRRYGLNWIESWYGNLPSENFQIQRNPGIHKGQS

SEQ ID NO: 243958 - protein, 49 aa, Glycine max
  unsure (1)..(49): unsure at all Xaa locations
  Clone ID: PAT_MRT3847_62321C.1.pep
MTVLHHPANFIKITRTXXHXKYIRLLILQQNNNRNIKYAAKNIFYAFIY

SEQ ID NO: 243959 - protein, 82 aa, Glycine max
  Clone ID: PAT_MRT3847_62322C.1.pep
ERRVREQGLQGNPYRILVGDLKEIVKLQMEARSKPMNLSHDIVPRVFAHLHQSVLKHGMLLFLRASPTGGALFATIIYCLPL

SEQ ID NO: 243960 - protein, 77 aa, Glycine max
  Clone ID: PAT_MRT3847_62323C.1.pep
CSHPAICMVPNQAHMAIILPLLIIPLHHFSLIAILNNAREDASKFSNWKSSSHDHRHRHSAMQRRSSPLTPAPSSID

SEQ ID NO: 243961 - protein, 412 aa, Glycine max
  unsure (1)..(412): unsure at all Xaa locations
  Clone ID: PAT_MRT3847_62324C.1.pep
MKITVMTADEQIITLDVDPHESVENVKALLEVETSVALQQQQLLFNGKEVRNSEKLSALGVKDDDLLMMVSGAGAGAAASSGSTNDLSLNTDGSAVNPGAFQQHIRRDSNLMGQLFQSDPELAQAILGNDLNKLQEVLRLRHHQRDELKRQKEEELALLYADPFDVEAQKKIEAAIRQKGIDENWAAALEHNPEAFARVVMLYVDMEVNGVPLKAFVDSGAQSTIISKSCAERLGLLRLLDQRYRGIAHGVGQSEILGRIHVAPIKIGSIFYPCSFLVLDSPNMEFLFGLDMLRKHQCIIDLKENVLRVGGGEVSVPFLQEKDIPSRFLDEEKYAKEASGSGGQISSGSNNPSTGGHSSGGASGDKAKDSEFEAKVAKLXVELGFERNAVIQALQLFNGNEEQXAAGFLFGG

SEQ ID NO: 243962 - protein, 63 aa, Glycine max
  Clone ID: PAT_MRT3847_62325C.1.pep
KDEVTKCNLVSRPIYESEQMSVVSHLVVKLEEFLPILMLTKLKYTMLKFERKSNLKKSPLLLC

SEQ ID NO: 243963 - protein, 67 aa, Glycine max
  Clone ID: PAT_MRT3847_62326C.1.pep
GSLYGHLVKFRIVMVLPVIMVLDGVHVYASYRSLSSDVCLTMARVTSPEICTASAHYMGASVKRFFF

SEQ ID NO: 243964 - protein, 69 aa, Glycine max
  Clone ID: PAT_MRT3847_62327C.1.pep
GGDAFTYPVFQGGQRVCLEREMAFFQMKKFVAGIFKSFKGLPEVAEPEFFVYLTSLRVGGFPGRIKNRT

SEQ ID NO: 243965 - protein, 48 aa, Glycine max
  Clone ID: PAT_MRT3847_62328C.1.pep
NKHCKIQPLLVRAWGIPPPHLVLKWAEKSKKGAFFFFLRTCGKFSLLR

SEQ ID NO: 243966 - protein, 92 aa, Glycine max
  Clone ID: PAT_MRT3847_62329C.1.pep
KTGFLPTAVIKYSGQGALMDKLLLLQKYFGWEKMGMEIKKKKSLQKPNKTFEEIPPFKSFLGKALSQKVNLQKKKFVLKKNLFGFHWGGETY

SEQ ID NO: 243967 - protein, 48 aa, Glycine max
  Clone ID: PAT_MRT3847_6232C.1.pep
RMEFCLPRDARITWNLYYGEKIELYWNTISQHIDNYYMRYTFNHPFTG

SEQ ID NO: 243968 - protein, 142 aa, Glycine max
  Clone ID: PAT_MRT3847_62330C.1.pep
FDQVLQHARVILLSLHGGIGYWRYGIERLVQLAERGVTLILVPGDDRPDPELSDLSTVPAEEGRRLWHFLRQGGMGNALDLYRCLANLWLGRDYSWAEPQPLPRTAIYHPRHGSVGLPAWRADWQAGQPVAAVLFYRSHLQA

SEQ ID NO: 243969 - protein, 94 aa, Glycine max
  Clone ID: PAT_MRT3847_62331C.1.pep
LIVYLFNLLLFLLPEKKVIRKELQKKMRQKHKVLRVRSIMKKLTEKNCLEVTAKKAGVKRGDLCAKMNPKNAERGILRGGQKGNNYIHQWDGQH

SEQ ID NO: 243970 - protein, 240 aa, Glycine max
  Clone ID: PAT_MRT3847_62332C.1.pep
MALEALNSPTTTAPSFPFDDPTIPWAKRKRSKRSRDHPSEEEYLALCLIMLARGGTTTVNNRHVSPPPPQPQPQPTPDPSTKLSYKCSVCDKSFPSYQALGGHKASHRKLAAAAEDQPPSTTTSSAAATSSASGGKAHECSICHKSFPTGQALGGHKRCHYEGNGNGNNNNSNSVVTVASEGVGSTHTVSHGHHRDFDLNIPAFPDFSTKVGEDEVESPHPVMKKPRLFVIPKIEIPQFQ

SEQ ID NO: 243971 - protein, 43 aa, Glycine max
  Clone ID: PAT_MRT3847_62333C.1.pep
QDCHSKQWLGIKEVQNTQMKCCTVWECYKLQVLKLKKILTHAF

SEQ ID NO: 243972 - protein, 95 aa, Glycine max
  Clone ID: PAT_MRT3847_62334C.1.pep
FLLPHFHFFASIFQCCEVYVQVSVPCSILSTVVTVRCGHCTSLLSVNMKKASFVPFHLLASLTHLEVFWLPFQFYVFSLSLVVLVGESIDPHILF

SEQ ID NO: 243973 - protein, 83 aa, Glycine max
  Clone ID: PAT_MRT3847_62335C.1.pep
MSGFLSNLFGFNGNNNGTEDAFKNSGGGGQDFKDAEFNTGVQVAKGRHAPCSGNSGTKSAFNNSGSGKQDFGNAMFNTGARYY

SEQ ID NO: 243974 - protein, 64 aa, Glycine max
  Clone ID: PAT_MRT3847_62336C.1.pep
GKPTGTLSMEHTILERELWLQEGGQTLEYITKNGSLSCSLTLRTSSDQACAPRKRWRTAILGFS

SEQ ID NO: 243975 - protein, 99 aa, Glycine max
  Clone ID: PAT_MRT3847_62337C.1.pep
LNAAGGGGGLKVTQRRTTNTKGSSAGGGGGGRGPNRSRTTKPKGTCAREKRLRGGPNSRGGGSKISITNPTGGGMRALLYPTRRRRSQCPTRTNTKKRK

SEQ ID NO: 243976 - protein, 42 aa, Glycine max
  Clone ID: PAT_MRT3847_62338C.1.pep
RFKTKILIYREFKIKKNLFGTYNKIQSFFKGLLTYLSETSKL

SEQ ID NO: 243977 - protein, 78 aa, Glycine max
  Clone ID: PAT_MRT3847_62339C.1.pep
SKPKLSKTMSSFTHVTTLIHAHIKTKHNKPSTTTTITNPLPHNHSPNIRKLSITFLATSTAVLLVHGVTSTPQALAQS

SEQ ID NO: 243978 - protein, 248 aa, Glycine max
  unsure (1)..(248): unsure at all Xaa locations
  Clone ID: PAT_MRT3847_6233C.1.pep
MSGAVLVAVAAAIGNLLQGWDNATIAGSILYIKREFQLQSEPTVEGLIVAMSLIGATVVTTCSGALSDLLGRRPMLIISSMLYFVSSLVMLWSPNXFISSLLSLLDLLDGLGIGLAVTLGTLFTISETAPSEIRGLLNTLPQFTGSAGMFFSYCMGFGMSLMKAPSWRIMLGVLSIPSLIYFALTLLFLPESPRWLVSKGRMLEAKKVLQRLRGREDVSGEMALLVEGLGVGGDTAIEDYIIGPANEL

SEQ ID NO: 243979 - protein, 175 aa, Glycine max
  Clone ID: PAT_MRT3847_62340C.1.pep
GSRGDAKLFCGNGVKTGCQEDTSRSEQSLRRRNGLADLNEPVPVEETYNSPYVHLLNRNPCQGATECSDISSDAPKQKSDFFALSREQLLNSDHGTESWTRSHEYLESYGGGKGRYQSVAESGLAKSNTHPVPQLLISVSSQTIHDALSIVREPASDYLHGRNMADMWRDKTVSD

SEQ ID NO: 243980 - protein, 47 aa, Glycine max
  Clone ID: PAT_MRT3847_62341C.1.pep
SHRHVRLVALEQDSGLGLCKLKSRCPNVYAVLPLSYENTTTACPFLS

SEQ ID NO: 243981 - protein, 70 aa, Glycine max
  unsure (1)..(70): unsure at all Xaa locations
  Clone ID: PAT_MRT3847_62342C.1.pep
HXWXXSIQHXIXXSHQXGXQXIAEXFXECXNLFHLKXPXGISFGSXIRIDAEDIPLXXMFFKPXIQSXXX

SEQ ID NO: 243982 - protein, 113 aa, Glycine max
  Clone ID: PAT_MRT3847_62343C.1.pep
ILYKKFFSLFSPKLFFPQHFYFPPCLFGPKTWVGDPIGPPKKGGHPGGVALRVGKKKLIFTNVPVEKTPFSNGQKKIDPPFGGALKFLPGINRAFFSKKLFFAMENTVFFLSF

SEQ ID NO: 243983 - protein, 68 aa, Glycine max
  Clone ID: PAT_MRT3847_62344C.1.pep
KTHPDSKPKKTILIILPTAPDAAMSMTFQIPPFSRVKDHMFKHHGGKGFVSGPMTSVKARRKSSDGLC

SEQ ID NO: 243984 - protein, 82 aa, Glycine max
  Clone ID: PAT_MRT3847_62345C.1.pep
IPRGNPKIQIGAKTNGKNGVKKTPLICYYPGGEKGGALNWIFYPFFPQNPNLKYFETLYFPHKKKFAPNPKKLGVRASLFLK

SEQ ID NO: 243985 - protein, 36 aa, Glycine max
  Clone ID: PAT_MRT3847_62346C.1.pep
HSSLPPIFGVWPREHPDSNYANSHTPLALASCIVQK

SEQ ID NO: 243986 - protein, 58 aa, Glycine max
  Clone ID: PAT_MRT3847_62347C.1.pep
GVFFFKKKNESFPIEAEICLVGPSSFFRTVPIKQIYKPVHRINELKKKKKKKKKKNPP

SEQ ID NO: 243987 - protein, 45 aa, Glycine max
  unsure (1)..(45): unsure at all Xaa locations
  Clone ID: PAT_MRT3847_62348C.1.pep
GRDSXCGIXVPVXVQXISXGNEGGMXXWIYIQGXPAGKXQXTYDG

SEQ ID NO: 243988 - protein, 100 aa, Glycine max
  Clone ID: PAT_MRT3847_62349C.1.pep
CLGGVLGSLFMQEKCTVIHSFNILCMIPSALLGEIHVNLPEYVSQFSIPPFPFHVTIGLSMPGPQPAQQQQQSPPGFYRPPGIGFYGQSHLSTPPPVPRQ

SEQ ID NO: 243989 - protein, 233 aa, Glycine max
  unsure (1)..(233): unsure at all Xaa locations
  Clone ID: PAT_MRT3847_6234C.1.pep
MEGIEHQTLNVNGINMHIAEKGEGPLILFIHGFPDLWYSWRHQITALASLGYRCVAPDLRGYGDTDVPANPTAYTSLHVVGDLVGLLDAIVGDEEKVFVVGHDWGAMTAWSLSLYRPERIRALVNLSVVFTPRNPKRKPLDTLRAVYGNDYYICRFQEPGEIEAEFAQIGTARVLKEFLTYRNPGPLYLPKGKAFAHPTDSXIALPSWLSEERCDYYAQXYDKTGFTGGLNYY

SEQ ID NO: 243990 - protein, 66 aa, Glycine max
  Clone ID: PAT_MRT3847_62350C.1.pep
SNCPSEPQFLLHDQMYDPSSMLPSVHFRSHLRTQPSALYSQDPSAIAYAIKRSCEHMNEAVSVSSK

SEQ ID NO: 243991 - protein, 70 aa, Glycine max
  Clone ID: PAT_MRT3847_62351C.1.pep
ASSLALSTFTLSTFTLPPSVTVTGPPQTMPVTSIRLPTPLPTSSPPTSPFSNPLLLPVAPVTCVTPHPGR

SEQ ID NO: 243992 - protein, 92 aa, Glycine max
  Clone ID: PAT_MRT3847_62352C.1.pep
GLAQAVFFFPLIGLRPAWMGFFSNQFSNFPPVIDVIYRTPLCVPSQFFVLRGGAALPITIKDHISLKTNNKTKKKKKKKQQKKKWHINNKKN

SEQ ID NO: 243993 - protein, 189 aa, Glycine max
  Clone ID: PAT_MRT3847_62353C.1.pep
DSLIAVQLTVDLKPNLPREEERIKLRRGRVFSLQNEPDVARVWLPNSDFPGLAMARAFGDFCLKDFGLIAVPDISYHRLTEKDEFVVLATDGIWDVLSNEEVVDIVASAPQSTAARALVESAVQAWKTKFPFCKVDDCAAVCLFFDSDSDFKSTDTKDKLIPEASIDQSEQLSLLGEKGVGIEAEKKQQ

SEQ ID NO: 243994 - protein, 70 aa, Glycine max
  Clone ID: PAT_MRT3847_62354C.1.pep
IYFTLYDFSKNVLLKDNRFVQNPDCINVLSAISAGAVSSTITCPLWVVKTRMQASKSLKYKNTFDAIRQL

SEQ ID NO: 243995 - protein, 50 aa, Glycine max
  Clone ID: PAT_MRT3847_62355C.1.pep
NGEHLRVFTQKGGGPAFFFKGFGPKKISFICFHNFIKKGGSCSPFTPLKF

SEQ ID NO: 243996 - protein, 172 aa, Glycine max
  unsure (1)..(172): unsure at all Xaa locations
  Clone ID: PAT_MRT3847_62356C.1.pep
MASSIQCSVWVPSLPNTNTIRFLSVNPNSVTFSSSSLTRIRASSSSPTVEEAAMNIDNLRRFINLNSGKWNGSFYQFDSCGNMLQQLSTKLSASSYGEDELMSLIQTLYIKQPSSSTSISGDDNDAEWAEYKIKETNMFTVDKYQQFXIGFFPSEKAFALRYQTAGMLETVL

SEQ ID NO: 243997 - protein, 64 aa, Glycine max
  Clone ID: PAT_MRT3847_62357C.1.pep
LAHLLPGGNLGTNNRSVQEGGKYRPSPPPGMLIGMPTLIILAHGRHPFATSRLSISTQLVRTLS

SEQ ID NO: 243998 - protein, 45 aa, Glycine max
  Clone ID: PAT_MRT3847_62358C.1.pep
TEAIISSQFHGNWALPQYECISFLEPKRCPINPLWDIFWPEHESG

SEQ ID NO: 243999 - protein, 90 aa, Glycine max
  unsure (1)..(90): unsure at all Xaa locations
  Clone ID: PAT_MRT3847_62359C.1.pep
PSKPLWTYSHLQRTISISTSPIIFHHNNPIYIQNFTYAQYTLKLHHNTHCSLHIXNNLLNNPKKILPYTLIKVFLTSLXPSKTYKLYSYL

SEQ ID NO: 244000 - protein, 67 aa, Glycine max
  Clone ID: PAT_MRT3847_6235C.1.pep
FITVGSVHAKKKKKKKKKKKKKKKKKKKKKKKKKKKKKKKKKKKKKKKKKKKKKKKKKGGAFLKKQI

SEQ ID NO: 244001 - protein, 382 aa, Glycine max
  Clone ID: PAT_MRT3847_62360C.1.pep
TAARRRQKGTYSSSSVRALTASLANNAFLKIPTLHHGECSLSSSSFIGSRLTLSRSSTLQGNQLLSRKQFVVFARKISGLEEAMNIRREREVRVVPKFKKRPPLRRGRVSPHLPVPDHIPRPPYVGSDILPEIASEHQIHDSEGIAKMRAAGELAARVLNFAGTMVRPSITTNEIDKAVHQMIIDAGAYPSPLGYGGFPKSVCTSVNECMCHGIPDSRQLQNGDIINIDVTVYLDGYHGDTSKTFFCGEVSDELKNLVKVTEECLEKGIAACKDGALFRKIGKRISEHAEKYGYGVVERFVGHGVGTVFHSEPIIIHNRNEKAGRMVEGQTFTIEPILSMGSIDSITWPDNWTTLTADGSPAAQFEHTILITKTGAEILTTC

SEQ ID NO: 244002 - protein, 137 aa, Glycine max
  Clone ID: PAT_MRT3847_62361C.1.pep
LCNLIGNSDSDFAGSKTDRKSTSGTCQFIGSALVSWLNKKQNSVALSTAEPEYISTGRCCAQILWMKQRLSNYGIVLDHIPIKCVNTSAINLSKKPVLHSRTKHIEIRHHCLRDHVLKGECVLEFVDTKNKTQAKLL

SEQ ID NO: 244003 - protein, 239 aa, Glycine max
  unsure (1)..(239): unsure at all Xaa locations
  Clone ID: PAT_MRT3847_62362C.1.pep
MRLRKGNKVEIRGNADGLSVEWCCARIISGDGHTYSVQYDCSSTTSEASIERVSRKAIRPCPPLIKGIESWAANDHVEVYIAGSWRAATVLKVIGGDFYLVRLWVSCKEFNVLKVNMRARQSXWQNGQWVVMSKGSGMSGDVMSSWYLISNSYKDQPENQCRNIFSPGLDTSGLQEFRLASFSVSIIMPPFDSFVFAAYIRKLRDVLNVCIWQWFKVVATVTLNGPALPANYPPCIMGA

SEQ ID NO: 244004 - protein, 229 aa, Glycine max
  Clone ID: PAT_MRT3847_62363C.1.pep
MRLRKGNKVEIRGNADGLTVEWRCARIISGDGHTYSVQYDCSSTTSGASTERVSRKAIRPCPPLIKGIESQAANDHVEVYNAGSWRVATVLKVIGGDFYLVRLWVSCKELKVRKVNMRPRQSWQNGQWVVVPKGSGKSSWCLISNSYKDQPENQCRNIFSPGLDASGLQESRLPSSSTLLSILAWPPRIRWTRLMCCAIPLTTPLLCLKKEHHCFALCCPTASDLLIMP

SEQ ID NO: 244005 - protein, 84 aa, Glycine max
  Clone ID: PAT_MRT3847_62364C.1.pep
KKKTEIIGKQKMGNPIFGKLTPTQKTFKKRTYPPHLTCLQMMDKTKGEKNGLNTGPPHYLVGVITPPKGIKRKRTLGKFGMIVK

SEQ ID NO: 244006 - protein, 143 aa, Glycine max
  Clone ID: PAT_MRT3847_62365C.1.pep
GLSIEGILKDKDIETPVVCNIFDVNGEVAAGVASVEAFEKYLTPDWIFRFKNTLLSAPVLMVDANLSHPSLEAACKMAIDMECPVWFEPVSVTKSRRISSIVEYVTFASPNEDELIAMANALSGSDEFHPLKESQKKNISVLS

SEQ ID NO: 244007 - protein, 157 aa, Glycine max
  Clone ID: PAT_MRT3847_62366C.1.pep
ALTVLFFFSPFLFLFPLFNFIKKKTLSPSNSTPQLEQKKPGGRPHHNPLSKKKNPTVLPPCSPPLGKQHYAEKKKKPPRDQNPLSSLKKVARKYQCRPPCQKINSIVPPKRCPGATLMGAALLQKGGTLKKTKTFFKVPLYFRRQKKQKNPQKKNLP

SEQ ID NO: 244008 - protein, 56 aa, Glycine max
  Clone ID: PAT_MRT3847_62367C.1.pep
TPDLGILSLKSMTIENALNIHLILSMQYGYFPESCTLIGKSICFKSIASSNLYLHM

SEQ ID NO: 244009 - protein, 44 aa, Glycine max
  Clone ID: PAT_MRT3847_62368C.1.pep
LETLQPVFHRVSNICSITHHVAARFISPINQYVLPLQKKRKRAA

SEQ ID NO: 244010 - protein, 59 aa, Glycine max
  Clone ID: PAT_MRT3847_62369C.1.pep
YGVSKKSPCRFVQSHVQYDMPNIYFGMKYSIIYMFTSSMMQNVNYPLINACICFFFFSI

SEQ ID NO: 244011 - protein, 57 aa, Glycine max
  Clone ID: PAT_MRT3847_6236C.1.pep
EQAKLAPWASTQRPKPGYERRCHEKMQNDPKCENITYPGHRQGNDHTFHRQTNTQPH

SEQ ID NO: 244012 - protein, 65 aa, Glycine max
  Clone ID: PAT_MRT3847_62370C.1.pep
DFTDILSFHCAHSTRKKKPSSSCSISDEHHCLNSNVTVGYVCASGDGCGQSSSIEPFLREWSCLM

SEQ ID NO: 244013 - protein, 157 aa, Glycine max
  Clone ID: PAT_MRT3847_62371C.1.pep
DAGIVLKSVKGVVSGLNIVDNMFSGLNKGVDIVKLDQSNSHFNQIDQVFVARNVVRGMNLKATAAKMSLLGNGTSWTADFNKVLLFPNLIKHVWTSLFTNVLLFPNHAQHVVYSLSANGNTFPNHALRNVSQNRVVIETDEAVNANVFVTVDQGNAS

SEQ ID NO: 244014 - protein, 74 aa, Glycine max
  Clone ID: PAT_MRT3847_62372C.1.pep
KDINNKSDKASEEYVTLAWCWISLVGLGKRPNPLSPFFLVYCHMRTNLGNTCDFIYLDVSIPLRGTFGDFVSFS

SEQ ID NO: 244015 - protein, 82 aa, Glycine max
  Clone ID: PAT_MRT3847_62373C.1.pep
KHSCSVYLIGLLLDLEMKLRGPEVASKTFYNTLGNCSVLISNMFGPLEQMALAQSSCKRCLFRHVWWTSECKRSNYELWWEN

SEQ ID NO: 244016 - protein, 90 aa, Glycine max
  unsure (1)..(90): unsure at all Xaa locations
  Clone ID: PAT_MRT3847_62374C.1.pep
RRFFXLIKMYFPMGYDIKHLMKFCSSLHGGGNKLXELLEVERGGVCHQAGSDRGGASCTFXKWRDTFFRGSTEKYAGVLYGLXGESGQTN

SEQ ID NO: 244017 - protein, 89 aa, Glycine max
  Clone ID: PAT_MRT3847_62375C.1.pep
LFLSIGCNEVWFIKIPCIADINSHSCVVGRGSFGICRPIIKIVGISRLQCAIIETGFQLLLSKRLVEVSLVDSLRWPVILIGLNERFGW

SEQ ID NO: 244018 - protein, 62 aa, Glycine max
  unsure (1)..(62): unsure at all Xaa locations
  Clone ID: PAT_MRT3847_62376C.1.pep
LIDTIGRKRIGLLYSEFLLLTVIYELLRSHVVRQSRSRDSNPNXITNKIYFFVSRNCTGXLE

SEQ ID NO: 244019 - protein, 79 aa, Glycine max
  unsure (1)..(79): unsure at all Xaa locations
  Clone ID: PAT_MRT3847_62377C.1.pep
CSVRREMCGIDKENTFKQPGXRYRSWASDRDDXINXLWVEAFSVPRVTHEIRSVWISYXWSQVDRFLRLKTCIFSEHEV

SEQ ID NO: 244020 - protein, 98 aa, Glycine max
  Clone ID: PAT_MRT3847_62378C.1.pep
TRQLNRTLLLNQIIHTIHHTFHTKGFIKGVVTFNDPSSSAMGYATLFKGPVNVSENVVSNGMDAFKIFGNVYGSSSPRIIFHIDCHDEFEIQFVVAHC

SEQ ID NO: 244021 - protein, 66 aa, Glycine max
  Clone ID: PAT_MRT3847_62379C.1.pep
EDCSTIGKMVVTSPKLTFPDMDHLQLEKDLVQLDFDPSDKAPGSKSYYLKIKPFYLKKHLLNSHFV

SEQ ID NO: 244022 - protein, 66 aa, Glycine max
  unsure (1)..(66): unsure at all Xaa locations
  Clone ID: PAT_MRT3847_6237C.1.pep
IRNFCGNVHTFNYDLYRVLLLLFDVRDPHASQVIMSNXAVWLNVMKEYLIYINKXISNMHLTCLEK

SEQ ID NO: 244023 - protein, 95 aa, Glycine max
  Clone ID: PAT_MRT3847_62380C.1.pep
PKGVFSKKGPVSSKKILGGFFGGVSKKIIWKNGFGKFRKKGVPFQLLGPGFYRKEIFKGSPFLARFFFPLFFFFPLFFLKGINWDKGGGFFLGKG

SEQ ID NO: 244024 - protein, 84 aa, Glycine max
  Clone ID: PAT_MRT3847_62381C.1.pep
IGVTNCSVQALDQNCQYLSSMIKKIFRHKGLSRTICGHASTTDGHMPRSHLDACSGSCLHVYSLFTPCGSKNRLEDLHEIICVC

SEQ ID NO: 244025 - protein, 296 aa, Glycine max
  unsure (1)..(296): unsure at all Xaa locations
  Clone ID: PAT_MRT3847_62382C.1.pep
MDTRKRGRPEPGFSLNGGFKKSKQEMESLSTGVGSKSKPCTKFFSTAGCPFGEGCHFLHYVPGGYNAVAHMMNLTPAAPPASRNVAALPPVPNGSAPPAVKTRICNKFNTAXEGCKFGDKCHFAHGEWELGKHIAPSFDDHRTMGPTGVGRLAGRMEPPPGPAASFGANATAKISVEASLAGAIIGKGGVNSKQICRQTGAKLSIREHESDPNLRNIELEGSFEQIKEASNMVKDLLLTLQMSAPPKTTPGVPGAPASHGSNFKTKLCENFTKGSCTFGDRCHFAHGAAELRKSGV

SEQ ID NO: 244026 - protein, 187 aa, Glycine max
  Clone ID: PAT_MRT3847_62383C.1.pep
FNTAEGCKFGDKCHFAHGEWELGKHIAPSFDDHHAMGPPGAGRLAGRMEPPGPAASFGANSTAKISVEASLAGAIIGKGGVNSKQICRQTGAKLSIREHESDPNLRNIELEGSFEQIKEASNMVKDLLLTLQMSAPPKTTPGVPGAPASHGSNFKTKLCENFAKGSCTFGDRCHFAHGASELRKSGV

SEQ ID NO: 244027 - protein, 83 aa, Glycine max
  Clone ID: PAT_MRT3847_62384C.1.pep
MDIRKRGRPEPGFSLNGGFKKSKQEMESLSTGVGSKSKPCTKFFSTAGCPFGEGCHFLHYVPGGYNAVAHMMNLTPAAPLPPT

SEQ ID NO: 244028 - protein, 57 aa, Glycine max
  Clone ID: PAT_MRT3847_62385C.1.pep
HTLWGKWRRKMNEQDLRNMRLDSEEALPSGNGSAYQNTQSHGDAALYPLQCSPSPSP

SEQ ID NO: 244029 - protein, 111 aa, Glycine max
  Clone ID: PAT_MRT3847_62386C.1.pep
HLYKCLIFQHSTPIGQTQRNPQAHLSLSIYGCPPNRTHAVHLRNRIHSTQPWTQPQPHIPQPSAPDPNLSNSPARHLFQPQHMTADTDPLPKTRFVSFTHPTRCSTPPATH

SEQ ID NO: 244030 - protein, 97 aa, Glycine max
  unsure (1)..(97): unsure at all Xaa locations
  Clone ID: PAT_MRT3847_62387C.1.pep
FYVFAHASGNGHHFCFIRELLRHLATFFVQSPILPLLLYWNLADTDRVLHELEEALLVSDFGPRITIKIVENLREDIFSGKLXSGNEIKEALKRNVL

SEQ ID NO: 244031 - protein, 67 aa, Glycine max
  Clone ID: PAT_MRT3847_62388C.1.pep
PCVRHIKYAHCARSTSSTTSPLLASVHHCRLACAGCLSCYVLHFPPTVKFIIIDQKTELNKRVRWSN

SEQ ID NO: 244032 - protein, 46 aa, Glycine max
  Clone ID: PAT_MRT3847_62389C.1.pep
GLSITKLFTRLLAKKEMRILMVGLNAAGKTTHLYNLKLVQIAPPFP

SEQ ID NO: 244033 - protein, 135 aa, Glycine max
  Clone ID: PAT_MRT3847_6238C.1.pep
RSCKLGPTFQSWLKTQSSLYILDISDNGINDSVPDWFWNKLQNMGLLNMSSNYLIGAIPNISLKLPLRQSILLNSNQFEGKIRSFLLQASELMLSENNFSDLFSFLCDQSTASNLGTLDVPHNQIKGQLPDCWKS

SEQ ID NO: 244034 - protein, 61 aa, Glycine max
  unsure (1)..(61): unsure at all Xaa locations
  Clone ID: PAT_MRT3847_62390C.1.pep
PLEAFLRFGKNLVEFLKKLLEKGPNGPLXNPYGPGKMPSPLLYPFSEEGLSFPGISPRVFF

SEQ ID NO: 244035 - protein, 401 aa, Glycine max
  unsure (1)..(401): unsure at all Xaa locations
  Clone ID: PAT_MRT3847_62391C.1.pep
MRMMMMTGVVRNDVVVVVDVDGWNGSDEGCDWIENENVNESVFDKVGVEYKDERSSGRAQQYPLRPEAEDCAFYLKTGTCKFGFNCKFNHPLRRKNQAKKENAGEREEQAERSGQMECKYYLRSGGCKFGKACKFNHTRGKSSSASATELNFLGLPIRVGEKECLYXRTGSCKFGANCRFNHPDPTTVGGGDSPSGYGNGSSISLQGVSQSSISSWSSTRPLNESAPFVPVILSPNPGVSPQSSEWNGYQAPVYLSERSLHPPSTYVMNNPAMESNVYMHHQKQMQVEEFPERPGEPECSYFLKTGDCKFKSNCKFHHPKNRIARLPPCNLSDKGLPLRPEQTVCTYYRRYGICKFGPACKFDHPPPSTMAGLDQQSSYTNSAGVDVAENGDADDGNQQSV

SEQ ID NO: 244036 - protein, 69 aa, Glycine max
  Clone ID: PAT_MRT3847_62392C.1.pep
MKPMASFSSQSIIRSTYNIGNEPQKQMILFFKKSLFKTTSSTNLLNSRLFFHVTCKHSNQWSLVLIKDP

SEQ ID NO: 244037 - protein, 55 aa, Glycine max
  Clone ID: PAT_MRT3847_62393C.1.pep
HCLLYELITYSVGVRVHIKCSVSASRVYRTEPDFECLVNRSVQPYISSTNILCSR

SEQ ID NO: 244038 - protein, 50 aa, Glycine max
  Clone ID: PAT_MRT3847_62394C.1.pep
PVQFTSGALHKWVNLLPETNSFFQKSHRTKDDTYEHNKLCNEISRDKFRA

SEQ ID NO: 244039 - protein, 45 aa, Glycine max
  Clone ID: PAT_MRT3847_62395C.1.pep
WSKRACVIRVYKVSLGVNAHNNSFHAFGSYRYESFQLTQYHFDER

SEQ ID NO: 244040 - protein, 103 aa, Glycine max
  Clone ID: PAT_MRT3847_62396C.1.pep
PSWAPTCSFISHQFPVGPGPTPGIYQEPLAILDRKFCHPVCIQLWLLSTANLSSKIIPIVKNRPRKVFLFFPNLSSVGSLPQTEGMRLKEPGVYQDCIVDLKE

SEQ ID NO: 244041 - protein, 118 aa, Glycine max
  Clone ID: PAT_MRT3847_62397C.1.pep
KKTCFDFLTNGSPENFGSLEKLGSPKEGLGILPMAKSSNLPNGASHTPSEFPRGNGNGPPVFNVNSNSPSSPSKTNHGLVLFPPCTLINTPGKPQNANAPLGLGFALGRTPNFFPPPS

SEQ ID NO: 244042 - protein, 61 aa, Glycine max
  Clone ID: PAT_MRT3847_62398C.1.pep
RTPLRTLQSLLSNCLITDRWLSFAFSPVPLTSPGACDTLSSLSPLDLKNPLILSPDNHKGP

SEQ ID NO: 244043 - protein, 499 aa, Glycine max
  unsure (1)..(499): unsure at all Xaa locations
  Clone ID: PAT_MRT3847_62399C.1.pep
MVLAELGGSISRALQLMSNATVIDEKVLNDCLNDITRALLQSDVQFKLVRDMQTNIKNIVNLDDLAAGHNKRRIIQQAVFNELCKILDPGKPSFTPKKGKTSVVMFVGLQGSGKTTTCTKYAYYHQKKGWKPALVCADTFRAGAFDQLKQNATKAKIPFYGSYMESDPVKIAVEGVERFKQENCDLIIVDTSGRHKQEAALFEEMRQVSEATKPDLVIFVMDSSIGQAAFDQAQAFKQSVAVGAVIVTKMDGHAKGGGXLSAVAATKSPVIFIGTGEHMDEFEVFDVKPFVSRLLGMGDWSGFMDKIHEVVPMDQQPELLQKLSEGNFTLRIMYEQFQNLLKMGPISQVFSMLPGFSAELMPKGREKESQAKIKRYMTMMDSMTNEELDSSNPKLMNESRMMRIARGAGRQIREVMEMLEEYKRLAKIWSKMKGLKIPKKGDMSALSRNMNAQHMSKVLPPQMLKQIGGMGGLQNLMKQMGSAKDMMGMGGMFGGGGGD

SEQ ID NO: 244044 - protein, 222 aa, Glycine max
  unsure (1)..(222): unsure at all Xaa locations
  Clone ID: PAT_MRT3847_6239C.1.pep
MEFYDQDFLEELMTLRRETWDTNPRTEENQFFDGGSFDCFDQNSLPYLPNSSCGQEVPQTYNNDYPFSEIYGSLLDESSPQIMDSFYSTLDTPLNTPPFLGQEDYPILSMMEEEEQGLLGEELKNLELQTTCKMEPTQSSEMPVFNMGTGLERKNRSKKLQGQPSKNLMAERRRRKRLNDRLSMLRAIVPKISKMDRTSILGDTIDYMKELLXKINNLQACK

SEQ ID NO: 244045 - protein, 60 aa, Glycine max
  Clone ID: PAT_MRT3847_623C.1.pep
TQNFHFIFVGIFLNYLWVFTHRNFPLNSNHISFSSRIGPIRKQIISIHLRTFLASQFLNM

SEQ ID NO: 244046 - protein, 87 aa, Glycine max
  Clone ID: PAT_MRT3847_62400C.1.pep
LFFFFFFFFFFFFFFFFFFFFFFFFFFFFFKKEKRHKQSLALKKSTHPGNPRKRGGTESFNYLFPITASEKRPKFKGKPRQLYLKGH

SEQ ID NO: 244047 - protein, 100 aa, Glycine max
  Clone ID: PAT_MRT3847_62401C.1.pep
LLIQSSKLLLFWLVFLGPLLAIPIIDRKAPIPLPLAPDPLPQFLLPSLTYFTTLERKKLNSYEPPCIVALLFSRCLGAPFITPIHLRSNRTRLNKRSCIP

SEQ ID NO: 244048 - protein, 36 aa, Glycine max
  Clone ID: PAT_MRT3847_62402C.1.pep
LVLLDDKQYSKLGEPINVKFIGFFYVFRDHYLPFYV

SEQ ID NO: 244049 - protein, 380 aa, Glycine max
  Clone ID: PAT_MRT3847_62403C.1.pep
MSSKPFTNFLVIFTLVLLCLVGSSHTNCHFWAIFNFGDSNSDTGGFWAAFPGQSGPYGMTYFKKPTGRASDGRLIIDFLAQALGLPFLSPYLQSIGSDYKHGANYATMASTVLMPNTSLFVTGISPFSLAIQLNQMKQFKTKVEEKVEQGIKLPSSDIFGKSLYTFYIGQNDFTSNLAAIGIGGVQQYLPQVVSQIASTIKEIYNLGGRTFLVLNLAPVGCYPAFLVELPHNSSDIDEFGCLVSYNNAVVEYNNMLKETLRQTRESLSDASVIYVDVYSVLLELFRHPTSHGLKYGIKACCGYGGGDYNFDPKAYCGNSKVINGSRVTSTACIDPYNYVSWDGIHATEAANKLTTFAILNGSFSDPPFPFHERCDLQPIG

SEQ ID NO: 244050 - protein, 57 aa, Glycine max
  Clone ID: PAT_MRT3847_62404C.1.pep
MAGDGAATCIDILLAIILPPLGVFLKYGCQVEFWICLVLTLFGYIPGIIYAVYSITK

SEQ ID NO: 244051 - protein, 51 aa, Glycine max
  unsure (1)..(51): unsure at all Xaa locations
  Clone ID: PAT_MRT3847_62405C.1.pep
CSVTARVGVLAARHCTDRHHPRSEIATRSRHSGLTSFQXHVPLEPELACXT

SEQ ID NO: 244052 - protein, 152 aa, Glycine max
  unsure (1)..(152): unsure at all Xaa locations
  Clone ID: PAT_MRT3847_62406C.1.pep
KACGYQRLNPNELRAVMEILNFICDQIVEGNTLDGLNWKSEAIVPDDGCRLVHSASCVYVDSYGFSXMVKCIDTSRIRFVHADLPEGVCIMLCIKKLSDIVLEELDENHTLQTLGSLGSVSLVTIKQKLSSKSLQTAVWTIGNSMGSYIPAF

SEQ ID NO: 244053 - protein, 107 aa, Glycine max
  unsure (1)..(107): unsure at all Xaa locations
  Clone ID: PAT_MRT3847_62407C.1.pep
HHLTLAIQLTLSSPPLLPFSFSQGIDLLLLNTTTASRDVLVAHVDMHSCNFHAAVIMGLDAHVLDHAADAKVPXMTSPRSTDPMANKAKVNNVKKVNDPNMPKRPPT

SEQ ID NO: 244054 - protein, 248 aa, Glycine max
  unsure (1)..(248): unsure at all Xaa locations
  Clone ID: PAT_MRT3847_62408C.1.pep
MPTMRSRKLFNSFYRTISSSSFPPPPVVSSRRVVVTGLGMVTPLGCGVDTTWKRLVGGECGVRALSLEDLKMNAFDRETQLSTFDQLTSKVAAVVPTGTNPGEFDHQIWLNSKDHRSIARFIAYALCAADEALKDSNWFPIEQQDKERTGVSIGGGTGSVSDILDSAQLICEKRLRRLSPFFIPRILINMASGHVSMKYGFQGPNHAAVTACATGSHSIGDXMRMIQFXDADVMVAGGTESSIDALSI

SEQ ID NO: 244055 - protein, 38 aa, Glycine max
  unsure (1)..(38): unsure at all Xaa locations
  Clone ID: PAT_MRT3847_62409C.1.pep
FLYHQQDRIIKAVYRGELVLFFXMFTSLTQNSYVFLQC

SEQ ID NO: 244056 - protein, 45 aa, Glycine max
  Clone ID: PAT_MRT3847_6240C.1.pep
EALIHASPFYTHNSTLAGTVKEEALHLLNFTHMFLGMRTDPKTTT

SEQ ID NO: 244057 - protein, 236 aa, Glycine max
  unsure (1)..(236): unsure at all Xaa locations
  Clone ID: PAT_MRT3847_62410C.1.pep
NWDLPRLESSSNNAEYYLIGDHSSSSGQRTGETLXSRTSGVTLQVVPLTTIQSSHIPSATGIGDDPSTGKSEILSTPQVVACDEVTKAQYSNVNVSVGESNAPAIPVTQTDEIMRDLSTIPDIVAGNILDIPQENYMAPETGGEGYMDPTSFGVNVSLPIDFDSISPEADIDDLLNNPHFWDDILRTPVSEEIDTNDAEVFKENEVQPMENGLDKSQNMDQLTEQMGLLSSDAKRI

SEQ ID NO: 244058 - protein, 44 aa, Glycine max
  Clone ID: PAT_MRT3847_62411C.1.pep
ALGAFMGASSGLPYPVILLYALTLKNVLGANNKALISPANNKRK

SEQ ID NO: 244059 - protein, 225 aa, Glycine max
  Clone ID: PAT_MRT3847_62412C.1.pep
MSSTTVVGSISTTAALTPLLPSSRTSRSRTTFGANSTSTSFPATPLSSNLLFFKLNHTSSSSSKRTSTFHAFKRFSPVMEWQDCTVKMEIDVPISVAYTCYSDREAIPNWMPFISSVKILPDKPDLSRWSLKYKAFGRDIEFSWLARNMQPIPNQKIHWRSMEGLPNRGAVRFYPKGPSSCVVELTVSYEVPQLLAPVASALQPFLEGLLQRGLERFAKFAKSYT

SEQ ID NO: 244060 - protein, 109 aa, Glycine max
  Clone ID: PAT_MRT3847_62413C.1.pep
MVSKKRSTNSHFLFMIEASDQLALLSNISFGFQSFSGKKSTHFYMRITPTTSGPEVSALEQKNLAPIAHIIAPALDATFPPRQMPHIDTALIIKGRDTVGQQINVTRVP

SEQ ID NO: 244061 - protein, 96 aa, Glycine max
  Clone ID: PAT_MRT3847_62414C.1.pep
VTKDSAGDYQDCGASSMLLMGEPPWCPPCPESSLHSANRSNAVMRYKEKKKTRKFEKKVRYASRKARADVRKRVKGRFVKAGDVYDYDPLNQTRSY

SEQ ID NO: 244062 - protein, 90 aa, Glycine max
  Clone ID: PAT_MRT3847_62415C.1.pep
TERQPKFMTHCMKGAVCDAAVMSAEIATGIAHCSEGHNLLLSFYTVNFIGQGPAYNLLPLEENLCPFYRTWSLATDSAASQGHSHRHHRL

SEQ ID NO: 244063 - protein, 46 aa, Glycine max
  Clone ID: PAT_MRT3847_62416C.1.pep
HASEGGNGQDTESPSKDTRTERVESYAAKPSTKKWFCCVTASPTQS

SEQ ID NO: 244064 - protein, 83 aa, Glycine max
  unsure (1)..(83): unsure at all Xaa locations
  Clone ID: PAT_MRT3847_62417C.1.pep
XFGVARIXXXFNXTXXXVXXLSGRETXVRXTGGMKVKAEGDESSPYAXMXAAQDVAXRCKEXGXTAXXIKXRAXGGKXXXGAG

SEQ ID NO: 244065 - protein, 76 aa, Glycine max
  Clone ID: PAT_MRT3847_62418C.1.pep
MGRRPRGLICRFKSKPYPKSRFCRGVPDPKIRIYDVGMKKKGVDEFPFCVDLVSSEKENVSSEALEAARIACNKYM

SEQ ID NO: 244066 - protein, 78 aa, Glycine max
  Clone ID: PAT_MRT3847_62419C.1.pep
ANWHLPLPTPSFSPSIIRYLIKKTTKSCHGNQVITCMFYDQYNSTSTGWLKLSMLCFVYFSLCTYSNLDQYTLRLFFI

SEQ ID NO: 244067 - protein, 144 aa, Glycine max
  Clone ID: PAT_MRT3847_6241C.1.pep
QVKPEKGENNAITAHGRTDPAQPTGFVFQNCLINGTEEYMTLYHSKPQVHKNYLGRPWKEYSRTVFINSFLEVLVTPQGWMPWSGDFALKTLYYGEFESKGPGSYLSQRVPWSSKIPAEHVLTYSVQNFIQGNDWIPSIGSPSS

SEQ ID NO: 244068 - protein, 38 aa, Glycine max
  Clone ID: PAT_MRT3847_62420C.1.pep
PYSASAILSLIAYVLGQKSSRSTSSAIVNIRSALARAE

SEQ ID NO: 244069 - protein, 101 aa, Glycine max
  unsure (1)..(101): unsure at all Xaa locations
  Clone ID: PAT_MRT3847_62421C.1.pep
YVRVRKLGIRLEXXVIXGRXDQXWXXLXXXWYTXXAXXSHXIXXXXXXXRXLXXGXXGXXXAXAXXKXQRXXXAXXVXXXNXLXRVVPGXXXFAIXXXVIS

SEQ ID NO: 244070 - protein, 97 aa, Glycine max
  Clone ID: PAT_MRT3847_62422C.1.pep
PGFKILGLRKRPVNFSGDRPFFIHLTPRHVMFEYVVLVISILNQRGSAQCLLLFHICKDTNFGGGGGPGHGSTPICQNIIVLLTKKKRKAGRSLVSP

SEQ ID NO: 244071 - protein, 545 aa, Glycine max
  unsure (1)..(545): unsure at all Xaa locations
  Clone ID: PAT_MRT3847_62423C.1.pep
GLGRKQKPKNHEVSEVHLSNFCGSSLSISLTISLPIEEAFNHCLTQHSQTPNQFPSSIYTYTNGSFTSILESTAQNLRYLLPSVPKPDFIFTPLDDSQVQAAVICAKKLGIHMRVRSGGHDYEGLSYVSLIEKPFMILDLAKLRAVNVDIARNTAWIQAGATIGEVYYRISEKSAVHGFPASLCTTLGXIGGHITGGAYGSMMRKYGLGADNVLDARIVDAKGRVLDRKAMGEDLFWAIRAGGGGSFGVILWWKIKLVPVPQTVTVFTVTKTLEQGGSKLLHRWQQVAPKIDENLFIRVIIQPGNGTVPGKRTLTTSYNALFLGGADRLLQVMKHGFPELGLTIKDCVETSWIKSVLYIAGYPDGTAPEVLLQGKSTTKAYFKAKSDFVREVIPEKSLDALWKIFVQDDGPLMIWNPYGGKMSRIAESATPFPHRKGVLYKIQYVTGWLDGEKSMAKHMNWMRKFYFYMAPYVSKYPRETYVNYRDLDIGMNQKNNTSLLKAWSWGYRYFKGNFNRLVKVKTKVDPSNFFRHEQSIPLLPTGKKE

SEQ ID NO: 244072 - protein, 144 aa, Glycine max
  Clone ID: PAT_MRT3847_62424C.1.pep
MKRQRENEVTTLESWDMQICSTSITPDTSVSSSTISPEDVFECKTCNRKFNSFQALGGHRACHNKRVKMEGEEQQLKTRAKYLGLGKHSEPKMHNCSICGQGFSLGQALGGHMRRHRASTNDVFSSIKQVVAKVSVLKRSCNDK

SEQ ID NO: 244073 - protein, 58 aa, Glycine max
  Clone ID: PAT_MRT3847_62425C.1.pep
PPLKLKLLWPPPRGILGAPPPPPPPPPPPPPPPPPPPPPPPPPPPPPKDRRTSYSDDR

SEQ ID NO: 244074 - protein, 49 aa, Glycine max
  Clone ID: PAT_MRT3847_62426C.1.pep
TKSGKEHHSLSLWPAHRVIFFPLTSRQQRSRVELESFLVTSKDSFCFRL

SEQ ID NO: 244075 - protein, 155 aa, Glycine max
  unsure (1)..(155): unsure at all Xaa locations
  Clone ID: PAT_MRT3847_62427C.1.pep
GAYRCVSELWRMTQADVMRXLQWLRSWEDMLYPYVVRLTRXASPDKAQCLGLKAKQGYVIYRVRVRRGGRMRPDPIGIVYGKPADQGVSQLKLQRDRRSVAEERAGRXLSGLRVLISYWVNEDYTYXYYEVNLVDVAHAAIIADHGVNCLAHPLR

SEQ ID NO: 244076 - protein, 61 aa, Glycine max
  Clone ID: PAT_MRT3847_62428C.1.pep
TTRLSACPSRRRRSLSRWTRVLTYLRVDQLLTFPALNPDLKTLGPYHNPKKHHHPTPFRPE

SEQ ID NO: 244077 - protein, 91 aa, Glycine max
  Clone ID: PAT_MRT3847_62429C.1.pep
MMASTSTFRWRFGVMASTSSWAPMWDLSTVSSWPLASYISPRWSPRRLLRWSGMMSVSIVDELVWRVVTAFESVALVSMLCFFFLFCGCTF

SEQ ID NO: 244078 - protein, 254 aa, Glycine max
  unsure (1)..(254): unsure at all Xaa locations
  Clone ID: PAT_MRT3847_6242C.1.pep
MLPLLSRSCGERVKGSNSNMFGLHRTKLLLFSTCVARGFTNFPNGHEFGSEFAMMSRDQVQLGRIPVSDKLVYWFVTRPRTSKDSTIWKDPVLIRQSLIESMKGFPEGAVEIIRNCKLSFLHLTELKYRAPWDLVFNKFRKGTVTIAGDAMHATGPFIAQGGSASIEDALVLARCLAQKKAEETAEINIAEAEEAFDQYVKERKMRNFWLSLHSFLVGKKLDTKSSIVRFIILAIMGILFRDPDWHSRYHCGXL

SEQ ID NO: 244079 - protein, 46 aa, Glycine max
  unsure (1)..(46): unsure at all Xaa locations
  Clone ID: PAT_MRT3847_62430C.1.pep
QXLVRXYQAQTQGKLSNQHLXXWRXXRGKVWXMFGXXALAPVAVAP

SEQ ID NO: 244080 - protein, 93 aa, Glycine max
  unsure (1)..(93): unsure at all Xaa locations
  Clone ID: PAT_MRT3847_62431C.1.pep
FDGRVVAKALFEGQLXLEADFTLSFFIAILGVKAXYQDIEARDPDNYTKSKWMLKIDASALTDLTSPLDYLEENHIFYQNNDVTDXKLKPAGR

SEQ ID NO: 244081 - protein, 113 aa, Glycine max
  Clone ID: PAT_MRT3847_62432C.1.pep
PTGAYILCATARAYIYFCCDTENKRGYISCGSVQVEHTSTWWFKENKGGYIPCGSFLVKVFTTLLEISRTGGCLGTGCRHGLLPNQYKSCLCLLFLYTFYFSTVYFYFHFTFV

SEQ ID NO: 244082 - protein, 52 aa, Glycine max
  Clone ID: PAT_MRT3847_62433C.1.pep
LAVVLKSGDWENLGVTKFNGFEENSFFASWGNRKKARTDGFFKNLGTLNGKW

SEQ ID NO: 244083 - protein, 138 aa, Glycine max
  Clone ID: PAT_MRT3847_62434C.1.pep
VVFDGPLSLAFRLIYVHNFIVHLPTSDPPPTPARLHRAIPPHDQNPRTKPPHRRRSATFPKSQPICFITHTHLACNRTNCPHCALNISRSLCCRRSSGAVSLPQQSLLRSLFSFSLFLRQPHRTRFRKSLRVTTADLC

SEQ ID NO: 244084 - protein, 44 aa, Glycine max
  Clone ID: PAT_MRT3847_62435C.1.pep
FLDYIIKWGVFSFLHKFICLKCKKILLFNYVIGPNSIVCSYIWS

SEQ ID NO: 244085 - protein, 70 aa, Glycine max
  Clone ID: PAT_MRT3847_62436C.1.pep
FWSSNLKLKHLILLFYKISDFDSTIQINELTIKNSLIKLLFLSTEAYFNFKRKNQNLPSKFIPYSTATLH

SEQ ID NO: 244086 - protein, 75 aa, Glycine max
  unsure (1)..(75): unsure at all Xaa locations
  Clone ID: PAT_MRT3847_62437C.1.pep
HHGFYLGSTHTGLVKEVTLVGIKVKFLESKVPSGNEXXPLFLSKWVICXXGKALFLNQPGVNPPFIKIELIIWNH

SEQ ID NO: 244087 - protein, 312 aa, Glycine max
  Clone ID: PAT_MRT3847_62438C.1.pep
RDLSPPPVASFNRSYPVTSPNEYSLFFANCAPETSVTMSVHTEAYNLDADGSRDYLSAGQTLLPSLYFLFFLTYLSFFSFWLYICYTNKLSVHRIHLLMSLLLGMKALNLICAAEDKHYVKATGTPHGWDVLFYIFQFIRVVLLFTVIVLVGTGWSFLKPFLQEREKKVLMIVIPLQVLANVASVVIGETGPFIKDWVTWNQVFLLVDIICCCAIIFPIVWSIRSLRETSKTDGKAARNLAKLTLFRQFYIVVIGYLYFTRIVVFALKTIAAYKYQWVSNLAEEAASLAFYVVMFYMFRPVERNEYFVLDEV

SEQ ID NO: 244088 - protein, 74 aa, Glycine max
  Clone ID: PAT_MRT3847_62439C.1.pep
LRCIHVSLLCVQQYPEDRPSMTLVIQMLGSETVLIEPKEPGFFPRRFSDEGNLSTIPNHMSSNEELTITSLNGR

SEQ ID NO: 244089 - protein, 54 aa, Glycine max
  Clone ID: PAT_MRT3847_6243C.1.pep
HPGIASAVVVAIPHAPLAEMVAACVPLGHPWQWAEQLSATIEQFLLSNGHIQQY

SEQ ID NO: 244090 - protein, 348 aa, Glycine max
  Clone ID: PAT_MRT3847_62440C.1.pep
MAEEALLQNKQVLFKGYIDGVPKETDMELKVDSHIALKPPPQGSSAILVKNLYLSCDPYMRGRMRDFHGSYIPPFLPAQALEGFGVSKVIHSDNPNYKPGDFITGFTGWEEYSLIQRTEQLRKIHPDDAIPLSFHVGLLGMPGFTAYAGFYEVSTPSKGEYVFVSAASGAVGQLVGQLAKLHGCYVVGSAGSKEKVDLLKNKLGFDEAFNYKEELDLNAALQRYFPQGIDIYFDNVGGDMLDAALLNMRIHGRIAVCGMVSQQSLSKPIGIYNLFNLITKRIKMQGFLQSDYLHLYPRFLEDVSSYYKQGKIVYIEDMNEGLESAPAAFVGLFHGKNVGKQVIRVAHE

SEQ ID NO: 244091 - protein, 113 aa, Glycine max
  Clone ID: PAT_MRT3847_62441C.1.pep
LNIFHTKKTHSKGPETGPSSTKGEINKGGDTAPFSLKKQGGGKFENGGYPLGGGNGQKKKKIWGRTPRGPLKGNKKEKENGRTKKRGKSPKLAGKKRAYEGNFCTIPGGGREG

SEQ ID NO: 244092 - protein, 49 aa, Glycine max
  Clone ID: PAT_MRT3847_62442C.1.pep
SLLDLYLSYWISHFTSLAIGYRKQHISNMVTADIARTVVGIIGNIISGC

SEQ ID NO: 244093 - protein, 103 aa, Glycine max
  Clone ID: PAT_MRT3847_62443C.1.pep
SKLQAWEEYSHIRRIHPDHAIPLSFHVGLLGMPGFTAYAGFYEVCTPSKGEYVFVSAASDAVGQLVGQLAKLHGCYVVGSAGSKEKIDLLQNKLGFDEAFNYK

SEQ ID NO: 244094 - protein, 56 aa, Glycine max
  Clone ID: PAT_MRT3847_62444C.1.pep
ATRRTMRPFSPLNSTGVIIISHQSFKFYIISGGISTTWESIRSFISLASMGVTIIL

SEQ ID NO: 244095 - protein, 65 aa, Glycine max
  Clone ID: PAT_MRT3847_62445C.1.pep
QAVSFSVHVAGRHLNPLPPWSLEVNCVQNTPLGQKDCLKGQAIFIRRDINLKWEWCPRPVVACHR

SEQ ID NO: 244096 - protein, 122 aa, Glycine max
  unsure (1)..(122): unsure at all Xaa locations
  Clone ID: PAT_MRT3847_62446C.1.pep
KRGRGGSAGNKFHMSLGLPVAATVNCANNTGAKNLYIISVKGIKSHLNHLPSTYINNIMMATVKKGKPNLKKKVLPXIIVHQHNPXHRKDSVYIYFKDNTNIIINPKEEIKSSTITNPIRKE

SEQ ID NO: 244097 - protein, 104 aa, Glycine max
  unsure (1)..(104): unsure at all Xaa locations
  Clone ID: PAT_MRT3847_62447C.1.pep
EYPFAVKSGRMGRNVDFLPRCSFARSCVRGMLSICIEGEGSCVPKQSXXSQMKYXXNALFFSYGGVSFLLRDPLSLKFSNDDVLSYHYNVTRLLSLISILENLA

SEQ ID NO: 244098 - protein, 84 aa, Glycine max
  Clone ID: PAT_MRT3847_62448C.1.pep
SISLFTVLLVLFPFLPETVPLTQITWQLTTINTRDKSLKMLNKINTCARALKTQAFVMGFYVRQNCFSRESLIKERNFLLPKGP

SEQ ID NO: 244099 - protein, 200 aa, Glycine max
  unsure (1)..(200): unsure at all Xaa locations
  Clone ID: PAT_MRT3847_62449C.1.pep
MIMAALSTLTPSQLSDLTRFIISGTNHHHRRLSCLLYSPTLFYLTLHHLHTLTLPHKTLLIDRHLLSSLHLLTGTSPAMSTTTRQSNLDAALILLLLXETHNHNPHALAGTVXEWRKNLSRVFSDSMITVSLAPLGTVMITCDETVSRCWRLEGALNCGGGKEAAPAAIMVALPKVDVSDREKETVICKEEMGIGRDVCQ

SEQ ID NO: 244100 - protein, 113 aa, Glycine max
  Clone ID: PAT_MRT3847_6244C.1.pep
LFAGGAAPPPADPPDLPCSLFCIFLSLCRDFRVCDAILICPRVLVGLLLEPTAIVRVSILTAEITIITTYDGFLLNSKNILLIEVCFHLDTNCLYATLILLCIDILTFSISLK

SEQ ID NO: 244101 - protein, 68 aa, Glycine max
  unsure (1)..(68): unsure at all Xaa locations
  Clone ID: PAT_MRT3847_62450C.1.pep
GGGGIGAFWPSPIFVGALNSVPLVPNFLGWVGVGSPGGFVSRSLLFXFSRKGLAPPLVSFKKKISGTE

SEQ ID NO: 244102 - protein, 116 aa, Glycine max
  Clone ID: PAT_MRT3847_62451C.1.pep
SLAKFMELITYFLNFCIPVSMQEHFYDNDTTSCSILVVQLYETVPNVILVSSRWFVFVHAHSYCKITVILICQSYLQQITLSFISLCFLIWSFIYDNMGKGGAMDWVGWIRNQNHC

SEQ ID NO: 244103 - protein, 256 aa, Glycine max
  Clone ID: PAT_MRT3847_62452C.1.pep
MLLRFLQLWIMLRFACVSCAARQDPFAMHISCGARQNVQTKPTNTLWREDFGFTGGIAANATRPSFITPPLNTLRYFPLSEGPQNCYNINKVPKGHYSIRIFFGLVGRSKDTSEPLFDISIEGTQIYSLKPGWNKQNDQVFVEALVFLTNDSVSICFHSTGHGDPAILSIEIQQIDDKAYYFGPWWSQGIILRTVKRLSCGFGQSKFDVDYGGDSRGGDRFWQRIKTFGDESDQPRSVETRIKQASHPPNFYPETL

SEQ ID NO: 244104 - protein, 102 aa, Glycine max
  unsure (1)..(102): unsure at all Xaa locations
  Clone ID: PAT_MRT3847_62453C.1.pep
DNTTIARNGGRVHCMQVRPPFGKKKLDTLSYLPDLDDAHLTXEVEFFLKKGWTTCLEXELEHSIQYLEHNRTPAYXYGRFWTMLNLPMYDCTDASEVLEDLQ

SEQ ID NO: 244105 - protein, 65 aa, Glycine max
  Clone ID: PAT_MRT3847_62454C.1.pep
QFKGSYILKLLIFFKDNYHVFLVPLLHCINLVEKETLFHHSSVLAGGATLAARRLVEENGILKVN

SEQ ID NO: 244106 - protein, 55 aa, Glycine max
  Clone ID: PAT_MRT3847_62455C.1.pep
KNACHNMIVDCASALFKERLKVLQECAQLIGKQRGSPFPYDSLKESAPLGFIEPN

SEQ ID NO: 244107 - protein, 82 aa, Glycine max
  Clone ID: PAT_MRT3847_62456C.1.pep
ALVRFQSSKKGDRPLDFWTINLRDAALSLGQISGENKSEGVLSKKFGKFCIGKKKGAKNGLGDFKQVFFTPFHQSCIGRQIQ

SEQ ID NO: 244108 - protein, 251 aa, Glycine max
  Clone ID: PAT_MRT3847_62457C.1.pep
MASEEVLKAVFPFLDGVDLASCMAVDKQWKDIASDDFLWKCLCAKRWPSICKQPNPSTLTYYKFYKTFHKRQHRRTLLPPRISFDDLEFFIDIWAENTLLFSEVVPGSVLQAGFKAPASGVCDMLKFQLEGSEYKMTFPVEPRFTIPSGQNQNVSVSVMVGRKDSNKVARVINKSMFDYIDRSSYRALAFDYLDISPGYPFLSGIRAWISLLFMEDRNEDLMDVFGIQMDFCDVANSKEEVLWLLDMLDWK

SEQ ID NO: 244109 - protein, 111 aa, Glycine max
  Clone ID: PAT_MRT3847_62458C.1.pep
KLGRLLACVFPRFFSPPDYVFQIGDKGRLKFLSCQGGPFALSPGGFSPLGGPFFLLSYSLPRSSRAPKKIFGKCLIFFFKKKKKKKKKKKKKKKKKKKKKKKKKKKKKKKK

SEQ ID NO: 244110 - protein, 109 aa, Glycine max
  Clone ID: PAT_MRT3847_62459C.1.pep
WSFSTLKRLHLHPSSGLLNFSSKLCFISFTTCDFQPCLPTITIRCYLLLYFSFNFKDNQQLGSYIYTCIPSFIALIFLKTKLEPIPSNFNDVIFFCASLLLISFFFSKH

SEQ ID NO: 244111 - protein, 40 aa, Glycine max
  Clone ID: PAT_MRT3847_6245C.1.pep
CGAHSIEDHGSKNDPDLVTYINFSSSEQGNTVYRVCITHK

SEQ ID NO: 244112 - protein, 107 aa, Glycine max
  unsure (1)..(107): unsure at all Xaa locations
  Clone ID: PAT_MRT3847_62460C.1.pep
DSSAEERKEKSFIKTRRTPHXGKQXXEASAKXGKPTXXKEREXTXXDPPKAQHNHXXEAXGEKQDRGEXXEQEKXXKAXKXREDXKTTPGHPQRAEQHKNNXAXKEA

SEQ ID NO: 244113 - protein, 73 aa, Glycine max
  Clone ID: PAT_MRT3847_62461C.1.pep
IFNEIRLFTLALNIYSTTTIHQPYIITRFSYAYNHFMQLNYTYHYFLLKMMPCYSIINHSFQCPLITKTFPSL

SEQ ID NO: 244114 - protein, 48 aa, Glycine max
  Clone ID: PAT_MRT3847_62462C.1.pep
KNLLVGESPHGEKPGIYISQVSPDPKSGHKWGVHGGIPFTLIMPNTPG

SEQ ID NO: 244115 - protein, 282 aa, Glycine max
  Clone ID: PAT_MRT3847_62463C.1.pep
NRCNCFNGNSNDSSDEELDIFGKKNSSGSFSDASDGRVGGCEKTTEGERNLLADTSKIVDKNSKVYKRKGDLRKIVTESLSSLGYDSSICTSKWDKTPTYPAGEYEYIDVVVEGERLIIDIDFRSEFEIARSTGTYKAILQSLPFIFVGKSDRLCQIVAAVSEAAKQSLKKKGMHVPPWRKAEYILAKWLSSSCTRANPPSSSAVNDSTENLIDGRESECGELELIFGEKASSPKPETFPGGENSLPSVVMPTWQPPAVRVRSVERGAKVVTGLASLLRDKP

SEQ ID NO: 244116 - protein, 50 aa, Glycine max
  Clone ID: PAT_MRT3847_62464C.1.pep
LYDGCFTLGTNHERDVALTTQEMMGVIKKGGTAGVAVTTGASEACAQDAH

SEQ ID NO: 244117 - protein, 411 aa, Glycine max
  Clone ID: PAT_MRT3847_62465C.1.pep
MALRLNPIPTQTFSLPQMPSLRSPRFRMASTLRSGSKEVENIKKPFTPPREVHVQVTHSMPPQKIEIFKSLEDWAEQNILTHLKPVEKCWQPQDFLPDPSSDGFEEQVKELRERAKELPDDYFVVLVGDMITEEALPTYQTMLNTLDGVRDETGALQTTDTIWTRAWTAEENRHGDLLNKYLYLSGRVDMKQIEKTIQYLIGSGMDPRTENSPYLGFIYTSFQERATFISHGNTARLAKEHGDIKLAQICGMIASDEKRHETAYTKIVEKLFEVDPDGTVMAFADMMRKKIAMPAHLMYDGRDDNLFDSYSSVAQRIGVYTAKDYADILEFLVGRWKVEQLTGLSGEGRKAQEYICGLPPRIRRLEERAQARVKESSTLKFSWIHDRERTTLNAPREEHGEIFRQYRSEKC

SEQ ID NO: 244118 - protein, 50 aa, Glycine max
  Clone ID: PAT_MRT3847_62466C.1.pep
IKRGFPTEALKILVFFWDDPHYYNTFSRELTAFFFLTRHPGDRTQFFFFF

SEQ ID NO: 244119 - protein, 91 aa, Glycine max
  unsure (1)..(91): unsure at all Xaa locations
  Clone ID: PAT_MRT3847_62467C.1.pep
MAPSGSNFLSALLCVSPLSLGGSVPAEWHNHGLVMHFYRESFPLAEDIIILPVTLRYTLHMTTAXSWLTNIFHHCAVHTCDASLLPHSTIR

SEQ ID NO: 244120 - protein, 422 aa, Glycine max
  unsure (1)..(422): unsure at all Xaa locations
  Clone ID: PAT_MRT3847_62468C.1.pep
MLPLLHLTHSSMALRLNPIPTQTFSLPQMPSLRSPRFRMASTLRSGSKEVENIKKPFTPPREVHVQVTHSMPPQKIEIFKSLEDWADQNILTHLKPVEKCWQPQDFLPDPSSDGFEEQVKELRERAKEIPDDYFVVLVGDMITEEALPTYQTMLNTLDGVRDETGASLTSWAIWTRAWTAEENRHGDLLNKYLYLSGRVDMKQIEKTIQYLIGSGMDPRTENSPYLGFIYTSFQERATFISHGNTARLAKEHGDIKLAQICGMIASDEKRHETAYTKIVEKLFEVDPDGTVMAFADMMRKKIAMPAHLMYDGRDDNLFDSYSSVAQRIGVYTAKDYADILEFLVGRWKVEQLTGLSGEGRKAQEYICGLPPRIRRLEERAQARVKESSTLKFSWIHDREXTTLNAPREEHGEIFRQYRSEKC

SEQ ID NO: 244121 - protein, 78 aa, Glycine max
  Clone ID: PAT_MRT3847_62469C.1.pep
SPITLFILDASAALFQIAKTSLFTHSIRYLPRYSKKYLPFAIKKPKPCPNAILTLIRQKQSERTHMLPLGAAKATSTF

SEQ ID NO: 244122 - protein, 274 aa, Glycine max
  Clone ID: PAT_MRT3847_6246C.1.pep
MLLFCRFNGEDFLTRLRGKSIMFVGDSLGLNQWQSLTCMLHIAVPQAPYSLARNGDVSIFTFPTYDVKVMLSRNALLVDIVGESIGRVLKLDSIQAGQTWKGIDVMIFDSWHWWIHTGRKQPWDLIQVGNRTYRDMDRLGSYEIALNTWAKWVDYNIDPTRTRVLFQGVSPDHQNPAQWGEPRANFCAGQNKPISGLRYPGGPNPAEVVLEKVLKAMQKPVYLLDITTLSQLRIDGHPSVYGHGGHLDMDCSHWCLAGVPDTWNELLYVSLFQN

SEQ ID NO: 244123 - protein, 50 aa, Glycine max
  Clone ID: PAT_MRT3847_62470C.1.pep
GPHPLADRTDDRRFTSALSGLGFRFLTQPLTYPDLTFPIRSDRLWLVEPL

SEQ ID NO: 244124 - protein, 262 aa, Glycine max
  Clone ID: PAT_MRT3847_62471C.1.pep
MKMPPFLHSFPPRSFFFCCFLLLPLLLLLLLLVAPSSSGAPNEKVTVSLYYESLCPYCADFIVNHLVRLFQTGLISIVNLRLVPWGNAWIAPDGTVVCQHGDDECFLNTIEACAITIYPDVVQHFRFVRCLENLTLEGRHNQWVNCFQMTGLGTSPIDCYTNGNGKAIDQKYAKETAQLNPPHRFVPWGVVNNQALQEDYQNFVTYICRAYKGNVIPNACRSLSTKTYDSNEKVNSFQPVCYVDEARNLSFPLVTRLSNKSP

SEQ ID NO: 244125 - protein, 89 aa, Glycine max
  unsure (1)..(89): unsure at all Xaa locations
  Clone ID: PAT_MRT3847_62472C.1.pep
MGKKTPKKIPRGKQNPKGLETKKKKKRGGPRNKIKKPPRPXKKNPPKKAKQKKKKGNGFKKGNQRPMGPRKKNFGARDNWISKKKMAPP

SEQ ID NO: 244126 - protein, 53 aa, Glycine max
  unsure (1)..(53): unsure at all Xaa locations
  Clone ID: PAT_MRT3847_62473C.1.pep
XHSKLLVHTPYIHRHTXLHFGTSITYNDYLLHKLVGDEVLSSKHVMSATTLRT

SEQ ID NO: 244127 - protein, 118 aa, Glycine max
  Clone ID: PAT_MRT3847_62474C.1.pep
MKGNKKPYLVAILIEAIYAGMFLLSKAAFDHGMNNFIFVFYRQTAATIFLIPFAFFFEWKTAPPLSFVTFCKIFFLSFLGITASLDIYGIGLIYTSATLAAATTNCLPVITFFLALIL

SEQ ID NO: 244128 - protein, 75 aa, Glycine max
  Clone ID: PAT_MRT3847_62475C.1.pep
LFSGQLQLLFVHIQFSISMAADSNSNLRITIERNPSQSRLAELNIKCWPKYILFSLFLSLLVPFFCYVLYEKNKT

SEQ ID NO: 244129 - protein, 550 aa, Glycine max
  Clone ID: PAT_MRT3847_62476C.1.pep
MSKILPEINKSTNYGGLMLWSRYYDKISGYSTRIQNPLRNGTANPLCTRKSQACRSHEGGFAELLGYMSTLGIKVYEDDNNGTQCCEIICRNNCSCDAFAPLNHINNTSTGCQIWLKGTKFVRASGNIALPINVSVALLEHKVNSWWIWLIVGVGAAFVIPVIFYLSRAFLRKYKAKVERKKMQKKLLHDIGGNAMLAMVYGKTIKSNNKGKTNNEVELFAFDTIVVATNNFSAANKLGEGGFGPVYKGNLSDQQEVAIKRLSKSSGQGLIEFTNEAKLMAKLQHTNLVKLLGFCIQRDERILVYEYMSNKSLDFYLFDSARKDLLDWEKRLNIIGGIAQGLLYLHKYSRLKVIHRDLKASNILLDHEMNAKISDFGMARIFGVRVSEENTNRVVGTYGYMAPEYAMKGVVSIKTDVFSFGVLLLEILSSKKNNSRYHSDHPLNLIGYAWQLWNAGRALELIDSTLNGLCSQNEVFRCIHIGLLCVQDQATDRPTMVDIVSFLSNDTIQLPQPMQPAYFINEVVEESELPYNQQEFHSENDVTISSTRAR

SEQ ID NO: 244130 - protein, 105 aa, Glycine max
  unsure (1)..(105): unsure at all Xaa locations
  Clone ID: PAT_MRT3847_62477C.1.pep
RPAPFPYXNSXAXSWRYTRPREKEEEXXDVSSLSAKVPNIPRLSGVTRSGHVLAPPDXPVQXANVKGKGKVATHQDGEAPHASNKDIPAKGLPEKKDGTQPASLE

SEQ ID NO: 244131 - protein, 280 aa, Glycine max
  unsure (1)..(280): unsure at all Xaa locations
  Clone ID: PAT_MRT3847_62478C.1.pep
MLQSLVPRSPRTSNPNAMKTKRAVDAGGDSPADEPSFKRTNFSGEKTTAEAEEEQAFDPEPHGGDSTGLKLLGLLLQCAECVAMDNLDFANDLLPEIAELSSPYGTSPERVGAYFAQALQARVVSSCIGSYSPLTAKSVTLTQSQKIFNAFQSYNSVSPLVKFSHFTANQAIFQALDGEDRVHIIDLDIMQGLQWPGLFHILASRSKKIRSVRITGFGSSSELLDSTGRRLADFASSLGLPFEFFPVEGKIGSVTELSQLGVRPNEAIVVHWMHHCLYXI

SEQ ID NO: 244132 - protein, 54 aa, Glycine max
  Clone ID: PAT_MRT3847_62479C.1.pep
NIPEMKGSGLQESNSRKLTGNSISVCGHLTHSLHITHNYCLNYSMTLLLFSCSR

SEQ ID NO: 244133 - protein, 63 aa, Glycine max
  Clone ID: PAT_MRT3847_6247C.1.pep
HEFSITLQLRMSNLNVIRSSHLRGILLHRRDGNRRMLTTEAYSSEQELFVTSRSLVYEDASNL

SEQ ID NO: 244134 - protein, 72 aa, Glycine max
  Clone ID: PAT_MRT3847_62480C.1.pep
PPISAIHSPNIKGRNGIPPKPQKKQEPCSLKQMKLRMSKKPKPSRHHNTHEQPQRINQNGKGRKWDTSNYTS

SEQ ID NO: 244135 - protein, 77 aa, Glycine max
  Clone ID: PAT_MRT3847_62481C.1.pep
NIITACMPVMGTITGSGELGALNLHCWGLTGRPNSKAVVPSGEIVNAEEAFELPNIRAETFELQHKEGLALENGSCY

SEQ ID NO: 244136 - protein, 153 aa, Glycine max
  Clone ID: PAT_MRT3847_62482C.1.pep
GSKAETRSVRSENVNPNPSPTPPLKKRWSDIWTKSKPLNQMVMAMKLHSLSSSPRISTTDKTNPILSPFPITDRTLLLSDALLLKIIALVSDSSTQRNSNSLVCKRWLNLQGRLVRSLRISDWNFLLSGRLMHRFPNLNHVDLLSDALISPKN

SEQ ID NO: 244137 - protein, 41 aa, Glycine max
  unsure (1)..(41): unsure at all Xaa locations
  Clone ID: PAT_MRT3847_62483C.1.pep
MFFCQKCSSKCLCVPSGYYGNKVVCPCFXGWKIXEGGPKCP

SEQ ID NO: 244138 - protein, 45 aa, Glycine max
  Clone ID: PAT_MRT3847_62484C.1.pep
LSKCFYLAQTPGWLSPKTNFYFETFNNRAFYMLGVWFTHKWDPKF

SEQ ID NO: 244139 - protein, 249 aa, Glycine max
  Clone ID: PAT_MRT3847_62485C.1.pep
MGVLVFGAVIYEVWAHNLASPAKPLKPQGPNIGFPPGGPGHQLFLRYAGIQPQHVEPTSQGGKYELLDISRVTLKARDRRSLRHLVQPPGRCFQYRQLNQRSLPPPVGILPQRYRGAAAAATAGRRPTAHPEHGGGPLGDVKAIKAKEMEARQHTVLDGLAAETEPELDQFMEAYHEVLVKLREELTRLLQEAMKFMQKMELQLSLLSISGRSLHNTLSSERWRKKRRPHEHLAEVGEDGRLKDGVERK

SEQ ID NO: 244140 - protein, 49 aa, Glycine max
  Clone ID: PAT_MRT3847_62486C.1.pep
RESFIGQSSSSRIDSSASQRCSALTWLQEHKPHPGSGVYGRGAERGATR

SEQ ID NO: 244141 - protein, 61 aa, Glycine max
  unsure (1)..(61): unsure at all Xaa locations
  Clone ID: PAT_MRT3847_62487C.1.pep
XNXTNLLISQXSFPATLXXLCXXNXGFXHAXXXXXLEGXVEVVHXGKNXXPWACPRXSSGX

SEQ ID NO: 244142 - protein, 85 aa, Glycine max
  unsure (1)..(85): unsure at all Xaa locations
  Clone ID: PAT_MRT3847_62488C.1.pep
MDANRGHALMCLARVSLFLFTLTLYAVYGSSTVXDISRKLKLGDNELLRTEKKFKVFMENYGRSYSTEEEYFRRLGIFSQNMVRA

SEQ ID NO: 244143 - protein, 48 aa, Glycine max
  Clone ID: PAT_MRT3847_62489C.1.pep
MAILCLQNDGIMRQQASYSGHFYILDLNRLDPDSPPPILLVPPPTPLS

SEQ ID NO: 244144 - protein, 52 aa, Glycine max
  Clone ID: PAT_MRT3847_6248C.1.pep
TYLEPLVYLLCCCSIKLLHSCFKTIWFDWKFFYHGYFLYDCSRQLLVLALMI

SEQ ID NO: 244145 - protein, 84 aa, Glycine max
  Clone ID: PAT_MRT3847_62490C.1.pep
PRVRPCVRFFIRQMKVFKRAILNGHYGITTFLIINIFYVVPYNFLMPIIAEAAVTYLSGLHKRRNNLSFFIYDYLLPLLDLTAL

SEQ ID NO: 244146 - protein, 98 aa, Glycine max
  Clone ID: PAT_MRT3847_62491C.1.pep
KKKKPPFYPGDFLMVGKRFTPKEGGPMFIIGLGPTGNLPLGKKWVRRKGFQTNIPAKEAPKPINFFKSCIKLKHVPFKKLFPWGEPQKPPPLWQKIFL

SEQ ID NO: 244147 - protein, 159 aa, Glycine max
  Clone ID: PAT_MRT3847_62492C.1.pep
YIGINHDSIKKLKVVFLSIEKKATCRDLNALKILVYVTSASAGYNLLLLCKHSIWSRKNFKGSYLCMAWICFLLDQIAVYMTFAANTAAMGAAMLAITGSDAFQWLKVCDKFTRFCVQIGGALLCGYAASIIMALISTISAYQVFRMYSPKWFLRLKNM

SEQ ID NO: 244148 - protein, 108 aa, Glycine max
  Clone ID: PAT_MRT3847_62493C.1.pep
DIEPTSTRREQALPTWTRFGHTQIHFWYGAGGVGVLSRIFFVGTVYRMQAYGRACLPTLTKGHCGPVQFCNPPVPGGCILCMIPRKVSGLNHPPCTSKKDGEFKKYFL

SEQ ID NO: 244149 - protein, 180 aa, Glycine max
  unsure (1)..(180): unsure at all Xaa locations
  Clone ID: PAT_MRT3847_62494C.1.pep
MKLGMARGEVCLRVSAILVLVLTACLVALDTQTKVVFVSIEKKATYKDLNALKILVYVTCAAAGYNLLLLCKHXFGLEKNFKGSYLCMAWICFSLDQIAVYMTFAANTATMGAAVLAISGSEAFQWLKVCDKFTRFCVEIGGALLCGYAASMLMALISTISAYKVFRMYSPKWFLRLKSA

SEQ ID NO: 244150 - protein, 180 aa, Glycine max
  Clone ID: PAT_MRT3847_62495C.1.pep
MKLRMARGEVYLRVSAILVLVLTACLVALDTQTKVVFLSIEKKATCRDLNALKILVYVTSASAGYNLLLLCKHSIWSRKNFKGSYLCMAWICFLLDQIAVYMTFAANTAAMGAAMLAITGSDAFQWLKVCDKFTRFCVQIGGALLCGYAASIIMALISTISAYQVFRMYSPKWFLRLKNM

SEQ ID NO: 244151 - protein, 628 aa, Glycine max
  unsure (1)..(628): unsure at all Xaa locations
  Clone ID: PAT_MRT3847_62496C.1.pep
PGRPTRRNEFISLLSRYVAGGKGILQPHDLLYEVEKLLEEDEGMQKLKDSPFVKELESAKEAIVLPPFVSIALRPRPGVWEYVRVDAFELSVDNLSVAEYLRLKEELVDGQCTDKYVLELDFEPFNVTLPRPTRSSSIGDGVQFLNRHLSSFMFRSKESLEPLLAFLRTHRYDGHAMMLNDRIYNLSKLQSSLAKAEELLSRLLPNAPYSDFEYELQGLGFERGWGDTAERVSEMVHLLLEILQAPDPNTLESFLGRIPMVFNVVVVSPHGYFGQANILGLPDTGGQLVYILDQVRALENEMLIKIQKQGLDVSPKILIVTRLIPEAKGTTCNQRLERVSGTAHSYILRVPFRTKNGILRKWISRFDMWPYLETFAEDASHEIAGELQGIPDLIIGNCSDGNLVATLLSYKLGITQCNIAHALEKTKHPDSDIYWKKYEDKYHFTCQFTADLIAMNNADFIITSTYQEIAGSKNNVGQYESYTAFTLPGLYRVVHGIDVFDPKFNIVSPGADMCIYFPYSDRERRLTSLHGSIEKLVYGAEQNEEHMXGFINKINVCMXELVNLVVVGGYIDVQKSTDIEEMREIEKMHNLIEEYNLHGQFRWIKAQMNRARNGELYRYIADVKGAFV

SEQ ID NO: 244152 - protein, 100 aa, Glycine max
  Clone ID: PAT_MRT3847_62497C.1.pep
CFAFLCLFLGLHLKVFAPAFCFQFCPHLPILGFLSFVPKKECLGQLDCYGCFCSYVITLVRKIISGRVVCRLQYSVIYTLNCNTFSFANYGILKGPKLLY

SEQ ID NO: 244153 - protein, 78 aa, Glycine max
  Clone ID: PAT_MRT3847_62498C.1.pep
MEDQNGSGKSSQRLFRVNPYLAILFLQIGYSRMDIITMASFKHGMSDWILSMYRHVHAAIIIQHFALVLVSNNRPYMT

SEQ ID NO: 244154 - protein, 90 aa, Glycine max
  unsure (1)..(90): unsure at all Xaa locations
  Clone ID: PAT_MRT3847_62499C.1.pep
XCFXXXFWXRSLSGXXFCXRNLSXWLXCCRSLSDWXCXLGLAYLGCFIFWNCCWCLLCNXNXWPFGKEIXQRXXNKTENRXXKVXEMCKR

SEQ ID NO: 244155 - protein, 67 aa, Glycine max
  Clone ID: PAT_MRT3847_6249C.1.pep
SLSREKKCRKKYHLQNRSKLLETKKANSTDYEPSSHSFFHATSYSDCSFTWMFIYILHLQFLCKNSW

SEQ ID NO: 244156 - protein, 77 aa, Glycine max
  Clone ID: PAT_MRT3847_624C.1.pep
DACNSTILCLLTVLTVNCTCMYICKIKLMLKIMEHVEIDKFNIDTFSIQTKHRVEDINVFVCLGLCGWRLIQAKLYE

SEQ ID NO: 244157 - protein, 80 aa, Glycine max
  Clone ID: PAT_MRT3847_62500C.1.pep
MASKHRKLFPDETTTTTNQTQDCYGFCDPACPYNCYNNPDYFFSPPPPSISHSSQVNHISSYLIILVTLFTAILVVVGST

SEQ ID NO: 244158 - protein, 82 aa, Glycine max
  Clone ID: PAT_MRT3847_62501C.1.pep
KPFLPKISLGKKTGHLNWPFTFKPPVLKTLEKNKKWVSRIFLALSPFYFFNQKIRGFSRVPINTFYPILALKKRHGTPHILG

SEQ ID NO: 244159 - protein, 111 aa, Glycine max
  unsure (1)..(111): unsure at all Xaa locations
  Clone ID: PAT_MRT3847_62502C.1.pep
FWFLYIWFVRLRKILKSSQNFFPCWEKEKKKIIFACPLFSFLFLEIVLLLLCQIWVDVRSSMGGAFLTLMKAMTTLCYFFNTGFSSVDFCFGLFTLFWFGFSFQXSFGWYF

SEQ ID NO: 244160 - protein, 116 aa, Glycine max
  unsure (1)..(116): unsure at all Xaa locations
  Clone ID: PAT_MRT3847_62503C.1.pep
VACIFRPLELFNILQWGAISFSSEDVPNGIGSGDVVIILGLFISAHCVQDHTCSXTTFGNLCLSKPNCISPEVIQCWGVTQYPSQHKYDAVXGPILHRFKQDRHMLKMVGLADSSE

SEQ ID NO: 244161 - protein, 130 aa, Glycine max
  Clone ID: PAT_MRT3847_62504C.1.pep
ARAFKLRAEKPSSEMWKVAGLTIVSVICFTSSSCVELLTDIPMQYNWHQRRLNDVYSSLLLILYYFVGSSIPSAVVLWVMRELPPEEAASIPEESSTIAFVADSSIAIHHPQRWATATSMQNQTSRASPI

SEQ ID NO: 244162 - protein, 80 aa, Glycine max
  Clone ID: PAT_MRT3847_62505C.1.pep
ENFIKPSKLQQNKIYLQMLTHNHIGLALDVLYDDTCRNNMNVNLKVLPVKVKHSMFILKNNFLILHACCCSPALRMMDCN

SEQ ID NO: 244163 - protein, 242 aa, Glycine max
  Clone ID: PAT_MRT3847_62506C.1.pep
MALSSPSLFSAVNATYSVPHFHALPLSLSSSYFPINVRPSTHHVLVSDHNHKWRTKVSFFTSFLKQKGKDAKIIKEELLEAIAPLDRGADATPQDQQTVDQIARELEAVTPIKEPLKSNLLDGKWELIYTTSQSILQTKRPKLLRSVANYQAINVDTLRAQNMESWPFFNQVTADLTPLNPRKVAVKFDTFKIGGIIPIKAPGRARGELEITYLDEELRLSRGDKGNLFILKMVDPSYRVPI

SEQ ID NO: 244164 - protein, 127 aa, Glycine max
  Clone ID: PAT_MRT3847_62507C.1.pep
NRNVYKFVSQDKSQPICETIYDMIQQMEWQLKFEGYTPDMSQVLLDVDEDEKRQRLKHHSQKLAIAFALIQTSEGSPIRISRNLRMCNDCHTYTKFISVIYEREITVRDRNRFHHFKDGTCSCKDYW

SEQ ID NO: 244165 - protein, 43 aa, Glycine max
  Clone ID: PAT_MRT3847_62508C.1.pep
HTPPKSKRWYYKSIQTAYGNGRVYDTLLTAYLGSWIMNRLLDY

SEQ ID NO: 244166 - protein, 85 aa, Glycine max
  unsure (1)..(85): unsure at all Xaa locations
  Clone ID: PAT_MRT3847_62509C.1.pep
GFNFALPFEIRSCVTDAMSLRHGSKVWLEDRDSAWLAAEVLDSDGNRLLLVTDSGKKVYASPEKLLPXDADEEEHGGFEDMTKLA

SEQ ID NO: 244167 - protein, 61 aa, Glycine max
  unsure (1)..(61): unsure at all Xaa locations
  Clone ID: PAT_MRT3847_6250C.1.pep
FXRXKXLXRSFXRTXWVNYSSSDXVXXXVKRDIEEALVISQXKSTXPPXXEXXNLTVLEGR

SEQ ID NO: 244168 - protein, 34 aa, Glycine max
  Clone ID: PAT_MRT3847_62510C.1.pep
TQLLCKLSIMIGDAVPSCGHIRTTGVALCVLSRV

SEQ ID NO: 244169 - protein, 78 aa, Glycine max
  Clone ID: PAT_MRT3847_62511C.1.pep
TPGGYRLREFPGSTHALRPKALRARQTPVRLSLSLLFSLFHYLVSNNRHHYDILNAQTCGYHARYICTSGDRATVALV

SEQ ID NO: 244170 - protein, 56 aa, Glycine max
  Clone ID: PAT_MRT3847_62512C.1.pep
KERFRYPFTLGYRKLSVLRRSYMALIFRAFTRECHTNRILLLCVQYVSLSDVFSRV

SEQ ID NO: 244171 - protein, 58 aa, Glycine max
  Clone ID: PAT_MRT3847_62513C.1.pep
SKQGVLKPQNFIINQREDTSSPGEDSHSCLFRFLESSCWMRKSGCFLDNSGLENGISS

SEQ ID NO: 244172 - protein, 65 aa, Glycine max
  Clone ID: PAT_MRT3847_62514C.1.pep
RLNFKSTLVKIFTIGLLETLHYLNKSDVFEDQWESWKINQFLLTNYFFKCHEWRLGFTEYAFKDF

SEQ ID NO: 244173 - protein, 86 aa, Glycine max
  unsure (1)..(86): unsure at all Xaa locations
  Clone ID: PAT_MRT3847_62515C.1.pep
MIEILHIEGGQCGNQIGAKFWEVICYEHCIDHTGKYSGDSELHLGRINVXYKDAIGGRIIPRSVLIDLDPGTMDSVRSGPYGHIFR

SEQ ID NO: 244174 - protein, 65 aa, Glycine max
  Clone ID: PAT_MRT3847_62516C.1.pep
TIHLWFSRSKAMGKGIYSLINQQSFSSSDPFKSHYLNAFNQRKKEKNLFSENKLLTYLRTYLSIV

SEQ ID NO: 244175 - protein, 178 aa, Glycine max
  unsure (1)..(178): unsure at all Xaa locations
  Clone ID: PAT_MRT3847_62517C.1.pep
ANSAKSVPVSPAIKKQAEAIQQRVSIVVSELLSQLQDWNNRRQFTSPTDFHADGVNDLFISQAVMENTQANEILKQAAFLIPFTSRVKIVTSQLAAARQRHGSQAVYTRNRVRIRRSHILEDAYNQMSQLSEDDLRGLIRVALVNELXVEEAGIDGGGIFKEFMENITRAALDXQYGL

SEQ ID NO: 244176 - protein, 549 aa, Glycine max
  unsure (1)..(549): unsure at all Xaa locations
  Clone ID: PAT_MRT3847_62518C.1.pep
VVRFLAPVETYKDRIASALETLRPTTSWERTTTAGQGLDGVLIGGRGFGMAMEALCNYLGSEYGNTFALARVFAFLSGPPDYGAGQLDTRRYGEQYASKGEDADRALLPEQTPFYKDLAAVAVQAGVCVDIFAVTNEYTDLASLHSLSAIXITSGGSLFFLDAYTILIVFYSSFIESTSTDYQYRNYIHYRCFHFVRMGSSSFRTNHGVKLLVGCLCCTXYVIYTLFFEKWIIXCAFSRSKSDVPTIQIAFQYSVVVPPQELSDSNSGGVSTNRTKHSLQRRLRIRTLQFGVAQNIHELYDSCDPEVVLSLLVHKVILASLEEGVREGRILLQEWLVILTAQYNDAYKLIQYDNGSSIRSQIDVAFSQCPQLQPLPRLIFALLRNPLLRFHEEGVHPDHRIYLQCLFSMLEPSSLHRAVYPVLTSYATPDKQAYPRHSLSRAALITSGSPIFFLDAFTILIVFYSSTADPTLPFPPPHDCLLRTTINKLKQERCITPKLIFIRGGHDDASIFENFLIEEQDVDGSGLTSVMGFVSFLEDTTQKVLEFMK

SEQ ID NO: 244177 - protein, 106 aa, Glycine max
  Clone ID: PAT_MRT3847_62519C.1.pep
PPPIPPAPPTTSGPPSMPPAPEQSGPPSPANLHHPITPPSAVPNPPPLTPLAPPSPSCTSVLDSNHTRVSSSRWPPFCLALPHLCPSVRLWPAKKNVFPSFVPSAF

SEQ ID NO: 244178 - protein, 57 aa, Glycine max
  Clone ID: PAT_MRT3847_6251C.1.pep
KHIKIFFLGFYITTILFFFPVREPRIIRVCFIILIHVSNLFYRKYTIFFSAWVTCGI

SEQ ID NO: 244179 - protein, 69 aa, Glycine max
  unsure (1)..(69): unsure at all Xaa locations
  Clone ID: PAT_MRT3847_62520C.1.pep
HYRYICIVLSKMDFNSFSIGYWLNFEIYVDEKYLLRDQSFTXMTLPRYTLPTPLTVNILNFTVSLIIKN

SEQ ID NO: 244180 - protein, 86 aa, Glycine max
  Clone ID: PAT_MRT3847_62521C.1.pep
NKKQIYSHNFMQFISKFLKDIAPKKRYTHENNILYILLEKFVLDCHKWNLGQKELWQLGGCCHVEEEYLAQTLLHEDYMGRWEGMP

SEQ ID NO: 244181 - protein, 99 aa, Glycine max
  unsure (1)..(99): unsure at all Xaa locations
  Clone ID: PAT_MRT3847_62522C.1.pep
SMALAFKSWWKPXFTFSISATTDRADGKMQYGFGIQSESLREASYQRADPNYVMLTQSKEHLAKGIVWKAGKRPMLKSDIDAGHFDGLPRELQPLDKIL

SEQ ID NO: 244182 - protein, 111 aa, Glycine max
  Clone ID: PAT_MRT3847_62523C.1.pep
QVGPGYAPVLDCHTAHIACKFSELLEKIARRSGKSIESGPKFIKSGDAAIVKMVPSKPMCVEAFTDYPPLGRFPVRDMRQTVAVGVIKSVEKSDKAGAGKVTKAAQKAGKK

SEQ ID NO: 244183 - protein, 112 aa, Glycine max
  unsure (1)..(112): unsure at all Xaa locations
  Clone ID: PAT_MRT3847_62524C.1.pep
EIFYSMRSKKERKGWMTIKIDFEKAYEDLVRDTLHDVGIPENIWVHXVLWNAKALEDFTPSRGIGXGNPFSLFLCHVFQIINLTVCRWKPISLSKHNSPISYLAFANTLLIN

SEQ ID NO: 244184 - protein, 195 aa, Glycine max
  unsure (1)..(195): unsure at all Xaa locations
  Clone ID: PAT_MRT3847_62525C.1.pep
GNLPYLNYLYLIDTNFFGAIPSSIANLTNLNYLNITYTNVSGTIPDFLSHIKTLVSIDFSYNNLSGNLPASLSSLPNLGEMIFTGNRISGAIPDSFGSFSEELILMRLSRNRLTGKIPATLAKLNLRFLDLSRNMLEGDASVLFGSEKDTVQXILGKTNLAFDPGEGGVFKKMGPLXLGLTRIYGXTLPQGLTGL

SEQ ID NO: 244185 - protein, 134 aa, Glycine max
  unsure (1)..(134): unsure at all Xaa locations
  Clone ID: PAT_MRT3847_62526C.1.pep
RRHAIMALATEGASYFGGHLVDRLLGRGHILIHHNNFFTGRKXHMLHHRGNPDXSTFRTTMVXPILLEGDQIYHXACPASPVHYKFKNGWTIQTKVWGTLNIVGMAYRHXARFLISGXNEGYGESLLHPKAVTY

SEQ ID NO: 244186 - protein, 113 aa, Glycine max
  unsure (1)..(113): unsure at all Xaa locations
  Clone ID: PAT_MRT3847_62527C.1.pep
FYGAKFEVFRDHKSLKYLFDQRXLNIKQKRWIEFLKNYDFELKNHVGKVNVVVDALNRKSLHMSSSMVQEMNLIEKFKXLNLNVSLTALSMKFNRLQVGSNIRDLIKKEQLIH

SEQ ID NO: 244187 - protein, 198 aa, Glycine max
  Clone ID: PAT_MRT3847_62528C.1.pep
PPIESLGDLSFLRYLSFRSHKIVHLPKLIGELHNLETLDLRETYVRVMPREIYKLKKLRHLLRDFEGFEMDGGIGDLTSLQTLRRVNISHNTEEVVKGLEKLTQLRVLGLTQVEPRFKSFLCSLINKMQHLEKLYITASHSGNMDLHFDVFAPVLQKVRLMGRLKKFPNWVAKLQNLVTLSLSFTELTHDPLPLLKDL

SEQ ID NO: 244188 - protein, 168 aa, Glycine max
  Clone ID: PAT_MRT3847_62529C.1.pep
CEVSFLGLYISLTYLQLKKVSSCAIPSEEKKLMELIIIITLLSFSFSYLIPTCSSSQIQLEPSLQLEDDNIGVNTNLQLSLPTVPRKLRFTEKVEEDDGARDLASHKQENSFAAAGKQYHRKQNMVLGKKGTRQEWMEVDDPSQYFTMDYTRVRRRRPIHNKQLPVNP

SEQ ID NO: 244189 - protein, 462 aa, Glycine max
  Clone ID: PAT_MRT3847_6252C.1.pep
EKATGQEYACKYIAKRKLVTDDDVEDVRREIQIMHHLAGHPNVISIKGAYEDAMAVHVVMELCAGGELFDRIIQRGHYTERQAAELTRTIVGVVEACHCVVEACHSLGVMHRDLKPENFLFVNQHEDSLLKTIDFGLSVFFKPALKTDDLSLPGDIFNDVVGSPYYVAPDVLRKRYGPEADVWSAGVILYILLSGVPPFWAENEQGIFEQVLRGDLDFSSDPWPSISESAKDLVRKMLVRDPRRRLTAHQVLCHPWIQVDGVAPDKPLDSAVLSRLKQFSAMNKLKKMALIIIAESLSEEEIAGLKEMFKMIDADNSGQITFEELKAGLKRVGANLKESEIYDLMQAADVDNSGTIDYGEFLAATLHRNKIEREDNLFAAFSYFDKDGSGYITQEELQQACDEFGIKDVRLEEIIKEIDEDNDGRIDYNEFVAMMQKGNLPAVGKKGLENSFSIKFREALKL

SEQ ID NO: 244190 - protein, 231 aa, Glycine max
  Clone ID: PAT_MRT3847_62530C.1.pep
MMQAMLLNLVLVSFVLLSSIRDGSAGITSSFVRPQWPGVDIPVDHEVFAVPKGYNAPQQVHITQGDYDGKAVIVSWVTPDEPGTRHVQYGTSKDKFKTSAEGTVANYTFYNYKSGYIHHCLIEGLEYKTKYYYRIGSGDSARDFWFETPPKVGPDTPYKFGIIGDLGQTFNSLSTLEHYLESGGEAVLYVGDLSYSDEHDYKDMGFTGGIHGARFAERSAAYQPWMWDVGN

SEQ ID NO: 244191 - protein, 81 aa, Glycine max
  unsure (1)..(81): unsure at all Xaa locations
  Clone ID: PAT_MRT3847_62531C.1.pep
NEYICLLLSLDLWGLQGASSAFANTIVFDDKPWGANTQXVFDGDFPVGSWXPILANSLYPVRQLPSEAVGVNDSCWSGPGR

SEQ ID NO: 244192 - protein, 99 aa, Glycine max
  unsure (1)..(99): unsure at all Xaa locations
  Clone ID: PAT_MRT3847_62532C.1.pep
LSLCVLPLFLEGVTAARMELSCFKSDQSSSYDDDEYSKPCCELCMCTRSMPSQCGCEDIRLNSCHSDCKSXSCTRSQAVQCRCLDTNDFCYKPCKSRDD

SEQ ID NO: 244193 - protein, 73 aa, Glycine max
  Clone ID: PAT_MRT3847_62533C.1.pep
SIRVPVLRSVLVLTKSRPSPSAPYSLLNSLSMVSAWRRCLSFVSKSDSCAILFWIFHLSKKQELFSIVGAVCC

SEQ ID NO: 244194 - protein, 84 aa, Glycine max
  unsure (1)..(84): unsure at all Xaa locations
  Clone ID: PAT_MRT3847_62534C.1.pep
LGKKPKEPLSAYGKGPXRRLSGHPETCSIHPFLWGVANPGGFVRVGRSPHKAGEGCFXGRRPAFTKDPNGVTPMNGNPTILWKP

SEQ ID NO: 244195 - protein, 61 aa, Glycine max
  Clone ID: PAT_MRT3847_62535C.1.pep
GNTFFFFFFLFLSPYFVSFFFVCTFFYFLYFFFFKRGGIRRWLVRFRRTRYRKLRGRGNSF

SEQ ID NO: 244196 - protein, 63 aa, Glycine max
  Clone ID: PAT_MRT3847_62536C.1.pep
KPGGFLPPIWGAPRRPHKFYLPSTYINEGIPQAWDGLVPLGCSPSRKFQGSCLVFVCTRPIER

SEQ ID NO: 244197 - protein, 43 aa, Glycine max
  unsure (1)..(43): unsure at all Xaa locations
  Clone ID: PAT_MRT3847_62537C.1.pep
SKSCAIFPQIYFRACYSCNKVFFRETVDVTKXIYEHSHXNFVG

SEQ ID NO: 244198 - protein, 42 aa, Glycine max
  Clone ID: PAT_MRT3847_62538C.1.pep
QLEKKKKLFEVSFSSGIWKFRAYIFVFLISVDFQIAYLSLDR

SEQ ID NO: 244199 - protein, 62 aa, Glycine max
  Clone ID: PAT_MRT3847_62539C.1.pep
FLTINSCSVCVGVFFSVFKSSYLVYFAEYGYIKSCSLSQCGTVAILCWKKGRIVGEVVRSDG

SEQ ID NO: 244200 - protein, 38 aa, Glycine max
  Clone ID: PAT_MRT3847_6253C.1.pep
YKFKTIFYIVSMLILSLDIIVDDHIYLEFPNVTLNIES

SEQ ID NO: 244201 - protein, 87 aa, Glycine max
  Clone ID: PAT_MRT3847_62540C.1.pep
AAASTRVPSCSPSLRHSSPSFGSRQVCSHSNPSQKIRFGRRCTPQGNPTNQLPAPLRGLVRPVDSAHDVQTPLVRVSIRLESGAHMP

SEQ ID NO: 244202 - protein, 142 aa, Glycine max
  Clone ID: PAT_MRT3847_62541C.1.pep
LLFSIYTRFLALIYFSFSCVHHTPQELYNMEISDFVPVCGSMKKYRRKISTYHKLKSGTEVSDDCSVENGCMLRPKVKMVEEEIQKAHQPKIRLSINLWKRLRNAYVQRMLGLAEHVAHLNNGEICFLKKIHDDEVQLLLAS

SEQ ID NO: 244203 - protein, 51 aa, Glycine max
  unsure (1)..(51): unsure at all Xaa locations
  Clone ID: PAT_MRT3847_62542C.1.pep
DHSSFRSVLWXXGHSHECYRSECLLQHSSXXNXXXAXXYLRTXDXKRIXHX

SEQ ID NO: 244204 - protein, 80 aa, Glycine max
  Clone ID: PAT_MRT3847_62543C.1.pep
CKSHRHCASLCCGGNQGWGYVSKTRRSQRAQEITFGFCSTLGISPSSSWSFLECQRCQRPCCRDTLVNIVETRPRQPALG

SEQ ID NO: 244205 - protein, 81 aa, Glycine max
  Clone ID: PAT_MRT3847_62544C.1.pep
KLWLFHHVFEAHHTHADTSQQSSLTPVAAHFLLPSSSAAFPLAIPCSWHLSRPPVCASNLWSGCAEAQYGCDLVLISVADS

SEQ ID NO: 244206 - protein, 45 aa, Glycine max
  Clone ID: PAT_MRT3847_62545C.1.pep
WNHSYRMLTERMISLYSVRALTSDPASTNMFIDSILRCIFALTMT

SEQ ID NO: 244207 - protein, 118 aa, Glycine max
  Clone ID: PAT_MRT3847_62546C.1.pep
GGPFGLGAPRWARGPPLRGGPPPIARAPPGGPKGKKGPPPPLGAEGAPPKGGGGPPRKGPPPPPPGWVFLTTVKCRALDGGFAGGRTPFLEEKRKRRKTEKKKKEKKKKGKKKKKKPT

SEQ ID NO: 244208 - protein, 134 aa, Glycine max
  Clone ID: PAT_MRT3847_62547C.1.pep
MDLGLWRKTPEASMFLINLPTKLPMIKQSATAGDKDVNEKSIPHGGSKNVEELCELNELSSGFMGKMLVYKSGAIKLKLGNTLYDVSSGMNCACAQDLVAINTAQKHCCTIGEISKHVSITPDIDAIIDNLPDL

SEQ ID NO: 244209 - protein, 470 aa, Glycine max
  Clone ID: PAT_MRT3847_62548C.1.pep
MEVVVTPTLENDTITTLYEASLNGSVSTLNTLIQRNPLILHRVSLSPFSETPLHIASLLGHLEFCEALLKRKPSLASEVDSERRSPLHLACAEGHTEVVKALLHTNPDVCLAMDKDEMLPLHLAVMRGHTGVIKELTRARPGSIQQNTIDDGSVLHLCVRYNHLEALIFLVQSATRNQQQFLLAKDKEGDTVLHLAVRLKQIKTIKHLLMLPEMRTAISALNKAGLTALEMLERCPRDFISLKIEKMLLEAEVQTGTAQQGSPSPRIATQPSNQSKRSKIWETLWLKYLQYQSNWIEEKRGTLMVVATVIATMTFQSAISPPGGVWQEDTITGGHNCTTYGICKAGTAVLAYDWPHGFLKFMTFNTTSFFSSLAVVLLLISGFRLENKLMMWILTMGMTLALTFMGLTYFWAQSLVTPDHIVDKVNRMGIPLSIVWVIMLLVAVLVHGVNLFLWVKKYVKKWKKQKLLQS

SEQ ID NO: 244210 - protein, 57 aa, Glycine max
  Clone ID: PAT_MRT3847_62549C.1.pep
IYINSKEKIKVKKHWTKISLTELEPMFFESNLVQWVNPNRYNFIWVNIFSVQFNGLA

SEQ ID NO: 244211 - protein, 44 aa, Glycine max
  Clone ID: PAT_MRT3847_6254C.1.pep
ALVVVLLKVEFDPHEHHLPNVMIPIPMSRSGDGKVKVSTTDNVR

SEQ ID NO: 244212 - protein, 205 aa, Glycine max
  unsure (1)..(205): unsure at all Xaa locations
  Clone ID: PAT_MRT3847_62550C.1.pep
QNSVGNANYNNPMFPPVQGQVMQNQAQFNLSPLQGQFLAQSILNMLQQPNMNMSMPNGQFCGPYLMQNMNPQLPMQMPNPSQGVPYGMHPGSCPMFGFPNQVPQAMVPQNSMFSTNPQLGFVPGNQVRPQIDPNEKNLNPPNVSANSFVSSSPFSSQQLQGNTSGSLNPNLAHTNNSQPPAFMKQEKPNSNIKTNVPNSNWXGIT

SEQ ID NO: 244213 - protein, 215 aa, Glycine max
  Clone ID: PAT_MRT3847_62551C.1.pep
MAASITLSRLVSSTLTTASFFPPITLPSKLSSLRLPTRRHPKPLRFSSSTITATISVGDKLPEATFSYLDSSGEVQTTTVSELTKGKKAVLFAVPGAFTPTCSQKHVPGFVEKSGELRAKGIDTIACISVNDAFVMKAWKEDLKVNEEVLLLSDGNGTFTKAIGVELDLSDKPVGLGVRSRRYALLAEDGVVKLFNLEEGGAFTFSGAQDILDVL

SEQ ID NO: 244214 - protein, 100 aa, Glycine max
  unsure (1)..(100): unsure at all Xaa locations
  Clone ID: PAT_MRT3847_62552C.1.pep
HVLFRNPVFVEGNNTLLIDLWKSAPSLCGIECPKDEKLPRRKXYWKLKTRCLTIVSYGRLSLRGCVMKRFNFXRVMMKNRDXLSCQVGINSHXMEWTDLG

SEQ ID NO: 244215 - protein, 97 aa, Glycine max
  Clone ID: PAT_MRT3847_62553C.1.pep
IYLCICKKESYPSLFCCTLSLVRTCGQLQFDHSITNKISIQSNPSKWLSQFTLFPLSSQSRPPPPLISPTVESPALLPVIDASAMPHSHQTWRRRSP

SEQ ID NO: 244216 - protein, 542 aa, Glycine max
  Clone ID: PAT_MRT3847_62554C.1.pep
MGEAKEIWSAPITPRTASVVGTPVVASPPVSCPPSQLHSPSLTRSPLLHPEDGDAPRRKTSKTPKTPRTPRTPRTPLRISNLTPKFITPLGSPMRKALRFTKLDPQDAWLPITESRNGNKYYAAFHTLCSGIGIQALVLPVAFTILGWTWGIITMTLAFIWQLYTLWLLVNLHESVEQGVRYCRYLQLCGATFGEKLGKILALFPILYLSAGTCTTLIIIGGSTARTFYQVVCGETCTAKPMTTVEWYLVFTCVAVVLSQLPNLNSIAGVSLIGAVTAVGYCTAIWVTSVARGALPDVSYNPVRTGNSVEDAFSVLNALGIIAFAFRGHNLILEIQSTMPSSEKHPSHVPMWKGVKVSYTIIAACLFPMAIGGYWAYGQLIPANGGMLTALYQFHSRDVSRFVLGLTSFFVVVNGLCSFQIYGMPAFDDMESGYTTRMKKPCPWWLRAFIRVFFGFLCFFIGVAVPFLSQMAGLIGGVALPVTFAYPCFMWLKTKKPKKYSAMWWLNWFLGTLGVALSAILVAASLYVIIDTGVNVSFFNPQ

SEQ ID NO: 244217 - protein, 87 aa, Glycine max
  unsure (1)..(87): unsure at all Xaa locations
  Clone ID: PAT_MRT3847_62555C.1.pep
RGLCCISXRHGGPYSSFLLAVPPRILEKSYIYFLKIIFAPKRFFIKTLIIIIIHPTYLPKSQLVVISNFLISLNKVLDLNLLFKQEI

SEQ ID NO: 244218 - protein, 62 aa, Glycine max
  Clone ID: PAT_MRT3847_62556C.1.pep
STMLKEFNYLQLYIRFCLCSSQCILTSTNLSPAKKKIKTSKNGSEHSAWLACLYYCALACNM

SEQ ID NO: 244219 - protein, 81 aa, Glycine max
  unsure (1)..(81): unsure at all Xaa locations
  Clone ID: PAT_MRT3847_62557C.1.pep
PKTARRGETQNTPKGSILGESFSHLRTKAWXNLHGRIVLPKTFTGRLWEAGMEMKTSPLTQGFESARQADWLRYGYSEPED

SEQ ID NO: 244220 - protein, 66 aa, Glycine max
  Clone ID: PAT_MRT3847_62558C.1.pep
TEHLHQHQQQNHHSEEQRMLYAGGNSGHGGGFWDNTPAPVQVPAFCQYSAHRGPLQFSNTPSIRAW

SEQ ID NO: 244221 - protein, 74 aa, Glycine max
  Clone ID: PAT_MRT3847_62559C.1.pep
MFEPQQLCTLAKTREFDLGSRETLYPGLNVGENQLRWGFIPKVYGILFGQIGLTNLVFVTTGFYTSINDLLKGN

SEQ ID NO: 244222 - protein, 581 aa, Glycine max
  unsure (1)..(581): unsure at all Xaa locations
  Clone ID: PAT_MRT3847_6255C.1.pep
MGNTCVGPSISKNGFVQSVSAAIWRSQLPEGSVSNRESVKEEATSVPESPLPVQNKPPEQITMPKQEAKQEGKSEIEPEKEQDKKKQKKRGSVKRVSSAGLRVDSVLQRETDNFKEFFTLGRKLGQGQFGTTFLCVEKTTGLECACKSIAKRKLGRQQWSNHLXRKNNLMHHLXGNLKESEIYDLMQAADVDNSGTIDYGEFLAATLHRNKIEREDNLFAAFSYFDKDGSGYITHEELQQACDEFGIKDVRLEEIIXVLKTIDFGLSVFFKPGDIFNDVVGSPYYVAPDVLRKRYGPEADVWSAGVILYILLSGVPPFWAENEQGIFEQVLRGDLDFSSDPWPSISESAKDLVRKMLVRDPRRRLTAHQVLCHPWIQVDGVAPDKPLDSAVLSRLKQFSAMNKLKKMALIIIAESLSEEEIAGLKEMFKMIDADNSGQITFEELKAGLKRVGANLKESEIYDLMQAADVDNSGTIDYGEFLAATLHRNKIEREDNLFAAFSYFDKDGSGYITQEELQQACDEFGIKDVRLEEIIKEIDEDNDGRIDYNEFVAMMQKGNLPAVGKKGLENSFSVKFREALKL

SEQ ID NO: 244223 - protein, 107 aa, Glycine max
  Clone ID: PAT_MRT3847_62560C.1.pep
ETLKNYNKLLSLGFKIVFLSGRYLDKMAVTEANLKKAGFHTWEQLILKDPHLITPNALSYKSAMRENLLRQGYRIVGIIGDQWSDLLGDHRGENRTFKLPNPMYYIE

SEQ ID NO: 244224 - protein, 90 aa, Glycine max
  Clone ID: PAT_MRT3847_62561C.1.pep
IRAETKKDTRSLKLNDGISGQENRRIQHVYNCRNLRTYNRPKSCAFIPLSSRASNIVRIPTHSSIHGIVIKYWVARTPNAQSHTWETIEI

SEQ ID NO: 244225 - protein, 160 aa, Glycine max
  Clone ID: PAT_MRT3847_62562C.1.pep
LTTKKLRELKSHLQELQNEKILRQQKVKSHISTISELTVVMSMDFRETLNEIHPSLGDSSKGTLQSISNDTLARLTGVIHSLKREKQKRLQKIQELAKLLVELWELMETPIEDQQAFSHVTRLISASVDEVSTECCLSAEVIEQVEVEVQRLNVVKASKM

SEQ ID NO: 244226 - protein, 82 aa, Glycine max
  Clone ID: PAT_MRT3847_62563C.1.pep
DAYGVNILSPTIFPFHNILLGAGLFYFRVIVGVIVDESASPDTGSLRHIIRMSGSDMASTGAIHGWDAQTLTSTLTTTTSSS

SEQ ID NO: 244227 - protein, 63 aa, Glycine max
  unsure (1)..(63): unsure at all Xaa locations
  Clone ID: PAT_MRT3847_62564C.1.pep
LTQTMFCILLXISNVRSPVXPPAPQXXXQXRGRMPPDILTSQPDIHTILSIMMEALTCEHHHV

SEQ ID NO: 244228 - protein, 133 aa, Glycine max
  unsure (1)..(133): unsure at all Xaa locations
  Clone ID: PAT_MRT3847_62565C.1.pep
ITXNFPIIPFSPTPFQHKTPXFXLLKSLNHKLXHPYPNLHQKPPHYLTHIKFPFFXXPNXSXXLTSHSLXXXQPTKPINTPXIYSFLTXXTXTXXKFNPPPTSKKTINQQHLFYTPITKFTHKNPLILLIPFN

SEQ ID NO: 244229 - protein, 79 aa, Glycine max
  Clone ID: PAT_MRT3847_62566C.1.pep
LRTLFLSFFCILAPYFGLQLRTARINLTIKLIIHITTQPLACFSFIYTFSTSPMEFQLKNLIALACRNQQLFSPSFYHS

SEQ ID NO: 244230 - protein, 74 aa, Glycine max
  Clone ID: PAT_MRT3847_62567C.1.pep
LHCLLCCEKRALLQWKSRRRGLRTLRLLSHTQFDRCRSMYDMDLHGEPNADPQHPAFLQLRAFYAVRTHVQIQY

SEQ ID NO: 244231 - protein, 77 aa, Glycine max
  unsure (1)..(77): unsure at all Xaa locations
  Clone ID: PAT_MRT3847_62568C.1.pep
FNPLVLGTRGKSRXAHSTSPSTFPRVLISAPLSADLHTKYNVLSXIPFRMEYEVQLVRXSYNYFENNVTHVYRRTWV

SEQ ID NO: 244232 - protein, 373 aa, Glycine max
  Clone ID: PAT_MRT3847_62569C.1.pep
MAAGVGFRSHKSLLIILLGFLGLFSFTVEADTKKYQFDIQVKNVSRLCHAKPIVTVNGRFPGSTIYVREGDRVLVNVTNHAKYNMTIHWHGIKQYRNGWADGPAYITQCPIQTGNSYTYDFNVTGQRGTLWWHAHIFWLRATVYGAIVIMPKPGTPFPFPQPAREFEILLGEWWHKDVEEIETQGNQMGLPPNMSDAHTINGKPGPLFPCSEKHTFAMEVEQGKTYLLRIINAALDDELFFAIGGHNLTVVEVDAVYTKPFTTQTILIAPGQTTNVLVKANQVAGRYFMATRTFMDAPIPVDSKAATAIFQYKGIPNTVLPSLPSLPAANDTRFALSYNKKLRSLNTPHYPANVPLHVDRTLFYPICSSPNSC

SEQ ID NO: 244233 - protein, 90 aa, Glycine max
  unsure (1)..(90): unsure at all Xaa locations
  Clone ID: PAT_MRT3847_6256C.1.pep
XTLSXILLSSIXWEAXRXGTAKCXVXLXRGGDLVXPGXCTXSXVIYSPDPPETYSXXXLXFISYXXXVQLSDFQVXXELXEIXTRVQYIX

SEQ ID NO: 244234 - protein, 38 aa, Glycine max
  Clone ID: PAT_MRT3847_62570C.1.pep
KYLYMVVIYGFCFCNPDQLSSLRSDYQNISSVNSTCLY

SEQ ID NO: 244235 - protein, 137 aa, Glycine max
  Clone ID: PAT_MRT3847_62571C.1.pep
NKHGEKPKRTGNSPKKGKNPQESPKKSKQGRKPPFTKKKRKKGEKTQKTRPKGKTKKTRQKGSKPGKISPGGLRGKTPKKPKQGPKETPPGKKKTGPQRKKRGKGKKKPLKNKKRKREEKRPNKNKNGHRKKSYRAP

SEQ ID NO: 244236 - protein, 119 aa, Glycine max
  Clone ID: PAT_MRT3847_62572C.1.pep
VSVFTTENAPVSNTQLASVRSLISPFRHLALRFWLVYCGQLAPRNYCALDPSLGTPGLTFNASRYNEVWNCDRFPFSHSRPICASVFQVLRGLIIGKDGTLARSGPKLGCPKKRTVINR

SEQ ID NO: 244237 - protein, 33 aa, Glycine max
  Clone ID: PAT_MRT3847_62573C.1.pep
HVTHVGFKHFGTKRTGRLGLYVTRSPNEELLIN

SEQ ID NO: 244238 - protein, 39 aa, Glycine max
  Clone ID: PAT_MRT3847_62574C.1.pep
SSAMTLYMASWNASLYRSRFYACRHPSALARNNPAGYRS

SEQ ID NO: 244239 - protein, 375 aa, Glycine max
  Clone ID: PAT_MRT3847_62575C.1.pep
PFIPFFLRTFSSSSLRAMSSSLALPSTPFFANGTRIFALKHSLPRSRVSMSVSAGSQASVHQALFADYKASTSFLFPGQGAQAVGMGKEAQNVPAAAVLFNKANDILGFDLLDICINGPKEKLDSTVISQPAIYVTSLAAIELLRAREGGQQIIDSVDVTCGLSLGEYTALAFAGAFSFEDGLKLVKLRGEAMQDAADAARSAMVSVIGLDSEKVQQLCDAANQEVPEAEKVQIANYLCPGNYAVSGGLKGVEVLESKAKSFKARMTVRLAVAGAFHTSFMEPAVSRLEAALATTEIRTPRIPVISNVNAQPHTDPNTIKKILARQVTSPVQWETTVQTLLTKGLKKSYELGPGKVIAGIIKRTDKGADIENIGA

SEQ ID NO: 244240 - protein, 275 aa, Glycine max
  unsure (1)..(275): unsure at all Xaa locations
  Clone ID: PAT_MRT3847_62576C.1.pep
TYSGVLSDGSKLEPAETXRRGSNFQRKKEFYSEIGRVARLRHPNLVAVMGCCYDHGDRYIVYEFVANGPLDKWLHHIPRGGRSLDWAMRMKIATTLAQGIAFLHDKVKPQVVHRDIRTSNVLLDEEFGARLMGVGLSKFVPYEVMHERTVMAGGTYGYLAPEFVYRNELTTKSDVYSFGVLLLEIVSGRRPAQAVDSVGWQSIFEWATPLVQAHRYHELLDLHITSSSSSIIPEASTIQKVVDLVYSCTQHVPSMRPRMSHVFHQLQQITQPHAK

SEQ ID NO: 244241 - protein, 117 aa, Glycine max
  unsure (1)..(117): unsure at all Xaa locations
  Clone ID: PAT_MRT3847_62577C.1.pep
TGVRRRQKGLQADFLLSANEETIFKVDNHIGCRIVGLTVDGRVLFRCMRSDCINYKYTYESPLPVWRLVVHLPDNAQGCTQPSPKLPYXGLRLRVIGVDQSGAHLYYNWPRGNYFQY

SEQ ID NO: 244242 - protein, 84 aa, Glycine max
  Clone ID: PAT_MRT3847_62578C.1.pep
SQIVLNNQLSRINKPINYCVQEKSEFPKVRTQDLPGEPSTHFTYLHTCNRRLFCPFHDALISVMHRHLRQGRGLVSVTSHGILT

SEQ ID NO: 244243 - protein, 107 aa, Glycine max
  Clone ID: PAT_MRT3847_62579C.1.pep
KKPSFKKPNQFLKNQLNQTLKKPTKNGGGAFPKPSLNSQKKPPNLGQKGKQLPPFWGLKKNKPWGWPKANHTLIKREWLPQTPLAPGIFETFFLGNGPLFKNKSFFF

SEQ ID NO: 244244 - protein, 87 aa, Glycine max
  unsure (1)..(87): unsure at all Xaa locations
  Clone ID: PAT_MRT3847_6257C.1.pep
SNARPGLGGAWTSSSRGRASSNVNTIXDXDWELLKPAXTKAMTMAYNPDRETDAWSREILITPGSMXMACTTPGWTATPCHDVQVTI

SEQ ID NO: 244245 - protein, 70 aa, Glycine max
  Clone ID: PAT_MRT3847_62580C.1.pep
GGGAHCPFGRAHVWEGVTVGAFFSYAPLYKGVLGATQLVWGTPGFFHSQFCKRPPDNTTFGALKKKLQVA

SEQ ID NO: 244246 - protein, 83 aa, Glycine max
  Clone ID: PAT_MRT3847_62581C.1.pep
VLPHHLHPPLPPLTPLVSSPSQILRCAILSPNPRLVPFTTTLSICFNSRPSHQPSHSLRSCVIISMASLIHGLTGKIIILSDS

SEQ ID NO: 244247 - protein, 129 aa, Glycine max
  Clone ID: PAT_MRT3847_62582C.1.pep
MEEKAKAEQKKIGMTETWLKKHRLLYNGATRHPLIISIRDGTINTASFKTWLAQDYLFVRAFVPFVASVLIKAWKESDCSGDMEVILGGMASLEDEISWFKTEANKLLESLMSPDAEYTVAITAFWAIE

SEQ ID NO: 244248 - protein, 229 aa, Glycine max
  Clone ID: PAT_MRT3847_62583C.1.pep
MEEKAKAEQKKIGMTETWLKKHRLLYNGATRHPLIISIRDGTINTASFKTWLAQDYLFVRAFVPFVASVLIKAWKESDCSGDMEVILGGMASLEDEISWFKTEANKWGISLSDVVPQQANKNYCGLLESLMSPDAEYTVAITAFWAIETVYQESFAHCIEEGSKTPPELKETCVRWGNEAFGKYCQSLQNIANRCLQKASDEELKKAEVMLLSVLEHEVEFWNMSRGNV

SEQ ID NO: 244249 - protein, 120 aa, Glycine max
  Clone ID: PAT_MRT3847_62584C.1.pep
ILSFSHFCFHPFVSVEGTCVVMCSETGPPRLSFSHDLSELQVLPMKQGVPCSDTLLHDSNSDFEFSTSTCLEFESSSADELFSNGVILPIQMQDKTTARKLTHHVKYPHPKLTPVRVPQC

SEQ ID NO: 244250 - protein, 38 aa, Glycine max
  Clone ID: PAT_MRT3847_62585C.1.pep
RPTLPLKSHSLPYNSIHKLISTHLNLRLHSPNIQQSSN

SEQ ID NO: 244251 - protein, 100 aa, Glycine max
  Clone ID: PAT_MRT3847_62586C.1.pep
TKNKLHLKLCPRCGAFDFKTRTHDAGTKNKGADEPFPRAYSASREKENALSPVPEVVRTVRNKHTAKPVGKDRPYPRARAYLPYASKTNKTSLRVGIDTS

SEQ ID NO: 244252 - protein, 113 aa, Glycine max
  Clone ID: PAT_MRT3847_62587C.1.pep
NKILGLLIYEKWNITTSLQNSASDFVLLCLHLWKGGHFSDVSSSRLTLQICTTLLKFWNINPQFLFFNEDFVQFEGHNSYIMHPYESYKAKTFTYFIPFPRNNYLRDFSIRVK

SEQ ID NO: 244253 - protein, 101 aa, Glycine max
  unsure (1)..(101): unsure at all Xaa locations
  Clone ID: PAT_MRT3847_62588C.1.pep
GGKELQEAXPPNPXGFIRTGERPTFAKRRAPRPAPPSPQGXKGEKXARQGEPPXXXXXXAQGPAGAGXXGXTEPPGPHPGTXXXPAPRPPXXXXRSRSRCT

SEQ ID NO: 244254 - protein, 65 aa, Glycine max
  Clone ID: PAT_MRT3847_62589C.1.pep
FSLFFPCFYGPIITLKKLNFLLLIKQCLFYFIENILMNLHLEYIALSCTSINIYMRFEKLPMHQM

SEQ ID NO: 244255 - protein, 27 aa, Glycine max
  Clone ID: PAT_MRT3847_6258C.1.pep
QAMYFQRNSQHYLYLTTPLLLNYSSWF

SEQ ID NO: 244256 - protein, 62 aa, Glycine max
  unsure (1)..(62): unsure at all Xaa locations
  Clone ID: PAT_MRT3847_62590C.1.pep
PPPSLPPYPQPFPLPLAPXLPPPPPSLPPYPPPPPPPPXPPPPXLPPPPAPPPVEPYPPLAP

SEQ ID NO: 244257 - protein, 60 aa, Glycine max
  unsure (1)..(60): unsure at all Xaa locations
  Clone ID: PAT_MRT3847_62591C.1.pep
YKLINYMKLIAQHXYVVLNIVFCKGNFLLLQVFHIRGIRVKYWILEKDAMSQFRHLFIIQ

SEQ ID NO: 244258 - protein, 233 aa, Glycine max
  unsure (1)..(233): unsure at all Xaa locations
  Clone ID: PAT_MRT3847_62592C.1.pep
MFMVMDSAERCLDSQLWHACAGAMVQMPPLNTKVFYFPQGHAEHAHGKVEYFGKNHQTRVPPLIPCRLSAMKYMADPDTDEVYVKMRLTPLREHELLDSQDDCFLGNTNSGGVENQEKPPTSFAKTLTQSDANNGGGFSVPRYCAETIFPRLDYSAEPPVQTIIAKDMHGQCWKFRHIYRGTPRRHLLTTGWSNIVNQTRLVAGDSIVFLRAENGDLXVGITRAKMGIDGGTE

SEQ ID NO: 244259 - protein, 172 aa, Glycine max
  unsure (1)..(172): unsure at all Xaa locations
  Clone ID: PAT_MRT3847_62593C.1.pep
MRKGKRQVGDNSQPVREMLRWTDEMDNRVLNAMVEEARAGNRIDGSWTPQAYTKIVQTLRDSGXRMLQKNHVKNRQKTMKDRWREIHDLFNGLSGFAWSPVTKRFEAEDEVWDELIKTKPSAAKWRASQVRHYDLLEELYGSNHATEHMGCTPRTHRTMDKENVTIDSETLS

SEQ ID NO: 244260 - protein, 77 aa, Glycine max
  Clone ID: PAT_MRT3847_62594C.1.pep
QGYTPRSVLVVFPPTMVKAAGIPPGLSKPLLQNAGKHVNSAKPDVNIGVSALGVRVGPHLKIQGILQRVNSRKLWPF

SEQ ID NO: 244261 - protein, 198 aa, Glycine max
  Clone ID: PAT_MRT3847_62595C.1.pep
MGCVSSKHIKKDLKQEEEVTVTNGGSYVNHVVSLTSSTYGALMLDKEKEQLQLQPTVEEESKTSPPRIREEPEVINAWELMEGLEEGVPISNNPMKSPKSTPFLRGFISTDPKPKITPFKFLNQFGSPKSLRKFTGKENTVQVQPPNAGVRRLDYNFSPPAMPCPSLVCSPPKGSPTRPRGLRFGSRFCPRSPSPLDP

SEQ ID NO: 244262 - protein, 109 aa, Glycine max
  unsure (1)..(109): unsure at all Xaa locations
  Clone ID: PAT_MRT3847_62596C.1.pep
PVPAVVLLSGGQXEEEASVSLYAINQVNGEKPWSFSFSFGRALQQSPLKAWGGKEEHVQXAQEALLVRSKAHSEASLGPPKGQSQLDDGASQSLHVWNYRCWSMGVGVV

SEQ ID NO: 244263 - protein, 51 aa, Glycine max
  Clone ID: PAT_MRT3847_62597C.1.pep
KNVRPFYETIVPHVEKLMLYTYQAKHTSPVVESYLPRTEKPDAHIALYIEY

SEQ ID NO: 244264 - protein, 84 aa, Glycine max
  unsure (1)..(84): unsure at all Xaa locations
  Clone ID: PAT_MRT3847_62598C.1.pep
PLAPKKLXFAEVVFPLVSKKGGSPKGFFXGGKPYAFFLFKDEGFVXVALGKMNPPISFFRGGIKIKGSFSVAPKFSPGIFPKPF

SEQ ID NO: 244265 - protein, 114 aa, Glycine max
  Clone ID: PAT_MRT3847_62599C.1.pep
LVVHACIMPAPATSFAATLATATRATLVQPLPSSILAPNLRLVNLLPFLVPYSVHLDAANTLWSVLIPRAFWPPNKGFIFPWLSRWLSYSSSFFFYYKLHTPCFYWLYPSISFI

SEQ ID NO: 244266 - protein, 82 aa, Glycine max
  Clone ID: PAT_MRT3847_6259C.1.pep
TVRGLKGLIPCAKILLTIGGTFFLGFGPLILIIVAPFSALYFYFGPTFVHDASKMAISPPQYVDPYALLEDERISQIAPRLN

SEQ ID NO: 244267 - protein, 51 aa, Glycine max
  Clone ID: PAT_MRT3847_625C.1.pep
KKNNLKDALFFFLKTQFGLPHLLITKAKVFWLDSRKITLWRVYFLKNINTL

SEQ ID NO: 244268 - protein, 76 aa, Glycine max
  unsure (1)..(76): unsure at all Xaa locations
  Clone ID: PAT_MRT3847_62600C.1.pep
DGPWTDDPLXFDILYFVELSKEHSVGLLKLPADKALLDDAEFLCYVQLYANDXDASFRDCANSHKTLSYLCFVPTS

SEQ ID NO: 244269 - protein, 134 aa, Glycine max
  unsure (1)..(134): unsure at all Xaa locations
  Clone ID: PAT_MRT3847_62601C.1.pep
LFKNKEHGKTSAAASLGMILLWDVDSGLAQIDKYFHSNDNHVIAGALLGVGIVNCSIKNDCDPAMALLGDYIDKEDTSTRIGAIMGLGIAYAGSQNEQLREKLTGVLNDSKASLEVLAFXAAISLGLIYVGSCN

SEQ ID NO: 244270 - protein, 46 aa, Glycine max
  Clone ID: PAT_MRT3847_62602C.1.pep
RVAEMCSLCKVYILAVSNKILIMHHMVPDWRIPMRRWLLNFQKKRT

SEQ ID NO: 244271 - protein, 86 aa, Glycine max
  unsure (1)..(86): unsure at all Xaa locations
  Clone ID: PAT_MRT3847_62603C.1.pep
RLEVQTEYLSPHKWXFXLGEEAFKRFLSNXPTVHKVFGDASLFSPXVFGKFFXPSDAFPLWEYESDVFVSNLRSSSLNTVYWCHTF

SEQ ID NO: 244272 - protein, 76 aa, Glycine max
  Clone ID: PAT_MRT3847_62604C.1.pep
RENKIKKLQETKLQHYSLIFSEMLLVIFHASYFCFAFSDITSLLEPANTTHSLTFFSLKYHSLISIVESCLLSLET

SEQ ID NO: 244273 - protein, 77 aa, Glycine max
  unsure (1)..(77): unsure at all Xaa locations
  Clone ID: PAT_MRT3847_62605C.1.pep
FFSIFFIYRSSHQNSVQVVEKNKVDTARFXPFWHEIIRNLMEEDYLTNFEMELLLKPRNFGDLPLVQWPLFILASKN

SEQ ID NO: 244274 - protein, 123 aa, Glycine max
  Clone ID: PAT_MRT3847_62606C.1.pep
MRPINSVSPSSPMRASGVNIWKSPIPYLFGGLAVMLAIISMALVILVCSYRKRDSQSSSEVNEDVKSQAMANNLETNSEPEVLVIMAGDHNPTYLAKPITSSIFCTCGAQPSEPNPSSTSTPE

SEQ ID NO: 244275 - protein, 232 aa, Glycine max
  Clone ID: PAT_MRT3847_62607C.1.pep
MRAVSLWLRRKHQLPLALAFRRFSTSNSKVKIFDRELKRTQRDRAAWLTPSHDPLLHTVAQNLLDRLQDCKKTFPTALCLGGSLQPITRSLSAPPGGVEKLIVMDASYDMLQACKNAHHNATVETHFLVADEEFLPIKESSVDLVVSCLGLHWTNDLPGAMIQSRLALKPDGLFLAAILGGETLKELRIACTLAQMEREGGISPRVSPLAQVRDAGNLLTRAGFTLPGVDVD

SEQ ID NO: 244276 - protein, 178 aa, Glycine max
  Clone ID: PAT_MRT3847_62608C.1.pep
MRAVSLWLRRKHQLSLALAFRRFSTSNSKVKIFDRELKRTQRDRAAWLTPSHDPLLHTVAQNLLDRLQDCKKTFPTALCLGGSLQPITRSLSVPPAPGGVEKLIVMDASYDMLQACKNAHHNATVETHFLVADEEFLPIKESSVDLVVSCLGLHWTNDLPGAMIQSRLALKPDGLFLA

SEQ ID NO: 244277 - protein, 59 aa, Glycine max
  Clone ID: PAT_MRT3847_62609C.1.pep
IHSSLPIHSHWLLVVEVFHCCQIQISLENFHSATSILYLGPKPFNSLRTTQASDSSSGL

SEQ ID NO: 244278 - protein, 83 aa, Glycine max
  Clone ID: PAT_MRT3847_6260C.1.pep
IFIYLFFFWIAKYTLYLFHEGSNIIGDTLTKHYNTHFKHTYHFHISLYQTLTTTYIPIHSNKIFIFFQLLLFTNNYYSFYTFF

SEQ ID NO: 244279 - protein, 592 aa, Glycine max
  unsure (1)..(592): unsure at all Xaa locations
  Clone ID: PAT_MRT3847_62610C.1.pep
MAFPNKKLIDDPNDVVTEFIEGLVETYSGLQYLDGFPLVKVVXRVDVSAATYDEVAIIXGVGRGHEXAHAGFXIQACICGGFSYSAANFVQLNKLCSDNSRRKSGPYVLWVGWHSYNGTNDYSWKNSSKITTGTWIXTVIVGDDCALPPPRGIAGRRGLAGTILVHKVAGAAAAGGLSLADVAAEAKHASEIVGTMGVALTVCSIPGQVASDRLGPGKMELGLGIHGEPGAAVADIQPVNVVVSHVLQQILSTETNYVPITRGERVVLMVNGLGATPTMELMIIAGKTVPKLQLEHGLAVDRVYTGSFMTSLDMAGFSISIMKADPVILQRLDAPTKAPYWPVAADGNHPPAKIPVPIPASRSAKTDEPRSQPLQLNEQGQILEVAIEAAANAIINLKDNLNEWDGKVGDGDCGSTMYRGAKAILEDIKNYPLNDAAETVGEIGSSIGRSMGGTSGIIYTIFFKAAHSVLKASSHSGVTSKQWAEALAVSIAAVSKYGGASAGYRTLLDALIPASLVLEEKLNSGVDPCIAFVLSSEAALAGAQSTVDMQAQAGRSTYFSGEILSTVPDPGAMAAATWYRAAALAVKAKYQS

SEQ ID NO: 244280 - protein, 333 aa, Glycine max
  unsure (1)..(333): unsure at all Xaa locations
  Clone ID: PAT_MRT3847_62611C.1.pep
ERCTFGFGANTNCRWHWHFADSRHTNSKVKIFDRELKRTQREPSRMVDCLTRPSSSHLVAQNLMDHLQDCKKTFPTALCLGGSLXPITRSLSAPPAPGGVEKLIVMDASYDMLQACKNAHHNATVETXFCVSEEDVSLSQRIFSGVTKVFNFTLPMMADRFLSNSLHLSVVISANWPIFTFLXGLETSEELRIACTLAQMEREGGISPRVSPLAQVRDAGNLLTRAGFTLPGVDVDEYVVKYESALELIEHLRAMGETNALYQMNNILKRDTALATAAIYDSMFSAEDGTVPATFQVIYMTGWREHPSQQKAKRRGSATISFNDIQKQFGSQN

SEQ ID NO: 244281 - protein, 269 aa, Glycine max
  unsure (1)..(269): unsure at all Xaa locations
  Clone ID: PAT_MRT3847_62612C.1.pep
LRADVSAATYDKVAFISGGGIGHEPAHAGFVGEGMLTAAICGDXAVTGPKGCLLVVKCSNLGVDXNYTRDRLNFGLAAKIAKSEGYKVETVIVGDDCALPPPRGIAGRRGLAGTILVHKVAGAAAAGGLSLADVAAEAKHASEIVGTMGVALTVCTIPGQVASDRLGPGKMELGLGIHGEPGAAVADIQPVNVVVSHVLQQILSTETNYVPITRGERVVLMVNGLGGTPTMELMITAGXTVPKLQLEHGLAXDRVYTGSFMTSLDMAGF

SEQ ID NO: 244282 - protein, 71 aa, Glycine max
  Clone ID: PAT_MRT3847_62613C.1.pep
DCLYSNIICPLAWWASYVLWEEKHRVSHGKGNIKCPLTCKTLSCLLKEVDPFGVVPSILIHQQCIFTCIVF

SEQ ID NO: 244283 - protein, 62 aa, Glycine max
  Clone ID: PAT_MRT3847_62614C.1.pep
EQEGLQKDSLHKLIPYSLVFLLGKTGPLTKTLLEPFTQNQEITSIQRHSSNNARTTIQMLIT

SEQ ID NO: 244284 - protein, 86 aa, Glycine max
  unsure (1)..(86): unsure at all Xaa locations
  Clone ID: PAT_MRT3847_62615C.1.pep
ATETNVVVLGGMTEMTGAASSVEINNLASFAVXEQNKRXNSALDFVMVISAQHQMASGVNYYITLEAKDGGMKNDYYAKGWDREYQ

SEQ ID NO: 244285 - protein, 70 aa, Glycine max
  Clone ID: PAT_MRT3847_62616C.1.pep
EGPQIPVGERAALFFPFNPGYFLFERRIFILFSGGGAMTPPVFGRASREISGFFERKVIYPFSEGGFFFF

SEQ ID NO: 244286 - protein, 117 aa, Glycine max
  unsure (1)..(117): unsure at all Xaa locations
  Clone ID: PAT_MRT3847_62617C.1.pep
THEVEPPTRAQEEIVASRASAWIPALSSGHRKAQASGPPVAPRAFLLDSFGRTDRTVRGALLLVDPYRPTPVYACXSIFAAPFRGGRPLGVVTCSTTIAHGCADLPTGVHALSTTTH

SEQ ID NO: 244287 - protein, 122 aa, Glycine max
  Clone ID: PAT_MRT3847_62618C.1.pep
MNQGNMMIPHVPSGGALSALLKLGLLGGIALYADANSLYNVEGGHRAIVFNRLVGVKDKVYPAGTHFMIPWFERPDIYDVRALPHLSESTSGGRDLQMAKIGLLVLTGALTNQIPTAYRTLG

SEQ ID NO: 244288 - protein, 203 aa, Glycine max
  Clone ID: PAT_MRT3847_62619C.1.pep
MKNTIFFALFLVCAFTSYLPSATADTIFDINGDFVRNGGTYYILPVIRGDGGGIEFAATGNETCPLTVVQSPLEVSKGLPLIISSPFEILSIQEGLILNIGFTFVPPCALIPSEWTTVKGLPEGLAVKLTGYENKVPGWFKIERVSLEFNDYKLVFCATEDSTCVDIGVYIDGEGNRRLVVTENNDPLLVHFKKVEVESSATA

SEQ ID NO: 244289 - protein, 28 aa, Glycine max
  Clone ID: PAT_MRT3847_6261C.1.pep
NTCQSQTFVESIFIVCFTLLYSHSKILF

SEQ ID NO: 244290 - protein, 321 aa, Glycine max
  Clone ID: PAT_MRT3847_62620C.1.pep
LEREREKDIEKAMLEAEREREREKDRMAVDRATLEARDRAYAESCERAAFERATVEARYKALAEARERLEKACAEARDKSNIDKETIEARLKAERAAVERATAEAQDQAMEKLKNERTAFESREQLERSVSDKFCRRQDSSSSDMLDPQFQNLSSSTGSRHPYSLYGAASFSERSEREGESAQRCRARLERHRRTAERAAKALAEKNMRDLLAQKEQAERNRLSETLDAEVRRWSGGKEGNLRALLFPFQYTLGPDFGWQLIPLTEVITSAAVKKAYRKATLCVHPGKLQQRGASIQPKYICEKVFDLLKEAWNKFNSEER

SEQ ID NO: 244291 - protein, 75 aa, Glycine max
  unsure (1)..(75): unsure at all Xaa locations
  Clone ID: PAT_MRT3847_62621C.1.pep
TIPLPXXXNLXXLIYSTNLLQQYPQLDASLFLDIEVGQSLIIDDPAAGAFTVSAFDANHCPGNIHFSNLFGIFVF

SEQ ID NO: 244292 - protein, 88 aa, Glycine max
  Clone ID: PAT_MRT3847_62622C.1.pep
FPLFKYLYMQNHFHLNSLFIPFLLKTSFQKLTLISNAKFIFNLFYISFLDVPIQKRKNSWTFSIPTLSSFKGIEYFFLFYFLTNLPFL

SEQ ID NO: 244293 - protein, 34 aa, Glycine max
  Clone ID: PAT_MRT3847_62623C.1.pep
GSYTFKSEGTGGLKSNQTIYYFTGVLAVAPFEQF

SEQ ID NO: 244294 - protein, 238 aa, Glycine max
  Clone ID: PAT_MRT3847_62624C.1.pep
LLLFKIGLSNYVPASFVFGDSLLDVGNNNYIVSLAKANHDPYGIDFGMATGRFSNGRTVADVINQKLGLGFSPPYLAPTTTGSVVLKGVNYASGAGGILNNSGQIFGGRINFDAQIDNFANTREEIISLIGVPAALNLFKKALFTVALGSNDFLDNYLTPILSIPERVLVSPESFVATLVSRLRLQLTRLFNLGARKIVVVNVGPIGCIPYVRDFTPFAGDECVTLPNELAQLFNTQL

SEQ ID NO: 244295 - protein, 80 aa, Glycine max
  unsure (1)..(80): unsure at all Xaa locations
  Clone ID: PAT_MRT3847_62625C.1.pep
SKWXKKCFKLGKKDRGPRFFGIYSNKGRGVPLGAFGKKHKGPFYKKIKNSKGKPKSPFLLFFPGNEFNSKPLNPSLLERE

SEQ ID NO: 244296 - protein, 108 aa, Glycine max
  Clone ID: PAT_MRT3847_62626C.1.pep
RHEASCRIRHEAHNLYEADFGDADAPVEPWAKEFAAWVHKSAALPAPEREAALLQYAKQPTFRRAHPREEHWMPIFFALGAADSQEKVQILADRILCGSLAVSTLLWE

SEQ ID NO: 244297 - protein, 33 aa, Glycine max
  Clone ID: PAT_MRT3847_62627C.1.pep
NYMIKFTPLMLSSNLNNKLDLRIKKMCLNQIIE

SEQ ID NO: 244298 - protein, 51 aa, Glycine max
  Clone ID: PAT_MRT3847_62628C.1.pep
LSDGFRTNWPLYLTTGSLLRVFIWGDGRDRGSCWLGILIVKWGGSNDQREG

SEQ ID NO: 244299 - protein, 101 aa, Glycine max
  Clone ID: PAT_MRT3847_62629C.1.pep
MSADEHHFEHHAEARAYKRYSQKDGTIGKNSYMNIYGRICRVAYVATDKTAKHSDAHCHSEGNDIGTDKKTDDILADIDNCDDTHENRTEYRTNDHANDRA

SEQ ID NO: 244300 - protein, 70 aa, Glycine max
  Clone ID: PAT_MRT3847_6262C.1.pep
CLINIKKENSSGHPSHRGFSYQRDFFIIDRAQAGHKACALDIIDAIYGLEAQDLFVCFQVMSMGVYVPSS

SEQ ID NO: 244301 - protein, 48 aa, Glycine max
  Clone ID: PAT_MRT3847_62630C.1.pep
LLVPQKPQIISQPHITVFKPSFSTHDLIIAIIKHCYHTHTSIRIPLYP

SEQ ID NO: 244302 - protein, 48 aa, Glycine max
  Clone ID: PAT_MRT3847_62631C.1.pep
LLDKLYAGGVIHISSQNWSRLDVFFFLLWRMDLSPSFSSLALCILLSS

SEQ ID NO: 244303 - protein, 44 aa, Glycine max
  Clone ID: PAT_MRT3847_62632C.1.pep
VEQARMKLYILNRFHCSLYLRFLVFFFGEFYPHKLISRILVCKP

SEQ ID NO: 244304 - protein, 104 aa, Glycine max
  Clone ID: PAT_MRT3847_62633C.1.pep
IYLAQANLANYIFFLLSLFRRAVIRASFLSALTFFSNPYLFIPSPSILGPSLTFHFRSLTWFASGPSRCSLFSFFLALKAIHPFVPAICIWWPHEHIHDFLQTV

SEQ ID NO: 244305 - protein, 75 aa, Glycine max
  unsure (1)..(75): unsure at all Xaa locations
  Clone ID: PAT_MRT3847_62634C.1.pep
GFVYREHTRSPGNYDGXLMDHGKPPMFGCXEAFQVLKKLQKVKXAYPNXFXRIXEXXNVXQXQCISFIAYKPPTX

SEQ ID NO: 244306 - protein, 82 aa, Glycine max
  Clone ID: PAT_MRT3847_62635C.1.pep
SSKSFHITSTSSCSTKLIGNIKKNGFMLSVWTSKMTSYSKFMSNKYEDDDDDVKDHRAWHAFMEKNLLGGKESVMLPNYSGR

SEQ ID NO: 244307 - protein, 78 aa, Glycine max
  unsure (1)..(78): unsure at all Xaa locations
  Clone ID: PAT_MRT3847_62636C.1.pep
KMYQTYKGLKRFSKPKLSRTNFTINHYAGDVTYQADYFLDKNKDXVVAEHQALLCASKCPFVANVFPPLPEETSKQSK

SEQ ID NO: 244308 - protein, 45 aa, Glycine max
  unsure (1)..(45): unsure at all Xaa locations
  Clone ID: PAT_MRT3847_62637C.1.pep
MATRRYEFGRMNEASHLDSIRVALVEFLSTSIFVFAXGEGSALAL

SEQ ID NO: 244309 - protein, 147 aa, Glycine max
  unsure (1)..(147): unsure at all Xaa locations
  Clone ID: PAT_MRT3847_62638C.1.pep
WSKKNRSCLVSVFFFFLFLLCNASEEIRSPDRKRKQWRLFRFQPPPTPNPNSEPKPRCSPITXPPPHPTKDLPSPPNPIFPNPXPPQIPNPKTTPXLPPPPSSXPPPPPXLPPPTAPPTPSSPLSLPLAPLLLLPRLPPHKLLPPRF

SEQ ID NO: 244310 - protein, 223 aa, Glycine max
  Clone ID: PAT_MRT3847_62639C.1.pep
SGIPASTHASAGGGGAGGYGEGGAHSGGYGSGGGAGDGGGAGGEHGGGYGGGQGGGVGAGGGYGDGGAHGGGYGGGQGGGAGGGYGAGGEHGGGYGGGEGGGAGGGYGASGEHGGGYGGGQGGGSGGGYGAGGDHGAAGYGGGAGGGAGGGYGAGGEHGIGYGGGGGSGGGSGGGYGDGGAHGGGYGGGAGAGGGGGYGAGGAHGGGFGGGGGSGGGHGGYVP

SEQ ID NO: 244311 - protein, 83 aa, Glycine max
  Clone ID: PAT_MRT3847_6263C.1.pep
LRQSPQRNSHIQSQTTMSSTNNNIEAVANQMPTGGSGEFNPKPAGAARENHDGHKPGVLVGNDAAPEFHAQVLPAGSAPSNAS

SEQ ID NO: 244312 - protein, 67 aa, Glycine max
  Clone ID: PAT_MRT3847_62640C.1.pep
NQTMPKLASWHFINEAVHILTNNLTNSLLSIKPNIHIYQEDFLLLTLRASKKVLTSKSNTEFSIVFI

SEQ ID NO: 244313 - protein, 80 aa, Glycine max
  Clone ID: PAT_MRT3847_62641C.1.pep
CMLKSKQKAQLKWDRSQVEIANYTNGHWQIKVKDKRLKKCIDNLCSWENMLKHWGETNWTDDEFYTPTPPAISTSSLFDL

SEQ ID NO: 244314 - protein, 203 aa, Glycine max
  unsure (1)..(203): unsure at all Xaa locations
  Clone ID: PAT_MRT3847_62642C.1.pep
MDSNIQDFIDTCNSDNTCNLITNSTTTNLTAASAASSSPASTSITSSSRYENQKRRDWNTFGQYLKNHRPPLSLSRCSGAHVLEFLRYLDQFGKTKVHTPICPFYGHPNPPAPCPCPLRQAWGSLDALIGRLRAAFEENGGKPEANPFGARAVRLWSRECEXLQSKASGLKSEKKKRKRPPPQQQPMPIPHHPLPPPGASATH

SEQ ID NO: 244315 - protein, 47 aa, Glycine max
  Clone ID: PAT_MRT3847_62643C.1.pep
NVKPIIIMIDRDIRDRTLQFKIFILSNSRSTTNYFFQLVTPSNGGSF

SEQ ID NO: 244316 - protein, 62 aa, Glycine max
  unsure (1)..(62): unsure at all Xaa locations
  Clone ID: PAT_MRT3847_62644C.1.pep
DESLFSVALIICPISKSSHVSDYVCFSPLPPILLFVCYIGIFYVIIYKHVLSVCKNKQKKKX

SEQ ID NO: 244317 - protein, 68 aa, Glycine max
  Clone ID: PAT_MRT3847_62645C.1.pep
RTNPFLNRLFAPALWWALYLWNGGGGSPNFYLPSFVAKLGVVCKIRPGSRLVVSTCLNYKFPGALSRF

SEQ ID NO: 244318 - protein, 97 aa, Glycine max
  unsure (1)..(97): unsure at all Xaa locations
  Clone ID: PAT_MRT3847_62646C.1.pep
IKGSSLAGSIRWKDQQRSFKGGHIGNGWMPSIQPEVCTPIETVFVPHANASLSTGXPWAIPHGLSVQKAXIILSTSRIAVSSEVAAPDSNKRFVQSH

SEQ ID NO: 244319 - protein, 185 aa, Glycine max
  unsure (1)..(185): unsure at all Xaa locations
  Clone ID: PAT_MRT3847_62647C.1.pep
LTPDCVTYNSVMNTYFIQGKTENALDLLNEMKSYGVMPNMVTYNILIGGLCKTGAIEKVISVLHEMLAVGYVPTPIIHKFLLKAYSRSRKADAILQIHKKLVDMGLNLNQMVYNTLITVLCRLGMTKKANVVLTEMVIKGISADIVTYNALIRGYCTGSHVEKAXNTYSQMLVSGISPNITTYNA

SEQ ID NO: 244320 - protein, 45 aa, Glycine max
  Clone ID: PAT_MRT3847_62648C.1.pep
WGPAPPPNFFFFFFFFFFFFFFFFFFFFFFFFFLSCKHIDIITEL

SEQ ID NO: 244321 - protein, 81 aa, Glycine max
  Clone ID: PAT_MRT3847_62649C.1.pep
GWIIEHDEYRHQASFLRRAWGRPNRVKYLGPFYGEPPFYLTGEIPREYGWNTDGLSADPGTFAKNRELGLIHCRRAMLGAL

SEQ ID NO: 244322 - protein, 63 aa, Glycine max
  Clone ID: PAT_MRT3847_6264C.1.pep
IASNETLFQRSQMSFCHQIIATLLKSSHRNSTMSQIRDRETKRINWKTLVLYIYDGKNAFCWF

SEQ ID NO: 244323 - protein, 219 aa, Glycine max
  Clone ID: PAT_MRT3847_62650C.1.pep
MANNPQYPGLQPLRPPIAGSLDPPRNFVPPMPVQFRPVVPTQQSQQFISMPSQHYQHQPVGPGGVPLIGVGMPPQNQRSQFSQPIQQLPPRPSPQLPPPSQAIPMPVARPNMHIPSESMMHQPDSQVHSQAPNGYTPGLGGPAMPLSASYTFAPSAYGQVQTNFSSTGQFQPVPQIHALTGSSSQSITTGATLQSNGGQPSVTTVMPSGTIAPPQLAKN

SEQ ID NO: 244324 - protein, 40 aa, Glycine max
  Clone ID: PAT_MRT3847_62651C.1.pep
YITLATTTYNTDGDIHQNLGTYFSSNGCRQLPTNLTQMQC

SEQ ID NO: 244325 - protein, 116 aa, Glycine max
  unsure (1)..(116): unsure at all Xaa locations
  Clone ID: PAT_MRT3847_62652C.1.pep
KEDRITNEYNMHGFYSLFILLPSPISLXYPFPFIPHLPPTKRSIPKGHHVSEVSCHSNQNTTPTPNPEEEKPSHNIPGKHRRDVLLGIGGLYGASTLINTNQSHGCSPYSPSLNGY

SEQ ID NO: 244326 - protein, 37 aa, Glycine max
  unsure (1)..(37): unsure at all Xaa locations
  Clone ID: PAT_MRT3847_62653C.1.pep
ERXPLHXXCNPLGKSGGAXISAXFHDLNFWFTQLTSN

SEQ ID NO: 244327 - protein, 78 aa, Glycine max
  Clone ID: PAT_MRT3847_62654C.1.pep
LLLEDYRRVHTKQTKPIRTEPTLHIFPIFTFILNFQLHSLFFSLYLLTHYSLSDTYLCLYIIFLLPSNKVIKHVTVDA

SEQ ID NO: 244328 - protein, 56 aa, Glycine max
  Clone ID: PAT_MRT3847_62655C.1.pep
AHVYYRLLQTAAFVGILTLKSVRCHTATAHNLNHPRHHSTVATNLMSHSQGWATLY

SEQ ID NO: 244329 - protein, 76 aa, Glycine max
  Clone ID: PAT_MRT3847_62656C.1.pep
FPKLKSIFHVINNGHVTLFTTAKRKRIPPSFFPSSFKAVVFGSEDRNIRDIFELKHIVGDVRPTQPLYFSPPPTQH

SEQ ID NO: 244330 - protein, 90 aa, Glycine max
  Clone ID: PAT_MRT3847_62657C.1.pep
RTHEQGKRLVSEYSLCLYFTRVQYTSNISTRQNVLHKVARVMDIMAAAQEQVNLIAHFDFNTSGTSAKECHTNRVKPIMLKYLLMLHKMG

SEQ ID NO: 244331 - protein, 62 aa, Glycine max
  Clone ID: PAT_MRT3847_62658C.1.pep
EDFEDLGAHVAASSGSCIDSFPDSPKVFSLISELLVCHHIRQIQLNVDSRIICWNRAKRNGL

SEQ ID NO: 244332 - protein, 69 aa, Glycine max
  Clone ID: PAT_MRT3847_62659C.1.pep
SNRGGARSVEIIHKLIHHLHHGLSLIATRERFIHKIPFRVSEMHLFWTKHRHSVVSFGLPCNLKDRTPG

SEQ ID NO: 244333 - protein, 49 aa, Glycine max
  Clone ID: PAT_MRT3847_6265C.1.pep
NSSLFTYSKTVLNSVLKTIHTMKKCSSPPTAPTPTFQAICAFSSALQYL

SEQ ID NO: 244334 - protein, 82 aa, Glycine max
  Clone ID: PAT_MRT3847_62660C.1.pep
RIIVSGLSSMLPPSTDIKHASLRSAGKGSYHTLDGNCSSWPIVLLFRITRVIHRHCAYHHPSCDTGYGQTIRVRSRRSSHIV

SEQ ID NO: 244335 - protein, 170 aa, Glycine max
  Clone ID: PAT_MRT3847_62661C.1.pep
KHYARGHGDVDLEDYTEELIVSLDPSKAVANKIPTPPPKKYTAINMLDGRNRIIEYKNPTLYKDDEKLKALSGMKETGYVPDTRYVLHDIDQEAKEQALLYHSERLAIAYGLISTPPRTPLRIIKNLRVCGDCHNAIKIMSRIVGRELIVRDNKRFHHFKDGKCSCGDYW

SEQ ID NO: 244336 - protein, 68 aa, Glycine max
  Clone ID: PAT_MRT3847_62662C.1.pep
MENNSRSPREGCMDFAVHSQVIKIKEEIEKIKHPSLQLHMRRALLRDVNRLRSRSPLGFADRERAILT

SEQ ID NO: 244337 - protein, 90 aa, Glycine max
  Clone ID: PAT_MRT3847_62663C.1.pep
LTTVHHGNLLVDASALKSNQLEMKRSISFLIFHSLNPVILRSTLGSKKGTALSFSIKVKVYLCETLDNAFSPFNEPTFRMGSTWWDGRTR

SEQ ID NO: 244338 - protein, 241 aa, Glycine max
  unsure (1)..(241): unsure at all Xaa locations
  Clone ID: PAT_MRT3847_62664C.1.pep
PRVRDSPVFPVIYDSKRTVLSLPPIINGAHSAITLETKNVFIECTATDLTKAKIVLNTMVTAFSEYCENKFVIEPVEVISSDGKSNIYPDLSVYNMEVSLSYINGLIGVSLEAEEVTKYLNRMQLHAKQSASHNKQCNIVVSVPPSRSDVLHPCDVMEDVAIAYGFNAIKDKAVVDNKGSXRLAASLTLLPLNELSDLIRKEVALIGFTEGLDIYTSAXKENFAMLNRKEDKSKAVIIGKP

SEQ ID NO: 244339 - protein, 144 aa, Glycine max
  unsure (1)..(144): unsure at all Xaa locations
  Clone ID: PAT_MRT3847_62665C.1.pep
LTKQISCFFNQTKKNSLRLFFYQDLLTNNELLSDSFLYKEIDNGMLXEVDGKSVIKLTVYVNINANPSTKRLRKNXAIDHSSRNVVDIVDTFTLXYQPPFDKKQFATFMKKIIKNFTPHLYAKQQEVFKKHXHVTTKYPLSKIK

SEQ ID NO: 244340 - protein, 57 aa, Glycine max
  Clone ID: PAT_MRT3847_62666C.1.pep
SCCYELLSVSRRCLDLSSAKDLSLRIVKLQFVSSTPGLLPGAGRQPAKVQGQRLFVL

SEQ ID NO: 244341 - protein, 51 aa, Glycine max
  Clone ID: PAT_MRT3847_62667C.1.pep
FTKENANSINTPNFKTLLLKENSSPSMYRLEIKSLVEDLKNCTPPHIYILF

SEQ ID NO: 244342 - protein, 52 aa, Glycine max
  unsure (1)..(52): unsure at all Xaa locations
  Clone ID: PAT_MRT3847_62668C.1.pep
MAETFLFTSESVNEGHXDKLCDQISDAVLXACXEQDPDSKXXCETCTKXNWG

SEQ ID NO: 244343 - protein, 116 aa, Glycine max
  Clone ID: PAT_MRT3847_62669C.1.pep
SSLSLIQIKVLSSFLLPVLDGNNWPYVDVGKGILVSLVIEADENRIESSLSKVKGKDIVKLIAAGREKIATAPIRGGLAVPSPNLLWYVLILMLLLLRQIKKIRSWCMQNPTMIWE

SEQ ID NO: 244344 - protein, 118 aa, Glycine max
  Clone ID: PAT_MRT3847_6266C.1.pep
GSSTEDKRSPFTQQSNIRNDEYYGKKVAGSNKDPFVESEVAVSDDVMEPSLHKYVTVKRGGGVVVEDMEDQESSGSNSFTVSSISGQHYWGNNIFCSSSWEPNSCDSTDWLDFFKIEL

SEQ ID NO: 244345 - protein, 66 aa, Glycine max
  Clone ID: PAT_MRT3847_62670C.1.pep
SPLIGVRSVPHGGSDIGRQSHVDISWEVARGSAEFMQNVRLNTEIIKSHDDNNNNNAFSLSVASII

SEQ ID NO: 244346 - protein, 55 aa, Glycine max
  Clone ID: PAT_MRT3847_62671C.1.pep
PTASSIALTSASMTGKAMKLGPSTPEVWRVIMRKTVTKQAYFGSPWFRLNRDKYL

SEQ ID NO: 244347 - protein, 166 aa, Glycine max
  Clone ID: PAT_MRT3847_62672C.1.pep
MDSSSSASVCQHAKVVPKQYDIFHAGRFSGVPFSWEYLPGIPKKQNSKKKLQESSLKLLPLPPPTTTHSSRKHTHEETRIRKKNSIQSVFQRDPFFAALVECSKDDSEETSRNLWNGAKVPRSVSDRFGFISLYASCKRTCAVSESLVYLPSSRRSTCEHVSPRSL

SEQ ID NO: 244348 - protein, 63 aa, Glycine max
  Clone ID: PAT_MRT3847_62673C.1.pep
DSNSTSLLRVKLESRMQIKCFWLSVETYVQWKNKCSKAQKLKQCNKSFFYMHNATDWQTRLKS

SEQ ID NO: 244349 - protein, 72 aa, Glycine max
  Clone ID: PAT_MRT3847_62674C.1.pep
AEEITVSYMGAPPPKDDILVGDPNSNLLIIIPLIIITAHEKICSPGTPKHVNDIIQRRRCHPLFPLIRFLML

SEQ ID NO: 244350 - protein, 148 aa, Glycine max
  Clone ID: PAT_MRT3847_62675C.1.pep
MDSSSSASVCQHAKVVPKQYDIFHAGRYPSSRRTHSSSSSCSSLSPSSSSFESFFFPEDPLLSPASPLRFSGVPFSWEYLPGIPKKLNSKKKLQESSSKLLPLPAPTTTHSSRKHTHEETRIRKKNSIQSVFQRDPFFAALVECSKDD

SEQ ID NO: 244351 - protein, 204 aa, Glycine max
  Clone ID: PAT_MRT3847_62676C.1.pep
MDSSSSASVSQHAKVVPKQFDIFFHAGRYPSSRRTHSSSSSSSFESFYFPEDPLLSPASPLRFSGVPFSWEHLPGIPKKQNSKKKLQESSLKLLPLPPPTTTHCSSKKHSHEETRIRKKNSIQSVFQRDPFFAALVECSKDDNEEITSRNLWNGAKVPIRSISDRFGFISLYASCKRTCAVSESLVYLPSSRRSTCEHVSPRSL

SEQ ID NO: 244352 - protein, 140 aa, Glycine max
  Clone ID: PAT_MRT3847_62677C.1.pep
MGRVRTKTVKKSSRQVIERYYSRMTLDFHTNKKVLEEVAIIPSKRLRNKIAGFSTHLMKRIQKGPVRGISLKLQEEERERRMDFVPDVSAIRTDQIEVDKETLDMLAALGMSEVPGIVQVDPVAVQAPLGFGRGGPGRRY

SEQ ID NO: 244353 - protein, 139 aa, Glycine max
  Clone ID: PAT_MRT3847_62678C.1.pep
MGRVRTKTVKKSSRQVIERYYSRMTLDFHTNKKVLEEVAIIPSKRLRNKIAGFSTHLMKRIQKGPVRGISLKLQEEERERRMDFVPDVSAIRTDQIEVDKETLDMLAALGMSEVPGVVQVDPVAVQAPLGFGRGAGRRY

SEQ ID NO: 244354 - protein, 137 aa, Glycine max
  Clone ID: PAT_MRT3847_62679C.1.pep
GVPKWGVAPFSFFGGMVSAPFPWPWSFFNPFFSPSRFWPRYYFCGFPPPVKSFGPPFFFPPFGKPWPPFFIKFYPLNGFWWEGFFFLNLLKWLLFFSSLILNFHVPIPFLGFKPINFFSPPIPRFFLDYKTPPLFFG

SEQ ID NO: 244355 - protein, 47 aa, Glycine max
  Clone ID: PAT_MRT3847_6267C.1.pep
AEFLDLLITLVLLHLSEYHRVGSRCKFIMIVTLQYLLLVFFHFHICY

SEQ ID NO: 244356 - protein, 103 aa, Glycine max
  unsure (1)..(103): unsure at all Xaa locations
  Clone ID: PAT_MRT3847_62680C.1.pep
MPIRNIAVGRGEEGTHPDTWKGGLAEFISTFIFVXRGQGAGVAYNKVTEHGAATPAGLISGSIGHAFGLFGAGSGGANISGGHVNPARTFGAFGGGDITFLRG

SEQ ID NO: 244357 - protein, 111 aa, Glycine max
  unsure (1)..(111): unsure at all Xaa locations
  Clone ID: PAT_MRT3847_62681C.1.pep
XHXXVSXXFXSXMSXXXXIQDXEXRXTSXKPGRKXXEFAREXDXXXHXXGFXXXXSNXDVDXXRDSNMXSAXITMYXTVXXNGXXXAQXXXAXXXXKMXXXXPRXXEXXXT

SEQ ID NO: 244358 - protein, 137 aa, Glycine max
  Clone ID: PAT_MRT3847_62682C.1.pep
KKKNPPFPPRKGGDPAIFTRKPSPEGNGKPYTNPKSPPGKTPPLNKKGVLKTPKKEPPFFKPPPGGNTAPFSGGGPGKFFGETKNFVLGKTPTPPPGETKSDPPQKRCDVLPLLMELPPPGPGLAWINPLNSPKAPP

SEQ ID NO: 244359 - protein, 54 aa, Glycine max
  Clone ID: PAT_MRT3847_62683C.1.pep
KNLIKNYYVMSTFSLLGFCAFLIVIWRLMYAFKVQFLFSSPIWKSSYLCLLTIW

SEQ ID NO: 244360 - protein, 30 aa, Glycine max
  Clone ID: PAT_MRT3847_62684C.1.pep
GGHYLRLAYIEVNFECIAASCSRLKKTIHF

SEQ ID NO: 244361 - protein, 55 aa, Glycine max
  Clone ID: PAT_MRT3847_62685C.1.pep
PASTLTRAEQRDSPGAKTRRVWQLDNIPSTVCGVLIPRSDYDVFKKGVMNSFGHW

SEQ ID NO: 244362 - protein, 62 aa, Glycine max
  Clone ID: PAT_MRT3847_62686C.1.pep
MAGVGDGDLYTQLWKLCAGPLVDVPRQGERVFYFPQGHMEQLQASTNQGLNQEIEWVVLKKK

SEQ ID NO: 244363 - protein, 116 aa, Glycine max
  Clone ID: PAT_MRT3847_62687C.1.pep
GYPKGDGLGTEIVGPFFFVYTVFSPPDAKKNAKNFPVPILAPFPIGFSVFLVPLGTIPIPGNGLNPPRSFGAAIKNNPDHAWDDPWIFWVGPFIGTAPAAVYPPKVIRAIPFKTKG

SEQ ID NO: 244364 - protein, 48 aa, Glycine max
  Clone ID: PAT_MRT3847_62688C.1.pep
ARVFLYIEWISQCKYDLSTREYSRKAQITLVLFQFLFSFFFLFSSVFS

SEQ ID NO: 244365 - protein, 65 aa, Glycine max
  Clone ID: PAT_MRT3847_62689C.1.pep
CVVSKKSPPQFRSGRLGPFNFEDVQNVKAVLKGGLSILFSPRTFITSRSPAAPCVPFCAISISGQ

SEQ ID NO: 244366 - protein, 138 aa, Glycine max
  unsure (1)..(138): unsure at all Xaa locations
  Clone ID: PAT_MRT3847_6268C.1.pep
QLVYSVIEIKDGTIQVYAGDSPSYLEYHVDLWFRQRGRXSQLDNQAPKVIPESHISNVYKEARMXLKIQAFQVAPQKSKCVIYAKRWFFLSHVIVTLIFSQKGFIAYPVRYTAYVYSCLHSLTHLRQYKRMIQAFVIL

SEQ ID NO: 244367 - protein, 82 aa, Glycine max
  Clone ID: PAT_MRT3847_62690C.1.pep
PPHQKHQLLDHGLFLLSSFFQLVASESLWLSSPSSNKAAPSEVTSMFAIDSRSIPPSPNCAVARKNIMLSDAWADAWVAAGF

SEQ ID NO: 244368 - protein, 89 aa, Glycine max
  Clone ID: PAT_MRT3847_62691C.1.pep
MRKRQVVVRREEPQRSARTVKYGECQKNHAANVGGYAVDGCREFMASGATGEGTSAALTCAACGCHRNFHKRQETEVVSECSSPTSNGT

SEQ ID NO: 244369 - protein, 55 aa, Glycine max
  Clone ID: PAT_MRT3847_62692C.1.pep
SFPEELFSVLRTVHLLRGLSIGLGINYSCAEQWRPFAEEALSRAGRLKRGTVTLA

SEQ ID NO: 244370 - protein, 120 aa, Glycine max
  Clone ID: PAT_MRT3847_62693C.1.pep
HEQLHVIDNAKLEPLRSYVSEQDKRRVGAVIVANKEDVLKAARESSIKDSNSLPASLVKVTPLLYKYLRTWTSESPFQIGPVLLVNDPFTIDNGLMTPTMKIRRDKVVAQYGDQIENLYK

SEQ ID NO: 244371 - protein, 78 aa, Glycine max
  unsure (1)..(78): unsure at all Xaa locations
  Clone ID: PAT_MRT3847_62694C.1.pep
KQGAPLGGGQTGAPHSNPPPLESPPRPPXPGCPKGPREPPPPHHRHSPPKPPAPGGHPWGCQGGNLHWAHGVPRGPAP

SEQ ID NO: 244372 - protein, 101 aa, Glycine max
  unsure (1)..(101): unsure at all Xaa locations
  Clone ID: PAT_MRT3847_62695C.1.pep
DSWMHLTYIYSFLYISERLPTTIVSDMNXDSLKEVLERYTXDAHIQVLQHHSHHDIQXLSQSRVVSXVALLPYKVSVITERRPISIPTGYNDLYESMHSHK

SEQ ID NO: 244373 - protein, 56 aa, Glycine max
  Clone ID: PAT_MRT3847_62696C.1.pep
YTQKVLVSLVIMCCSKVLWPGHIQLAHSSYAPNALSPHGMVTTLITWVQMLFTKRL

SEQ ID NO: 244374 - protein, 80 aa, Glycine max
  Clone ID: PAT_MRT3847_62697C.1.pep
MWGGYLVLAGVFPFNPFFFPGFPWGDKSSSPGAWVFKSGPKGPPGNPPESLFFFLVSPGGFSGPIVFPEYFFFPQFWVLF

SEQ ID NO: 244375 - protein, 160 aa, Glycine max
  Clone ID: PAT_MRT3847_62698C.1.pep
MGASLSNLGSNGSAAAPGLGDIPENCVARVFLHLTPPEICNLARLNRAFRGAASADSVWQTKLPRNYQDLLDLMPPERHRNLSKKDIFALLSRAVPFDDGNKEVWLDRVTGRVCMSISAKAMSITGIDDRRYWTWVPTEESRLGFQDLLQTLNYVVVMLG

SEQ ID NO: 244376 - protein, 493 aa, Glycine max
  Clone ID: PAT_MRT3847_62699C.1.pep
MELGSILHFLQDKNILITGATGFLAKVLLEKILRVQPNVKKLYLLLRAEDAKSATHRLNNEIIGKDLFRVLKEKLGANFNSFVSKKLTLVPGDISREDLGLEDSILREEIYDQTDVIINLAATTNFDERYDISLGLNTFGVKYVINFAKKCTKLKVLVHVSTAYVCGEGGREGLILEKPYHLGDSLNGVSGLDINAEEKVVRDKLSELQQLGATEKEIKEVMKDLGISRAKLYGWPNTYVFTKAMGEMLVEQLKGNLSVVTIRPTIVTSTFKEPFPGWAEGVRTIDSLAVAYGKGKLTCFLGDLKAIVDAIPADMVVNAILVAMVAHANRPSDDVIYHIGSSVRRPLRYGKLQEYGFRYFTAKPCISKDGRPVKVGKVTVLSNMDSFRRYMFIRYLLVLKGLELANTAFCQYFQGTYLDLNRKIQIVMRLVDLYKPYLFFKAAFDDMNTEKLRMAGRQGGVETDLFYFDPELIDWEDYFLNIHLPGMVKYILK

SEQ ID NO: 244377 - protein, 254 aa, Glycine max
  Clone ID: PAT_MRT3847_6269C.1.pep
ASPSDQRPLPHRVNVTVAGVLPPFHVLNKVSQLGFDVNIGYGMTETLGPVIVRPWNPNSDGEHTKLNYGVSEFRQDVDVKDPETGESTPHDGKTIGEIMFKGNALMLGYLKNSQANDKAFRGGWYRTGDLAVREPNGSITMKDRAKDVIYSKGEVVSSLEVEAVLLNHPKVLKAAVVGRCDECLVESLCAIVKLKDGCSATVEEIIKFCEDHLATHMVPSTVVFGDLPVNSTGKVQKFRIREKIKGSEWYDSKN

SEQ ID NO: 244378 - protein, 216 aa, Glycine max
  Clone ID: PAT_MRT3847_626C.1.pep
QDITFRNTAGATNHQAVALRSGSDLSVFYRCSFEGYQDTLYVYSDRQFYRECDIYGTVDFIFGNAAVVFQNCNIYARNPPNKVNTITAQGRTDPNQNTGISIHNSKVTAASDLMGVRTYLGRPWQQYSRTVFMKTYLDSLINPEGWLEWSGNFALSTLYYGEYMNTGPGSSTANRVNWLGYHVITSASEASKFTVGNFIAGNSWLPATSVPFTSGL

SEQ ID NO: 244379 - protein, 73 aa, Glycine max
  Clone ID: PAT_MRT3847_62700C.1.pep
VRSSLDYVFCVSGFYCIALLKKRQVVALVHAMVRDSRAIHNLSHWPYFIVLGCCISRFLYFMHINIDFMPCSF

SEQ ID NO: 244380 - protein, 83 aa, Glycine max
  Clone ID: PAT_MRT3847_62701C.1.pep
MHGYSRLGGAARSPPSSPRFRHGRSKSSSWCSSKESNSMEKLVFILMSAVFRRRGLLLFAPLLYISGMLLYMGSLSIDVVSIK

SEQ ID NO: 244381 - protein, 57 aa, Glycine max
  Clone ID: PAT_MRT3847_62702C.1.pep
IVSLKWGYRITWPETIIGDCCKLVTALERLVVICIFGLSTWLINDIGNDQHRCQTNL

SEQ ID NO: 244382 - protein, 47 aa, Glycine max
  Clone ID: PAT_MRT3847_62703C.1.pep
PPSASHDLDNPLRLGHLLLPSANGQFNNFTHNHCCPHLQRSQTTLKA

SEQ ID NO: 244383 - protein, 74 aa, Glycine max
  unsure (1)..(74): unsure at all Xaa locations
  Clone ID: PAT_MRT3847_62704C.1.pep
MASLGGLQNVSGINFLIKEGPKVNAKFELKPPPYPLNXLEPGMNQQTLEFHWGKAPQDLMWENLKKQGLVGQNF

SEQ ID NO: 244384 - protein, 293 aa, Glycine max
  Clone ID: PAT_MRT3847_62705C.1.pep
MGSLANSPTRPLTSTPTRPPTRPYGCEKTTEGGPKSSFQPHASEDMASLGGLQNVSGINFLIKEGPKVNAKFELKPPPYPLNGLEPVMSQQTLEFHWGKHHKTYVENLKKQVVGTELDGKSLEEIIVTSYNKGDILPAFNNAAQVWNHDFFWECMKPGGGGKPSGELLELIERDFGSFVKFLDEFKAAAATQFGSGWAWLAYRARKFDGENVANPPSPDEDNKLVVLKSPNAVNPLVWGGYYPLLTIDVWEHAYYLDFQNRRPDYISVFMDKLVSWDAVSSRLEQAKALITSA

SEQ ID NO: 244385 - protein, 82 aa, Glycine max
  unsure (1)..(82): unsure at all Xaa locations
  Clone ID: PAT_MRT3847_62706C.1.pep
PLFFLEXDVVLILRDYLGEREALGFFNDVNIPLYGDLKRSRRLLGYFLRTDLVFVREDVGGLIGIVLRILRGDNFFILLLSA

SEQ ID NO: 244386 - protein, 92 aa, Glycine max
  Clone ID: PAT_MRT3847_62707C.1.pep
ASSLASSASSAASVLAHSASLSASSLSKSLAASASSAASAASVTSVSASKSLVSAYSVASKSAVSAASSASSYSASLSSVSAQASKSAKKEL

SEQ ID NO: 244387 - protein, 71 aa, Glycine max
  unsure (1)..(71): unsure at all Xaa locations
  Clone ID: PAT_MRT3847_62708C.1.pep
QIPTAFDPFADANADDSGAGSKEYVHIRVQXRNGRXSLTTDQGLQKAFELTHYGVNAMVEFSCISSVVKDP

SEQ ID NO: 244388 - protein, 58 aa, Glycine max
  Clone ID: PAT_MRT3847_62709C.1.pep
HPRGDDTGGGAMANESPDTPRKRTRDGDPPAGRKKARKTDPQEPREDRANDPRATQGA

SEQ ID NO: 244389 - protein, 40 aa, Glycine max
  Clone ID: PAT_MRT3847_6270C.1.pep
LSLAWNNTASTTYISCVSRLGSRMDYSVIVGSKNRTRLAY

SEQ ID NO: 244390 - protein, 52 aa, Glycine max
  Clone ID: PAT_MRT3847_62710C.1.pep
ERAHEAQATHTPQERLMWNRLKPLLPPRLISALDNSYNSEKLIILVYTHASP

SEQ ID NO: 244391 - protein, 39 aa, Glycine max
  Clone ID: PAT_MRT3847_62712C.1.pep
PKILTISGVAAGVCDLTGRIPSPHRAKYGCYCLSRRKGR

SEQ ID NO: 244392 - protein, 72 aa, Glycine max
  Clone ID: PAT_MRT3847_62713C.1.pep
DLTSILLPHLTTKLNLFIIYFNRLHYHIIFFVNSITSYQKFFTIPLLQLLKLNTSPSKIYFNNLPTIFPNTF

SEQ ID NO: 244393 - protein, 154 aa, Glycine max
  Clone ID: PAT_MRT3847_62714C.1.pep
MKMPVPNGEEQILLPETENASEVSKSPSLDLNPDSVDGSPPVSTVYTDVGVVPEHQKNELEHLISNLEGEIEELRLKQKKLDKKRREELSKILDIKGSIRVFCRIRPNLVTEKRKFSEPVSAGPEKISVKFGGTRKDFEFDKVLPQEAAKRVFL

SEQ ID NO: 244394 - protein, 147 aa, Glycine max
  Clone ID: PAT_MRT3847_62715C.1.pep
ISVLLKRSSSSKGHVIQGRTFTATTLSYDDLSFARSSINSIRSSTGRSSYSTTSSADFSSARHSDFRVQRQSSGRKLDVDYGYDVRIRPPSPGLSFSGMSNHSYHGLGFATQETSSGNTECSILEEIPQDLREMQASENAVTDVIDS

SEQ ID NO: 244395 - protein, 57 aa, Glycine max
  Clone ID: PAT_MRT3847_62716C.1.pep
WNVVVTLCIKFRKGMYEPNSGYSAGVLGGYVYTMRRRVSIYIVTRWSLSKRSYRNSN

SEQ ID NO: 244396 - protein, 39 aa, Glycine max
  Clone ID: PAT_MRT3847_62717C.1.pep
VRHVRRMAQGFYAYRFAGILRYITSIVRYICSGAKPYDC

SEQ ID NO: 244397 - protein, 53 aa, Glycine max
  Clone ID: PAT_MRT3847_62718C.1.pep
NGPGLFTVVMEKSKDLLTNDYNCEQKLTISSYINYGMALTSTFDKKGGLYTGD

SEQ ID NO: 244398 - protein, 51 aa, Glycine max
  Clone ID: PAT_MRT3847_62719C.1.pep
ISIMPKTVRFMYDPCSVSFMSTALLVVTTDNITQSESSLSAIRSHSLCTSS

SEQ ID NO: 244399 - protein, 32 aa, Glycine max
  Clone ID: PAT_MRT3847_6271C.1.pep
YMNRDFCMERALKLTCARVSITYLTSMTILQL

SEQ ID NO: 244400 - protein, 328 aa, Glycine max
  Clone ID: PAT_MRT3847_62720C.1.pep
MGTTKLSLLLCVGVLLLGCCVGRFVVEKNSLKVTSPKSLKGTYECAIGNFGVPKYGGTLVGSVLYPKVNQKGCTNFSDVNFQSKPGGFPTFLLVDRGDCYFTLKAWNAQNGGAAAILVADDKAETLITMDTPEEGKANDDYVDKISIPSALISKSLGDSIKQALSDGEMVNINLDWRESLPHPDDRVEYELWTNSNDECGPKCDSLINFLKDFKGVAQQLEKRGFTQFTPRYITWFCPEAFLLSRQCKSQCINNGRYCAPDPEQDFSRGYDGKDVVVQNLRQACFYKVANESGKPWQWWDYVTDFSIRCPMKENKYTEECSDQVIKSL

SEQ ID NO: 244401 - protein, 113 aa, Glycine max
  Clone ID: PAT_MRT3847_62721C.1.pep
MMGAKLGLLLCVCVLLLGCCVGRFVVEKNSLKVTSPKSLKGTYECAIGNFGVPKYGGTLVGSVLYPKVNQKGCTNFSDVNFQSKPGGLPTFLLVDRGDCYFTLKAWNAQNGGA

SEQ ID NO: 244402 - protein, 194 aa, Glycine max
  Clone ID: PAT_MRT3847_62722C.1.pep
MELEPKKGPVHDQYDDLVGSFSSSSSSTSSSVSGISSGSSLESDSFEEVTSSASSSSSSAADDQLVVVADPLGDMTSLFQQLPIKRGLSKFYQGKSQSFTSLTNVRSLEDLAKPENPYNKRLKSCKSYAGGLAESHSTRAVSKRGMVHSTSSRGSCSSFRRGSATTNFMGSRPPIPPHRSTSTNTIPNQTVLFA

SEQ ID NO: 244403 - protein, 305 aa, Glycine max
  Clone ID: PAT_MRT3847_62723C.1.pep
KTENGIITFEFTRPLDPSCRREKRVECKNIVDPTTPLKVVWAMGAKWTDDHLTDRNMHSSTSNRAILVHLMRGSAEAEQDLLPVLAVHGFMMFVAWGILFPGGILAARYLKHLKGDGWYRIHVYLQYSGLVIVLLALLFAVAELRGFYFSSTHVKFGFATILLACIQPANAFLRPPKPANGEQASSKRVIWECFHTIVGRCAIVVGIAALFTGMKHLGDRYDVENVHGLRWAMAIWFLIGALIVIYLEYHERQRIGRQISGRGNWVLGNLEEDDSVDLLRSTRTTADKELQHSARMEVQLEPLNR

SEQ ID NO: 244404 - protein, 104 aa, Glycine max
  Clone ID: PAT_MRT3847_62724C.1.pep
GSSFFFFFFFFFWRANKQESKFQKTDHWFLLHFSWPDVIPNINPGRGDSFGPPGETDQWLSSVYDQYFHTLRETRKVMSFSPAVKAEPCKHTLVPQLPVKFITG

SEQ ID NO: 244405 - protein, 109 aa, Glycine max
  Clone ID: PAT_MRT3847_62725C.1.pep
QIFLRDENWISVPPDHKSFFINVGDSLQVMTNGRFRSVRHRVLANGFKSRLSMIYFGGPPLSEKIAPLPSLMKGKESLYKEFTWFEYKNSTYGSRLADNRLGHFERIVA

SEQ ID NO: 244406 - protein, 85 aa, Glycine max
  Clone ID: PAT_MRT3847_62726C.1.pep
APENNEPKKSTADAIAPKAPNKESTEQHSKGWQTIPKPKGHSALDYARWDSVEDDSSDDDDEDEDEESLPQYRFRVRTVGVRPVK

SEQ ID NO: 244407 - protein, 98 aa, Glycine max
  Clone ID: PAT_MRT3847_62727C.1.pep
PGKNGKLSERWGIEFDENLPANLREVNGQGRLDMQLGRIGEINCMICKNNFKLSYMLILITVFTCYESYFSLVIEHNPQLLIEKNKLFSLLQIKLLRE

SEQ ID NO: 244408 - protein, 67 aa, Glycine max
  Clone ID: PAT_MRT3847_62728C.1.pep
PTLQSNLSLINDALLTRNTILEPPTGNSIETIYIKDHRFKHHRTYRHRFAYDSHHRPVIHNACKNCY

SEQ ID NO: 244409 - protein, 102 aa, Glycine max
  Clone ID: PAT_MRT3847_62729C.1.pep
MTQTTGSGFNQGQAGMETTCAKSNLDEQQTAKGSMAALKTPLCIPARTTNTGGGSILRLDLWAILVTAGNWRARIHEHPTHGLNRMTNWLAPGGMPENPGIS

SEQ ID NO: 244410 - protein, 56 aa, Glycine max
  Clone ID: PAT_MRT3847_6272C.1.pep
ESDAFENSGARFSHFQEKMALPNLPFDERLLARFPLTTKSMPNSHLDLLPSLSIGG

SEQ ID NO: 244411 - protein, 387 aa, Glycine max
  unsure (1)..(387): unsure at all Xaa locations
  Clone ID: PAT_MRT3847_62730C.1.pep
MGKQTRKKCRVGKHIMGHFSSMFNGLARSFSMKKGRRNGKCXGEVKAAEAMAKEAKKNDMMLCSSGIVHVDGSNNFVSVFSKIGQKGVNQDCCMVWEEFGCQEDMIFCGIFDGHGPWGHFVAKRIRESMPPSLLCNWQETLAQTSIDHPAIDVEEEKSKHYRFNIWKHSXLMTPAVIDQEIEQYRKIXPELKQSNXLVKIRQCYQPLMGYGSXSLVKMEWTSYHQQLIKVRQLIXGRVFDAQVAERIIQCQGRVFCLEDEPGVHRVWSPDEESPGLAMSRAFGDYCIKGHGLISVPEVTHRNITSRDQFVVLATDGVWDVISNKEAVDIVSSAADKAKAAKRLVECAVHAWKRKRRGIAVDDISAICLFFHSSSLSTGQVSQVATLK

SEQ ID NO: 244412 - protein, 141 aa, Glycine max
  unsure (1)..(141): unsure at all Xaa locations
  Clone ID: PAT_MRT3847_62731C.1.pep
MKHFVDTRRREVSYQLGDXVLLKLRPYRQLSVXIPRRCKXQLAKRFYGPFQVVERIGPVAYHLXLPDGAHIHPVFHCSVLKPFCGSPKLDEAVQLPNKVFQDQPVISPLAILGHQKSSPTGPWEVLVQWQGLSLDDTSWED

SEQ ID NO: 244413 - protein, 111 aa, Glycine max
  unsure (1)..(111): unsure at all Xaa locations
  Clone ID: PAT_MRT3847_62732C.1.pep
PHSQGPVSLSYYSEMTTTIMMKVHWDSLWTSLTPVHLFSPFTRHPKCFVLPTIKTKVDVLLPETNVTPQKSVITSSDSSSVALXPAPHQHRFNSYLSLIVAEKANGMGQDQ

SEQ ID NO: 244414 - protein, 149 aa, Glycine max
  unsure (1)..(149): unsure at all Xaa locations
  Clone ID: PAT_MRT3847_62733C.1.pep
RATHSHLMEAKKEYEVDHLSTPTGTSFSQLLFGDDDDDVDESALGLAVDQSYSYNYNNLTRSPLFSIHKAPQMLCFGNHQNEEGGVLLPETNVTPQKSVITSSDSSSASASSCNHTNTAFNSLPKSNNSLQKKRQEGVAKVGCWKPETX

SEQ ID NO: 244415 - protein, 54 aa, Glycine max
  Clone ID: PAT_MRT3847_62734C.1.pep
SYTKLSQLYKESKYKDLIILAFPYKQYGALESVYNEETEELASTRFKDEFPIFD

SEQ ID NO: 244416 - protein, 46 aa, Glycine max
  Clone ID: PAT_MRT3847_62735C.1.pep
ARGNHGSSKKRRRTTILHYSHLLHIWEVNPIGWNGTNISLEIKTLG

SEQ ID NO: 244417 - protein, 109 aa, Glycine max
  Clone ID: PAT_MRT3847_62736C.1.pep
RIFAVFWILTGTITLAQLFVYIAELNTEIRQKELVKWVLTRKVTNLDLEAADLDEDGTVGAAEFVIYKLKEMGKISQEDISLVMQEFEQLDVDDSGTLSTSDITLAQSS

SEQ ID NO: 244418 - protein, 107 aa, Glycine max
  Clone ID: PAT_MRT3847_62737C.1.pep
FAVFWILTGTITLAQLFVYIAELNTEIRQKELVKWVLTRKVTNLDLEAADLDEDGTVGAAEFVIYKLKEMGKISQEDISLVMQEFEQLDVDDSGTLSTSDITLAQSY

SEQ ID NO: 244419 - protein, 72 aa, Glycine max
  unsure (1)..(72): unsure at all Xaa locations
  Clone ID: PAT_MRT3847_62738C.1.pep
KSTICFALFLFRAYTTSYLPSAVTDFRHDNEGNPLERGGTYYIVADMTAVDGISASPTXNEKSPVTGVQSLR

SEQ ID NO: 244420 - protein, 84 aa, Glycine max
  Clone ID: PAT_MRT3847_62739C.1.pep
MEGFEVIPQNSKWVSFRPSPDSFGIMNGVSFQARSNGRAHSPLSRLIVIRNIPINSEWFFPTPQGWSIFKPPKESVQCVPPSVS

SEQ ID NO: 244421 - protein, 51 aa, Glycine max
  Clone ID: PAT_MRT3847_6273C.1.pep
FFFCSFQCLRHHSPAFLLALSVCFPKVSSRSLFFKFPAQVQPAHPVSSLSL

SEQ ID NO: 244422 - protein, 56 aa, Glycine max
  Clone ID: PAT_MRT3847_62740C.1.pep
HSFLYLIFLHYKKTKILILIIVFNSSCQGKKTKTNVLKLAKRLNYSLEQQWEKEKT

SEQ ID NO: 244423 - protein, 96 aa, Glycine max
  Clone ID: PAT_MRT3847_62741C.1.pep
LEGLFETGLGRVIKKKGEKIMSEIPDLQRKGMLLMEENERLKRHVAGIINGQRHGGAESENFVMDEGQSSESVTYVCNSTGPPQDFESSDTSLKLG

SEQ ID NO: 244424 - protein, 94 aa, Glycine max
  unsure (1)..(94): unsure at all Xaa locations
  Clone ID: PAT_MRT3847_62742C.1.pep
KVHMTIVVIGHVHSWKSTTTGHLIYKLGCIDKPVIEKFEKEASEMNKKSFKYSWVLDKLKAXRERRITIDIALWKFETTKYYCTFIDAPGHKDF

SEQ ID NO: 244425 - protein, 181 aa, Glycine max
  unsure (1)..(181): unsure at all Xaa locations
  Clone ID: PAT_MRT3847_62743C.1.pep
MKMLFLQTTFLPRPFSPFCDASLHPLSSLNIQNPMLECAHSFSHYSPVSSHRIVKSISCSVSSKSHSKPDPEPPEPEANSNQRARPKARSRSGQSKDVVSSNGDKSSAETFPTTIPRKPRRGRRSEAVAVEDFVRGSLERTFAXIREPXQDALENHEKHMKERDDDSSKSESGDXDDXHDD

SEQ ID NO: 244426 - protein, 100 aa, Glycine max
  unsure (1)..(100): unsure at all Xaa locations
  Clone ID: PAT_MRT3847_62744C.1.pep
LGPPFGPPSFSILRSRWEWGWYSRGHPFPPRDPVCPGFPPALKGPPYRAAGTPSGSRPVFPGGPPPPKKCPPNFNLKPFGGFWVLFXQXKKKNPQISTNK

SEQ ID NO: 244427 - protein, 52 aa, Glycine max
  unsure (1)..(52): unsure at all Xaa locations
  Clone ID: PAT_MRT3847_62745C.1.pep
MVVYDNLLACDELLSDSFRYNEIENGMLWEVXGKCVVKVAGDVDIGANPSSE

SEQ ID NO: 244428 - protein, 144 aa, Glycine max
  unsure (1)..(144): unsure at all Xaa locations
  Clone ID: PAT_MRT3847_62746C.1.pep
ATRALDNRVLTVNSGRDMLQRGRLLSVVRKNMHKKCIGIFYETGEHKGGFHKAYGGFSKNMIRVIXMRSCEQXRQNLSELLRDHSTKRGEETPRLRDYATSMKDGQIDIYYITGQSKIAVSNXSLLGTLMKKGVERLYIGDAID

SEQ ID NO: 244429 - protein, 57 aa, Glycine max
  unsure (1)..(57): unsure at all Xaa locations
  Clone ID: PAT_MRT3847_62747C.1.pep
FFLSSATSVQVFTTILESSFTKXNIFSFHIKHTGYPCLSQQAFXSSRIPSLRTRACD

SEQ ID NO: 244430 - protein, 213 aa, Glycine max
  Clone ID: PAT_MRT3847_62748C.1.pep
MGLVFGKITVETAKYEVIKSTSEYEIRKYAPSVVAEVTYDPSQFKGNKDGGFMILANYIGAVGKPQNTKPEKIAMTAPVITKDSVGGGGSDGEKIAMTAPVVTKEGGGEGEEGKRNKMVTMQFVLPAVYGKAEEAPKPTDERVVIREEGLRKYGVVKFGGVASEQVVRERVEKLRESLEKDGFKVVGDFLLGRYNPPWTIPAFRTNEVMIPVE

SEQ ID NO: 244431 - protein, 73 aa, Glycine max
  Clone ID: PAT_MRT3847_62749C.1.pep
FGLTKMNCFGIKKKQPPGLTWSNRQGDFRVSPQGQSMEPPRSGLFIVWNFPFKITPPWGKKKGFISLVKGKCF

SEQ ID NO: 244432 - protein, 208 aa, Glycine max
  Clone ID: PAT_MRT3847_6274C.1.pep
AIEFFRYMHTEGVESNQFTFPSILTACSSVSAHCFGEQVHGCIVRNGFGCNAYVQSALVDMYAKCGDLGSAKRVLENMEDDDVVSWNSMIVGCVRHGFEEEAILLFKKMHARNMKIDHYTFPSVLNCCIVGRIDGKSVHCLVIKTGFENYKLVSNALVDMYAKTEDLNCAYAVFEKMFEKDVISWTSLVTSYTQNGFHEESLKTFCDM

SEQ ID NO: 244433 - protein, 131 aa, Glycine max
  unsure (1)..(131): unsure at all Xaa locations
  Clone ID: PAT_MRT3847_62750C.1.pep
APFNREPLYAKFRLPEPMNMPLLSANPPIFFHPLPPKDSFLIFASDGLWEPLSNXKTVDFVNPHPPAGRAQRLFKGAFPEAARKREIRFSAPRKISKKVXPPFPDDKSGIVLFFNPGLFFQGPGVDPALSI

SEQ ID NO: 244434 - protein, 99 aa, Glycine max
  Clone ID: PAT_MRT3847_62751C.1.pep
MFTLLCWGLFAILINLLIVPFVVYRRPTALQDRMRDSDDDDLHDRDYDVAALAHNLSQAFRYKIYGNEDNEEERGNLDRDDEDVYFDDDSAQVGILSLR

SEQ ID NO: 244435 - protein, 291 aa, Glycine max
  Clone ID: PAT_MRT3847_62752C.1.pep
MSMLRSVCQLRVGVATPKPCLHPSIFLFSLSLSHNTHTLTSFPRTFRFHPLSLPLSPFVLFMPPKATASYGTGASGAAEGDRPREILVQHLLVKEDDQKLLLYLQQKISSGEDLSDLAVEYSLCPSKEEGGMLGWVRKGQMVPEFEEAAFTAPLNQVVRCKTKFGWHLLQVLSEREESILQDIQPDELHMKIQDPSFLDEAQLIDVREPDEVAKASLPGFTVLPLRQFGSWGPEITTKFDPQKDTYVMCHHGMRSLQVAKWLQSQGFRKVYNLSGGIHAYAVQVDPSVPTY

SEQ ID NO: 244436 - protein, 79 aa, Glycine max
  Clone ID: PAT_MRT3847_62753C.1.pep
KLGTRPGPWDIALSFKKERKNSIWGYPNAFFTPICESLRGPSLKKLKLPLPLIPPKKEKTKTSCYKKETGGNSFFAHPP

SEQ ID NO: 244437 - protein, 292 aa, Glycine max
  Clone ID: PAT_MRT3847_62754C.1.pep
MSMLRSVCQLRVGVTTQKPCLHPSILFSFSLSHNTHTLTLTSLPRTFRLHPPSLALSPSSADAWADAWADAWAGASAAAEGDRPREILVQHLLVKEDDQKLLLDIQQRISSGEDLSDLAVEYSLCPSKEEGGMLGWVRKGQMVPEFEEAAFTAPLNKVVSCKTKFGWHLLQVLSEREESILQDIQPDELHVKIQDPSFFDGAQLIDVREPEEVAKASLPGFTVLPLRQFGSWGPEITTKFDPQKDTYVLCHHGMRSLQVAKWLQSQGFRKVYNLSGGIHAYAVQVDPSVPTY

SEQ ID NO: 244438 - protein, 59 aa, Glycine max
  unsure (1)..(59): unsure at all Xaa locations
  Clone ID: PAT_MRT3847_62755C.1.pep
MAXERSGIXXXVTELXGKXPLVXXNXLADXCVARXAAXLXXMEXCSSVKDRXGYSMIAD

SEQ ID NO: 244439 - protein, 59 aa, Glycine max
  Clone ID: PAT_MRT3847_62756C.1.pep
TCPLIYSHLTTTCFLSRDSVTCHRSPRTKMIFGNSAPSTPQSRQIWKLSYLHHNYASSA

SEQ ID NO: 244440 - protein, 68 aa, Glycine max
  Clone ID: PAT_MRT3847_62757C.1.pep
NLPLLTNLNPYHLLPIGMEAKTIPDSKKKRADPALTHTRQRAQTHYPCLLYVTITEYELHTIPKSEVL

SEQ ID NO: 244441 - protein, 43 aa, Glycine max
  Clone ID: PAT_MRT3847_62758C.1.pep
KKIKKKKKKKKKKKKKEKKKKKKGKKKKRGTQTKEKKASKHIK

SEQ ID NO: 244442 - protein, 70 aa, Glycine max
  Clone ID: PAT_MRT3847_62759C.1.pep
LQHINHLCPITYMNIVYIQYLYLLSSKNQMMTTRKTALISSFRNYKEINDCLGYQFEYIKHVIFILSFNY

SEQ ID NO: 244443 - protein, 81 aa, Glycine max
  unsure (1)..(81): unsure at all Xaa locations
  Clone ID: PAT_MRT3847_6275C.1.pep
GSSNTDPMFANNMLTGTDAGXPGGLWIDPLGWGSGSPVKIMALRTXDIINGRLAMSAVIAAWLLHIYTGSGPIDCLCGHLD

SEQ ID NO: 244444 - protein, 47 aa, Glycine max
  Clone ID: PAT_MRT3847_62760C.1.pep
HEGGKLTRIENPACNASQDTKTAGFPVTGLKLAACSSWFHASFRFSP

SEQ ID NO: 244445 - protein, 101 aa, Glycine max
  Clone ID: PAT_MRT3847_62761C.1.pep
ARVLTDDTAMLWGVKFYNDFLMQAGPLGNVQSELLFRKDKSTFTFDKGWAFPRRVYFNGDVCVMPPPDSYPWLPNAGSKQEVSLLALVMSSLVALVLYAYA

SEQ ID NO: 244446 - protein, 65 aa, Glycine max
  Clone ID: PAT_MRT3847_62762C.1.pep
AVHLYLLWSLGSHYCAFWNVLTPQLTPLNARGIDLNTNAWPNGKRSQLVISNLHYDSRPQCGCCG

SEQ ID NO: 244447 - protein, 560 aa, Glycine max
  unsure (1)..(560): unsure at all Xaa locations
  Clone ID: PAT_MRT3847_62763C.1.pep
MSAMLQPQIILLKEGTDTSQGKPQLVSNINACTAVADVVRTTLGPRGMDKLIHDDKGTVTISNDGATIMKLLDIVHPAAKILADIAKSQDSEVGDGTTTVVLLAAEFLREAKPFIEDGVHSQNLIRSYRTACSLAIEKIKDLAVSIEGKSLEEKKSLLAKCASTTLSSKLIGGEKEFFAPMVVDAVISIGNEDRLNMIGNLKVXGSNQKGXFLVNGVAFKKTFSYAGFEHQSRKFLNRKILLLNVELEXNLRNENAEIGXSDPAQYQSIVDAEWNIIYDKLDKCVSSGAKVVLSRLAIGDLATQYFADRDIFCAGRVAEEDLKRVAAATGGTVQTSVNNIIDEVLGTCEIFEERQVGNERFNIFNGCPSGQTATIVLRGGADQFIEEAERSLHDAIMIVRRALKNSTVVAGGGAIDMEISRYLRQHARTIAGKSQLFINSYAKALEVIPRQLCDNAGFDATDVLNKLRQKHALPSGEGAPYGVDIATGGIADSFANFVWEPAVVKINAINAATEAACLILSVDETIKNPKSESAQGDAAASAMGRGRGGGFRGRGRGMRR

SEQ ID NO: 244448 - protein, 323 aa, Glycine max
  Clone ID: PAT_MRT3847_62764C.1.pep
MLITRNPVLLNSTFVPTLISDSEHRCASPRSLCFSSRTDMDTAAGQSLYPLHRCKTLHLVRHAQGFHNVEGEKNFEAYKSYDLFDANLTPLGWKQVDNLRQHVKASGLSKRIELVIVSPLLRTMQTAVGVFGGQPYTDGINVPPLMNDNVGDSGRPAISSLNAPPFIAVELCREHLGVHPCDKRRNITDYRHMFPAIDFSLIENDEDILWKPDIREKNEEVAARGLKFLEWLWTRKEKEIAVVTHSGFLFHSLSAFGNDCHPNVKNEICTHFANCELRSMVIIDRGMIGSDESSTNYPGKVPDGLDLPSDVADQKHPENGQAN

SEQ ID NO: 244449 - protein, 111 aa, Glycine max
  Clone ID: PAT_MRT3847_62765C.1.pep
RQLCDNAGFDATDVLNKLRQKHALPSGEGGPYGVDIATGGIADSFANFVWEPAIVKINAINAATEAACLILSVDETIKNPKSESAQGDAAASAMGRGRGGAFRGRGRGMRR

SEQ ID NO: 244450 - protein, 77 aa, Glycine max
  unsure (1)..(77): unsure at all Xaa locations
  Clone ID: PAT_MRT3847_62766C.1.pep
HQYWNQMSKSPPKEXDPPPGSYTAWDMLADDGEAIDASSPIPLDDGTPVDFGAIEVVQLLIEHHNAIFTDANETVWK

SEQ ID NO: 244451 - protein, 86 aa, Glycine max
  Clone ID: PAT_MRT3847_62767C.1.pep
WKSFKKAKPGNNKPGINLATILPKLRVGQPKKGVKVLNQGSQTRPRIFKRLAGKKIRVVLRKLGLLQKKKTLKIIFIKKTSGFESN

SEQ ID NO: 244452 - protein, 129 aa, Glycine max
  unsure (1)..(129): unsure at all Xaa locations
  Clone ID: PAT_MRT3847_62768C.1.pep
KKLPKKVGAGGEGKKKXRHTKCVYSSLLCMFKVLKQFHPGIGISSKALGIMSSFSLAMFVKLVQESSRIARSIKGPFIPWRGIQSPVRFVMPGFLTEPTVSQGSKAVAKVISSCISYFIAFLSLFFVTH

SEQ ID NO: 244453 - protein, 69 aa, Glycine max
  Clone ID: PAT_MRT3847_62769C.1.pep
MMRARFRVLLLGLVFLASVIVSFDIAYWEKENPIHYKCIQSCNSERDSYRNQACLARCNLLKVENNRSM

SEQ ID NO: 244454 - protein, 65 aa, Glycine max
  Clone ID: PAT_MRT3847_6276C.1.pep
PTSPTSCQKTGVSGSTTVCSPQLPAARSLSFHTPTVLCQARGIVAGIFAAEGYFVLLLLLSALVV

SEQ ID NO: 244455 - protein, 62 aa, Glycine max
  unsure (1)..(62): unsure at all Xaa locations
  Clone ID: PAT_MRT3847_62770C.1.pep
CLIILGLHTLNWRTIILFRHLHAWLLFKWFLLCSSQFPDQRXDPHKHGTSQLTQEIALPTYN

SEQ ID NO: 244456 - protein, 102 aa, Glycine max
  unsure (1)..(102): unsure at all Xaa locations
  Clone ID: PAT_MRT3847_62771C.1.pep
AAQVGLQDATSPIIEELITLHDHALIIIVLICFLVLYALFLTLTTKLTNTNISDAQEIETVXTILPAIILVLIALPSLRILYITDEANDPSLTIKSIGHQWY

SEQ ID NO: 244457 - protein, 65 aa, Glycine max
  unsure (1)..(65): unsure at all Xaa locations
  Clone ID: PAT_MRT3847_62772C.1.pep
HEPTFTNFYTKINSSNPRNRMLKPTHAPTTNQAQFENSEKLLFMKTKVCSDHXXYKRKRVILGYS

SEQ ID NO: 244458 - protein, 120 aa, Glycine max
  unsure (1)..(120): unsure at all Xaa locations
  Clone ID: PAT_MRT3847_62773C.1.pep
GINRNPTVDDLXHRDRDLFCWDREKTSPTNYSAESLSCKEGTAPGQHYTEWAPNNCRDHRQPSYTTEGNYVRKQDDSIEYDACTIPNDSGTLNVAKVGNHKQHAGIHXGGCKGRLGYAPL

SEQ ID NO: 244459 - protein, 84 aa, Glycine max
  Clone ID: PAT_MRT3847_62774C.1.pep
PKKKKQQGLNPRGPGKKGPFAIKKPPGGIKAAGKESPPPPKGNGPKGGLEGQTPPKRATNGPSFGGPEPPNGGRKKGRGPPPFF

SEQ ID NO: 244460 - protein, 48 aa, Glycine max
  Clone ID: PAT_MRT3847_62775C.1.pep
VSPNQIRALEKKKKAGKFAKKVKAKTRRKMHEMSNPLEPDEFADMWKD

SEQ ID NO: 244461 - protein, 200 aa, Glycine max
  unsure (1)..(200): unsure at all Xaa locations
  Clone ID: PAT_MRT3847_62776C.1.pep
MSYLILTISPAFLVFGGGEEEEKKRADDETARLYAEFIEXFQGDTTPGSKTFVRGGTINPNDKFKDDSEGEKSKDGVSGPKKGSRYVPSFIPPPMATKGKESERKKEEEKPKEKEKGKSRNIDHFMEELKHEQEMRERRNQEREHWRDGRHTEHSISSRFDELPDDFDPSGKLPGSFDDGDPQTTNLYVGNLSPQVDENF

SEQ ID NO: 244462 - protein, 106 aa, Glycine max
  unsure (1)..(106): unsure at all Xaa locations
  Clone ID: PAT_MRT3847_62777C.1.pep
MVPRGLIIMAVFCISSLSMSLCRVADKGRVMNFXAVSCPQVAGIIPYQVPLLQECNSKTAFSXRTYIFDDSRVHSYQASQLLDSTFTILSDKDIDTSFELRTFTYI

SEQ ID NO: 244463 - protein, 52 aa, Glycine max
  Clone ID: PAT_MRT3847_62778C.1.pep
RISSFFSSLFSISGDDLRFRTLLYAGEPLLFPPPSNHLRLESFTSLTPSLHP

SEQ ID NO: 244464 - protein, 112 aa, Glycine max
  Clone ID: PAT_MRT3847_62779C.1.pep
MKTMANSQKPDETQIAKHVKSSLKQLANAVVEQQLRTSGKWQFEQLYNNAQRRPWTELIDRSSMSRPDTLAEAYSWIRKNFAYFRVNYLTLIVLALAVSLITHPFSLFVLFG

SEQ ID NO: 244465 - protein, 89 aa, Glycine max
  Clone ID: PAT_MRT3847_6277C.1.pep
SVRLAFLSLFISFQVLTTLARALFCSVAKLTCRLVSLSSSSSMRLPLNHPSRFGAWAAVPLNPYLFILLPRPALSSSTRRLSVPPPPPK

SEQ ID NO: 244466 - protein, 48 aa, Glycine max
  Clone ID: PAT_MRT3847_62780C.1.pep
HEAWGFFRCWCLFLRSGFFPITVIFIPSGAWLKFKTCFSLSFRRRGVS

SEQ ID NO: 244467 - protein, 70 aa, Glycine max
  Clone ID: PAT_MRT3847_62781C.1.pep
SRACGILKRGVIMTLYATYFVINTIRIIIDLILATFNFIKELNNSGLQCFKPFNYFHKLLFYYGAFVYGY

SEQ ID NO: 244468 - protein, 50 aa, Glycine max
  Clone ID: PAT_MRT3847_62782C.1.pep
VKFRLKRKEICFEKKVIYQTRKRLTEQRPRVKGQFVRQHNHPFAEAGGDS

SEQ ID NO: 244469 - protein, 106 aa, Glycine max
  unsure (1)..(106): unsure at all Xaa locations
  Clone ID: PAT_MRT3847_62783C.1.pep
PRVRISIYDIVVGDVIPLNIGNQVPADGILITGHSLAIDESSMTGESKIVSIYFYLLGNWIFFPLSCYLLCFLQVHKDSKDPFLMSGXKVADGRGTMLVTGVSYKY

SEQ ID NO: 244470 - protein, 57 aa, Glycine max
  unsure (1)..(57): unsure at all Xaa locations
  Clone ID: PAT_MRT3847_62784C.1.pep
XXXPXXTVXPKLSPIEXPXXPRMKGXSQXGRXSYSSPVXXSXXXLEPNXEXTSAXIX

SEQ ID NO: 244471 - protein, 51 aa, Glycine max
  Clone ID: PAT_MRT3847_62785C.1.pep
GGSFSIVFFSIDASNMSCLKLYSHFIKHMFCLKKEFFNAVRKKCEYYLGSL

SEQ ID NO: 244472 - protein, 79 aa, Glycine max
  unsure (1)..(79): unsure at all Xaa locations
  Clone ID: PAT_MRT3847_62786C.1.pep
LGVPPRLHHCILPLTPQPRFPQNQTLLQLLTLPEDNQAGVQWRNLRPPQPPPPGFKXFSCLSLPSSWDYRHAPPCLANF

SEQ ID NO: 244473 - protein, 111 aa, Glycine max
  Clone ID: PAT_MRT3847_62787C.1.pep
RQKGQVGKFFLPPTQTVRPGRTKLGGVIRIQPVRVGPERILEKGGESIKNAPEGCPGDPPNPKCVSPWNKLEKLSGAPNPPRGKQKEKVPPPLENFCKANPETLEGKTFED

SEQ ID NO: 244474 - protein, 59 aa, Glycine max
  Clone ID: PAT_MRT3847_62788C.1.pep
ICKHINNFPNIESTLSTSATARSTCTRLIMDNNSSMDIWGQYCLRQFNNSHCGVKDDTP

SEQ ID NO: 244475 - protein, 890 aa, Glycine max
  unsure (1)..(890): unsure at all Xaa locations
  Clone ID: PAT_MRT3847_62789C.1.pep
MAQPLVKKDDDRDDEAEYSPFLGIEKGAVLQEARVFNDPQLDARRCSQVITKLLYLLNQGETFTKTEATEVFFSVTKLFQSRDLGLRRMVYLIIKELSPSADEVIIVTSSLMKDMNSKTDMYRANAIRVLCRITDGXLLTQIERYLKQAIVDKNPVVASAALVSGIHILQTNPEIVKRWSNEVQEAVQSRAALVQFHALALLHQIRQNDRLAVSKLVTELNQGXVRSPLAQCLLVRYTSQVIRESGNNTQSGDRPFYDYLESCLRHKSEMVIFEAARAITELNGVTSRELTPAITVLQLFLSSSKPFLRFAAVRTLNKVAMTHPMAVTNCNIDIGKFXISDQNRSIATLAITTXLLKTGNESSVDRLMKQITNFMSDIADEFKIVVVEAIRSLCLKFPLKYRSLMNFLSNILREEGGFDYKKAIVDSIVILIRDIPDAKESGLLHLCEFIXEDCEFTYLSTQILHFLGVEGPKTSDPSKYIRYIYNRVHLENATVRAGAVSTLAKFGAAVDELKPRIFILLRRCLFDSDDEVRDRATLYLNTLGGDGSVVETDKDVKDFLFGSFDIPLVNLETSLKNYEPSEEAFDIDSVPREVKSQPLAEKKAPGKKPTGLGAPPSGPPSTADAYERLLLSIPEFANFGKLFKSSEPVELTEAETEYAVNVVKHIFDRHVVFQYNCTNTIPEQLLEDVIVIVDASEAEEFSEVFSKPLRSLPYDSPGQTFVGFEKPEGLSIAGKFSNVLKFIVKEVDPTTGETEDDGVEDEYQLEDLEVVTADYMLKVGVSNFRSAWESIGPDCERVDEYGLGPRESLAEAVNTVINLLGMQPCEGTEVVPPNSRSHTCLLSGVFIGNVKVLVRLSFGLDGPKDVAMKLSVRSEDETVSDTIHEIVASG

SEQ ID NO: 244476 - protein, 517 aa, Glycine max
  unsure (1)..(517): unsure at all Xaa locations
  Clone ID: PAT_MRT3847_6278C.1.pep
MRMTKSNRKGKAKTTAVAAGAGRRISARTVFPVVVVLGIVLPFMFVRIAILMLESAAACSSLECAGWRFLSGVITFLELREELTRMYIVAIDGNVNEGAESVMELVKELTAKQDHDVIAVLTRAMVSRLEPXVPLARIIESVELHVDASRFSQRPHLFRLKMSKVSXNKLFRRIWPNPLLLSLESVXRHVDPTISHXFLLTDNLLGATLVETSLIESTNNRVKHVFHIENYKXTYAPMHAWFAKNTIXVRGLHQYDWSIEVXEEVNAGVKEMLETNHLIWKQYYNKEKDLDYTQEHSRYLEALRPSSLSLMNQLRIYLPELFPDLKKIVFLDDDVVVQHDISSLWELDLNGKVIGSVLKSWCGDGCCPGSKYTNYLNFSHPPISSKFNGDQCVWLYGMNIFDLETWRRTNITETYHQWLKLNLKSGMTMWNPGVLPPALMTFEGQVHPISSSMLVTDLGYRHQSAEISKEKLEAAAVIHFSGPAKPWLEIGFPEVRSLWSRYVNISNKFIGRCRITG

SEQ ID NO: 244477 - protein, 98 aa, Glycine max
  unsure (1)..(98): unsure at all Xaa locations
  Clone ID: PAT_MRT3847_62790C.1.pep
VRYLTTXXPXXQTVKAETREHAXTTXGKXNXAPAXERXXNAKTAPXSKGSXQXPNXGSQGRRNEPXGHPKAXRGTTGPTATTGEKEGAQGDADPPHTT

SEQ ID NO: 244478 - protein, 275 aa, Glycine max
  Clone ID: PAT_MRT3847_62791C.1.pep
MAPFFVLFLLASSLTQGYAQFQPKNEAFISLLITQNGLDFVKELLVNKAISSLVSLRLPNIEKTAKIPVVGNVYMVLSNITIYHIDVPSSHVKPGETGISIIASGVTCNLSMNWYYSYSTWLVPVKISDRGRAEVQVEGMEVGLTLGLENQEGSLKLKLKDCGSNVKDISIKLDGGASWLYQGFGDARVGFSGSTVENAVAEKPTFGIPALDPYFVETPMGAPLHLRASSFVPFGNVVMQYPNHDMNWNLSLSSPPVVEISKSESRCQHICIHDN

SEQ ID NO: 244479 - protein, 101 aa, Glycine max
  unsure (1)..(101): unsure at all Xaa locations
  Clone ID: PAT_MRT3847_62792C.1.pep
FLTKFLFCRESTWASAAKLTSLLKAPRWVFEDMSRGYSIRCLWVNLNSPRLAVLXITFXLLXXSSSFLQKXVXHLXIQETXXRLXXCRLSLVXLERXTQKE

SEQ ID NO: 244480 - protein, 97 aa, Glycine max
  unsure (1)..(97): unsure at all Xaa locations
  Clone ID: PAT_MRT3847_62793C.1.pep
MGETKDEAYEEELLDYEEEDEKAPDSAGAKVNGEATKKGYVGIHSSGFRDFLLKPELLRAIGDLGXEHPSEVQHECIPQAXLGMDVICXAQSGMGKT

SEQ ID NO: 244481 - protein, 163 aa, Glycine max
  unsure (1)..(163): unsure at all Xaa locations
  Clone ID: PAT_MRT3847_62794C.1.pep
CNTVKIAGVPDEAIRLSQFSFSLAGEAKRWLYLCKGNSLKTWEEVVEKFLKKYFPXSKNAEGKAAISSFHQFPNESLSEALERFRVLLRKNPIHGFSEPIQLNMFIDGLRLXTKQLLDASTRGKIKLKTPEEATELIENMSASDHAILRDRVHQPTKKSLLEL

SEQ ID NO: 244482 - protein, 39 aa, Glycine max
  Clone ID: PAT_MRT3847_62795C.1.pep
AKASNHSNLIAESCASLLHLPRFLYEPMSFLSRKIPLPI

SEQ ID NO: 244483 - protein, 294 aa, Glycine max
  unsure (1)..(294): unsure at all Xaa locations
  Clone ID: PAT_MRT3847_62796C.1.pep
LLTLGSLGPVLFASSPVQHECIPQAILGMDVICQAKSGMGKTAVFVLSTLQQIDPVPGQVSALVLCHTRELAYQICHEFERFSTYLPDLKGPVFXGVSVKCQWHLLGVTKKCFCKGTKQMDQNCRSRDLXSFIHFVVDSISLRKDPNPLIXIYCEICSFQPMEIYVDDEAKLTLHGLVQHYIKLKEEEKNRKLNDLLDALDFNQVVIFVKSVSRAAELDKLLVECNFPSICIHSGMSQEERLKRYKGFKEGHTRILVATDLVGRGIDIERVNIVINYDMPDSADTYLHRVGRAG

SEQ ID NO: 244484 - protein, 429 aa, Glycine max
  unsure (1)..(429): unsure at all Xaa locations
  Clone ID: PAT_MRT3847_62797C.1.pep
MGETKDEAYEEELLDYEEEDEKAPDSAGAKVNGEATKKGYVGIHSSGFRDFLLKPELLRAIVDSGFEHPSEVQHECIPQAILGMDVICQAKSGMGKTAVFVLSTLQQIDPVPGQVSALVLCHTRELAYQICHEFERFSTYLPDLKVAVFYGGVNIKVHKDLLKNECPHIVVGTPGRILALTRDKDLSLKNVRHFILDECDKMLESLDMRKDVQDIFKMTPHDKXQVMMFSATLSKEIRPVCKKFMQDPMEIYVDDEAKLTLHGXLVQHYIKLKEEEKNRKLNDLLDALDFNQVVIFVKSVSRAAELDKLLVECNFPSICIHSGMSQEERLKRYKGFKEGHTRILVATDLVGRGIDIERVNIVINYDMPDSADTYLHRVGRAGRFGTKGLAITFVSCSTDVDVLNNVQSRFEVDIKQLPEQIDTSTYMPS

SEQ ID NO: 244485 - protein, 92 aa, Glycine max
  Clone ID: PAT_MRT3847_62798C.1.pep
WSLLRRLLSTLSSWSSQYAAQHLGELAQKAPQFVLVFSPEGKKRENVRLYVVGTGLILCFVWCMAFYVSTQIGIMCGFSSHGQYEFCFCVQQ

SEQ ID NO: 244486 - protein, 316 aa, Glycine max
  Clone ID: PAT_MRT3847_62799C.1.pep
MKNTNTNTKLILLHPYIQKQGSSNRLWLLALVSILTLAFLVTLISTRESTFITTATSSVTPSSNNAPVSGFGSAPLPATVINTLLHYASKSNDTFHMPHSDLKPISDVLRKCSSPCNFLIFGLTPETLLWKALNHNGRTVFIDENRYYAAYYEELHPEIDAYDVQYTTKRSEMKELIASAKEQVANECKPVQNLLFSECKLGLNDLPNHVYEVDWDVILVDGPRGDWPDAPGRMSAIFTVGVLARSKKGGNPKTHVFLHDFSGEVEKVCGSEFLCNENLLEANGNLGHYVLERMDENSVQYCKNHSSSGSGAASSA

SEQ ID NO: 244487 - protein, 66 aa, Glycine max
  Clone ID: PAT_MRT3847_6279C.1.pep
INDDHVWLFLTRGLTAILIYFKMDSNNQILIVIHPTDHLFNHHQCLSLITNLISFDFKHFLFYHYH

SEQ ID NO: 244488 - protein, 134 aa, Glycine max
  unsure (1)..(134): unsure at all Xaa locations
  Clone ID: PAT_MRT3847_627C.1.pep
MLGETHRPNATVHMPAWAPEIFSPYTNDADYSPYSVRKTLSALEDCESTDAKSDSEVPCSKAEGPVDTYSYDHCRMFECKVSRCTXYRSHKXDRCPYARPHDKARGQDPRDYHYSGRXEPGWPEESGKRSNACE

SEQ ID NO: 244489 - protein, 79 aa, Glycine max
  unsure (1)..(79): unsure at all Xaa locations
  Clone ID: PAT_MRT3847_62800C.1.pep
SSRKIPLHHHPPHLYFSSHSHSTPLHSPHNLALXASGEPHKVKLLRHGLRGSKKERPILLKNFFLLQNQRHYASSGARS

SEQ ID NO: 244490 - protein, 158 aa, Glycine max
  unsure (1)..(158): unsure at all Xaa locations
  Clone ID: PAT_MRT3847_62801C.1.pep
MGKRGLNHIDPSKGPKPKKTPNPKXKPFKKNPFNRKAKPKPFLKPPPKGQPKKKFQLNKKKKKPGVQKTKFHILKEHWEPQPPPQKEKKLHKTNPKTPLPPKFSLPTPFFNRNLFRGKTNPFGVNTLNGGFLKRGYFFWWRVPKRSWFFPWGNPGQPP

SEQ ID NO: 244491 - protein, 67 aa, Glycine max
  Clone ID: PAT_MRT3847_62802C.1.pep
RLKFNFSDSIIYSIMLLRGIFVIGKREEKVKKKKKRIKLIYFKFDIFLISYYILQRSLIQDSCSPIF

SEQ ID NO: 244492 - protein, 105 aa, Glycine max
  Clone ID: PAT_MRT3847_62803C.1.pep
LTISISSISSISKCKAHPLSRDYHPINGSFTRISIHQLRTPFKSKHAESQASETMIRQTAKQHFLKKKNSTTKQRNNPIPQNQSIPKNQKTRQSNMLFKSETKQQ

SEQ ID NO: 244493 - protein, 61 aa, Glycine max
  Clone ID: PAT_MRT3847_62804C.1.pep
KPPPRGKRPMTAKKGPPQQGYPPPPAPRRPPTPKNNPSACYGREKPEPSGPENEISKPPPN

SEQ ID NO: 244494 - protein, 55 aa, Glycine max
  Clone ID: PAT_MRT3847_62805C.1.pep
INYGPGSALGQGVNWAGFGALNLRVEGFKFPGGQFIWGSSWLPPPGGGFPPGLST

SEQ ID NO: 244495 - protein, 52 aa, Glycine max
  Clone ID: PAT_MRT3847_62806C.1.pep
VFKCYKENDGFSCYYFKLIISEIKKNQNKTFENIKNQNESCQNKTFEKHKKI

SEQ ID NO: 244496 - protein, 94 aa, Glycine max
  unsure (1)..(94): unsure at all Xaa locations
  Clone ID: PAT_MRT3847_62807C.1.pep
ELSHTTCSMVSTGCVQQEDTWGLMKNQQKGGNMSKSSQLQHVLSIVTRIKXRRTRSGFQSISATDWLFSSNKLHGKAVLYETEAILSLIGERDM

SEQ ID NO: 244497 - protein, 495 aa, Glycine max
  Clone ID: PAT_MRT3847_62808C.1.pep
RAESARAPNFRAYSIILILLFVNSGSAHNYQEALSKAILFFEGQRSGFLPQDQRQNWRANSGLGDGWTYNVDLTGGYYDAGDNIKFGFPMAFTTTMLSWSVIEFGDMMPPNEHRNALVAIRWATDYLLKTVSQPNRIFVQVGDPISDHNCWERPEDMDTSRTVYAVDAPNPASDVAGETAAALAAASMAFRSSDPGYSDTLLRNAAKAFQFADTYRGAYSDNADVRSGVCPYYCDFDGYQDELLWGAAWLRRATQDENFLNYIQSNGKTLGAEDNINEFGWDNKHAGLNVLVSKEVLDGNVMSLESYKTSAESFLCTLIPETSSSHIEYTPGGLIYRPGGSNLQHATSIAFLELVYANYLSRTSQTINCGNVYVNAQTLRQHAKKQVDYILGDNPMRMSYMVGYSNKYPQHIHHRGSSLPSIKDHPQFIACKEGSIYFNSSNPNPNVLVGAIVGGPGEDDVYEDDRADFRKSEPTTYINAPFVGILAYFVANPNP

SEQ ID NO: 244498 - protein, 87 aa, Glycine max
  Clone ID: PAT_MRT3847_62809C.1.pep
NELFFGAQSPNWRARFFGCGVIPTNSLLIHTHFVFWLCFLFPNSYPKPFFCFLDSIPPFRFYFFKTFLPLTFPIHFISLTPKKHPHF

SEQ ID NO: 244499 - protein, 89 aa, Glycine max
  Clone ID: PAT_MRT3847_6280C.1.pep
DASQGQIGSDKAVPKQGMTDGGRPGTMENYWACVSDPIRCCAFMRAIGQPQLKLTLWASPPFWVQTSVCYCDVPNHSQRQYNYQGILCP

SEQ ID NO: 244500 - protein, 75 aa, Glycine max
  Clone ID: PAT_MRT3847_62810C.1.pep
TLEGAVEKQDHPMRVGLLNRLPECWVQGRFHCLTQDHSDSWLHPYAPAGPWYIFAMVGIQMRVQLRHLVPEDRCF

SEQ ID NO: 244501 - protein, 65 aa, Glycine max
  Clone ID: PAT_MRT3847_62811C.1.pep
NLYGNKKKSSLKLKIEIWQQSSNRDYTSHIEFQTGNDFDPKVYMDNNARGSQIILAAQLFMPNTF

SEQ ID NO: 244502 - protein, 55 aa, Glycine max
  Clone ID: PAT_MRT3847_62812C.1.pep
LKAQNLWQVAREKGLVFRSNRGSGKLRLKFFFMIHMLGFSPNVTARPPRSVMNNA

SEQ ID NO: 244503 - protein, 103 aa, Glycine max
  Clone ID: PAT_MRT3847_62813C.1.pep
LCIIINSRQSKESIVLSCIYPLLLHLPSSFEDSRNRLRVLPGAGLGDVAGEGVEAQASIVEVNALEANEDLVGVVLGRAGNERTVGVGEDAEAVARADSPAGL

SEQ ID NO: 244504 - protein, 68 aa, Glycine max
  Clone ID: PAT_MRT3847_62814C.1.pep
FVFSCLRFRCFGGLVECPARVSCLDSCGDLSVAHFHARVVWDCDGPWPGLVGGSSCVGLCCSMPPFYC

SEQ ID NO: 244505 - protein, 54 aa, Glycine max
  Clone ID: PAT_MRT3847_62815C.1.pep
QGLFGQALYGSTAMPYLALLALLIASPVMALEKFKRTEASIKSANYTLYGLPVG

SEQ ID NO: 244506 - protein, 71 aa, Glycine max
  Clone ID: PAT_MRT3847_62816C.1.pep
EGECWVGQIVDPALGSHYDVQQMQILTTVALECVQEEKYVIPSMSLVVERLQSHHCWSQAHVTVWFICVYC

SEQ ID NO: 244507 - protein, 73 aa, Glycine max
  Clone ID: PAT_MRT3847_62817C.1.pep
YISQHQKSVVNLDCRCSQSYIMIFLRSMSMLRSALYGRALSAGLRGRGQVRFDELRLRASGNWQGSWRVMTVA

SEQ ID NO: 244508 - protein, 49 aa, Glycine max
  Clone ID: PAT_MRT3847_62818C.1.pep
YQTTVKRHYIRGTSLSLITRRNHEYKAPFFKILTQEFTLLPHHYSKMSR

SEQ ID NO: 244509 - protein, 217 aa, Glycine max
  unsure (1)..(217): unsure at all Xaa locations
  Clone ID: PAT_MRT3847_62819C.1.pep
MRIPSNCEFTRITPSAFSYHRLKSYVSDCRAVLLPSFGGPHVLQLRSHVPVPPLKPHDVLVRARAVSVNPLDTRMRAGYGRSIFEPLLPLILGRDVSGEVSAVGDKVRSVSVGEQVFGALHPTAVRGTYSDYAILSEXGEVTPKPDSLTHVEAIAIPFAALTDLRALKSTARISEGQGFIRSCFKRMGGLVLRKWWRRRMRTMFFICSNRIVRMLRF

SEQ ID NO: 244510 - protein, 83 aa, Glycine max
  unsure (1)..(83): unsure at all Xaa locations
  Clone ID: PAT_MRT3847_6281C.1.pep
FVHCFTSLPLVIHFLCIWSSLHKRLNKTSLASIHTPDVXWCKIRGSVQINSFEKRSHAVLPYFGPGIGSQIQFLWFGSFNVCC

SEQ ID NO: 244511 - protein, 300 aa, Glycine max
  unsure (1)..(300): unsure at all Xaa locations
  Clone ID: PAT_MRT3847_62820C.1.pep
MSSTLSIPLGFCFPPTVATSFPHSQTKPQNVTFQRRKTTTKACAASENPNQRQNPKQNQKEAKTKNAGDDDGEKGINPAGFLAKRGISHKAFAQFLRERYKVLKDMKDEILKRHENFMILASGFELLGMHRHPEHRVDYMEWAPGARYCAIIGDFNGWSPTEDCAREHYFGHDDCGYWFIILQDKLREGEEPDKYYFQMYNYVDDYDKGDSGVSVEELIKKANEKYWQPGEDRFVNNRFEGPVKLYEQIFGPNGPQTIEDIPDIPDPETRYKAWAAEHGPSPTAAIDSGXEYDIYNVIVD

SEQ ID NO: 244512 - protein, 82 aa, Glycine max
  Clone ID: PAT_MRT3847_62821C.1.pep
RLGHGLGDTSGNIQLMESSFYPSASSVSHSYSSNNLGQMQFDSSSIGAFRSPHRSQMRLQSRRSQSREDLNSSLAETHIVKV

SEQ ID NO: 244513 - protein, 357 aa, Glycine max
  Clone ID: PAT_MRT3847_62822C.1.pep
MATRALLGAIKKRTVSFPAFRGHSIYRHGSTLVVAEHEGGFIKPPSLSALAAATCLPDPDSSVSVLLAGSGPSLHQAASHAASCHPSISKVLVADSDKFKNPLAEPWAKLVHLVHQSGGYSHIIAAASSFGKNVVPRAAALLDVSPITDVTGISDSNTFVRPIYAGNALCTVRYTGANPCILTIRSTSFPVPQNSVDSKSNEAPISQVDLSTFDEDLDKSRYISQTSQDDERPDLGNARIVVTGGRALKSAENFKLIEDLANKLGAAVGATRAAVDAGYVPNDLQVGQTGKIVAPELYMAFGVSGAIQHLAGMRDSKVIVAVNNDADAPIFQVADYGLVGDLFEVIPELMEKLPEKK

SEQ ID NO: 244514 - protein, 58 aa, Glycine max
  unsure (1)..(58): unsure at all Xaa locations
  Clone ID: PAT_MRT3847_62823C.1.pep
MQDVNVGADKFSNRQSLGTGSYNYKDYKDAPPTPLFDPREFXSWSFYTSWIFIILLLF

SEQ ID NO: 244515 - protein, 207 aa, Glycine max
  Clone ID: PAT_MRT3847_62824C.1.pep
SGTWPKRNVEAYHNKSSSMKPNIVPNCIRTENYMITFEVEEEKFPLFGKKYQLKFANDVSAETHCLVHFPSFIRLAREAGLEYVEIQNLTEFYDDNRAQLAGLLTHLLTHYVPNLLDPRGRLLPRSYDALGLYTTFIFQKPDPEIAPPIPTPLLPDVSYNLDEVTIWRDDEVINGHVVEPAIGLGKISEQKGILGPGPADLRFPEAL

SEQ ID NO: 244516 - protein, 171 aa, Glycine max
  unsure (1)..(171): unsure at all Xaa locations
  Clone ID: PAT_MRT3847_62825C.1.pep
SAETYCLVHFPSFIRLAREAGLEYVEIQNLTEFYDDNRLFEILFIEFNFLXVSVRAQLAGLLTHYVPNLLDPRGRLLPRSYDALGLYTTFIFQKPDPEIAPPIPTPLLPDVSYNLDEVTIWRDDEVINGHVVEPAIGLGKISEQKGYWAPVLQILRFPKHFEKSTEAILAV

SEQ ID NO: 244517 - protein, 68 aa, Glycine max
  Clone ID: PAT_MRT3847_62826C.1.pep
VFCSKSFGYRQCLKIRDDQLSMWYVSTLFVQCFFPAHCALFAIPGSSYFILCVSKLLSLSSIDSSLTS

SEQ ID NO: 244518 - protein, 78 aa, Glycine max
  Clone ID: PAT_MRT3847_62827C.1.pep
VELPLMSIHPEEDKAFKGDTSDGRKRSAATDSDHCVDQPCGNKLRKSEVSEMLDLNCQYQRDIDSSVKEIDLNFSSSF

SEQ ID NO: 244519 - protein, 110 aa, Glycine max
  Clone ID: PAT_MRT3847_62828C.1.pep
PPLRNRPHHVIVGKRRIHRGLPGIALLDQPYPRLRPSRISVVDRRLRPLLTAPLVDIILEVVELVPRLGRWHAIGLNVVVVHPGLSVLVPIRIVLVAHGWSVLDIAKARA

SEQ ID NO: 244520 - protein, 98 aa, Glycine max
  Clone ID: PAT_MRT3847_62829C.1.pep
LKSYCSFSLIQELSSSFNPVIIMCKGMVEKGSWLKTKTSTLCSCFCSTQVDHPYYLPLITNLVFVHFDYEQKYNCCMFCTWKIVDNHICFAIMYDLNS

SEQ ID NO: 244521 - protein, 245 aa, Glycine max
  unsure (1)..(245): unsure at all Xaa locations
  Clone ID: PAT_MRT3847_6282C.1.pep
QGSSSSIAILNLVSSACTRKGKKYREAALSSLEQVIKALGNPEFFNMVFPLLFDLCNSEPLKSGQAPLASDAAGXLNSVEEISVPHNKIVDCLTSCIHVAHINDILEKQKGLAHMYTAFLLPEHKWTVKTTAFVSIRELCSRLQNVVKDSQGSNELAGATSFVQEIFHSLSPKILHCISTIKIAQVHVSASECLLEVMNLAMDVPSVGTINEGFKDELLHQYEIEKNEGAKSILKKCVNILQDWK

SEQ ID NO: 244522 - protein, 60 aa, Glycine max
  Clone ID: PAT_MRT3847_62830C.1.pep
QNGFQLLCVTHFTFTHKHEAFQIPLNCCKFLSHISPSDVCSFQFSSSLSLLFPIFFFHTL

SEQ ID NO: 244523 - protein, 112 aa, Glycine max
  Clone ID: PAT_MRT3847_62831C.1.pep
CPLLFLSPEPPSPATIFSLCSPVGHKLGLFLTVRRLRNPGKMPYSLPRGQGTLCSVFLTRLTRVVLNPYIFPFIFCFHFYFSLIFIHLFTPSGNAIYSLFFNPPPWLTFYYG

SEQ ID NO: 244524 - protein, 85 aa, Glycine max
  Clone ID: PAT_MRT3847_62832C.1.pep
GFPVGPFSKGIRKGDPPLVKSKGGKFFLHVPPGETLVSKMGLKGPRVIFRPKVKKQKRPALSGYADRGGLTSPLGKNSNSFPGRR

SEQ ID NO: 244525 - protein, 84 aa, Glycine max
  Clone ID: PAT_MRT3847_62833C.1.pep
MATTNPDGFVADDPADPLQLIDAEQLKAETTDLAANDESKKARAQHNKHFQLHTKPASTDKAVMDARNQPPREAHKLRRCVAQA

SEQ ID NO: 244526 - protein, 121 aa, Glycine max
  Clone ID: PAT_MRT3847_62834C.1.pep
KTGAKALKQKKGKTAGETTNPPEEKKPKKGGAHAKIRGPKGGKSATGGANSKKHNRAKREIRPKKKKGGPKGCAQPQRGKNRAKGNGMRGQKKKDKASGKAQAQKVGNPKKGPPNLGYSIK

SEQ ID NO: 244527 - protein, 59 aa, Glycine max
  Clone ID: PAT_MRT3847_62835C.1.pep
VTQCSNNISTKVTIIFLSFWYITCFMNLLQTQNCVKSTSYHIYKSTIRISLSPLILPWD

SEQ ID NO: 244528 - protein, 76 aa, Glycine max
  Clone ID: PAT_MRT3847_62836C.1.pep
GAAHTTLHCRASAAINLGRDCKDFESIILRKGTTVSTSIRRRSISVPVCNTNAYYNALLEVKRPCIKSSHSMYSTI

SEQ ID NO: 244529 - protein, 67 aa, Glycine max
  Clone ID: PAT_MRT3847_62837C.1.pep
KTEDIQVVEVSPPPLETSQSLKISSKAPQDGFLIKLRYLSVSPQPKLKTKNNLKKTHHPLSKFEISA

SEQ ID NO: 244530 - protein, 82 aa, Glycine max
  Clone ID: PAT_MRT3847_62838C.1.pep
EIKEEEVECVLVLGLACCHPNPHHRPSMRTVLQVLNGEAPPPEVPKERPVFMWPAMPPSFKEAEDNSLIQGTLTPFTEITGR

SEQ ID NO: 244531 - protein, 71 aa, Glycine max
  unsure (1)..(71): unsure at all Xaa locations
  Clone ID: PAT_MRT3847_62839C.1.pep
IHHFIFFNGSXSHVILVICGEIFLIRVSLNLYRFSPLLCPIQQKSSFSLTSXSYXSFSSKLPKKQYVSLYI

SEQ ID NO: 244532 - protein, 477 aa, Glycine max
  unsure (1)..(477): unsure at all Xaa locations
  Clone ID: PAT_MRT3847_6283C.1.pep
MKFYISTRGIKRVTISNSEGKGSAKTTAVAAGSGRRISARTVFPVVLVLGIVLPFLFVRIAILMLESAAACSSLECAGWRFFSGVDTSLELRDELTRALIEANDGNNSARAGSFNELVKEMTSKQDLKAFAFKTKAMLSQLERKVQLARQQESVYWHLASHGVPKSLHCLCLKLAEEYAVNAMARSRLPPPEFVSRLVDPTFHHLVLLTDNVLAASVVVTSTVESSINPEKLVFHIVTDKKTYAPMHAWFATNSIKSVVEVRGLHQYDWSEEVNAGVKEMLETNHLIWKQYYNKEKDLDYTQEHSRYLEALRPSSLSLMNQLRIYLPELFPDLKKIVFLDDDVVVQHDISSLWELDLNGKVIGSVLKSWCGDGCCPGSKYTNYLNFSHPPISSKFNGDQCVWLYGMNIFDLEAWRRTNITETYHQWLEINLKSGMTMWNPGVLPPAFIASEGHVHPIXSSMLVTDLGYRHQSAEIAK

SEQ ID NO: 244533 - protein, 133 aa, Glycine max
  Clone ID: PAT_MRT3847_62840C.1.pep
RVGVCEVSKMTSPFIKCTVYLFIELGNMADDTTNWEAFPHKLAQFGEIQEKLVLQLSQEEFLTARSTQVLPATTLLADGCPYLDAMVHDSTESTIPDDKAIGVKMATINNMCAYDLNPGISGSRILSTITHSI

SEQ ID NO: 244534 - protein, 126 aa, Glycine max
  unsure (1)..(126): unsure at all Xaa locations
  Clone ID: PAT_MRT3847_62841C.1.pep
LKPGMVITFRPTKLTTKVKCXEMHHECVTGTHACDNMKWNVKNVACENLXHDYIAXKXRDDAAKKTADCTRGMMIMNHPGQIGNSYAAVLDCDTCDIAVKWGELMTEMDERCGEELEENAGVWKNG

SEQ ID NO: 244535 - protein, 78 aa, Glycine max
  unsure (1)..(78): unsure at all Xaa locations
  Clone ID: PAT_MRT3847_62842C.1.pep
FGSPLFMPFFDNQLKFPSPLLFPAQDVVSPLFXPKPVFLVKTVFAFAPEKDISPGDKVEIVVLKASGFFCEYMALRKD

SEQ ID NO: 244536 - protein, 56 aa, Glycine max
  unsure (1)..(56): unsure at all Xaa locations
  Clone ID: PAT_MRT3847_62843C.1.pep
MSSRKKVLLKVIILGDSGVGKTSLMNQYVNKKXSNQYKATIGADFLTKKVMVMIDG

SEQ ID NO: 244537 - protein, 146 aa, Glycine max
  unsure (1)..(146): unsure at all Xaa locations
  Clone ID: PAT_MRT3847_62844C.1.pep
DGEPMKRLLCEGDLVVFPEGXTXCREPYLLRFSSLFAELADEIVPVAMNAHVTMFYGTTASGLKVLDPIFFFMNPWPRYDIQVLGKVPRELTCAGGRSSHEVANYIQRQLADALGFECTNLTRRDKYMMLAGNEGVVQEKKGRRFC

SEQ ID NO: 244538 - protein, 44 aa, Glycine max
  Clone ID: PAT_MRT3847_62845C.1.pep
LPLNIQVHLWLTVNATNLVMPKTPIGAVQGPTISTATGSPISRR

SEQ ID NO: 244539 - protein, 113 aa, Glycine max
  unsure (1)..(113): unsure at all Xaa locations
  Clone ID: PAT_MRT3847_62846C.1.pep
ILFCTKAKTMSSNPNPSADAWSLQFLKRTGLHSEIISDTGWTATPMQDVQVXTTDRFISSQESVXRTHGVMKPQISFELNRWKGKMTIPQGNLRSVXRMPLSLGGGAWCKECY

SEQ ID NO: 244540 - protein, 263 aa, Glycine max
  Clone ID: PAT_MRT3847_62847C.1.pep
MEEKVKLAHYKVGSLPTLFYVPDFITDSDQSLLLNNIYGAPASKWKILKNRRLQNWGGVVHEKGLLPQILPPWLTNLTQKIYEESGLFPSALNHVLINEYLPNQGIMPHQDGPAYFPVVAILSLGSPVVMDFTPHARFKQDSQDDVCKDSDGGTFEIGKDKWLDDNHPFSILLMPRSLLIFKDKAYSDYLHGIKDCAVHCYDGAVNEAEALKHKESDGNLFSSEDDELETIGKGEYKNISRKSTRISLTCRLVPKVHKNLFRF

SEQ ID NO: 244541 - protein, 50 aa, Glycine max
  Clone ID: PAT_MRT3847_62848C.1.pep
RFIFLYPFTLFFFFLSLLLMGSAHFAISFTLLHCLLILTFLITSVLLPPR

SEQ ID NO: 244542 - protein, 106 aa, Glycine max
  unsure (1)..(106): unsure at all Xaa locations
  Clone ID: PAT_MRT3847_62849C.1.pep
TFSAFSTFFLDLIPIHREDFLNSKEFPKTLPKENSRNKIDLLLKYNPVHIIIPVLVXHNGKAIAXSMVILKYIDETCKDIPKLLTSDSYLRSQSLFLXHFIHYHLM

SEQ ID NO: 244543 - protein, 102 aa, Glycine max
  Clone ID: PAT_MRT3847_6284C.1.pep
RSYETLFYLPDLDDAQLSQEAEYLLRKGWIPCLEFELEHGFLYREHNWSPVYYDGRYWTMCMLPMFWCTDAFQVSNELQEAMTAYPNGFLRIIDIDIVRPVQ

SEQ ID NO: 244544 - protein, 60 aa, Glycine max
  Clone ID: PAT_MRT3847_62850C.1.pep
LVSYLSMSHIPYVDSVREPKPICDSDDSAIGFSKISVVWGQTDHSCSGEHSARRIGLNES

SEQ ID NO: 244545 - protein, 108 aa, Glycine max
  unsure (1)..(108): unsure at all Xaa locations
  Clone ID: PAT_MRT3847_62851C.1.pep
XXXXXXXXXXXXXXXXXXXXXXXXXXXXXXXXXXXXXXXXXXXXXXXXXXXXXXXXXXXXXRYTLVTIYFFVKLIKVAKFNSLCKIPSKVFLTHYGWTSIERFECVKP

SEQ ID NO: 244546 - protein, 120 aa, Glycine max
  Clone ID: PAT_MRT3847_62852C.1.pep
LEVLPATSLGSSASKTIRSYIFHSAKAPTASISFLGTTYGDTAPVMAAFSSRGPSSVGPDVIKPDVTAPGVNILAAWPPTTSPSMLKSDKRSVLFNIVSGTSMSCPHVSGIAALIKSVHK

SEQ ID NO: 244547 - protein, 81 aa, Glycine max
  unsure (1)..(81): unsure at all Xaa locations
  Clone ID: PAT_MRT3847_62853C.1.pep
VXXXRXFSEDHEPXXXCXXVGAXTXPVXVLLDASVVGTAXXHLVAXXCSGCPSFTDXEVNRNVSAXFILLKLXGXXXXRXX

SEQ ID NO: 244548 - protein, 45 aa, Glycine max
  Clone ID: PAT_MRT3847_62854C.1.pep
FVGQCRSLKVFVLSNAGVCNESHSSLRHLPCSRGFVRKKIAAQNG

SEQ ID NO: 244549 - protein, 103 aa, Glycine max
  unsure (1)..(103): unsure at all Xaa locations
  Clone ID: PAT_MRT3847_62855C.1.pep
IRLERERKPLPHSAVLGANDLPITILTDHIEHPLFKRGKHKILXRAXASXKTYDQIPGAYTLIETLFHSFXQKFLSKPLFLEIFXEKNYPTKYSIKIKGDFVV

SEQ ID NO: 244550 - protein, 121 aa, Glycine max
  unsure (1)..(121): unsure at all Xaa locations
  Clone ID: PAT_MRT3847_62856C.1.pep
PPGPRIRSPPPPPRRGAFFLNRRGPPXSPFENGPGGPPPKKGVGPPFWPPPLFPLFSRPFFFLEFLGANLFPPETPLPXFPPPFIPPPLRKSGPPPGPRPEFPGGPPGPPPGPEIWGLGFF

SEQ ID NO: 244551 - protein, 90 aa, Glycine max
  unsure (1)..(90): unsure at all Xaa locations
  Clone ID: PAT_MRT3847_62857C.1.pep
ATPIPKLIPQTKTSNADSNLSEFPIYLSHNCTNNTFYXNNSAFQTHLTILLFNLASNATTGNKFYKADVANTVFGLFLCRDQEDLPSGLC

SEQ ID NO: 244552 - protein, 84 aa, Glycine max
  Clone ID: PAT_MRT3847_62858C.1.pep
RPPFFFFFDQKYTGGYIMGIDLFKQKSTNILFINKGITNYDTHKRFLKPKPSWTPASGMAYDNSLLLFWANKKLINVAHDWVEY

SEQ ID NO: 244553 - protein, 141 aa, Glycine max
  unsure (1)..(141): unsure at all Xaa locations
  Clone ID: PAT_MRT3847_62859C.1.pep
HGDSSVALWSSISVGGVPVLXFLEKQEIAYEKEMLENIHKEVIQGAYEVINLKGYTSWAIGYSVANLARTILRDQRRVHPVSVLAKGFYGIDDGEVFLSLPAQLGRGGVLGVTNVHLTEEETQRLRDSAKTILQVQNQLVI

SEQ ID NO: 244554 - protein, 131 aa, Glycine max
  Clone ID: PAT_MRT3847_6285C.1.pep
MKFYISTRGIKRVTISNSEGKGSAKTTAVAAGSGRRKSARTVFPVGLVLGIVLPFLFVRIAILMLESAAACSSLECAGWRFFSGVDTSLVSISFTKSPFLFYFYFNKFLIFFLLFPPFTFHKVFGEFSLLD

SEQ ID NO: 244555 - protein, 238 aa, Glycine max
  unsure (1)..(238): unsure at all Xaa locations
  Clone ID: PAT_MRT3847_62860C.1.pep
MFLFAAFSICKVAKDAAGVAGNVFAFALFVSPIPTFMRIIRNGSTRMFSRWLEIYSLLNCLICMWYGTPLISADNLLVTTVNSIGAVFQFVYIIIFLMYAEKAKKVRMIGLSLAVLGIVXIVIYRSLQIDDGYNXWSVSLCSFLIFISLLSMFGSRFAIIKLVIQAKSVEFYLWSVXLSTFLKSNSFLLYGXLFNDDAFIFFXNGIWTFLGMLLLILYFYFESKVNESSREPLIVSYA

SEQ ID NO: 244556 - protein, 59 aa, Glycine max
  Clone ID: PAT_MRT3847_62861C.1.pep
KINTLVKLYILHVVFLKEYLINKKKNLYELWGKREPNLKYLKVWGCVVNVNIPIFKNKY

SEQ ID NO: 244557 - protein, 40 aa, Glycine max
  Clone ID: PAT_MRT3847_62862C.1.pep
GQNVVIWIIHFDHCSFIYQKNVVSFTSSLAYRPLSLSSHL

SEQ ID NO: 244558 - protein, 90 aa, Glycine max
  unsure (1)..(90): unsure at all Xaa locations
  Clone ID: PAT_MRT3847_62863C.1.pep
YMLSEDRDDDVAVELHSKLLKEFPRDLLSLKRAQVLCFYMGLPGLSLSLIQQILPHNEGENYIXRMLAFPLLELGRMEEAEEAAKRGFEI

SEQ ID NO: 244559 - protein, 75 aa, Glycine max
  unsure (1)..(75): unsure at all Xaa locations
  Clone ID: PAT_MRT3847_62864C.1.pep
AMTQTMSGPNDSWLQFYNQNSTPSIPXLTVSTANVTTTTIVAATSPSQDMLNSSSSGPTHLSPEGAWRSHPPSLP

SEQ ID NO: 244560 - protein, 98 aa, Glycine max
  Clone ID: PAT_MRT3847_62865C.1.pep
LWGELWPMTHVRSDTLCTTTYAGSTDSMTTSATKRTYDHHDDPSGPSYGHAVDSLAYIGLFLGQPLILTVYALEDTAQLSALNQLAAKVEYHDPLQAA

SEQ ID NO: 244561 - protein, 46 aa, Glycine max
  Clone ID: PAT_MRT3847_62866C.1.pep
HCLLIPLPEKKHFLVEDRSCTSNRSLQCQILQVLVTSLQHFCPQDP

SEQ ID NO: 244562 - protein, 35 aa, Glycine max
  unsure (1)..(35): unsure at all Xaa locations
  Clone ID: PAT_MRT3847_62867C.1.pep
LQIIFLNQHLHEVGKKGSLXXYSFEQQHNIHLPFL

SEQ ID NO: 244563 - protein, 67 aa, Glycine max
  unsure (1)..(67): unsure at all Xaa locations
  Clone ID: PAT_MRT3847_62868C.1.pep
LIQDVQETEINYVNFVHLLISLHFFAXXXPXGXXXXSXXXXPGNYXGTXLQGXPXPPRXXRXXTGXX

SEQ ID NO: 244564 - protein, 89 aa, Glycine max
  Clone ID: PAT_MRT3847_62869C.1.pep
FLFFLIFFFGWGLLLTRCCSFFNYWGKTNPHAELFFKFSNFGFPPKEMPKPGFKKVYSLKILLFFPKGTLFKTQNRVLPKFLCLKGPPL

SEQ ID NO: 244565 - protein, 104 aa, Glycine max
  Clone ID: PAT_MRT3847_6286C.1.pep
GDRLFGATAPTIHKNNETKREAPWLDKRYVLRHGARNKPIDIRIWPRRKHPSGCANRSPTLNKKRANEQDASTGAVEPCDMHQDQQGHGVPREHRQRLRKQGED

SEQ ID NO: 244566 - protein, 85 aa, Glycine max
  Clone ID: PAT_MRT3847_62870C.1.pep
TQALTFRHILCSCPDKSIMLYEDRSKRTFSLNLINLVQSSLTVCTTLIARMQKQLKPNWTTVLPLEVETFSSLTVMLMMINTSST

SEQ ID NO: 244567 - protein, 70 aa, Glycine max
  unsure (1)..(70): unsure at all Xaa locations
  Clone ID: PAT_MRT3847_62871C.1.pep
SDFVGXXMGGTPPHLPHDKAPDIHFFCSYLRPMLNGTCKLVKYRLGALTHLSRMRLGDVDCYISLLSLTL

SEQ ID NO: 244568 - protein, 37 aa, Glycine max
  Clone ID: PAT_MRT3847_62872C.1.pep
LTRPKIAITRLNTNKSPYIRNYKKIHAFSIIPLALIS

SEQ ID NO: 244569 - protein, 90 aa, Glycine max
  Clone ID: PAT_MRT3847_62873C.1.pep
GTLYSAARDPIFYSHHSNINNMGSVYKTLGGRKKDFTHSNQLKSAFLFYDKNKNLVRVNVKDSLDTIKLWYVYQNLDIPLVNSNPTPLKS

SEQ ID NO: 244570 - protein, 75 aa, Glycine max
  Clone ID: PAT_MRT3847_62874C.1.pep
GVVWAKGQPCVSLEGWGDYPFSGAEDNRPDWGKIKWHFISKRYPPANDIGYKPKSGKKKKKKKKKKKKGGPDSSC

SEQ ID NO: 244571 - protein, 94 aa, Glycine max
  unsure (1)..(94): unsure at all Xaa locations
  Clone ID: PAT_MRT3847_62875C.1.pep
KMKLKVYAPETDSWEAIKGLPLPEQKRKPFSVKACDCQIYVVGQNLVVGVGHIPRLNPKKSCKEKWNFSVXWHVINAPKRGFDLTPSSFQGRFA

SEQ ID NO: 244572 - protein, 99 aa, Glycine max
  Clone ID: PAT_MRT3847_62876C.1.pep
FFFFFFFFFFFFFFFFFCNQHTYTLGYEGKYIPKDIFYHGNIFSPKKSTAEGRPLASFGCSPREFLFTSPLEFFWGPSFISRVDSLGKSLGKNLKKNPL

SEQ ID NO: 244573 - protein, 60 aa, Glycine max
  Clone ID: PAT_MRT3847_62877C.1.pep
IKAPSSNSKPDTAFFYATTSYWSVIEIQNHPPVHCISLARVTLSFFDSTYLKVIKSFRTP

SEQ ID NO: 244574 - protein, 63 aa, Glycine max
  unsure (1)..(63): unsure at all Xaa locations
  Clone ID: PAT_MRT3847_62878C.1.pep
DRWGSPEMAPVLDTVWPYHGFLRNSXELFPQLPFHLKLRGGGGSLIAGQPMMMKRESLLKQPL

SEQ ID NO: 244575 - protein, 89 aa, Glycine max
  unsure (1)..(89): unsure at all Xaa locations
  Clone ID: PAT_MRT3847_62879C.1.pep
FVNVAQMAKNIYLXGPPSYGGFPRVYGASYGNGTRSYNFSYNSGGGXSHLLVYFQNVNLVGITPEACNEVPSNGVKDVNVVNGSLVEVA

SEQ ID NO: 244576 - protein, 62 aa, Glycine max
  Clone ID: PAT_MRT3847_6287C.1.pep
QFSFKAANYLNIKSLLDLTGQTVCDMIKGKTPEEIRKTFNINNDFTPEEEEEVRRENQWAFE

SEQ ID NO: 244577 - protein, 60 aa, Glycine max
  Clone ID: PAT_MRT3847_62880C.1.pep
SSKLLCKKINEGKLFTKSQNHLIYVWKATKGIKPPCFKIQKQLFGSHSVVFSSSRYTSYS

SEQ ID NO: 244578 - protein, 90 aa, Glycine max
  Clone ID: PAT_MRT3847_62881C.1.pep
LTHNGLLKFRKLKVCLIITVVIRSLHVCCLRTVLLALVILPPRPASTYAVNVMLGFSPLVCFLSFLSWSSSCLVFRYSPPPPPKKEDVIQ

SEQ ID NO: 244579 - protein, 118 aa, Glycine max
  Clone ID: PAT_MRT3847_62882C.1.pep
MMKMKLKLLKCCIREFYKFIRKVSANFPNYAILVTCCSSHEKSHSYVPKDVPKGHLVVYVGEDCKRFVIKVGMLNHPLFQALLDHAEDVFGFTNDSKLRIPCNENIFLLVLHNAGDLV

SEQ ID NO: 244580 - protein, 120 aa, Glycine max
  Clone ID: PAT_MRT3847_62883C.1.pep
KVGNNRRPTYRCKKCRRLVALQEHVIDHVPGEGERAFEFHKRRGGNPFNKSDEFECSSIFIEPLRWMKAVEEGAMEGKLSCAHCDARLGYFNWSGIQCSCGSWITPAFQLHKGRIDISPM

SEQ ID NO: 244581 - protein, 94 aa, Glycine max
  Clone ID: PAT_MRT3847_62884C.1.pep
ASRCWYGINLAKGILEHHSKGILDFDKPRKLLADFRIGKLITGNIHRLQDIYWLQVMCLIKCQDDIFGHVIRKKFSDTFPGITCTCTTNGGWSD

SEQ ID NO: 244582 - protein, 61 aa, Glycine max
  Clone ID: PAT_MRT3847_62885C.1.pep
AREGLLVLSYLSFKQNEGLVIAVRRYNEVMNHTCKLSMNPEQRYVHFVWNIINLPPKVPDK

SEQ ID NO: 244583 - protein, 91 aa, Glycine max
  Clone ID: PAT_MRT3847_62886C.1.pep
DPFRVMFQNTFSQIDTIPAALNMPLVLTSFFSLHPTSRSSLTVRRISCVLNPSGRIASRAASMRLIPCILFCRQNKTPLRKGKMLENSQTR

SEQ ID NO: 244584 - protein, 67 aa, Glycine max
  Clone ID: PAT_MRT3847_62887C.1.pep
KYLEHVLSNMLCVKASEEYDKCLKSHYMVWLARGTHIHTPLVLLVKNHLKARVKLFCVIVRVGAPGF

SEQ ID NO: 244585 - protein, 100 aa, Glycine max
  Clone ID: PAT_MRT3847_62888C.1.pep
VPRVRPRVPKRVRYPETEHKLFVGNLSWSVTNEILTQAFQEYGTVVGARVLYDGETGRSRGYGFVCYSTQAEMEAAVAALNDVELEGRAMRVSLAQGKRA

SEQ ID NO: 244586 - protein, 289 aa, Glycine max
  Clone ID: PAT_MRT3847_62889C.1.pep
MAATAAAGIASLFSSSINSVKCLRSSKNCSIIDPLITTVPSNRGMFVSHLVEPLSIGGAINSHKLWGPRISAAVAQEEAVVVADDEVDDGAGLVEEEKVEENEGEVVAEQDSDSSATKLYFGNLPYSVDSAKLAGLIQDFGSAELIEVLYDRDTGKSRGFAFVTMSCIEDCNAVIENLDGKEFLGRTLRVNFSSKPKPKEPLYPETEHKLFVGNLSWSVTNEILTQAFQEYGTVVGARVLYDGETGRSRGYGFVCYSTKAEMEAALAALNDVELEGRAMRVSLAQGKRA

SEQ ID NO: 244587 - protein, 108 aa, Glycine max
  Clone ID: PAT_MRT3847_6288C.1.pep
LAAKGRVPIGKGGAFFFKRAFFSKIAQIGENVKVFHRDYVPETAREPHGVFLKSGVVPVIKHCFIPSGPVFYTPPPPQKIFCTPNPNGVWEAPFSPRKVYQALFPRLK

SEQ ID NO: 244588 - protein, 186 aa, Glycine max
  Clone ID: PAT_MRT3847_62890C.1.pep
IRLEIGGSANPTINSQGNRYTAPGDPDAKEVTKRVDTDDREWSGWNWRTEGDIMVNGAFFVPSGAAGQSGQYQEATSVQAKSAVQIDQLTMYSGVLGDPRDNGDLYPGFNGGGTVTGATSKGNTDGSSSDDGGDFFGMIFRGGSSSSSSSQAAPPSSVLFVSIFLSLLIIFVLDTTTNHAFLLSLL

SEQ ID NO: 244589 - protein, 272 aa, Glycine max
  Clone ID: PAT_MRT3847_62891C.1.pep
MTSSTLLLCSIALLYSASFGAEAWTSPYIPVSSLISKSLYDKFFLHKDDTACPAKDFYPYDAFIRASKSFPAFGTTGCLATRKREIAAFLAQISHETTGGWATAPDGPFAWGLCFKEEISPQSNYCDSTNTQWPCFPGKSYKGRGPIQLSWNYNYGPAGKALGFDGLRNPEIVANNSVIAFKTAMWFWMTEQKPKPSCHNVMVGIYVPTEDDIAANRTAGYGLVTNIINGGLECGIPGDARVNDRIGFFERYTKLFNVDTGPNLDCAYQKPF

SEQ ID NO: 244590 - protein, 45 aa, Glycine max
  Clone ID: PAT_MRT3847_62892C.1.pep
KGSYLKGIADVKVQSLMLGLSQDLRQNFSKSEHFSCFVQVLKIYF

SEQ ID NO: 244591 - protein, 80 aa, Glycine max
  Clone ID: PAT_MRT3847_62893C.1.pep
LVFLGNFLPWEKLNGGGLQQQNFGLLHREKKLTHFCHKGGGENFYGGRAPNGHPGLFSPPFLKEFFRFSFKRGALVPKKF

SEQ ID NO: 244592 - protein, 57 aa, Glycine max
  Clone ID: PAT_MRT3847_62894C.1.pep
LRVRPRVRLSRMKHHTYLSSKSCAGTPEWMAPEVLRNEPANEKCDVYRFGVILGESI

SEQ ID NO: 244593 - protein, 106 aa, Glycine max
  unsure (1)..(106): unsure at all Xaa locations
  Clone ID: PAT_MRT3847_62895C.1.pep
MAVVYVAAKCTIAMDMGTTQYIMAELLVGQPSFPGESGVDQLAEIINVLGTPTRAETKCMNPNYTEFKFTHIKPYPWHKVFHKRLPPDAVDLVCRXFKYFPNLRCT

SEQ ID NO: 244594 - protein, 46 aa, Glycine max
  Clone ID: PAT_MRT3847_62896C.1.pep
KGIPQTVNHSHFYYFFVCGYTEENLYFTIFEYLLYLVLDWILRKFR

SEQ ID NO: 244595 - protein, 50 aa, Glycine max
  unsure (1)..(50): unsure at all Xaa locations
  Clone ID: PAT_MRT3847_62897C.1.pep
LFFFXTPCKRRGTSIDNNKHILHGLKEGFAHIFGCNIKERLGPRMHPNRS

SEQ ID NO: 244596 - protein, 62 aa, Glycine max
  Clone ID: PAT_MRT3847_62898C.1.pep
HNKALLLYRVIDAQLMNTHDTVFINKLSMLAATTESETPLMTSAELTEAEGDMLLYSTTLVY

SEQ ID NO: 244597 - protein, 103 aa, Glycine max
  unsure (1)..(103): unsure at all Xaa locations
  Clone ID: PAT_MRT3847_62899C.1.pep
ARNSAREQVVFFLEKXSNKSINQXIXTLLLXXESTXQNXDSEXKXCXXXRWXXRXXXSEFXTXXXKXWSLXXXXGPXKXSXSXXXXXVPXXPWXFPXLGLXGM

SEQ ID NO: 244598 - protein, 132 aa, Glycine max
  unsure (1)..(132): unsure at all Xaa locations
  Clone ID: PAT_MRT3847_6289C.1.pep
LSCSHTFGFSHCPXSPTRFYCTPPDPTLNYQSASYLPQMCPTHVDPKIAITIAPSPHHHSHHVYYHIITRGLGLLTYDQILFTDPRSQITDNYFDYTTTATSYLFEDALTTXCLLRLNTARNGKIRTDCLVL

SEQ ID NO: 244599 - protein, 223 aa, Glycine max
  Clone ID: PAT_MRT3847_628C.1.pep
MEVENAKLKAELAGRIALICSLCPELEYESLDDERVNNILRNAAEKTQEALHLKDEYIKHVQSMLKMKQMLCVSYEKRIQELEQKLSDQYVQGQKMSSVNDAADLPLVAGKTDNYKSESISGEANMPCISTSEPMDEVSCISSSLDAKLGLFMFTEHTGKALDGVDENMLDSSGVQNPQLDSSMMEPHREEAQSGDKDKKGKIIVQLGMSLTNSSTGETCLCT

SEQ ID NO: 244600 - protein, 80 aa, Glycine max
  Clone ID: PAT_MRT3847_62900C.1.pep
TFPSLTSQISSITYKYLMGMDIMTRGDLQSFPSNNHAMSFNTAHGCILYVTFCRVLSIPCESIPCGVWPFCMKDQILKFN

SEQ ID NO: 244601 - protein, 80 aa, Glycine max
  Clone ID: PAT_MRT3847_62901C.1.pep
KACSFWEEEWKLSKQKRYMLKMRVKELLCASSWDKKKKKSKVDSGKITSSKSVVENKNQTQKNQILIRIIYQGKPREGDK

SEQ ID NO: 244602 - protein, 47 aa, Glycine max
  Clone ID: PAT_MRT3847_62902C.1.pep
SVDLSVVEYFNSNSPCSYCFSLGSLIYAFFSRKIMLISSFLNLCLLI

SEQ ID NO: 244603 - protein, 50 aa, Glycine max
  Clone ID: PAT_MRT3847_62903C.1.pep
NFPILKPAQSQRQSSIALLARRISGCRIRKQSVLLIHLDSVDKVIKSFVK

SEQ ID NO: 244604 - protein, 125 aa, Glycine max
  unsure (1)..(125): unsure at all Xaa locations
  Clone ID: PAT_MRT3847_62904C.1.pep
RQCFMTRTVFFFFCFYAYSQPPCFLPRLPLSMLRQLHRPRMPAVFSSHGFILSHXSPPRLWALPLLPMQRPFFRFAGFTFILCAYDGPFLFMRCLSSRVTNAAANNHASXAQLFWLVPFVAGLLL

SEQ ID NO: 244605 - protein, 41 aa, Glycine max
  Clone ID: PAT_MRT3847_62905C.1.pep
FLKGLFPLSWQKLQVSINHGRVVLVLWVYPIYKTVKDQSWP

SEQ ID NO: 244606 - protein, 62 aa, Glycine max
  unsure (1)..(62): unsure at all Xaa locations
  Clone ID: PAT_MRT3847_62906C.1.pep
ETRSXARNAAXAKFXIXLXCXXVXAXFXXRNQRCQFRXXXPKXLKRXVFELGVLMXXSCYPX

SEQ ID NO: 244607 - protein, 60 aa, Glycine max
  Clone ID: PAT_MRT3847_62907C.1.pep
PLFTVVFKLEFLKHSEKESSVFEVEYHAFLKPQLGTKIKTLRCLHTKMVHTFLSDLWLFV

SEQ ID NO: 244608 - protein, 150 aa, Glycine max
  unsure (1)..(150): unsure at all Xaa locations
  Clone ID: PAT_MRT3847_62908C.1.pep
PNRGRLRAGXREKVIRQGAKAGKEAFPMHEQEPIGAPTAGARGRTAGPPRARGNDGWHSQTLTSRAAEGKRRNREAGQIPAIECSAVLRRTTKVQNPPPRPFRGIERKKGRGXAVYLTSADLYGMPHGGQXAEGRSFFFXXLRXXRGPWX

SEQ ID NO: 244609 - protein, 238 aa, Glycine max
  Clone ID: PAT_MRT3847_62909C.1.pep
MSSPDIVSILENSKEFDRVRKEQEDILSEINKLHKKLQATPEVVEKPGDNSLARLKFLYTQAKDLSESEASISNLLINQIDALLPTGPQGQTRRRIGKEGNEQKRKRVKTESDISRLTPNMRSQLEACASLKGEQVAARVTPRNADKDEWFVVKVIHFDKESKEFEVLDEEPGDDEESSGQRQYKLPMANIIPFPKSNDPSSAPDFPPGKHVLAVYPGTTALCKAIVIQDPRRRKTEE

SEQ ID NO: 244610 - protein, 95 aa, Glycine max
  unsure (1)..(95): unsure at all Xaa locations
  Clone ID: PAT_MRT3847_6290C.1.pep
MEPPPLGGKGKKKKRGFVKRRGFLGAGSVKGAGAPPGIWPPPPPFFLKKKIGPLFCFPKKKKKKKKKKKKKKKKKKKKKKKKKKKKKXRKEGGPP

SEQ ID NO: 244611 - protein, 43 aa, Glycine max
  Clone ID: PAT_MRT3847_62910C.1.pep
ILDTKLADLDNGWFDPLCAHIKLNFYLLNHNQKKKNKQLPTNY

SEQ ID NO: 244612 - protein, 269 aa, Glycine max
  Clone ID: PAT_MRT3847_62911C.1.pep
HFLKASEGAQEVTKMLEATRLHYHSNFADNRGHIDHSARVMRVITWNRSFRGVSNGDAAKDDIDSEEYETHATVLDKLLAWEKKLYEEVKQGELMKFEYQRKVAILNKQKKRGASAESLEKTKAAVSHLHTRYIVDMQSMDSTVSEVNHIRDAQLYPKHDLVALIIRMANMWENMCIHHDSQLKIVTDLKSLDIFQAPKETTKHHYDRTVQLEKVIQEWHLQFEKLVTQQKHYIKALNSWLKLNLIPIESNLKEKISSPPPSVVFSSRI

SEQ ID NO: 244613 - protein, 51 aa, Glycine max
  Clone ID: PAT_MRT3847_62912C.1.pep
PRAEFGTRQRWVIESTGPYAEVKVIKDSDHMVMFSKPKKLSFELLKIAYKY

SEQ ID NO: 244614 - protein, 93 aa, Glycine max
  unsure (1)..(93): unsure at all Xaa locations
  Clone ID: PAT_MRT3847_62913C.1.pep
QQQVRLSHQRXXXXLREMILFSRAQHPKIEAVKCSNLSNAGVFPDDTVIRPVAIGTALITHAGNEPGQQKGCHRQRCWTSCIALTRAAPPXAT

SEQ ID NO: 244615 - protein, 170 aa, Glycine max
  unsure (1)..(170): unsure at all Xaa locations
  Clone ID: PAT_MRT3847_62914C.1.pep
VYEGERTRANDNNLLGFFSLLGLVPAPRGHPVDVCFTIDVNGILSVSAEETTTGYRNEITITNDQKRLSAEQIKRMIHXAEKYQVNDMKFMKKANPMNALDPYVYKMRNALNNKNISSKLCFQERKKIKSVITKVTDLLEGDNQRDKIEVFEDHLNELVNLFDRVIGKFA

SEQ ID NO: 244616 - protein, 122 aa, Glycine max
  Clone ID: PAT_MRT3847_62915C.1.pep
MEGMAPNSCARPVVEKKARPQEQLNCPRCNSTNTKFCYYNNYSLTQPRYFCKTCRRYWTEGGSLRNVPVGGGSRKNKKVSVTASSSPKVPDLNPPNHSAISSHNPKIMHGGQDLNLAFQPWK

SEQ ID NO: 244617 - protein, 67 aa, Glycine max
  Clone ID: PAT_MRT3847_62916C.1.pep
GRAENRVPPAFFKRVIYLGVGPGDERGIVANYLQGALNRGALGKKAPRRPDALRAVEASCGLYMTIN

SEQ ID NO: 244618 - protein, 96 aa, Glycine max
  Clone ID: PAT_MRT3847_62917C.1.pep
PSPNGKPVVTCKTIFGLPNIPFFVGEKPFPLPPEQFFFKTGKGLPKVSPRGFFAFNIPPPRGPLWIFGDVFLRGYPPVFFYGTPQVGFPKVPHQNF

SEQ ID NO: 244619 - protein, 49 aa, Glycine max
  Clone ID: PAT_MRT3847_62918C.1.pep
LKIKSHLVVKVVGLFFYPLLKFVCISLAIWSETRERETTVDSFMDDVTL

SEQ ID NO: 244620 - protein, 63 aa, Glycine max
  Clone ID: PAT_MRT3847_62919C.1.pep
RGAGGSRFYLFHHREPRFFTRGCWCRHHYTIGVWAWFHIVQSLFNCNRTREVKSSPNLRFLRQ

SEQ ID NO: 244621 - protein, 103 aa, Glycine max
  unsure (1)..(103): unsure at all Xaa locations
  Clone ID: PAT_MRT3847_6291C.1.pep
SYLIKTQSADAVPTGTGQLNGNPEGIGTKHFRVMGASMTSAGSHKIPRXEEYATNQLLPLILICASTGALMQEPNLNLIQMAKIPSASYDYPKNKKIFYVSIL

SEQ ID NO: 244622 - protein, 100 aa, Glycine max
  unsure (1)..(100): unsure at all Xaa locations
  Clone ID: PAT_MRT3847_62920C.1.pep
EPNKPLAEQDVHVAPSQAGEGRVQILFTDLCHTDAYTWGGQDPXTPLPXILAHETVGIVNSVEKGHTNDHPGDHDNTCYHADYWECKTCNSWETNLCRKD

SEQ ID NO: 244623 - protein, 132 aa, Glycine max
  unsure (1)..(132): unsure at all Xaa locations
  Clone ID: PAT_MRT3847_62921C.1.pep
LLLQVLITAIHTTVHTLEDTQVDVIVGSLFVSTFQITLQINLNVNKFYXKKFGQKNGFLSKLHPQYKKVSKNGSKDHPNEQSLAKSIFIGENIDNKPKKHSDSYHKAFARTSTRFMDKFIDGAIFETVFTID

SEQ ID NO: 244624 - protein, 72 aa, Glycine max
  Clone ID: PAT_MRT3847_62922C.1.pep
SIPFFSLYFPFSWFAWVLRIQNVGTYTIHSHKRYTLFFATLDLSLYLFHSLEPSFFSINLFPTFSEWRSVRA

SEQ ID NO: 244625 - protein, 146 aa, Glycine max
  Clone ID: PAT_MRT3847_62923C.1.pep
KQLASMVEKASIDDVMKVLIASRKQEMQQLWSTCSHLVAKSGLPPEVLAKHLPIDVVAKIEELRLKSSLARRSLLPGHHQHHHDLTPGMEDQKIQRMRRALDSSDVELVKLMVMGEGLNLDEALALHYAVENCSREVVKALLELGA

SEQ ID NO: 244626 - protein, 50 aa, Glycine max
  Clone ID: PAT_MRT3847_62924C.1.pep
FGYKLHGYLSGKQVIRVHQYLTKPFGPSRFLMVEVSWWIPPRSCSLNYWV

SEQ ID NO: 244627 - protein, 128 aa, Glycine max
  unsure (1)..(128): unsure at all Xaa locations
  Clone ID: PAT_MRT3847_62925C.1.pep
QHLYSQLSGRLRSEEDEFEILSSLHPSPAVCGFPTEEAQLLIADAEVFDRXGMYAGPVGWFGGGESEFAVGIRSALVEKDLGAFIYAGTGIVEGSNPYLEWDELELKTSQFTKLLKLDLLRRQKVDCK

SEQ ID NO: 244628 - protein, 51 aa, Glycine max
  Clone ID: PAT_MRT3847_62926C.1.pep
NYRCPSIIIEENITKALSVLKFHDNITSIISSLCMLDCNLVFSYHIQNMRK

SEQ ID NO: 244629 - protein, 71 aa, Glycine max
  unsure (1)..(71): unsure at all Xaa locations
  Clone ID: PAT_MRT3847_62927C.1.pep
HIVPLTQNXDFXCLFQLLTLHRKPLEHHNFWLSLYTSVIPKTVYTYHHTELIECAIFRVSFITDTKTWLVI

SEQ ID NO: 244630 - protein, 87 aa, Glycine max
  unsure (1)..(87): unsure at all Xaa locations
  Clone ID: PAT_MRT3847_62928C.1.pep
RKXGRGKYSEVFEGVHXTDGEXXVIKILKPXXXXXXXXEIKILXDLCGRAHXXKLLDIVRDXQSXTXSLIXEXVNNTGFKVLYXTLS

SEQ ID NO: 244631 - protein, 155 aa, Glycine max
  Clone ID: PAT_MRT3847_62929C.1.pep
STKLIQNCINSQSMTSNIGSKSFPLPLESTNLNDNHKKFFSVLPYFGVINMIITSGTTIYRAYNNGDIQMIAFVTFMFFGTFLLDYWIRLYNKMPPHDQSYEKLKLKIRIWVLVSSIMFGFACEFSTFMGFYGSITFFGVVISGNTFLFYVYFIW

SEQ ID NO: 244632 - protein, 94 aa, Glycine max
  Clone ID: PAT_MRT3847_6292C.1.pep
KFFPLFRKGKKGEKVFFSFLQKTSGLIPPFFWEQNPFIFFTSKGGGPPKVPVSSHLGGGTPKKRFFFYLKKGFRGIQFFTSNPFGLGFGKFYKT

SEQ ID NO: 244633 - protein, 460 aa, Glycine max
  Clone ID: PAT_MRT3847_62930C.1.pep
RIGNGSSGPQNVNVALSVDNQWVNGGQVEVADDRWHEIGGSFRIEKQPSKVMVYIQGPASGVDLMLAGLQIFAVDRHARFKYLRRQTDKIRKREIILKFSGLDSIGNLGTLVRVKQVQNDFPIGSCISRSNIDNEDFVDFFVKHFNWAVFGNELKWYWTEPHQGNLNYKDADEMLDLCQKNKIDTRGHCIFWDVDNTVQQWIKSLNKTDLMTAVQNRLNGLLTRYKGKFKHYDVNNEMLHGSFYQDRLGKDIRANMFKTAHQIDPSATLFVNDYHVEDGCDTRSSPEKYIQHILDLKEQGAPVSGIGIQGHIDSPVGPIVCSALDKMGTLGIPIWFTELDVSSTNEYVRADDLEVMLRESLAHPAIDGVMLWGFWELFMSRENSHLVNAEGELNEAGKRYLALKQEWLSHSHGYVDEQGQFSFRGFSGTYNVEVVTLAKKVTKTFVVDKGDSSLVVSIDL

SEQ ID NO: 244634 - protein, 67 aa, Glycine max
  unsure (1)..(67): unsure at all Xaa locations
  Clone ID: PAT_MRT3847_62931C.1.pep
RTFVNTNVPNVIIIRSLHTTATKNIGNNRYRMKRVNRHLYPTLXNTSGRSIAMKKAXKLCLDKNNPI

SEQ ID NO: 244635 - protein, 92 aa, Glycine max
  unsure (1)..(92): unsure at all Xaa locations
  Clone ID: PAT_MRT3847_62932C.1.pep
QLLAYGKKGALNVGGAIVLPKGYEWAPPDSISPDIREKIGSLSFQNYRPTNRNIRVXGPAPGLKYYDITFPIRYPDSTTTRNVHFLKYPMFV

SEQ ID NO: 244636 - protein, 41 aa, Glycine max
  Clone ID: PAT_MRT3847_62933C.1.pep
TNKENQDAKLLSNTDLIDHHSIFFLIENILGHLLLSGYEAN

SEQ ID NO: 244637 - protein, 173 aa, Glycine max
  unsure (1)..(173): unsure at all Xaa locations
  Clone ID: PAT_MRT3847_62934C.1.pep
GLRTRDLSRILAEFKISWAMKRYHINIVMIGHVYFGNVTTTVNLIYKLGGTDKRVIERPEKEAAVMNTKSFKYAWVLDKLKAERERXSPLICALRKFETTMNYCTVIDAPGHRDFIKNMITGTAKTTWAVLIIDSTTGGFEAGISKDGQTREHALLAFTLGVKQMICCCNKMD

SEQ ID NO: 244638 - protein, 64 aa, Glycine max
  unsure (1)..(64): unsure at all Xaa locations
  Clone ID: PAT_MRT3847_62935C.1.pep
HXSXQLHKTTXXDTHLFLIAALYHTLSSISMSFXITLPPFPLSHKNNTFSLLLPIYFFPLIFKK

SEQ ID NO: 244639 - protein, 80 aa, Glycine max
  Clone ID: PAT_MRT3847_62936C.1.pep
LHPITRQEDIVPGIENHTAGRDKDAYNLWRNWGEGYKRQPTMKYAASTKPKTPSLPDKHRQIGTRLLDAYKTFSVFYFGA

SEQ ID NO: 244640 - protein, 42 aa, Glycine max
  unsure (1)..(42): unsure at all Xaa locations
  Clone ID: PAT_MRT3847_62937C.1.pep
FGVLSFIFWTFTIIGLFXYVFIVMSTDDNGEGVYKGWFCLEE

SEQ ID NO: 244641 - protein, 259 aa, Glycine max
  Clone ID: PAT_MRT3847_62938C.1.pep
MAEEPESTVTTGAADESLLDKITEKLHGHDSSSSSSPDSDSDSEKTVTSSVKDKVFRLFGRERPVHSVFGAGKPADVLLWRNKKISAGMLGGATAVWVLFELLEYHLLTLVCHILILLLAVLFLWSNAHTFIHKSPPRIPEFHLPEEPFLQVASALRIEVNRGFAVLHSIGSGRDLKKFLVVIASVWILSIVGNWCNFLTLFYITFILLHTVPVLYEKYDDKIDPLAEKAVIEIKKQYVVFDAKVLSKIPLGPLKAKLS

SEQ ID NO: 244642 - protein, 91 aa, Glycine max
  Clone ID: PAT_MRT3847_62939C.1.pep
MLPASSYNKLTDNGAATPAGLISASIVHAFDLFVVGSVGANISGGHVNPAVTFCAFVYGIISLLRRIVYGICQLLAYIEGCLLLDLYTAYP

SEQ ID NO: 244643 - protein, 134 aa, Glycine max
  Clone ID: PAT_MRT3847_6293C.1.pep
TSAPDHDKGARESTKKPDPGHRPRGRERDPPPRQAHPKGASNRKRRERDPDHKGKKAPEPHGDGKNHGPTRKKGEKGKRRPAPGEGEKRTPSPGTSAEEAHNKPRAEPEKRAPTQAGTEGPTEEKPPGHKRTDK

SEQ ID NO: 244644 - protein, 257 aa, Glycine max
  Clone ID: PAT_MRT3847_62940C.1.pep
MAEEPESTVTTGAPDESLLDKITEKLHGHDSSSSSSSDSDSEKTVTSSVKDRVFRLFGRERPVHSVFGAGKPADVLLWRNKKISAGVLGGATAVWVLFELLEYHLLTLVCHILILLLAVLFLWSNAHTFIHKSPPRIPEVHLPEEPFQQVASALRIEINRGFAILHSIGSGRDLKKFLVIIAGVWILSIVGNWCNFLTLFYITFVLSHTVPVLYEKYDDKIDPLAEKAVIEIKKQYAVFDAKVLSKIPLGPLKAKLS

SEQ ID NO: 244645 - protein, 140 aa, Glycine max
  Clone ID: PAT_MRT3847_62941C.1.pep
PSSPSNHPPRPSRTLRTVFTALFNRTIRQRRHVFVHRVTMASFAETVRFCFPATGASSSPVDLPLQSGPGARDRPVRRPDAVNWGEQEEDDLSRNVVKPTLAAMARSYAPDWILAAVLWGVLAVLNRSGGHKREFSLNDI

SEQ ID NO: 244646 - protein, 122 aa, Glycine max
  unsure (1)..(122): unsure at all Xaa locations
  Clone ID: PAT_MRT3847_62942C.1.pep
MLFAAFEFFPIYRLELVQFCTVWVVLFLXRQILLIKVQEKFKSASHFYMSVWWHLSVSSWDTVYTLDTWPINHLQEATDILNFLEFVNSKSLGIXRPYIYECNSRGSVHLRVSDIRFNLSSP

SEQ ID NO: 244647 - protein, 113 aa, Glycine max
  unsure (1)..(113): unsure at all Xaa locations
  Clone ID: PAT_MRT3847_62943C.1.pep
SQSLFALLSLTHSSSSSSGGFLSRTRTKIPEILHIQGGQCRNQIGTQFLEVVFPEHRIHSTGRYQRDHQVELEPINLYYNETRCGKVLPXAGLIDLEPGTIDRVRSXPYGKIF

SEQ ID NO: 244648 - protein, 59 aa, Glycine max
  Clone ID: PAT_MRT3847_62944C.1.pep
LVTCVGNKQHVLDRLIGYYVDIDTLFYITSIYSPYDLSRHCDCNVTGIDGCAEPAYSIQ

SEQ ID NO: 244649 - protein, 79 aa, Glycine max
  Clone ID: PAT_MRT3847_62945C.1.pep
GGKKKIYFFYGFPMLSLKLLYKTCICINIFPSHFPLVIFQCRAKKIKNPQKGVQKKNPKNIYKLSFKKIKMAFFIPGDV

SEQ ID NO: 244650 - protein, 115 aa, Glycine max
  Clone ID: PAT_MRT3847_62946C.1.pep
QKLTIVRLHFEGQVVPWFQMLQKANLIPTWAALAQAIEKQFGPSQFDSPRAQLFKLSQTNSVADYYTKFMTLANRVEGLTEPALLDCFISGLRDPIRRDVIAQSPPPFCRLLAAV

SEQ ID NO: 244651 - protein, 71 aa, Glycine max
  Clone ID: PAT_MRT3847_62947C.1.pep
MTFYKRINILPVHEMRAMAMNINLNQLHVKPSQIPFGFPSSWYFYYHYTVFPTIHWWRRMEPCCWGGRTEI

SEQ ID NO: 244652 - protein, 55 aa, Glycine max
  Clone ID: PAT_MRT3847_62948C.1.pep
FGEMGTPDIVDDKNNNKNNRTTYVKMKAPRDNVVLGIFRTRGRPGRSGPGPAGVP

SEQ ID NO: 244653 - protein, 373 aa, Glycine max
  Clone ID: PAT_MRT3847_62949C.1.pep
MQCNRCYKHKSFLNFLTALILHKFSQLGLQNLFVIHSRRGGSIQKMYHSEWLDTIDSEPDVISMLLLPLTSLWNRSGRNGFVSHAINLYHRYKPPIEDLHQFLEFQLPRHWAPVASEISLGSHHKHQVNTWIRFSILGPRLYINTIPVDVGNRPVVGLRLQLEGRSSNRLAIHLQHLASLPKSLSVSDNSNAYLSCDSYNCNLHKKVKWNSLSYVCTAPVESDDSVSIVTGAQLQVENKCLFLRLCFSKVIGVTLRKAPEWDQSPSLGQFSIKTWGILTTFISKAEQRDHPKPGDVTIGSSIYSAARLAPVRTPKLLRFVDTTEIMRGPVDTPGHWVVSGARLHVQDAKIYLHVKYSLFSFAMQTETGASQVL

SEQ ID NO: 244654 - protein, 37 aa, Glycine max
  Clone ID: PAT_MRT3847_6294C.1.pep
LESGTSSKSVFKKENIRLWNTISLAKVNLSNLAGPFH

SEQ ID NO: 244655 - protein, 211 aa, Glycine max
  Clone ID: PAT_MRT3847_62950C.1.pep
FIAREENMKQDSVQAPNCDDFRHVSSTAKFKRQDAPNWKAYRPLVNSISPMSVVRFIIRALSFVCEVLLLLLAVATRLVKIIGVALTAYGGSGKKKVNSSKQGRDHLSHKEGTTNIHNMHKGDQSLPNTSAVTTNTSDDQILRSAGTEKHSSSVNNGTEDAFINSGGGHQYFKELLVPLLPLQGACLPLATCTPVLNSASLKYLKTGFRKS

SEQ ID NO: 244656 - protein, 58 aa, Glycine max
  Clone ID: PAT_MRT3847_62951C.1.pep
RSRLSKIEMNLSIFAMMLNTSNLWIILERHNNVLYTVIAKSSLGYPVEYLAELTVCLL

SEQ ID NO: 244657 - protein, 283 aa, Glycine max
  Clone ID: PAT_MRT3847_62952C.1.pep
INVCSAQERLEYLLSIGVKQRDVRRILLRQPQILEYTVENNLKSHVAFLRGLGIPNSRIGQIIAAAPSLFSYSVENSLKPTVSYLIEEVGIKEKDLGKVIQLSPQILVQRIDISWNTRCMFLTKELGAPRDSIVKMVTKHPQLLHYSIDDGLLPRINFLRSIGMKNSDIVKVLTSLTQVLSLSLEENLKPKYLYLVNELNNEVQSLTKYPMYLSLSLDQRIRPRHRFLVSLKKAPKGPFPLGSLVPTDECFCQQWAGTSLDRYLAFRQRLLLKKFAEKYERKM

SEQ ID NO: 244658 - protein, 44 aa, Glycine max
  Clone ID: PAT_MRT3847_62953C.1.pep
KVHSCFNVFKGYPYCNWKSCYRKQPDKEFGTIAHARQSFKLFSP

SEQ ID NO: 244659 - protein, 254 aa, Glycine max
  Clone ID: PAT_MRT3847_62954C.1.pep
KHHWDGSTSFNEKKANSIKTIKSAQSQPRSKQLPKENSPSSVKNSGSVSPRMQQKNLESEKQSRLPTPPSDSNNPRRQSCKQTTESGSPSRKLRPKVANSWYSDDRLSETSNELRSLSSQWDEISLQSDSITVDSKMDIEVTSSLQSDDTIDSQFRSMKANEHLVSGSTHKKSTLRWDEDESIAEPATDASDHPSLDSVDDVSVYKYDMPSPVKNGFFVNNTINRKRFQSVDCLIQKLRQLNSSHDETRIDYIA

SEQ ID NO: 244660 - protein, 83 aa, Glycine max
  unsure (1)..(83): unsure at all Xaa locations
  Clone ID: PAT_MRT3847_62955C.1.pep
XRNXARXIXKLXEYDAXNXXXIAKDSXISXKXEXQXNXIXXXXXGQYYSXIXQXXTFXDKXXTXXXXMMMXXLXXXKXTNXXX

SEQ ID NO: 244661 - protein, 100 aa, Glycine max
  Clone ID: PAT_MRT3847_62956C.1.pep
CANVKKLEEVRAILGNSMAFQSLKLDLPELQGEPEDISKEKARMAAAQVNGPVLVEDTCLCFNALKGLPGPYIKWVLHKLGHEGLNSALGGYHDKSADPL

SEQ ID NO: 244662 - protein, 60 aa, Glycine max
  Clone ID: PAT_MRT3847_62957C.1.pep
SSFSFLSPFPSVNIWSSHSLSSHYGRSTQASPNCVSEKEFLLQFLSFQGPPLLIRTPPPI

SEQ ID NO: 244663 - protein, 213 aa, Glycine max
  Clone ID: PAT_MRT3847_62958C.1.pep
MDPSSVNGFYSFLTLGIDDLERVFLSTNFMSIQFLQRVVSVLRSFHTQLTLLVQKLQLPVGDKWLDEYMDESSKLWDACHLIKSGISAMDSYYSAALNITSSLDSHRHITPQVSRQVIRAIAGCRREAVGLEEENRALMEARIEALSLRFQERLSIESKLNGFNGFRGVLYAMRNVSSLLLMVLLYGLVYCYGDSSDFVLGGCGYEGCLFLGS

SEQ ID NO: 244664 - protein, 177 aa, Glycine max
  Clone ID: PAT_MRT3847_62959C.1.pep
HQVNVTVIAATNRPDKIDPALLRPGRFDRLLYVGPPNEVDREEIFRIHLCKIPCDSDVSLKELARLTDGCTGADISLICREAAVAAIEERLDASVGSREHLKMAIKQIQPSEVHSYPKLSTKFQRAVHCCDIKDEFNDMQCDSRSTQFNIWKFIKSCTSFLYQIPFVIFNLRTAQSS

SEQ ID NO: 244665 - protein, 170 aa, Glycine max
  unsure (1)..(170): unsure at all Xaa locations
  Clone ID: PAT_MRT3847_6295C.1.pep
LSLGCKKYEFLTVDDYSRYTWVYFLAHKHEXFEIFYKRVQNEKGFCLSFIRSDHGTKFENTKXNHFCERNGIFHNLSXPRTPQENRVVERKNRTLQEKARTILFTTCFVQNKILIRPMIKKTPYELWKGRRHIISYFHPFGCKCFILNTIDQLTKFDSMVDKGIFLGYSD

SEQ ID NO: 244666 - protein, 170 aa, Glycine max
  Clone ID: PAT_MRT3847_62960C.1.pep
PETSFVKTWRFRNEGDCAWPEGCQLIFVSKLNGDQMGAPAAVPVASAGVGQEVDVSVPMVAPATPGRYVGFWRLCTADGQKFGQRVRVLVQVTSTSSSSSDSSSSSEDEAAAMAPLLLQMEQMGFTNKEKNARVLKKHQGNLASAVACLRKKQQMKAEKAAQKAAEKAEK

SEQ ID NO: 244667 - protein, 63 aa, Glycine max
  unsure (1)..(63): unsure at all Xaa locations
  Clone ID: PAT_MRT3847_62961C.1.pep
CLSTCPPFXKEKNELVHTSNAAYLKRHDRNMHRLLQPILHTSLFRSHTYKHLKHSKGSIIDHS

SEQ ID NO: 244668 - protein, 90 aa, Glycine max
  Clone ID: PAT_MRT3847_62962C.1.pep
PGSARGSGGIRACAVRVDPSVPPFWFPVGSFTCPLSFFGLGSNFLWVGLVPFGGWDSLGGAVFFFWNKRVGLPNERSLKKKTKVGDTKKR

SEQ ID NO: 244669 - protein, 94 aa, Glycine max
  Clone ID: PAT_MRT3847_62963C.1.pep
VRTSTPLSACSPVEVCPSHSRAGSPPSSSRHSIRRPDLVEQVPCLQPVLYPRVPIVWCKSAQTNVAPSPPINSALQIRHSLHVCHVLRADTIPA

SEQ ID NO: 244670 - protein, 225 aa, Glycine max
  unsure (1)..(225): unsure at all Xaa locations
  Clone ID: PAT_MRT3847_62964C.1.pep
MLRQVLRQCYSLHRPAVNVYAVPRFYRRRLCSSSSSSESTAATISIDRSSLYNPPEHSHHPTSDSELVKHLKGIIKFRGGPISLGEYMSEVLTNPKAGYYINRDVFGAEGDFITSPEVSQMFGEMVGVWVMCLWEQMGQPQGVNLVELGPGRGTLMADLLRGASKFKNFIESLHVHLVECSPALQKLQHQNLKCTDEENASQDTDTRTARSLXGTPVSWHATLEQ

SEQ ID NO: 244671 - protein, 40 aa, Glycine max
  Clone ID: PAT_MRT3847_62965C.1.pep
PRVRPRVRPRVRITYVLFVRVDNVFHYFCNLCMIKACSEN

SEQ ID NO: 244672 - protein, 766 aa, Glycine max
  Clone ID: PAT_MRT3847_62966C.1.pep
MQNSSCFLCSTQRKMEGPSEIGLIGENFDAGLMGRMRDDEYESRSGSDNFEGASGDDQDGGDDQPQRKKRYHRHTPHQIQELEAFFKECPHPDEKQRLDLSKRLGLENKQVKFWFQNRRTQMKTQLERHENIMLRQENDKLRAENSLIKEAMSNPVCNNCGGPAIPGQISFEEHQIRIENARLKDELNRICVLANKFLGKPISSLTSPMALTTSNSGLELGIGRNGIGGSSTLGTPLPMGLDLGDGVLGTQPAMPGVRPALGLMGNEVQLERSMLIDLALAAMEELLKMTQAESPLWIKSLDGEKEIFNHEEYARLFSPCIGPKPAGYITEATRETGIVIINSLALVETLMDANRWAEMFPSMIARAINLDVISNGMGGTRNGALQVMHAEVQLLSPLVPVRQVYGCKKTTEGAEGVWAVVDVSIEIGHDAANAQPSISCRRLPSGCIVQDMPNGYSKVTWLEHWEYDENVVHQLYRPLLSSGVGFGAHRWIATLQRQCECLAILMSSSISSDSHTALSQAGRRSMLKLAQRMTSNFCSGVCASSARKWDSLHIGTLGDDMKVMTRKNVDDPGEPPGIVLSAATSVWMPVSRQRLFDFLRDERLRSEWDILSNGGPMQEMVHIAKGQGHGNCVSLLRANAVNANDSSMLILQETWMDASCSVVVYAPVDVQSLNVVMSGGDSAYVALLPSGFAILPDGHCNDNGCNGSLQKGRGSDDGSGGSLLTVGFQILVNSLPTAKLTVESVDTVNNLISCTIQKIKAALRVA

SEQ ID NO: 244673 - protein, 409 aa, Glycine max
  Clone ID: PAT_MRT3847_62967C.1.pep
AEMFPSMIARAINLDVISNGMGGTRNGALQVMHAEVQLLSPLVPVRQVRFIRFCKQHAEGVWAVVDVSIEIGHDAANAQPVMSCRRLPSGCIVQDMPNGYSKVTWLEHWEYDENVVHQLYRPLLSSGVGFGAHRWIATLQRQCECLAILMSSSISSDDHTALSQAGRRSMLKLAQRMTSNFCSGVCASSARKWDSLHIGTLGDDMKVMTRKNVDDPGEPPGIVLSAATSVWVPVSRQRLFDFLRDERLRSEWDILSNGGPMQEMVHIAKGQGHGNCVSLLRANAVNANDSSMLILQETWMDASCSVVVYAPVDVQSLNVVMSGGDSAYVALLPSGFAILPDGHCNDNGCNGTLQKGGGGNDGGGSLLTVGFQILVNSLPTAKLTVESVDTVNNLISCTIQKIKASLRVA

SEQ ID NO: 244674 - protein, 45 aa, Glycine max
  Clone ID: PAT_MRT3847_62968C.1.pep
KDNGSNNLSLKTFVKKGGGIPIETLRLQLSWIKTFGCWLLFRIYY

SEQ ID NO: 244675 - protein, 53 aa, Glycine max
  Clone ID: PAT_MRT3847_62969C.1.pep
HQASPFNNLDFLLENATDTQTYTKKLLSSASNNYKQTNSDSIEIFYHSPKDFI

SEQ ID NO: 244676 - protein, 106 aa, Glycine max
  Clone ID: PAT_MRT3847_6296C.1.pep
HGSAQGSAHGSVEKFFSAPAWFKGSTFLLIRLSLSVAAGGSPMGSPAAQTGQLQLRVQGPPQSPLEVPKEEQAKSHSPGFLSPSYFGDLSCLIRKGVFYPSEPPLC

SEQ ID NO: 244677 - protein, 115 aa, Glycine max
  Clone ID: PAT_MRT3847_62970C.1.pep
TQPVRQVQLSWKSPRGNLSANGAYNSSIGGAINTTAPAYVAWISQLNVTYTPLNVTGNNTGTTIQPGGVVFNNTNDGIVNGTMFIGLTDTNMYVTPYNLSLLNDHLFAFGLYQTD

SEQ ID NO: 244678 - protein, 34 aa, Glycine max
  Clone ID: PAT_MRT3847_62971C.1.pep
CIFIRYQSIVDVPGCCVRHQRSITFDVQQAGKRK

SEQ ID NO: 244679 - protein, 99 aa, Glycine max
  unsure (1)..(99): unsure at all Xaa locations
  Clone ID: PAT_MRT3847_62972C.1.pep
PTHASLTSIADAINYLPISSSNVSSILKGRKTASTSYSFILAFDSFTVFLTFSPSSNASLPXFTNIFSPTYTTDELLXPQIPNIFSLLFPNTTSPLQFF

SEQ ID NO: 244680 - protein, 131 aa, Glycine max
  unsure (1)..(131): unsure at all Xaa locations
  Clone ID: PAT_MRT3847_62973C.1.pep
MCSMLKVFAVIELVLLIVYPGAHGLSRDDFPPGFGFGASTSAYQVEGAANEDGRKPSIWDTFYQAGNGNMYAGKXDAVCDQYYKYKEDVQFMADTGLXVYRSAIYWPRVIPYGRGPGNSMGPQCFNNLFNE

SEQ ID NO: 244681 - protein, 135 aa, Glycine max
  Clone ID: PAT_MRT3847_62974C.1.pep
TQTLPFPLSSPTSPSVTYTYSSSSSASMALTASLAHNSFLKIPTAIHSEASPLCSSFMGSPPTLSRSSTLPGNQSLSRNQFVVFARKISGLEEAMNIRRDRELQVVTKFKKRPPLRCGRVSPRLPVPDHIPRPLM

SEQ ID NO: 244682 - protein, 137 aa, Glycine max
  Clone ID: PAT_MRT3847_62975C.1.pep
AEVATEVKLFNKWSYDDISVAADISLEDYIAVKGKAATFLPHTAQRYQKKRFRKAQCPITERLVNALMRKGRNSGKKLKATRIVKHTLEIIHLLTDKNPLQVVVEALIKSGPREDSTRVGSAGVVRRQGVDVSPFRR

SEQ ID NO: 244683 - protein, 382 aa, Glycine max
  Clone ID: PAT_MRT3847_62976C.1.pep
MDRNGPKIKSTILHHLYEKQRQSPYYDNLCRPVSDLLPFIANGIRGVTTNPAIFERAISSSNAYDDQLRELVGAGKDIESAYWELVVKDIQDTCKLLEPIYNETDGEDGHVSLAVSPKLANDTKGTIEAAKWLHNMVGSPCVYMKIPATDESISSMKEVISLGISVNATLIFCLPKYEAVIDAYLDGLESCGMTDLSKVSSAAAFYISRVDVTLDKKLEQIGTTEALDLKGKGAVAQAVLAYQLYQKKFSGPRWERLENRGAKKQRLMWASTNVKNPSYPDTFYVNSLIGPDTISTLPVQALQAFMDHGILSRTLDAKVSEAQDIYNAIEKLGIDWSSVGSELEHEVLDSFTKSFDNVLECMQKKAKLRDFSRAYEPCFQDN

SEQ ID NO: 244684 - protein, 225 aa, Glycine max
  unsure (1)..(225): unsure at all Xaa locations
  Clone ID: PAT_MRT3847_62977C.1.pep
MDRNGPKIKSTILHHLYEKQRQSPYYDNLCRPVSDLLPFIANGIRGVTTNPAVLTTQFFLHLKTLLFSIWFYFYLVSVCCVLTSQIFERAISSSNAYDDQLRELVGAGKDIESAYWELVVKDIQDTCKLLEPIYNETDGEDGHVSLAVSPKLANDTKGTIEAAKWLHNMVGSPCVYMKIPATDESISSMKEVISLGISVNATLIFCLPXYEAXIDAYLXGLESCA

SEQ ID NO: 244685 - protein, 94 aa, Glycine max
  Clone ID: PAT_MRT3847_62978C.1.pep
HIFLEHNFSIIALTVWPIYMMLGNACANPQLQFKIFTHISYICLLYQISHIEILTHTHICLLYQISDVEILTHTHICLLYHISDIEILKLMLSD

SEQ ID NO: 244686 - protein, 79 aa, Glycine max
  Clone ID: PAT_MRT3847_62979C.1.pep
CHLLAQVSQCCHGSIAHRAGSSKTPFLCINIPNTSNIFDCNKLHSFCDHPKLPNPRNMPGACPEPGTAAAHPGYQNEAE

SEQ ID NO: 244687 - protein, 63 aa, Glycine max
  unsure (1)..(63): unsure at all Xaa locations
  Clone ID: PAT_MRT3847_6297C.1.pep
CELLRRTQTWGLWEAFPHWLRTLFFXHEIDLSLRRLQYAGNTXLGNVVATGGYHEDMIPSVGF

SEQ ID NO: 244688 - protein, 128 aa, Glycine max
  unsure (1)..(128): unsure at all Xaa locations
  Clone ID: PAT_MRT3847_62980C.1.pep
ENVLNRLMSHQFGWVFNTPVDVVKLNIPDYFTVIKHPMDLGTVKKRITSGEYSNPMDFAADVRLTFENAMFYNPAGNDVHXMAETLSKFFETRWKAIEKKIPAIDSVASEPSRPTHVETEISDRVPPP

SEQ ID NO: 244689 - protein, 122 aa, Glycine max
  Clone ID: PAT_MRT3847_62981C.1.pep
YRMTSAAGTFCYIDPEYQQTGMLGVKSDIYSLGIIFLQLLTASPPMGLTHHVGRAIEKGTFADMLDPKVSGWPVEDALSLAKIGIRCAELRRRDRPDLGKEVLPELNRLRELAENNDTSFNV

SEQ ID NO: 244690 - protein, 174 aa, Glycine max
  unsure (1)..(174): unsure at all Xaa locations
  Clone ID: PAT_MRT3847_62982C.1.pep
MHNMSTLVFFILLSTLLSVCYGGRDLVDKNPFTEQAYVARYWDKHVGNNLPKPSFLLSKASPMSASDTASFANLAATNSLSTRLPEFCSAAHLLCFPEGRPSLEKXTGDSDFQTYNDGQNFTNYGAEFAGGLDTFKNYSNELFSTPVDDFRRYNRGGAGHEERISRYTGDTNVA

SEQ ID NO: 244691 - protein, 92 aa, Glycine max
  Clone ID: PAT_MRT3847_62983C.1.pep
GIGENHKPSSKGFFLSIPQFKKKTNRGFDPFFFFNLWVKPQISCWELLPPQYMQAFSHLFEVFISICPIVFNIPPKLIPKAFASKFSPLPGN

SEQ ID NO: 244692 - protein, 41 aa, Glycine max
  Clone ID: PAT_MRT3847_62984C.1.pep
FSRVEALATQTCMSPGGSTIHEVSHNYSDVTRKLAPVNQWQ

SEQ ID NO: 244693 - protein, 49 aa, Glycine max
  Clone ID: PAT_MRT3847_62985C.1.pep
LHMSLHVFLSMPSHVLALRAVHFSALFLTWHCKREVPSKIAPYATAKCP

SEQ ID NO: 244694 - protein, 439 aa, Glycine max
  Clone ID: PAT_MRT3847_62986C.1.pep
MLSLSVPPLNLKPITPNDLFLSSASPSPHRRYFVKPISAVLNSSSFKKPEQPLLPQHQVYQPFRPPPSPLPSQFGTLDIAGRIDILANRLGLWYEYAPLINSLIREGFSPPTIEETTGISGVEQNRLIVGAQVRDSLVHSKADPDLLAAFETGGAELLYEIRLLSASQRVAAARFLVENRCDGKAAQELARSMKDFPSRRGDKGWARFDYTLPGDCLSFMYYRQSREHRNPSEQRTSALEQALRVAETEAARNMILEELEGNGEEGDKVDAGEGAVRVPVVRLRIGEVAEASSVVVLPVSAAEEREILEAPYESRSQGVFGVVVAEKGWGKWVVLPSWDPVVGLGKGGVVVSFPDARVLPWKVNRWYKEEPILVVADRSKKEVGADDGFYLVNADGEGLKVERGSGLKEKGFTQSLGTVLLVVRPPKEENDELSDEDWE

SEQ ID NO: 244695 - protein, 99 aa, Glycine max
  Clone ID: PAT_MRT3847_62987C.1.pep
ARPKSRAYGPGQAKKNPFFGAPKIHSTGRGLTPGGGENPGGPPIKGPGKKPPFPPGGNKKKGPPRCPSQQGAPPKGKGAPPLDRPINRGGGGGSPPGPP

SEQ ID NO: 244696 - protein, 67 aa, Glycine max
  Clone ID: PAT_MRT3847_62988C.1.pep
SRPCDWFNMLEHLCSLKLQNQQFLSCNPLCLFLYVGVSHLILCGPIQSICREVGSSCPLLITVHLWT

SEQ ID NO: 244697 - protein, 60 aa, Glycine max
  Clone ID: PAT_MRT3847_62989C.1.pep
SKTRGLYNTSFLSHTGVCQHLLCLQPLLCSSECLSIISGVKGFFKEKFGLMEGSLKHSGC

SEQ ID NO: 244698 - protein, 85 aa, Glycine max
  unsure (1)..(85): unsure at all Xaa locations
  Clone ID: PAT_MRT3847_6298C.1.pep
PTMTTPPVPKPATDKPPVYKRPIEKPAVNKPIXEKPHQHKPAVEKPPXFKSAVEKSPAFEPPVEKAPXVKPAVAKPPTDKPPAEK

SEQ ID NO: 244699 - protein, 86 aa, Glycine max
  Clone ID: PAT_MRT3847_62990C.1.pep
CMSKVVSTETSLLLELLVLILEHKTQILQVRFFFYMVKLGFHLIIINSTIFYYHVWVVPVSIKNPPTIHPFCVLLKTFRQVVVRVG

SEQ ID NO: 244700 - protein, 57 aa, Glycine max
  Clone ID: PAT_MRT3847_62991C.1.pep
HHIKYNSARWKRLLLASIKNNPQCYDYSSEVRINHKQHMLQIGVRLKLLISQKYSFG

SEQ ID NO: 244701 - protein, 325 aa, Glycine max
  Clone ID: PAT_MRT3847_62992C.1.pep
MASNIQTLLVLVLATLGTFMIPSNAQLTPNFYKKVCPQALPIIRSVVHRAIIRERRIGASLLRLHFHDCFVNGCDGSVLLDDTHNFTGEKTALPNLNSIRGLEVVDEIKAAVDKACNRPAVSCADILAIAARDSVAILGGPHLWYGVLLGRRDARTASKDAANANLPPPFFNFSQLLSNFNSHGLDLKDLVALSGGHTIGFARCTTFRDRIYNDTMANINPTFAASLRKTCPRVGGDNNLAPLDPTPATVDTSYFKELLCKKGLLHSDQELYKGNGSESDKLVELYSRNPFAFARDFKASMIKMGNMKPLTGNKGEIRRNCRRVN

SEQ ID NO: 244702 - protein, 245 aa, Glycine max
  Clone ID: PAT_MRT3847_62993C.1.pep
MVVHVSSTPDEVGLAVSQLIFDLSKQAIATNGRFTVALSGGSLPKILNKGLQTVKNDVDFSKWFVYFADERCVSLDHDDSNYKACKAALFDFISVPESQIYSINASLTPVAMAVDYTKKLAKVWGNNILPRFDLILLGMGPDGHTCSLFPGHPLLEEKTLFVASIEDSPKPPPQRITLTYPVVNNAANVAFVATGAGKADLVPHMVGIEKRTPPLPAASVNPTDGVIYWFIDEDAAIKLSEEARM

SEQ ID NO: 244703 - protein, 59 aa, Glycine max
  Clone ID: PAT_MRT3847_62994C.1.pep
RTRGQGFKGSPKTQLLMSYAPHVLQFLDSLYMEKDMDDVVTKTAIGVLGDLADDQSFFC

SEQ ID NO: 244704 - protein, 314 aa, Glycine max
  Clone ID: PAT_MRT3847_62995C.1.pep
MAMEVTQILLNAQAVDGTLRKQAEESLKQFQEQNLPSFLFSLAGELANDDKPAESRKLAGLILKNALDAKEQHRKIEFVQRWLSLDPTLKSQIKAFLLRTPSSPSLDARSTASQVIAKVAGIELPHKQWPELIGSLLSNAHQLPAPTRQATLETLGYICEEVSPDVVDQDHVNKILTAVVQGMNSTEENNDVRLAAIKALYNALGFAQANFSNDMERDYIMRIVCETTQSPELKIRRAAFECLVAISSTYYEKLAPYIQDIFNITAKAVREDEEPVALQAIEFWSSICDEEIDILEEYGGDFSGDSEVPCFYFI

SEQ ID NO: 244705 - protein, 869 aa, Glycine max
  unsure (1)..(869): unsure at all Xaa locations
  Clone ID: PAT_MRT3847_62996C.1.pep
MAMEVTQILLNAQAVDGTLRKQAEESLKQFQEQNLPSFLFSLAGELANDEKPAESRKLAGLILKNALDAKEQHRKIEFVQRWLSLDPTLKAQIKAFLLRTLSSPSLDARSTASQVIAKVAGIELPHKQWPELIGSLXSNAHQTSCPYKTGNTWVLLTHMTEYTNSLRNGILEAYSGLFQGFKGXPKTQLLMPYAPHVLQFLDSLYNEKDMDDVVTKTAIGVLGDLADTLGSNAGPLIQQSVSSKDFLKECLSSDDHLIKXIGITAKAGREDEEPVALQAIEFWSSICDEEIDILEEYGGDFSGDSEVPCFYFIKQALSFLVPMLLETLLKQEEDQDQDEGAWNIAMAGGTCLGLVARTVGDDIVPLVMPFNEECIAGQEQERRYPMISAFTVTIEGPSPDKLVPLVNMALNFMLTALMKDPNNHVKDTTAWTLGRMFEFLHGSALDTPIITPANCQQIITVLLQSMKDVPNVAEKACGALYFLAQGYEDAASASSPLTPFFQDIVHALLTVTHREDAGESRLRTAAYEALNEVVRCSNDETAPMVVQLVPLIMMELHQTLENQKVSSDERQNELQGLLCGCLQVIIQKLGSSEPTKYHFMQYADQIMGLFLRVFASRSATAHEEAMLAIGALAYATGADFAKYMTEFYKYLEMGLQNFEDYQVCAITVGVVGDVCRALEEKVLPYCDGIMTQLLKDLSSNQLHRSVKPPIFSCFGDIALAIGENFEKYLLYAMPMLQSAAELSAHTSGADDDMTEYTNSLRNGILEAYSGIFQGFKGSPKTQLLMSYAPHVLQFLDSLYMEKDMDDVVTKTAIGVLGDLADTLGSSAGPLIQQSVSSKDFLKECLSSDDHLIKESAEWAKLAISRAISF

SEQ ID NO: 244706 - protein, 58 aa, Glycine max
  Clone ID: PAT_MRT3847_62997C.1.pep
HVLISIKRGSVVHAEDYCTDINYKQFYPIAVAATKLTSKRDFSGSRVTEQWLKTRTAQ

SEQ ID NO: 244707 - protein, 187 aa, Glycine max
  unsure (1)..(187): unsure at all Xaa locations
  Clone ID: PAT_MRT3847_62998C.1.pep
LGTQKINVSPDGEPRTGKNGPGQESGPPKREGNRNKGRGKQKTTPDRKRNPNRKPKNKRAETEKKKKRGAERKRGPNQKEGREGPRPQSRKQPPRPXEKRNPPPHGERRNNEPPHSGFSLTPRRKGKRGGPARPGQGRRKPANPGGPHQQKKKPAGGRGAKYKKKSSEAQGSPPKGMKPTQTPAQRR

SEQ ID NO: 244708 - protein, 101 aa, Glycine max
  unsure (1)..(101): unsure at all Xaa locations
  Clone ID: PAT_MRT3847_62999C.1.pep
QLREHDPTVSKQHTLSSVPFPTQFNFRNWLITIHTDHRSTFGIALYQQLSTKADRKSXAPATGRFKKPHRFCPRTVALRXIQDLQTSTELQILNLPFHRLV

SEQ ID NO: 244709 - protein, 485 aa, Glycine max
  unsure (1)..(485): unsure at all Xaa locations
  Clone ID: PAT_MRT3847_6299C.1.pep
SVLWEAKTSSKLLLKGGSVVYALHQKXAYFYVVEGIIXVAINPTITVGDEVTVIDATGKFVLPGTMNLKPDMTALNFTLKACRIDDLRKMPNGVNGIXSMNAFVMGYHGGNLAKISVHCLYKANNNWVYSESREMELIVKEKGINSFKFFMAYKGALMINDELLLEGFKKCKSLGALAMVHAENGDAVYEGQEKMIELGITGPEGHALSRPAVLEGEATARAIRLADFVNTPLYVVHVMSIDAMEEIAKARKSGQRVIGEPVASGLALDESWLWHPDFETAAKYVMSPPIRKRGHDKALQAALSTGVLQLVGTDHCAFNSTQKALGIDDFRKIPNGVNGIEERMHLVWDIMVESGQISVTDYVRLTSTECARIFNIYPRKGAILPGSDADIIILNPNSTFEITAKSHHSKLDTNVYEGRSGKGKIEVTIAGGRVVWENNELKVAPGTGRYIKMPPFSYLFNGIDKKDAFYLNSLQAPVKRAKSNT

SEQ ID NO: 244710 - protein, 40 aa, Glycine max
  Clone ID: PAT_MRT3847_629C.1.pep
HQYLIFNLLPRNSENHRLCYKAQTIYIQIKTLGRFVWYLI

SEQ ID NO: 244711 - protein, 50 aa, Glycine max
  Clone ID: PAT_MRT3847_62C.1.pep
HHVYTIEHYCILHVDQTNDQETQRNCKSLHVNSTFPLIRYRGHTHHSVGT

SEQ ID NO: 244712 - protein, 72 aa, Glycine max
  Clone ID: PAT_MRT3847_63000C.1.pep
RQAPKNELFLDRWYCSKKSGGCSSCKLFFCIFAPSKLGFTISLQAILLINVVHCKCKVITLFFILEKQLWCR

SEQ ID NO: 244713 - protein, 170 aa, Glycine max
  unsure (1)..(170): unsure at all Xaa locations
  Clone ID: PAT_MRT3847_63001C.1.pep
VFFADTAKSAPKKAAPATKGAKPPTSKLPAVPETVLKRRKRRDAAKASLVQAALKLRARRLQKKKVIFKRAELYQKEYLKKERDEIRLKRATVKKGDYYVPSEAKLAFVVRIRGVNKVAPKVRMVLQLFRLKQINNGVFVQLNKATVNMLRICEPYITXGYPNLKSVREL

SEQ ID NO: 244714 - protein, 45 aa, Glycine max
  Clone ID: PAT_MRT3847_63002C.1.pep
VYALRISSIYARYFERALRISSMKGYGSHANIHLSRLEHSQQPWP

SEQ ID NO: 244715 - protein, 99 aa, Glycine max
  Clone ID: PAT_MRT3847_63003C.1.pep
EFGTRVNHHLLPPLRHTTTFQPLQTRRLRQDLNCSNNLAITASATVKRSECTHAFIAESTTVAEQLKKESSGLTDLKFHFNWFSNSPLFLFLLMFLLWL

SEQ ID NO: 244716 - protein, 122 aa, Glycine max
  unsure (1)..(122): unsure at all Xaa locations
  Clone ID: PAT_MRT3847_63004C.1.pep
NSYQEAVGAAARWENXQVMECLKXNEELRGILDNLRMEQARGLPDSSKNGEHEIASLASMKGQLVSEQSRAEVLSAEVMQLSAQLEQVKQAYDGLARFYRPVLRNIESNLIKMKQDSSLAVR

SEQ ID NO: 244717 - protein, 433 aa, Glycine max
  Clone ID: PAT_MRT3847_63005C.1.pep
MEARHATLGRRTLEEIRQKRAAERLSKTSSGPDLTQVPSTSEIAGMSKSESANKLSETDLSALLSQLKGLQKKNTELEEENTKISLKLQTMEIDNETMHKQLNDVEQNTVPSLRKALRDVAMEKDAAVVAREDLSAQLRTLKKRLKEAEDEQYRAEEDAAALRAELNSIQQQAMTNTVSTISSFGNPPDHFQIQRLQKELDDLKLELQRESLLRHQEQEQLAKEQACIASLISEKQELEEKLMSISREPAEASDKAAHKAFSLEDKQKLDRQLYDMALAIERLESSRQKLLMEIDSQSTEIERLFEENSSLSNSYQEAIGAAARWENQVMDCLKQNEELRGILDNLRMEQARGLPDSSKNGAHEIASLASMKGQLVTEQSRAEALSAEVMQLSAQLEQVKQAYDGLARFYRPVLRNIESNLIKMKQDNSLAVR

SEQ ID NO: 244718 - protein, 58 aa, Glycine max
  Clone ID: PAT_MRT3847_63006C.1.pep
MDYMAPHVTTAARGTIGHIAPEYLTTGKSLRNTDAFAYGIMLLEHVIAQRAFDLHRLA

SEQ ID NO: 244719 - protein, 58 aa, Glycine max
  Clone ID: PAT_MRT3847_63007C.1.pep
NLVLQISHPQSISQSFRSTRVDSITSLNYVNDSKPQSLHKIDPSSIVTYTGHMDNASP

SEQ ID NO: 244720 - protein, 100 aa, Glycine max
  Clone ID: PAT_MRT3847_63008C.1.pep
MRVPSSPQPNNNHSPTSNLVLHTNNNPTTTFTYEPTSVLDLCRSPSPEKKLTVPKPEPQHNNNNNNLNLDLDDHVLPNSEWWESIMKDLALPEDSSTPLL

SEQ ID NO: 244721 - protein, 60 aa, Glycine max
  Clone ID: PAT_MRT3847_63009C.1.pep
HSIAMYKVDGVTVTSVAILSWAVILLLQRGYTAHATVHNVKDVYVTNHSEETEGAMSHVD

SEQ ID NO: 244722 - protein, 238 aa, Glycine max
  Clone ID: PAT_MRT3847_6300C.1.pep
DIYGTIDYIFGNAAVILQECNMIWRKPMPGQFTVITAQSRDSPDEDTGISFQNCSIIATLDLYSNSSSFKSYLGRPWRVYSRTVYLESYIDDFIDAKGWTKWSNEPGLNTYSPGEYDSFSIQNCSILATQDLYSNSGSFKSYLGRPWRVYSRTVFLESYIDQFIDPMGWKEWSGDQGLDTLYYGEYANYGPGSGTDNRVNWAGFHVMDYDSAYNFTVSEFIIGDAWLGSTSFPYDDGI

SEQ ID NO: 244723 - protein, 82 aa, Glycine max
  unsure (1)..(82): unsure at all Xaa locations
  Clone ID: PAT_MRT3847_63010C.1.pep
RLDQGRSSVLKMKALVGFAATIVVAWQCHANDMSPLRKNTVYGARTPXEKRARWRLAGGAHNIFGFETISEECGEASGEHLH

SEQ ID NO: 244724 - protein, 83 aa, Glycine max
  Clone ID: PAT_MRT3847_63011C.1.pep
GGMSATVCWVSNLVVSQSFLSIVEAIGIGSTFLILAAISVLAFVFVLIYVPETKGLTFDEVELIWKERAWGNNSDSRNLLAQE

SEQ ID NO: 244725 - protein, 105 aa, Glycine max
  Clone ID: PAT_MRT3847_63012C.1.pep
EKVPLVIRAELILVVQSSVALHGTNRIMKVHPVSRKRTICIQFRGDGGTPMAEAHALLGIARTKLRRLPHVFICGLDLSLRSNADEAEEEAPNFFRFVADTDGIG

SEQ ID NO: 244726 - protein, 204 aa, Glycine max
  unsure (1)..(204): unsure at all Xaa locations
  Clone ID: PAT_MRT3847_63013C.1.pep
TRPRTRGSYSIFPPCVSLTLETQALLQFKNHLKDSSNSLASWNESDSPCKFYGITCDPVSGRVTEISLDNKSLSGDIFPSLSILQSLQVLSLPSNLISGKLPSEISRCTSLRVLNLTGNQLVGAIPDLSGLRSLQVLDLSANYFSGSIPSSVGNLTGLVSLGLXENEYNEGEIPGTLGNLKNLAWLYLGGSHLIGDIPESLYEM

SEQ ID NO: 244727 - protein, 230 aa, Glycine max
  unsure (1)..(230): unsure at all Xaa locations
  Clone ID: PAT_MRT3847_63014C.1.pep
MVLAELGGSISRALQQMSNATIIDEKVLNDCLNDITRALLQSDVQFKLVRDMQTNIKNIVNLEDLAAGHNKRRIIQQAVFNELCKILDPGKPSFTPKKGKPSVVMFVGLQGSGKTTTCTKYAFYHQKKGWKPALVCADTFRAGAFDQLKQNATKAKIPFYGXYMESDPVKIAVEXVERFKQENCDLIIVDTSGRHKQEAALFXRKCASFRSTXPDLVIFVMDSSIGQAAF

SEQ ID NO: 244728 - protein, 127 aa, Glycine max
  unsure (1)..(127): unsure at all Xaa locations
  Clone ID: PAT_MRT3847_63015C.1.pep
PFVRFNPNPCTDAWRLEYLKRTGLYCDIIXVTGWTATPMQDVQLANDWSINYHECLPRTYCVLNPQNPCELNRWMGKLSFPXGTYRTVXRMPLSIDEQAGAKNAIIIAMPDASLVMWRYIDGDLDID

SEQ ID NO: 244729 - protein, 50 aa, Glycine max
  Clone ID: PAT_MRT3847_63016C.1.pep
INISSSNLNALVLSPMIMGTLADRAHCTADQGSSFKQGSVLGIFRIYGCG

SEQ ID NO: 244730 - protein, 117 aa, Glycine max
  Clone ID: PAT_MRT3847_63017C.1.pep
YLSNFQEQTITCTALCSLVITHIMPRLLGNLTPQILVQALRSMPRQATSSLKVRTHGGTRGSGPSHGSVGGKRGSPISQGKGGQHNEVVQKMPNGNNGSKRNDEARVEANAAKKLGN

SEQ ID NO: 244731 - protein, 96 aa, Glycine max
  Clone ID: PAT_MRT3847_63018C.1.pep
FWVNPSQRTSNILSDVVDLKGFFPQWVKIGLLEATGHNKRGEWHDVLSWSLAAHLPHGNSNIDPLDLTSFVWQEAVSICRSEEERVIRRLSSLGRK

SEQ ID NO: 244732 - protein, 96 aa, Glycine max
  unsure (1)..(96): unsure at all Xaa locations
  Clone ID: PAT_MRT3847_63019C.1.pep
MLELSLTPITSVIGTESTTSIHKHLGRTYSFTCRHISTALRIINLRDEESGTESVYPDVDGSEGDDTYRIXGSDIYIGAERLREVDEDSIQDDSNL

SEQ ID NO: 244733 - protein, 90 aa, Glycine max
  Clone ID: PAT_MRT3847_6301C.1.pep
SIPPGPCVCRLNVGLPHHTSAALDIMLVPQYACLPPTTFIFSSNGSTTKPPPAACHPNHKSQATVHPHMFLSGHTNTYALVTGPWTVRSR

SEQ ID NO: 244734 - protein, 31 aa, Glycine max
  Clone ID: PAT_MRT3847_63020C.1.pep
DAIYKRVPITMERSISDGSTVESDVVQAQKR

SEQ ID NO: 244735 - protein, 128 aa, Glycine max
  Clone ID: PAT_MRT3847_63021C.1.pep
HALAVSFAKVDLSKRLFIESDLLPTELCVEELAVSSNEEHKELKTKEDSELANRMSKELDLDDLAADQLTSSRSSSMCHAVSTFPLCNNVFHIPVNYVNAEAQQTSCSSKNKAFVPCSDASLHSTEDA

SEQ ID NO: 244736 - protein, 72 aa, Glycine max
  Clone ID: PAT_MRT3847_63022C.1.pep
MAIEAAPKVHWLNINRNPLIVPGLPNSCFIIPSLFHYFYGHYLPMGETKTLISEFFHMKGFLCSSPFPHECL

SEQ ID NO: 244737 - protein, 46 aa, Glycine max
  Clone ID: PAT_MRT3847_63023C.1.pep
DYILKKKIILPKKILNFHFIYTIIYFNFSNVSFNKKNILKAETNNR

SEQ ID NO: 244738 - protein, 71 aa, Glycine max
  Clone ID: PAT_MRT3847_63024C.1.pep
KRRGYNKTRRRRGRRAYLSPLQSMMLFAPPRGDTQRKLNIITIGDTNVMILKGEETCINRANLREGFYNLL

SEQ ID NO: 244739 - protein, 146 aa, Glycine max
  unsure (1)..(146): unsure at all Xaa locations
  Clone ID: PAT_MRT3847_63025C.1.pep
MDGRASSSVGGEASPAPAPVPITNANAPPPFLSKTYEMVEDPSTDSIVSWSPTNNSFVVWNPPEFARDLLPKHFKHNNFSSFVRQLNTYGFRKVDPDRWEFANEGFLRGQKHLLKTITRRKPAHGHNQQAQQAHGXESSVXACVES

SEQ ID NO: 244740 - protein, 54 aa, Glycine max
  unsure (1)..(54): unsure at all Xaa locations
  Clone ID: PAT_MRT3847_63026C.1.pep
LLXIYLFRVKXFAGKTTFVKRHLTGEFEKKYEREILELXFYIINLLFGLSHSFV

SEQ ID NO: 244741 - protein, 620 aa, Glycine max
  unsure (1)..(620): unsure at all Xaa locations
  Clone ID: PAT_MRT3847_63027C.1.pep
PSSLTPVRRKMEIEKSTKGSAEIGEKEEKKKKQHRRGGIRTLPFILANEVCDRFASAGFHGNLISYLTQELNMPLVAASNTLTNFGGTSSFTPLIGAIIADSFAGRFWTITVASLIYELGLISITVSAILPQFRPPPCPTQANCQEATSSQLWILYISLLLTSVGSGGIRPCVVPFSADQIDMTKSGVASRKWNIFNWYFFSMGFAXLSALTIVVYIQDNMGWGWGLGIPCIAMLISIVAFVLGSPLYKTVKPEGSPLVRLAQVTVAAIKKRKEALPEDPKLLYHNWELDASISLEGRLLHSDQYKWLDKAAIVTEEEAKDPTTTPKLWKLATVHRVEELKSIIRMLPIWASGILLITSSSHLHSFVIQQARTMDRHLSPSFQISPASMSIFSVLTMMSGVVLYERLFVPFARRFTGNPSGITCLQRMGIGFIINIIATVIAGLMEMKRKSVAAKYHLLDDPKATIPISVFWLVPQYCLHGVAEIFMSVGHLEFLFEQSPESMRSSATALYCITTAIGNYMGTLLVSLVHKYTGKENNWLPDRNLNRGGLDYYYFLVSGIQVVNLVYYFICAWFYTYKSVEEISEKNKEEDLEQANEHVSSDDKLNDGKEEEKRGLTKDE

SEQ ID NO: 244742 - protein, 106 aa, Glycine max
  Clone ID: PAT_MRT3847_63028C.1.pep
TPTKNIIQCWPKPFPNPYKKEPWQETKRGRMESLGNTLRYLDRHLARNQVLYFFKTLLIRKIYHSLTGDYNHISLAGTETSPTLGWIFLTHCILGGYFIIFTTTRG

SEQ ID NO: 244743 - protein, 158 aa, Glycine max
  unsure (1)..(158): unsure at all Xaa locations
  Clone ID: PAT_MRT3847_63029C.1.pep
MDAGGKIKKGAGGRKGGGPKKKPVSRDSXGSNNKXXPXGFLQFPVGRIGRYLKKGRYAQRVGTGAPVYLAAVLEYLAAEVLELAGNAARDNKKNRIIPRHVLLAVRNDEELGKLLAGVTIAHGGVLPNINPVLLPKKTERAAKEPKSPSKATKSPKKA

SEQ ID NO: 244744 - protein, 58 aa, Glycine max
  Clone ID: PAT_MRT3847_6302C.1.pep
AFLVAVILDKTVPGSKQERGVYVWSEPEVARREPAVANDYELPLRVGKIFRWVKWVGL

SEQ ID NO: 244745 - protein, 149 aa, Glycine max
  unsure (1)..(149): unsure at all Xaa locations
  Clone ID: PAT_MRT3847_63032C.1.pep
MDTGGKIKKGAGXRKGGGPKKKPVSRSVKAGLQFPVGRIGRYLKKGRYAQRVGTGAPVYLAAVLEYLAAEVLELAGNAARDNKKNRIIPRHVLLAVRNDEELGKLLAGVTIAHGGVLPNINPVLLPKKTERASKEPKSPSKATKSPKKS

SEQ ID NO: 244746 - protein, 131 aa, Glycine max
  unsure (1)..(131): unsure at all Xaa locations
  Clone ID: PAT_MRT3847_63033C.1.pep
EWALTIALLADNNGWLYGELKRTCDTDLGSXDHACVTTHAFTIAIQYLTNASMKTNAQTRXRHTVLVDAXRCRIPLXTDXPTIQMWSDTLPTHKDGEDWSPQVAAGQAQYDCLEVTQYASLVCAQAHKREL

SEQ ID NO: 244747 - protein, 110 aa, Glycine max
  unsure (1)..(110): unsure at all Xaa locations
  Clone ID: PAT_MRT3847_63034C.1.pep
STPNLQHLAIKILXLTCSASGCECNWIAHNFFFSYLLHIHSKKRNRHEHKRLHNLVYVECNQALVKRYNYRDEIDPISLNDIDIPKWLVGQMDGDDENDDGLPWDVVFEE

SEQ ID NO: 244748 - protein, 37 aa, Glycine max
  Clone ID: PAT_MRT3847_63036C.1.pep
FHTSVAYYLTSRGPKHNIKSITRTQISRYFQTTTCLP

SEQ ID NO: 244749 - protein, 138 aa, Glycine max
  Clone ID: PAT_MRT3847_63037C.1.pep
MDADGKIKKGAGGRKGGGPKKKPVSRSVKAGLQFPVGRIGRYLKKGRYAQRVGTGAPVYLAAVLEYLAAEVLELAGNAARDYKKNRIIPRHVLLAVRNDEELGKLLAGVTIAHGGVLPNINPVLLPKKSDRASKEPKS

SEQ ID NO: 244750 - protein, 148 aa, Glycine max
  unsure (1)..(148): unsure at all Xaa locations
  Clone ID: PAT_MRT3847_63038C.1.pep
MDAGGKIKKGAGGRKGGGPKKKPVSRSVKAGLQFPVGRIGRYLKKGRYAQRVGTAAPVYLAAVLEYLAAEVLELAGNARDNKKXRSIPRHVLLAVRNDEELGKLLAGVTIAHGGVLPNINPVLLPKKTERAAKEPKSPSKGTKSPKKA

SEQ ID NO: 244751 - protein, 59 aa, Glycine max
  unsure (1)..(59): unsure at all Xaa locations
  Clone ID: PAT_MRT3847_6303C.1.pep
XXFPKNHLWXIRCXXXLFPPFSTNYSTQVPVSVSFIFIIVKFTPASFEFFXIXSPNLSF

SEQ ID NO: 244752 - protein, 82 aa, Glycine max
  unsure (1)..(82): unsure at all Xaa locations
  Clone ID: PAT_MRT3847_63040C.1.pep
KHPNLVPLTGYCVSGDQIIAIYDYMENGNLQNLLYHLPLIVQNTXNSTTNAXQESNNNCIQNAGSKRLLTSLTFHHKISLTT

SEQ ID NO: 244753 - protein, 61 aa, Glycine max
  Clone ID: PAT_MRT3847_63041C.1.pep
LGEASPKELTWGTTYKLNTKFLKQKGDLFESNLLQAQQKRVSKCDFNILGKPNFYDKNADN

SEQ ID NO: 244754 - protein, 61 aa, Glycine max
  Clone ID: PAT_MRT3847_63042C.1.pep
WWFCCGLGLEEPVCIGARGTMLKERWCKKFAQMISGAKLIIKTFWRPERRVKCDEILGKPR

SEQ ID NO: 244755 - protein, 60 aa, Glycine max
  Clone ID: PAT_MRT3847_63043C.1.pep
TVGNTSKVMYVVPFKKKNFCTKLGMVVNNSICHVICPSTVHINSSASTSNNIVLVPFRRS

SEQ ID NO: 244756 - protein, 154 aa, Glycine max
  Clone ID: PAT_MRT3847_63044C.1.pep
MNHIQGFVTETDPEMFNLTTGMEMIGFSKNLEQNSESNGVMWKSFFCKPGQHAGPSSSKTMNESCSNFYNHQHDHKYNKQDFTSGINSETSTDNLVVGGAHDSAPWQENRLMVDDSSLRCVFPCEGNERPSQGLSLSLSSTNPSGIGLQSFELR

SEQ ID NO: 244757 - protein, 46 aa, Glycine max
  Clone ID: PAT_MRT3847_63045C.1.pep
PYVLRWENEPQFPSLCSKVAKGCRGKGPCLRFIGTHSYILPGFKEI

SEQ ID NO: 244758 - protein, 230 aa, Glycine max
  unsure (1)..(230): unsure at all Xaa locations
  Clone ID: PAT_MRT3847_63046C.1.pep
MMMDQRQREKLLHKTEACAFVAGVVPELSLVTVPGNNTNNVNNNNNVVSHSQSNGSGRIQENNHHLGLVAAVTSAFGTVQRKKRMARQRRSTKPTSLMNHLNNHKHNKPRSLPSPSASSSYVPLSSATLQPAREIDQRRLRFLFQKELKNSDVSSLRRMILPKKAAEAFLSALESQEGIVISMDDIDGXHVWRFXYRAGLHIQRMYALENXGEFXNTHGLVWRFIMVTKI

SEQ ID NO: 244759 - protein, 41 aa, Glycine max
  Clone ID: PAT_MRT3847_63047C.1.pep
VWSWTQWQLHPIIPFRGTCHYAACIASAMGSQDPFRIATLH

SEQ ID NO: 244760 - protein, 115 aa, Glycine max
  Clone ID: PAT_MRT3847_63048C.1.pep
IIITSSSCFSVVVTILFPSLLLFATETDDEAISESSVLRENSASISGSISRSGKTSPSSLIPMKKSSKLMLSSKFPSERSAKSSVPIETLSNISPCPPSSLVLLKGDTANMNINP

SEQ ID NO: 244761 - protein, 69 aa, Glycine max
  Clone ID: PAT_MRT3847_63049C.1.pep
DIPLAKEYTAFSMVFIVSNIILPVSSSFAKTATHRSLIPNPSRSPEVDYFNLTVVAQCCWVIFILPWVS

SEQ ID NO: 244762 - protein, 54 aa, Glycine max
  unsure (1)..(54): unsure at all Xaa locations
  Clone ID: PAT_MRT3847_6304C.1.pep
TAXFTLXXRQXIXILXSXWMXPXPGPKXFPXXYSCHPLRREQIQRKLPENXEAX

SEQ ID NO: 244763 - protein, 86 aa, Glycine max
  Clone ID: PAT_MRT3847_63050C.1.pep
PRVLRCLNSQLEFRKPLFLVGSSFYLSNPGDQSAKSLCVLQISKFKIQLHHPKHAMHPLVRRAVPAKLLPTDHDANAYRSNVLADR

SEQ ID NO: 244764 - protein, 211 aa, Glycine max
  Clone ID: PAT_MRT3847_63051C.1.pep
LYGDNVEVDYRGYEVTVENFLRVLTGRHETSVPRSKRLLSDEGSHILLYMTGHGGDEFLKFQDSEELQSHDLADAVKQMKEKRRFKELLIMVDTCQASTLFSQLHSPGVLAIGSSKKGENSYSHHLDSDVGVSVVDRFTFYTLAFFERLNMYDNASLSSLFTSYNPNLLMSSAYYRMHLYQCHLEEVPVTNFLGSLMKTIHTDSAYRSPAK

SEQ ID NO: 244765 - protein, 374 aa, Glycine max
  unsure (1)..(374): unsure at all Xaa locations
  Clone ID: PAT_MRT3847_63052C.1.pep
MSQTTLHAFVAKNLGCGMAEGKCLPCSGVSGRTAAVYSYSSLGHHRIHSRVQVRGLKCGFRGASFVCEAKRNPDFSRQNKHGSSRSRNRNSDGRDSFESFDDDMFSLKNGPPVSLSTSGKFQATSAPGPREKEIVELFTKVQARLRERAXAQHEKVXEASRAQSKENSTVDSLLKLLKKHSVEQVKRSSGGRGKDFSSDQLQESNQYNGGRNSKISDLDSSPKDEPQEDIVFSSSVARPRSNFQRRSPVPRLKYQHVSNDENEMTVVPVGSEDTENNQDQIDLKLDDEAESDFESDVDSKDEFFFPNIGMAELSEDDDSEQTYNDESVEEQPAAQHKDLSALKLSELRALAKTRGLKGFSKMKKSDLVELLTES

SEQ ID NO: 244766 - protein, 316 aa, Glycine max
  Clone ID: PAT_MRT3847_63053C.1.pep
DNYNRSKFPGQGGYGTVYKGMLPDGTIVAVKKSKEIERNQIKTFVNEVVILSQINHRNIVKLLGCCLETETPILVYEFIPNETLSHHIHRRDNEPSLSWVSRLRIACEVAGAVTYMHFSASIPIFHRDIKPTNILLDSKYSGGRADFGTSRSVPLDKTHLTTAVGGTFGYIDPEYFQSSQFSDKSDVYSFGVVLVELITGRKPISFLYEDEGQNLVAQFISLMKKNQVSEIFDARVLKDARKDDILAVANLAMRCLRLNGKKRPTMKEVSAELEALRKAQSSLQMNHDHEHTTSDIVQECTEESISLSLHLESTSF

SEQ ID NO: 244767 - protein, 100 aa, Glycine max
  Clone ID: PAT_MRT3847_63054C.1.pep
FSFPLGFRRGKVFRPLVLEASFCPPPSISLSKNVALRALFIKEMWKITLERKYLPQWERNLKEKASPKWFLISSGYQSQFKKEVVKQNPFWFKKKKSMRG

SEQ ID NO: 244768 - protein, 51 aa, Glycine max
  Clone ID: PAT_MRT3847_63055C.1.pep
LHNNNNNGFYSLKISDTFTRTAKYITVQGLNYGDSSSEPESSACTSSTDIF

SEQ ID NO: 244769 - protein, 39 aa, Glycine max
  unsure (1)..(39): unsure at all Xaa locations
  Clone ID: PAT_MRT3847_63056C.1.pep
PKEDYAGLLNAFYXKTRQHHYPPYYYRNMKEDPSTCVIC

SEQ ID NO: 244770 - protein, 185 aa, Glycine max
  unsure (1)..(185): unsure at all Xaa locations
  Clone ID: PAT_MRT3847_63057C.1.pep
MKEMELQENGSIERENKNKDLIIQMEDMLESVELPLVSRCCIYKVPQKIRKVNEAAYTPTIVSIGPFHYGDKRLQSMEELKLRYLKSFLERTQKGLXEIALNNXLKESEEVIKSCYSENLEXSSDDXVRTVLTDACFIIEYFLRISKWTQENLYXQPWLRCDVKLDLILLENQLPWFVLEEIFNL

SEQ ID NO: 244771 - protein, 69 aa, Glycine max
  unsure (1)..(69): unsure at all Xaa locations
  Clone ID: PAT_MRT3847_63058C.1.pep
NLHQQIPILPKHXTSVSKFLSWFLGGKKXSFPKSIFTXINTFHLNIFFPELPSINIFMNLIQQVFFNYG

SEQ ID NO: 244772 - protein, 129 aa, Glycine max
  unsure (1)..(129): unsure at all Xaa locations
  Clone ID: PAT_MRT3847_63059C.1.pep
KTVATFFVQKIFLDDXGLXXFXSXTEGFFPLXXVLGNKVATXLKQPSFGLLKQFXXCXFCLSNNPRACNPLKSXFPALLKNVTFSPCLCEDPPIRRWFQQLVPNVWRESGSCPPNWRRFRSKDWGLGIN

SEQ ID NO: 244773 - protein, 94 aa, Glycine max
  Clone ID: PAT_MRT3847_6305C.1.pep
FSFFFFFFFFFFFFFFFFFFFFFFFFTGKGKLFLTKKTHPILGQGRKDPGKPSQKNPALFFQLWPKKKGEKCPPPLKNLMGGPFPSFLKRGKKP

SEQ ID NO: 244774 - protein, 67 aa, Glycine max
  Clone ID: PAT_MRT3847_63060C.1.pep
ANSHRLGSSYGGAAPYRSRDGLSTRPVGASEEIQLRIDPLDLDDEITGLHRQVRRLKHVCIYSLCTC

SEQ ID NO: 244775 - protein, 81 aa, Glycine max
  Clone ID: PAT_MRT3847_63061C.1.pep
MLLPIFLVQVAEEIGTEVKYQKNFLEELQMTMIKAQAGVKNNLRRLNKSIIQSGSNHIIHVILFALVCFFVVYLWSKMIRK

SEQ ID NO: 244776 - protein, 132 aa, Glycine max
  Clone ID: PAT_MRT3847_63062C.1.pep
MAANSHRLGSSYGGAAPYRSRDGLSTRPVGASEEIQLRIDPLDLDDEITGLHRQVRRLKHVAEEIGTEVKYQKTFLEELQMTMIKAQAGVKNNLRRLNKSIVQSGSNHIIHVIIFALVCFFVVYLWSKMFRK

SEQ ID NO: 244777 - protein, 25 aa, Glycine max
  Clone ID: PAT_MRT3847_63063C.1.pep
GYYKRGVLGTKVNPYKGHALIGGGG

SEQ ID NO: 244778 - protein, 612 aa, Glycine max
  Clone ID: PAT_MRT3847_63064C.1.pep
MSSSFSVRFLAPPSSCFPSSRPKTWLCAATTPTVAPATASSEVEASRLEPRVEERDGFWVLKEEYRGGISPQEKVKLEKDPMKLFMEGGIEDLAKMSLEEIESSKHTKDDIDVRLKWLGLFHRRKQHYGRFMMRLKLPNGVTTSAQTRYLASVIRKYGKDGCADVTTRQNWQIRGVVLPDVPEILKGLDEVGLTSLQSGMDNVRNPVGNPLAGIDPDEIVDTRPYNNLLSQFITANSRGNPAMSNLPRKWNVCVVGSHDLFEHPHINDLAYMPANKDGRFGFNLLVGGFFSAKRCAEAIPLDAWVSADDVIPLCKAVLEAYRDLGFRGNRQKTRMMWLIDELHGLFPLSLSVSAWQVSDKSVWQMKGIEVFRSEVEKRMPGKQLERASEEELVKKKWARRDYLGVHPQKQDGLSYVGIHIPVGRVQADDMDELARLADEYGTGELRLTVEQNIIIPNVDNNKIDALLNEPLLKGRFSPEPSLLMKTLVACTGNQFCGQAIIETKERALKVTEEVERQVAVTRPVRMHWTGCPNTCGQVQVADIGFMGCMARDENGKATEGVDIFLGGRIGSDSHLAEVYKKGVPCKNLVPIVVDILVKHFGAVQRNREEGED

SEQ ID NO: 244779 - protein, 59 aa, Glycine max
  Clone ID: PAT_MRT3847_63065C.1.pep
PLFLSIKNNFIPYVNPHLCACFSQSEEDNTSQNLYLIIHLHPQLYLIYNITSHSPNLNC

SEQ ID NO: 244780 - protein, 175 aa, Glycine max
  unsure (1)..(175): unsure at all Xaa locations
  Clone ID: PAT_MRT3847_63066C.1.pep
MLAAAASASRHLLQRDASIGACSGSGNRVRSLLTASAITTTYPIRIRKCYSNGYGISFNNPKHRTCPSLLFAVKGFLSDSSNSNSPHGRVTRPYLPHPVNSSNVDGRALFSTSTXTDDGSQSQKAAASTIGKSSPPPXPGGQAADVKILGTLASYLWMKDNLEFRVRXWCCIGFA

SEQ ID NO: 244781 - protein, 606 aa, Glycine max
  unsure (1)..(606): unsure at all Xaa locations
  Clone ID: PAT_MRT3847_63067C.1.pep
MYTFLLLLPIMSSSFSVRFLAPLPPSSSSCFPTSSLPKTWLCAAATPTVAXVNHHLLLXEVEASRLEPRVEERDGFWVLKEEYRGGISPQEKVKLEKDPMKLFMEGGIEELAKMSLEEIESSKHTKDDIDVRLKWLGLFHRRKQHHGRFMMRLKLPNGVTTSAQTRYLASVIRKYGKDGCADVTTRQNWQIRGVVLPDVPEILKGLDEVGLTSLQSGMDNVRNPVGNPLAGIDPDEIVDTRPYNNLLSQFITANSRGNPAMSNLPRKWNVCVVGSHDLFEHPHINDLAYMPANKDGRFGFNLLVGGFFSAKRCAEAIPLDAWVSADDVIPLCKAVLEAYRDLGFRGNRQKTRMMWLIDELGIEVFRSEVEKRMPGKQLERASEEELVKKKWERRDYLGVHPQKQEGLSYVGIHIPVGRVQADDMDELARLADEYATGELRLTVEQNIIIPNVDNNKIDGLLNEPLLKGRFSPEPSLLMKTLVACTGNQFCGQAIIETKERALKVTEEVERQVAVTRPVRMHWTGCPNTCGQVQVADIGFMGCMARDDNGKATEGVDIFLGGRIGSDSHLAQVYKKGVPCKDLVPVVVDILVKHFGAVLRNREEGED

SEQ ID NO: 244782 - protein, 117 aa, Glycine max
  unsure (1)..(117): unsure at all Xaa locations
  Clone ID: PAT_MRT3847_63068C.1.pep
DSQVPSPKKKKKKKKSERSRLSKLTYPTLPRHSLSIVSRKLNSLDWPLQHNDWKNKXLTQLNLIALHHIFVRSPNIEEDRTERISQQNSSPNCKWNATCTRALNSARVVVTLHADRT

SEQ ID NO: 244783 - protein, 69 aa, Glycine max
  Clone ID: PAT_MRT3847_63069C.1.pep
IVDFGTLFSLSVEDYNDNDDIILHQLSFLRTVWVKDAAVEFISVIEEFEKLLLLSNSAMFLVESELSRS

SEQ ID NO: 244784 - protein, 36 aa, Glycine max
  Clone ID: PAT_MRT3847_6306C.1.pep
LTLRINYSPLSTIDPSGPILSLIISSYYHYPICSPL

SEQ ID NO: 244785 - protein, 151 aa, Glycine max
  unsure (1)..(151): unsure at all Xaa locations
  Clone ID: PAT_MRT3847_63070C.1.pep
LYDSYRVSCYACWYRLRNWRGRPPRATAARRQQRGRPFDVRCGDPSTAVYAAFRGHVSFTRGDLTERAFLRQPRVFLTSKNTGTGKRPVKGDNRFWRSLVLGFKTPREAIXXTYIDKKCPFTDNAPIRGRILPATCHSANMNSASIRTRNY

SEQ ID NO: 244786 - protein, 69 aa, Glycine max
  Clone ID: PAT_MRT3847_63071C.1.pep
SPSRSEISSARRSVRLINSVNALQFAEWLLDGLAGFLIDFFIKKHLGNNEARYRRYNVCFPFLVYLICE

SEQ ID NO: 244787 - protein, 80 aa, Glycine max
  Clone ID: PAT_MRT3847_63072C.1.pep
MAGELGVLNALDVAKTQWYHFTAIVIAGKGFFTDAYDLFCICLVTKLLGWLYYTEPGAPKPGSLPPRVQASVTGVALCGT

SEQ ID NO: 244788 - protein, 107 aa, Glycine max
  Clone ID: PAT_MRT3847_63073C.1.pep
FSPGAGVVSKVANVKPNCSLTSSFPSSSQAFLNSNHVGNSRASQQAPIRLRAEPCHGSRQTPVALPFPIMRGTSNVVSKEHKINSDLQGGLVLTLGGPASAHPQVKH

SEQ ID NO: 244789 - protein, 101 aa, Glycine max
  unsure (1)..(101): unsure at all Xaa locations
  Clone ID: PAT_MRT3847_63074C.1.pep
WLNWRFFLCAICILAPMALASFFIIQXEVFNKSRSDSGENQGEEEGGLLXEYVAWNTXLKELHPSWLLIYRIICFVVLLALIIASVAAPSVVLLAARTHAW

SEQ ID NO: 244790 - protein, 65 aa, Glycine max
  Clone ID: PAT_MRT3847_63075C.1.pep
PPCGAQISPGFPTPSVMCNSNMRHLTSGFCILLPPPGVGDTRLAQGRKQTNLKKKQKKNKKSKTP

SEQ ID NO: 244791 - protein, 63 aa, Glycine max
  Clone ID: PAT_MRT3847_63076C.1.pep
STVDERTWLIFHMSLQSSIRSITTTTITFTTFATDCTTYKLDDLSIIDTLLTITWLGLSINAL

SEQ ID NO: 244792 - protein, 41 aa, Glycine max
  Clone ID: PAT_MRT3847_63077C.1.pep
PNYSTSILIMNPHHYTTCLPSEHPILFINNNCFFFITTTIN

SEQ ID NO: 244793 - protein, 430 aa, Glycine max
  Clone ID: PAT_MRT3847_63078C.1.pep
GSRRFTRLGGKLPKGVLLVASAGTGKTMLARAIAGEAGVPFFSCSGSEFEEMYVGVGARRVRDLFSAARKRAPAIIFIDEIDAIGGKRNAKDQMYMKMTLNQLLVELDGFKQNEGIIVIGATNFPQSLDNALVRPGRFDRHVVVPNPDVKGRQQILESHMSKVLKADDVDLMIIARVTPGFSGADLANLINIAAIKAAMDGAKAVSMADLEHARDKILMGSERKSAVISEESRKLTAFHEGGHALVAIHTDGALPVHKATIVPRGMALGMVTQLPDKDETSISRKQMLARLDVLMGGRVAEELIFGENKVTSGASSDLKKATSLAREMVTEYGMGNEVGLVTHDYEDDGRSMSSETRLLIEKEVKQFLERAYNNAKTILTTHNKELPALANALLEHETQSGTQIKALLAQVRSQMQQQQPQTLEAYNCSQ

SEQ ID NO: 244794 - protein, 53 aa, Glycine max
  Clone ID: PAT_MRT3847_63079C.1.pep
LVWGPPGFSRARCFIPRPVYLYFGAPVKGVFIGMPGLVSLGLGLRFFLPKGPN

SEQ ID NO: 244795 - protein, 43 aa, Glycine max
  Clone ID: PAT_MRT3847_6307C.1.pep
NYLPTRNDLIYLFLLLIFVWFRVLQNFFNGINFELLDVIARYV

SEQ ID NO: 244796 - protein, 333 aa, Glycine max
  Clone ID: PAT_MRT3847_63080C.1.pep
DSERYRNQRKCTLIDTTNAQLVCDPSLVHVAMTIDWHYLRGSIAAVHSVVKHTSCPLNLFFHFIASDARLDSKDVFERIVHTSFPSLRFKVYVFRESLVDNLISPSIREALDNPLNYARSYLPDLLDQCIERVIYLDSDVIVVDDVQELWKVSLTGSRVIGAPEYCHANFTRYFSYEFWSSAEFSEVFQGKRPCYFNTGVMVMDLVRWRAGDYTRKIEKWMEIQKERRIYKLGSLPPFLLAFGGNVEAIEHRWNQHGLGGDNVRNSCRTLHPGPVSLLHWSGKGKPWTRLDAKMPCSVDFLWAPYDLYIPHHHTYHHYHHHQRIAIGSTHSSF

SEQ ID NO: 244797 - protein, 228 aa, Glycine max
  Clone ID: PAT_MRT3847_63081C.1.pep
MSQGRKSVEKVQFRSSVSTMATPKASSKWTENISSIAARIFFLLIIFQIPLFRVTCRSGMCTTPLHVTSSQLIASEIFPVVVVKGLLYPGAAVNGLIHNMTVPSWDNLLDLYNLTSVKEASAVTDLQRLEVLAGSYFTVAGALVGILKPGRMSMFGSLLIIWGLVKEGILGKPVNTDPAKAVYVYPTMVIAMICAFSSVKYDVKKVVRSAPIRSSARPLKNSSKSKLK

SEQ ID NO: 244798 - protein, 85 aa, Glycine max
  Clone ID: PAT_MRT3847_63082C.1.pep
FGCLFSFFLLVVFVLFLQCLFFSHFLIPNTTFRFRAMWPHSTQKELQFFRRGQEKSRRCCRRRNPQKLEKKLRRYSQPGTKTRNQ

SEQ ID NO: 244799 - protein, 264 aa, Glycine max
  Clone ID: PAT_MRT3847_63083C.1.pep
PVPVEILDDHTISCADIGIVAGVQETKKRRINQTQTQKPPRKNDNYVNSEHSDSDCPTLPTATTPTTSEPKKRGRKPILGRETPVNHVEAERQRREKLNHRFYALRAVVPNVSRMDKASLLSDAVAYISELKAKIEYLESQQPRDSSKKVKTEMTDTLDNHSTTTISTVVDQSGPEPRLGPSPLGLEVDVKIVGPDAMVRVQSENVNHPGARLMGALRDLEFQVHHASMSCVNDLMLQDVVVKLPNGMRSEEGLKSAILMRLDQ

SEQ ID NO: 244800 - protein, 37 aa, Glycine max
  unsure (1)..(37): unsure at all Xaa locations
  Clone ID: PAT_MRT3847_63084C.1.pep
KPWMDLGYVTLXDXRDQXRFDGXYHNQFMVVNDCLHX

SEQ ID NO: 244801 - protein, 213 aa, Glycine max
  Clone ID: PAT_MRT3847_63085C.1.pep
QMVLLIEKLTKHYFKLENHHHAITHLQPEELSSSLLAFKSHMSKSIDQLASDLKPGSETPLSLTWFGKCFGLLPFINKAFGKLVVDIDYPMSKLEIFSIEEYLSYTLSLLELLNSVSSRLSNLGQARLSLVHGLTLVENSPSLATKHLKAIQFQQGYSFTTNFGKDHDDEVRVFSGKEWNVQEAVNEKGSIGFWAGGVMWSCGFGVGGPFLAR

SEQ ID NO: 244802 - protein, 81 aa, Glycine max
  Clone ID: PAT_MRT3847_63086C.1.pep
PTRKLYFSCPPLLKTNTSFWGTLWARPLAWSNGYCNYRQHADVWHAYPILKKGSLEEEKIIGFIYDDIAFNGENPTPGIII

SEQ ID NO: 244803 - protein, 274 aa, Glycine max
  Clone ID: PAT_MRT3847_63087C.1.pep
SISATSFAKALLMKGKRPKHFPNHVKDRGVSDPGFKSDASWSIDYPMSKLEIFSIEEYLSYTLSLLELLNSVSSRLSNLGQARLSLVHGLTLVENSPSLATKHLKAIQFQQGYSFTTNFGKDHDDEVRVFSGKEWIVHEAVKEMRSIGFWVCGVMLSCLYGDGRPYMELRKIAGGFDGSLVATLDFKINEQLIEKRPLFSEIKEVNNVVSNLLVASDEVRHDAANELQTKLRVLEKLSDDISKEVDNLFANVMTQRSELIDGFRLQKQPQKSSV

SEQ ID NO: 244804 - protein, 233 aa, Glycine max
  Clone ID: PAT_MRT3847_63088C.1.pep
MMSLLQNSPTLHNSSFPQKHVTRSSRRDAISFIVKAVQEPSASLTSQDRQRRRQVIAVGTTAPLVFLFNQHSNSFAAENKKGFLPVLDKKDGYSFLYPFGWQEVVIEGQDKVFKDVIEPLENVSVNVIPTGKQDITEFGSPQEVAETLIKKVLAPPNQKTKIVEAKELDVEGKKYYQFEFIAQAPNYTRHALSTVSIGNGKFYTLTTGANERRWVKMKDRLQTVIESFKIFDV

SEQ ID NO: 244805 - protein, 61 aa, Glycine max
  Clone ID: PAT_MRT3847_63089C.1.pep
AEHTHLEGHADSHGSCTTPRGNSKVTRLPGLSKDRCAIDAGEHPGAAYKARLRVLPAISKT

SEQ ID NO: 244806 - protein, 57 aa, Glycine max
  unsure (1)..(57): unsure at all Xaa locations
  Clone ID: PAT_MRT3847_6308C.1.pep
NKKKKKKKKKKKKKKKKKKIKNKXKKKKKKKNKKKXKKNKHKIKKKKKGNPIKKSKL

SEQ ID NO: 244807 - protein, 97 aa, Glycine max
  Clone ID: PAT_MRT3847_63090C.1.pep
SWVSHVSHCGRKQKITLFYPSIYNLSILCLLNGCLGIIIVKIFMQDKFLSSKKTFLFLMLERIETDDTYVSLIGKVYTYKLTYMKIRLKKLWIDFYF

SEQ ID NO: 244808 - protein, 171 aa, Glycine max
  unsure (1)..(171): unsure at all Xaa locations
  Clone ID: PAT_MRT3847_63091C.1.pep
MTSLQNSPTLHRTMLHNSFPQHATRSSRRDAISFIVKAAQEPSASLASQDRQRRRQVIAFGTTAPLVFLFNQHSNSFAAENKKGFLPVLDKKDGYSFLYPFGWQXEVVIEGQDKVFKDVIEPLENVSVNVIPTGKQDITEFGSPQEVAETLIKKVLAPPNQKTKIVEAKEV

SEQ ID NO: 244809 - protein, 78 aa, Glycine max
  Clone ID: PAT_MRT3847_63092C.1.pep
PNQKTKIVEAKEQDVEGKKYYQFEFIAKAPNYTRHALSTVSIGNGKFYTLTTGANERRWDKMKDRLQTVIESFKIFDV

SEQ ID NO: 244810 - protein, 502 aa, Glycine max
  Clone ID: PAT_MRT3847_63093C.1.pep
MAYQVLVICVVSSIVFAYIVWRKERKKKLPPSPKGLPIIGHLHLVSPIPHQDFYKLSLRHGPIMQLFLGSVPCVVASTAEAAKEFLKTHEINFSNRPGQNVAVQFLTYVFGPYGPSVKFIKKLCMSELLGGRMLDQFLPVRQQETKKFIKRVLQKGIAGEAVDFGGEFMRLSNNIISRMTMNQTSSEDEKQAEEMRMLVADVAELMGTFNVSDFIWFLKPFDLQGFNKRIRKTRIRFDAVLDRIIKQREEERRNNKEIGGTRQFKDILDVLLDIGEDDSSEIKLTKENIKAFIMDIFVAGTDTSAATMEWAMAELINNPCVLEKARQEIDAVVGNSRIIEESDIVNLPYLQAIVRETLRIHPGGPLIVRESSKSVVVCGYEIPAKTRLFVNVWAIGRDPNHWENPFEFRPERFFENGQSQLDVRGQHYHFIPFGSGRRSCPGTSLALQIVHVNLAIMIQCFQWKFDNGNNKVDMEEKSGITLPRAHPIICVPVPRLNPFPVM

SEQ ID NO: 244811 - protein, 49 aa, Glycine max
  unsure (1)..(49): unsure at all Xaa locations
  Clone ID: PAT_MRT3847_63094C.1.pep
MPVLNDFADKRFLNFYTPLFSNYICLTMFTFGFCSFFPQICKVYFSVTX

SEQ ID NO: 244812 - protein, 74 aa, Glycine max
  unsure (1)..(74): unsure at all Xaa locations
  Clone ID: PAT_MRT3847_63095C.1.pep
HGVFTRRYIVLGPRLDKGFSHRGYTQQAIRITHSTGMDCMRLLYVKHSCYVCNVXLVSQHNITSPIAKINNVAX

SEQ ID NO: 244813 - protein, 64 aa, Glycine max
  unsure (1)..(64): unsure at all Xaa locations
  Clone ID: PAT_MRT3847_63096C.1.pep
IYILIVLGVILSVLKLGAGGAAQELGLNFKASFDAVPQSQKERLMLVVETVSFTALTSFVLSYX

SEQ ID NO: 244814 - protein, 103 aa, Glycine max
  unsure (1)..(103): unsure at all Xaa locations
  Clone ID: PAT_MRT3847_63097C.1.pep
LQCAASFIMSAPMAHAPITCWHVTNILINCITYLHNRRTPSSVYYNXMKSLNANAKTTPNLHTACNCLNSATSQISCFKTNNVALLPGKCRVSIPYKINTFTN

SEQ ID NO: 244815 - protein, 58 aa, Glycine max
  Clone ID: PAT_MRT3847_63098C.1.pep
LSNTSLSHELTKLGQFAYSAQRRELTHQMTELFINLTTSALDGFTPRRSTQWRTYALE

SEQ ID NO: 244816 - protein, 68 aa, Glycine max
  Clone ID: PAT_MRT3847_63099C.1.pep
LLSRKGLPSLLPFSTWRLVPVVPIQTCLFWPYRMCRSTLIEYCPVGSYPGYKSMQPPLNFSKAFSASV

SEQ ID NO: 244817 - protein, 368 aa, Glycine max
  Clone ID: PAT_MRT3847_6309C.1.pep
MAVKSKKEKEHLNLLLGSHLTTIHETLQVLDQTPPSSSSAKVTWDDVIKMAEQVSKQATTVGMLWTGEKPDAKAVEENMASYFNTLQGFLLLSHGSTVGAGPTLSSAVHASVKQVVDSSFRLMKETVSLYGYHSKDLKISVPQLVGAVWEACSALKKTPSTNITAIGRGMTQVAVSVKDVLREMKELKPVSCDDQVDEAAGESCAEAASEPHDDNSSEGDLGNDLSPEEMKVAERAIEVVSNTLSFIKILIHSIIGLLKLEKPNDNSSFVNSLEKLLQLCHELGRQIDEIGACLYPPQEIPAINAALEKIHSIIDAVQVEVGELLGASDVFLEPCNDLRSSLRQLASELSNSSTADIEARVENITLNQ

SEQ ID NO: 244818 - protein, 214 aa, Glycine max
  unsure (1)..(214): unsure at all Xaa locations
  Clone ID: PAT_MRT3847_630C.1.pep
RLREDDRRGSEVVIETRLEGPSAMGDDSGSNRSKPEWLQQYDLIGKIGEGTYGLVFLARIKSSTNRGKSIAIKKFKQSKDGDGVSPTAIREIMLLREITHENVVKLVNVHINHMDMSLYLAFDYAEHDLFEIIRHHRDKVNQSINQYTVKSLLWQLLNGLNYLHSNWIIHRDLKPSNILGMGEGEEHGVVKIADXGLXRIYQAPLKPLSENGGC

SEQ ID NO: 244819 - protein, 115 aa, Glycine max
  Clone ID: PAT_MRT3847_63100C.1.pep
KGDALNAAYYHVVNPLTNTAVGAEVTHRFSTNENTLTLGTQHQLDPLTTLKARVNNFGRTSALIQHEWRPKSFFTISGEVDTKAIEKSAKVGLSLILIHPGGVRNRIVCQTKLFP

SEQ ID NO: 244820 - protein, 118 aa, Glycine max
  Clone ID: PAT_MRT3847_63101C.1.pep
MAKGPGLYSDIGKKARDLLFKDYHSDQKFTITTYSPTGVAITASGTRKSELFLADVNTQLKNKNITTDIKVDTDSNLFTTITVNEPAPGLKAIFSFKVPDQRSGKVEVQHLHDYAGIS

SEQ ID NO: 244821 - protein, 313 aa, Glycine max
  Clone ID: PAT_MRT3847_63102C.1.pep
MAKGPGLYSDIGHRQTHTRFLPSQKNYRDPLFLLRKAMAKGPGLYSDIGKKARDLLFKDYHSDQKFTITTYSPTGVAITASGTRKSELFVADVNTQLKNKNITTDIKVDTDSNLFTTITVNEPAPGLKAIFSFKVPDQRSGKVEVQYLHDYAGISTSVGLTANPIVNFSGVIGTNVLALGADLSFDTKIGELTKSNAGLSFTKDDLIASLTLNDKGDALNAAYYHVVNPLTNTAVGAEVTHRFSTNENTLTLGTQHQLDPLTTLKARVNNFGRTSALIQHEWRPKSFFTISGEVDTKAIEKSAKVGLGLVLKP

SEQ ID NO: 244822 - protein, 264 aa, Glycine max
  Clone ID: PAT_MRT3847_63103C.1.pep
NCDIHDANSRFDLRLAICDLDLYLLLQAITASGTRKSELFVADVNTQLKNKNITTDIKVDTDSNLFTTITVNEPAPGLKAIFSFKVPDQRSGKVEVQYLHDYAGISTSVGLTANPIVNFSGVIGTNVLALGADLSFDTKIGELTKSNAGLSFTKDDLIASLTLNDKGDALNAAYYHVVNPLTNTAVGAEVTHRFSTNENTLTLGTQHQLDPLTTLKARVNNFGRTSALIQHEWRPKSFFTISGEVDTKAIEKSAKVGLSLVLKP

SEQ ID NO: 244823 - protein, 74 aa, Glycine max
  Clone ID: PAT_MRT3847_63104C.1.pep
KPNLTLQTIQPVPNSNNFPRASAKVNSRALVGGLAWVTGNNAPKKAFSTNGKIFKPKVTNNLKTGRSKGSGFVT

SEQ ID NO: 244824 - protein, 89 aa, Glycine max
  Clone ID: PAT_MRT3847_63105C.1.pep
KKEILPKNPRIEESTPFDNFPEEKSQDCIAPPFFLAGSNKICLQEGRAALLHLNLFARWLCWYVDNHGFKKVGGGGGIKNTPGFLKRGG

SEQ ID NO: 244825 - protein, 100 aa, Glycine max
  Clone ID: PAT_MRT3847_63106C.1.pep
MAYEPPFLETYKTLVQQHLGDSRNEFIVERCDIPLIDLGRLSLEREECMREIAEAAREWGFFQVVNHGISHELLKSQSETAVMVRSLSFLSDRHLKDGPA

SEQ ID NO: 244826 - protein, 104 aa, Glycine max
  unsure (1)..(104): unsure at all Xaa locations
  Clone ID: PAT_MRT3847_63107C.1.pep
TSESVNHGHPGMLCDHMMXASLEAGSQHDPXEPMEAXETCAKTNEAMDFGETTIKACVDYEQDCAFHMTEHWILCLMGLDIDADNGWVLENIVQQRPDIAQGVH

SEQ ID NO: 244827 - protein, 87 aa, Glycine max
  Clone ID: PAT_MRT3847_63108C.1.pep
IIEKENSSYIEALSNRKEDLVYLTADSETVLEELDLKKAYVIGGLVDRNRWKGITLKKAEEQGIQTAKLPIGNFMKMSSSQVLLMSQ

SEQ ID NO: 244828 - protein, 114 aa, Glycine max
  Clone ID: PAT_MRT3847_63109C.1.pep
MHASANMKKVKHLVEPPDSKTKLSLWKADLAQEGSFDEAIKGCTGVFHVATPMDFDSKDTEGKIKQTMDKAFWDGIMENEAGEKRPCITFFQRHGWSIMKFIPYGTVYVGICVV

SEQ ID NO: 244829 - protein, 122 aa, Glycine max
  Clone ID: PAT_MRT3847_6310C.1.pep
MAVKSKKEKEHLNLLLGSHLTTIHETLQVLDQTPPSSSSAKVTWDDVIKMAEQVSKQATTVGMLWTGEKPDAKAVEENMASYFNTLQGFLLLSHGSTVGAGPTLSSAVHASVKQVVDSSFRL

SEQ ID NO: 244830 - protein, 56 aa, Glycine max
  Clone ID: PAT_MRT3847_63110C.1.pep
PNYQLRWDIFPLLFPLLGAGHKILFCTSKAKPCSNRNDSLTFLFYYFFKKIKSTLA

SEQ ID NO: 244831 - protein, 101 aa, Glycine max
  unsure (1)..(101): unsure at all Xaa locations
  Clone ID: PAT_MRT3847_63111C.1.pep
IQLSLXDPTHLRMGRAHFLTDKQSPFLVYPTPNYHIMTNVLFPLNQSREHNIQTRPLTEHMHPKQTIIRELALTHIMEERRRKNLPSKRYLRLEGSGAICL

SEQ ID NO: 244832 - protein, 84 aa, Glycine max
  Clone ID: PAT_MRT3847_63112C.1.pep
SISFFSISCFLLFYFLFFVCHFLGQFDSCFFSLPFLLVLCGPACLAFFWGFCKVANFLDIKIKKIKNQKKKKKKKKKKKKKKKK

SEQ ID NO: 244833 - protein, 79 aa, Glycine max
  Clone ID: PAT_MRT3847_63113C.1.pep
IKIPQFDCSPRRSAVTRNCAKSTGGNGVPQIRGASEHPGKKFADQPLQCPHANDIAATASNSMFSCPNADSWEKRGFCK

SEQ ID NO: 244834 - protein, 117 aa, Glycine max
  Clone ID: PAT_MRT3847_63114C.1.pep
LSKILLLRWTIKIRIFPRRKQTKKKLRSPRKKKNLAEFGIVTQCIAPTRVNDQYLTNVLLKINAKLGGLNSMLGVEHSPSIPIVSRARTIIIGMDVSHGSPGQTDIPSIAAVVSSRE

SEQ ID NO: 244835 - protein, 67 aa, Glycine max
  Clone ID: PAT_MRT3847_63115C.1.pep
RARPTRSAYGRHSMNITIPNLSVLSIRQRWHMIGREMTGGVSYVMEESMTRWDHTPQREDHLPPDIQ

SEQ ID NO: 244836 - protein, 81 aa, Glycine max
  Clone ID: PAT_MRT3847_63116C.1.pep
SSESAQRNLVKLIGICIENSFRSLVHELVPNGSVESYLHGVDRGNSPLDWGARMKIALGAARGLAYLHEDSSPRVIHRDFK

SEQ ID NO: 244837 - protein, 83 aa, Glycine max
  Clone ID: PAT_MRT3847_63117C.1.pep
PPPPQNSFFNHLKPIIRAFYEARTFFKNSFHLKRSPLEKKRGPKKNFLLPLYPKKQSFLNGVKNILERLHKKWTGQPILGRGG

SEQ ID NO: 244838 - protein, 253 aa, Glycine max
  Clone ID: PAT_MRT3847_63118C.1.pep
MAEEAALEVVDPNTAAAAAAVDMDVENVEAGGNGAEPNQKRAREEEEPQGGDDDVSKKQRVDEENEKSVEEQRLEKRDEQEEEKGEEKEAEKEEEEEKEASGSVNLGFKSFGSSSEMFHYFYNFLHTWPQYLNVNKYEHLMLLELLKNGHAEPDKKIGGGVRAFQVRKHPTFKSRCFFLIREDDSADDFSFRKCVDHILPLPEEMHLKFDANKALGGGGGGKHYGGGKGGRGGRGGRGGGGRGGHGRGGKWRN

SEQ ID NO: 244839 - protein, 63 aa, Glycine max
  Clone ID: PAT_MRT3847_63119C.1.pep
WRPDSRHLLVCQWKRNPLNTMWWLLLLRQHLRGTVYQCLSYMNIDITSGFIHFWQNFIILRIV

SEQ ID NO: 244840 - protein, 62 aa, Glycine max
  Clone ID: PAT_MRT3847_6311C.1.pep
KSITCFCFPKIKKDPIGLFLKGVRTLVSNNQYKNPGPFSENYFLPWPSFSLNPKGHFLKPPI

SEQ ID NO: 244841 - protein, 208 aa, Glycine max
  Clone ID: PAT_MRT3847_63120C.1.pep
MAEEAAPKVVDPNTVVAAAAAAAVDMDVENIEAGDNGAEPNQKRAREEEEPLGDDDDVLKKQKVAEEKEQSVEEQRLEKRDEKEEKEAEKEEEEKEASGSVNLGFKSFVSSSEMFHYFYNFLHTWPQYLNVNKYEHLMLLELLKNGHAEPDKKIGGGVRAFQVRKHPTFKSRCFFLIREDDSADDFSFRKCVDHILPLPEEMHLKFDA

SEQ ID NO: 244842 - protein, 230 aa, Glycine max
  Clone ID: PAT_MRT3847_63121C.1.pep
MIIKMNCFFFKNKSKSDPELPKRRKKRNQVGNNGASKSSPSSLPSPRSIKELYKEKEHNFRIFTLQEMVNATHGFNRMLKIGEGGFGKVYRGTIKPDPEDGADPILVAIKKLNTRGLQGHKEWLAEVQFLSVVNHPNLVKLLGYCNIDSEKGKQQVIEWVNTCPANSSRFSKIIDPRLKNQYSLGAARKVAKLADNCLKKNPEDRPSMSQIVESLKQALQDSETNTLSSI

SEQ ID NO: 244843 - protein, 187 aa, Glycine max
  Clone ID: PAT_MRT3847_63122C.1.pep
TPLGNLKLEFFKVVVGSRKNRELTQQAVKSALHVLIETCPLGRNRMKIVEAGAVVELIELALEKPEKNMTELIFILLAHLCSCADGREQFLQHAAGIAVVSKRILRVSPTTDDRALHIFSLVSKFSASNEVVQEMLRVGAVSKLCMVLQADCASYLKEKARGVLRLHSKTWNNSPCIQVYLLTRFHR

SEQ ID NO: 244844 - protein, 50 aa, Glycine max
  unsure (1)..(50): unsure at all Xaa locations
  Clone ID: PAT_MRT3847_63123C.1.pep
VRPRKGDALLFYSLLPNGTIDQTSAHGSCPVIKGEKWVATKWIRNQVQXD

SEQ ID NO: 244845 - protein, 124 aa, Glycine max
  Clone ID: PAT_MRT3847_63124C.1.pep
EENPSKRNQYQPPPPYSHYCHTTAQLNFKRWFVIPSWFGLLFCSFIPTYKAKSSTEPAAISLTNVKTTFSFCRTNQDQYSLRVMLSCVEPVGPTMIQENAHSVICLSRSQYLLPRPIYCTNLSQ

SEQ ID NO: 244846 - protein, 99 aa, Glycine max
  Clone ID: PAT_MRT3847_63125C.1.pep
VDRFGSAKSPLPFPGRNFLEKVSNWLPCFSNVGAILVGKVFPAKQNFPGFSCHPWVKYSLGIGLSFQSKMLLGFPTPRGMVGFLFKTTLISKKKKKKII

SEQ ID NO: 244847 - protein, 114 aa, Glycine max
  Clone ID: PAT_MRT3847_63126C.1.pep
FFFLISFFFPFFFFFFFFLFFFILGGPQKTGFILDPTSPGTFFGGKKNPSRGFFILNIKKNWFTPSKSFGAGGQKPPFFPAIFFPWGRSKNHTFLEGGAMSKKNSPSKISGKKS

SEQ ID NO: 244848 - protein, 90 aa, Glycine max
  Clone ID: PAT_MRT3847_63127C.1.pep
KKGRVFNLPRPWCGPLGIRTLKTKAYPSNFKTLENNFSLKALLRNLVFLIPHLISRKTPSQGEKAKTGGKTSFLLTPSKVGTPMEKKKGF

SEQ ID NO: 244849 - protein, 85 aa, Glycine max
  unsure (1)..(85): unsure at all Xaa locations
  Clone ID: PAT_MRT3847_63128C.1.pep
MDTKFLVSGNWKCSGTTEDDLKIVTNLTEAKVPXEYVVANCVXCPPFVFLPVVNSLQRPDFHVSGQHCSVRKSRAYTGDVIADLH

SEQ ID NO: 244850 - protein, 282 aa, Glycine max
  Clone ID: PAT_MRT3847_63129C.1.pep
MDSLCCFSSVSQVVGGRSSCNSGKGKSSQSSVKYGYSLVKGKANHPMEDYHVAKFVQFKGRELGLFAIYDGHLGDSVPAYLQKHLFSNILKDEDFWNDPFMSISNAYETTDQAILSHSPDLGRGGSTAVTAILINNQKLWVANVGDSRAVVSRGGVAGQMSTDHEPNTERGSIETRGGFVSNMPGDVARVNGQLAVSRAFGDKNLKTHLRSDPDIQYTDITPDVELLILASDGLWKVMANQEAVDVARRIKDPQKAAKQLATEALNRDSKDDISCIVVRFKG

SEQ ID NO: 244851 - protein, 201 aa, Glycine max
  unsure (1)..(201): unsure at all Xaa locations
  Clone ID: PAT_MRT3847_6312C.1.pep
MGDFIFSFKTQPQDHAHHQRAKHNNNNNKRLTEDQVAILEKCFASNMKLEPEQKFHLANQLGVPPRQVAIWYQNKRARWKTQSLEVDHGVLQARLENVVAEKKQLEKDVERLKAELKKAQEMLLITNNVKSXTNNNNNASCEFSTSFEEGGSSGVVLDDATHHHHHECWQSGGEVMQVEELYAYFVGANYGTGLHEKGHKI

SEQ ID NO: 244852 - protein, 191 aa, Glycine max
  Clone ID: PAT_MRT3847_63130C.1.pep
MKLDCSNGQAPLAADVSPPQEDGSEEEIFVPPLNFAMVDNGIFRAGFPDSANFGFLKSLRLRSVMCLCPEPYPETTSEFLKANGIRLYQFGIDGCKEPFVNIPNDTIREALKVALDVRNHPLLIHCKRGKHRTGCLVGCIRRLQRWCLSSVFDEYQRFAGAKARVSDQRFIELFDISCLKHHPLSFSCSKK

SEQ ID NO: 244853 - protein, 42 aa, Glycine max
  Clone ID: PAT_MRT3847_63131C.1.pep
ALYNNAHISISLITPFSILIVTPVNISTRDRMCIRTRRRTRV

SEQ ID NO: 244854 - protein, 63 aa, Glycine max
  unsure (1)..(63): unsure at all Xaa locations
  Clone ID: PAT_MRT3847_63132C.1.pep
EDGSQVAXLLPEPRGPFRSRASMDGGGVQVFIVXALQENVXGRISQXDQXCSASXFRRWILRS

SEQ ID NO: 244855 - protein, 64 aa, Glycine max
  Clone ID: PAT_MRT3847_63133C.1.pep
GHVALTRLPLLALGKSVNGIIYESKLWRTIDINAPSLCNSANSSLAVAYKLGLVVCFSDSQKKP

SEQ ID NO: 244856 - protein, 54 aa, Glycine max
  Clone ID: PAT_MRT3847_63134C.1.pep
GLKKWTDYNGRTLVTRLWWRGRKPGLQHGEDFFTYAQAEDTKVDNPPHGWGCNC

SEQ ID NO: 244857 - protein, 95 aa, Glycine max
  Clone ID: PAT_MRT3847_63135C.1.pep
MYFVTFYAGSGWLVVQHRLLRLDKGLKSVRSWITTLFTSLACQIQYFTGMGLIATGLKKDQMFDGDICTLYMSGYTTMDVKVDSYSHISTIVTRE

SEQ ID NO: 244858 - protein, 87 aa, Glycine max
  unsure (1)..(87): unsure at all Xaa locations
  Clone ID: PAT_MRT3847_63136C.1.pep
MHAVPQLRATLFSKVRGTVKFGISGFVSIGLLGARFALQSNDVXLLAVXNPFDTTDYTTQIFKYEIVHGQXNHFNVIVKDKITLLFS

SEQ ID NO: 244859 - protein, 99 aa, Glycine max
  Clone ID: PAT_MRT3847_63137C.1.pep
APQVFFFILPVCIFFANLTVFPFSPGYLFFPFFSKLLFYSLFVKLVFLLYRSGFSRSSPPSFPVFGFFIISLRNPQKYQVNFFIITSFNFKKKKTNFLF

SEQ ID NO: 244860 - protein, 135 aa, Glycine max
  unsure (1)..(135): unsure at all Xaa locations
  Clone ID: PAT_MRT3847_63138C.1.pep
GPSSAVLPASSPXSLASSVLRVXLFXLXPCFSLCPACSPLFLCLXLXFGGGXGLCLAGCLPXXXVLLKKKKSFPPPAXVCLRLXKPPSLSXPXXGLFFXXGLSFLXXLPLRPACFPPAWAIRADQRLGVLSEPNV

SEQ ID NO: 244861 - protein, 109 aa, Glycine max
  Clone ID: PAT_MRT3847_63139C.1.pep
ATRAINISLFCTCLKKTRHHMQGSGLRTRIQSRFMNRITRLMLIKWRLTFRSTCITGLIYTPLLTSSQIWEVGAFSTLKHGSRDLDRRTNGVQYNGRSLAKKALSTSKQ

SEQ ID NO: 244862 - protein, 188 aa, Glycine max
  unsure (1)..(188): unsure at all Xaa locations
  Clone ID: PAT_MRT3847_6313C.1.pep
SNSSVEGTLSRNLGDEISRRLQDVQPVVDEEEEGEGDSYVKTVVTTQRTRKVGSRKPSNTNPQASGTASVPTIHVDEEVREYADAGTITDAVRILPLLEEESAEEQAEAGPSTTSSPQIPQENPPAYTAKPDPVNEQEVLDRHHPRKHGQDIDADDEYEALXQATGVRCTVLEEEVKLRKSERTKRGI

SEQ ID NO: 244863 - protein, 185 aa, Glycine max
  Clone ID: PAT_MRT3847_63140C.1.pep
MPSNDLKHRVTTTTATTNDVNRTSRGKRMLMAKRGLKSLAIAVVLPLSLTALSAYIGSSSSSAHYASRSPFWFPPSWALHLTCPASSFLMGLSAWMVWADGGFHRNPMALLLYFTQLLFTVLWDPLVFALGATRLGLILCVSLFLTQFGCMRLFRPFNPIAADLIKPCLAWVAFLSILNLKLLFV

SEQ ID NO: 244864 - protein, 101 aa, Glycine max
  Clone ID: PAT_MRT3847_63141C.1.pep
ALATDKESVDDIVCEKYDISKEKWAQLCQTRRDPSWEDVRKKTQAIQKQNIVPHMLSRVGYEYLENKLINEKKQKKVEETALSRSTDTVINPPSPIRRHMK

SEQ ID NO: 244865 - protein, 90 aa, Glycine max
  Clone ID: PAT_MRT3847_63142C.1.pep
PSKTCMQGAMIARLIPILRWGSFYFYFHFQFFVRNPALGFCLLCFSMYKSSGRAILEVLCLLYKSCYPFPVNIEVLSLLSLVLFWIILAL

SEQ ID NO: 244866 - protein, 127 aa, Glycine max
  unsure (1)..(127): unsure at all Xaa locations
  Clone ID: PAT_MRT3847_63143C.1.pep
MRLRHRDMEGYXSFGLXGNSKIXATPMYXXLDEEILSKXCTXIXVEEMGFDXCVDEEDXFEEXXLXSAAXQLVLKGLDYXMERIPLATSEGFPHVLSRKNGEKGKRRFDSGDCEQMTLIPGTSVEEA

SEQ ID NO: 244867 - protein, 81 aa, Glycine max
  Clone ID: PAT_MRT3847_63144C.1.pep
ATPFNWQTYSQWPQHSNWITYEHNPPQEMYLNHDRQQLLEVHLGLLLNSPFKKFPFLGKRRPTQEGQFWGRSRPPPKVSHS

SEQ ID NO: 244868 - protein, 52 aa, Glycine max
  Clone ID: PAT_MRT3847_63145C.1.pep
APSKDRMAGQPAINARPPAVQIRGQPFAQKGGYCSSYPLVTPIHFIWLPISC

SEQ ID NO: 244869 - protein, 44 aa, Glycine max
  unsure (1)..(44): unsure at all Xaa locations
  Clone ID: PAT_MRT3847_63146C.1.pep
CLDIGRFDSKNCXGGRRFDFPEHXAFGLGFIEAFXVDGIIQSVV

SEQ ID NO: 244870 - protein, 139 aa, Glycine max
  unsure (1)..(139): unsure at all Xaa locations
  Clone ID: PAT_MRT3847_63147C.1.pep
ARXXXQRAXXKXXQXXXXXAXXGRHXPXTXTXQGGTAXXEXXXXXXTXPRTXHQXXKEXXXGXXPTXXXXDXXXXXRXXDXGXXANNKGKHSXXXXXXXXARXXXQXRXTXXXXXKXXXXXXXXXXREPEEXKQQEEEE

SEQ ID NO: 244871 - protein, 165 aa, Glycine max
  unsure (1)..(165): unsure at all Xaa locations
  Clone ID: PAT_MRT3847_63149C.1.pep
IGAEPELEARMGAANQQFEARHLSVEGSMETSRDTELDQYVAAYYDTLEKYREELTGPIHEAMDGMRLIETQLNMLGYGPERILSDDECEGARSSEXDQDDTGGXTDVTEIDPRADDRELXIHLLKKFSAYLRSLKQELSMKNEKGMLTIDAXHQLLNWRELHYK

SEQ ID NO: 244872 - protein, 107 aa, Glycine max
  Clone ID: PAT_MRT3847_6314C.1.pep
LDAEKEMMSQCVALLGKFIAVREPNIRYLGLENMTRMLMVTDVQDIIKRHQAQIITSLKDPDISIRRRALDLLYGMCDVSNAKDIVEELLQYLSTAEFAMREDLSLK

SEQ ID NO: 244873 - protein, 66 aa, Glycine max
  Clone ID: PAT_MRT3847_63150C.1.pep
ILQPQCSICKTTRRRIKRYGPFLPLLNGSFLSQSYQTDYKHLGQLYQFGLLKQNFNGNNFIVCCYH

SEQ ID NO: 244874 - protein, 54 aa, Glycine max
  Clone ID: PAT_MRT3847_63151C.1.pep
INFLVVILLFILSFFGSSFHHNFDYDIINIEILIHYLLNDLNLFFFTKYFFDIL

SEQ ID NO: 244875 - protein, 273 aa, Glycine max
  unsure (1)..(273): unsure at all Xaa locations
  Clone ID: PAT_MRT3847_63152C.1.pep
MDNIFPLYSLFGYXVLHMIIYSANIYLWRRYKINFPFIFGFKEGTELGYREVFLLSSGLAVLSLAAVLSNLDMEMDQRTKSFSALTELVPLCLVIVLLLITFCPFNIIYKSSRFFLIQCAFHCVCAPLYKVNFPENFLADQLTSQVQAFRSLEFYVCYYFWGNFKTRSNNCLKSDVYKAFYLIVAIIPFWIRCLQCFRRLLEERNTMHGLNGLKYISTVVALVLRTTNEFHRGMVWEISSXTSSSIATIVNTYWDTVLDWGFPRKEFKKPLNP

SEQ ID NO: 244876 - protein, 77 aa, Glycine max
  Clone ID: PAT_MRT3847_63153C.1.pep
LKKRVLHSTRFQQLPKGIHCSVPLEKEHLFNAKHQSYLPCELVHPPPKARLIEGPRARQPRPCKSFELWYFVTQLSF

SEQ ID NO: 244877 - protein, 93 aa, Glycine max
  Clone ID: PAT_MRT3847_63154C.1.pep
VIGSCIAGALHAFGETLTRVLGALVVHELGTLRRRRPLLRRPAFYNHPLDTQSEGSLLEITTMLAEIAMLSMLAKLAMLSMLEVTTLFMLLEF

SEQ ID NO: 244878 - protein, 408 aa, Glycine max
  unsure (1)..(408): unsure at all Xaa locations
  Clone ID: PAT_MRT3847_63155C.1.pep
MVLEATMICIDNSEWMRNGDYSPSRFQAQADAVNLICGAKTQSNPENTVGVLTMAGKGVRVLVTPTSDLGKILACMHGLDIGGEMNLAAGXIQVAQLALKHRQNKKQQQRIXIVFAGSPVKHEKKMLEMIGRXLKKNSVALDIVNFGEEDEGKTEKXLEALLAAVNNNDTSHIVHVPSGPNALSDVLISTPIFTGDGEGGSGFAAAAATAAAGGVSGFEFGVDPNLDPELALALRVSMEEERARQEAAAKKAAEDAAKQEKGGEQQASSQDATMTERAGAATSEAENKTSDLMDDENALLQRKRSRXSDAPAIDHELKDTXMSEASASDXDLALALQMSITDSAKDQSSQSARGKLLADQSFVSSILASLPGVDPNDPSVKDLLASMQNQSEPQQKNDDKPSNEEEKK

SEQ ID NO: 244879 - protein, 215 aa, Glycine max
  unsure (1)..(215): unsure at all Xaa locations
  Clone ID: PAT_MRT3847_63156C.1.pep
PRVRFSLWGGGFLYGWGVIEGSGGXVIDLSSGIAGFTAAYWGXLWMGWSGFNGGAPYAANIDSSIAVLNTNICAATSLLVWTSLDVIFFGKPSVIGAVQGMMTGLVCITPGAGLVQSWAAIVMGXILSGSIPWVTMMILHKKSSLLQKVDDTLGVFHTHAVAGLLGGLLTGLLAEPQLCRLILPVTNSRGXAFYGGSGGIQLFKQLVAAWFNSWM

SEQ ID NO: 244880 - protein, 74 aa, Glycine max
  Clone ID: PAT_MRT3847_63157C.1.pep
RTDKYWMQCRNLSHSVDKLLNWDIKGLGCTIKPLEKVADFLFLYEALPSSPDKSAHSMLWLDSRMNRKLALLLS

SEQ ID NO: 244881 - protein, 72 aa, Glycine max
  Clone ID: PAT_MRT3847_63158C.1.pep
NKLKCTLHTNYLSLLFRSTLINIIYFFFHIIFSSMSSFSLSFLLNHLSSFFFSISLPLDVSFIFFLFHGENQ

SEQ ID NO: 244882 - protein, 70 aa, Glycine max
  Clone ID: PAT_MRT3847_63159C.1.pep
QEIYIKYHKIFSMKSYVYRSLIHQTISSIVLIFQMKKLALIRLQSSSCCSATTNLSPASSLILAKVIFES

SEQ ID NO: 244883 - protein, 159 aa, Glycine max
  Clone ID: PAT_MRT3847_6315C.1.pep
ENVTSLIEFFQSRGMAVLDLVVLSGAHTIGRTSCGSIQYRLYNYQGTGKPDPTLDPKYVNFLQRKCRWASEYVDLDATTPKTFDNVYYINLEKKMGLLSTDQLLYSDARTSPLVSALAASHSVFEHQFAVSMGKLGIVDVLTGLEEGEIRTNCNFVNDY

SEQ ID NO: 244884 - protein, 47 aa, Glycine max
  Clone ID: PAT_MRT3847_63160C.1.pep
NNYMLTIEYNGSTYLPYLISFMSKSFLLLPLSSQENSPNTTCIIACR

SEQ ID NO: 244885 - protein, 76 aa, Glycine max
  Clone ID: PAT_MRT3847_63161C.1.pep
MPNSSPEYSKLRRDFSWVSTESYCRSKCHYRSREVYRPPCFFFSFLEDRGLSQIEADPGRESGAWTILRLLGTLNE

SEQ ID NO: 244886 - protein, 78 aa, Glycine max
  Clone ID: PAT_MRT3847_63162C.1.pep
GVFSRENKTMYISEKGISRKSAYSNLQEREKLRENFSGGKRKGKTIRERTRKLGNGIPNHRFGRIRRKWLLCSTNSAP

SEQ ID NO: 244887 - protein, 69 aa, Glycine max
  Clone ID: PAT_MRT3847_63163C.1.pep
RGVHIYIYIYIYIYIYILSYLIFFQFFPLYQQILLRMTLLELMYERGQMKISGLLMKNLKRGQTTQDRS

SEQ ID NO: 244888 - protein, 107 aa, Glycine max
  unsure (1)..(107): unsure at all Xaa locations
  Clone ID: PAT_MRT3847_63164C.1.pep
HLPHEENVYIDKLAVQAECYEXMVEXLERVSFGADNNELTXEEMNLFLPACWNVIRARRAWWLIISSIEQKEESLSHHDHVSGMLHYRVMIVSELCNICDVVLKLLD

SEQ ID NO: 244889 - protein, 119 aa, Glycine max
  unsure (1)..(119): unsure at all Xaa locations
  Clone ID: PAT_MRT3847_63165C.1.pep
FVQKRHDNNFKPLKKTFLSITELLVARXIFSDHLPFSGLYEXLIFLSWTICIFYXITSNVVFTQDFATFGLLTKTHKFVILVHALPSHWLMMHVITMILGYVFLLCXSSLSMTILVITL

SEQ ID NO: 244890 - protein, 83 aa, Glycine max
  unsure (1)..(83): unsure at all Xaa locations
  Clone ID: PAT_MRT3847_63166C.1.pep
HFQSRVKQSYATLNLIFTHQSSVLAMASIQQLIVLLPMVFKAPLRIEYHQHLXPQXQVYVHQYPHALALXLQRLFRPHSKAAR

SEQ ID NO: 244891 - protein, 58 aa, Glycine max
  Clone ID: PAT_MRT3847_63167C.1.pep
KLHTVNNPTWEGILTHNMSKLQSLYCGPIISYMMNVKVQALYLKVNDELLLVQHIMDR

SEQ ID NO: 244892 - protein, 88 aa, Glycine max
  Clone ID: PAT_MRT3847_63168C.1.pep
KGQLHIGPLTPSAYTKLIKQGSLPLERREAYLPQMKYQPFHPRDNSYKNKTKRFHHKKAKSRCDWLLHRLPKQEPGLWYTRGQHTKRF

SEQ ID NO: 244893 - protein, 85 aa, Glycine max
  Clone ID: PAT_MRT3847_63169C.1.pep
CKVLSKEELTISVVLTTEACMCFPSTVMFYGRIAGVHEVEPVEFKLPFMEAASSATIEERTDVSIRAKYVQAASIAATADSAAFS

SEQ ID NO: 244894 - protein, 80 aa, Glycine max
  Clone ID: PAT_MRT3847_6316C.1.pep
LLERQHTIVSLSFRDLYHNNQCGAYLHAWPHQSFVPSLYPQQGYFLPFNRSCSWYSKAPTQALESQSPYPWFSACACANA

SEQ ID NO: 244895 - protein, 58 aa, Glycine max
  Clone ID: PAT_MRT3847_63170C.1.pep
RNIGSGAPCRHMLLMFLYALRLSGSPRIAVDDMVSVVRFAGDSAIRAALSTRATRAVR

SEQ ID NO: 244896 - protein, 193 aa, Glycine max
  Clone ID: PAT_MRT3847_63171C.1.pep
MADNSISLFSPYNKMGKFNLSHRVVLAPMTRCRALNGTPLAAHAEYYAQRSTPGGFLITEGTLISPTSSGFPHVPGIYSDEQVEAWRNVVDAVHANGSFIFCQLWHVGRASHPVYQPGGAPPISSTSKPISDKWKILMPDGSHGIYPEPHALTTSEISEIVHHYRQAAINAIRAGFDGIEIHGAHGYLMINSW

SEQ ID NO: 244897 - protein, 231 aa, Glycine max
  Clone ID: PAT_MRT3847_63172C.1.pep
PRENRALANAIGCRPLFSATLHDFVEDLARDLMHDADRVIVGRNNIASETKKLKLIFTRSGEGKLPEIRQCFGLGLNPELLVFLQSKERAKELYSELAFDKSRIDVIHSDLSQAERENAVDNFRAGKTWVLIATDVVARGMDFKGVNCVINYDFPDSAAAYVHRIGRSGRAGRTGEAITFYTEDDIPFLRNVANLMAASGCEVPSYLMELRKKKWKKHRPKRDSISTKPDL

SEQ ID NO: 244898 - protein, 105 aa, Glycine max
  Clone ID: PAT_MRT3847_63173C.1.pep
TRADVDKSGTIDYQEFITATINRHKLEKEENLFKAFQYFDKDSSGYITRDELRQALTEYQMGERATIDEVIDDVDTDNDGKINYQEFVAMMRKGILDIDEKEKPQ

SEQ ID NO: 244899 - protein, 74 aa, Glycine max
  Clone ID: PAT_MRT3847_63174C.1.pep
QLDMQELLFYIANFKGVTVILIHWTNSRAMTFSHAAASASTSLQTSLPTRAMTFSHAAASASTSLQTSLPTRTS

SEQ ID NO: 244900 - protein, 137 aa, Glycine max
  unsure (1)..(137): unsure at all Xaa locations
  Clone ID: PAT_MRT3847_63175C.1.pep
MDKLCCFKDSYSQLVAARSSSSTGKGKNHEGSIKYGFSLVKGKANHPMEDYHVAKFAQIQDNELGLFAIYDGHVGDRVPAYLQKHLFTNIXREEEFWEDPTLSISKAYESTDQEILSHXSDLGRGGSTAGTAILING

SEQ ID NO: 244901 - protein, 49 aa, Glycine max
  Clone ID: PAT_MRT3847_63176C.1.pep
IKKTFFFLTCLFIGGDSYMLNDKMKNEGGSPHQELKVQTVPKKSNIKQK

SEQ ID NO: 244902 - protein, 63 aa, Glycine max
  Clone ID: PAT_MRT3847_63177C.1.pep
LKPQNYIHSTIHISTHQRKWLVPILHSSRAAEHLYSRYYFPSKRIFHSPTSASLCQLWNFFVD

SEQ ID NO: 244903 - protein, 63 aa, Glycine max
  Clone ID: PAT_MRT3847_63178C.1.pep
TLNFFYTESFFSCPSYSLLCGSFSILLQIKLLTHITPHYNYFLCILSTLLILTPYMTVPSLDY

SEQ ID NO: 244904 - protein, 109 aa, Glycine max
  unsure (1)..(109): unsure at all Xaa locations
  Clone ID: PAT_MRT3847_63179C.1.pep
MQDVEAPSQCFVYCQDWVRMPWWVTYPACGQADSALVTEHVVKGKRPSVGQYLSVNHEAKCFFEPLMGAYXPNRLNNDAVIRDCFIYNIPVVLNEVDSQSFERAAAGVK

SEQ ID NO: 244905 - protein, 47 aa, Glycine max
  unsure (1)..(47): unsure at all Xaa locations
  Clone ID: PAT_MRT3847_6317C.1.pep
LEPLNSGXSSWXLTFHXGRLGLXXWWRKXDIGKLXSKLVXKVXAPEE

SEQ ID NO: 244906 - protein, 60 aa, Glycine max
  Clone ID: PAT_MRT3847_63180C.1.pep
LQTYFTVKHLKHSHQKSQHTLLLGLGLHLQTVFVDKNYIFRNRYQNFMHRGYFSDTWLNS

SEQ ID NO: 244907 - protein, 111 aa, Glycine max
  unsure (1)..(111): unsure at all Xaa locations
  Clone ID: PAT_MRT3847_63181C.1.pep
DHACYGYNKKQFGILLLLEKQRFLLNLNVHRDLLIYKSSXFADKLSEQSSLSCLQVDDXEDVEIYVETVGLIYCKEMKHHLMKQSVSHILLILNVIEFLGFNXCIQSCMEY

SEQ ID NO: 244908 - protein, 39 aa, Glycine max
  Clone ID: PAT_MRT3847_63182C.1.pep
QPRYNMFALKSLYNMGTNYNLLYLKKLETTYKGIAIFKK

SEQ ID NO: 244909 - protein, 51 aa, Glycine max
  Clone ID: PAT_MRT3847_63183C.1.pep
NPPAPFTHTIPPPETEDVSCVIMLLLDYEINKFTHALVIEPESTGDKITGY

SEQ ID NO: 244910 - protein, 76 aa, Glycine max
  unsure (1)..(76): unsure at all Xaa locations
  Clone ID: PAT_MRT3847_63184C.1.pep
MVNDVEQVTGQGEYSLRDYHDPPPSTADDPXELTRWSLCTDTISEFIATLLCLYMIVLTIIGFKRLGDSKVLGNTK

SEQ ID NO: 244911 - protein, 41 aa, Glycine max
  Clone ID: PAT_MRT3847_63185C.1.pep
VTHHPLSIFLVLSLYGDKIPTTLSYSPNAIIRADAIRNIIL

SEQ ID NO: 244912 - protein, 219 aa, Glycine max
  Clone ID: PAT_MRT3847_63186C.1.pep
ILLDDKWTPKIADFGMARLFPEDQSQVHTRVAGTNGYMAPEYVMHGNLSVKADVFSYGVLVLELITGQRNSSFNLDVDAQNLLDWAYKMYKKGKSLEIVDSALASTIVAEEVAMCVQLGLLCTQGDPQLRPTMRRVVVMLSRKPGNMQEPTRPGVPGSRYRRPRRHSALSSTVGTSGASDSHTSDSSNNYNTTVTTSATGTISATAETDPKGKRPIREG

SEQ ID NO: 244913 - protein, 94 aa, Glycine max
  Clone ID: PAT_MRT3847_63187C.1.pep
KQPSIFFFLQLFEFQIFYLFSLLKRFVLTSIKFSINKPPETDTSTPPSPTPESAPTRSSPSSGSLTDGNDNSIFFLRCRFRLTTNEGFVLNHFY

SEQ ID NO: 244914 - protein, 48 aa, Glycine max
  unsure (1)..(48): unsure at all Xaa locations
  Clone ID: PAT_MRT3847_63188C.1.pep
IYTQLLVGHSSVSRRAESPPSLQSIYAKMIAGAGTQTEREXEKPRAPP

SEQ ID NO: 244915 - protein, 88 aa, Glycine max
  unsure (1)..(88): unsure at all Xaa locations
  Clone ID: PAT_MRT3847_63189C.1.pep
MGSNGTSWADQWDNGPDPVTVSNESKKKNNALGKTKAVASTGVKKLKEGTXLASNGSRPSTTKLPRNIKLTYLWFLLVHIYNIYSLPF

SEQ ID NO: 244916 - protein, 61 aa, Glycine max
  Clone ID: PAT_MRT3847_6318C.1.pep
LGTHSGFMRLIYIVNRPGHYRSFTGASISSPKRIMIFHQCVYYVHVRNKCVCIPKFLFLAF

SEQ ID NO: 244917 - protein, 86 aa, Glycine max
  Clone ID: PAT_MRT3847_63190C.1.pep
FFEHLSFLIYSFKGPKLPHRYSLLFGLHCFLIELILATRCMLIAAIDLSFPDVYYVLFPHNQLHTCSLNSSATVSLWKFLFRNSGE

SEQ ID NO: 244918 - protein, 125 aa, Glycine max
  unsure (1)..(125): unsure at all Xaa locations
  Clone ID: PAT_MRT3847_63191C.1.pep
MACTEHGHGSVMLGLVLLSLSASQSCCYGLSTFGFDIHHRFSDPVKGMLGIDDVPQKGTPQYYAVMAHRDRIFRGRRLAGADHHSPLTFAGGNDTHRIASLWILQFCXNVSVGTPTLWFFGSGGY

SEQ ID NO: 244919 - protein, 53 aa, Glycine max
  Clone ID: PAT_MRT3847_63192C.1.pep
FLNNLLTPTRLILLLLFSFSTFIFFFSCSISLISYYNATYNFSSTPSLPYSSP

SEQ ID NO: 244920 - protein, 65 aa, Glycine max
  Clone ID: PAT_MRT3847_63193C.1.pep
GPIVKWGSPFIIKLPFHFGPLGRPRFSGNCKGFLFLYFSKKQNFFIPKKQRKFWGFYFPTFIPNF

SEQ ID NO: 244921 - protein, 82 aa, Glycine max
  Clone ID: PAT_MRT3847_63194C.1.pep
AKTLHFFFFGTIHNSSFSNYEGGRGITNIHQTLYFLHLHIVLLLITFYPLPLTQNTLLISTMPLSNYNLIFFTLISTNLDKN

SEQ ID NO: 244922 - protein, 53 aa, Glycine max
  Clone ID: PAT_MRT3847_63195C.1.pep
RLREDDRRGSLNKDVLMTKKKTFIPGSISDNYRALSHGGPLSHPKKVMKVEIE

SEQ ID NO: 244923 - protein, 63 aa, Glycine max
  Clone ID: PAT_MRT3847_63196C.1.pep
STLRQSLFSGHTYRSRTSRSNPPCRCSYTISNGVVRSFSSSSNAFCVVGGISHRSQVKYAESQ

SEQ ID NO: 244924 - protein, 52 aa, Glycine max
  Clone ID: PAT_MRT3847_63197C.1.pep
RITTSSLEYLCRSRACERDSRQLRTQYIDVAMEYAYGAPHFCLVSEIMLVEF

SEQ ID NO: 244925 - protein, 157 aa, Glycine max
  unsure (1)..(157): unsure at all Xaa locations
  Clone ID: PAT_MRT3847_63198C.1.pep
DLKKKKKKKXKKXKXXXXXXXXXXXXXXXKKKXKKKKEXXNKKKKKKXKQIKINKKKXKXKKKKYKKNKKKKKKIKKKKKKXKKKKXXXKKKKKKKKKKKKKKKKKKXKXXKKKXXKKKXKKXXXKKKKKKKNKKKKKKKXXKKKKXKKKXKKKKKK

SEQ ID NO: 244926 - protein, 45 aa, Glycine max
  unsure (1)..(45): unsure at all Xaa locations
  Clone ID: PAT_MRT3847_63199C.1.pep
LXPMXAXXXSPTXLSSACHMXSDGXIGLXTIKCVVYXXNVASIGT

SEQ ID NO: 244927 - protein, 43 aa, Glycine max
  Clone ID: PAT_MRT3847_6319C.1.pep
QINFQCLDASFFMITVSLPNPNSLEILYTSPHPSYSSPPLPYL

SEQ ID NO: 244928 - protein, 83 aa, Glycine max
  Clone ID: PAT_MRT3847_631C.1.pep
LKETNFKSSKPHKKPYLHIQILRAWVISLNMNTNTFFQILTLPYIFKSLLLIEVKRSLFLLFFYFFYMVFIIFERVWGLILVV

SEQ ID NO: 244929 - protein, 56 aa, Glycine max
  Clone ID: PAT_MRT3847_63200C.1.pep
GGLFPPVSLGIKGLAKNGSSIKVTKNHTWDNPWFSNGVNTIGSPENLKTSHFSLKK

SEQ ID NO: 244930 - protein, 80 aa, Glycine max
  Clone ID: PAT_MRT3847_63201C.1.pep
MNSIDVEGQFRNVSGAVESQCTDKSPKSFPLPNHMPQETNGAGGASLVQGKNQKCEGKDIPTPVSYQQGLPVDVPQISVN

SEQ ID NO: 244931 - protein, 463 aa, Glycine max
  Clone ID: PAT_MRT3847_63202C.1.pep
MATRPYGSEKKTERGSQQPNHMLPLLGSNMAQTLNCRTLQPMDSTMIKSLSHNPKNANSTAFTRHFAKKSGVFIKIMASATPTAAPITFGFKNLLETFTVDVHRAENRPLNVPLIAPFTIATSRLAKVENVAIRVELSNGSVGWGEAPILPFVTAEDQTTAMAKASEACAFLRRCPALTLGSMLGEIAGILPGHQFASVRAGMEMAIIDAVANSIRVPLWRLFGGASNTITTDITIPIVSPAEAAELASKYYKEGFKTLKLKVGKNLNADIEVLQAIRVAHPECQFILDANEGYNSEEAVEVLEKLHDMRLTPVLFEQPVHRDDWDGLRYVGNIARERYGVSVAADESCRSIVDVYKIVEGNVLDVINIKLAKVGVMGALEIIEKAKAAGLDLMIGGMVETRLAMGFAGQLAAGLGCFKFIDLDTPLLLSDDPVLEGYEVSGATYKFTNARGHGGFLHWDNLA

SEQ ID NO: 244932 - protein, 185 aa, Glycine max
  unsure (1)..(185): unsure at all Xaa locations
  Clone ID: PAT_MRT3847_63203C.1.pep
MNEYFRVSNCKNAKEMXDTLLVIHEGTTAXEDDRRGTLTYEYELFRMNQYETIQDMQKIFTHIVNHLASLGKIFPNEDLINKVLRCLSRQXQPKVTAIAESKDLNNMSLATFFGKLQEHEMELIRLHQHEENDKMKKGIAPKASSSSIQEESDKEDLNEIEEDDDFIFFVKRFNKFLRHKKKTTP

SEQ ID NO: 244933 - protein, 72 aa, Glycine max
  Clone ID: PAT_MRT3847_63204C.1.pep
DLTMGGRGETRPAMGFAGQLAAGHGCFKFIDLDTPLLLSDDPVLEGYEVSGATYKFTNARGHGGFLHWDNLA

SEQ ID NO: 244934 - protein, 79 aa, Glycine max
  Clone ID: PAT_MRT3847_63205C.1.pep
SSEEGNSDGGRERKVSAEAVTDFLRINRKFQLFLKGLLLILVVAAELLPLFSVTRKKRKYSHLPILLEHVLTCAQVNIL

SEQ ID NO: 244935 - protein, 52 aa, Glycine max
  Clone ID: PAT_MRT3847_63206C.1.pep
MEAHIWVESEVPGNHGSTNFAGLKVLVMDDNGVSRTVTKGLLMHLGCDVTFA

SEQ ID NO: 244936 - protein, 56 aa, Glycine max
  Clone ID: PAT_MRT3847_63207C.1.pep
GRESSSAPNPMAGYLKPFNRPLPASSPPGNLIGPMSYLALCLQMTFMPSPILVQTL

SEQ ID NO: 244937 - protein, 44 aa, Glycine max
  Clone ID: PAT_MRT3847_63208C.1.pep
KFLSKRMQDSLTWLSSDQSSPKFKACVAGEPHYLKTVAACSIFL

SEQ ID NO: 244938 - protein, 96 aa, Glycine max
  unsure (1)..(96): unsure at all Xaa locations
  Clone ID: PAT_MRT3847_63209C.1.pep
VRRVDRQRXKGTRSLHLPSLQFXLFLSNSPIXFRFXXXRVPGGPVDXGXTRXFKGGCXRLXAPXXLAGXKXEXKLKXRFGAKKFPGGKSPREXMLK

SEQ ID NO: 244939 - protein, 82 aa, Glycine max
  unsure (1)..(82): unsure at all Xaa locations
  Clone ID: PAT_MRT3847_6320C.1.pep
MSCCRWNCGCRNSCQCSNACGRCKMYPDLNYTESTTTETFYIVVTPITAQFEVAEMGVPTNNDGCXRGPNCSCNPCTCTRCV

SEQ ID NO: 244940 - protein, 63 aa, Glycine max
  unsure (1)..(63): unsure at all Xaa locations
  Clone ID: PAT_MRT3847_63210C.1.pep
XXXXXRXTXXXXXXYDXXRXXXXXXXXXHSXXTXXXXKXXRXXXXEREXSSRXPXLRXRXCDV

SEQ ID NO: 244941 - protein, 39 aa, Glycine max
  Clone ID: PAT_MRT3847_63211C.1.pep
SLPFVDRLKLWLFIAYVVSFVSLAGSAGLLIQDSLDKSA

SEQ ID NO: 244942 - protein, 218 aa, Glycine max
  unsure (1)..(218): unsure at all Xaa locations
  Clone ID: PAT_MRT3847_63212C.1.pep
LFFISITHIHSQQPKTEPKKKKEITFPIQISETLRISLASDQKSKTSKKFAAEAGLPVLTNVLLPKTKGFHACLEALRGSLDAVYDVTIAYKNQCPSFLDNVFGVDPSEVHLHVRRIPVEEIPASETKAASWLIDTFQIKDQLLSDFKIQGHFPNQLNENEISRFKSLLSFMVIVSFTAMFIYFTFFSVIWFKLYVGLSCAYLTLATRFNXQLMPLSS

SEQ ID NO: 244943 - protein, 431 aa, Glycine max
  unsure (1)..(431): unsure at all Xaa locations
  Clone ID: PAT_MRT3847_63213C.1.pep
MNNTYLSKTSKLTTVIEKRNNFSDSNIGNPENLPRKKGSFFNRFLKKMEVLHPVKSENIRCSSPLTPFRLLRGLICLVVFLSTALMCLVYFVPVAVVGLRLFSVRCSRKTVSFIFGLWLSLWPSLIEKSHKPNHXFSGDSLHXEPSLFYSDSFFYGHVYLYLWDLAHLVQTLGCIKYILKSSLMKLPIFGWGFHILEFIXPVERKWEIDEQILQQXLXTFKDPQDPLWLGFNPLLFFQSDQKSKTSKKFAAEAGLPVLTNVLLPKTKGFHACLEALRGSLDAVYDVTIAYKNQCPSFLDNVFGVDPSEVHLHVRRIPVEEIPASETKAASWLIDTFQIKDQLLSDFKIQGHFPNQLNENEISRFKSLLSFMVIVSFTAMFIYFTFFSVIWFKLYVGLSCAYLTLATRFNFQLMPLSSYVHALHNSKNQKSE

SEQ ID NO: 244944 - protein, 69 aa, Glycine max
  Clone ID: PAT_MRT3847_63214C.1.pep
AAPLLISPPVSDLFVIPIPVSFIHSFIHSLLFFISITHIHSQQPKTEPEKKKEITFPIQISETLRISLA

SEQ ID NO: 244945 - protein, 58 aa, Glycine max
  Clone ID: PAT_MRT3847_63215C.1.pep
VSTLVQVVGIIICLHAATRISHRAQNIVSVASRWHAMLTCTSSDAPSQLRSSASAGSL

SEQ ID NO: 244946 - protein, 87 aa, Glycine max
  Clone ID: PAT_MRT3847_63216C.1.pep
ELANKWESRQIFDGSFCAPPIPISGACHKHLQKKGGQHQCPCRIGSAHLILCFQGNFLWEEISQNVHPFSQYLVKKIYKYIGSNARK

SEQ ID NO: 244947 - protein, 85 aa, Glycine max
  Clone ID: PAT_MRT3847_63217C.1.pep
PKSILFRINSNTPLVCPSFSELQCYMVLGWNLSLCSYISHFCIMVKQEAAALAATQVAFVLQSGQRRGLQFAIAPGPPTLHQEQV

SEQ ID NO: 244948 - protein, 56 aa, Glycine max
  Clone ID: PAT_MRT3847_63218C.1.pep
LGLSILIEVGENLLLIDYVYINSSTNKVHVDSTLGLLSKSYYLKQNLCTCQQVNKF

SEQ ID NO: 244949 - protein, 58 aa, Glycine max
  unsure (1)..(58): unsure at all Xaa locations
  Clone ID: PAT_MRT3847_63219C.1.pep
RRCRSEHRHRSLKMYHPHVXXLXVLTDSFAXSXXLXTTHGASRYSSRXSLAAAXTGRX

SEQ ID NO: 244950 - protein, 431 aa, Glycine max
  unsure (1)..(431): unsure at all Xaa locations
  Clone ID: PAT_MRT3847_6321C.1.pep
SSSSSPKRGRHSNLFLILGIAIGIIFIAIISVLIFCLCTFLSKAKTPPIETEKPRTESAISTVGSLPHPTSTRFIAYEELKEATNNFEPASVLGEGGFGRVFKGVLNDGTHVAIKRLTNGGQQGDKEFLVEVEMLSRLHHRNLVKLVGYFINRDSSQNVLCYELVPNGSLEAWLHGPSAASCPLDGDTRMKIALDAARGLSYLHEDSQPCVIHRDFKASNILLENNFHAKVHXMEIALDAARGLAYLHEDSQPCGTFGYVAPEYAMTGHLMVRCEVYSNGDLLEGLLSGRKHVDISQPYGEXNLVNRAGPILRDKDRLEELADPRLGGRYPKEDFVRVCTIAAACVAPEASQRPTMGEVVQSLKMVQRITESHDPVLASSNTRPNLRQSSTTYESDGTSSMFSSGPYSGLSSFDYDNISRTAVCPEDLHEG

SEQ ID NO: 244951 - protein, 98 aa, Glycine max
  Clone ID: PAT_MRT3847_63220C.1.pep
FLLQIPSEQDQLRARQIIAQKINKVEELWKTNPDASFDDLDKPGVDDEPQSVALKYENAYQYQNVFAPLIKLEADYDKMMKESQRKDNVPIRWDIGLN

SEQ ID NO: 244952 - protein, 52 aa, Glycine max
  Clone ID: PAT_MRT3847_63221C.1.pep
HNTNINAAIKTENEKEQRGSIHAAARRESRNGGEFSSFQGQHLVASREIIAT

SEQ ID NO: 244953 - protein, 95 aa, Glycine max
  Clone ID: PAT_MRT3847_63222C.1.pep
SAVFWALDLGGNQKWSCQVHALYKELEVRSSHPISVYLGLLCIALNQCPLVCFILVNVGCVMCCDYVPVYSCHCPSNGCVKVQYQWRANVLGKGY

SEQ ID NO: 244954 - protein, 355 aa, Glycine max
  Clone ID: PAT_MRT3847_63223C.1.pep
MGRAPCCDKSNVKKGPWSPDEDAKLKSYIEQHGTGGNWIALPQKIGLKRCGKSCRLRWLNYLRPNIRHGGFSEEEDNIICSLYVSIGSRWSVIAAQLPGRTDNDIKNYWNTRLKKKLLGKHRKELQARNKGNGGILKQENSSSLLLQQNSAQQLHPCWPQIPVLPLSSPYTNQSPSFNDQDSIRKLLIKLGGRFSDDYQPILDGLNLQFPHGSNSLSSTQQIQEEQVHVGSSALGCMNSIGHNQVQFGQSNEYCAELVQGQGSFITTAIGEMVSSNDYSRRLLGGSLEFFYGEEMITDNKIMGACASSSCGQSTNWGETSSSLMYPSLVASNYEGVRQEMPRECAFQELSYPGAQ

SEQ ID NO: 244955 - protein, 62 aa, Glycine max
  Clone ID: PAT_MRT3847_63224C.1.pep
HYFQNTHGLILIVSSYVRDREVEARDELHRMLNEVDLRDADSLVCPNKQDLSTAMNAEKLTD

SEQ ID NO: 244956 - protein, 91 aa, Glycine max
  Clone ID: PAT_MRT3847_63225C.1.pep
FFFFFFFFFFFFFFFFFKKTKPFKEIKYHPSGGELAVKKKLRGMVKPNLGKPLTTKKRVFNIDQKGDSTTLTNRWWMKRCKNYKFSTTAHN

SEQ ID NO: 244957 - protein, 42 aa, Glycine max
  Clone ID: PAT_MRT3847_63226C.1.pep
TFQRPPFLFFFGPLKLSRFLILLETQGGDFPYFLLSAPQLKS

SEQ ID NO: 244958 - protein, 128 aa, Glycine max
  unsure (1)..(128): unsure at all Xaa locations
  Clone ID: PAT_MRT3847_63227C.1.pep
RRLWLALCGLYGFPLAPAGSKRVKSLGRLVSVTGMTALYIHTVGHALVRLTREVEVGILVAGMEGAVMYGSPSMGPSFGTVIISGQXAARLALKAWGSNYAIDGACEVGRGIPPSILAFGYNEEIVDA

SEQ ID NO: 244959 - protein, 122 aa, Glycine max
  Clone ID: PAT_MRT3847_63228C.1.pep
PPPFFDELGDPNPRWPKGGFLPPWFNFKSPELKGVPVGILLKLFPHPPRNQGPFFGLGNCEKGTKTPKGGFPKKGPGRDPPGIWGPGKNCFKKKGVPHFPPPPGGVQKKPGFPVFQRGVTPE

SEQ ID NO: 244960 - protein, 118 aa, Glycine max
  unsure (1)..(118): unsure at all Xaa locations
  Clone ID: PAT_MRT3847_63229C.1.pep
MASSSKKQKKAMEXINSRLALVMKSGKYTLGYKSTLKTLRQGKAWLVIISDNCPPLMKSEIEYYAMLAKCGVHHYAGSNIDLGTACGKYFRVGVLAITDPGDSDIVKHVPVAGESEAQ

SEQ ID NO: 244961 - protein, 95 aa, Glycine max
  unsure (1)..(95): unsure at all Xaa locations
  Clone ID: PAT_MRT3847_6322C.1.pep
LERNPPMYGGNSQQGYQARAPTSWGPTAAPMPQSGYGYAHTAAYYGPHYYNMPHQQYASYPPQPSGXYSATNWDQSTDPQQQSTHAWYDYYSQQQ

SEQ ID NO: 244962 - protein, 56 aa, Glycine max
  Clone ID: PAT_MRT3847_63230C.1.pep
RRANMDGQMVVHEHTQHTGKELREDGCDIVEAGDRELKTIWDEQNLLKADHNVEEA

SEQ ID NO: 244963 - protein, 62 aa, Glycine max
  Clone ID: PAT_MRT3847_63231C.1.pep
MLGLLSFYNLFFYSSIENHLDIYPCVRTVYRFFLIFNTLVTFLCPKAFKYDYFSYKNVSRIN

SEQ ID NO: 244964 - protein, 79 aa, Glycine max
  Clone ID: PAT_MRT3847_63232C.1.pep
HIKPQQLEPLLKNNPKPMILPNVYRHGLSKHMLSMTSVNNMSSSTLSIKLPCAPLILILSKQQDTIPGTKLYILIPAIS

SEQ ID NO: 244965 - protein, 172 aa, Glycine max
  Clone ID: PAT_MRT3847_63233C.1.pep
TFPAIDPLRLTVGFWKVGLSGYEADEILYGDYGVVCELVGNKSITYAFNLGTCRDHVQRLLSGIKHLAATYVTIQQPEERVLTVHAPFDDKITSLIPRDAFFASKRKVTIKESIGEISGELICPYPPGIPVLIPGEVITKKAVDYLLHVRSKGGDITGASDPLLSSIVVCNV

SEQ ID NO: 244966 - protein, 39 aa, Glycine max
  unsure (1)..(39): unsure at all Xaa locations
  Clone ID: PAT_MRT3847_63234C.1.pep
MHGLYEEEEASDPNAXPTDFTIREAYAREAQSMATERYW

SEQ ID NO: 244967 - protein, 78 aa, Glycine max
  Clone ID: PAT_MRT3847_63235C.1.pep
VVVGQLMWSSSVLNANSKPYAAGWVGWQINFGEANTIHTFIHLWVRRNILCVYVFFLLLLGRRVKIFSLIFFNYNKTH

SEQ ID NO: 244968 - protein, 77 aa, Glycine max
  Clone ID: PAT_MRT3847_63236C.1.pep
TVLLRAHGQNRMHVLIRISLQCAIQYCRRVVKHVSIMPSRCCFSTFELSFELSVPGVVSRAYSIRIRSIISIKFSES

SEQ ID NO: 244969 - protein, 156 aa, Glycine max
  unsure (1)..(156): unsure at all Xaa locations
  Clone ID: PAT_MRT3847_63237C.1.pep
KLWAPCFWFFSPLPPFKIRFGPLCLRETPGCLFFVTNRGVVFLFPNAQKWAGGGPMVGASSGFSPRDPLVVGNPPPFLMDSLATKFGLLKSQICLVGGRFAPYFLFGQNGGCKTFFVFSGVPPRAMFXGPNNSIQRGFFSPKISVFFSLKAAAVCL

SEQ ID NO: 244970 - protein, 67 aa, Glycine max
  Clone ID: PAT_MRT3847_63238C.1.pep
GGFFPPPNGDPPKYCDPREKPHPPPQKGGNPKLGGGSPKKNPPTGPLFFGQGEKQIPTTQTQTPPYS

SEQ ID NO: 244971 - protein, 575 aa, Glycine max
  unsure (1)..(575): unsure at all Xaa locations
  Clone ID: PAT_MRT3847_63239C.1.pep
MGGGGTLVQGIRRLFKRRASSPASDDHNHNNVNANNSRVLVRDLRAQLASIPNTLDPVSDFDFSTLKPIKVPTPIPFRPSSMDHHKKGAQETEFFTEYGEASQYQIQEVVGKGSYGVVGSAIDTHTGEKVAIKKINDVFEHVSDATRILREIKLLRLLRHPDIVEIKHIMLPPSRREFKDIYVVFELMESDLHQVIKANDDLTPEHHQFFLYQLLRGLKYIHTANVFHRDLKPKNILANADCKLKICDFGLARVSFNDAPSAIFWTDYVATRWYRAPELCGSFFSKYTPAIDIWSIGCIFAEMLTGKPLFPGKNVVHQLDLMTDLLGTPPPESIARIRNEKAKRYLNSMRKKQPIPFSQKFPNADPLALRLXEEALSDPYFTGLANMDREPSTQPISKLEFEFERRKLTKDDVRELIYREILEYHPQMLQEYLRGGDQTSFMYPSGVDRFKRQFAHLEEHYGKGERSTPPLQRQHASLPRERVCAPKDESKQNNDSEKPSGSNLQQSPPGSDETGAQNGTSKQNYSARSLLKSASISASKCVVLKQKKDPEQEPITEVNDEAVDGVTGEIAALHA

SEQ ID NO: 244972 - protein, 65 aa, Glycine max
  unsure (1)..(65): unsure at all Xaa locations
  Clone ID: PAT_MRT3847_6323C.1.pep
GGAVADSPAXVEEKTEFDLLIXRCRASARIAVIKAVRALTNLALKDAKDFIEGFPNKFKEWISKD

SEQ ID NO: 244973 - protein, 201 aa, Glycine max
  Clone ID: PAT_MRT3847_63240C.1.pep
PRVRALSDPYFTGLANMDREPSTQPISKLEFEFERRKLTKDDVRELIYREILEYHPQMLQEYLRGGDQTSFMYPSGVDRFKRQFAHLEEHYGKGERSTPPLQRQHASLPRERVCAPKDESKQNNDSEKPSGSNLQQSPPGSDETGAQNGTSKPNYSARSLLKSASISASKCVVLKQNKDPEQVQFAERSYYMEGHVIPTNL

SEQ ID NO: 244974 - protein, 280 aa, Glycine max
  unsure (1)..(280): unsure at all Xaa locations
  Clone ID: PAT_MRT3847_63241C.1.pep
MAAPASNAVLLGDVHFDDVAAKPCGVHFRGETRRGALRATVNLRKPKTLSGILNFGCSTSDASWRSWNPSSLHRNSSFACCSAETTPHVQHLATSTFSIDQTNFGGERLKLFSGSCYLPHPDKEDTGGEDAHFICTDEQAIGVADGVGGWADVGVNAGLFARELMSHSVRAIEEEPKNSINPARVLEKAHSCTKAKGSSTACIITLTDTGLHAINLGDSGFIVVRDXCTIFRSPVQQHGFNFTYQLESGNGGDLPSSGEVSSHMKLLTGFTSKDISLVFE

SEQ ID NO: 244975 - protein, 110 aa, Glycine max
  Clone ID: PAT_MRT3847_63242C.1.pep
RLEGGTLVEGIRRLFQRRASSSSSSDHHDHNNVNANNSLVLVRDLRAQLASIPNTLHPDSDSDFDFDFSTLKPIKVPSQIPFRPSSMDHHKKGAPETEFFTEYGEASQYQ

SEQ ID NO: 244976 - protein, 176 aa, Glycine max
  Clone ID: PAT_MRT3847_63243C.1.pep
EKAHSCTKAKGSSTACIITLTDTGLHAINLGDSGFIVVRDGCTIFRSPVQQHGFNFTYQLESGNGGDLPSSGEVFTIPVAPGDVVVAGTDGLFDNLYNDEVTEVVLHSVRAGLEPQVTAQKIAVLARQRALDRNRPTPFSTAAQEAGFRYYGGKLDDITVVVSYITGSTCVSFSPS

SEQ ID NO: 244977 - protein, 75 aa, Glycine max
  Clone ID: PAT_MRT3847_63244C.1.pep
HASESKSQLRRQMMRQWIFFLFHNYTLGSTNTGTLQQATCTVVLKQKKDPEQEPITEANDEAVDGVTGEIAALRA

SEQ ID NO: 244978 - protein, 230 aa, Glycine max
  Clone ID: PAT_MRT3847_63245C.1.pep
LEPIRLELSFFPISSNIGTGTIIPGQFNNISGSNQGTTTTTTTTLYGNSIENESSPHAGSSFSSIFGNSIENASSSHMSATALLQQAAQMGSTTTTTTNNGSSLRVRMCTNNSSKAENDHHHNLQGLMNSIANGNTSLFGSMQGNENNLCGFHNVDESNNNKLPQNLSVNFGGSDKLTLDFLGVGGMMTNMSGGFSQREQQQHVTGTMSSLDHDLKSAQSYRHFGKSTLQ

SEQ ID NO: 244979 - protein, 209 aa, Glycine max
  Clone ID: PAT_MRT3847_63246C.1.pep
MEDKIETADKKVLVDIVKLAQKRGLKGNLGGWKEFLNSHDKKFGAGLSDPSKRSHEVLAAFLKTFSKEEDLKFFDNIMRHHSNQYMLERLKDKSHDSPEQRLVQATLQHPLYPLDYSFPSIDEGWIVVNFKNKPKVMKSTEMVAVDCEMVLCEDGTEAVVRVCVVDHNLEVKLDKLVKPDKEIADYRTEFNGVSSQDLEAVTCSLADIQ

SEQ ID NO: 244980 - protein, 59 aa, Glycine max
  Clone ID: PAT_MRT3847_63247C.1.pep
QTLLCGQNFLQTMFLNLNTLLIDSLLYNICFIYLNLQIILNVLIINFLVYIHFCLFSFT

SEQ ID NO: 244981 - protein, 284 aa, Glycine max
  unsure (1)..(284): unsure at all Xaa locations
  Clone ID: PAT_MRT3847_63248C.1.pep
TRPVASSMGDGGRWWLLVVSWXLSVSLFWTGAVLCNTVHVVVSGMVFLVLFHGGRDAASIRPTRLMKSLQYALTTSFGSICYGSLFTAAIRTLRWEIRGFRSKIGNNECLLCLGDFLFHLVETLVRFFNKYAYVQIAVYGKSFNHSARDAWELFQSTGVEALVAYDCSGAVLLMGTVFGGLITGTCSGVWAWVKWKDRVIMIGYTTMLMGMVLVGLAMVVVESAVTSIYICYAEDPLLIQRWDAEFFNQMSETLHQRLQYRSARAREVLTHNRLDDIVQQNASI

SEQ ID NO: 244982 - protein, 67 aa, Glycine max
  Clone ID: PAT_MRT3847_63249C.1.pep
GKWPNTPGINQGKPFLITLDHSVGFFWILKEPGGPIKPSNSNLSPGHGLIGPSVVFSNRTGWADPEI

SEQ ID NO: 244983 - protein, 66 aa, Glycine max
  unsure (1)..(66): unsure at all Xaa locations
  Clone ID: PAT_MRT3847_6324C.1.pep
PNPNVFFNMTMGGQSAGRIMMELYTDVTPRTVENFRALRTDEKGVRRSVKPLHYKGXSSFHRVIPS

SEQ ID NO: 244984 - protein, 156 aa, Glycine max
  Clone ID: PAT_MRT3847_63250C.1.pep
AYFGDLGVDSVKMLEYFASIPGTEEIRSQYNPATYMLEVIGAGIGRDVKDYSAEYKSSDLCQKNRERTLELCKVSEEFIRHSTLNYQPIATDFWNQLRELTTKQRLTYWRNPQYNFMRVFLFPIFAIIFGTTFYQLSADSVKRINSHIGLIYNSMD

SEQ ID NO: 244985 - protein, 98 aa, Glycine max
  Clone ID: PAT_MRT3847_63251C.1.pep
VHINLIILYRAPTYLQNSFITKILPFLPSTNPILLPDKPHFQAFSVTLHHTTSLITIHKPIEKGKAFFFFFFFIWVTLHNLAEWKTVSSTTTTITLGA

SEQ ID NO: 244986 - protein, 147 aa, Glycine max
  Clone ID: PAT_MRT3847_63252C.1.pep
MSNSSMASLTFAVGIIGTVLSLLVFASPIKTFCRVVKKKSTENYKGAPYITTFLCTSLWTSYGVLKPGGFQIAIVNGAGAVFHCTYIILFLVYSPQDQKVKTALWVAILDVGFLGTVISVTLFALHGTIQLNVLGMFWCGFTMMMCA

SEQ ID NO: 244987 - protein, 130 aa, Glycine max
  Clone ID: PAT_MRT3847_63253C.1.pep
ADMFTLVGLLEFFYRESPASMKSLSTSLTWLSTSLGYFLSTVFVNVINAVTKRITRSKQGWLHGFDLNQNNLNLFYWFLATLSCLNFFNYLYWASRYQYKREDSGPGFKPLGEMPLKRVERKQDCEVSRE

SEQ ID NO: 244988 - protein, 76 aa, Glycine max
  Clone ID: PAT_MRT3847_63254C.1.pep
AREFLNLGFLSCTDGKEESFFDSKAWLDSDCDDDFYSVKGGKDALQCLFLSSFLLEYLNLFTWHDHQIMCLTMNRR

SEQ ID NO: 244989 - protein, 63 aa, Glycine max
  Clone ID: PAT_MRT3847_63255C.1.pep
SASAKGTINQHRLLSSLIKRPSAGFLLSIFTYRAIHPLYRLSPTPDSNIQIPAIKSRVRSPFL

SEQ ID NO: 244990 - protein, 66 aa, Glycine max
  Clone ID: PAT_MRT3847_63256C.1.pep
LLFSGQEPTIHMVAVMMMFHVTITITVTATPVAVVINIIIAVTRGIVVFSGLQFGFGRRRSGTDAW

SEQ ID NO: 244991 - protein, 72 aa, Glycine max
  Clone ID: PAT_MRT3847_63257C.1.pep
PSHDLVARSTTSESIANQESPITVHDRAGPQGAPVTTPQASELYFPLLYTPSPHLCFISLGRVGGRVGGRVG

SEQ ID NO: 244992 - protein, 56 aa, Glycine max
  Clone ID: PAT_MRT3847_63258C.1.pep
KKESGVNHANKTKHELKDKRNLLFLNRNTVAINPITPRKGRHVFSFSPFLHWRVGT

SEQ ID NO: 244993 - protein, 73 aa, Glycine max
  Clone ID: PAT_MRT3847_63259C.1.pep
RRQKGTPSRCPMHSHPMKNQMSYHHICLVPSTDSRQGSAVFMPRFREPVLLYGSRIQLSRTGFTPSVQIKYIS

SEQ ID NO: 244994 - protein, 99 aa, Glycine max
  Clone ID: PAT_MRT3847_6325C.1.pep
MGKSYPTVIADFQKAVDKANKNLICFIAEKRCAPLMLRLAWHSAGTYHLSSKTGGSFLTINNPFLLLDGANNRLDMLASLLEPLKAHLPISSYNNYYQL

SEQ ID NO: 244995 - protein, 148 aa, Glycine max
  Clone ID: PAT_MRT3847_63260C.1.pep
IISIIQSTSKNLELFICFVTFWMVSKRQSGQRHEGRGKVPIQEQKQASISGLRNVINALWMSDKSSYLENFLRRVVREVVEQKIQDQAHLFSRERVGEAGISGAKHLKLCFINKLPETIFTRSSIITKDESFLQIALFDVRTESVVND

SEQ ID NO: 244996 - protein, 112 aa, Glycine max
  Clone ID: PAT_MRT3847_63261C.1.pep
TVVCNLHCDIHTLIYFGLQSLCAITMVIDIETLEDRYIDSCRRHDVFPNSSILSSLFKAEVKKSNHELCSLEILIDDLKDADIAPLFDLCMNFDASEIEAVDVRNESSCDLN

SEQ ID NO: 244997 - protein, 66 aa, Glycine max
  Clone ID: PAT_MRT3847_63262C.1.pep
ILHTRLKSIYDGYPLVRLVGLTNKACCLLILSFVRELGPLGIGKSKHSKFYKFKSLILSDKIPCFY

SEQ ID NO: 244998 - protein, 84 aa, Glycine max
  unsure (1)..(84): unsure at all Xaa locations
  Clone ID: PAT_MRT3847_63263C.1.pep
KANLHVVSKQXTLRIDRHDLILRRHLARLGRKSPSLSKSVGVQNKVIGQYRNIKRLQQVGVRTLIFIPTFSYVLEAEIDFVPYI

SEQ ID NO: 244999 - protein, 150 aa, Glycine max
  Clone ID: PAT_MRT3847_63264C.1.pep
MLEMLERGILMSVQTMNHPPFLTGDAFRKRTQTRCRGRANSSTALQLSSDESGNYAEPCTSLLSQPNTIGVIGGVSLLSTLIFLEKLACWGSRNGKECPPFVVSSDPALSKMLSLRGPLPSARTRFDRIKLNQDLVIENLRCKKNFLQQS

SEQ ID NO: 245000 - protein, 91 aa, Glycine max
  Clone ID: PAT_MRT3847_63265C.1.pep
HHPQPQPHTKNKPSNFQSQQPQIKKKSFFSGFCSKTPQRTKKTKRKWVLFFQTTINCFCFHSLYNKGKKKGFNIIYTNFKKTRRGGETLRL

SEQ ID NO: 245001 - protein, 108 aa, Glycine max
  Clone ID: PAT_MRT3847_63266C.1.pep
FGKNNNINNSLCRLSGTEDRIVLYCTSLRGIRKTYEDCCSVRMILRGFRVAVVFRDISMDSSYRKELKDLLGGKAAVTLPQVFIRGRYVGNAEEMKHLNESGELARLL

SEQ ID NO: 245002 - protein, 283 aa, Glycine max
  Clone ID: PAT_MRT3847_63267C.1.pep
MRPVKQTPAHHTDKFAELVCSNSLRGNALTNAVGVLKEEMRHLDSLIITSADKARVPAGGALAVDRHDFAGYITDTLRNHPNITVLNEEVNHIPEGYTIIATGPLTTEHLAQEIVDITGKDQLYFYDAAAPIIEKDSINMDKVYLKSRYDKGEAAYLNCPMTEEEFNRFYDAVLEAEVAPVNEFEKEKYFEGCMPFEVMAERGRKTLLFGPMKPVGLEDPKTGKRPYAVVQLRQDDAAGTLYNIVGFQTHLKWGAQKEVIRLIPGLENVDIVMLKVLPVDYLQ

SEQ ID NO: 245003 - protein, 141 aa, Glycine max
  Clone ID: PAT_MRT3847_63268C.1.pep
LAPSPPIFVFLVLYVFVLQYKPNSLVSHTLYINISPLRSSQSISITFNVIFAFISFKNLQALLIVSMRRNCNLELALFLPSDSGPRHHHSMVEEASEISPIQNFFHHHHRQEQQQQQPLTIFYDGNICVADVTELQVCVYM

SEQ ID NO: 245004 - protein, 70 aa, Glycine max
  unsure (1)..(70): unsure at all Xaa locations
  Clone ID: PAT_MRT3847_63269C.1.pep
AEIDKMSPPELXKQFEQVRTAKPGVDCSVKIFPKVSHGWTVRYNPEDAQPVKAAEXAHQDMLNWFAQHLK

SEQ ID NO: 245005 - protein, 110 aa, Glycine max
  unsure (1)..(110): unsure at all Xaa locations
  Clone ID: PAT_MRT3847_6326C.1.pep
YGEVYHVKCHETQLSSKNFLYQNISNQFLXRIQNXLQLINKLSHPNFCLFITSLTLPPYLSFISKFLPTSTFCTLIHLPNYQLYNRTSLPITLHATQLIYYLRNYTPAIM

SEQ ID NO: 245006 - protein, 98 aa, Glycine max
  Clone ID: PAT_MRT3847_63270C.1.pep
NKNPNNPNSYMHIFASLFLENVELEFPEKFRSHFLGFQYRHNKNTNNPNSYMNIFASLFFKYVKLEFPKKSRSHSLGFKNSLIRKPIIPNQNCTFLPP

SEQ ID NO: 245007 - protein, 162 aa, Glycine max
  Clone ID: PAT_MRT3847_63271C.1.pep
VDEAAGKLRAKGIEVLAVVCHVSNAQQRKNLIDKTLQDAAPHLKKGSSVVLIASLVAYNPPPTMAMYGVTKTAVLGLTKAMASEMGPNTRVNCVVPGIVPTHFVALYTSNDATREELERKALLGRLGTTEDMAAATAFLASDDASYITGENLVVSGGMPSRL

SEQ ID NO: 245008 - protein, 260 aa, Glycine max
  Clone ID: PAT_MRT3847_63272C.1.pep
MGSVLMERTKYGKRFQGKVAIVTASTLGIGFSIAERLGLEGASVVISSRKQQNVDEAAGKLRAKGIEVLAVVCHVSNAQQRKNLIDKTLQKYGKIDVVVSNAAVHPSVDPILQTQESILDKLWEINVKSTILLLKDAAPHLKKGSSVVLIASLVAYNPPPTMAMYGVTKTAVLGLTKALASEMGPNTRVNCVVPGIVPTHFVALYTSNDATREELERKALLGRLGTTEDMAAVTAFLASDDASYITGENLVVSGGMPSRL

SEQ ID NO: 245009 - protein, 271 aa, Glycine max
  Clone ID: PAT_MRT3847_63273C.1.pep
DGRYDPVVKALANDLDIRLNHRVTKISDGYNMVMVTVEDGRNFVADAVIVTVPIGILKANLIEFSPKLPHWKAEAIKDIGMGNENKIALRFDAVFWPNVEVLGIVAPTSYACGYFLNLHKATGHPILVYMAAGKFAYDLEKLSDESAANFAMQQLKKMFPDASKPVQYLVSHWGTDPNSLGCYACDLVGMPDDVYERLRAPVGNLFFGGEAVSMDDHQGSVHGAYSSGVMAAENCQRHLLQKQGHMESLPLVPSVRHEIFETTIPPQISRI

SEQ ID NO: 245010 - protein, 72 aa, Glycine max
  Clone ID: PAT_MRT3847_63274C.1.pep
MEFTASYKQTGSCCVSSNARFIAIGVDYRVVIQETVSFKVVQLLSCLDKITYIEWPLDSEYILCGLYLTTMI

SEQ ID NO: 245011 - protein, 78 aa, Glycine max
  Clone ID: PAT_MRT3847_63275C.1.pep
GTYQNLVSKIGFWILFPLGLHQPSCLVDFTVNFSPPLQFFKPPYLVGSLVSFVLVLEFVWETTSSLFLETASAFISIT

SEQ ID NO: 245012 - protein, 74 aa, Glycine max
  Clone ID: PAT_MRT3847_63276C.1.pep
GCPSQQYQRRLACLRWPKLCRSTWVRLIQCFHSLLKPWKSGSTFGSQLHLVKAPGSECFCRSEGRSLVGLQSSL

SEQ ID NO: 245013 - protein, 109 aa, Glycine max
  Clone ID: PAT_MRT3847_63277C.1.pep
FLPPPDGQTTHVKDRVKETSEVYHSQHFSLGRYRLPPQDVQDHQYHVRHRPTFQLAIPLIISASRSLALFSKNSISILPSDFSSLNSAPHGPTANSIPGSKFLVSYSTR

SEQ ID NO: 245014 - protein, 87 aa, Glycine max
  unsure (1)..(87): unsure at all Xaa locations
  Clone ID: PAT_MRT3847_63278C.1.pep
CHCSKAHTSGSNSFHEGSLAIXGKXXKRVSSKVWCYYCDREFDXEKILVQHQKAXHFKCHVCXXKLSXAGXMXIHVLXVHKXSVXKY

SEQ ID NO: 245015 - protein, 77 aa, Glycine max
  Clone ID: PAT_MRT3847_63279C.1.pep
THKEHTDSLFQKKSITISPYSKTLTILYRRLEHLRKIRKHKPCLHTKLERITRGKLYTIQLPKQDCLTSCVGNKYKD

SEQ ID NO: 245016 - protein, 54 aa, Glycine max
  Clone ID: PAT_MRT3847_6327C.1.pep
RVEVDAQNYTLFRFLCEFVFVPNHVCHFWRLCDLPDFRTHSPLKLHFNPFLLLS

SEQ ID NO: 245017 - protein, 44 aa, Glycine max
  Clone ID: PAT_MRT3847_63280C.1.pep
ERLSGVAQAWILGAALPRFCFPIISVFFLEPKSCLEFLIFCFCS

SEQ ID NO: 245018 - protein, 72 aa, Glycine max
  Clone ID: PAT_MRT3847_63281C.1.pep
REYAKHAGAQRIISWPRESYALLGVRRAQLVKPKFPNSRIAREWHYGGLQDQKALLKVEAGANKRRATRAYP

SEQ ID NO: 245019 - protein, 86 aa, Glycine max
  Clone ID: PAT_MRT3847_63282C.1.pep
YSKNPRLFKGTTKMGPLENQVKKILIGKKTPFKGDRLTTYPSREEGGDTFPQKLRHPNPKKKYWAKGEKIPGPKMNPGFFKATFPN

SEQ ID NO: 245020 - protein, 107 aa, Glycine max
  Clone ID: PAT_MRT3847_63283C.1.pep
GGFSLGPGGETQFGPKFFKGGPNRSRKKLAFFVFENGFFWWWGRVPFLIVPNLLTLKVGDSLVCVPLGGVWAPLFKAPLIRCQVVRFLCLAFYKGPGIIFPHFFFIV

SEQ ID NO: 245021 - protein, 114 aa, Glycine max
  Clone ID: PAT_MRT3847_63284C.1.pep
YPTITAPNRTLIEASEEQRKHALTVAIATAAAAEAAVAAAHAAAEVVKLTGTSRSYSYLSKGDKSLAAIKIQSTYRAHLARKALRALKGVIRLQAIIRGQAVRRQVSNNILQNF

SEQ ID NO: 245022 - protein, 80 aa, Glycine max
  Clone ID: PAT_MRT3847_63285C.1.pep
TLARGNMPKKNGGQTFFPQTKGLWGGGNKGGPYPEKKGPNFGKQTFYNNGEPTQEALSLNKIPRLLKGAPQAFVLHHGHN

SEQ ID NO: 245023 - protein, 29 aa, Glycine max
  Clone ID: PAT_MRT3847_63286C.1.pep
MLVYQDLLTGDELLSDSLCYKEIENVMLW

SEQ ID NO: 245024 - protein, 57 aa, Glycine max
  Clone ID: PAT_MRT3847_63287C.1.pep
IRSIHLSSASNASVLICASGRHISLLQPYQYERELSFSIGELRLDCAKTILVAHLRD

SEQ ID NO: 245025 - protein, 53 aa, Glycine max
  Clone ID: PAT_MRT3847_63288C.1.pep
RTFHLLSRESSVALNSLISLRCSCRWIFLYFHFGKQTIAFVLNNLYFKNIAAC

SEQ ID NO: 245026 - protein, 104 aa, Glycine max
  Clone ID: PAT_MRT3847_63289C.1.pep
FCFVFFSFFWAGFLFFFFFLFFLCFFFFFFFFGGGGKHAPKIFYPPNPNMFKQVPMGIIFWKPPFWLPHISPLKANYGGLGDPGGDGPSRKKLFSGKPPPFQKL

SEQ ID NO: 245027 - protein, 62 aa, Glycine max
  unsure (1)..(62): unsure at all Xaa locations
  Clone ID: PAT_MRT3847_6328C.1.pep
VMLPSFNXKPSLPLXPILLFSLFLSPSLSXLXNLIXXXIXIMIFSNLYNLQSXKTSXXNQMS

SEQ ID NO: 245028 - protein, 43 aa, Glycine max
  Clone ID: PAT_MRT3847_63290C.1.pep
ITSISQPKMIHILVSKMFHHPKMYGFNCYIRFFIYDKCYKHTL

SEQ ID NO: 245029 - protein, 73 aa, Glycine max
  Clone ID: PAT_MRT3847_63291C.1.pep
TIQKEMVLFGSSIYIFYDGASRHMIGGGMSYSWAKLLYAVRRRILQRVVHAMGARDYCGIGDWHNTRYPKCTD

SEQ ID NO: 245030 - protein, 62 aa, Glycine max
  unsure (1)..(62): unsure at all Xaa locations
  Clone ID: PAT_MRT3847_63292C.1.pep
HDLDAKADFPRYALIDNALXYESLLGLSNXGPRMLALSKQPSHPSAHSVAPGFDLTTXPLLF

SEQ ID NO: 245031 - protein, 113 aa, Glycine max
  unsure (1)..(113): unsure at all Xaa locations
  Clone ID: PAT_MRT3847_63293C.1.pep
PTRPEKFILTLYDKWVGMGYAPGLPETLKNYNKLVSLGFKIIFXSGRTLYKHAVTESNLLKAGXYYSREKLILKDPQDPFTSNVSAFNSATIDILIWQVYIIDGIIGYQWSDL

SEQ ID NO: 245032 - protein, 51 aa, Glycine max
  unsure (1)..(51): unsure at all Xaa locations
  Clone ID: PAT_MRT3847_63294C.1.pep
YSKPYCDLCICTHSIPXNEDVNILRLIHXQSNCTSCICTHSHPRQCRCLYT

SEQ ID NO: 245033 - protein, 118 aa, Glycine max
  Clone ID: PAT_MRT3847_63295C.1.pep
PVCDESTALKFPETTLPYMQPSDSNLWPLPQMAMSAIPSFPENNAASTVMPLDDIFRHSGEDHRYIHEAEVILEAPKDLNSSFVSPVIPQPFTSVPMNENATHAPHGITIPGFMNSDY

SEQ ID NO: 245034 - protein, 363 aa, Glycine max
  Clone ID: PAT_MRT3847_63296C.1.pep
MGGKRKKSDDDDDVEAEAEASGWKKKTRTTTEREKEKKEPLRPSMIKNKEKRSELHAKLKHQKKLEKRAKAKARDAALKKALELGEEPPEKKVPRTIENTRELDETVCKPDDEELFAGNDADEFGPILNQQQTPKILITTCRFHSTRGPAFISELLSVIPNAHYFKRGTYDLKKIVEYAKKKDFTSIIVVHTNRREPDALLIIGVPDGPTAHFKLSKLVLRKDIKNHGNPTGHKPELVLNNFTTRLGHRVGRLIQSLFPQDPEFKGRRVVTFHNQRDFIFFRHHRYIFETKEVKKAESKGKKDKDGESENVPEQKTIARLQECGPRFTLKLISLQHGTFDTKGGEYEWVHKPEMDTSRRRFFL

SEQ ID NO: 245035 - protein, 245 aa, Glycine max
  Clone ID: PAT_MRT3847_63297C.1.pep
MQFSQAITYIRIIKDKIILLRRKNMKVVYLLVALLALTSTVVSAYDPSPLQDFCVAAKEKDGVFVNGKFCKDPKLVKAEDFFRHVEPGKTDNPLGSNVTQVFVDQLPGLNTLGIGLARIDFAPKGLNAPHTHPRGTEILIVLEGTLYVGFVTSNQDGNRLFTKVLNKGDVFVFPIGLIHFQLNVGYGNAVAIAGLSSQNPGAITIANALFKANPPISSEVLTKAFQVDKSIIDYLQKQSWYDNNN

SEQ ID NO: 245036 - protein, 89 aa, Glycine max
  unsure (1)..(89): unsure at all Xaa locations
  Clone ID: PAT_MRT3847_63298C.1.pep
QMCINTFTTNTITLELXCSDAIGNIXTKIRNEDGIPGDQGXLMCGEKQLKDERALASYKVWRKATLRVVLRLRGGMRIVVGTGTKETRT

SEQ ID NO: 245037 - protein, 85 aa, Glycine max
  Clone ID: PAT_MRT3847_63299C.1.pep
RTKFWAKKHTLMGGHKGGKPPPLFEKKFVFLFTGKKKKKKLRGGPVLALEKKAGKSETPPKPGGVFYELLGGDQGSFAKGAIFNH

SEQ ID NO: 245038 - protein, 55 aa, Glycine max
  Clone ID: PAT_MRT3847_6329C.1.pep
PFEYKRARSQPLFQQTSLRLFSLPPNLSPRRPHQLGMITDLTGHQFQAVNTLGRF

SEQ ID NO: 245039 - protein, 97 aa, Glycine max
  Clone ID: PAT_MRT3847_632C.1.pep
ITHSQGFPPIYIFYISLASILFNVDHIIKRNESEGFTIYELLHLLASMFSVQYSNEFRNQTRLFSYVAVNVQFSVSNNCRCRCLLLLLTIFSLCFAD

SEQ ID NO: 245040 - protein, 59 aa, Glycine max
  Clone ID: PAT_MRT3847_63300C.1.pep
YTASYTCTSIPHSSWFYDKILIELDLTFNINIRQEMCQIYILFLSFSNYGKKCAICRDS

SEQ ID NO: 245041 - protein, 57 aa, Glycine max
  Clone ID: PAT_MRT3847_63301C.1.pep
LNMIIGGDQESKPRLTLGVDICFFFFYKFSPFRCSWLCGGATGREHTWSSIAGHSWV

SEQ ID NO: 245042 - protein, 362 aa, Glycine max
  Clone ID: PAT_MRT3847_63302C.1.pep
HGRMTANLPRHAPEGFGLQDETFKPFHALNQQNIDRREFDDDLKKFSSLPSNSEPVSKFGNYSLGAHDAGKRPVGIHDDVIKKSGSALHPGYLEPGPGYGRHHMDGIASRSPVSEYAEMSSRRLGPHAGSLVGKAGIDDFEGRVARRFGEFHDSRFPHLPSHLHRDDFDGFGNFRMGEHPRSGDFIGQDEFGGHFRRGEHLAPHNFPRHLQLGEPIGFGAHPGHMRAVELDGFRRFESSAFGKGGRPGHPQLGEPGFRSSFSLPGFPNDARFLTGDIRLFDNLRRRKASSMGWCRICKVDCETVEGLDLHSQTKEHQKMAMDIVKTIKQNAKKQKLIPSEEPSMDEGNKTHNTGIEGRGNKH

SEQ ID NO: 245043 - protein, 87 aa, Glycine max
  Clone ID: PAT_MRT3847_63303C.1.pep
SSLSTRKSPVSTANGPVGGKLVGPPLVFRACSTTSGRSAWERLPSSTLMPICCCFSSSSRFRRPIGLSPSSTGDSCCLESFLLTPAR

SEQ ID NO: 245044 - protein, 106 aa, Glycine max
  unsure (1)..(106): unsure at all Xaa locations
  Clone ID: PAT_MRT3847_63304C.1.pep
MQIFVKTLTSKTITFXVESSDAIGXPNANIHYKEGIPPDQQRLIFAGKQLEDGRTLADYNMQKESTLYLVLRLRGGAKKRKKKTYTKPNKIKHKHKKVKLGILQFY

SEQ ID NO: 245045 - protein, 49 aa, Glycine max
  Clone ID: PAT_MRT3847_63305C.1.pep
RPPQSTGPLLPPLGGLAPPDALKGHFPPAGGRIPLGAGVFHGGFRCFTL

SEQ ID NO: 245046 - protein, 211 aa, Glycine max
  Clone ID: PAT_MRT3847_63306C.1.pep
MGKAWVGLVVLLCLIVTAIAEQCGRQAGGQTCPNNLCCSQYGWCGNTEEYCSPSKNCQSNCWGGGGGGGGGGGGESASNVRATYHYYEPEQHGWDLNAVSAYCSTWDASKPYSWRSKYGWTAFCGPVGPRGRDSCGKCLRVTNTGTGANTIVRIVDQCSNGGLDLDVGVFNRIDTDGRGYQQGHLIVNYQFVDCGNELDLTKPLLSILDAP

SEQ ID NO: 245047 - protein, 44 aa, Glycine max
  Clone ID: PAT_MRT3847_63307C.1.pep
FLAWLICCYLECVITTRTDFGRSSVNPHYPPSFFLLEKHCICKL

SEQ ID NO: 245048 - protein, 50 aa, Glycine max
  Clone ID: PAT_MRT3847_63308C.1.pep
GGPPGGRDFDPKGKGANEIRRFGQGFMRDMYRYWGPGKDLRSEELAVGTR

SEQ ID NO: 245049 - protein, 205 aa, Glycine max
  Clone ID: PAT_MRT3847_63309C.1.pep
MATTKVYIVYYSTYGHVEKLAEEIKKGAGSVEGVEAKLWQVPETLSEEVLGKMGAPPKSDVPIITPNELPEADGLLLGFPTRFGLMAAQFKAFMDATGGLWRTQALAGKPAGIFYSTGSQGGGQETTPLTSITQLVHHGMIFVPIGYTFGAGMFEMENVKGGSPYGAGTYAGDGSRQPTELELAQAFHQGKYFAGIAKKLKGSSQ

SEQ ID NO: 245050 - protein, 148 aa, Glycine max
  Clone ID: PAT_MRT3847_6330C.1.pep
YVSAMVAAGALVTYSRQNDNLWFAIVLITSVVATMYQLYWDFIKDWGFLNPKSINPWLRDDLILKNKSIYYMSIVLNIVLRVTWVETIMHFKVGPVQSRLLDFLLAALEVIRRGHWNFYRLENEHLNNVGHYRAVKTVPLPFREIDSD

SEQ ID NO: 245051 - protein, 207 aa, Glycine max
  Clone ID: PAT_MRT3847_63310C.1.pep
MATTTTKVYIVYYSMYGHVEKLAEEIKKGAASVEGVEAKLWQVPETLPQEVLGKMGAPPKSDVPIITPNELPEADGLLLGFPTRFGLMAAQFKAFLDATGGLWRTQALAGKPAGIFYSTGSQGGGQETTPLTSITQLVHHGMIFVPIGYTFGAGMFEMENVKGGSPYGAGTYAGDGSRQPTELELAQAFHQGKYFAGIAKKLKGSSQ

SEQ ID NO: 245052 - protein, 87 aa, Glycine max
  Clone ID: PAT_MRT3847_63311C.1.pep
SFKTNSTMHREFQRELKSFNFYTFNMKGNEVTAFNTSTDHLINPKGWCNSVRSCCIHKSENNIFRERTRVRFPLGQWQSRTASGFNF

SEQ ID NO: 245053 - protein, 144 aa, Glycine max
  unsure (1)..(144): unsure at all Xaa locations
  Clone ID: PAT_MRT3847_63312C.1.pep
STGPSRGDPRVRNVCDRFGFVXPDLTHYLYTSNMLRYIEGYVQKGNPGNAPLVVGQLLDDECPEEFIKGVILSGGALLPGEPLIEECEKRNRLPLLTQVLEHLXSEGSHDVHVHNALGKIIIDRDNKAGDFLTTNPYYESSGGG

SEQ ID NO: 245054 - protein, 105 aa, Glycine max
  Clone ID: PAT_MRT3847_63313C.1.pep
NNKVDRTPLDLPSGDHSQRHSAEYAQRALMSDKVETTYRGRDPLLDGSIHHRACCESRQIVGCDCQGRRHDLTIHPLKEESRTMSKGLPGTQQVRPDCWHKGEEN

SEQ ID NO: 245055 - protein, 35 aa, Glycine max
  Clone ID: PAT_MRT3847_63314C.1.pep
VRRLVQLLEVTEDPTFQKNKQVYERRQFATSVIRF

SEQ ID NO: 245056 - protein, 96 aa, Glycine max
  Clone ID: PAT_MRT3847_63315C.1.pep
KGKGSNPGQYKAYPGFGTFFMNSTLSLERSACPAHFAKGTFPSRGGTGLFQIPGSRRLYPKKWKIPVWKGVTEREPLKEKKVGPLTRTGVVRPRNS

SEQ ID NO: 245057 - protein, 41 aa, Glycine max
  Clone ID: PAT_MRT3847_63316C.1.pep
YTSNYICIQKKKKKKKKKKKKKKKKKKKKKKKKKKKKKKKK

SEQ ID NO: 245058 - protein, 106 aa, Glycine max
  unsure (1)..(106): unsure at all Xaa locations
  Clone ID: PAT_MRT3847_63317C.1.pep
LVAYNTDARIVKLTLAAGAYRTDEGKPLVLNVPRPVKQLLINDAXRNTEYVPIVGLAXFTNRSANLIFGADSPALHDNRLTTCSCXSGTGCLILAGRIFGSALSPT

SEQ ID NO: 245059 - protein, 66 aa, Glycine max
  Clone ID: PAT_MRT3847_63318C.1.pep
YWEFFLEHSPMVKALKKKVSPLTSRIGLVHALKSPSFYNPIKFHVSKLSILPSCEWIGNCVLLSSQ

SEQ ID NO: 245060 - protein, 92 aa, Glycine max
  Clone ID: PAT_MRT3847_63319C.1.pep
KNEAIQGMKLNRKVQGGNKKGRGSFLIKKIKPQFKHFIFLKQTNWGGASTINGGGFTQDAKKNFVKLMGEEKGTNSKNCQWRLKSICSTRCG

SEQ ID NO: 245061 - protein, 113 aa, Glycine max
  Clone ID: PAT_MRT3847_6331C.1.pep
VFEEMSSFVTNGNDSLTVHVISTTIVGTYGDAKQTIRDKAERAVGTAAFGIAVQAIRLETVEALASEMVTLERRDQNRELHLLRELDHTTVITVKHGHLGTTGTDQLYANTVM

SEQ ID NO: 245062 - protein, 60 aa, Glycine max
  Clone ID: PAT_MRT3847_63320C.1.pep
ALVHNAPKGVFFIIQNVKFRAPLFMQHLAHCKSQCSPLRYGCMAHIGNKLHYFLKNRFHY

SEQ ID NO: 245063 - protein, 111 aa, Glycine max
  unsure (1)..(111): unsure at all Xaa locations
  Clone ID: PAT_MRT3847_63321C.1.pep
LCVRYNTHSVLYFPRPLSDFRVTPHGLLSHTCGGPGATFAFRTXYPFRTNTLYNFTNHYHPLRLQWYITRRNYVNYFSRVIPTCISNTLLNICTNFVFVVSFVFVCLSIKS

SEQ ID NO: 245064 - protein, 129 aa, Glycine max
  Clone ID: PAT_MRT3847_63322C.1.pep
QRCRCEVSKATAGVLEHPDRLTKFVQQPIRNRTKMATKTIARPTTPVASEDSAQDPADLLENTLSQLEALLWVCHGEDIDWCSGDGPGRLDNLLWLAAELARKAGHLFQLSEKARRGAPTFSRTPQPQS

SEQ ID NO: 245065 - protein, 61 aa, Glycine max
  unsure (1)..(61): unsure at all Xaa locations
  Clone ID: PAT_MRT3847_63323C.1.pep
WEIHYCCCHIIAGNXLFAWVNYRQIRFELLSIDYQGKQPFNYMMPXVLIKQLTDYFLSPTS

SEQ ID NO: 245066 - protein, 116 aa, Glycine max
  Clone ID: PAT_MRT3847_63324C.1.pep
VPVQNTKDNPPCNTLVIGNLGENINEEEVRGLFSVQPGFKQMKILRQERHTVCFIEFEDVNSATNVHHNLQGAVIPSSGSIGMRIQYSKNPFGKRKDNLPIAVPSANGAPPTMTYQ

SEQ ID NO: 245067 - protein, 71 aa, Glycine max
  Clone ID: PAT_MRT3847_63325C.1.pep
KYWVDPRMRPPMRTVSWETTTEGGLTLGNCTATEILEPPSILNQREFTKEVTMSYYEREEMEMDLTSAEGV

SEQ ID NO: 245068 - protein, 155 aa, Glycine max
  Clone ID: PAT_MRT3847_63326C.1.pep
ANVGIVSHLFGAYKVYCQPLFSFVESHAAARFPNSDFMSREFEVPIPGCKPYRLNLFRLVWRTIFVILSTVIAMLLPFFNDIVGLIGAIGFWPLTVYLPVEMYITQTKIPKWGPRWICLQMLSAACFVVTLLAAAGSIAGVIDDLKVYKPFVTSY

SEQ ID NO: 245069 - protein, 320 aa, Glycine max
  Clone ID: PAT_MRT3847_63327C.1.pep
MAGTGIHPYHQQWAPAAAAPPPPPAAAGGPPPHPGEEVRTIFITGLPEDVKERELQNLLRWLPGFEASQLNFKAEKPMGFALFSAPHQALAAKDILQDMLFDPDTKSVLHTEMAKKNLFVKRGIGAADAGGAFDQSKRLRTAGDYTHSGYTSPSPFHPPPPPVWGPHGYMAPPPPPPPYDPYAGYPVAPVPMPTPAPIPAPSTYVPVQNTKDNPPCNTLFIGNLGENINEEEVRGLFSVQPGFKQMKTLRQERHTVCFIEFEDVNSATNVHHNLQGAVIPSSGSIGMRIQYSKNPFGKRKDNLPIAVPSANGAPPTMTYQ

SEQ ID NO: 245070 - protein, 42 aa, Glycine max
  Clone ID: PAT_MRT3847_63329C.1.pep
CVITRKKTKLIESKSCIFTLFLVTSRHVQSCQHHHSGRHLKG

SEQ ID NO: 245071 - protein, 58 aa, Glycine max
  Clone ID: PAT_MRT3847_6332C.1.pep
PPPNRKGTMGRPPNQIEKRGWPPFNLAHGGGKISHRGILNTPLNMGFSPLQPEKGLFN

SEQ ID NO: 245072 - protein, 42 aa, Glycine max
  Clone ID: PAT_MRT3847_63330C.1.pep
MFRTLMIDGMSNQQMLFTLVLGYFVIPPYMSICIKKYFIQRF

SEQ ID NO: 245073 - protein, 94 aa, Glycine max
  Clone ID: PAT_MRT3847_63331C.1.pep
IWSRSKIVLLPFRWRNGPLVCQMQLHRSHHILSISQVEAANLGPLMNFKVPVILGHANTSCQVCKIASEHLNYGVGDFFFFPMDLNLRFWKNFP

SEQ ID NO: 245074 - protein, 118 aa, Glycine max
  Clone ID: PAT_MRT3847_63332C.1.pep
MATSVLSPPFFHPLHQLQFSKCPRLSSKSHFRPRLLRSISQRTIRAISAVAAESELGTQQDHAIEADIFACPVCYEPLIRKGPSGLNLPAIYRSGFMCKRCKKTYSSKDRYLDLTVTA

SEQ ID NO: 245075 - protein, 56 aa, Glycine max
  Clone ID: PAT_MRT3847_63333C.1.pep
MLITNIAEHIHEPVIDTAIIPILPKIVQNKSDFPPRQRIFLLLDAPPTSLCGALER

SEQ ID NO: 245076 - protein, 109 aa, Glycine max
  Clone ID: PAT_MRT3847_63334C.1.pep
MERQEIRPPVMSVPQFGGWDQNEPGAIDYTVMFTQARENKKHQKANLIEIRRKSFGSERDFVNSNHGRAPRHHVRSHTHSHAHEDHVVMGKKRILTYINCCIRPTIAAT

SEQ ID NO: 245077 - protein, 75 aa, Glycine max
  Clone ID: PAT_MRT3847_63335C.1.pep
RLDRISSDGPPPPPKKKNKTLHLKTQLNTHHLTWKKKKKSDGNSQDSQQHTPKGKPFCTKTKSLFTWCSRNKLEP

SEQ ID NO: 245078 - protein, 47 aa, Glycine max
  Clone ID: PAT_MRT3847_63336C.1.pep
TLDFIACIMRASSPTSVHHQASLLPYPILYHDNYIAPHSSVTLQFTA

SEQ ID NO: 245079 - protein, 101 aa, Glycine max
  Clone ID: PAT_MRT3847_63337C.1.pep
LPPAFFPHGCPPGMPIFQMKIAPFSSQLKGSLKTFSNPSPLLTKPFFSPNKTPRVLVLPVKLNSFPPPLLFFPQGFFFLPIVNGSIKPKGFMEGVLPCARC

SEQ ID NO: 245080 - protein, 101 aa, Glycine max
  Clone ID: PAT_MRT3847_63338C.1.pep
SNILCAESSERPLLNRLMLELYKLESDVLVGHNISGFDLDVLLHRSQACKVASNMWSKLWRLNRSTMPKLRRSNVFGSGADPGIMSCNAGRLLWETYLCSR

SEQ ID NO: 245081 - protein, 473 aa, Glycine max
  Clone ID: PAT_MRT3847_63339C.1.pep
MGMKKATMDHVLLASQETKETREVRIRSLFDFFDRENLGFLDYSHIEAGLSALQIPSEYKYAKDLLNACDANKDGRVDFQEFRKYMDDKELELERGLQAIDVAHNGCILPEELWEALVRAGIKIDDEELARFVERVDKDNNGVITFEEWRDFLLLYPHEATIENIYHYLERICVVDIGEQTVIPAGIGKHIHASRYLIAGGVAGAASRTATAPLDRLKVVLQIQTTQSHIMPAIKDIWKKGGLLGFFRGNGLNVLKVAPESAIRFYSYEMLKSFITRAKGDEAKAANIGAMGRLLAGGIAGAVAQTAIYPMDLVKTRLQTHACKSGRIPSLGTLSKDIWVQEGPRAFYRGLIPSLLGIIPYAGIDLAAYETLKDMSKQYILHDGEPGPLVQLGCGTVSGTLGATCVYPLQVVRTRMQAQRSYKGMADVFRKTLEHEGLRGFYKGIFPNLLKVVPSASITYMVYESMKKSLDLE

SEQ ID NO: 245082 - protein, 69 aa, Glycine max
  unsure (1)..(69): unsure at all Xaa locations
  Clone ID: PAT_MRT3847_6333C.1.pep
GSRHSPRLSYAXLTATAAGGILEMKVCWPPAPSRASKPSSKAAPYRKTEKPDKLTLAKSRQERRRNRAI

SEQ ID NO: 245083 - protein, 35 aa, Glycine max
  Clone ID: PAT_MRT3847_63340C.1.pep
HLVLFNNYDKPTTSVVIDWSMLDQGMNRDERISVE

SEQ ID NO: 245084 - protein, 159 aa, Glycine max
  Clone ID: PAT_MRT3847_63341C.1.pep
TAARRRQKGGTQIWPLKTVNSKHHLFERDPIGEGRQDSCSCRVQGSVECVRFHIAKKRAKVKLELGEAFHQWNLHKVGEEIGGSWTEKEEKKFKDVVKSNPASLEKCFWDHLFKTFPKKSREDLVSYYFNVFLLQRRAYQNRHTPDNIDSDDDESECTP

SEQ ID NO: 245085 - protein, 47 aa, Glycine max
  unsure (1)..(47): unsure at all Xaa locations
  Clone ID: PAT_MRT3847_63342C.1.pep
RSPVSPDQYLVFFNYPRKTLSGCFFTSTSLHVISFSLTPSATXEITQ

SEQ ID NO: 245086 - protein, 164 aa, Glycine max
  Clone ID: PAT_MRT3847_63343C.1.pep
NSQVKTGNVRDIASAKNDANAQELSALRAVIKCIEEYKLESEYPPDTLRKRVLQLEKSKGDRKRSGGEFIKRPQSKRPRPNERHFSLHSSGSAASAVILGRQVPPVRAPYAANPDRYPHAGAIPYNYQVPGQSVYTAPSNAPPSNYGRYMGTSTSLQYSHEWYM

SEQ ID NO: 245087 - protein, 38 aa, Glycine max
  Clone ID: PAT_MRT3847_63344C.1.pep
AHPSAEDRPFNAHLSVSQEEGAFISTRCIKLVLRKQNQ

SEQ ID NO: 245088 - protein, 79 aa, Glycine max
  Clone ID: PAT_MRT3847_63345C.1.pep
HKFLMNCRHQQYIYQALRYTESTWYKQFVNPILVQYRAYMNGTANTPPFFYFNESNPKRYSMLGPQYPGEETGHSYHAP

SEQ ID NO: 245089 - protein, 66 aa, Glycine max
  unsure (1)..(66): unsure at all Xaa locations
  Clone ID: PAT_MRT3847_63346C.1.pep
LSPQRALFSLLSLSISQISLSXTIHLRNXSLLFRSRFNFXELPLTPFPLFLPSFNYXFKNILFMGF

SEQ ID NO: 245090 - protein, 38 aa, Glycine max
  Clone ID: PAT_MRT3847_63347C.1.pep
LWILLKGTMKLLSNGAMGSVEMQLLVGREHERFPFCVN

SEQ ID NO: 245091 - protein, 79 aa, Glycine max
  unsure (1)..(79): unsure at all Xaa locations
  Clone ID: PAT_MRT3847_63348C.1.pep
RTTKXXVEAFXXXGXXDWXXXFWXAHXGGPXILDXVEXKLRIKXDKLQXTRHVXSXYGNMSXACXLLIVDXMXXXSKDX

SEQ ID NO: 245092 - protein, 35 aa, Glycine max
  Clone ID: PAT_MRT3847_63349C.1.pep
EDMRPTLCWLSLNSHSDTIMGEPRGCHLDQNDRLE

SEQ ID NO: 245093 - protein, 66 aa, Glycine max
  Clone ID: PAT_MRT3847_6334C.1.pep
PRVRRLREDDRRGALISPSLWLSLSLLRGPLASTQPNHSSWEATSQENSPAMDPDLKEVSQLLDRF

SEQ ID NO: 245094 - protein, 40 aa, Glycine max
  Clone ID: PAT_MRT3847_63350C.1.pep
EFFKKMTDHTDGQLFHRKVHISNELYRWNGDRWKPKFPKT

SEQ ID NO: 245095 - protein, 48 aa, Glycine max
  Clone ID: PAT_MRT3847_63351C.1.pep
PSSRAYGSHLARLPSPTLFHRPEVCSPCRPDAVMSTPERGMHSVLPAR

SEQ ID NO: 245096 - protein, 53 aa, Glycine max
  unsure (1)..(53): unsure at all Xaa locations
  Clone ID: PAT_MRT3847_63352C.1.pep
PIGVAVVSLLRLRERANAAAYSRGGPAGWTSPTTARTSGKXFTAGDILIFNYD

SEQ ID NO: 245097 - protein, 57 aa, Glycine max
  Clone ID: PAT_MRT3847_63353C.1.pep
RQLYALLCMCIGLMQLMQPVLDQLLTLSESQLLQYLAFIHATGTVGSYGCGTAISRL

SEQ ID NO: 245098 - protein, 189 aa, Glycine max
  Clone ID: PAT_MRT3847_63354C.1.pep
MYNFPLRRDKGSLSENNVRGRIMLEKNGKTTNSFPGDVTTERIAALQEAYWSMASALSEADGIDYTDPEELELLVRTLIDLDAMDGKQSVSLLAECSSSPDVSTRRALANALGLEAAAPSMWTLGNAGMGALQRLAEDSNPAIAAAASKAIYELKKQWEIEEGDSWRFMMDENTMEEKGSIESDNEDTK

SEQ ID NO: 245099 - protein, 156 aa, Glycine max
  unsure (1)..(156): unsure at all Xaa locations
  Clone ID: PAT_MRT3847_63355C.1.pep
FAAQPCTLSFSALWGGLCLAGQVPGAVRFLDEVVAQGFHPNLVTYATLLDGLCKIGETRCAIKFLRMIEDSSTGLNVVMYNTIIDGLCKDKLVNEAYDFYXEMNARGIFPNVITYTTLIGGFCLAGQLTGAFSLLNEMILKNINPNVYTYAILIDA

SEQ ID NO: 245100 - protein, 82 aa, Glycine max
  Clone ID: PAT_MRT3847_63356C.1.pep
ENVHGLRWAMAIWFLIGALIVIYLEYHERQRIGRQISGRGNWVLGNLEEDDSVDLLRPTRTSADKELQPSARMEVQLEPLNR

SEQ ID NO: 245101 - protein, 86 aa, Glycine max
  unsure (1)..(86): unsure at all Xaa locations
  Clone ID: PAT_MRT3847_63357C.1.pep
IWFKCFQTDGNGRTVXLTDLNYLYYKYGQNPWNDSLSRPVTDLLTIIAGAVRGITSNICDLXKAISSWNAYNNQLRELEQTWNDIE

SEQ ID NO: 245102 - protein, 60 aa, Glycine max
  Clone ID: PAT_MRT3847_63358C.1.pep
MTRDCIIRVYRLRKQSGENRSSEGCVLDSDNNNSYIMYALLHDICYHDLVYFLYDTATVI

SEQ ID NO: 245103 - protein, 105 aa, Glycine max
  Clone ID: PAT_MRT3847_63359C.1.pep
MASCCSLLLLSLIFLLSSSVSHALSNAEVSFIARRQLLHLHENDELSDNYVDNYETNLTFSNPRLKLAYIALEALKKAIYSDPSNFTANWEGQNVCSYNGVFCEK

SEQ ID NO: 245104 - protein, 85 aa, Glycine max
  Clone ID: PAT_MRT3847_6335C.1.pep
LVKQSCVSSGFCWGPLLISFQGGGVGGGGGFHIPCHDPSRRAIRVHPPPPVPGRSPSSPRNRAACPTEGSRPLHQHREALSRQTS

SEQ ID NO: 245105 - protein, 126 aa, Glycine max
  unsure (1)..(126): unsure at all Xaa locations
  Clone ID: PAT_MRT3847_63360C.1.pep
DATFLRTVVXDRSTILLQNVGLVVASFIIAFMLNWRITLVVLATYPLIISGHISEKLFMQGFGGNLSKAYLKANMLAGEAVSNIRTVAAFCAEQKVLDLYAHELVEPSKRSFNRGQIAGIFYGISQ

SEQ ID NO: 245106 - protein, 548 aa, Glycine max
  Clone ID: PAT_MRT3847_63361C.1.pep
MEEIDPRSGFCSSNSIFYSKRKPLPLPPNNALDVTTFISSRAHRATTAFVDAATARRLTYTQLWRSVEGVAASLSVDMGIRKGNVVLILSPNSIHFPVVCLAVMSLGAIITTTNPLNTTREIAKQIADSKPLLAFTISDLLPKITAAAPSLPIVLMDNDGANNNNNNNNIVATLDEMAKKEPVAQRVKERVEQDDTATLLYSSGTTGPSKGVVSSHRNLIAMVQIVLGRFHMEENETFICTVPMFHIYGLVAFATGLLASGSTIVVLSKFEMHDMLSSIERFRATYLPLVPPILVAMLNNAAAIKGKYDITSLHSVLSGGAPLSKEVIEGFVAKYPNVTILQGYGLTESTGVGASTDSLEESRRYGTAGLLSPATQAMIVDPESGQSLPVNRTGELWLRGPTIMKGYFSNEEATTSTLDSKGWLRTGDICYIDNDGFIFIVDRLKELIKYKGYQVPPAELEALLLTHPAILDAAVIPYPDKEAGQHPMAYVVRKAGSSLSETQVMDFVAGQVAPYKRIRKVAFISSIPKNPSGKILRKDLIKLATSKL

SEQ ID NO: 245107 - protein, 106 aa, Glycine max
  Clone ID: PAT_MRT3847_63362C.1.pep
KLGETRAKAVPGGKMKTAHNPTQKTSRKQKGKSRGGLKRELTHINGGGLTAPFPGEKPERHRGKKKTAKPRGEGDPQWGPRGEFLSKKGTGKKGKSQSTLSGPEKK

SEQ ID NO: 245108 - protein, 73 aa, Glycine max
  unsure (1)..(73): unsure at all Xaa locations
  Clone ID: PAT_MRT3847_63363C.1.pep
SGCFCCTAPCLRITIDNKPIKLQIWDTAGQESFRSITRSYYRGAAGALLAYDITRTXTFNHLASCLEHATQHA

SEQ ID NO: 245109 - protein, 129 aa, Glycine max
  Clone ID: PAT_MRT3847_63364C.1.pep
MSSGGRAVKPKEEEQDGMSVHSPCKPPPSSASSLPKEQSQVELELRLLEALEIYPPMKLQGVHRHFVLYGLMEFLRRKFDRQFSSEEVLQLLDRFYNLEMLKTDDDEIDLLTHEEEFSLPQSYFVKEEP

SEQ ID NO: 245110 - protein, 46 aa, Glycine max
  Clone ID: PAT_MRT3847_63365C.1.pep
FGSEFSVTCPTSFWHSVSGASMSSGGPSTTFSTPAQGNRAQHTASR

SEQ ID NO: 245111 - protein, 425 aa, Glycine max
  Clone ID: PAT_MRT3847_63366C.1.pep
HDEHFVDGSVERASEADSGIQEGDQNGSMKPRRYLPKKKEINIEGKMMVADGIDASQGEVDDSAGDWMPAVSRSTHRRYLRRKARREYHELLSSNQDQQQLEGNVDGSVGEDASALNQPAHHNEEQHIENAVTEDDNVVKENKDNESIYEIMQQMRLQEGSLEVLDEESKPSSSPEELQSDNAGLVETASDGNATVVNKLCDSRTDTIDGQSNQLEIASQTSEAADFSYADDDDSDQSWMVRSLSESSVACITGDFAMQNVLLQMGLRLLAPGGTQIHQLHRWILKCHACNTVTAEIGRIFCPKCGNGGTLRKVAVTVNENGIVLAARRPRVTLRGTKFSLPLPQGGRDAVTKNLILREDQLPQRVLYPKMKKANKQDDDFFTPDSVFSHHIDKKAPFQPPVRKAMAVFSGRRNPNDNHYSRSKA

SEQ ID NO: 245112 - protein, 74 aa, Glycine max
  unsure (1)..(74): unsure at all Xaa locations
  Clone ID: PAT_MRT3847_63367C.1.pep
MGTQVAERQAIADTFINDTSMFACLLYTRADGQGXNSTGADSTEIHVLDSSPQIDRQAYYLRHRMSQTKPEPIH

SEQ ID NO: 245113 - protein, 358 aa, Glycine max
  Clone ID: PAT_MRT3847_63368C.1.pep
MSQQLTREEQERKYPEYTWDLTTIFKSDEAFEEAFKSIEAKIGEEEKFKGHLGESAETLYEALSLEDELGTKLEKVYVYAHLKQDQDTANDKYTGLEARAHQLVIKYSSAWSFLVPEILQLDEATIQSFIDSNDDLKRYEFDLKLINEKRPHILDANTEKLLTEAQDALSTPSNVYGMFSNADLEFEDAIDKDGQAYPLTQGTFIKYLESDDRELRASAFRNVYKAYGAHNNTLGATLAGEVKKNVFNARTHHYRSARERALSNNHIPEAVYDNLIKTVHKYLPLLHRYTKLRQELLGLDDLKMYDLYTPLVKDVKFEMPYEEAKSWMLKALEPMGEEYLNVVKEGLDNRWVDVYENK

SEQ ID NO: 245114 - protein, 1029 aa, Glycine max
  Clone ID: PAT_MRT3847_63369C.1.pep
SLPYLVVLCTPESNMGVANFSVFLLIISLSFFQLLRISESKLPKEEVDALKEIVSTMGATYWKFDADSCNIEMVGVTLEPPDESERRIGCDCSFEDGTVCHVVNMTLKRLSLPGILPPQLAKLPFLRFVDLAYNCFTGTCPVLRAALVPTAVSLLVSRLPGVTPKHLGNITSLTYLMLEANQFSGDVPTELGKLINLQTLVLSSNQLTGSFPPSLAGLQNLTDFRISNNNFTGTIPNFIQNWQQLKRLEMHGSGLEGPIPSNISLLNNLEQLRISDIESPSQDFPFLGNMAGLITLVLRNCNLSGVIPSYIWTMMALENLDVSFNMLVGQIPAVISARRLRYIYLTGNILSGNIPNSVLKDGSSIDLSYNNFTWQDDDQPACQDSMNLNLNLFRSSIKENKLEEYVPCSKNFICPRYSSCLHVNCGGKDVNVKDDKGENLYVGDDVQGGTATYFYSSNDHWGFSSTGDFMDDFDGQNIRYTVSSPSSNMPELYKTARISPITLTYFHNCMENGNYTVNLHFAEIQFTNDKTFRSLGKRIFDIYVQGKLIRKNFDIENETNVAEKPLVLPIYNISITNNVLEIRFYWAGKGTTRIPDVGVYGLLVSAFSVVSNSRVCSNGEKKVSVSIIIAIVVGALCLVLFTSGFIWWKWKGFFRGKLRRAGTKDRDTQAGNFSLEQIRVATDDFSSANKIGEGGFGPVYKGQLLDGTFIAVKQLSSKSRQGNREFINEIGLISCVQHPNLVKLYGYCAEGEQLLLVYEYLENNSLARVLFGSENKQLKLDWPTRFRICIGIAKGLAFLHDESRFKIVHRDIKASNVLLDDKLNPKISDFGLAKLDEAEKTHISTRVAGTIGYMAPEYALWGYLTDKADVYSFGVVALEIVSGKSNNNYLPDDGSVCLLDRACQLNQTRNLMELIDERLGPDLNKMEVEKVVKIGLLCSNASPTLRPTMSEVVNMLEGHADIPDVIPEPSTYNDDLRFKALRNLHQYQSKQSLSGNQSQSSMTHTFTSASGGNTHTTSYIEDHSSVDSS

SEQ ID NO: 245115 - protein, 382 aa, Glycine max
  unsure (1)..(382): unsure at all Xaa locations
  Clone ID: PAT_MRT3847_6336C.1.pep
MDGAEFDAAFGFPSEFPYEFDSVGTEPVDSGSTGTESSDDEDFFAGLTRRLSHTSLNETRKEQHFTVPIGNSGQAESQKMMARGLAGSPQSILSGIGSWSGRSGGSGDGSPNGSSRVPSPTTTPFKSTNDAWDVLYAAAGEVARLKMNDLVSSKYDFQNRGVLGGFPPPVAAENVFXPNQGVSQVRYQQVRPEQMLKQQCGSVWGRQEKAGWVSQQHHQPQVQNRVRDLREFGYDYEAVKCTRALPRPAWHPLQVKNQNTQHVPHFGSGSRPGLQAGSGATKRGCAGTGVFLPRQYGAPPDSRKKTCCAAPVLVPAKVIHALNLNIDELNAAGQPRFSSAFGVLVDALLARRNALLLQQKLSMRREEAANYEALRLPQEWTY

SEQ ID NO: 245116 - protein, 492 aa, Glycine max
  Clone ID: PAT_MRT3847_63370C.1.pep
SRTRGLIRKNFDIENETNVAEKPLVLPIYNISITNNVLEIRFYWAGKGTTRIPDVGVYGLLVSAFSVVSNSRVCSNGEKKVSVSIIIAIVVGALCLVLFTSGFIWWKWKGFFRGKLRRAGEVILLYFESYTQAGNFSLEQIRVATDDFSSANKIGEGGFGPVYKGQLLDGTFIAVKQLSSKSRQGNREFINEIGLISCVQHPNLVKLYGYCAEGEQLLLVYEYLENNSLARVLFGAENKQLKLDWPTRFRICIGIAKGLAFLHDESRFKIVHRDIKASNVLLDDKLNPKISDFGLAKLDEAEKTHISTRVAGTIGYMAPEYALWGYLTDKADVYSFGVVALEIVSGKSNNNYLPDDGSVCLLDRACQLNQTRNLMELIDERLGPDLNKMEVEKVVKIGLLCSNASPTLRPTMSEVVNMLEGHADIPDVIPEPSTYNDDLRFKALRNLHQYQSKQSLSGNQSQSSMTHTFTSASGGNTHTTSYIEDHSSVDSS

SEQ ID NO: 245117 - protein, 73 aa, Glycine max
  unsure (1)..(73): unsure at all Xaa locations
  Clone ID: PAT_MRT3847_63371C.1.pep
DFCYIQEINCASWDYXYESDTXYPCAHYKAFYGRGPIQLSWXFNYRPIGQSIGSDGLNATETAANDPVVSFID

SEQ ID NO: 245118 - protein, 90 aa, Glycine max
  Clone ID: PAT_MRT3847_63372C.1.pep
RLCELNPSNQGASVGSAERATGTAISIHEAIRSVAEDYEPSSSVSQPRRYDRIRHIHSLTLSLSTVDKIYLTHDSILHIGQRLICTRTGR

SEQ ID NO: 245119 - protein, 29 aa, Glycine max
  Clone ID: PAT_MRT3847_63373C.1.pep
LQNNYFLETIDVSSHIIYISSQYISMICI

SEQ ID NO: 245120 - protein, 66 aa, Glycine max
  unsure (1)..(66): unsure at all Xaa locations
  Clone ID: PAT_MRT3847_63374C.1.pep
KKKCVIMNFSGIFFWERVSLPCVLIPDETGAPALWLXKKKKKKKKKKKKKKKGRGRHDCTEIQVIA

SEQ ID NO: 245121 - protein, 205 aa, Glycine max
  Clone ID: PAT_MRT3847_63375C.1.pep
MSMEEPQFREHPKAKIATIPPSQHSDGAAAELRGADCNLASLCEHVQIEGFNSGSFSDIVVNAMGSTYHLHRLILSRSSYFRNMLHGPWKEAGAPVVALHVDDKNVNDEAIAMALAYLYGHHPKLNDNNAFVLAAAVFLDLQDLCGIWTDFIISDLWTLNFLAYKVFAENHDYGMHGERGRTGCWGYLWQSGGMEFEEGAPKLLF

SEQ ID NO: 245122 - protein, 67 aa, Glycine max
  Clone ID: PAT_MRT3847_63376C.1.pep
PNMYILPVPPIFPPPSAYIQAMSPFISISNILRHHHPCFTTFSLVFFSPFASAVMEVQAKFLRSTTI

SEQ ID NO: 245123 - protein, 135 aa, Glycine max
  unsure (1)..(135): unsure at all Xaa locations
  Clone ID: PAT_MRT3847_63377C.1.pep
DSSKQSYGQYSIDLLGGGKKADKTGDWITLMQNSTISNLLRAAARKKGXLMDKIEMSGNAAVKRSDWASLVQVLLTYSNSTEHFDACKRTKSEPHSWELISPIEGCGPKNGPEMWSSERANNTPWHKTTLNDNPK

SEQ ID NO: 245124 - protein, 61 aa, Glycine max
  Clone ID: PAT_MRT3847_63378C.1.pep
VVHGLDSLTCVLPSLFPNNAFRQDKDLNKPRMRAVLKSQSSWKEICGMEALKHRVWFGPHS

SEQ ID NO: 245125 - protein, 131 aa, Glycine max
  unsure (1)..(131): unsure at all Xaa locations
  Clone ID: PAT_MRT3847_63379C.1.pep
DDVAKLXERXXGTSRAIGAPEYCHANFTKYFTGGVWSESKLSGDFPPRRASTSHGGDGNDSGEWGKGRFPQKNWGFDGIPKKVRVLYFGSFPPLFLWFPGNLAPFLTPGNPPVLGGVKTKGDFPRNFPPGA

SEQ ID NO: 245126 - protein, 48 aa, Glycine max
  Clone ID: PAT_MRT3847_6337C.1.pep
KPFSSIKELICTILRTTSNPSSHCGGGGGILTPWRYKIIPNTSNGMPT

SEQ ID NO: 245127 - protein, 41 aa, Glycine max
  unsure (1)..(41): unsure at all Xaa locations
  Clone ID: PAT_MRT3847_63380C.1.pep
YGCYINXQAVIRSKKDVHIRQCKPRDLIXCLRIYEANMGAT

SEQ ID NO: 245128 - protein, 54 aa, Glycine max
  Clone ID: PAT_MRT3847_63381C.1.pep
SVRLLRIKLICMLNIKIWINLIRIGLVDQLDSYERNTALAFWHPQKKPAFKRRR

SEQ ID NO: 245129 - protein, 332 aa, Glycine max
  unsure (1)..(332): unsure at all Xaa locations
  Clone ID: PAT_MRT3847_63382C.1.pep
MMTDITNLSTDLIELILSLLPIPTLIRASTVCKLWHSIISSXLPSQPSPTTSSXPWFFLHGIHNISSKNNQSFAFDPSSNTWFLLPTPQHHHQSQYQSNTSFIGTSSFFFITAPNFLYTPILHPSWHPTPPLHFPRINPLLGVFHDAKDQNFGHHPKFIVVGGVKFIGNLVDIEDRLDVEIYDPLVGSWELGPPLPPDFRSGNSSSSLSSALFRGKFYVFGIYSCFVSSFDLHKRVWSDVHTLRPRHEGVFSFLVACREMLVLAGVCNFPHGSSSFVLWKGDERTMWFTQIDVMPHDLLCSLFDGDEDDKFASLKCVGLGDLIYVFNEDCHH

SEQ ID NO: 245130 - protein, 237 aa, Glycine max
  unsure (1)..(237): unsure at all Xaa locations
  Clone ID: PAT_MRT3847_63383C.1.pep
GSSPSSLLLVGSSXIGNLVDIEDRLDVEIYDPLLGSWDLGPPLPPDFRSGNSSSSLSSALFREKFYVFGIYSCFVSSFDLHKRVWSEVHTLRPHHGIVFSFLVACKEMLVLAGVCNFPHGSSSFVLWKVDERTMGFSQIAVMPHDLLCSLFDGDEDDKFASLKCVGLGDLIYVFNEDYHRMYPACVCEIDGESGRCAWRRVPQLPSLMNRFHKVVSFCSTVSLHSILGERQPCGLQY

SEQ ID NO: 245131 - protein, 88 aa, Glycine max
  Clone ID: PAT_MRT3847_63384C.1.pep
DSCVYRVYGLSYACVMDKLILVVADRVYSQASSEDRSAVGRYVFLYSMSTWYCLKSSNRVSISDHLVLQRPRVLRRHSDWCIAGSGVS

SEQ ID NO: 245132 - protein, 116 aa, Glycine max
  Clone ID: PAT_MRT3847_63385C.1.pep
RGMISDMLAIDTCICQHHHRYLHNYHQQNEEPEMIIGPIRRMDTVRARLALTESLEQLLMHLRELLGRTVEQMNNNYYNNEEYSTAESDQEQMETAQNGARVGTDNDELLRNYMDC

SEQ ID NO: 245133 - protein, 364 aa, Glycine max
  Clone ID: PAT_MRT3847_63386C.1.pep
LYPDACGGGGRGWISQGIVSYGRGHGTRETCALHTARLSCDTLVDFWSALGDEMRLSLLRMKEEDFIERLMYRFDSKRFCRDCRRNVIREYKELKELKRIRREPRCTSWFCVADSAFQYEVSDDSVQADWRQTFADAAGTYHHFEWAVGTTEGKSDILEFENVGLNGCVRASGLDLGGLSACFVTLRAWRLDGRCTELSVKAHALKGQRCVHCRLIVGDGYVTITKGESIRRFFEHAEEAEEEEDDDLMDEDGNELDGECSRPQKHAKSPELAREFLLDAATVIFKEQVEKAFREGTARQNAHSIFVCLALKLLEDRVHVACKEIITLEKQMKLLEEEEKEKREEEERKERRRTKEREKKLRRK

SEQ ID NO: 245134 - protein, 89 aa, Glycine max
  Clone ID: PAT_MRT3847_63387C.1.pep
VHSAVSLINTKVHGIYKIYHQCCLEAPFPTPPRSSFKGLLRTSSLVSLLVTKSFPKHLHIINSLVLWTLIITHATRNWRSSTVTSPSNG

SEQ ID NO: 245135 - protein, 75 aa, Glycine max
  Clone ID: PAT_MRT3847_63388C.1.pep
MLVLEDFPEWHTRKNKVFWRGSTTGGGNNPAGRQLDYQRHRFVRMTSDNSSEPVGIILPPKNGTSDLTYVELPSA

SEQ ID NO: 245136 - protein, 116 aa, Glycine max
  Clone ID: PAT_MRT3847_63389C.1.pep
ALPESSMLRIKFSEHAHLVRYVQQCKTEFIEAAPSPSSAPRFHTGASSSASKSHSSSKPKSKPKREKTQEEKTFKRKAKYFVVAQLVAVVVFLTLMTSFDDAEVELDDDGGYDFDE

SEQ ID NO: 245137 - protein, 45 aa, Glycine max
  Clone ID: PAT_MRT3847_6338C.1.pep
MQPNHINVSVHIPTLAYALNCLVHMTLAHNKGSGNYSNWSVERRQ

SEQ ID NO: 245138 - protein, 70 aa, Glycine max
  Clone ID: PAT_MRT3847_63390C.1.pep
CGQRVMDSTGGSLRILLLVPSVGGPAKEDHHSRPPTGEVTPNIVRISTEAFTRGWVNYHLNPTWRCWCCG

SEQ ID NO: 245139 - protein, 86 aa, Glycine max
  unsure (1)..(86): unsure at all Xaa locations
  Clone ID: PAT_MRT3847_63391C.1.pep
AREFGSXPLXXAXYXNIPXIFSXNLXHXSPSXGXXXIGXSVLXTSLHDXIXVXXQXNXXTMQSWHXDXYDXWVIXHXFXXWTXASR

SEQ ID NO: 245140 - protein, 56 aa, Glycine max
  Clone ID: PAT_MRT3847_63392C.1.pep
MWKLPMFGCTDASQVLKELQEANTAYPSGFIRIIGFDKDCQVQCISFMAYKPPGFV

SEQ ID NO: 245141 - protein, 95 aa, Glycine max
  Clone ID: PAT_MRT3847_63393C.1.pep
VDLSKTSCSCNFWQLVGIPCRHAIAAINYKGEHAEDHVDKYYHRDTYKLCYSHSITTIDGRKKCSKTNDPDLLPPNYKRAAGRPKKLRRREVDED

SEQ ID NO: 245142 - protein, 71 aa, Glycine max
  Clone ID: PAT_MRT3847_63394C.1.pep
KGRVEIETEHPYPTHTHASSLGIFPHSLFLHERHGFLLHVWGLTQTLAYPFTYFPCTYSFLILQLFHLNLN

SEQ ID NO: 245143 - protein, 87 aa, Glycine max
  unsure (1)..(87): unsure at all Xaa locations
  Clone ID: PAT_MRT3847_63395C.1.pep
KNKRGTSRRRHPEVINTRLFPTIRIYIANPPKGWRRGPPKSLDEHETEFRDXLRNNXREYERQVAEEEAQRIRRXKAAGGSTAQRTA

SEQ ID NO: 245144 - protein, 81 aa, Glycine max
  unsure (1)..(81): unsure at all Xaa locations
  Clone ID: PAT_MRT3847_63396C.1.pep
MDRKPVRGYLCIHCDLFDIDSIKEALNGCHGAFHTGNPFTTDPXEMAKLSYNETNNEITASSEQXVRWVKLTSAIVSLYMH

SEQ ID NO: 245145 - protein, 183 aa, Glycine max
  unsure (1)..(183): unsure at all Xaa locations
  Clone ID: PAT_MRT3847_63397C.1.pep
MFLKCFGFGAQRQYPTVIEELCHRFSLADLRKSTNNFDQDTVTGHGRFSRVYKGCLQHNEDASEYTVAVKRFVRVGVVEKWFRNEIELLCQLRHPNLVSLIGFCNDQNEMIIVYEYMSNGSLLQLLQSGILSWKKRLEICIGAARGLHYLHAGAKRTIIHRYINSRNILXLDHNMQPKLAEFV

SEQ ID NO: 245146 - protein, 122 aa, Glycine max
  unsure (1)..(122): unsure at all Xaa locations
  Clone ID: PAT_MRT3847_63398C.1.pep
MASHRIGELGLSESGPSSHHIPYGVLHGINTPASSLINQGSAFDFGELEEAIVLHGVKGRNDEGKASLFTARPAATLEMFPSWPMRFQXTPRVGSKSGGESTDSGLSSKTEPPFEGRISIVK

SEQ ID NO: 245147 - protein, 151 aa, Glycine max
  unsure (1)..(151): unsure at all Xaa locations
  Clone ID: PAT_MRT3847_63399C.1.pep
MTGIQVSLAMMNEEEYRWSTFLVSKQESQIGTMFLKCFGFGARGQYPTVIEDGARRQYPTVIEELCHRFSLADLRKSTNNFDQNTAIDRGRVYKGCLQHNEDASEYTVAVKRYNAVEEEEGFRKEXELLCQLRHPNLVSLIGFCNDQXERI

SEQ ID NO: 245148 - protein, 97 aa, Glycine max
  Clone ID: PAT_MRT3847_6339C.1.pep
HCILYIQGTGKTIVISVGAEPILPVGLFAILHGRTLKGTLFGGLKAVSDLSIVAEKCQKKEFPLQELFTHEVTLADINKAFELVKQPNCVKVVINMS

SEQ ID NO: 245149 - protein, 46 aa, Glycine max
  Clone ID: PAT_MRT3847_633C.1.pep
YRCECQRWASSKACGSLFEIAALAAVHSVVLCPMFRVFTRTGAVYT

SEQ ID NO: 245150 - protein, 127 aa, Glycine max
  unsure (1)..(127): unsure at all Xaa locations
  Clone ID: PAT_MRT3847_63400C.1.pep
MFLKCFGFGAQRQYPTVIEELCHRFSLADLRKSTNNFDQNTVIDRGGCGRVYKGCLQHNEHASDTVAVKRLGMGNEELFRNEIELLCQLRHPNLVSLIGFCTXQKEKIIVYEYLSNGSLDQLLQSGV

SEQ ID NO: 245151 - protein, 35 aa, Glycine max
  Clone ID: PAT_MRT3847_63401C.1.pep
CEKRTNGRALGFTSFQFSIHNSKYLFLSNNHIQSS

SEQ ID NO: 245152 - protein, 92 aa, Glycine max
  Clone ID: PAT_MRT3847_63402C.1.pep
MASKRINKELKDLQKDPPTSCSAGPVADDMFHWQATIMGPADSPFAGGVFLGSIHFPPDYPFKPPKVSFCTKVFHPNINSNGSICLDILKEQ

SEQ ID NO: 245153 - protein, 98 aa, Glycine max
  Clone ID: PAT_MRT3847_63403C.1.pep
LSDTQEEEEEKEEEEEEEEEEEEEEEEEEEEEEKEEEEEEEGNVLVIIDEDKHDTEELNKKCEDFIKRMKATFSSNNLELRAVDSFYFDNQKLPVAVN

SEQ ID NO: 245154 - protein, 94 aa, Glycine max
  unsure (1)..(94): unsure at all Xaa locations
  Clone ID: PAT_MRT3847_63404C.1.pep
VRLATXXKXPKAGLPLRRXTGGDPXXEAXKRTAPXXKSTGXXXRAPGKXAEDTNKXEAXPHKPAQXGENQEKAAPKXPQEEHPTAGTXQXRPAT

SEQ ID NO: 245155 - protein, 67 aa, Glycine max
  Clone ID: PAT_MRT3847_63405C.1.pep
SLSCAQARFYAIALQSERVVCVHLQNMHCLGLALFVYSFTFTLQAIASFSTIYGTGDCSMAPFGPCT

SEQ ID NO: 245156 - protein, 72 aa, Glycine max
  Clone ID: PAT_MRT3847_63406C.1.pep
YSYEVGKAISWVSLGSSMFVWIKSLLRELGTQQDPLEEKPCMKKVKKDNCSSIQSVETKDDHDQALICSPEC

SEQ ID NO: 245157 - protein, 69 aa, Glycine max
  Clone ID: PAT_MRT3847_63407C.1.pep
PQTIPSIYMPSFQIQPAAHISSPHHKRHLPLGASLFSNQSLYHTLHGQTMQALPDLQCTLKPLMTTLII

SEQ ID NO: 245158 - protein, 91 aa, Glycine max
  Clone ID: PAT_MRT3847_63408C.1.pep
PTVAIQRRLGFAFLLLFLYLHFFLYPKLVEPLNPSPSMAIYRKKPFWGREGSPKRAGFLGMKLFHGPGEPDASLGELGSRKTKKKILLPPS

SEQ ID NO: 245159 - protein, 281 aa, Glycine max
  Clone ID: PAT_MRT3847_63409C.1.pep
TAVFSFNGVRSLKGHLKKKHISVPVGHSFFASLVLVMPESDFNRELGVFQLTAELLSVNGNVIEKSSQPCMLRFRSSPIRLVRTLMMGVPLVLGISGETQNINVDILKHKEDYRRSNSIRVTLHPRAGTSSLPQLYEAKIAINSHLPWTKELVRNWKWTFYVWVSLYVYIVLLVSLLCCYRPLIFLVTPEYFSDHRVSELTREEPGQLQVEELGDESEVSELLRKWRRSRSKRKTVLAHGGVPETIVGSSTSSISMMTTREDVTSVAVEDEVEDSESASIG

SEQ ID NO: 245160 - protein, 130 aa, Glycine max
  unsure (1)..(130): unsure at all Xaa locations
  Clone ID: PAT_MRT3847_6340C.1.pep
IFVFPKERLGPLQKVSPPQEIVCSQTNGANLKEEDVVVSYVKIDLTRGRANPLXKEYGSKEKFRIPNDCISHLLPAYCEDVIVRVYSREREQVEAVSNAFENYQLKTFGRKKQVHDTPEKKKRPKYFPSL

SEQ ID NO: 245161 - protein, 83 aa, Glycine max
  Clone ID: PAT_MRT3847_63410C.1.pep
KNEWSGGSGHNPFDILSSFFGKRSPFGSSGSRRSEKDKREEDVVHPLKVSLKDRCVGTCRKLSLSGNVVCCKVRLRSAESGAA

SEQ ID NO: 245162 - protein, 45 aa, Glycine max
  Clone ID: PAT_MRT3847_63411C.1.pep
CLDRVAVSAYRCSTCSSRSDHRACILRLDLRSESRLETFVLRRFI

SEQ ID NO: 245163 - protein, 31 aa, Glycine max
  Clone ID: PAT_MRT3847_63412C.1.pep
KAYRKTQMINRTGLSPSMMPHSIGLRLTKYA

SEQ ID NO: 245164 - protein, 84 aa, Glycine max
  unsure (1)..(84): unsure at all Xaa locations
  Clone ID: PAT_MRT3847_63413C.1.pep
MSHLKMTCCGGNCGSGSSCKCSNICRGCXMYPRLELXTDSTITETLFMGVAPSKAEFEGADMDVSAENDGCKCEPNCFCYRCTS

SEQ ID NO: 245165 - protein, 39 aa, Glycine max
  Clone ID: PAT_MRT3847_63414C.1.pep
GMTRRRKAPSMRQVVNKSLTKLVIGEGEIIGFGIGHEQK

SEQ ID NO: 245166 - protein, 375 aa, Glycine max
  Clone ID: PAT_MRT3847_63415C.1.pep
MFAGKGAVWFSRAVALAAIAVVACVGLTQAQPEARFKCNSANIPTCRALISYSHPNTTTLGDIQKLFNVKHILDIVGANNLPSNATKTYAVGPNEVVKVPFPCRCSNNTGLSDRVPLYRIKKGDTLYYIATTTFAGLMKWPQIQVANNIANANNITTGDMLYIPLPCSCDEVGGKSVVHYAHLVAPQSTVEGIAEEFGTTQQILLNLNGISDPKNLQAGQILDVPLQACSSNVKNDSLDYPLLVPNATYAYTAHECVKCKCDSSNNFILQCEPSQLKPTNWSVCPSMECSANVLIGKTISSDSCNRTTCAYTGYRFHNISAEAVTENTCAVPPTPSGSGGSTGSDSGASRSTLQGLFWSNLFIVIHFVLFLVYVL

SEQ ID NO: 245167 - protein, 90 aa, Glycine max
  unsure (1)..(90): unsure at all Xaa locations
  Clone ID: PAT_MRT3847_63416C.1.pep
FDRDRSVAWVKLFGSYFDTFLGNTQMRIVFLGLDAASKTPILDNFHIGEASSTAPTIGRNVEKPHDTNDVFTVSTVGRQEXLTALWRDFF

SEQ ID NO: 245168 - protein, 111 aa, Glycine max
  Clone ID: PAT_MRT3847_63417C.1.pep
APTRPPTRPGVITVKNKKDETTFTVHFPASGETLVVRAWHLRPSLIWKDGKWIESYKVGTNDSSTHEGERPHLFIQCMGRYLTTIRNALVAFLLLSIKRVQKDQRAARFLI

SEQ ID NO: 245169 - protein, 57 aa, Glycine max
  Clone ID: PAT_MRT3847_63418C.1.pep
GLTAKVIDPTMIMDDVYGDFFDFASMLVSNVDNNYPNASNRFIKLLAIEKTCRQSGL

SEQ ID NO: 245170 - protein, 54 aa, Glycine max
  Clone ID: PAT_MRT3847_63419C.1.pep
YNHPIASGGDIWLQSPCHTSLLRPTRYACSAHLHIFVSHRILDNEDRNDHPILF

SEQ ID NO: 245171 - protein, 429 aa, Glycine max
  unsure (1)..(429): unsure at all Xaa locations
  Clone ID: PAT_MRT3847_6341C.1.pep
EQFQRLRDLKQLGLSYMVYPGAVHSRFEHSLGVYWLAGKAIDAIKKYQGQELGIEHTDVLTVKLAGLLHDVGHGPFSHTFERGFLPLVLQGSTWSHEEMSVKMIDHIVDQHKIDLDSELLKKVKEMITSSPGHSSQREKRFLYDIVANGRNGIDVDKFDYIVRDSRACGLGCNFQHERLMETMHVVDDEICYRANDYLTVHKLFATRADLHQTVYTHAKVKAIELMVIDALVKANPFLQITSLIHQPSEFWKLDDSILKTIESSSQQELKESRDLIQRIRRRDLYQYCNEFSVPKERLDHFRSITPQDIVCSQTNGANLKEEDVVVSYVRIDLTRGRANPLGRYLLKKQLLINXEYGSKEKFRIPNDCISHLLPAYCEDVIVRVYSREREQVEAVSNAFENYQLKTFGRKKQVHDTPEKKKRPKYFPSL

SEQ ID NO: 245172 - protein, 70 aa, Glycine max
  Clone ID: PAT_MRT3847_63420C.1.pep
TFFFFFFFFPYPKNASTKTQKPYYHHHTLPFLGSVDLTLLRHITVPLQPSAVFTEIQRLKFLDFSVWTLI

SEQ ID NO: 245173 - protein, 73 aa, Glycine max
  Clone ID: PAT_MRT3847_63421C.1.pep
KGRGAYNHFNINLEEHHYLWLSLKTKLDHGPGPAGVSGAIKSIKAISPGCLYPSINLDVTGPPTVSCYTTQHL

SEQ ID NO: 245174 - protein, 171 aa, Glycine max
  Clone ID: PAT_MRT3847_63422C.1.pep
SSEFGSREEYHDGFFDEEEFLREILKEEQQPENLWPQRDQKLSNTSPTVSFDEAISFCGSGTLHKSNSSNSIKSLKRSSSSVSPATTTYLLSFDTSSAKPITLKPSPKLDLALGSSNKRSTSTVTVVKDGCEFEPLMMPQSQARKKVRRSCETQHYIIAERKRRQELTGSI

SEQ ID NO: 245175 - protein, 86 aa, Glycine max
  unsure (1)..(86): unsure at all Xaa locations
  Clone ID: PAT_MRT3847_63423C.1.pep
MYTSTCRGTERGTIRGTDLSATTETVGMVRARVEAQRTXRVKGMTEVSATGGCARNTCXSSGCAMNSAVRAGASSDSPPSESRQRI

SEQ ID NO: 245176 - protein, 361 aa, Glycine max
  unsure (1)..(361): unsure at all Xaa locations
  Clone ID: PAT_MRT3847_63424C.1.pep
MAQPLVKKDDDRDDEADYSPFLGIEKGSVLQEARVFNDPQLDARRCSQVITKLLYLLNQGETFTKVEATEVFFAVTKLFQAKDTGLRRMVYLMIKEISPSADEVITGTRSLNPRVRSKIDMYRANAIRVLCRITDGTLLSQIERYLKQAIVDKNPVVASAALVSGIHLLQTNPEIVKRWSNEVQEAVQSRAALVQFHALGLLHQIRQNDRLAVSKLVTSLTRGTVRSPLAQCLLIRYTSQVIHESGHTQSGERPFYDYLESWPCHKSDMVIFEAARAITELNGVTSRELTSAITVLQLFLXSTKPVLRFAAVRTLDKVGMTHSMAVTNCNIDMGKFNLLTRTRSICYPSLLLHFWKTXNEI

SEQ ID NO: 245177 - protein, 66 aa, Glycine max
  Clone ID: PAT_MRT3847_63425C.1.pep
MEDVSMGMWVEQFNSLRPVEYVHSFKFCQFGGIEDLYPGHYQFSRQITCMWGQLPQKGKPLCCNIR

SEQ ID NO: 245178 - protein, 326 aa, Glycine max
  Clone ID: PAT_MRT3847_63426C.1.pep
EREREKMAEEKGMSPWEQHSAVIKLPRFDYNAPSSLLRNSHSGFLITCTIKREKSATKEAISILHKFLGSGHYHTLNNPNEEDTTSKRRKICTQDAAEECFDESPTANSGADGKLSSPVKAEAEKDGIANLSLVKLTRNGLLLLTFPINTHPDTVTIVSNIIQALESGTVSLPVWCHRIFPIQATCNLKLKELYEVVSMLVKKFLADKQDKLERPLKFAVGFNRRGIEETTLAKENSNDSKAFSLLDRNKCFGVVASAVNHVVEDSVVDLRSPELSVLVELLPLSGVPDASIIVAVSVLPRNLVSTKPRLCIKALNSNTKEGSGAT

SEQ ID NO: 245179 - protein, 99 aa, Glycine max
  Clone ID: PAT_MRT3847_63427C.1.pep
TLPQWKQDYRARLKLNRGQSQTTAKSQAQAGENQEKSNHSPNRERNPRGEPPKKPAIQAPRTTNGTAKPEKGPQLKKQPGDGAKGGHKKYHGDKRPKEK

SEQ ID NO: 245180 - protein, 166 aa, Glycine max
  Clone ID: PAT_MRT3847_63428C.1.pep
TPRGSGPEFPGRPTRPEKMAEEKGMSPWEQHSAVIKLPRFDYNAPSSLLRNSHSGFLITCTIKREKSATKEAISILHKFLGSGHYHTLNNPNEEDTTSKRRKICTQDAAEECFDESATANSGADGKLSSPVKAEAEKDGIANVSLDKLTRNGWVLLTFTINTHPGT

SEQ ID NO: 245181 - protein, 212 aa, Glycine max
  Clone ID: PAT_MRT3847_63429C.1.pep
EGYTPERILKVPSGSYNIAHVTYELNVLGTRGPRRMNCTMYSIPASSMEPNGVVPGQPELLPRALEDSFRSISFSKSIDNSTEFSSSRFSDIMGTGIEDEEGKVRPLVLKNKSPRWHEQLQCWCLNFRGRVTVASVKNFQLIASTPPAAVAPTGTGPTPSQPTQSSSDPDKIILQFGKVGKDMFTMDYRYPLSAFQAFAICLTSFDTKLACE

SEQ ID NO: 245182 - protein, 103 aa, Glycine max
  Clone ID: PAT_MRT3847_6342C.1.pep
LGSIHWDQQFLTKEGNFNFKQRRKQWLFMEETKQGVALRERLRMVSFEIAEKGHCSESNKQIRRATLKDNAAGVHEIKQYNEHLNPPREEINTLFGEKENAYE

SEQ ID NO: 245183 - protein, 44 aa, Glycine max
  Clone ID: PAT_MRT3847_63430C.1.pep
YGHQQAAPKLETYPRSFYVLTMRLIGYENVFVKGLEEFCVCWEK

SEQ ID NO: 245184 - protein, 534 aa, Glycine max
  Clone ID: PAT_MRT3847_63431C.1.pep
MCCGAQPQPQPQAAPFMRFPFWNSVHPKNPTSVVRVQAEAADMNMNSIPHVLSVAGSDSGGGAGIQADLKTCAARRVYCSTVITAVTAQNTAGVQGLNILPEDFVADQLHSVLSDMHVHVVKTGMLPSLNIVKVLCQTLRKFPIKALVVDPVMISTSGDVLVGPSVLAGFLEELLPMTDIVTPNIKEASVLLGGVPLKSVSDMRTAAKLIHDLGPRNVLVKGGDLPNSLDAIDVFFDGEEFYELCSPRVNTRNSHGTGCTLASCIAAELAKGSSMLSAVKTAKHFIEAALDYSRDMTIGNGAQGPFDHFLALNINQSSCRLNRFNPNDLLLYAVTDSAMNRKWGRSIAEAVKAAVEGGATIVQLREKDAETRDFLEAAKVCLEICHSYGVPLLINDRIDVALACDADGVHVGQSDMPARLARTLLGPEKIIGVSCKTPEQAHQAWIDGADYIGCGGVYPTNTKANNRTIGLEGLKEVCLASTLPVVAIGGIGLSNAREVMKLGAPNLNGVAVVSALFDRECILTETRNLHALVS

SEQ ID NO: 245185 - protein, 43 aa, Glycine max
  Clone ID: PAT_MRT3847_63432C.1.pep
ISFYACVKKKKIFSFGNRRNIARFFVNPRYFSEIPRAGSELRR

SEQ ID NO: 245186 - protein, 51 aa, Glycine max
  Clone ID: PAT_MRT3847_63433C.1.pep
FVTTLDTSSDRRYDIRQLALFVFLRYLTLVVGISLSKPNCSSPFSLDVRSF

SEQ ID NO: 245187 - protein, 58 aa, Glycine max
  Clone ID: PAT_MRT3847_63434C.1.pep
QLHSFAFIYYYTEIEILFLSLHPTIQPSNSLFQYHPCPFSSILINPSSFHSSSSLDWN

SEQ ID NO: 245188 - protein, 42 aa, Glycine max
  Clone ID: PAT_MRT3847_63435C.1.pep
RFRPFAPQEKESIVASFRYQPKTDVQGGAHGTSMDLLYSLVP

SEQ ID NO: 245189 - protein, 42 aa, Glycine max
  unsure (1)..(42): unsure at all Xaa locations
  Clone ID: PAT_MRT3847_63436C.1.pep
QYGVCDGFWVGQHFRRWCWVSHTXPTPLQXFVLIRANPGSRN

SEQ ID NO: 245190 - protein, 123 aa, Glycine max
  unsure (1)..(123): unsure at all Xaa locations
  Clone ID: PAT_MRT3847_63437C.1.pep
KDVRRVECGIPSGFPLTVICNSIINEMLIRYSYEKLLRQAKAPRVFLQSFKNYASLSEYGDDNLISAHEYDKPYFTGSKLKSFLAXGHYITITDGLDTTRATLQLRKAADCDFLKRNYKHMFN

SEQ ID NO: 245191 - protein, 63 aa, Glycine max
  unsure (1)..(63): unsure at all Xaa locations
  Clone ID: PAT_MRT3847_63438C.1.pep
LGMIPSRXAIIAYDTSLAGDRPLWLFIYSNWAFFAALAPMSCGLGFTHEENLLILSDHDLIHY

SEQ ID NO: 245192 - protein, 46 aa, Glycine max
  Clone ID: PAT_MRT3847_63439C.1.pep
YYMLEVFKRTCIFNTPPRDDYRIKQKTLCSLLEVLRMMGRPGIWSS

SEQ ID NO: 245193 - protein, 132 aa, Glycine max
  unsure (1)..(132): unsure at all Xaa locations
  Clone ID: PAT_MRT3847_6343C.1.pep
KVWGKTGSKLYGPSAGVDYEDNQLRFSLLCQAALEAPRVLNLNSSKYFSGPYGEDVIFIANDWHTALLPCYLKSMYQTKGIYKNAKVAYCIHNIAYQGRHSFADFSLLNLPNKFKSSFDXTDGHVKPGKGRE

SEQ ID NO: 245194 - protein, 210 aa, Glycine max
  Clone ID: PAT_MRT3847_63440C.1.pep
MAALSSSCSTSLPKISSHRFNFYPHHLNLPPWPPKSMPNNPLSLSTTCKRRNVFSEEFNGSVAEEESFSSMDDKQFVRWFRETWPYLWAHRGATFVVIISGEIVTSPLLDPILKDIAFLHHLGIRFVLVPGTHVQIDNLLRERGRQPKYVGPYRITDDESLAAAMEAAGRIRLMIEAKLSPGPSIYNIRRHGDNSRLHEVGVSVASGNFL

SEQ ID NO: 245195 - protein, 65 aa, Glycine max
  unsure (1)..(65): unsure at all Xaa locations
  Clone ID: PAT_MRT3847_63441C.1.pep
NKGRGATVSLTINKGERATRIPLTARNRESPNKIGRPGVKGRMKSVLTAGGERRVQSXAPPEKKE

SEQ ID NO: 245196 - protein, 71 aa, Glycine max
  Clone ID: PAT_MRT3847_63442C.1.pep
IEEVKNPINGSNKIPIRMHLASILFPFFKYNENNVWLYEAIFRFRFDFLQSTAHQRIVRLKQNIYDQFYDG

SEQ ID NO: 245197 - protein, 99 aa, Glycine max
  Clone ID: PAT_MRT3847_63443C.1.pep
MIELFLSEPNWNDVVNDDDSTRSRISILNDLETVIWSTVGRSEARLWLCNTVAGLNCVTSLDQRDLFRNLLRTSGVKRDLASQLLHLMFDTAPHKPSSV

SEQ ID NO: 245198 - protein, 67 aa, Glycine max
  Clone ID: PAT_MRT3847_63444C.1.pep
GGAVTYRVLALLLGPLDVHVMSSKGAFIIQISAVTKAFHPRFVSLGFRHVIGIFNTCAYFSENDSVH

SEQ ID NO: 245199 - protein, 44 aa, Glycine max
  Clone ID: PAT_MRT3847_63445C.1.pep
IIYPPNVIVVKYVRAVVGANYHIIAWVKTVKCAFRVIFRVHAML

SEQ ID NO: 245200 - protein, 61 aa, Glycine max
  Clone ID: PAT_MRT3847_63446C.1.pep
KEEIKKGTINITTKRKPDKEKICILYLGGQLKHLLLVRWFLSIKGIKRVSLVFNMLHLLIQ

SEQ ID NO: 245201 - protein, 54 aa, Glycine max
  Clone ID: PAT_MRT3847_63447C.1.pep
FVHMSVLFLVHFYLVHVSVLFSLMNPNPINQLSSTTCVVVTNVFSRFHIKVTDP

SEQ ID NO: 245202 - protein, 143 aa, Glycine max
  Clone ID: PAT_MRT3847_63448C.1.pep
RPGIPFRVRPTPAVLSTEKKTTLEGVFLSDCGTVYPSLQHVSKFLMFMEWSLTLDSSHSTSSTTNHITFPTLGDPVNLSPSSDHNRTVLGEEDSYSGARNISSSHTNNEHVTPIKGDPQVKTELRLPTANAGSDQSTVDEGAK

SEQ ID NO: 245203 - protein, 49 aa, Glycine max
  Clone ID: PAT_MRT3847_63449C.1.pep
IQIKKPKHPALILKHNLIKTTTIKRNLGQKPKIHSNSYRLSQSHPAKNI

SEQ ID NO: 245204 - protein, 325 aa, Glycine max
  Clone ID: PAT_MRT3847_6344C.1.pep
ARASTYNALMGACMSNGLADNCQSLFCDLKRDLTCDPSIATYNILLSVFGRLMLVDHMEATFREIQKLTFTMNICTYNHMIAGYITAWMWDDMEKVFQMLKLSSVEPNMKTYMLMLRGYANSGNLEKMEEMYSFIRDHVNIKEISLIRCMICAYCRSSHADRLKKIELLLKFIPQKEYRPWLNVLLIKLYAKEDWLAKMENAINEAFEHGTSITTKGILRRIIATYYRCNAVEKLENFVRRAEISGWSICRSLYHCKLVMYGSQMTLLEMHNVLEEMENVKLKCSKKTLWIMYKAYMSRGQISMVLKTLGQMFKHGYEVPLSAFP

SEQ ID NO: 245205 - protein, 76 aa, Glycine max
  unsure (1)..(76): unsure at all Xaa locations
  Clone ID: PAT_MRT3847_63450C.1.pep
APIIXKYTTAEPSGINTQRVILHRASRIKKDDPRIRKNHRLHHHSKHGHHNICVNSLQRKLFNTMFYGLNTISTLS

SEQ ID NO: 245206 - protein, 38 aa, Glycine max
  Clone ID: PAT_MRT3847_63451C.1.pep
VVKCRFSLFHVCSKPINQSVVIMPPHVDPIEDLHCLSR

SEQ ID NO: 245207 - protein, 97 aa, Glycine max
  Clone ID: PAT_MRT3847_63452C.1.pep
VFLSCKSELQVPGGRTEAEIPGAIPISTKATIPTLPRATSVSSNDAPPSHRASVLPANEEDQDEKCLLKWKGHRKINRIYGDWLDDLPLVHDLPVAR

SEQ ID NO: 245208 - protein, 151 aa, Glycine max
  Clone ID: PAT_MRT3847_63453C.1.pep
MHQPSWGLSPPMTGPHPGSSPHMTGQSYHPNTSEHPPHMSRVAPQMTEQHYTPSGSSPQMAGHGHQPYGTPHGPQQMEERWYPSSGLSPPMSGSSIPWNGASAKMSPPYHRSAAPSSQVTGPYHPSSSSSSPPHFEESHQQQSEVLEQVAA

SEQ ID NO: 245209 - protein, 90 aa, Glycine max
  unsure (1)..(90): unsure at all Xaa locations
  Clone ID: PAT_MRT3847_63454C.1.pep
FPTSHSTKCTVSFNLWQPXKNSFQFPTSFKPPHTYYSIQLTHSTSNFFIIXSIKSTNTPHSQKFPXNLIYNYKPTFFLTSYKIYYSIYLF

SEQ ID NO: 245210 - protein, 68 aa, Glycine max
  Clone ID: PAT_MRT3847_63455C.1.pep
KPSFASGFLPVEVPILKIIINSIMTWKSRGELPSRSVISQRWVLFLCLGSFCAGMLFTTRFITFPISY

SEQ ID NO: 245211 - protein, 123 aa, Glycine max
  unsure (1)..(123): unsure at all Xaa locations
  Clone ID: PAT_MRT3847_63456C.1.pep
NQKNILQMVRYVWEADGLKGYYRGVTPGVIGSLATGATYLGVIEATKKWMEDSHSILMGHWAHSIAGAVGDTLGSFVYVPCEAMKHRMQIQGPIASWRLGVVNDGIGIXPGAQIYGYYTGMLH

SEQ ID NO: 245212 - protein, 88 aa, Glycine max
  Clone ID: PAT_MRT3847_63457C.1.pep
NQQTNKFCRGGWFNNTMHNPLCKPKGARIPCNALTLVILNLLPILGGQIHLHEYSRWGDALPFWRVQPNTTLERLNVDDCHSYARENH

SEQ ID NO: 245213 - protein, 133 aa, Glycine max
  Clone ID: PAT_MRT3847_63458C.1.pep
ARATWDRETNNQFRRAPGDGKRGWSLPIVLCQNLVQKLTENCTAMIATVSRPAQRLEAPRENNRAAGPCLSNPHAFVHCSIALTSNQNSVDARGENFVRDNSTPTTLCACSHPKRVSPCLRERIFAQPIMLES

SEQ ID NO: 245214 - protein, 129 aa, Glycine max
  Clone ID: PAT_MRT3847_63459C.1.pep
SLSLSLTLFKMFTEGLDESAIQWIKQGSKAPPDVDVQEPPLPQVRSPLAEKISCSSNRFPRSPLLSSANTLNSPVLPPLKFHSALLQPRNLAFADHDDSYESTEDANFSDDEISAPNNLDFSDSPIPHN

SEQ ID NO: 245215 - protein, 89 aa, Glycine max
  Clone ID: PAT_MRT3847_6345C.1.pep
YIFLFFFFFGAPMATQGFFYSQDISLGQNPPNFPPGVYKGKILSTKKKIFPPRKTFGLLKKSGVFKYPLIFFGNKIFPQTPYYLGAGES

SEQ ID NO: 245216 - protein, 116 aa, Glycine max
  Clone ID: PAT_MRT3847_63460C.1.pep
LENKNDFDLGLNALDYEVCFGDVSIGGAELTKSAKIEKSGISYIDIPITFRPKDFGSALWDMIRGRGTAYTIKGHIDVDTPFGAMKLPISKEGGTTRLKKKKEDRDYDDDDDDDEE

SEQ ID NO: 245217 - protein, 320 aa, Glycine max
  Clone ID: PAT_MRT3847_63461C.1.pep
MSTSDKPEVVERGSKDEKHKEDDQEEGKGGFIEKVKDFIHDIGEKIEEAIGFGKPTADVTAIHIPSINLHKADLVVDVLIKNPNPVPIPLIDIDYLVDSDERKLVSGLIPDAGTIGAHGEQTVKIPVTLIYDDIKQTYADIKPGSIIPYRVKVSLIFDVPILGRLTLPLEKTGEIPIPYKPDIDLEKIHFERFSFCTTRDNFHLKLENKNDFDLGLNALDYEVWLGDVSIGGAELTKSAKIEKSGISYIDIPITFRPKDFGSALWDMIRGRGTGYTMKGHIDVDTPFGAMKLPISKEGGTTRLKKKKEDRDYDDDDDDED

SEQ ID NO: 245218 - protein, 74 aa, Glycine max
  Clone ID: PAT_MRT3847_63462C.1.pep
TRDYSCHITTHGETAFAKSSDPDYITSPSTSPPGYVQTDIPRRSANDTSNQEFTLLNTMSLWRVILTCISHIRK

SEQ ID NO: 245219 - protein, 81 aa, Glycine max
  Clone ID: PAT_MRT3847_63463C.1.pep
HTGRATSAQSPSPESAGAAVGASIQAWVVRAQPRVPDRGKAQARRRWRQEGISLPHRPPDRPSIVSSRLARRPQVPHLDPT

SEQ ID NO: 245220 - protein, 501 aa, Glycine max
  unsure (1)..(501): unsure at all Xaa locations
  Clone ID: PAT_MRT3847_63464C.1.pep
ELGFDYLRDNLATSVEDLVIRGFNYCIIDEVDSILIDEARTPLIISGPAEKPSDRYYKAAKIAEAFERDIHYTVDEKQKSVLLSEQGYEDSEEILAVKDLYDPREQWASYILNAIKAKELFLRDVNYIIRGKEVLIVDEFTGRVMQGRRWSDGLHQAVEAKEGLPIQNETVTLASISYQNFFLQFPKLCGMTGTAATESTEFESIYKLKVTIVPTNKPMIRKDESDVVFRATSGKWRAVVVEISRMHKTGRPVLVGTTSVEQSDSLSEQLKEAGIPHEVLNAKPENVEREAEIVXQSGRLGAVTIATNMAGRGTDIILGGNAEFMARLKLREILMPRVVKPSEEGFVSIKKPPPSKTWKVYQLFFPCLLSVNTVVVAEKAVQLAVETWGKRSLTELEAEERLSYTCEKGPAQDEVIAKLRNAFLEIGKEYKVFTEEERKKVVEAGGLHVVGTERHESRRIDNQLRGRSGRQGDPGSSRFFLSLEDNIFRIFGGDRIQGLMQ

SEQ ID NO: 245221 - protein, 74 aa, Glycine max
  Clone ID: PAT_MRT3847_63465C.1.pep
ITVPILYLTRSLSYSPELILYLLHLSPSPFSQSDSIYCVNTDFYDPLRGTNIVSHSYPSDHDNFNESSVHYPTY

SEQ ID NO: 245222 - protein, 35 aa, Glycine max
  Clone ID: PAT_MRT3847_63466C.1.pep
HSYTHLPDFIIIFIYTFHYSIFFIVYNNLTLNFPN

SEQ ID NO: 245223 - protein, 76 aa, Glycine max
  Clone ID: PAT_MRT3847_63467C.1.pep
DPVEGPFFFFFFFFFFGQGRVKLFHGGGLPPGAQLITFYHRFQMSFFAFKKSFNLRLKYSILLILAKFCDLGRKTS

SEQ ID NO: 245224 - protein, 77 aa, Glycine max
  Clone ID: PAT_MRT3847_63468C.1.pep
TPFLNGHGHGSGLFWKPSWGGTKTNWAPPGWLPKIKAMKTMQGKGGCSTNDKTVAGEVVRLSLNPRSNRPFGKKIKF

SEQ ID NO: 245225 - protein, 81 aa, Glycine max
  unsure (1)..(81): unsure at all Xaa locations
  Clone ID: PAT_MRT3847_63469C.1.pep
LDPMFPGGALDPVGLDGNPDAYAELTAPETNTLSMAMFRATGIVRQAFVNCXGTLYILYEHTADAVAYSACAHDSIYAAAH

SEQ ID NO: 245226 - protein, 63 aa, Glycine max
  Clone ID: PAT_MRT3847_6346C.1.pep
LSQSTSLNARGQYAPSLISLSGPFIHANYIPRLSWSSHLCEIVPKLNVLLYASTDHLTQLTHP

SEQ ID NO: 245227 - protein, 76 aa, Glycine max
  unsure (1)..(76): unsure at all Xaa locations
  Clone ID: PAT_MRT3847_63470C.1.pep
SHXGHKYHYIXRNHXASIXXYXXXXXVXTXXXXXVHXXYXXXXXXSXXXXHXXXXXLTXXLLXQLXXXFXXXERXX

SEQ ID NO: 245228 - protein, 109 aa, Glycine max
  unsure (1)..(109): unsure at all Xaa locations
  Clone ID: PAT_MRT3847_63471C.1.pep
ILVSVNSTLTAFIKDVEYATTFIPSNKQQNLTFWKNIIDLSIXKKKKKKKKKKKKKKKKKKKKKKKKKKKKKKKKKKKKKKRGGALLRDPILRPGAGKEKFFYWGPQIQ

SEQ ID NO: 245229 - protein, 102 aa, Glycine max
  Clone ID: PAT_MRT3847_63472C.1.pep
PSSGSFDSPEPELPYAHNRFSNFLKQFSDLSSLLFSSHLLSSPVTTLSPQLHVIVSNPKRCVLSPPQETLFAVLIGSSNLILQSVSVCSTITKRNEVLDGVS

SEQ ID NO: 245230 - protein, 49 aa, Glycine max
  Clone ID: PAT_MRT3847_63473C.1.pep
MACLAPCFRSQFEPIMKESIFVGRVLSAVVRGRVVIYYFGTCEFINYNS

SEQ ID NO: 245231 - protein, 38 aa, Glycine max
  Clone ID: PAT_MRT3847_63474C.1.pep
RVREREHRDSSASHRHLGSQRISASSTSFTVALGIQDE

SEQ ID NO: 245232 - protein, 102 aa, Glycine max
  unsure (1)..(102): unsure at all Xaa locations
  Clone ID: PAT_MRT3847_63475C.1.pep
ESXHWDRLRRVFPFGKIEEIITKSYPNLKRKXNYIYRCRKDEKXSPHXHIYIYIYIYIXRVIYREVAIATLAMALETDLGDHGCNIXIFPSSRGTRCYDCKV

SEQ ID NO: 245233 - protein, 107 aa, Glycine max
  unsure (1)..(107): unsure at all Xaa locations
  Clone ID: PAT_MRT3847_63476C.1.pep
LLQTATSTTSASSLSLFSPTSEPLHSVPTHKLMVHTTKRSTNHHTLTDVIFKPVEEVKKELDLVPTIPQASLAHQKYIDESEXGINEQINIEYNVCYLYHTIFTYFN

SEQ ID NO: 245234 - protein, 144 aa, Glycine max
  unsure (1)..(144): unsure at all Xaa locations
  Clone ID: PAT_MRT3847_63477C.1.pep
MASKLTLIALVLAVALCAVDLTHSASASSPHAPAPSVDCTNLVLTMADCLSFVTNGSTVTKPEGTCCSGLKSVXKTAPACLCEAFKSSAQFGVVLNVTKATSLPAACKVSAPSATNCGLSETPAAAPAGGLSPQACASAGQAHA

SEQ ID NO: 245235 - protein, 139 aa, Glycine max
  unsure (1)..(139): unsure at all Xaa locations
  Clone ID: PAT_MRT3847_63478C.1.pep
MRKNVGSHSGRMFSDRKWILPFFASLIISMSLVLTAILGLLSSDGGGEQSPFEIISFKRSEDSSGYFVESDIQRSLNVSVVKREAPRFAYLISGTKGDSRXMMRTLEAVYHPRNQYILHLDLEAPPRERVGLXNAVKAD

SEQ ID NO: 245236 - protein, 148 aa, Glycine max
  Clone ID: PAT_MRT3847_63479C.1.pep
QWRKYGQKIAKGNPCPRAYYRCTLAPACPVRKQVQRCADDMSILITTYEGTHNHPIPASATAMASTTSAAVSMLLSGSSTSQPTDHSFAYHANSPTLFSGVNFSLLDQPRANQVLLPTPSSHLLPTITLDLTSTPSYSLNQGNCLPSN

SEQ ID NO: 245237 - protein, 35 aa, Glycine max
  Clone ID: PAT_MRT3847_6347C.1.pep
SARAVISLYQVARRSWRSIWSSRCCRSSRTGMTRF

SEQ ID NO: 245238 - protein, 63 aa, Glycine max
  unsure (1)..(63): unsure at all Xaa locations
  Clone ID: PAT_MRT3847_63480C.1.pep
SASLFISSILKMNSILHNTGIVILTLSTFFQRRRXNNKTISTNTNKQTNIFYKLIYVTLLLLQ

SEQ ID NO: 245239 - protein, 47 aa, Glycine max
  Clone ID: PAT_MRT3847_63481C.1.pep
PQKQIKDSLLAFESTFDINELLFMFFAQRKESIKENQQYEEDTTACF

SEQ ID NO: 245240 - protein, 122 aa, Glycine max
  unsure (1)..(122): unsure at all Xaa locations
  Clone ID: PAT_MRT3847_63482C.1.pep
MASEKKLSNPMREIKVQKLVLNISVGESGDRLTRAAKVLEQLYGQTPVLSKXYDPLTGIYGMDCFDVLERSGYRVXRRRMCKSRVGIQHRVTNEDAMKCVHVKHDAEIRNEIQAIVQLERVH

SEQ ID NO: 245241 - protein, 104 aa, Glycine max
  Clone ID: PAT_MRT3847_63483C.1.pep
KKKEDIDKKEKKKVTGKDKTKELSALKQKLEKINGKIQPLLENKTDVEKVKGKEDKEKKKKEKKVKDDKTDAEKVKGKEDDGEDNEEKEEKKKKKKKEKDDKID

SEQ ID NO: 245242 - protein, 155 aa, Glycine max
  unsure (1)..(155): unsure at all Xaa locations
  Clone ID: PAT_MRT3847_63484C.1.pep
NVERVNAELYTLTYGAIGRQXLTDLEEDEEVDEHLDPMGYNIGIRLIDELLAKANVSRCNDLVETTDVIAKVGLKMFHGVTASVTTWDADGTWRSIAQEDYPXVDLVVLTDNCQRSDYCDVWSXVIRRGLDMVSMKTEGTCLSDARRSDEEIEQR

SEQ ID NO: 245243 - protein, 59 aa, Glycine max
  Clone ID: PAT_MRT3847_63485C.1.pep
GEGSLTLGRYKTICGWQCSEECYAHSYHLLQAWETTCMYSVSHPNILYRQSYNFIIYLI

SEQ ID NO: 245244 - protein, 60 aa, Glycine max
  Clone ID: PAT_MRT3847_63486C.1.pep
PCENNIATTKGENTVQNRVGISLHEANMCHRVRIKKHQIVLVLRRITSFNCSAQLLPSSD

SEQ ID NO: 245245 - protein, 56 aa, Glycine max
  Clone ID: PAT_MRT3847_63487C.1.pep
WSWDTYRHFSRCGGALRWVFGPPGVTIIALPILQVVMFTLISIRVLTSYLSLYPFL

SEQ ID NO: 245246 - protein, 118 aa, Glycine max
  Clone ID: PAT_MRT3847_63489C.1.pep
MDSTSVHKDIDEPLLVSNEPSPEPPSCTQSFSSKHGSDGELERILSNTSVPFAKRLGPATWVELKLLFHLAAPAVIVYLINYVMSMSTQIFSGHLGNLELAAASLGNTGIQVFAYGLM

SEQ ID NO: 245247 - protein, 74 aa, Glycine max
  unsure (1)..(74): unsure at all Xaa locations
  Clone ID: PAT_MRT3847_6348C.1.pep
GGRAHPNWAFDPRALGAFXRFGNKLAPIENNLSERTPVEKLRTRCGPVQKPYTLLLPFSKEGFPFRGIPPSIFF

SEQ ID NO: 245248 - protein, 37 aa, Glycine max
  unsure (1)..(37): unsure at all Xaa locations
  Clone ID: PAT_MRT3847_63490C.1.pep
MKYRIVIPATLLYTQHLISWFILIKLNNPCRSTXSPL

SEQ ID NO: 245249 - protein, 52 aa, Glycine max
  Clone ID: PAT_MRT3847_63491C.1.pep
YVCEKTTEGDRRAVFHRSFAELPIYAHREIIVKASIIVTYEMDPQDRQTVNS

SEQ ID NO: 245250 - protein, 67 aa, Glycine max
  Clone ID: PAT_MRT3847_63492C.1.pep
LLLAVILVAWRCHGARLPRYPLRMKTGYGERSSRVTCASSRAAVEAHNIRALKTIPEACVAPTPDYI

SEQ ID NO: 245251 - protein, 77 aa, Glycine max
  Clone ID: PAT_MRT3847_63493C.1.pep
KWSNVQVFDGHGGKSAAQFDRDNLPRVIVEDVNFTLELEKVVKRSFVETDAAFLKTSSHEPSLSSGTTAITAIIFGR

SEQ ID NO: 245252 - protein, 209 aa, Glycine max
  Clone ID: PAT_MRT3847_63494C.1.pep
MAKGSRGRHRIASRQFRVTPYPLASCKRDICEDMCQKKCSKALEKKELEDVTCSVCMEYPHNAVLLLCSSHDKGCRPYMCGTSFRHSNCLDQYKKAYTKVISPNRQPMQGTPGVLQDSNLPLEKSEATELACPLCRGQVKGWTVVEPVRDYLNAKKRGCMQDDCLYVGSYKELKKHVRAEHPSARPRMVDPADEQKWRWLEWERERKDD

SEQ ID NO: 245253 - protein, 205 aa, Glycine max
  unsure (1)..(205): unsure at all Xaa locations
  Clone ID: PAT_MRT3847_63495C.1.pep
RVEAGIGSRNPSTFPVKENLPEPHFNGERVEPKNPRGVLHGKGLEDVIQFFNSGSYNPSYNTSLEGRRKLFAITKEEVLLLNKRMPDLAIATSGKWLPLHTLAAGGELYLLDSLLKHNVDINAVDKXWFDCLHKAIGKKRVITNYLLKNSTNPFVRDIEGATLXHYAVQTASIETIELLLXLFNVDIKLPDNDGLDTLFILLVKN

SEQ ID NO: 245254 - protein, 77 aa, Glycine max
  Clone ID: PAT_MRT3847_63496C.1.pep
MAKGSRGRHRIASRQFRVTPYPLASCKRDICEDLCQNKCSKALEKKEWEDVTCSVCMEYPHNAVLLLCSSHDKGCRP

SEQ ID NO: 245255 - protein, 156 aa, Glycine max
  Clone ID: PAT_MRT3847_63497C.1.pep
MLGLGADLLWADMNRLLAFLFHQGVLDEQFLQLQQLQDETSPNFVSEVVNIYFHESEKLLRNLRALLMEKEFSDYKKMGIHLNQFMGSSSSIGAKRVRNVCVAFRAATEQNNRAGCLRALEMLEHEYCYLKNKLHELFQIEQQRALAAGVRYPVQN

SEQ ID NO: 245256 - protein, 81 aa, Glycine max
  Clone ID: PAT_MRT3847_63498C.1.pep
FRSTDSFLPLRVQWREEIGLFPYMAASDVTTVSAMGNKSIKPRLKSKLRTTSCHVLRLYSLVYFGLCNFVQLKLHSSVKIA

SEQ ID NO: 245257 - protein, 53 aa, Glycine max
  Clone ID: PAT_MRT3847_63499C.1.pep
PHHQSRHMMMINLIYLIKLYYKSNLVLLQLNILSRQWHILSTIPFKMICLEPN

SEQ ID NO: 245258 - protein, 133 aa, Glycine max
  Clone ID: PAT_MRT3847_6349C.1.pep
MQLVFAPKQFDVIVTDNLFGDILSDQASMLTGSIGMLPSASLDANNKGMYEPCHGSAPDIAGQGIANPLATILSVSMMLRYSFNLFFSADAIEKAVSLVLDQGLRTDNIWSQGCTKVGTQEMGDAVVAALRNL

SEQ ID NO: 245259 - protein, 58 aa, Glycine max
  unsure (1)..(58): unsure at all Xaa locations
  Clone ID: PAT_MRT3847_634C.1.pep
INXXSQSPTSFTXKSLTLKFVTXSIXFSKPNHFLFPISFLSSPLNQILLGCYTLNANK

SEQ ID NO: 245260 - protein, 79 aa, Glycine max
  Clone ID: PAT_MRT3847_63500C.1.pep
PNYVHVPFSITSLIIGGQCFTTFAAWSCGLHFLNDVINVSMSLSCVILLHGPFASKFNWHHVNVKDRSFLSVIDPRFWI

SEQ ID NO: 245261 - protein, 163 aa, Glycine max
  Clone ID: PAT_MRT3847_63501C.1.pep
IGIGLVLSAVSMAVAGFVETHRKSVAIKHNMVDSREPLPISVFWLGFQYAIFGAADMFTLIGLLEFFYAESSAGMKSLGTAISWCSVAFGYFTSTVVVEVVNKVSGGWLANNNLNRDNLNYFYWLLSVLSVVNFGFYLVCASWYRYKTVENEQDDSKDNVDMA

SEQ ID NO: 245262 - protein, 105 aa, Glycine max
  Clone ID: PAT_MRT3847_63502C.1.pep
GGGPRGRPGGKSGGPPQRAFSCRDKQKGGGQGEHSNELVGSFSQNPRLPVQAATVGASREPGEWGEMPQAGTGAFKDPTRLMSSCTPYWDALPSHCCSTGQELNH

SEQ ID NO: 245263 - protein, 66 aa, Glycine max
  unsure (1)..(66): unsure at all Xaa locations
  Clone ID: PAT_MRT3847_63503C.1.pep
DRYTCIVYKFXAKAIYIIILLMSNLVHMWMERRIFPFIFISLPAKLRMLSTEHRFLSMSLSSPVQV

SEQ ID NO: 245264 - protein, 92 aa, Glycine max
  Clone ID: PAT_MRT3847_63504C.1.pep
LSNPREKGPKGPVPNPSPNRNGKTRFCGGSSLSIPPTPQGLGIGTPGPTLKSKSFSRGNGPILPTSLAKIVPSTKGCSPWKPEAVIKTTGRG

SEQ ID NO: 245265 - protein, 350 aa, Glycine max
  Clone ID: PAT_MRT3847_63505C.1.pep
MGGKGYALWLFIIEILVHFSTSRSAKVPSIIVFGDSSVDSGNNNFIPTIARSNFEPYGRDFFNGNPTGRFSNGRIAPDFISEAFGIKQSVPAYLDPAYNISDFASGVCFASAGTGFDNATARVADVIPLWKEIEYYKEYQKKLRAHLGDEKANEIIREALYLVSIGTNDFLENYYTLPERRCEFPIVQQYEDFLIGLAESFFKEIYGLGARKISLTGLPPMGCLPLERATNILEYHNCVEEYNNLALEFNGKLGWLVTKLNKDLPGLQLVDANAYDIILQIVKHPSRFGFEVADTGCCGTGRFEMGFLCDPKFTCEDANKYVFWDAFHPSEKTSQIVSSHLIEKYLAKFR

SEQ ID NO: 245266 - protein, 35 aa, Glycine max
  Clone ID: PAT_MRT3847_63506C.1.pep
GSRSLAARAAAGITPNLAVARRPVNHYHTRLANCL

SEQ ID NO: 245267 - protein, 139 aa, Glycine max
  Clone ID: PAT_MRT3847_63507C.1.pep
ISHRCMVIELQRFPFLWKRMDEALGNFLREGLEALENMIAHLIAMELNYINTSHHNFIGGSKALEIASQQTKSSMVSIPVSRQKEVLESDKGSVSERSVKSRAILARQANGVVTEPGVHAASDAEKVVSSGNTVDQSGY

SEQ ID NO: 245268 - protein, 49 aa, Glycine max
  Clone ID: PAT_MRT3847_63508C.1.pep
SRCSSDVVVVEFHGTRGERCLHVHEDHKDVWDSCKQNYPRLVMLLKFMK

SEQ ID NO: 245269 - protein, 44 aa, Glycine max
  Clone ID: PAT_MRT3847_63509C.1.pep
LHEAFVEAVNHLGGSEKATSNGVLNLMKVAGLTLFNVRSLLQLI

SEQ ID NO: 245270 - protein, 33 aa, Glycine max
  Clone ID: PAT_MRT3847_6350C.1.pep
HTLLRKKGVALFRGLNFHIRPGNALLFIWGTLN

SEQ ID NO: 245271 - protein, 73 aa, Glycine max
  Clone ID: PAT_MRT3847_63510C.1.pep
HILLLLLFCVCLCFFSHLGISCCGANCGCGSSRKCRNRCRGCNIYPHLSHTESTTTDNLRILVGPFKAQFDGA

SEQ ID NO: 245272 - protein, 42 aa, Glycine max
  unsure (1)..(42): unsure at all Xaa locations
  Clone ID: PAT_MRT3847_63511C.1.pep
KLXXXSSXFHFSXXXXQRAXLVLCLXRXXXAXFRXXRTSAXL

SEQ ID NO: 245273 - protein, 136 aa, Glycine max
  unsure (1)..(136): unsure at all Xaa locations
  Clone ID: PAT_MRT3847_63512C.1.pep
MATGKNLADQKTNLLQKISLETHAKTLKIPEPTKNAKQESQLISXIEEMPXNGQINSYDRSVTPMLNDTXDTTICHLPNGYSSTVYDNGGYYATENXRDEYLRYVNSEGVEMTTRXNGDKGTVHYQHQYRYAPYCP

SEQ ID NO: 245274 - protein, 231 aa, Glycine max
  Clone ID: PAT_MRT3847_63513C.1.pep
GRVGSKEEEAVCCIQNVHGFVLEGRPLRACFGTTKYCHAWLRNVPCSNPDCLYLHEIGSQEDSFTKDEIISAYTRSRVQQITGATNNMQRRSGNVLPPPLDDNMNSSSVKPIVKNSSCNSVNIVRGSPPNGIYGKNMALPASAAWGTQASNCQPPAGGLSYPNGPSKPKPDTGCSTLAFSAAVTGSIQASDVTKRPPSSDGCHSMTPTVKSELLKPVKQYNNSVGSLVSAG

SEQ ID NO: 245275 - protein, 123 aa, Glycine max
  Clone ID: PAT_MRT3847_63514C.1.pep
NFVLGTKKKFGPLQGIPGSKNRQQSVVLEPVEKKQNPLTAAGDSKEPLVLQEGVGKSEKGTTKAGLKARPTGAPQKHWVGPPGDPKGAGIGTPGAKKPGWACPPEVKNDFGPGPKDWKTPPAP

SEQ ID NO: 245276 - protein, 82 aa, Glycine max
  Clone ID: PAT_MRT3847_63515C.1.pep
LIISQNQPTFKINFSILILCTLMIHLKPTIDKNKTNPTFIPSCYLPCKIISSTVFPLTKSLNSIHLLNKRYHKIKKVNPGMD

SEQ ID NO: 245277 - protein, 144 aa, Glycine max
  unsure (1)..(144): unsure at all Xaa locations
  Clone ID: PAT_MRT3847_63516C.1.pep
MAQDSEKRFHSIMDKLYHPPKPPSASSSSGVQLPGNSKKRPYQSGVMELNRRGDVAEGQQSSSASATALQGSLCRPWDRGDFTRRLATFKSMSWFAKPXGWINVDIDTIACEACGVRLLFSTPASWNQQQVEKAALVFSLXLDN

SEQ ID NO: 245278 - protein, 256 aa, Glycine max
  Clone ID: PAT_MRT3847_63517C.1.pep
MAAKRFFNDSDQDPENPGDKRMRNTRPSFASVIGEVVMIKNMENLFSAMEPLLKRVIGEEVDQVMRQWPHSFARSPSLRLQAMDQQQPSTLQLCFSKRLSLPIFTGSRILDVDGNPINIVLMDKSNGQGVPTSLSNAIKLEIVVVDGDFPLNDNDEDWTSEEFNRHIVKERNGKRPLLAGELNVIMRDGIAPTGDIEFTDNSSWIRCRKFRVAVRVVPGTNPGGVRIREAMTEAFVVKDHRGELYKKHHPPMLHDE

SEQ ID NO: 245279 - protein, 75 aa, Glycine max
  unsure (1)..(75): unsure at all Xaa locations
  Clone ID: PAT_MRT3847_63518C.1.pep
NSAEVPSLLLVNIQLPTYAASMFPGDADGEGMSLVLYFKLSENFANXSSPHFQESIKRLVDDEMEKVKGFAQESL

SEQ ID NO: 245280 - protein, 43 aa, Glycine max
  Clone ID: PAT_MRT3847_63519C.1.pep
RMNPIKVIANVDYLMLKHRGRPCCFNFSLICVFRIEDLLCPLL

SEQ ID NO: 245281 - protein, 603 aa, Glycine max
  unsure (1)..(603): unsure at all Xaa locations
  Clone ID: PAT_MRT3847_6351C.1.pep
MKYVLVTGGVVSGLGKGVTASSIGLLLKACGLRVTAIKIDPYLNTDAGTMSPFEHGEVFVLDDGGEVDLDLGNYERFMDIKLTRDNNITTGKIYQSVIDKERRGDYLGKTVQVVPHITDAIQDWIERVAHIPVDGKTSPADVCVIELGGTIGDIESMPFIQALGQFSYRVGAGNFCLIHVSLVPVLNVVGEQKTKPTQHSVRALRGQGLTPHILACRSTMVLDENAKGKLSQFCLIPAENIVTLYDVPNIWHIPLLLRDQKAHEAMFKVLNLHGVTKEPXLEEWTCRAESSDLLYEPVRIALVGKYTCLSDSYLSVLKALLHASVDCQKKLVVDWIPASNLESATAKENPDAFKAAWKLLKGADGVLVPGGFGDRGVQGKIIAAKYARENRIPFLGICLGMQIAVIEFARSVLGVQDANSTEFEPHTKSPYIIFMPEGSKTHMGGTMRLGSRRTYFQTKECKSAKLYGCKSFIDERHRHRYEVNPDLVARLENAGLSFTGKDETGQRMEIVELPNHPYFIGAQFHPEFKSRPGKPSPLFLGFIGAACGQLDAVLQRSSIVDNGLSKGVINDISAVKTYRTRTATRTTYRSAEYVYGSCNGLHF

SEQ ID NO: 245282 - protein, 95 aa, Glycine max
  Clone ID: PAT_MRT3847_63520C.1.pep
RTITLYTHTHIYIYIYIYIYIYIYIYSFVSSCINIFIFFIFLGHIICDTIDFNVKFKLNSKFNYTFNSCTNFIFLVLILKNHHFNSYTYHVYNVK

SEQ ID NO: 245283 - protein, 61 aa, Glycine max
  Clone ID: PAT_MRT3847_63521C.1.pep
TAPSRKYKVLDDYHATFAETGTFKTITAYTILQTINLLIWSVLTCMAIAADMLPMRIIHLI

SEQ ID NO: 245284 - protein, 74 aa, Glycine max
  Clone ID: PAT_MRT3847_63522C.1.pep
KCQETGRVLLVCFREEKERQECGQSGHSCWKWRFGNRFLNIDLVIIRCLEQCTMFGAGEVVTVLVSFERDFEGR

SEQ ID NO: 245285 - protein, 52 aa, Glycine max
  Clone ID: PAT_MRT3847_63523C.1.pep
ETGADLLQTQTSSTGTLDSRLSTMHVILQLDTFMKCMFAQTMTCALNHGKFS

SEQ ID NO: 245286 - protein, 124 aa, Glycine max
  unsure (1)..(124): unsure at all Xaa locations
  Clone ID: PAT_MRT3847_63524C.1.pep
MMIATICRPVRSPWEEPMDRCFRFFPCLADPGRRSSLCLKLCLVTIHLIYAGVLFLFDGDLIERTKKEPWYTALYLLLFVGTLIQYFATSLSSPXYVLEAMLTVNERSAANRKAPETSXNGRLP

SEQ ID NO: 245287 - protein, 65 aa, Glycine max
  Clone ID: PAT_MRT3847_63525C.1.pep
AKAIARLGEVSDRFEAQQLGQMVDLEKRRNEFARRREVHRMEMHMDTQVQLERIKRAKRSGSNDM

SEQ ID NO: 245288 - protein, 77 aa, Glycine max
  Clone ID: PAT_MRT3847_63526C.1.pep
FTILVHLFSQPKSTISFSTKFWGPRQKQALVRKEFDIILRCFATNFFNGPTGETGGRLTKNLIEDGQTGRGLLGLES

SEQ ID NO: 245289 - protein, 47 aa, Glycine max
  Clone ID: PAT_MRT3847_63527C.1.pep
MRATQQLTIGFQAALTEEESKNLEGVPEVSFCLPNSFLVPGTNHLGG

SEQ ID NO: 245290 - protein, 62 aa, Glycine max
  Clone ID: PAT_MRT3847_63528C.1.pep
AEVPDVCDDKDTGAHVGPMVTLEEDAVTTREDDEDAILDRESKLYSFDNDGNQWKESGVDAV

SEQ ID NO: 245291 - protein, 96 aa, Glycine max
  Clone ID: PAT_MRT3847_63529C.1.pep
STPRSTLTSINIFSNLLYVELNLTGNEKFISSMKKSKDPRSITIVFSHSHAIFLSCPYSPCGKTNFTTSTHLYFSTNYTTYDTQEKHIVHTTQQHQ

SEQ ID NO: 245292 - protein, 55 aa, Glycine max
  Clone ID: PAT_MRT3847_6352C.1.pep
AVVPRSPHYDISSSCKSTGGEDLTLRAILTHVFSTSDSTVSSESASTTSCHIVSP

SEQ ID NO: 245293 - protein, 138 aa, Glycine max
  Clone ID: PAT_MRT3847_63530C.1.pep
MRARAFHRLGPKGTGDMLILFLEERSDGAPPLLDSYRDAKSRIIPFLGKWKGHSITKRSGVYGSTIANADTVVLHDMDDNGQLMQDVTSSSTFDGENVTTNVHWTGTVSDYLVTFDGGYQMILLPGGMYMGCPCDVAK

SEQ ID NO: 245294 - protein, 74 aa, Glycine max
  Clone ID: PAT_MRT3847_63531C.1.pep
GANISRQCLYLLRHLFSRRYYPTCHIETDQSMPHELHERLVHLLPCPCTHPYGSSGSTFFPLLWSSRTCTDAVG

SEQ ID NO: 245295 - protein, 72 aa, Glycine max
  Clone ID: PAT_MRT3847_63532C.1.pep
PHVISKCCCRPLLSRACRKMFSLRIVLYIFFINLTELGSHIRANIYVVGGHPQRSFRYHRPHSLSLQGTEKA

SEQ ID NO: 245296 - protein, 92 aa, Glycine max
  Clone ID: PAT_MRT3847_63533C.1.pep
GWTVSPTLDVQGTLDWFISCQECLPRTYCVLNPQNPFVSNRWMGNLSFPQGTTRRVKRMPLFIGGGAGAKNAILMSMPNAVLSMWRYFAGDL

SEQ ID NO: 245297 - protein, 54 aa, Glycine max
  Clone ID: PAT_MRT3847_63534C.1.pep
ATRSFKTLPYGVLAAEALLLDLLLTERMHTLQIPQRNQQNSFLHIPKTGYHGPQ

SEQ ID NO: 245298 - protein, 122 aa, Glycine max
  unsure (1)..(122): unsure at all Xaa locations
  Clone ID: PAT_MRT3847_63535C.1.pep
SLIMVAATFDGFSIRDYTSKMRSIDVFKCWPFASTSSRDVSDEEVQSWLPPMNPCPRSDDSTDHRAQNLEIPPSAAETDEDDGDVDCSEEESAESMESEKSAPSSDSSXANNNNNNEDEKLE

SEQ ID NO: 245299 - protein, 129 aa, Glycine max
  Clone ID: PAT_MRT3847_63536C.1.pep
ASSGSAFSFTTSSAPLFSTVTTTMASTVVTGSTTLSPSLPAFGATAPSSVAASASATPAASTGAAASASGGSSFAGFGVGSTASAASFGTGFSFANKSSTPAVSSVTASAFGVSTSTSTAPAILSSSTS

SEQ ID NO: 245300 - protein, 394 aa, Glycine max
  Clone ID: PAT_MRT3847_63537C.1.pep
MESQTDLQNRPGIFIIGSSNVGKRTLLSRLTSVDVDDAFDSASQVNVHGWTINNKYYTADVSLWMAHLHDDFSAANVTLSRRMTALVMVFDMNEPSSLAALREWVSRTDIQNFEILLCIGNKVDLVPSHPAHAEYRRRLLKLEDSAADFYSEEYGISESEGTSLLGDEEPSWDIRRSCLDWCTDHNIEFIEACASNADFDKCLSIDGDLQGVERLYGALSAHMWPGMVLKSGNRINQLSFPEKEELSSEESDYEQEYEVLSAGSADWDESEQGWISASSLDSGGSAPQNNPGTVGQHEDGIKSDKESHPTTSSTAIQDESEKDMVHNTMDSEGDGKENEGKCLELEDLEHLMSEIGNMRAGLRLMPDFQRRDMAAKLAMKMASIFGGESDEEEI

SEQ ID NO: 245301 - protein, 64 aa, Glycine max
  Clone ID: PAT_MRT3847_63538C.1.pep
TTTQTLSILSLIFPMLISGKSPDPLKHAIQLSPKTPTDTYINHDTKIPSTPALHNPIKKHNEEL

SEQ ID NO: 245302 - protein, 243 aa, Glycine max
  unsure (1)..(243): unsure at all Xaa locations
  Clone ID: PAT_MRT3847_63539C.1.pep
HERVEEEEKNRRRRVRAETSLTARQTDLQNRPGIFIIGSSNVGKRTLLSHSGIIYSVLELEFDLADVECRIXSVDVDDAFDSASQVNVHGWTINNKYYTADVSLWMAHLHDDFSAANVTLSRRMTALVMVFDMNEPSSLAALREWVSRTDIQNFEILLCIGNKVDLGPSHPAHAEYRRRLLKLEDSAADLYSEEXGLSELEGASXLGDEEPARDIRRASLDWGADHKDENGVQAGAPARKLKP

SEQ ID NO: 245303 - protein, 77 aa, Glycine max
  unsure (1)..(77): unsure at all Xaa locations
  Clone ID: PAT_MRT3847_6353C.1.pep
MLRHVWEPPKPIRCPRGKAHLIDEELLLHYLRENDGFIPLARAIIVVDDIYEXDAWELSAKGLLGEKEWYLFGPRDP

SEQ ID NO: 245304 - protein, 231 aa, Glycine max
  Clone ID: PAT_MRT3847_63540C.1.pep
TRWINAIKSLSVTTPEPHAAIESYHLKLKSMLLKENYANFWPRVDWLIHALTTEFHSLYWLDQYSLETGYFENLRDNSFSSNAWYHALHIPDVDVILDEQNLHLAKVLSQTDRSLVYTVSNPGSEFSLCDCSWSRLGNLCKHVIKVATFCRSRQVARPSLSAQVYKQALLTLLHNPPDDPLVLDHTILHVAHLQQDIKALEDLSNNGLLQPIAPDLSSQMAENPLLFQRIQ

SEQ ID NO: 245305 - protein, 111 aa, Glycine max
  unsure (1)..(111): unsure at all Xaa locations
  Clone ID: PAT_MRT3847_63541C.1.pep
RGTVAPGSFFGSPIALSMRGQIDPWRKPKKLGGTWMFSEYMLAYGRDLLAMHAGTVEPWARALGVDNXTATGGSLWAALCLLKRRGSXVMACRSAIDLPYXKGRRRLDGNP

SEQ ID NO: 245306 - protein, 29 aa, Glycine max
  Clone ID: PAT_MRT3847_63542C.1.pep
SHRADLMNSVLELLCILKNPPGHNSYHLV

SEQ ID NO: 245307 - protein, 28 aa, Glycine max
  Clone ID: PAT_MRT3847_63543C.1.pep
VQFFYRPPKRTQANGAGMLKKRRVNSAT

SEQ ID NO: 245308 - protein, 76 aa, Glycine max
  Clone ID: PAT_MRT3847_63544C.1.pep
NCATVEHSTVKMEHTHIIYVLESDVQSHGGVPSMKGTCLKGHPHSAKLPIHFFPVVALGELGEEVVSHLGPALGAH

SEQ ID NO: 245309 - protein, 82 aa, Glycine max
  unsure (1)..(82): unsure at all Xaa locations
  Clone ID: PAT_MRT3847_63545C.1.pep
PPKVQRAVCKLSNPPRGEEGFAPLHPKFDLMXPKGAFVPWSXGEGMEKGEFFKAGXALAALGRVYKKVGCKFGEAPKNNKTH

SEQ ID NO: 245310 - protein, 34 aa, Glycine max
  Clone ID: PAT_MRT3847_63546C.1.pep
MRAVDKCVVVIVQSTKPENTKSSTVTVLGDLCTD

SEQ ID NO: 245311 - protein, 80 aa, Glycine max
  Clone ID: PAT_MRT3847_63547C.1.pep
IRLPLLPPPPCLRRLLEPLLPMLPMKQEKGNYQINPEKVLFYSLNFIFWGADISLNTREQSKIGSFGEKKSEVQHMGLLF

SEQ ID NO: 245312 - protein, 56 aa, Glycine max
  Clone ID: PAT_MRT3847_63548C.1.pep
DAWEHSLGGPQAKGIMYFSTLSLFAEHSPIGHRTSRKMATACAYFSALWLNSRSSS

SEQ ID NO: 245313 - protein, 53 aa, Glycine max
  Clone ID: PAT_MRT3847_63549C.1.pep
EHNPNPYFSSSLLSFTLLFSAATIPNPKVFLDMTIGGQSAGRIVMDLYAHMSP

SEQ ID NO: 245314 - protein, 49 aa, Glycine max
  Clone ID: PAT_MRT3847_6354C.1.pep
KVKITGLCSISECSCKGIGDVHVLVCVKNDGCMRECCSGNEETFLEGLT

SEQ ID NO: 245315 - protein, 66 aa, Glycine max
  Clone ID: PAT_MRT3847_63550C.1.pep
SIRTDLVILLRGRRGASTHGEDSGTCRGRGGGSGILDCLFVISQVGVEEKRWEALIKFIILFDLDC

SEQ ID NO: 245316 - protein, 71 aa, Glycine max
  unsure (1)..(71): unsure at all Xaa locations
  Clone ID: PAT_MRT3847_63551C.1.pep
CVHRAVKTGQPGAPRLGPPPPGYLCAGLPRLTFVWTNEMLARSGPSRVGGLCGLTHFFXXXINYFKQKKKK

SEQ ID NO: 245317 - protein, 106 aa, Glycine max
  unsure (1)..(106): unsure at all Xaa locations
  Clone ID: PAT_MRT3847_63552C.1.pep
MSLVHSYGNAASFLSVDWTKRTTIHPGETARRSYPPPYHYSGTAXCQFMMGSCNTGDSXEDYSWGLXESWVYPQRYLTQACKDRLYMAPGLCDMFQHTLIQLTLMG

SEQ ID NO: 245318 - protein, 69 aa, Glycine max
  Clone ID: PAT_MRT3847_63553C.1.pep
TACTKAMTIRSNLPWVHMHGTGAEGILPLVIEYPCEYTGWAVAPRLRCARDKGLVKTHDKIVHLGPIER

SEQ ID NO: 245319 - protein, 39 aa, Glycine max
  Clone ID: PAT_MRT3847_63554C.1.pep
LIVSPLFSTRLLDLRNSTVRVMLNLILYYTLPIMKYSLN

SEQ ID NO: 245320 - protein, 453 aa, Glycine max
  Clone ID: PAT_MRT3847_63555C.1.pep
PRVRGGGRDSGMSSETINSSTQRTSMSNESVCSTSFSRLSFDLPPPSSSPETLFVKPHRSSDFAYSAILRRKSALTFRDFHLLRRIGAGDIGTVYLCRLRHDAGDEDDDEDPCFYAMKVVDKEAVALKKKAQRAEMERKILKMVDHPFLPTLYAEFEASNFSCIVMEYCSGGDLHSLQHNHPNNRFSLSSARFYAAEVLVALEYLHMLGIIYRDLKPENVLVRSDGHIMLSDFDLSLCSDAIPAVESPDCSLDPAFAPALRYTRQYSTPFSCLSNRVFRSRKVQTLQPNRLFVAEPVGARSCSFVGTHEYVSPEVASGNSHGNAVDWWSFGIFIYEMVYGRTPFAGSSNEATLRSIIKKPLAFPTSTPSSTLEMHARDLISGLLNKDPNRRLGSKRGSADVKKHPFFAGLNLALIRTVTPPEVPSLRRHKTTPFYYPANVNNSRQQLTAFDYF

SEQ ID NO: 245321 - protein, 37 aa, Glycine max
  unsure (1)..(37): unsure at all Xaa locations
  Clone ID: PAT_MRT3847_63556C.1.pep
PXNSRMHIXLDXERTMXXXXNSARPNAKXKRXXPXKT

SEQ ID NO: 245322 - protein, 56 aa, Glycine max
  Clone ID: PAT_MRT3847_63557C.1.pep
NKNQFLPMNNPLFSLLAFQTTCLVKLFLRLSKSFFKMGITFSYYLRILSSPSYNIL

SEQ ID NO: 245323 - protein, 38 aa, Glycine max
  unsure (1)..(38): unsure at all Xaa locations
  Clone ID: PAT_MRT3847_63558C.1.pep
LQXAXLEHTXXVAXXXLIKVXPLXTTCYQVQXXPLPXG

SEQ ID NO: 245324 - protein, 86 aa, Glycine max
  Clone ID: PAT_MRT3847_63559C.1.pep
TFPYLQALKAYLTLELMSIEKIYFIFLYSGVNHLCRLFWFQLSAMAYYAFMDIYFSGHVKNVYPSILDDPYVIFSRCFLIHNHGSV

SEQ ID NO: 245325 - protein, 58 aa, Glycine max
  Clone ID: PAT_MRT3847_6355C.1.pep
TQLLSLSSFITIPFFGVTDKGIEIICVHFMSVCIAAARQFWISLNLTLSHTNHIVNNY

SEQ ID NO: 245326 - protein, 240 aa, Glycine max
  Clone ID: PAT_MRT3847_63560C.1.pep
MVRESASLYSAIGQIRSCNQTRGVKSDLDKSECFDPQSFIKNLPELSEIEVNGQPTLIPKQSPRRKSITLVLDLDETLVHSTLEPCDDADFTFTVFFNLKEYTVYVKQRPYLHTFLERVSEMFEVVIFTASQSIYAKQLLDILDPDGRFISRRMYRESCLFSDGNYTKDLTILGVDLAKVAIIDNSPQVFRLQVNNGIPIKSWFDDPLDCALMSLLPFLETLADADDVRPIIAKRYGNKE

SEQ ID NO: 245327 - protein, 98 aa, Glycine max
  Clone ID: PAT_MRT3847_63561C.1.pep
GFPYIKQSLSMGVVLLGNNIPLKNFPVKSFVNKRNCFPKEKDIGGTGYLGPNLRLGQHFRSLPPTFGFHKIFYLLGVSFGGSLPSNAMKFPAFQKAKI

SEQ ID NO: 245328 - protein, 57 aa, Glycine max
  unsure (1)..(57): unsure at all Xaa locations
  Clone ID: PAT_MRT3847_63562C.1.pep
TQRTRSWRRPFLSLISIMAAVAPSSDKTADLLQXLTLDSESKAIGVAEPAKKELNCF

SEQ ID NO: 245329 - protein, 95 aa, Glycine max
  Clone ID: PAT_MRT3847_63563C.1.pep
LVLLVAGQKWGQVDNLRYDCCFICVDASLPVLDRYVEQRVDCVMHEGLLNEVYDIYNLNAVYTRGLRQAIGVREFEPLLRTCVVKDMHALLSSSP

SEQ ID NO: 245330 - protein, 39 aa, Glycine max
  Clone ID: PAT_MRT3847_63564C.1.pep
CTVTSYSNINYYFSMLYISLICLLVIYILINYILYIEKE

SEQ ID NO: 245331 - protein, 86 aa, Glycine max
  Clone ID: PAT_MRT3847_63565C.1.pep
MLNVTLACLGRMGATIVLQMVCLVNAELYPTFIRNLGMMVCSALCDLGGIFTPFMVFRLTEVWQALPLILCGVLGLTAGAMTLLLP

SEQ ID NO: 245332 - protein, 70 aa, Glycine max
  Clone ID: PAT_MRT3847_63566C.1.pep
ENHITIFSILGMVQVKLFRKFSCKFHAKFKDFNIFHPISFSQFLTCHSVDPSCHLFMLWQKQKGSAKLNA

SEQ ID NO: 245333 - protein, 25 aa, Glycine max
  Clone ID: PAT_MRT3847_63567C.1.pep
IKFPSLGFIPVKVSLSNESHQTVFP

SEQ ID NO: 245334 - protein, 131 aa, Glycine max
  Clone ID: PAT_MRT3847_63568C.1.pep
MAALVNAATSEKLAETDWMKNIEICELVAHDQRQARDVIKAIKKRLGNKNPNIQLYAGVLLEMLMNNIGDLVHQLVIDTGIIPILVKIVKKKSDLPVRERIFLLLDATQTSLGGAFGKFPQYYNAYYDLGE

SEQ ID NO: 245335 - protein, 398 aa, Glycine max
  unsure (1)..(398): unsure at all Xaa locations
  Clone ID: PAT_MRT3847_63569C.1.pep
MAAELVNGATSEKLAETDWTKNIEICELVAHDKREARDVVKAIKKRLGSKHSNTQLFAVMLLEMLMNNIGEHIHEQVIDTGIIPILVKIVKKKSDLPVRERIFLLLDATQTSLXGASGKFPQYYNAYYDLVSAGVQFAQRDQVVQSNNPSSQPSRTSNVPNREQASPKHEAVAQPAESQTVPESSIIQKAGNALEVLKEVLDVVDAQNPQGARDEFTLDLVEQCSFQKQRVMHLVMASRDERIVSRAIELNEQLQKVLARHDDLLAGRATTTASRFDHEEAEEEEEPEQLVRRLRKGKACARPEHEETETDIPCLGLLGERLNRPLIRPTSTIEPPTREADTRSPTCSIPPPPAKHIERERFFLENKDGSNLSGHMRGLSLHSRNGSSSRSGSFDFSD

SEQ ID NO: 245336 - protein, 153 aa, Glycine max
  Clone ID: PAT_MRT3847_6356C.1.pep
KKKKRDLKKPSFCRLKKVPRFEETHNVQNNIVVVAVASWVLQSKQALCVGSENTCHASHTPMRASSRAWRTNAAPWQMDLEGVGESSSPSCASTSYNNYDRWISVYNRLDETGHDQPISNPEFREQLEIHMNHLPHTWVRGRTQCSQDPFSGH

SEQ ID NO: 245337 - protein, 70 aa, Glycine max
  Clone ID: PAT_MRT3847_63570C.1.pep
IVYFQSVQSYTRYFQRFENDIISCSLELQFIKLPANSHVQFLDTYGLPPSINRSAIIAFWLVNSPYRGIL

SEQ ID NO: 245338 - protein, 71 aa, Glycine max
  Clone ID: PAT_MRT3847_63571C.1.pep
KKRGYLNLAESVGVGLKKLKRPRIRSKSNGSPRGWGFSIPSPNFKIKNRFLHSLFLFLGLAPPHPPPPPIH

SEQ ID NO: 245339 - protein, 52 aa, Glycine max
  unsure (1)..(52): unsure at all Xaa locations
  Clone ID: PAT_MRT3847_63572C.1.pep
EIGVYIAYWTYLSYNXVGFIIAMRSDINFTFRIIYSKRSFTDMDSTNIYAYM

SEQ ID NO: 245340 - protein, 207 aa, Glycine max
  unsure (1)..(207): unsure at all Xaa locations
  Clone ID: PAT_MRT3847_63573C.1.pep
GLPLKFVQADQSARNWWRKLDIVRDIIAGSLQGEDRLEALLYSAIYLKWINTGQISCFEDGGHHRPNRHAEISRLIFRELERHTSRKDISPQEVLVIRKIHPCLPSFKAEFTASVPLTRIRDIAHRNDIPHDLKLQIKHTIQNKLHRNAGPEDLVATEAMLAKITKNPAEYSEPFVKEFKIFHQELXDFFNASSLAEQLESIHESMG

SEQ ID NO: 245341 - protein, 69 aa, Glycine max
  Clone ID: PAT_MRT3847_63574C.1.pep
TRNVGSDFFGKTPSFLSQRIFLLFDEPWIHFSSIVQVRRSRISLNRVLFSTFPFLKSREHVELSAVFCC

SEQ ID NO: 245342 - protein, 61 aa, Glycine max
  unsure (1)..(61): unsure at all Xaa locations
  Clone ID: PAT_MRT3847_63575C.1.pep
PHDPGTKYKMLIGCFXPICKTRKCFFVIGWPKACGMTIFKYHGTESRGSKALSWGWLTTLP

SEQ ID NO: 245343 - protein, 129 aa, Glycine max
  Clone ID: PAT_MRT3847_63576C.1.pep
MHQKKSEVQIGKESSGVSSDFNQHPNHPLPTLTPNPNHESLTSIAPYKRPSLPTQPSPQPLLSKPPTLKPRHVTTTTVIPTFLSAAVSLRRRLRHRLRLFLFLSLPFFYFLGFHPTNSLLLDFIFAFSF

SEQ ID NO: 245344 - protein, 160 aa, Glycine max
  Clone ID: PAT_MRT3847_63577C.1.pep
MEDAGGSKLHGIKQIERLKEMFQKWQTVTLGSKDSNNHSDVTHHHGVLSPMINKRLTDIVYCDSDEDGCYSPQPPHDVPKGYLAVYVGPQLRRFIIPTSYLSHSLFKALLEKAAEEFGFDQSGGLTIPCEIETFKYLLNCIENHDDSSSKLIMLLYYHLV

SEQ ID NO: 245345 - protein, 166 aa, Glycine max
  unsure (1)..(166): unsure at all Xaa locations
  Clone ID: PAT_MRT3847_63578C.1.pep
MKFKDSADNHCLASEDLCNQKENLFMVHSRRGGSNQKMYHNEWLDTIDLEPDVISLFLLPLTSLLTSIRGSGFVSHAINLYLRXPRQWAPVLSEIRLGSRWKHQVNTWLKFSILGPKLYINTIPVDVGNRPVVGLRLQLEGRTCNRLAIHLQHLASLPKSLPLSDN

SEQ ID NO: 245346 - protein, 90 aa, Glycine max
  Clone ID: PAT_MRT3847_63579C.1.pep
RGQLAHRNLCVLAPSLGTPGLAFFFSGWFFVWFFERITFCQREPFCPCLAQVLLGLLIGKGGHPFGFCSEFTGAPRLLGVMCQKGNFSPH

SEQ ID NO: 245347 - protein, 203 aa, Glycine max
  unsure (1)..(203): unsure at all Xaa locations
  Clone ID: PAT_MRT3847_6357C.1.pep
LLVPRVRSFILVRLKFPHLVWFIMKKRGKLRCQVGINPSHGWLGGHWLLSKGNDILSCDYASFDGLITKQAMSKMAEMINSLCGGDEKLMRERTHLLLAXCDQGCAIXKKDVWRVECGIPSGLPLTXICNSISNEMLIRYSYEKXLLQAKASSLVLQSFTNWVSLXVYGDDNSNSAHEYVKPYFXGFKLKSFLAXGNNITITG

SEQ ID NO: 245348 - protein, 88 aa, Glycine max
  Clone ID: PAT_MRT3847_63580C.1.pep
MAFMSEVNMSFSHYMDDEYEKLFRRMNPPRVVIDNEACKNATVIRVDSANKHGILLEVVQILTDLNLIITKAYISSDGGWFMDVFNVT

SEQ ID NO: 245349 - protein, 165 aa, Glycine max
  unsure (1)..(165): unsure at all Xaa locations
  Clone ID: PAT_MRT3847_63581C.1.pep
MTEVPMCIASVSELSPDEERILIRDIALTAQANSKEGDTFFLITQRWWQHWIEYVNQEQTNTSYDASSLSEHCDLANSSVLKRPAGIDNSDLIDDAVSEDTGMGIEIHDTLLEGRDYVLLPQEVWNQLFRWYGXGGPTLARKVISSGLSQTELAVEVYPLRLQLL

SEQ ID NO: 245350 - protein, 54 aa, Glycine max
  Clone ID: PAT_MRT3847_63582C.1.pep
HIYKVRLVCDRYMSRCCSTTICVNNWELVIVTLGCKGKQLQGDHFPKKEKETSK

SEQ ID NO: 245351 - protein, 51 aa, Glycine max
  Clone ID: PAT_MRT3847_63583C.1.pep
RNTIMTDSAWGSPSSANNPMIGRSNSNPCQQGLDYTSCFGNRFHIPVLTMV

SEQ ID NO: 245352 - protein, 53 aa, Glycine max
  Clone ID: PAT_MRT3847_63584C.1.pep
TLQGHGGNNYLHQVEPFSVMKKNSTAYNGRSRGGYRLTIPKAYEPLTRKTYHP

SEQ ID NO: 245353 - protein, 133 aa, Glycine max
  unsure (1)..(133): unsure at all Xaa locations
  Clone ID: PAT_MRT3847_63585C.1.pep
MAEEKRAPSSFVKKGDRQMFTVELWPGETTIVSWKKLLKDANKHNGSTSAPQHVAIAPGQPVEVEETDPSQPNRFSAVIEKIERLYTGKDSSDDEDLLDVPDDDQYDTEDSXIDDAELDEYFXVDNSCIKHDG

SEQ ID NO: 245354 - protein, 58 aa, Glycine max
  Clone ID: PAT_MRT3847_63586C.1.pep
YSLNPAWLVNPHSTDSYLTIYVSLRSIKASTAVTRCLFPPLTALADHTPNLTDNHHSL

SEQ ID NO: 245355 - protein, 117 aa, Glycine max
  Clone ID: PAT_MRT3847_63587C.1.pep
WYIYLGLTENKRGYISCGSVLVEGTSTRFKENKGGYIPCGSLLVKGFLQGERLRSQDYLREATKERIEGLFSTESLRWILRIPIQLKHSSPCGGSAISNDGSWGPLVVMGGGEGVRV

SEQ ID NO: 245356 - protein, 117 aa, Glycine max
  unsure (1)..(117): unsure at all Xaa locations
  Clone ID: PAT_MRT3847_63588C.1.pep
KKWKKHVNAYKKINRLLDTGGYXNIMDMNAGLXSFAAAIQSSKLWVMNVVPTIAEKSTLGVIYERGLIGIYHDWYGFLTSSSYFYLWPACLYLMYFNSSNYTNLVLIVESNKIXKFQ

SEQ ID NO: 245357 - protein, 48 aa, Glycine max
  Clone ID: PAT_MRT3847_63589C.1.pep
AMWFAMSIELSKVLSLGPGVFLTQAALAGFRQDCAARHVAHSMVARSY

SEQ ID NO: 245358 - protein, 79 aa, Glycine max
  Clone ID: PAT_MRT3847_6358C.1.pep
HNTAMLSSVDEHLCKGLEPMNAEWYQNVCEDDKCHYMYCCMNTYKGWFYSVGYSLSGMGATESYDLGMQKIKKWEIGEW

SEQ ID NO: 245359 - protein, 278 aa, Glycine max
  unsure (1)..(278): unsure at all Xaa locations
  Clone ID: PAT_MRT3847_63590C.1.pep
MATTTQLHLPPGFRFHPTDEELVIHYLCRKCASQHIAVPIIAEIDLYKYDPWDLPGMALYGEKEWYFFTPRDRKYPNGSRPNRSAGTGYWKATGADKPVGKPKPVGIKKALVFYAGKAPKGEKTNWIMHEYRLADVDRSVRKKNSLRLDDWVLCRIYNKKGAIEKQQLPPPSGVRKIECYEMEDEKPEILPPDXTAATVADCLYFEASDSVPRLHTTDSSCSEQVVSAEFASEVQSEPKRGSNNNNEFAYNYVDATLGNNQMSPLQDIFMYLSKSFCN

SEQ ID NO: 245360 - protein, 130 aa, Glycine max
  Clone ID: PAT_MRT3847_63591C.1.pep
MVYVFMQAIRKHKFVNLLDNPGSADLSAYVDFASIRHSAEEASGEVSVHGPITQSEFLGLLGINFRVEALLQNCTEEQAESLRTGYWRLVGDGEASFWEGPDEGVPIGMGTRYKAMAIVNKKQGVPVPFQ

SEQ ID NO: 245361 - protein, 362 aa, Glycine max
  unsure (1)..(362): unsure at all Xaa locations
  Clone ID: PAT_MRT3847_63592C.1.pep
MTDNEEPMIVPGSMSELAFNKYKRWQWWCLVTLSIAFLIVGQSAAVILGRFYYDQGGNSKWMATLVQTAAFPILFIPLFTIPSPPEASTSASPPIKIILLIYXVFGVLIAADNMMYSTGLLYLSASTYSLICASQLAFNAVFSYFINSQKFTALIINSTVVLTLSAALLAVNEDTDEPSGFSKGKYIIGFLCTLGASAVYSLLLSLMQLTFEKVLKKETFSVVLEMQIYTSFVASGASVIGLFASGEWRTLHGEMEGFQKGYVAYVMTLVWTSIAWQVCSVGVVGLIFLVSSLYSNVISTVSLAVTPIAAVIVFHDKMNGVKIISMLLALWGFASYIYQNYLDDSKTRHAQAATKSQNDSSC

SEQ ID NO: 245362 - protein, 130 aa, Glycine max
  Clone ID: PAT_MRT3847_63593C.1.pep
GINESLAYESCSDVVGDVLHVDVMKSVKYMVEYLLSRSKVLLYQGQHDLRDGVVQTEVWVKTVKWEGIVEFLNSERKIWKVNGELAGYVQNWKSLTNVVVLGAGHLLPTDQPVNSQKMIEDWVLERGLFK

SEQ ID NO: 245363 - protein, 57 aa, Glycine max
  Clone ID: PAT_MRT3847_63594C.1.pep
LEAGFECNPFMNRGSLVAISAYGSLISTIDRTLLHHLNSDFIQHINIVSIALYCKSI

SEQ ID NO: 245364 - protein, 67 aa, Glycine max
  Clone ID: PAT_MRT3847_63595C.1.pep
FQDSLKVYLHNLCTTILGHRKSLSVLATHFMNHCMVPLLVYWLNTLLLDIGLRVRFKLMLSLSQIYV

SEQ ID NO: 245365 - protein, 50 aa, Glycine max
  Clone ID: PAT_MRT3847_63596C.1.pep
FSFEPILQQPWTLINANSYHLFMQSQSLNMLASQDLQLYTLPNFFNMIVD

SEQ ID NO: 245366 - protein, 118 aa, Glycine max
  unsure (1)..(118): unsure at all Xaa locations
  Clone ID: PAT_MRT3847_63597C.1.pep
APFSGDETAPLFRLLGDATHDGLTRGGAALGSVANGRGFGSMGVARPHLGMNIFGPPVNAGVRGDECLLIGGLXAGLMSQGTAXFRVDGDAHPSSGLPXGRGGLSRGKAIGIIGRCCG

SEQ ID NO: 245367 - protein, 309 aa, Glycine max
  Clone ID: PAT_MRT3847_63598C.1.pep
MVLFRKFLKQILVDNTQTKTKARTFFTSTSTATAFPWCAPHHNNRLFRSPGPGPGPGPLFLARPPWKLSQSATPLYSHGNAFNLLRSTAPLQFPDPVPSHSNKPSIFHSFVNLPNFISFTRLLSGPLLAWMISNEFYTSAMVGLALSGATDWLDGYVARKMKIDSVVGSYLDPLADKVLIGCVALAMVHRDLLHPGLVSLVVFRDVFLVGGAVFLRANSLGWKWESWFDFFNLDGTCRQKVEPLFLSKVNTVFQLALVAAAFLQPEFGTQETQLYVTYLSYLVASTTVASTAAYGAQYFRRLAVVSNSV

SEQ ID NO: 245368 - protein, 191 aa, Glycine max
  Clone ID: PAT_MRT3847_63599C.1.pep
LETISKLEERIKEAEENARRIKEHADIAEKEIEALELQVTKLNEEKEDAALHYQQCMEIISSLEYKLSCAEEEVRRLNSKIVDGVEKLQSSEQKCLLLETSNHMLQSELQSLAQKMGSQSEELNEKQQELGRLWGCIQDERLRFMEAETALKTLQQLHSQSQEELRSLASELTSKVEILGNVESRKQALKD

SEQ ID NO: 245369 - protein, 80 aa, Glycine max
  Clone ID: PAT_MRT3847_6359C.1.pep
RSSWRGRISWWILSTILAMFLSRFCVSLVLALVFVSSPWCILAMSLTMCIFSKFIIRLTMVHLGNQLNQVLAYSISSLKV

SEQ ID NO: 245370 - protein, 48 aa, Glycine max
  Clone ID: PAT_MRT3847_635C.1.pep
THPFFNLFKISVNKKALKYWMQGLYKMKASVLTLLIPQVLTVLNTIRG

SEQ ID NO: 245371 - protein, 37 aa, Glycine max
  unsure (1)..(37): unsure at all Xaa locations
  Clone ID: PAT_MRT3847_63600C.1.pep
KGHLLPCKXIFYAYSXNNKIXMXKVTNIQNKLTKIAN

SEQ ID NO: 245372 - protein, 42 aa, Glycine max
  Clone ID: PAT_MRT3847_63601C.1.pep
NAAESQISKADDLINWAPRGSIWPMTFGLPCCPVKKTHTGSP

SEQ ID NO: 245373 - protein, 165 aa, Glycine max
  Clone ID: PAT_MRT3847_63602C.1.pep
MSAPFFRTTLAAVLACCIALPASAALDARIQTAAEQAKAPTLKLLEQLVNIDSGSGYEPGLSEVGKLVSAELKTLGATLQQVPNTAPDKSQHLVATLKGSGKAKILLLAHMDTVFKEGTAKARPYRTDEKRAYGPGVSDDKGGIVVASAEFLQPGGSTSSRAAAT

SEQ ID NO: 245374 - protein, 605 aa, Glycine max
  unsure (1)..(605): unsure at all Xaa locations
  Clone ID: PAT_MRT3847_63603C.1.pep
MDEEVDLERKPCMLQDCLRLQAAEKSFYDALVRSYPSSTGQFNDNPDPDDNFGGTTSSESFSSYTTDNSCESDWFNGASDLDSSFLQRSLIDSPEHAYVAPDPFRETQAGVHFSNGAWNLIHPQNKPRVIEDGVMRGSVTATGLREKRSYLMNDMSHEEERSNKLSSVYSDDSEPSSMFDEVLLCKDGKSAXIFYAGREPSPSQIADSRGSNGKKTRSKRGSNKGTRASVTTVDLWTLLIQCAQAVASFDQRTANETLKQIRQHSSPFGDGLQRLAHYFADGLEKRLAAGTPKFISFQSASAADMLKAYRVYRXVTNQIAMSNFLAIRTILKLALNEMVKKEYHNGFVVGEDGTWVFQRLSERPGGPPKLLMTGIDLPQPGFRPAERVEETGRWLEKYCKRFGVPFEYNCLAQKWETIRLEDLKIDRSEVTVVNCLYRLKNLSDETVTANCPRDALLRLIRRINPNIFMHGVVNGTYNAPFFVTRFREALFHFSSLFDMFEVNVPRERRRQKGIEKGVFGRDAINVIACEGAERVERPETYKQWQVRNQRAGFKQLPLAPEHVNRVKEMVKKEHHKDFVVDEDGKWVLQGWKGRILFAVSSWVPA

SEQ ID NO: 245375 - protein, 61 aa, Glycine max
  Clone ID: PAT_MRT3847_63604C.1.pep
RDFTGSNVLFSTYLFNFLKYLTSHLFIISTIYKSPIFIFYISILHFYIIKTSFSNSLFILF

SEQ ID NO: 245376 - protein, 61 aa, Glycine max
  Clone ID: PAT_MRT3847_63605C.1.pep
TMEIGGGLGVGPLTDHIYLHLNYLPPYVLAERLAGISETAAILAGVDVTNEPIPVLPTGPF

SEQ ID NO: 245377 - protein, 88 aa, Glycine max
  Clone ID: PAT_MRT3847_63606C.1.pep
LVPNRHEAATSKEEWQEQCKFWPTSYHPRTYNIDGITGFSEEDSQSVLKFMQSAVEMATSDGMVNVQIFCLFHSICAQEIMCSHLRQS

SEQ ID NO: 245378 - protein, 71 aa, Glycine max
  Clone ID: PAT_MRT3847_63607C.1.pep
PTFLGALFFSMDSSTVTRRCPLQICVRETTTTPPHQEHHLRTNYLGQPLLREPPPTRPKSTRVISGHQIRA

SEQ ID NO: 245379 - protein, 76 aa, Glycine max
  Clone ID: PAT_MRT3847_63608C.1.pep
HPAHIIYVPAWILFGNNFAIMKLYALFTLHKTGWGTRAGIGDPATALAALEKKDGPPPPELPGTYDVEMNGQNRKA

SEQ ID NO: 245380 - protein, 196 aa, Glycine max
  unsure (1)..(196): unsure at all Xaa locations
  Clone ID: PAT_MRT3847_63609C.1.pep
MGDEQPSTTSVSGLRRVIALLSSLISLSLSIRVFAGKWQLIRSRLEELHSALVAGDSTSLSGELPAITGTAEECLELARRCADLSYSGKLLMQSDLDLTLGKLEAHVKKLSEIFKKGVSMHGYSVVVSRPGFGACKDDMRFYLRDLLTRXKVGDLGMKKQALVNLHEXVVEDDKVCEVGLLRVLKFVHVXGGFSRF

SEQ ID NO: 245381 - protein, 80 aa, Glycine max
  Clone ID: PAT_MRT3847_6360C.1.pep
CAPKPPNLVASCPLASATTQSPHELGVLAPHSGHLSQMYSLARRLSSSLSQWPACCACPFVVIVTQWLPIPARRCLWQLR

SEQ ID NO: 245382 - protein, 75 aa, Glycine max
  Clone ID: PAT_MRT3847_63610C.1.pep
LFHLSANMYTLYTDRSPSVSTHVFICQSLLFFFFFFLGTFTIRSKLIKSVKNTPKEESEPCPIARSDQGSNEYYP

SEQ ID NO: 245383 - protein, 111 aa, Glycine max
  Clone ID: PAT_MRT3847_63611C.1.pep
KERKQKKRETMEKLKPKTQKHKEKKKRGGRTKGPKQTNAGKRGKTTPKGEPKPNTRAEGKQRADGENPGGTQQKGTEKKAPTARRRKKQKGPNRPPNQTRAQPEGTRGRPQ

SEQ ID NO: 245384 - protein, 61 aa, Glycine max
  Clone ID: PAT_MRT3847_63612C.1.pep
LLGPKQVVNHVQLIGVFRPRGFAPFQPSCGQEKGLILVTCRARHVGQGDSPILTLPEGVVL

SEQ ID NO: 245385 - protein, 105 aa, Glycine max
  Clone ID: PAT_MRT3847_63613C.1.pep
MGLMGSFFKRLAKRVIKHQEVLQNKLLEAIERMEKERAEWEEGWRVREREIHDREAIVKARERDLASKRDSSIVSNLEKITGQKSFVLVSSGKSSHEQLSTIHEY

SEQ ID NO: 245386 - protein, 55 aa, Glycine max
  Clone ID: PAT_MRT3847_63614C.1.pep
IHGGRGMALTVFHVKGNLENLVSARSKVDLILGVLGGFPGCSWPTLMEAPGVLES

SEQ ID NO: 245387 - protein, 81 aa, Glycine max
  unsure (1)..(81): unsure at all Xaa locations
  Clone ID: PAT_MRT3847_63615C.1.pep
KERIQTAVEYASHWLEGTQLPXSDEFXDKQRELQGICIPINAKMYQGAAARPGGYVPTGDHDMLRAGGTGSGAGPKIREVD

SEQ ID NO: 245388 - protein, 58 aa, Glycine max
  Clone ID: PAT_MRT3847_63616C.1.pep
TNTGTEVTKDPDAGLEYGKVSSTELVQAVHDMLSAAGVRMDAEKETLFEATLSLQDHA

SEQ ID NO: 245389 - protein, 89 aa, Glycine max
  Clone ID: PAT_MRT3847_63617C.1.pep
YNSSCLFCSVKPLKVFRTIRAQCCDESTYAPGNVEAVPVWITLPELDPNTPCQIFGGYNAGLLRMAQVEEFYVITRDSPIEQICELSTG

SEQ ID NO: 245390 - protein, 77 aa, Glycine max
  Clone ID: PAT_MRT3847_63618C.1.pep
NGPFLTKWFAYQKKVFTKGLSHYTQPQKATNVSPGGIMLPAPKTSFFLSLKGLKKPLGKPLKRKPLFFIFLGSFFSL

SEQ ID NO: 245391 - protein, 223 aa, Glycine max
  unsure (1)..(223): unsure at all Xaa locations
  Clone ID: PAT_MRT3847_63619C.1.pep
MLPALSQFKVNHVGVGFNSSPNPIPMLPALRRSRCVVLFRLRSYSSTDFKITAHVETDSTVHLERCFNAPVASHLPSISMKGGQYGAFGAVTLEKSKLDMSQKQTRSSPELDIGGGGGXIGKKINHGGGDGDDDDEGDXDSCYXRRILFEELFDRKFVDAVLNEWQKTMMDLPAGLRQAYEMGLVSSAQMVKFLAINARPTTSRFISRTLPQALSRSFIGRLL

SEQ ID NO: 245392 - protein, 257 aa, Glycine max
  Clone ID: PAT_MRT3847_6361C.1.pep
VQLHQDDCTSYDEDDNSNVIGIVVLVAAAFFGYMLALLQWRVRAMFSSPDDPRAPSRKKGAPFVAQQMQRPPPTTKSVRPPLIPNEDEFEKQDEGFFVSLGRLFLNSGTCMSEILGGLFSGSKRKSLQYHQYQQQYQYANRYPNAWPMQESFVIPDEDEPPPSLETKTPTPRETYPIMTKELEKPQHFKPSRGYLKRWEGGDYQEQHQQLQQHHQQHQQEHPKLQHQQHQQQVKLQHQHQVHTRYSSTPQGYYEQNC

SEQ ID NO: 245393 - protein, 193 aa, Glycine max
  unsure (1)..(193): unsure at all Xaa locations
  Clone ID: PAT_MRT3847_63620C.1.pep
MIPALSQFKVNHVGVGFNSPSPNPIPMLPTLSHRRCVLRVSVRSYSSDDFNTLKITAHVETDSTVHLERCFNAPVSSHLPSISMKGGQYGAFGAVTLEKSKLDLSQKQTSFSPELDIGGGGGDIGKKINHGGGDGGDDDGDDDDYFDDFDDGDEGDEGGLFRRRILFEELFDRKIXDAVLNEWQKTMMEFACW

SEQ ID NO: 245394 - protein, 76 aa, Glycine max
  Clone ID: PAT_MRT3847_63621C.1.pep
TDLSRHYTWIRESLVSSKGTIFRIPITGNEIWNGKSHRNHSAFTRCVLIPVYPTWMVERDNVVLRTVDRGFEICMP

SEQ ID NO: 245395 - protein, 153 aa, Glycine max
  Clone ID: PAT_MRT3847_63622C.1.pep
HASAAAVSVASSSLTSSNTSTDSNRVMSSSSTSAFLHLSNQAPKDTVPSLPNPPGLKLTLESLKSEIPPAAALKSDMQPAAVSNSKTVLDASAEVVTRPNEPLNGASELKLGPSRNFSPTIEQPFNNTTSFDLNVVSVSQAAQPSDAPLQLST

SEQ ID NO: 245396 - protein, 256 aa, Glycine max
  Clone ID: PAT_MRT3847_63623C.1.pep
SHSLIFHANLLLLLLIVGCHAQLRVDYYENTCPNVESIVRSAVEKKLQQTFVTAPATLRLFFHDCFVRGCDASVMLATRNNTSEKDNPINLSLAGDGFDTVIKAKAAVDSVPGCQNKVSCADILALATRDVIALAGGPSYAVELGRLDGRVSAKASVRHHLPHPEFKLEQLNQMFASHGLTLTDLVALSGAHTIWVSHCSQFSKRDYNFRRRISIDHTLNATYAIQLQPVCADHVDPRLAIDMDPVTTRTFDSSYF

SEQ ID NO: 245397 - protein, 118 aa, Glycine max
  Clone ID: PAT_MRT3847_63624C.1.pep
IIYFLSALLSFFGLLVRLTFLQETTMSNAWYEVLSVLHLMAMLLLSQANLLLLPRTSTDSHQPKVSEESRRASVDIFLKAAGYLDCAVRHVLPQLPGELRRNLPVDLTEGVLRALCLQ

SEQ ID NO: 245398 - protein, 62 aa, Glycine max
  Clone ID: PAT_MRT3847_63625C.1.pep
NTSFTSYCFTLTLFSWVALKIELKKKQDKIVILGLRYDIFFHIFIYYSWKNAFTIFNRVKLE

SEQ ID NO: 245399 - protein, 25 aa, Glycine max
  unsure (1)..(25): unsure at all Xaa locations
  Clone ID: PAT_MRT3847_63626C.1.pep
SIRPCPALXCIMYGRGSPTQSGIIT

SEQ ID NO: 245400 - protein, 92 aa, Glycine max
  Clone ID: PAT_MRT3847_63627C.1.pep
NFRALYCLSFFAYCCTFFVLDISWSVLFLVSLSLFFFYSHAPILYLSSFIIFLSLHSSFTFFPSSIPTHSCPSLSSRIDLIDHSHLALHFHY

SEQ ID NO: 245401 - protein, 189 aa, Glycine max
  unsure (1)..(189): unsure at all Xaa locations
  Clone ID: PAT_MRT3847_63628C.1.pep
TFSSTTLGELKLRSSEMRKIIATLRALVEVLXSLSKDADPSGVGGLIMEELRKIKKSSVTLSGELTPYNIIPLEAPSLTNPIRIFPEVKAAISAIRYTDQFPRLPAGLRISGQRDADMFDLLEFVFGFQKDNVRNQRENVVLMIANKQSRLGIPAETDPVSYFMNSFCRLFAFLFYYPPPPPPPKKNIY

SEQ ID NO: 245402 - protein, 63 aa, Glycine max
  Clone ID: PAT_MRT3847_63629C.1.pep
KFLIFKGIHYHKSKNLWYIKCIGLRAILHAIQFPFLLHLKMLFSRIVFGYILFFWVHFPRIFI

SEQ ID NO: 245403 - protein, 39 aa, Glycine max
  unsure (1)..(39): unsure at all Xaa locations
  Clone ID: PAT_MRT3847_6362C.1.pep
PLLPTVVRPGLLAAAPNHLTTVGSSXFMXSEEXARPWMI

SEQ ID NO: 245404 - protein, 353 aa, Glycine max
  Clone ID: PAT_MRT3847_63630C.1.pep
MEANSGASDRISRIAGHLRPQREDDVCLKRSDCRAKGGVSGFKVAILGAAGGIGQPLAMLMKMNPLVSLLHLYDVVNTPGVTSDISHMDTGAVVRGFLGQQQLEDALIGMDLVIIPAGVPRKPGMTRDDLFNINAGIVKTLCEAIAKCCPKAIVNVISNPVNSTVPIAAEVFKRAGTYDPKRLLGVTMLDVVRANTFVAEVLGVDPRDVDVPVVGGHAGITILPLLSQIKPPCSFTPKEIEYLTGRIQNGGTEVVEAKAGAGSATLSMAYAAVKFADACLHALRGDAGIIECAYVASQVTELPFFASKVRLGRVGVEEILPLGPLNDYERESLEKAKKELAASIEKGISFIRK

SEQ ID NO: 245405 - protein, 280 aa, Glycine max
  unsure (1)..(280): unsure at all Xaa locations
  Clone ID: PAT_MRT3847_63631C.1.pep
VVPTVVIDLVDQLKVKYSIQLILEVFNNPXSPYSQWKTKPYKNDPVTQKVIELCKANHYTYGYRKITALINQCYTSPINHKRVQRMMQKHHLNCRVRPKKTTRIGKPYYKTDNLLQRQFKASCPMEVLTTDMTYLPFGHSMLYLSSIMDIYNGEIMAYKIDDKQDQRLVNDTLNQIDIPEGCILHSDQGSVYTSYAYYQLCEEKGIIRNMSRKGTPADNAPIESFYSSLKSETFYINNQLNSSDYIIIDIVEKYIKNYNNNRIQQKLGYLSPVKYRELIA

SEQ ID NO: 245406 - protein, 98 aa, Glycine max
  Clone ID: PAT_MRT3847_63632C.1.pep
MDSKDINGCLMDKHKPVVTSSLVCEKVEDHVNGEDDSDSNSLLPPRRGGMSRNCEKTRRKVQWNDRNGNKLAEVLEYEPSDVSDSEDEDSDSCICAIM

SEQ ID NO: 245407 - protein, 99 aa, Glycine max
  unsure (1)..(99): unsure at all Xaa locations
  Clone ID: PAT_MRT3847_63633C.1.pep
IXLWRXXSVXXVXXXXXGIGSQFWLXXVVQASFGXGXGXXVXLXNGXXSXSXSRXEEXXCXXPLXRXSAAXLTXXXSXXFXXCXPXXXGGGXGXXHRAX

SEQ ID NO: 245408 - protein, 69 aa, Glycine max
  Clone ID: PAT_MRT3847_63634C.1.pep
CLHFTPVQHLIQTGTFKRVFPPLVFLQSAPGGTPGGGGTLITSPYSFLPTNIVETPTGGALWTVSTGTT

SEQ ID NO: 245409 - protein, 64 aa, Glycine max
  Clone ID: PAT_MRT3847_63635C.1.pep
KMPDIMFMIHLVKSRSWLWFISNRELKVIPCSQYGAHKSNANYEIHLYRLNYYVCFCNIGNRLE

SEQ ID NO: 245410 - protein, 232 aa, Glycine max
  Clone ID: PAT_MRT3847_63636C.1.pep
MPKRTTHTYSSEDAAPEGPHSDLFVYYCKHCGSHVLITDTQLQKMPKRKTDKAYVLDKSKHLARLNMKEGGKVVLKRGEGKMEKQFRMNCMGCGLFVCYRAEQELELSSLIYVLDGALSTVAAETNPQDAPVPPCISHLEGGLVQLAIEVEDRAQRSAITRVNADDVRVTVAAPAARGEANNELLEFMGKVLGLRLSQMTLQRGWNNKSKLLVVEDLTARQVYEKLLEAVQP

SEQ ID NO: 245411 - protein, 99 aa, Glycine max
  Clone ID: PAT_MRT3847_63637C.1.pep
LNQMQLSTMKNVYRESALPGESKENPVGNFRIHMATSLHLTSRLRKGQNFCKYLRLQLVTDFFVYKKIKKPGPSVSTNIFHVAGAQKLQKVQLVHYEPR

SEQ ID NO: 245412 - protein, 134 aa, Glycine max
  Clone ID: PAT_MRT3847_63638C.1.pep
DFTQLPQGGRNTLEEAGWKVGRSPIFETVTAADGTVKLLLKLEDNRLIETVGIPVMVDKGLTRLTACVSSQVGCPLRCSFCATGKGGFSRNLQRHEIVEQVLAIEEVFKNRVTNVVFMGMGEPMLNLKAVLEAH

SEQ ID NO: 245413 - protein, 55 aa, Glycine max
  Clone ID: PAT_MRT3847_63639C.1.pep
YPHEHNITGYIGNIKGANEYINNRPHLILTDSCDLLTHNSTAHTNREAILTLSSW

SEQ ID NO: 245414 - protein, 49 aa, Glycine max
  Clone ID: PAT_MRT3847_6363C.1.pep
DWFDNKHVVFGRELEDGILVVRKNYFVETGAYKRRKIVCVSMECGEMKI

SEQ ID NO: 245415 - protein, 212 aa, Glycine max
  Clone ID: PAT_MRT3847_63640C.1.pep
MGICFSIEDPNNLSISDSNAKPNKPAGHESGAPLASMNIKDLREGAGYSNVDIFTYEELRLATKHFRPDFILGEGGFGVVYKGVIDHSVRSGYMSTEVAIKELNREGFQGDREWLAEVNYLGQFSHPNLVKLIGYSCEDDHRLLVYEYMASGSLEKHLFRRVGSTLTWSKRMKIALHAARGLAFLHGAERPIIYRDFKTSNILLDADFNAKL

SEQ ID NO: 245416 - protein, 116 aa, Glycine max
  unsure (1)..(116): unsure at all Xaa locations
  Clone ID: PAT_MRT3847_63641C.1.pep
MGICFSIEDQNHLSISDSNAKPKPAGHESGAPLASMNIKDLREGAGYSNVDIFTYEELRLATKHFRPDFILGEGGFGVVYKGVIDHSVRSGYKFTEVAIKELNREGXQGDREWARE

SEQ ID NO: 245417 - protein, 206 aa, Glycine max
  unsure (1)..(206): unsure at all Xaa locations
  Clone ID: PAT_MRT3847_63642C.1.pep
PTTHKVMDYLRDVFIDNQSFSIRTGVSSFSDQVARIIQVLDSSLEAKSKNYTDPALGHVFMINNLMLLQYEKYIYRVVIFGEDWYKSKINQNIELYQRSSLDKILDFLNLDSNELLLAESMKKKLKLFNQHFNEICKAQSEWLIFDEQLKEQMIKSIENKLXPAYGTFLGRIHDVLGKDAYDFIRYGIQNIQDLLSGLFLVIQHEG

SEQ ID NO: 245418 - protein, 118 aa, Glycine max
  Clone ID: PAT_MRT3847_63643C.1.pep
LLLVVLACGPWFAACFCRVFGGCLGRFRLVGLWFLWVGVPRSRGRLWLCVLRPCVFGRLPLVWFGVCAGAVWCSGRPCFLWFRVWGFAFSSKRSPVPARPGGVLFGVARRARAGFRAS

SEQ ID NO: 245419 - protein, 57 aa, Glycine max
  unsure (1)..(57): unsure at all Xaa locations
  Clone ID: PAT_MRT3847_63644C.1.pep
HVADYLTTVIHAHXEMISSDLRCDXCHVVTKLLFIQSQSRLYSCLFSLSLTSSSLEP

SEQ ID NO: 245420 - protein, 90 aa, Glycine max
  Clone ID: PAT_MRT3847_63645C.1.pep
LRVRILKGFKMTEADTDDVGTKCNFSFAFNNINFSDRILNIEVIPDPHFIRAQSHSLSTLAPNRKRRRLSLMKGNFESFTHTHKHFNSAS

SEQ ID NO: 245421 - protein, 54 aa, Glycine max
  Clone ID: PAT_MRT3847_63646C.1.pep
SQSEIVKLSALSIEIKLHVIRAVSSCKLRQIRMRLLETQQVQSDKAFDTMVERP

SEQ ID NO: 245422 - protein, 589 aa, Glycine max
  Clone ID: PAT_MRT3847_63647C.1.pep
MSFEEKPVSVGPWGGNGGYHWDDGVYSTVRQLVIVHGEGIDSIQIEYDKQGSSIWSLKYGGSGGYKIDKIKLDYPDEFLTSIDGYYGSLSQWGPIFIRSLSFESNKKLYGPFGVEQGTYFSLPMTGGKIIGFHGRYGWHLDAIGVNVKSSQQQKPSKALSFSQNYMTNTNDNASYSVIQGSVGQGYDIVLALKQKDDFGKSPTVKISSFKEPNNVEPKEKVVFVEKVPPMVEGVVTYGPWGGTGGYVFDDGPYTGVRQIDMSRNVGIVWIRALYDLDGEPVWGYKHGGAGGFKHEKIIFDFPYEVLTHISGYYGSLMYMGPAVIRSLTFHTTKRSYGPFGDEYGTYFTTKLREGKVVGIHGRFCLFLDSLGVHAIEGKVIVPVATSPSMEIISREPSISEIDNPQWLVVAKPAPVEQASRCVIKEPAPCGPGPWGGDGGRPWDDGVFSGIKQIYLTKAPEGICSIQIEYDRYKQSVWSVKHGGNGGNTMHRIKLEYPNEVLTCISGYYGSVTADEQPIIIKSLTFHTSRGQYGPFGDEVGKYFTSTTTEGKVVGLHGRSSMYLDAIGVHMQHWLGGIQKTSKLSFFKLF

SEQ ID NO: 245423 - protein, 134 aa, Glycine max
  Clone ID: PAT_MRT3847_63648C.1.pep
AQGYGSLGMMTSELMTPDGLTMESEAAHGTVTRHYRQYQKGQETSTNPVASIFAWTRGLAFRAKLDDTPALAEFAKDLEAACVEVIDKDSVMTKDLALAMKGKNMQRGDWVTTDEYMKAVNNKLIEKIKARTSA

SEQ ID NO: 245424 - protein, 49 aa, Glycine max
  Clone ID: PAT_MRT3847_63649C.1.pep
EQQTRKAGALGGGCWRARTIISLRNASSLPLTKPLVNAIISCTLGISKR

SEQ ID NO: 245425 - protein, 93 aa, Glycine max
  Clone ID: PAT_MRT3847_6364C.1.pep
HEGHLAKTIAKCRLNASRLHTPPQNMMTTEIEREKEVSNKGQPGLTTQHSLMSDRELHRQPPPRRRWTSATESWEWCGGSVSLPITGVEEPML

SEQ ID NO: 245426 - protein, 78 aa, Glycine max
  Clone ID: PAT_MRT3847_63650C.1.pep
MEGGGSTPAAPIPNANAPPPFLSKTYDMVEDPSTDAIVSWSATNNSFIVWDPPEFARDLLPKYFKHNNFSSFVRQLNT

SEQ ID NO: 245427 - protein, 108 aa, Glycine max
  Clone ID: PAT_MRT3847_63651C.1.pep
FCLFFFFFFFVFFFFLTSLQSLFLFKMKPIRAKHALQSYKAQRSLPGNGSLRTISEMDRMNVGLAVVVVDDSAIQELKVSVNLAFYNLLHCLRRDSSKIDTYLKQLML

SEQ ID NO: 245428 - protein, 399 aa, Glycine max
  Clone ID: PAT_MRT3847_63652C.1.pep
CLDDGCCRSYEDKIHGILSKGLNDRAQFIQWSVDDGLSVLDKVPLFVGFSVSSLEKAFRMVDIGPNAESKEEALEFRKFWGEKAELPTRPPTRPAESTVWESEQWARHLVLKRIIDHVLSRHLSLSKENIVVVVDQLDFSLLHGAGDPISYSGSLLGAFDVLSKRLRLIEDLPLKVSSVQPLDSAFRFTSVFPPEPHLLANEKNESLRLNKLVPSCIQPLEVMIQLEGSGNWPMDEIAIEKTKSSFLVQIGVSLQKMWGMTCTATEDNVDVLVSGYAFRLKILHERGLSLLNKEIGNDQAKRIPSADKKLFIRSQHANMINGLQSRYAIFGPVVRLAKRWAASHLFSSCLVEEAVELLVAYLFLNPLPYDVPCSRITGFLRFLRLLSHYDWTFSSLIVD

SEQ ID NO: 245429 - protein, 78 aa, Glycine max
  unsure (1)..(78): unsure at all Xaa locations
  Clone ID: PAT_MRT3847_63653C.1.pep
MADAXQNKYDSSDVDXQDRRVFHFLGKXKDEEDKPHLQEEVIATEFQKVTVSDXGENKYSLLEKLHXSDSSSSSSSEE

SEQ ID NO: 245430 - protein, 111 aa, Glycine max
  unsure (1)..(111): unsure at all Xaa locations
  Clone ID: PAT_MRT3847_63654C.1.pep
GFHSDFVSLVPNFVTPSDVKGEGKGMRIWGSEIVFAILLCGTLSCTAQAHHITASTCPARSILDFVLGFSDFTCQLPNSLGSIAVTEGDEVSLQKVLNMVHXNNHEHVAVL

SEQ ID NO: 245431 - protein, 193 aa, Glycine max
  Clone ID: PAT_MRT3847_63656C.1.pep
IALSLIGPLNRGTEQTRCVPSFTLPCISIIYPYAYILGILAYYVAPFTYASAIVSSSSEEVKGIITGQRHDLEGRRLALEKKFVPTVKARLKGICGPSSISAKRNLAATHEQRMSTISVEREARERVIDSLHQEATMWTDRFALTLNRSQELPRLLAKAKAMADTYSAPKKIHGLLSYCQHMIDLMDHMIRNR

SEQ ID NO: 245432 - protein, 148 aa, Glycine max
  unsure (1)..(148): unsure at all Xaa locations
  Clone ID: PAT_MRT3847_63657C.1.pep
MSLHHRREEEMLGSSESSPYSPKSIKHTRSLXPRSINYLLREQRLLFILIDSTFFIIQPTLSCMGPPEPVHXIPPSNRACSLQRHKAHTGRVPIWIGGRRQRIIVTDGSSFIESHLIDKLIARGDDIIVIDNVFTGRKESLMHLFGNP

SEQ ID NO: 245433 - protein, 151 aa, Glycine max
  Clone ID: PAT_MRT3847_63658C.1.pep
IHHISPTIPFLDSKTESIINPFLIETLQNPHHHLTILKIKLKIQKFLNNTNQLHFKFHHFPSSYLRLTTHHITQHYNIQTIIQDNNLNDQRSEILIRKLPKSKYPIVRLSEVPTKQLEDDRSEQREMGIRPRPSENSLNNADVVGNRITPV

SEQ ID NO: 245434 - protein, 90 aa, Glycine max
  unsure (1)..(90): unsure at all Xaa locations
  Clone ID: PAT_MRT3847_63659C.1.pep
MDYSSEEDSDISESEIEEYAEKPYEQLRAGKYKVKNLNGTLRCPYCAXKKKQEFKYKDLLQHASGVGKGSANRSAQXKAXHLALAKYLET

SEQ ID NO: 245435 - protein, 170 aa, Glycine max
  Clone ID: PAT_MRT3847_6365C.1.pep
EEEDNGIETLRSGEVERQKEESGCMEEESIGLGKSLVVEKEGEIECEEEQEEGEEIEALRNEEVEDKEGVGTSSVAENCLMKEEGGDYERAEGDGKKKDLLEKMVEDNQKMVEMMTQLFQRNEMQTTLLTSLSQRVEQLERALACEKLRRKKKRKADAKIKRNNPKNGFI

SEQ ID NO: 245436 - protein, 43 aa, Glycine max
  Clone ID: PAT_MRT3847_63660C.1.pep
GSSTIIHEAYTFSRSDLDGGPGAIRLMVMTQCIAYHWAYMGSY

SEQ ID NO: 245437 - protein, 45 aa, Glycine max
  Clone ID: PAT_MRT3847_63661C.1.pep
FKRTRAKKKPLKSSFLLCSHQGSPPHKSIPLKGFLPPVPLKPNSV

SEQ ID NO: 245438 - protein, 240 aa, Glycine max
  Clone ID: PAT_MRT3847_63662C.1.pep
TLISCRCLLEELISVFFVIFPNQRCAPQHILTKAFNFPTPFQMLAKAHNKGDGSKSLAKILAKWKEYNAQIDSSSDADKPIRKVPAKGSKKGCMKGKGGPENSRCNYRGVRQRTWGKWVAEIREPNRGNRLWLGTFPTAIGAALAYDEAARAMYGSCARLNFPNVSVSSFSEESSKDSPSANHCGSSMAVSANESMISPSNSGVDAEEDVDMEPISLSLSVKHENGEGESGISSSPPSSS

SEQ ID NO: 245439 - protein, 81 aa, Glycine max
  Clone ID: PAT_MRT3847_63663C.1.pep
YKNNQFTNLSDIVDLKYILYIAHLDFYDEELSGYSDKALTLTRKECGNKGLVQPNTPRHDHLPLVDVDKLQPYELGYLEEI

SEQ ID NO: 245440 - protein, 45 aa, Glycine max
  unsure (1)..(45): unsure at all Xaa locations
  Clone ID: PAT_MRT3847_63664C.1.pep
KLHDVSGEPIWMVPFSVAFEPXEPDEEPIKHMIYREALALDSESA

SEQ ID NO: 245441 - protein, 84 aa, Glycine max
  Clone ID: PAT_MRT3847_63665C.1.pep
LFLTPEVDEATTKLVNSPLCCLRFRLKQRPFNDPPTQLELDSHNTMGFYNSVDFGEETAMRATISLMTPTPISHPHNSSSRTTS

SEQ ID NO: 245442 - protein, 45 aa, Glycine max
  Clone ID: PAT_MRT3847_63666C.1.pep
LGFNSQSWSLQFPIPNNVNLNPRVPPDQPKGFHHRKPNRSVKGIN

SEQ ID NO: 245443 - protein, 112 aa, Glycine max
  Clone ID: PAT_MRT3847_63667C.1.pep
SSSKYKAKHDSSSKPTSPMATRINCTKAKAIANRIQLIGNNYEAALPVVCVPHIMQPNNLLFRVKLHFKQRCHLAASKKCVCSANKLTEYFPNLYFDSHVENISKGSIKSSP

SEQ ID NO: 245444 - protein, 61 aa, Glycine max
  Clone ID: PAT_MRT3847_63668C.1.pep
NYLKSKMEIKIMLLLLVFKLITCKENKKYDTNFYDKKLRFIFKLIRNRQLTQQIFSNNDNI

SEQ ID NO: 245445 - protein, 91 aa, Glycine max
  Clone ID: PAT_MRT3847_63669C.1.pep
ARGYVGLTLLRLILFSYDYIRDPILDPYSDNGEFNRMRSSGLSNLWYHWCSSSHHYGFSCNCCPHSTKKQHSEIILTLNSSISIVTCKLFL

SEQ ID NO: 245446 - protein, 155 aa, Glycine max
  Clone ID: PAT_MRT3847_6366C.1.pep
SWWWRSFSQFSMAEFCQSELHFFTLNIFKNSTLTLAKSGSFGFFDCVRWCCASSPSSTSSYPLFSTLLFLELSISRNLSNPNDISRHYLNLETCWSCLGGGGGNPLNPRTFPEEAQHNNSEESKSLRTKNFNLSSQTQRKRLLVFFCLTSEDLKD

SEQ ID NO: 245447 - protein, 53 aa, Glycine max
  unsure (1)..(53): unsure at all Xaa locations
  Clone ID: PAT_MRT3847_63670C.1.pep
GLLNTDEALAIYIWPQLNRHFSFIYCVEDXXXQNKLEECESCFEKLDLDFEPI

SEQ ID NO: 245448 - protein, 65 aa, Glycine max
  Clone ID: PAT_MRT3847_63671C.1.pep
LNSINWPHLPTLANWENRERAALTRLVPHPPIPSCESSEACLKRSTFPTFAQFARREGHTLQRLY

SEQ ID NO: 245449 - protein, 74 aa, Glycine max
  Clone ID: PAT_MRT3847_63672C.1.pep
LQTNQRHVFIKLGGPHEQQHVPHMAKLPSEVRKYRTQLAEQDILAIPAGYTVADNATSNLNYFAIGINAQSTKK

SEQ ID NO: 245450 - protein, 56 aa, Glycine max
  Clone ID: PAT_MRT3847_63673C.1.pep
MPPTHGSRNIMFPPHEFLARTRGFPLSVHEGVGSSLKGKNGRSVRNLIGKKVGFED

SEQ ID NO: 245451 - protein, 97 aa, Glycine max
  Clone ID: PAT_MRT3847_63674C.1.pep
RINVKIRLVWYAQLVQVKRRNFQIYEIISTSLFPMRQAPKEKAPNQICPNKLFDLKTPNFLHVKKKKRKPKISESKSTKREEQQQLEKVASKCPEIK

SEQ ID NO: 245452 - protein, 102 aa, Glycine max
  Clone ID: PAT_MRT3847_63675C.1.pep
MYVDHAFSISDEDVMMGTSYTVNNKPPIKEIALAVSLLVCGVLGIVIGSLMAYNHVGGDTAHGIFFAILGFILFIPGFYYTRIAYYAYKGYKGFSFSNIPPV

SEQ ID NO: 245453 - protein, 84 aa, Glycine max
  Clone ID: PAT_MRT3847_63676C.1.pep
MYVDHAFSISDEDIMMGTSYTVNNKPPIKEIALAVSLLVCGVLGIVIGSLMAYNHVGGDTAHGNNKKKAIFFSILKKKNVNFQI

SEQ ID NO: 245454 - protein, 69 aa, Glycine max
  Clone ID: PAT_MRT3847_63677C.1.pep
KFTQDVYFCTFHHAIHSIPFRSQQNSFLGIWMHLYSFGVKIICFNIFGWNLCSMQFFIYHNHYESFIDG

SEQ ID NO: 245455 - protein, 204 aa, Glycine max
  unsure (1)..(204): unsure at all Xaa locations
  Clone ID: PAT_MRT3847_63678C.1.pep
MILLFLHFMPIGVPRVPFRSPGEEDASWVDIYNRLYRERLLFLGQEVDSEISNQLISLMVYLSIEEENKDLYLFINSPGGWVIPGIAIYDTMQFVQPDVQTVCMGLAASMGSFLLAGGEITKRLAFPHARVMIHQPAIXFYEAQTGEFILEAEELLKMRETITRVYVQRTGKPLWVISEDMERDVFMSAAEAQAYGIVDLVAVE

SEQ ID NO: 245456 - protein, 101 aa, Glycine max
  Clone ID: PAT_MRT3847_63679C.1.pep
AGSPEDAEYGDGVVEGWAFRKSAMHEVHAGAWLSRDGKEVAVLGVTLAQWSTMEGDSCRVGSHAMEVTVLAKRRRHSLWVFVHPRKGNVLEKKEKPKLLIP

SEQ ID NO: 245457 - protein, 185 aa, Glycine max
  Clone ID: PAT_MRT3847_6367C.1.pep
MIKRSPSRNNRSKGIKVKHVLQIILLLGVCFWLIYQVKHSHDKKKEFEENDAKVSVGTQTAYQTLKLGRKDLHPGKDEVNQNEKHEEEEEDDNVEDAYKHDHNEHEEEGNEHESEEKGDKRGVRGGGSEQEEDENKSNEVEDQRGGGDDEIDENDQEQSAVDTDHDEEFTDEEKEEESDEKEKEK

SEQ ID NO: 245458 - protein, 51 aa, Glycine max
  unsure (1)..(51): unsure at all Xaa locations
  Clone ID: PAT_MRT3847_63680C.1.pep
QPHAYKAMGVKFPQGKTVVKFRPQNIKQCSFKKYPQRXFSNFKDFXKHRHK

SEQ ID NO: 245459 - protein, 134 aa, Glycine max
  unsure (1)..(134): unsure at all Xaa locations
  Clone ID: PAT_MRT3847_63681C.1.pep
TFTTGGGTDCDGVGILGITWAFDDMIFILDYCTASILRGHINPAATFQLFLGHKVSLIRSLDXMXTQCGPAISGTALAKVFQXAYYTKCGRGTNSLDDGYNKSTAMRAVNIITLNLGYTDSIATDPKRYSLYSD

SEQ ID NO: 245460 - protein, 39 aa, Glycine max
  unsure (1)..(39): unsure at all Xaa locations
  Clone ID: PAT_MRT3847_63682C.1.pep
SPLEAHKSHTIDYTXXSXDXGNDNPINADIELDYTEADQ

SEQ ID NO: 245461 - protein, 126 aa, Glycine max
  Clone ID: PAT_MRT3847_63683C.1.pep
NKLSKLPDTIGFELINLKKLSVNSNKLVFLPSSTLHLTALKVLDARLNCLRALPEDLENLINLETLNVSQNFQYLETIPYSIRLLWSLVELDVSYNNIKTLPESIGCLKNLQKLSVEGNPLTCPPM

SEQ ID NO: 245462 - protein, 71 aa, Glycine max
  unsure (1)..(71): unsure at all Xaa locations
  Clone ID: PAT_MRT3847_63684C.1.pep
LEIINYGVNIIVRLWRIGSGKFKEDLKPLIGLIFKNSLANWKIIVVTSKKHLTISIKSNLFTTRVEXVRPR

SEQ ID NO: 245463 - protein, 115 aa, Glycine max
  Clone ID: PAT_MRT3847_63685C.1.pep
FLVLIFAPSFSVSLDPSLCGLSHSVSLDSYTLKRGGVAVEAVSSATVEVATLYVSLFLFRSTPNLLSLYANFLVSVNVSFSRTLCAHCLRRTLVLTVSGERLKCFGEQNRESKTP

SEQ ID NO: 245464 - protein, 170 aa, Glycine max
  Clone ID: PAT_MRT3847_63686C.1.pep
SRVRSNKEDIFTRSKNGLTNMEVEVKQQEGFYLKAIVTDVLENSLDVVYDRGCRKPETVEFSQCRAVIIENAQQKRPSKCGDIVDALVPIDKNNDDFQAYKKMKIREIKGDFAVVCSVDNSGDGNVSALGSEVIPLDQCRHPAMCMLIDASSVKQCTISVPDDLVNYFVH

SEQ ID NO: 245465 - protein, 68 aa, Glycine max
  Clone ID: PAT_MRT3847_63687C.1.pep
KIDVVFLLKLKTPNPFLLPLSLENPFLSSRLSLPSACYLATTDDCHRHVRHHHHCSWHSAILRNLHLR

SEQ ID NO: 245466 - protein, 46 aa, Glycine max
  Clone ID: PAT_MRT3847_63688C.1.pep
ADADAVTRRGSYSRPSKGFSFCFPTWLPLRKLKRPMEASTTGSLLS

SEQ ID NO: 245467 - protein, 63 aa, Glycine max
  Clone ID: PAT_MRT3847_63689C.1.pep
RCASFGHEYQLWRNVKGLMEPLRAHFITCPSLKFKGVATLTQSTVEESRGVGGGAYGVGVTVN

SEQ ID NO: 245468 - protein, 85 aa, Glycine max
  Clone ID: PAT_MRT3847_6368C.1.pep
FQFFIWSGPLLARSTFFFFLDSWGFSPSSLHVPALGQSQFFSLLILSLPLAFFPLTYVFFLVLHWVLNPSVDYEPVVRLHFSVRK

SEQ ID NO: 245469 - protein, 156 aa, Glycine max
  unsure (1)..(156): unsure at all Xaa locations
  Clone ID: PAT_MRT3847_63690C.1.pep
WAPPGFLMGAVXGSRFVGGPPGGGPGPIFPGGGFAPLGLVFDPRAFFGLKGKGPQTGRWARFFMLGFFVRALFPGKGPLGNPPGPLVGPVPNNAWGFAPPFVPGKWGPKNEKPFEGFLFWVWGGPPQNVNFFGGPNPPFCFLLFSKPQGPFVFPFF

SEQ ID NO: 245470 - protein, 75 aa, Glycine max
  Clone ID: PAT_MRT3847_63691C.1.pep
NHRMLHFILLLLNGFTMCIWLSSGVISFLLLCSQFSLWLFIYFLILLTYCSKEINGIYCLCRVGSNYFSNQSFTH

SEQ ID NO: 245471 - protein, 181 aa, Glycine max
  unsure (1)..(181): unsure at all Xaa locations
  Clone ID: PAT_MRT3847_63692C.1.pep
MLSARFRGSIQRLHPFPRRMMHVSGAAAAPYRNAAIAAQTEGIRKPDLDDRSYRHLLLRNGMEALLVSDPTTDLAAAAVDVNVGHFSDPDDFPGLAHFLEHMLFMGSKTYPDENAYSKYLSENGGHSNAFTSMENTNYYFDVKWDKFEGALDRFAPFXTCPLLSESGTEREMQAVDSENQK

SEQ ID NO: 245472 - protein, 43 aa, Glycine max
  unsure (1)..(43): unsure at all Xaa locations
  Clone ID: PAT_MRT3847_63693C.1.pep
XXXVRKXGIRLEXSNQAXKNKTSXXXLAXRLXXXGYHPVXXXX

SEQ ID NO: 245473 - protein, 119 aa, Glycine max
  unsure (1)..(119): unsure at all Xaa locations
  Clone ID: PAT_MRT3847_63694C.1.pep
PKSKGNTPHCCTKNPTAVDLLPGVPYNQQYSNCCKGGVXAAWGQDPSQAIXSSQASVGQAGTSNKTGKLPKNPTLFAPGPAYTCGPAKTVPPTNSLTPDKRRKTQALMTWNATRTNSQA

SEQ ID NO: 245474 - protein, 157 aa, Glycine max
  Clone ID: PAT_MRT3847_63695C.1.pep
VSYYFPLKTMWRSFFCALVAGVILRFVNPFGSDQTSLFHVDYSMRWTFMELIPFAMLGIFGGVLGSLFIWANIKWCAYRKNSRWLGANPINEVLIVSAITGAISFFNPYTRKSASSLIKQLFDRCGPEDYTMDLCDYNRNLTYGVCWGQSGRQLPHR

SEQ ID NO: 245475 - protein, 30 aa, Glycine max
  Clone ID: PAT_MRT3847_63696C.1.pep
HIRSSGYVRAHLMAGFRLVRLHCKILQLLC

SEQ ID NO: 245476 - protein, 118 aa, Glycine max
  Clone ID: PAT_MRT3847_63697C.1.pep
MAATANPIIGSHVWVEDSQVAWIDGEVLEVKGEEIKVLCTSGKTVVVKASSVYHKDTEAPPCGVDDMTKLAYLHEPGVLDNLRSRYDINEIYTYTGNILIAVNPFIRLSHLYDSHMMA

SEQ ID NO: 245477 - protein, 65 aa, Glycine max
  Clone ID: PAT_MRT3847_63698C.1.pep
GPKERVLDRVRPLTQHKTCTRNSHLSELFILDQDSRSPQDEIAIYLKDPLTNLNYCYQKNSFLWH

SEQ ID NO: 245478 - protein, 350 aa, Glycine max
  Clone ID: PAT_MRT3847_63699C.1.pep
TDQIKLRKSCEYQKRLEGNLTRKIIFNTRYFGKGREDGGPGFEEVEHVDSIFHLLEYVNAFSVSDYVPCLRGLDLDGHEKKVKEALKIIKKYHDPIVQERIKLWNDGLKVDEEDWLDVLVSLKDSNNNPLLTLEEINAQIIELMLATIDNPSNAFEWALAEMINQPELLHRAVEELDSVVGKERLVQESDIPKLNYVKACAREALRLHPIAPFIPPHVSMSDTMVGNYFIPKGSHVMLSRQELGRNPKVWNETYKFKPERHLKSDGSDVDLTEPNLKFISFSTGRRGCPGVMLGTTMTVMLFARLLHGFTWTAPPNVSSINLAESNNDILLAEPLVAVAKPRLASELYQL

SEQ ID NO: 245479 - protein, 346 aa, Glycine max
  unsure (1)..(346): unsure at all Xaa locations
  Clone ID: PAT_MRT3847_6369C.1.pep
MQMGGGSKIDLQTLDEGMQPLANGTIEDTLQSELEKILQEQRNQQFINRERDFNISRSGSAPPTVEGSFSAFGSLRNSDFGSINDRSNNNGLLTEDDIRSHPAYLSYYYSHVRPRVRXINPRLPPPLLSKEDWRVAQRFHGGGSSSIEGFGDWRKNVAPNGDSSSLFSMQPGFSVQQVENDLMELSKASGWNVSRQGSSQMLDRHMGGLTRMSGAGLGGRRTSYTDILQQEGLEQPTMLSSTMSRPASHNAFGDIMGSTGIVDRESFEGLRSSASTPGLVGLQNHGVNLSHSFAPSVGTSLSRVKTPEPQVIGRPVGSAASKWVVKFSLLRIVVWGVGSQHGHSSI

SEQ ID NO: 245480 - protein, 182 aa, Glycine max
  Clone ID: PAT_MRT3847_636C.1.pep
LEAPETFDLFDDIILISEGQMVYQGPRDHIVEFFESCGFRCPERKGTADFLQEVTLRKDQEHYWANRSLPYRYITVSEFANRFKQFHVGMQLENELSVPYDKSRGHRAALVFKKYTVPTMGLLKACWDKEWLLIKRNAFVYVFKTGQIVIIGIKAATVFFMTNMHQRNEACATVYISSNLLP

SEQ ID NO: 245481 - protein, 70 aa, Glycine max
  unsure (1)..(70): unsure at all Xaa locations
  Clone ID: PAT_MRT3847_63700C.1.pep
HTHTHTHTLSHAPSLXRSRPRPGARSPSPPPLTHRPRLPAPSVERRFSRIGAAHGESARRHGDRAQGEER

SEQ ID NO: 245482 - protein, 45 aa, Glycine max
  Clone ID: PAT_MRT3847_63701C.1.pep
MLEIFKFYIGCFKKKKKKKKKKKKKKKKKKKKKKKKKKKKKKKKK

SEQ ID NO: 245483 - protein, 86 aa, Glycine max
  Clone ID: PAT_MRT3847_63702C.1.pep
RVRPRVRKKKKRDSPNVCAIVIFSKKGPPMSCKNGEVTMGGTPCPCVGSPPISPFLEGNGKATGLKGGLFLGFPVWKSLPLGWGGV

SEQ ID NO: 245484 - protein, 48 aa, Glycine max
  Clone ID: PAT_MRT3847_63703C.1.pep
GKNILLIIILQCTICYLKNANKQSTLFYTYITKNNLYNTPNLFQFRNF

SEQ ID NO: 245485 - protein, 316 aa, Glycine max
  Clone ID: PAT_MRT3847_63704C.1.pep
GTRPTSLGHKNASSPISFPSSGNELSSQSQGSKWGSQWKKHSSFNLNSTNPFHVRGSKEFSGTYCSMIRIQQLCTDSQKLKEIEYMLRRFRSLVSRLEDVNPRNMKHEEKLAFWINVHNSLAMHALLIYGISANNVKRMSSVLKAAYNIGGHTISVDLIQNFILGCRLPRPGQWLRLWFPSMTKPKVRDARKGYAIHRPEPLLLFALCSGSHSDPAVRLYTSKRVFEELQCAKEEYIQSTITISKEQKIVLPKMVDSFAKTSGLGASDLMEMVKPYLPDSQRKSIQEFQSKTSWKSIELTPHNFTFHYLISTELAW

SEQ ID NO: 245486 - protein, 45 aa, Glycine max
  Clone ID: PAT_MRT3847_63705C.1.pep
DRIGFNGVMWFFFLVGSCPYVKQQEFINFVMVALILSFLRNVGCP

SEQ ID NO: 245487 - protein, 44 aa, Glycine max
  Clone ID: PAT_MRT3847_63706C.1.pep
LSRGVCVKQAHFLTRKGVCLNWLVNIAFHYVYPITTIHKFNLCC

SEQ ID NO: 245488 - protein, 221 aa, Glycine max
  Clone ID: PAT_MRT3847_63707C.1.pep
MKNDHNNNNNNSAEHSKDTTVGILDSRFNQTLRNVQGLLKGGSRPGKILLSRLVDPPDNSGSKISSPNYKRSFSHNDAGTMGLLLLMQEEFQSKSKPISIANANKLKVSTSLGGSPPEEFHKSTMGARATDSARIMKFTKVLSGTVVILDKLRELAWSGVPDNMRPKVWRLLLGYAPPNSDRREGVLRRKRLEYLDCISQYYDIPDTERSDDEVNMLHQNG

SEQ ID NO: 245489 - protein, 65 aa, Glycine max
  Clone ID: PAT_MRT3847_63708C.1.pep
QSLLSYSFNMIYFISKNSIRILNHFIKGIQASTAHVKMLIKIRNSEYSYSIFGIQLDLNNQSESK

SEQ ID NO: 245490 - protein, 104 aa, Glycine max
  unsure (1)..(104): unsure at all Xaa locations
  Clone ID: PAT_MRT3847_63709C.1.pep
MRRVTGDGEKMTLVTGTTGEEAYNKLIVELEKRVATXGGIECPKDEKLPRRKMFDKPKTRCFTILPMEMNLVVRQKILNYVRFIMKKRDKLRWKVGINPYYMEW

SEQ ID NO: 245491 - protein, 147 aa, Glycine max
  unsure (1)..(147): unsure at all Xaa locations
  Clone ID: PAT_MRT3847_6370C.1.pep
MQMGGGSKVDLQTLDEGMQPLANGTIEDTLQSELEKILQEQRNRQFINRERDFNISRSGSAPPTVEGSLSAFGSLRNSDFGSINDRSNNNGLLTEDDIRSHPAYLSYYYSHESINPRLPPPLLSKEDWRVXQRFHGGGSSSIEGFGD

SEQ ID NO: 245492 - protein, 50 aa, Glycine max
  unsure (1)..(50): unsure at all Xaa locations
  Clone ID: PAT_MRT3847_63710C.1.pep
EKVVEELIHCRXRTHNLSFQSHPKRPQLTIQIIIMASFFPHSPSHWLIYX

SEQ ID NO: 245493 - protein, 189 aa, Glycine max
  Clone ID: PAT_MRT3847_63711C.1.pep
MKEKTLSMAHQYSSSNESDSQIIPPQPFKLKKPHQPKGKQMGQEQENESQYLEELVSDSRYGEELVLDCQSGKYSGKDNNILGQIPSASKIHNKVEIALDHNATKEGITSVEGDHQDSGREKLKRHRVEVAGRVWIPDIWGQEEILKDWIDCTAFDAPLVPSRIVMARTALVEEGRRATSGGLRIENRC

SEQ ID NO: 245494 - protein, 48 aa, Glycine max
  unsure (1)..(48): unsure at all Xaa locations
  Clone ID: PAT_MRT3847_63712C.1.pep
XFQDXXFXXXVSXXIXXVXXXXPLXTVEKTKKSIXXLGXRPDXCQRRR

SEQ ID NO: 245495 - protein, 63 aa, Glycine max
  unsure (1)..(63): unsure at all Xaa locations
  Clone ID: PAT_MRT3847_63713C.1.pep
EELKGVPRKPCNFSPLGLTTGKLSXXCMVFFFREQKFRVLGTTEVSTKVHVVSWLHVKLVRCX

SEQ ID NO: 245496 - protein, 243 aa, Glycine max
  unsure (1)..(243): unsure at all Xaa locations
  Clone ID: PAT_MRT3847_63714C.1.pep
MTHPYCSNDFNAWFDLNSPCLFSTSSSPCSNNPPFYFPTSNTNYLHNCTNNDISFTQRIQSSPSSFPLPKEELPLLNLSPARGEDLESSFSAMKVNKEKEKELSMSANNNSLDDETAVTVALHLGLPSTTTTTTSSADLTSNVYSDKEDKKDTVASEYSPTRINKGQYWIPTPAQILIGPTQFSCPLCFKTFNRYNNMQMHMWGHGSQYRKGPESLRGTQPTAMLKLPCYCCAPXCKNTIDHP

SEQ ID NO: 245497 - protein, 74 aa, Glycine max
  Clone ID: PAT_MRT3847_63715C.1.pep
KFFFYCVGTKPKIKTKNQKRLKNTVLRAKNVRVKKQYFTPNPNGFFPKPDLGTKTPHRVRAPHNPRPEKNIVFL

SEQ ID NO: 245498 - protein, 60 aa, Glycine max
  unsure (1)..(60): unsure at all Xaa locations
  Clone ID: PAT_MRT3847_63716C.1.pep
PLIRKIFQEDYTAETPEEKKTPFKXERQPNKDQTDHKGQNTEPQTDKEPARLKAQRLTYI

SEQ ID NO: 245499 - protein, 48 aa, Glycine max
  Clone ID: PAT_MRT3847_63717C.1.pep
RFRFHIDYNIYLYPEHLCKPGSVILPCSSNSVMCINFHSSDQGCFGLL

SEQ ID NO: 245500 - protein, 68 aa, Glycine max
  Clone ID: PAT_MRT3847_63718C.1.pep
PSPLALAGTQTPTRDSRAPLWGHYGLGSTICNAPREHGQQCRPIQATPLHASSRGLTPPTLYLFPKES

SEQ ID NO: 245501 - protein, 54 aa, Glycine max
  Clone ID: PAT_MRT3847_63719C.1.pep
PEVPATFLPNLIYFFGTREALYPPWGVSSLNGGGSSKNELGFFITWVLFLGRAL

SEQ ID NO: 245502 - protein, 66 aa, Glycine max
  Clone ID: PAT_MRT3847_6371C.1.pep
MKDRKGNGNRMVEKKLRELEMLDMSDVDYVLDIEEVLHYYSRLTCPVYLQIVDKFFMEMCSEFFGA

SEQ ID NO: 245503 - protein, 59 aa, Glycine max
  Clone ID: PAT_MRT3847_63720C.1.pep
IFLFHISYFMRLLGLPIRVLGPNGCSCIQSSHLHWGKCQTHLRGSSEKPNVVWTCELSE

SEQ ID NO: 245504 - protein, 58 aa, Glycine max
  Clone ID: PAT_MRT3847_63721C.1.pep
GIILIFPSPVQGSPRSDAPSNLAFPIVVNVNCGHMRNTTPVFFNLLFLATFSLLGKIC

SEQ ID NO: 245505 - protein, 72 aa, Glycine max
  Clone ID: PAT_MRT3847_63722C.1.pep
ARAELFIYWILWSQKNTYSYFKHIKRYPPVFLHNTRHQKNCKNHSGPALVEPNNCLRAFDFDNQIQKTAADQ

SEQ ID NO: 245506 - protein, 278 aa, Glycine max
  Clone ID: PAT_MRT3847_63723C.1.pep
ERDAFRGTAPINLTDRLHQVLRWATGSVEIFFSRNNALLASSRLKFLQRIAYLNVGIYPFTSIFLIVYCFVPALSLFTGQFIVQTLEVTFLVYLLGITLTLVILAALEIKWSGIELEEWWRNEQFWLIGGTSAHLAAVLQGLLKVMAGIEISFTLTSKSGGDDENDEFADLYVIKWTSLMIPPITIMMVNLIAIAVAVSRTIYSEDREWSSLLGGVFFSFWVLSHLYPFAKGLMGRRGRTPTIVFVWSGLISITISLLWVAIDPPSGSSLIGGSFQFP

SEQ ID NO: 245507 - protein, 150 aa, Glycine max
  Clone ID: PAT_MRT3847_63724C.1.pep
QDVVDASKQLKDLLLQLLERQRLNHGEVQAFGTPRRLVVAVENLCTKQAEKEVEVRGPPVSKAFDHEGNPTKAIEGFSRRYSVPLDLVYRKVDGKTEYVYARIKESSRHALEVLSEDLPATIAKISFPKTMRWNSHAMFSKPIRWILDLH

SEQ ID NO: 245508 - protein, 527 aa, Glycine max
  Clone ID: PAT_MRT3847_63725C.1.pep
MEPHKKHHFGTSNVPMLVQHCCLISIFIFTFFTATTTQAFDYADALSKSLLYFEAQRSGRIPYNQRVTWRDHSGLTDGLEEGVDLVGGYYDAGDHVKFGLPMAFTITMLSWSAIEYRQQIEDAGELEHTLEAIKWGTDYFIKAHTSPNVLWAEVGDGDTDHYCWQRPEDMTTSRRAFKIDENNPGSDLAGETAAAMAAASILFRKTNPHYSHLLLHHALQLFEFGDKYRGNYDASVGVVKSYYASVSGYMDELLWAATWLYKATDNKMYLQYVISNAHTFGGTGWSISEFIWDVKYAGLQLMVSKLLSEEKHKKHRDILEQYKSKAEYYICSCLNKNNDSNNVERTPAGLIYVRQWNNMQYVSTAAFLLSIYSDFLQSTNQKLNCHGGTVDHEEILNFAKSQADYILGSNPMNMSYLVGYGPNYPKRVHHRGASIVSYKKNKGFIGCTQGYDNWYGSQAPNPNVLVGALVGGPDGKDNFEDRRNNFMQTEACTYNTAPLVGVFAKFLHIENQKLVHDCNSHLVASFK

SEQ ID NO: 245509 - protein, 116 aa, Glycine max
  unsure (1)..(116): unsure at all Xaa locations
  Clone ID: PAT_MRT3847_63726C.1.pep
MQTPKTRNGSSDVPQKVSPRAVRQLKPTTLDIDSASSLSQATKSSKERSPKVTDRRSPRSPVIERKRPSKISELESQISQLQNDLKKVRDQFILSEXCKKQAQQEAEESKEQLLAL

SEQ ID NO: 245510 - protein, 262 aa, Glycine max
  unsure (1)..(262): unsure at all Xaa locations
  Clone ID: PAT_MRT3847_63727C.1.pep
SSLVVSSAPAMHYPNPPNPEKVLYINKKEAPVLRVERGVPVKFLIQAGHDVALYITSDPLGGNATTRNLTETIYAGGPEAHGVQASPTELVWAPDRNTPDHVYYHSLYDQKMGWKVEVVDGGLSDMYNNSVILDDQQVTFFWTLSKDSISIAVRGEKKSGYIAVGFGSGMVNSYVYVGWIDDTGIGHVNSYWIDGKDASSIHRTKENLTHVRCKTENGIITFEFTRPLDPSCXLEKRVECKNIIDPTTXLKVVWAMRAKWAN

SEQ ID NO: 245511 - protein, 81 aa, Glycine max
  Clone ID: PAT_MRT3847_63728C.1.pep
ITILELPVAFFTLHVAHLTVNLALLAVTVTALNRQFPQSWLTTPINLKGIIPYPSKAYIPPPPPPPPPPPPPPPPPPPPPK

SEQ ID NO: 245512 - protein, 61 aa, Glycine max
  unsure (1)..(61): unsure at all Xaa locations
  Clone ID: PAT_MRT3847_63729C.1.pep
ASCHLQXSTLSXPILNTTRVLFVLRGSVFWSHEGTVVAGGGGSKLGPWRREIRKLGKRESG

SEQ ID NO: 245513 - protein, 55 aa, Glycine max
  unsure (1)..(55): unsure at all Xaa locations
  Clone ID: PAT_MRT3847_6372C.1.pep
MGLLLALDDVETPKGSMXDLKISQSKIALPKNTAGGTILRSDLLGNFLTEGNFRA

SEQ ID NO: 245514 - protein, 156 aa, Glycine max
  Clone ID: PAT_MRT3847_63730C.1.pep
STSPMSATALLQKAAQMGSTRSTNPSIFSGSFGVMSSSSTQSTSLNSNIANQSCDQLNQAFQNFNATSSSSATMLGSSTNFSSLTHSSNGFDQFMMQNNVEPTQLKLHHPGSNSVEHNLTRDFLGVSGNGGGQVHHAFLPQELAKFASLGSSMGLN

SEQ ID NO: 245515 - protein, 51 aa, Glycine max
  Clone ID: PAT_MRT3847_63731C.1.pep
PRDGRVLPNFGDARPKAPPPQGKIIFEQYVGSHLPLKNLLENIFCNRRGCV

SEQ ID NO: 245516 - protein, 118 aa, Glycine max
  Clone ID: PAT_MRT3847_63732C.1.pep
IGPVELAAVGVSIALFNQVSRIAIFPLVSVTTSFVAEEDTLSGANPQTEEGRCLEAGQPTDTETKELLPQKGGNVHNSDFVGESFNIAKEERKRRHIPSASSAIFIGGILGLIQAIFL

SEQ ID NO: 245517 - protein, 137 aa, Glycine max
  Clone ID: PAT_MRT3847_63733C.1.pep
GPGAYNLVNREENIKWLVSLVVEEVWVAWPSHGPGYKRFLFQMKTGFGERFWEVKGPGFRLVGEAHNIQPLKTILEKGVEPTKDYIKGNQLKSNFKPVNQQAFFIASERKVHNTTLLIFGLNNTDLFNIQYYEKHGF

SEQ ID NO: 245518 - protein, 42 aa, Glycine max
  Clone ID: PAT_MRT3847_63734C.1.pep
EFSQSRFQLVGMSHVFGPSDGDVAYGHLTQVTLTIMLRSSEH

SEQ ID NO: 245519 - protein, 203 aa, Glycine max
  Clone ID: PAT_MRT3847_63735C.1.pep
MARGKVQLKRIENPVHRQVTFCKRRAGLLKKAKELSVLCDAEIGLFIFSAHGKLYELATKGTMQGLIERYMKFTRGAQPEAAAPEAHPLLVAKEETNALKQEIQTLQKGISYLFEGGNKTMAIDELQLLEKNLETWIYHIRSMKMNIMLQEIQALKDKEGTLKAANKYLHDKIVENTAISNFAEFATDTSYPLIVQDGGFQLY

SEQ ID NO: 245520 - protein, 47 aa, Glycine max
  unsure (1)..(47): unsure at all Xaa locations
  Clone ID: PAT_MRT3847_63736C.1.pep
QLGEPQLSWKAPKXSFLGRNKPFPQKIPPAEKVDFFVDIWEQKGLFC

SEQ ID NO: 245521 - protein, 123 aa, Glycine max
  unsure (1)..(123): unsure at all Xaa locations
  Clone ID: PAT_MRT3847_63737C.1.pep
APEAHPLLDAKEETNMLKQEIQTLQKGIRHLFGXRNKTMPIDELQVLEKNLETWIYHIRSMKMNIMLQEIQALKDKEGTLKAANKYLHDKIVENTAISNFAQFATDTSNSYPLIIQDEVFQLY

SEQ ID NO: 245522 - protein, 39 aa, Glycine max
  Clone ID: PAT_MRT3847_63738C.1.pep
RDSNYRLSLLKIHVGAYTSTAPLFKLTLSILELFFQYNR

SEQ ID NO: 245523 - protein, 64 aa, Glycine max
  unsure (1)..(64): unsure at all Xaa locations
  Clone ID: PAT_MRT3847_63739C.1.pep
PVRFLRVLDXWLCSCSLGRPFGLRVFWXVVCFCLLVPPPPVPLLVPIFEPIXRCSPSLGPPSSR

SEQ ID NO: 245524 - protein, 45 aa, Glycine max
  Clone ID: PAT_MRT3847_6373C.1.pep
EHVDLVASNIVKSSIFIHLDSSHSHRRICRVSHRRDKLTGIALRG

SEQ ID NO: 245525 - protein, 63 aa, Glycine max
  Clone ID: PAT_MRT3847_63740C.1.pep
TLQMTAKLDVILDRLSALTTTPLSPKSTPFHFHVDNIALQPVETMKSPPTDESRRSPKVSATT

SEQ ID NO: 245526 - protein, 175 aa, Glycine max
  Clone ID: PAT_MRT3847_63741C.1.pep
MGAQKSIHAGKAKIDVNVDFTHKLCASLMLPTLRSTGSPFSLVIGSLCIKHPNLFGGSEKLDVSWDKGLYDSNVLVAYRRPRPEWLAQQSFVLQHSLSPEIGVHGIPVNNFSRSGSGGINLSRLSVGMDLKEPASSKWSSTTSIKFEHVRPLNDDGRAICRDYDGFPLTSSLIFK

SEQ ID NO: 245527 - protein, 41 aa, Glycine max
  Clone ID: PAT_MRT3847_63742C.1.pep
LICRASRLYLMVPILALATMGLNVTDVSHLDGSEHVPTISC

SEQ ID NO: 245528 - protein, 85 aa, Glycine max
  unsure (1)..(85): unsure at all Xaa locations
  Clone ID: PAT_MRT3847_63743C.1.pep
MSGMGDRYMGIAHYTVMIRLLVKHRXSERRRIQVLRMKSSSVNGXPGLLHFSSITSEIHETAFKNESVGLVTREQYVDTRVNIHI

SEQ ID NO: 245529 - protein, 90 aa, Glycine max
  Clone ID: PAT_MRT3847_63744C.1.pep
VCTQRGDAPDATMTMSNSTELTSNGLKMVFVLGGSLAMAAATAANLMKAGYHNMITRGTHGSRCEKFKCTIIEKSNHRKSVGARTQKRWN

SEQ ID NO: 245530 - protein, 79 aa, Glycine max
  Clone ID: PAT_MRT3847_63745C.1.pep
FLVSLSFHLVSYYYPPQFRSHNNNILIYVDLYFSCCKGCSCSLFYISCQLLLIKLPHSFWGGCVRFFFSTLRLFLVHIY

SEQ ID NO: 245531 - protein, 74 aa, Glycine max
  Clone ID: PAT_MRT3847_63746C.1.pep
INSLGRLTAQSMQQPAFWLTDPVIKIPLVLKLGQTGKTFDIPRTQIGEFIVAHTLLMNALIWNRAIVNKKGVCQ

SEQ ID NO: 245532 - protein, 51 aa, Glycine max
  unsure (1)..(51): unsure at all Xaa locations
  Clone ID: PAT_MRT3847_63747C.1.pep
VLNSVQICQLHAVSCCQMEXKNKTSGKNVKTDSSMKYRVANFQVIYPLGDK

SEQ ID NO: 245533 - protein, 128 aa, Glycine max
  Clone ID: PAT_MRT3847_63748C.1.pep
PTEGKEGGGGRVAKNKNNPSAAHQKEPGPIDRPQEVGVTAEVGGTWAATFEEFTDYGINGCTFRLTVRRPGEHKVCDLNCIGLARNPIVFGQPSGSIAGGLGRWTTLVTSHINRLIPIAQRGFTGEMC

SEQ ID NO: 245534 - protein, 87 aa, Glycine max
  unsure (1)..(87): unsure at all Xaa locations
  Clone ID: PAT_MRT3847_63749C.1.pep
KILFPHVPLYKVRENFDGETVTNVYTYNISLMQYCVTIXPKKMTIHMRGLTKNNFIDXKNSTLDKFTDKNLQLNEYIPSPTPKQNET

SEQ ID NO: 245535 - protein, 59 aa, Glycine max
  Clone ID: PAT_MRT3847_6374C.1.pep
GAAYVAALKKAMDDAHVRMKVAKEGMRRKKEGFPDRVKQKSNIELKAEGKKEANVTYYT

SEQ ID NO: 245536 - protein, 58 aa, Glycine max
  unsure (1)..(58): unsure at all Xaa locations
  Clone ID: PAT_MRT3847_63750C.1.pep
MAQXXFXFTSXSXNXGHPXXLCXQISDAVLDACLEQDPXSXVXCXTXTKTNMVMXFGE

SEQ ID NO: 245537 - protein, 88 aa, Glycine max
  unsure (1)..(88): unsure at all Xaa locations
  Clone ID: PAT_MRT3847_63751C.1.pep
SRIFSMYDQIIGPVGSATVYKALGADANNMIDIAVDSFKSVENIAGNWGPGTNRTITFGDDGKTKYVLHKIXAGDNANLGYSYNVVGG

SEQ ID NO: 245538 - protein, 45 aa, Glycine max
  Clone ID: PAT_MRT3847_63752C.1.pep
NRVSCFNHCLQSQLLIIFLGHKDESHALMQIKERSCTMTLNPVFF

SEQ ID NO: 245539 - protein, 87 aa, Glycine max
  Clone ID: PAT_MRT3847_63753C.1.pep
KNIKKKRKKKKKKKKKKKKKKKKKKKKKKKKKKKKKKKKKKKKKKKKKKEGEKKLKKMKKKRGGGGGGKKGFFRGKPGLTFFYWGQF

SEQ ID NO: 245540 - protein, 84 aa, Glycine max
  unsure (1)..(84): unsure at all Xaa locations
  Clone ID: PAT_MRT3847_63754C.1.pep
MMXNSTTETKSDIPLRHAMTSMLNHNWSTPTSLTIRLRLLFRKRKKCPYRFRTRHSHIHYQQQERGGRRNNEGHRRKPHVQIYR

SEQ ID NO: 245541 - protein, 92 aa, Glycine max
  Clone ID: PAT_MRT3847_63755C.1.pep
GFPPWGQLIFKGPHFFPPKALFFKSPMKKNLFRQGNKIVGIIGDQRSVLFGAPKGENRAFKLPNPRGSIGGGLPPFQQKRKRWPPSKRKKGG

SEQ ID NO: 245542 - protein, 56 aa, Glycine max
  Clone ID: PAT_MRT3847_63756C.1.pep
HGVLLHTVPEHHEKYEDHVHSIGEKASADTQKRYAALDAKDWITMPIVPLTDKTKD

SEQ ID NO: 245543 - protein, 66 aa, Glycine max
  Clone ID: PAT_MRT3847_63757C.1.pep
GFNFLHTTTHTSSLQINLSASDFRFQSLPLAAPMAKATSLTVNPHSSTGVRIVVSGHHCTLKSILL

SEQ ID NO: 245544 - protein, 63 aa, Glycine max
  Clone ID: PAT_MRT3847_63758C.1.pep
LTHGEDSIIWRGWKKDSLCSWMNTIIVAISNESKVHMHTDPSVSVVNKSWENNTDFDDAPGRT

SEQ ID NO: 245545 - protein, 334 aa, Glycine max
  Clone ID: PAT_MRT3847_63759C.1.pep
MMGDSEVAKFGLKVGKNEKNGFPRGLDPAISKFFVQLQSVVKSRLSRLAKQDGMSLMSSVQRKGDKSFSYSEAELNEQLQAWRENPSWVDKPPLIKVTAPKGSLCNLDVEVDVGLPPDAVYNIVIDPDNRRVFKNIKEVVSRKVLVDEGHRQVVDLDQAAIWKFLWWSGTISINVLVDQNRKDHSMKFKQTKAGFMKKFEGCWRVEPLFVDEAMCHPFKPVTKEDYNACARGKGRIGSKVSLEQILQPSIVPPPPLSWYLRGITARTTEMLINDMLAETARIRGGYEAEKSKAEELQVKPGENVDLVSNTSDIKESWKLRRKNAKQSHRSLLTK

SEQ ID NO: 245546 - protein, 78 aa, Glycine max
  unsure (1)..(78): unsure at all Xaa locations
  Clone ID: PAT_MRT3847_6375C.1.pep
VKLEKRLASVFLXCGIRKVCLDPNESNEISISNAGQNIRKLVENRFIINKPTKIHCHSRTRRIKKTDIKRRHSRYGKR

SEQ ID NO: 245547 - protein, 88 aa, Glycine max
  Clone ID: PAT_MRT3847_63760C.1.pep
NFQKFWWGYNPLFGGGRKNMPAETFFRKGPPVFFGTRKKNGITKKALRGGQKQSGWDIKSIGPFFLERLGVNIFFQPRVGLPGFGKKI

SEQ ID NO: 245548 - protein, 317 aa, Glycine max
  unsure (1)..(317): unsure at all Xaa locations
  Clone ID: PAT_MRT3847_63761C.1.pep
PRRPIFHRLNNYTIYAVSITIRIVFGFMFIALIWNFDFSPCMVLIIAFLIEGIAISIAREMAKPCPLPYSWNVKGIFATGVGLVRYLALMTXVIFFWAIKETTFFPDKFGVRPIHDNPDEMTAALYLQVSIVSQALIFVTRSRSWSFIERPGLLLVTAFVIAQLIATVIAVYANWGFARIQGIGWGWAGVIWLYSIVFYFPLDIMKFAIRYILSGKAWNNLLENKTAFTTKKDYGKEEREAQWALAQRTLHGLQPPETSNIFNEKSSYRELTEIAEQAKRRAEVARLRELHTLKGHVESVVKLKGLDIDTIQQHYTV

SEQ ID NO: 245549 - protein, 53 aa, Glycine max
  unsure (1)..(53): unsure at all Xaa locations
  Clone ID: PAT_MRT3847_63762C.1.pep
PMVNTVATDNHITVRGSDWYFAVTAVHGCSAPSSSWVCHSRRXDTQRLFHXXY

SEQ ID NO: 245550 - protein, 90 aa, Glycine max
  unsure (1)..(90): unsure at all Xaa locations
  Clone ID: PAT_MRT3847_63763C.1.pep
LVLQVAGKAWXKFVVNLPNGSSVFQKAVFTGGVENSKYAXEVLWETVTAVXGSVQRCVGIVADKFXAKALRNLEVQYHWMVXTSCHFRGL

SEQ ID NO: 245551 - protein, 52 aa, Glycine max
  Clone ID: PAT_MRT3847_63764C.1.pep
SSYRELTEIAEQAKRRAEVARLRELHTLKGHVESVVKLKGLDIDTIQQHYTV

SEQ ID NO: 245552 - protein, 30 aa, Glycine max
  Clone ID: PAT_MRT3847_63765C.1.pep
SSIESSAISSSRVLLTDDSRRFTRILMLSF

SEQ ID NO: 245553 - protein, 72 aa, Glycine max
  Clone ID: PAT_MRT3847_63766C.1.pep
CRLPARSLRARGLVSQPIRVRRQWSICLAPSSRRYGRLCVEVRTEEVRRCRIDREIFGVVGCVSQVSSGRGI

SEQ ID NO: 245554 - protein, 194 aa, Glycine max
  Clone ID: PAT_MRT3847_63767C.1.pep
MGFAGDDELYHGGSFCQNPIDLGRLCTYGSIVDEYYYTPSKRARINALDAFEFLGREQDQKPTIDVLPDECLFEVFRWLSSGKERSSCAYVSKRWLMLMSSICKAEIHKSDKMIEGSASGYVEMASVDEDQGIEDNGYLTRCLEGKKATNVRLAAIAVGTSARGGLGKLSIRGSNSVRGVTDVGLSPSVVFSQP

SEQ ID NO: 245555 - protein, 56 aa, Glycine max
  unsure (1)..(56): unsure at all Xaa locations
  Clone ID: PAT_MRT3847_63768C.1.pep
FSDSSSISIARSLSLFFIRVXIIRFLKYLLDACVILFSEILNWMLRPTLHRTILST

SEQ ID NO: 245556 - protein, 55 aa, Glycine max
  Clone ID: PAT_MRT3847_63769C.1.pep
SMDSDLISESMHQHHKVFQVHPLGSPGFVLECWPTTLDTSSIAGANSFIASLQQK

SEQ ID NO: 245557 - protein, 60 aa, Glycine max
  Clone ID: PAT_MRT3847_6376C.1.pep
IKIGPGKKKHFCWYLPRIKTYMQQSQLKTNGFSNYSKTNNSSFNQDRRKIVGLDILSWRI

SEQ ID NO: 245558 - protein, 210 aa, Glycine max
  Clone ID: PAT_MRT3847_63770C.1.pep
MLKQFLSKLPRKAPKPDSDESCRADSSRSDDSPRAASRNIRPPGGGGSSAAKKTSSSAVFPASTVSLIEPLVPFKDVPSSEKMNLFVSKLSLCCVTFDFTDPGKNTVEKEVKRRTLVELVDFVSSCGSSRFSEPAILAVCRMCAINLFRVFPPNYRSNRGGENDDDEPAFDPAWPHLQLVYELLLKFITSNCLDARVAKKYIDHFVILRL

SEQ ID NO: 245559 - protein, 82 aa, Glycine max
  unsure (1)..(82): unsure at all Xaa locations
  Clone ID: PAT_MRT3847_63771C.1.pep
GKRQEKEGRRPEQERLILGGKQVEDGRTVGEDNSEKEFFFERLXLRIRXGGIIEPPLKGGGRKYNQDKMIWRKRDGRLNRRG

SEQ ID NO: 245560 - protein, 84 aa, Glycine max
  Clone ID: PAT_MRT3847_63772C.1.pep
YSSIQPTHSSNVPFQALHSKIKQNSPIKILKQQFLTVAHLPKVMPLGGHSYLILMQRINPSWARHVLLQPLTSPQETYTKQSIL

SEQ ID NO: 245561 - protein, 239 aa, Glycine max
  Clone ID: PAT_MRT3847_63773C.1.pep
MSSNQASLNLSQAKFVLPTNNDLEQQQQQQQQATTTLEIEADHEDIFDYSKRSQWLRAAVLGANDGLVSTASIMMGVGAVKHDIKAMILSGFAGLVAGACSMAIGEFVSVYSQLDIEVAQRKREKERGQSRGRDIQEEDTNYEEKDSLPNPLQAAAASALAFSVGAMVPLLAASFIREYKVRLGVIVAAVTFALVVFGWLGALWGKAPVLRSALRVLFGGWMAMAMTFGLTKLIGSSAL

SEQ ID NO: 245562 - protein, 188 aa, Glycine max
  Clone ID: PAT_MRT3847_63774C.1.pep
FLPHSLSEITGPTIGAERVNEKDNDLTAQQDGEPQGERIIIHGRVLDENGLPVPGILVEIWQANAAGRYNHKRDLHDAPLDPNFTGTGRTVTDADGWYQFQTIKPGAYPWGNHHNAWRPAHIHFSLFGPSVLTRLVTQMYFPGDPLLEYDPIYNCVPDTSAKQRLIARFDLEKTIPSYALGYRWDIVL

SEQ ID NO: 245563 - protein, 59 aa, Glycine max
  unsure (1)..(59): unsure at all Xaa locations
  Clone ID: PAT_MRT3847_63775C.1.pep
GHGPGSRAAEEKEVFDTXHLAPFYRIEQPIVATIPDSNYGKPPGIITEESIELVLPNTG

SEQ ID NO: 245564 - protein, 46 aa, Glycine max
  Clone ID: PAT_MRT3847_63776C.1.pep
GHQHNPSSNSKGYYSIIYILRRYTQSPLPKNSTYSNLQTNHSIILF

SEQ ID NO: 245565 - protein, 67 aa, Glycine max
  Clone ID: PAT_MRT3847_63777C.1.pep
SRSRNSHRNCLVCTFLERREIKYSICPEFNEIIEFSFTSLLFHISEFSRSLILGLPSPWLDPPRTSL

SEQ ID NO: 245566 - protein, 158 aa, Glycine max
  Clone ID: PAT_MRT3847_63778C.1.pep
METKDDSAEKEEAWSSHEDEILLNYVQVRGEGNWRNLPKRAGLKRCGESCKQRWLNYLKPTISRGNISLDEHELIIRLHKLLGNRWSIIAGRLPGRTEEEIKNYWNTYLRKEAEENQNNKNEFPSTSMTTTSMSSVQSPWYFRTFRRYQSHGISKSCD

SEQ ID NO: 245567 - protein, 46 aa, Glycine max
  Clone ID: PAT_MRT3847_63779C.1.pep
EIRLQISDLILPLLSLSFSLHSSSPTFKLLPMTSYGGELVLDSSSP

SEQ ID NO: 245568 - protein, 76 aa, Glycine max
  Clone ID: PAT_MRT3847_6377C.1.pep
GSSSYTACFKHIAKPTHRSLAMGSIEPKPAPPNLLSCFNCNTSTAGRTDGRRIFHPTNGWRNQSISTISEGMSVSC

SEQ ID NO: 245569 - protein, 232 aa, Glycine max
  Clone ID: PAT_MRT3847_63780C.1.pep
MATLQASLLSKPSLLSKPSLPFPFPFLSPNHSPFSLSFPPMRRVLSTPLCCTFCPSEPNLSPSEPEHEAGSANTEEPGINSTEEGAASVSDSGLEEEEGAEAVLRSGADSEKIVVASGRLSIVVFFVGLWVKARDRVKKAFSELLDWWPFWRQEKRLERLVADADANPQDAAKQSALLVELNKHSPESVIKWFEQRDRAVDSKGVAEYLRALVVTNAISEYLPDEDSGKASS

SEQ ID NO: 245570 - protein, 47 aa, Glycine max
  Clone ID: PAT_MRT3847_63781C.1.pep
WVIESFSPPFSLGVQARILYREGTSGCLPLSLASTLLKKIKKKKPIY

SEQ ID NO: 245571 - protein, 78 aa, Glycine max
  Clone ID: PAT_MRT3847_63782C.1.pep
SPLDKMKHSMRSDGYISNNLGNGPNATQARYAGYDERKSTSDHSPPPANHDTAYGTVEDHYGGKKLGMTRTALIFFTN

SEQ ID NO: 245572 - protein, 41 aa, Glycine max
  Clone ID: PAT_MRT3847_63783C.1.pep
PPLKDDMVSCVMALEAALLPCLPARELQAIDRSPHPSHQSG

SEQ ID NO: 245573 - protein, 335 aa, Glycine max
  Clone ID: PAT_MRT3847_63784C.1.pep
MGNALRFLYSHCCKPTAAGDSESLGPHGVSSATVGVSTLAHDLFHFDITSQVPEGLSKHVVSSKKAQANWYRKLVDAWKEAKPPPKTPEEAARLVIQTLRRHQKADVEGLLAFYGLPLPHTLVQGTTQPLSSLPDGVQFEMHTLPVDAKAVADGDTITVYVSTTDPRESAFVPGNVHAAAVRRSEARARRNFTEADALHKQIIDSGYRVIPVQNEEILAKKYRIRLRGIDAPESAMPYGKEAKTELTKIVQGKPLRILVYEEDRYGRSVGDIYCNGIFVQEMMLKKGLAWHYVAYDKRPELETWEKQARAKRVGLWASKNPEKPWEWRKDRREAA

SEQ ID NO: 245574 - protein, 252 aa, Glycine max
  Clone ID: PAT_MRT3847_63785C.1.pep
DGDESDSDTEDSGSVDDEFNVADTCSSGDDFESDSINSSKTKLKRANSHKNNMLKVYTEIDESHPGEAWLLGLMESEYSHLNIEERLNALASLTDLVSSASSIRMKDSARVTAHCSSGVQLRGSGAKIKRSAVKKPGPLWNQKVHLNSDPCAVDSSSLISRFHTHEASFGKGKVSFISHPIQSVFLGSDRRYNRYWLFLGPCNVDDPGHRRIYFESSEDGHWEVIDTEEVNFFGFLILCKRRYLVTYMETWK

SEQ ID NO: 245575 - protein, 51 aa, Glycine max
  Clone ID: PAT_MRT3847_63786C.1.pep
GVNVAHIIILCIKRNLKCSQRELTGCHPPVSHMTSVLNLHASTSTKMQIIF

SEQ ID NO: 245576 - protein, 96 aa, Glycine max
  Clone ID: PAT_MRT3847_63787C.1.pep
STFPGYTIFPGHLPTLTRGEKLCIFKRNQQFYFDHTQAMMYLTLLLYITCLYGKLSIYIRGRVPAEPWKAQPLSPLTCCGRMISSSAWGAPSNSFL

SEQ ID NO: 245577 - protein, 95 aa, Glycine max
  Clone ID: PAT_MRT3847_63788C.1.pep
RLLEDDRWGETERPEHKAGERVCFFSLQWKAANRFSLWAPTLAAAGFPTFFPLRLVILSGLSVLAVVASANFVAEPEFTPLFQTKRAVTITITSL

SEQ ID NO: 245578 - protein, 90 aa, Glycine max
  unsure (1)..(90): unsure at all Xaa locations
  Clone ID: PAT_MRT3847_63789C.1.pep
TRNTTAFFRAFATVCRVIPAVIRXGVMQLTNTLNEEHECKIRTDARLEALLMREVNESRLADYLRELQRTEDKKERYIAALKRETLTREP

SEQ ID NO: 245579 - protein, 63 aa, Glycine max
  Clone ID: PAT_MRT3847_6378C.1.pep
WLQVQVITRKVCEPLEEDSFRPILHHYDGPKFRLELSVPEALSLLDIFANQNSFDDIFKVIPA

SEQ ID NO: 245580 - protein, 51 aa, Glycine max
  Clone ID: PAT_MRT3847_63790C.1.pep
SGGCCDQLLIFTANGGRGHVHMNTSGGCYMVPWWPVHDSNNYVGQLLSLHL

SEQ ID NO: 245581 - protein, 107 aa, Glycine max
  Clone ID: PAT_MRT3847_63791C.1.pep
FVILFIVQPIIFLRLDLLSISFVIHDFLNRYILLVVFFTLDLLNISFVILVFLILFRSYLSSLLHPHRHVLSPKPSLQQFCHPCPSFPFSSPFYPSHISLSFTQHPL

SEQ ID NO: 245582 - protein, 335 aa, Glycine max
  Clone ID: PAT_MRT3847_63792C.1.pep
DWDRKDGILMIEADRLLRPGGYFVWTSPLTNARDKDSQKRWKIIQSFAENLCWDMLSQQDETVVWKKTIKRNCYSSRKNSSPPPLCGKGYDVESPYYRELQNCIGGTHSSRWISVKERQTWPSRDHLNKKELAIFGLQSDEFAEDSESWKAAVRNYWSLLSPLIFSDHPKRPGDEDPPPPYNMLRNVLDMNAHVGGFNSALLQAGKSLWVMNVVPLSGLNYLPLIQDRGYVGVLHDWCEAFPTYPRTYDLVHAAGLLSLEFAQQRRCTMLDMFIEIDRLLRPEGWIIIRDIVPLIESARALTTRLKWDARVVEIESDSDQRLLICQKPLFKRQAN

SEQ ID NO: 245583 - protein, 62 aa, Glycine max
  Clone ID: PAT_MRT3847_63793C.1.pep
NLVNGEPGPHHGGHGTQLGANQQQLGAYLQKQGFPPAGNPQQQGFPPAGYPQNQGYPPAGYP

SEQ ID NO: 245584 - protein, 239 aa, Glycine max
  unsure (1)..(239): unsure at all Xaa locations
  Clone ID: PAT_MRT3847_63794C.1.pep
IQVLDPIDGPRGFLKAGKALYVVGLALVVEGEIVVGVMGCPNWEEDLSEKSSAEIEEGWDSLGGSGTVMIAHNGXGTWMKSLNSQLKSSGVWTRCFVDGSDIIHKARFCIPDSQTWESLPLTSLFNATSNADNVGSNQILLLGACCGSLCKYLMVASGRASIFILRAKEKTIIKAWDHAVGIICVHEAGGKVTDWKGSDIDLAADHVGRRIIFPSGGVLVANGNLHNKILQIINQTSRV

SEQ ID NO: 245585 - protein, 507 aa, Glycine max
  Clone ID: PAT_MRT3847_63795C.1.pep
MGNVPNVVVLCFCLWTLLFPLVFCAPNDGLRRIGLKKVKLDTDDVVGFKEFRSSIRKHHLQNILGGAEDTDVVALKNYLDAQYYGEIAIGTPPQKFTVIFDTGSSNLWVPSSKCYFSVACFMHARYRSSQSSTYRENGTSAAIQYGTGAISGFFSNDDVKVGDIVVKDQEFIEATREPGVTFVAAKFDGILGLGFQEISVGYAVPVRYNMVDQGLLKEPVFSFWFNRNPEEEEGGEIVFGGVDPAHYKGKHTYVPVTRKGYWQFDMGDVLIGGKPTGYCANGCSAIADSGTSLLAGPTTVITMINHAIGASGVMSQECKTIVAEYGQTILDLLLAETQPKKICSRIGLCAFDGTHGVDVGIKSVVDENERKSLGGHHGAACPACEMAVVWMQNQLSRNQTQDQILSYINQLCDKMPSPMGESAVDCGNISSLPVVSFTIGGRTFDLSPEEYVLKVGEGPVAQCISGFTAIDIPPPRGPLWILGDVFMGRYHTVFDFGKLRVGFADAA

SEQ ID NO: 245586 - protein, 77 aa, Glycine max
  Clone ID: PAT_MRT3847_63796C.1.pep
LLYIIIYILPLTYALHIFPLIRRKGMYIHPRSVLHISYPLHSTHPMYVTPFNVFFIPEVCVHARVIDGVAVRVGVRE

SEQ ID NO: 245587 - protein, 110 aa, Glycine max
  Clone ID: PAT_MRT3847_63798C.1.pep
RLYLNKPPIDILLTSSWPPRRLLHARGSSPKPTSAAAPPESTPPSNLHHPLSSQVKNIDSRQIMIVIRQKRFGIRFAWIDFLMLWLEQGNRPNNSLFKKMLPVIKSTDHR

SEQ ID NO: 245588 - protein, 60 aa, Glycine max
  Clone ID: PAT_MRT3847_63799C.1.pep
SFPVGLRCWQCRHSCSHNFGACLTCHVGHCWFLCILFTTLSDHSHTHRTRNTTTACLRLF

SEQ ID NO: 245589 - protein, 367 aa, Glycine max
  Clone ID: PAT_MRT3847_6379C.1.pep
MDNYNSNDFWKFSDQLRLESGLANLSLNDYSIWSNSYSSKRPDQRRNFDVKGSDFNNSSKPFDDDFNDGWKITNSNGPLFSMPHNNNTHTLEVGGFNKGGIYFNTNTTSSLYPNLNNNTLGGFNKGIYSNTTSSPYLNLNNNNNNNNHLRHDPNRNNLKGYKTYFKGEDQFHTPKSAKKKNTTNNTNNKKHGDNTNNNDGTKTGAEKKFKTLPPSESLPKNETIGGYIFVCNNDTMAENLQRQLFGLPPRYRDSVRTITPGLPIFLYNYSTHQLHGIFEAASFGGSNIDPTAWEDKKCPGESRFPAQVQVITRKVCEPLEEDSFRPILHHYDGPKFRLELSVPEALSLLDIFANQNSFDDIFKVIPA

SEQ ID NO: 245590 - protein, 143 aa, Glycine max
  Clone ID: PAT_MRT3847_637C.1.pep
MSDEVYDGAIGIDLGTTYSCVANYEGNGVEIIANDQGSFTTPSFVSFTAEERLIGEAAKNQAAMNPINTVFDVKRLIGRRFDDPTVKKDIESWPFKVVDDDGSPKVQVEYLNETKTFSPQEVSAMVLVKMKEIAETKLGKKVE

SEQ ID NO: 245591 - protein, 102 aa, Glycine max
  Clone ID: PAT_MRT3847_63800C.1.pep
TPFVETYNHTFWSTKRVFPFNSGRKKKCFLRICEQPNQRLLNSMGTRIFYLGRIFFKGIKGTFNSLYWRLGFSTYFVTKTTFPFFPFNHFSFVPHGPEIYLG

SEQ ID NO: 245592 - protein, 103 aa, Glycine max
  Clone ID: PAT_MRT3847_63801C.1.pep
QPITLSFFLFPPPPPFTNSPLFLPPHTLSLLPPSFPPLTGFSPPLPAAAALRGSPAPSLQSGPPPSPPHAPSTTASPPAWPPPAWPTRSPPPRPTLRRQRGSH

SEQ ID NO: 245593 - protein, 82 aa, Glycine max
  Clone ID: PAT_MRT3847_63802C.1.pep
KGGKKKKGDPPPQIWGGHRGPYGKAPTPKNPFKFSWKKKTEIFSPPFLIYWGGGNPLPSLGGNTGFNLAQEIFWLVPNLFWP

SEQ ID NO: 245594 - protein, 63 aa, Glycine max
  Clone ID: PAT_MRT3847_63803C.1.pep
KIFPTDAAHFMIPFSLILYPRSYYLSSVPLFFLIKYQCMHIWCVSIKFSIKRTTENCGLHFRN

SEQ ID NO: 245595 - protein, 156 aa, Glycine max
  Clone ID: PAT_MRT3847_63804C.1.pep
FVLRIRRDITEDQRQAFLVVAALIATATYQSALSPPGGVFQANAGNNDNNNVNITSPNSTTIATQGINAGTSVISEGDFLTLSILNSLSLLISTVTIYILTPSGIVGTILFTPMFWFAYCYLYSIRVISPTNATKNFNLVMLCLFSSLYSGVGWTF

SEQ ID NO: 245596 - protein, 56 aa, Glycine max
  Clone ID: PAT_MRT3847_63805C.1.pep
RATLRETIYTKMESPSTYHKLQGHCPVLDNFHTFTIHHTLCDHMILFHQPLTTSKD

SEQ ID NO: 245597 - protein, 59 aa, Glycine max
  Clone ID: PAT_MRT3847_63806C.1.pep
LTGDDDDDEYGRRLILRHSNTSSNGRTTVHNRAWLSALRLLNSVRTATPVSVHAPHVRI

SEQ ID NO: 245598 - protein, 80 aa, Glycine max
  unsure (1)..(80): unsure at all Xaa locations
  Clone ID: PAT_MRT3847_63807C.1.pep
ETEEISVTNVGCVQHLHRVSXRRSSLTSADVHTSTTITDDVLSMLHQEKNPYMVSADAGEHFQTPCIENNLDGKLVYCLY

SEQ ID NO: 245599 - protein, 29 aa, Glycine max
  Clone ID: PAT_MRT3847_63808C.1.pep
KGHLDRLEREIKLISTQVRETQTLEPDHW

SEQ ID NO: 245600 - protein, 478 aa, Glycine max
  unsure (1)..(478): unsure at all Xaa locations
  Clone ID: PAT_MRT3847_63809C.1.pep
MTEETNIGEPLLKKQYYENCPGCKVDRAKELEKDVSIRNLVHIWIVVLCGALPVSSLYPFLYFMVKDFNIAEGEEDISAYAGYIGSAFMLGRCLTSMLWGMIADRYGRKPVVIISVISVVIFNILFGLSTSFWMAVITRLFLGCLNGVMGTIKAFSSEIFREEYQPLGLSTVSAAWGVGLALGPALGGYLAQPVEKYPYLFSKGSFWDRFPYFLPCLVISTFAFSVAIACIWLPETNHNHNPEALEIRSRAPDKDKVVQNNESVFRNWPLMSSIIVYCVFSLHDNAYSEVFSLWAVSPRWLGGLNFTTNSVGNVLVVSGFAIIIFQLGLYQSIQKTCGPVSLARISGVLSIPILQSYPFMTMXFCFTLYAAIYIASILNNVIIEIITTCLLILQNRAVEQQQRGIANGISMTAMSAFKVIGPAAGGAILTSSQKRLNATFLPGTHLIFFSLNVVEGLGVLLTFKPFLTIKKLPLELLK

SEQ ID NO: 245601 - protein, 162 aa, Glycine max
  Clone ID: PAT_MRT3847_6380C.1.pep
ASHAYVSSEFGSRSLLSFSVFMASSNNNIQAISRSRKHQNSAVTIALGRRRGTHKKHSGGGDGNCSSPVVNSWEGGSKKSEVSARKLAAGLWQMQYIQVSRDHHAAVLDTSSFLSSMSQLANGNARSRFPIMTNLVERFKKTRVQLRRPLPILRSKNGLRSE

SEQ ID NO: 245602 - protein, 36 aa, Glycine max
  Clone ID: PAT_MRT3847_63810C.1.pep
HDYTDDALEHRLVGLSLLYESQVQQFLERGYNNALT

SEQ ID NO: 245603 - protein, 169 aa, Glycine max
  Clone ID: PAT_MRT3847_63811C.1.pep
MALKLVNLGFHSSIPCSPRPLKDRFVLRSSKVEQISFTESENSLIEALLGIQGRGRSSSRQQLNAVERAVQVLERLGGVPDPTKSNLIEGRWQLIFTTRPGTASPIQRTFVGVDFFSVFQEVYLRTNDPRVCNIVSFSDAIGELKVEAAASIEDGKRILFRFDRAAFSF

SEQ ID NO: 245604 - protein, 375 aa, Glycine max
  Clone ID: PAT_MRT3847_63812C.1.pep
MGVCFASLARHQTPSKSIPYAGSGRESLGSKDENMGITESTSSVNGGSCSSHSSKNIVFPSVEVRNLKEFSFANLKAATKSFKSDALLGEGGFGKVYKGWLDEKTLAPTKAGSGIMGAIKKLNSESLQGFREWQSEINFLGRISHPNLVKLLGYCCDDIEFLLVYEFMPKGSLENHLFRRNTNSEPLSWDTRIKIAIGAARGLAFLHTSEKQIIYRDFKASNILLDEDYNAKISDFGLAKLGPSGEDSHVSTRIMGTYGYAAPEYIATGHLYVKSDVYGFGVVLLEMLTGLRALDKNRPIEQQNLIEWAKPSLSDKRKLKSIMDERIEGQYSTKAALKSAHLILKCLQCDRKKRPHMKDVLDTLEHIEAIKDRTK

SEQ ID NO: 245605 - protein, 253 aa, Glycine max
  Clone ID: PAT_MRT3847_63813C.1.pep
LGHVIDKLSVSFGLEILKVVPGYVSTEVDARLSFDTAATIARAHRIIDLYEKAGIKKDRVLIKIASTWEGIQACKHLQKEGISCNMTLLFGFAQAVGCAEAGATLISPFVGRILDWHKAKTGKSSYESHEDPGVVSVTKIYQYYKKYDYKTIVMGASFRNTGEITELAGCDRLTISPGLLEELAKSTSKLDKKLDPETAAKAYTGEKVSYDEKGFRLSMNEDAMATEKLAEGIRGFSADIVKLEQILKAKLSA

SEQ ID NO: 245606 - protein, 249 aa, Glycine max
  Clone ID: PAT_MRT3847_63814C.1.pep
MGLCFASLATHQTPSNNSPHYSGSAREMGITESTSVNGGSSSINSNNMVFPSVETRNLKQFNFADLKAATKSFKSDALLGEGGFGKVYKGWLHEKTLTPTKAGSGMVVAVKKLNSESLQGFREWQSEINFLGRISHPNLVKLLGYCCDDIEFLLVYEFMPKGSLENHLFRGNTNSEPLSWDTRIKIAIGAARGLAFLHTSEKQIIYRDFKASNILLDEVCYFPYFLSVIFDEFMNLDPPFVFNYKPNFC

SEQ ID NO: 245607 - protein, 139 aa, Glycine max
  Clone ID: PAT_MRT3847_63815C.1.pep
EFESVIEEAKTPMLRLLSSGFGLALMMNKPIGLLGTDANVKSPKWSEKFNDVVNFKDVDTVQHSHPLPPRPRQHGSIHKKAFNAYEYYWRTKPTTKVAPASNTFTFQHNNNYSSLENNLKSCKDSRRSFLIWEPYCIAT

SEQ ID NO: 245608 - protein, 125 aa, Glycine max
  Clone ID: PAT_MRT3847_63816C.1.pep
QPPKGGQGAKKLKKTGAKKKKVPRPPQNFIVGGILRGKKKDAKMGAPGGKAPPPPFEKGGGSLVAKNIYNPTLGRKGANVRDRKRGAAGLNKKRQKKKRGGQNFLRGEIYPGFTRGGGDKSKKGG

SEQ ID NO: 245609 - protein, 69 aa, Glycine max
  Clone ID: PAT_MRT3847_63817C.1.pep
PFKMGRGGVNWARVFLPFFLVGKLGPVPYLISPPFVCLPEILRFSTMGGGLRKFFFPDLLWGEGPALKR

SEQ ID NO: 245610 - protein, 47 aa, Glycine max
  Clone ID: PAT_MRT3847_63818C.1.pep
LIWINTLDCIKGFRNQTLKASYCFNHAPKFYLQTIFYAYTGIDKSLQ

SEQ ID NO: 245611 - protein, 80 aa, Glycine max
  Clone ID: PAT_MRT3847_63819C.1.pep
VYLKIPRSLNKGRKDTKNKPCIDLIINSHNYMRHAQSKSTPNKATLVSWWCCKIMMRIWSLWCEPMRISIFVRDIISILN

SEQ ID NO: 245612 - protein, 96 aa, Glycine max
  Clone ID: PAT_MRT3847_6381C.1.pep
RGPPNIPKPFFLKKYFLKPKTFVQAASFGGSNIDPTAWEDKKCPGESRFPAQVQVITRKVCEPIEEDSFRPILHHYDGPKFRLELSVPEALSLLDI

SEQ ID NO: 245613 - protein, 137 aa, Glycine max
  unsure (1)..(137): unsure at all Xaa locations
  Clone ID: PAT_MRT3847_63820C.1.pep
NSAPAREDKIEGVKLNIPIFXGKSDPKAYLECEMKIEELIACHNYIKDKKMKVAAMEFTNYPLIWWDQLXKERSRFREPLMNSWEEMKRLMRRRFVSSHYHRDLHNKLQRLTQGNKNVDEYYKEMEVSLIRANLSED

SEQ ID NO: 245614 - protein, 116 aa, Glycine max
  Clone ID: PAT_MRT3847_63821C.1.pep
NRLSCMRWSILWSTVCFCGNWSTCCDLVNIPPAGIPALKEMHKSLSSHGKQGTQKFFPPLELYASVVMGLKAPPLVNGQNLAITHNVFLGNPLVLSNLKNFMLIKHINIPTPPISM

SEQ ID NO: 245615 - protein, 156 aa, Glycine max
  Clone ID: PAT_MRT3847_63822C.1.pep
MVILSSLPLNYSAFLRQGTPFLPSKFPARVDCHRNVSQTSQTIFRIKIREKHANYSCTKFVTSAARNDHHLSYDDDLPQEPFLLTLIKDAIWGLRYIFVFLAEQPSQFKYIEWPSFSSTLRTAILTLILVAMLIVALSSVDSALSYLLAFALRKRP

SEQ ID NO: 245616 - protein, 114 aa, Glycine max
  Clone ID: PAT_MRT3847_63823C.1.pep
LFNKYLSLKMVILCSLPLNYSAFLCQGTPFLPSKFPARVDYHRDVSLTSQTIFRIKIREKHANHSCTKFVTSAARNDHHLSYDDDLPQEPFLLTLIKDVIWGLTYIFGLLVEQP

SEQ ID NO: 245617 - protein, 162 aa, Glycine max
  Clone ID: PAT_MRT3847_63824C.1.pep
MKILTKEEAEAAYHETLMGGAQGAAYGLVGAIALSLVLQRTSRGYRRLTLPLKVFFVTSLTSATCVIQAERRMLRHGRIKYHHKRAILPEGQHQQDTLAHKEIAPIPFRQQVTDFVNERRWLMIGGTCVLGMAASGAYLYSRKYMNWQQKLVQARMYAQAIT

SEQ ID NO: 245618 - protein, 50 aa, Glycine max
  Clone ID: PAT_MRT3847_63825C.1.pep
GGKEFPSGGIRNRYPFGGLLAPVPFCGLLAPVSFCGLLEPVPFGGLLAPV

SEQ ID NO: 245619 - protein, 151 aa, Glycine max
  unsure (1)..(151): unsure at all Xaa locations
  Clone ID: PAT_MRT3847_63826C.1.pep
MGCFVMCSSDYSNWFCPDQSLPDELGTRXLTLAESSSPHALGLEIIDCHDSCDGLGMCDSLVTWAPEYAFLYYPPDAAAHSDTDLPAWXKDAEHNGHGXLKRNLLXPRLLTSDYLIHSCSFIXWNSPALHAAVHLXNYLYGALLLNCPTLS

SEQ ID NO: 245620 - protein, 117 aa, Glycine max
  Clone ID: PAT_MRT3847_63827C.1.pep
ELSKVLSLLTDIASSAMFTPPSSVIAAAPTPISPGVPVLVSPPKFEVSPGQPAILCDDLVPTPIATAHAGAKRVNATLAPIPNHNNRGRRLTRSINRCCRVRGGRGRVGSKPDVWSS

SEQ ID NO: 245621 - protein, 154 aa, Glycine max
  Clone ID: PAT_MRT3847_63828C.1.pep
GCLSKTARGPSGTLGLYNGFGVSVMGIIPYRGVYFGLYDTLRELNPYKSDLSPIGFAARFAVAQTTAIAAGYASYPFDTVRRRLQMQSEKPKEQWVYKGAAHCLNKVIKDEGMNALFKGAGANALRTVGSALVLVLYDSLQTFLGVNIGAGSAE

SEQ ID NO: 245622 - protein, 143 aa, Glycine max
  unsure (1)..(143): unsure at all Xaa locations
  Clone ID: PAT_MRT3847_63829C.1.pep
YFGGFEQEDXNQLFNAMAANYKAWCSGFAPMAIGGDMESVAVQEFSRTLFNMRPDIALSVLQTIFPSDMRQILNLVSVPCHIIQSMKDLAVPVVVAEYLHQHIGGDSIVEVMSTEGHLPQLSSPDIVVPMLLKHIRLDIATRH

SEQ ID NO: 245623 - protein, 84 aa, Glycine max
  Clone ID: PAT_MRT3847_6382C.1.pep
QAFEAASFGGFIFDPTGWEDKRCPGESRFPAQVQVITRKVCEPLEEDSFRPILHHYDGPKFRLELSVPEALSLLDIFCKPEQFR

SEQ ID NO: 245624 - protein, 62 aa, Glycine max
  unsure (1)..(62): unsure at all Xaa locations
  Clone ID: PAT_MRT3847_63830C.1.pep
XXXIXXXXFVHRLLGSSXXCQALQXXXQXQRXLRXFHSXSXXFLXXFXXCSSXIPXLRPRXS

SEQ ID NO: 245625 - protein, 74 aa, Glycine max
  Clone ID: PAT_MRT3847_63831C.1.pep
NLTLAYSRSPTHFIFYFFSPKVFMEKCIQTYLRAKTSSLTAFPPLSPPIHIQRIPKTHRPYHFPPHEKEKNNNK

SEQ ID NO: 245626 - protein, 83 aa, Glycine max
  unsure (1)..(83): unsure at all Xaa locations
  Clone ID: PAT_MRT3847_63832C.1.pep
LEPNRLEAIQQDPELXAWWKXIVQVGHGDLQDKPWWQKMPTCEDLIEATATLIWIAXTLHVLDNFGKYPYGALIVHRQNISRR

SEQ ID NO: 245627 - protein, 116 aa, Glycine max
  unsure (1)..(116): unsure at all Xaa locations
  Clone ID: PAT_MRT3847_63833C.1.pep
GGSFLAGLFRSLASCGRSSSSRGWLRCWFPVVGSRFSLASRVGFFALGVGRCVAPFPCCSLLRGRFPWVPAFVLLCCVLLPAALGGSCFRSRWVGWFWXAPSSLARSGFXSGGKAT

SEQ ID NO: 245628 - protein, 70 aa, Glycine max
  Clone ID: PAT_MRT3847_63834C.1.pep
SPPVSRILRLGRRVDSLGRTPLGTSHHGPAAVATVPAASVASAATLRHDSTACPGPAGHVGPLRPAFALA

SEQ ID NO: 245629 - protein, 475 aa, Glycine max
  Clone ID: PAT_MRT3847_63835C.1.pep
IKAILRSFELVSSLRINFAKSQFGAIGQSEEWCTLAADILNCGPLQFPFIYLGMPIGVNPRRKVVWEPLIKKLEAKLNKWNQRSLSMAGRITLINVVLTTLPLFYMSFFRAPTTIIKRLTAIQRQFLWDGNLEGKKIAWVAWNQVCAPKEKGGLGVKDIKAFNRALLIKWKWLMFQQQDHLWSKILTSKYRGWRGLEEGPPKQIFSSWWSDLRSVTQHSSMAAVNKHFRWNLGSDDQILFWEDSWVGEGIALKDKYPDLYQEVRALHNNPMENFLQHYSLAASRNSNRRRKFIQHICGASAGLQGKRWQWWWFALTYSIWKHRNNIIFSNTTLFSLRCIKSLTNNSNLSSSWEVIRRNEDGTFSHLWRLKIPPKAKVFTWRLIKDRLPTNMNLRGRQVEIADPLCPFYNNLDEDAAHLFFNCSKVLPLWWETVSWVKSVGAFPKESKDHFMHHSRSNATQTRLFVSLEGRFLLRL

SEQ ID NO: 245630 - protein, 67 aa, Glycine max
  Clone ID: PAT_MRT3847_63836C.1.pep
TQIRWMKSYSDRCQPTTPPSTDTNIRISEVSPLLLVITVQLMVPKVYPIGTFDLLCSPLNSIYNELK

SEQ ID NO: 245631 - protein, 183 aa, Glycine max
  unsure (1)..(183): unsure at all Xaa locations
  Clone ID: PAT_MRT3847_63837C.1.pep
HGIDPTGRLRWLTLQLQLXRIDVYYNEASSLCRVVPXRAGLMDLQHASSCTXVRFATYGQMFMTDNFVIVHFGAGNNXAANGRYTECAAXIAYDSVLNDELNEAEKCHCLQGFQACLSLGXGTVSRMLILLMSNIREEYPDTRMLTISDFPSPXVFRDCVCIPYNATLSVDALAGYADERMLL

SEQ ID NO: 245632 - protein, 190 aa, Glycine max
  Clone ID: PAT_MRT3847_63838C.1.pep
MGHKNTIFLALIATLIAKEAFAAQHVVGGSQGWDQSTDFKSWTSGQTFKVGDKLVFKYSSFHSVVELGNESAYKNCDISSPVQSLSTGNDVVKLDKPGTRYFTCGTLGHCSQGMKVKITIRKGNAPSPALSPATSPSLSPSLSPLLSSTSLSSPPSSSSPTNTNASSASQCFTSFMFIVALSVTIMVSLF

SEQ ID NO: 245633 - protein, 83 aa, Glycine max
  unsure (1)..(83): unsure at all Xaa locations
  Clone ID: PAT_MRT3847_63839C.1.pep
VKSEPHSWELIFPIEVCGPNNGIEMWSSEWANQTSWYXGVDLIDNPKQSTVVDIFXVICQDIEIAGDTHMPGLSGTQATVRSS

SEQ ID NO: 245634 - protein, 368 aa, Glycine max
  Clone ID: PAT_MRT3847_6383C.1.pep
MDNNNDFWKFSDQLRLESGLANLSLNDYSIWSNSYSSKRPDQRRNFDVKGSDFNNNNNSSKAFDDDFNDGWKITNSNGPLFSMPHNNNNNTLEVGGFNKGGGIYSNTNTTISSYHPNNLNNNAFGGFNKGIYSNTTSSPYLNNNHHHLDDNNNLNRNNLKGYKTYFKGEDQFHTPKSAKKKNTTNNTNNKKHGDNTNNNDGTKTGAEKKFKTLPPSESLPKNETIGGYIFVCNNDTMAENLQRQLFGLPPRYRDSVRTITPGLPLFLYNYSTHQLHGIFEAASFGGSNIDPTAWEDKKCPGESRFPAQVQVITRKVCEPLEEDSFRPILHHYDGPKFRLELSVPEALSLLDIFANQNSFDDIFKVIPA

SEQ ID NO: 245635 - protein, 125 aa, Glycine max
  unsure (1)..(125): unsure at all Xaa locations
  Clone ID: PAT_MRT3847_63840C.1.pep
LSIYSGEKMKALDLFAATTDVAWTCHASEMFPXLRVNTDYGAGTTEEKCTSGTLAGEAHNXYGFETIXEERVVTTREYIHGDLYISDSKTVKQPAYLHDGDLLDPTQDTIVFSIDDTVLYNIGYY

SEQ ID NO: 245636 - protein, 45 aa, Glycine max
  Clone ID: PAT_MRT3847_63841C.1.pep
FIHFITGLNKNFCNFFFYSKTYFHSLKCQKKKKNKYPNMVIFGLE

SEQ ID NO: 245637 - protein, 55 aa, Glycine max
  Clone ID: PAT_MRT3847_63842C.1.pep
RVHRTTIQRASLVPRYDSCMTLRCNPLLSCFLVATFNISAILFLHLLLAQRVYLL

SEQ ID NO: 245638 - protein, 57 aa, Glycine max
  unsure (1)..(57): unsure at all Xaa locations
  Clone ID: PAT_MRT3847_63843C.1.pep
MINEGELIDALLRVNANKRYVTKGLNAGEATDKRXLHSIRPFPWYIHTTCATTGEGL

SEQ ID NO: 245639 - protein, 73 aa, Glycine max
  Clone ID: PAT_MRT3847_63844C.1.pep
MAANTLMSSAISAFPSLLSSSKSRFAAAVPLSSFVVTNASSSRFSMSADWMPGQPRPPYLDGSAPGYASIAIH

SEQ ID NO: 245640 - protein, 88 aa, Glycine max
  Clone ID: PAT_MRT3847_63845C.1.pep
LGPGLFSITPSVVRALCFPPFQFCLSAVFPVPLLYSSAHSLAFAFTTSSFLSSMPGYLQFFFLSRPPRFFFLFFFFFFFFFVSLFFPR

SEQ ID NO: 245641 - protein, 161 aa, Glycine max
  Clone ID: PAT_MRT3847_63846C.1.pep
DMMPRIGVKADANLLIIMARVYERNGQREELKKLHRHMEEAPNLNDLEFRQFYNCLLTCHLKFRDLDSASNMVLEMLRKAKEARNSLAAAKFMTNAAEIDHSHSPGLASVHSLNNSKDLYSLQNNRPITNAVLSYEEFSKDRNFLKLESESKAILSSLLAK

SEQ ID NO: 245642 - protein, 119 aa, Glycine max
  Clone ID: PAT_MRT3847_63847C.1.pep
ISALNFNRTFICSGSHSVNDLNYPSITLPNFRLKPVTIARTVTNVGPPSTYTVSTRSPNGYSIAVVPPSLTFTKIGERKTFKVIVQASSAATRRKYEFGDLRWTDGKHIVRSPITVKRR

SEQ ID NO: 245643 - protein, 47 aa, Glycine max
  unsure (1)..(47): unsure at all Xaa locations
  Clone ID: PAT_MRT3847_63848C.1.pep
KRAIRSSAALRLCLDFASNSFXRTCGVTSWVELGIRPAGVRAIPSGS

SEQ ID NO: 245644 - protein, 50 aa, Glycine max
  Clone ID: PAT_MRT3847_63849C.1.pep
MSWNCANIIELAWAALCMRLELCCNGHTQAIAKESLDLKKKKKKRRGRPL

SEQ ID NO: 245645 - protein, 84 aa, Glycine max
  Clone ID: PAT_MRT3847_6384C.1.pep
MSLLCFPSILSIFCFFSFVTAATEFDFGTLTLGSLKLLGDAHLNNATVSLTRDLAVPTSSAGRALYSRPVRFRQPGNRFPASFT

SEQ ID NO: 245646 - protein, 98 aa, Glycine max
  unsure (1)..(98): unsure at all Xaa locations
  Clone ID: PAT_MRT3847_63850C.1.pep
GKVQEVDESNHRIKREENMKLSVLIVAASLMVPRSCHRSCYHSLPRXSIIGYGDRTSDVKXDRLRLDVGSHNMRAFIMIPEQYVDXSADYIIGEHFRS

SEQ ID NO: 245647 - protein, 165 aa, Glycine max
  Clone ID: PAT_MRT3847_63851C.1.pep
MGKKGSWFSAIKRVFTHHSKGKDSDNNKGTKEKKKSLGKLKHGETNSFIPLFREPSSIEKIFGDFEREQQLLGLRPATPPERPKTPPYVPPRAPSPRPPSPRAPSPRPPSPRAASPRVASPRVTSPKAASSRIAHHHKEVGYRPEPTLRQQHATATKIQSVYRGY

SEQ ID NO: 245648 - protein, 536 aa, Glycine max
  unsure (1)..(536): unsure at all Xaa locations
  Clone ID: PAT_MRT3847_63852C.1.pep
MLLTWERRGSWFSAIKRVFTHHSKGKDSDNNKGTKEKKKSLGKLKHGEANSFIPLFREPSSIEKIFGDFEREQQLLGLRPATPPERPKTPPYAPPRAPSPRPPSPRAPSPRPPSPKXASPRVASPRVTSPKAASSRIAHHHKEVGHRPEPTLRQQHATATKIQSVYRGYMARRSFRALKGLVRLQGVVRGQNVKRQTVNAMKHMQLLVRVQCQIQSRRIQMLENQARYQADFKNDKDAASILGKLTSEAGNEEWDDSLLTKEEVEARLQRKVEAIIKRERAMAFAYSHQLWKATPKSTHTPVTDTRSGGFPWWWNWLERQTPAATPQERQSLKNFQITPPRPYSEQKTSPRPGSSTQRQPQQQQPHFAFDNMDTPTPKSTKSTIVTSSKPARTPPFRTPQANGSGSGSRYPRPRGVGSNSPFDVPLKDDDSLTSCPPFSVPNYMAPTLSARAKVRASSNPRERLGGTPTSTDSKRRLSFPLSQGIGSFKWSKGFSNKDQRVPDKFQSLESIGNVSVDSTVSLPARVVGRKPFTRFV

SEQ ID NO: 245649 - protein, 61 aa, Glycine max
  Clone ID: PAT_MRT3847_63853C.1.pep
IEPYDGRIFVSHNIKFCSRLGGEECTKRLASLGLEYLGKHTHDSLLFNHYEIWFEFRRSKA

SEQ ID NO: 245650 - protein, 124 aa, Glycine max
  Clone ID: PAT_MRT3847_63854C.1.pep
MGKKGSWFSAIKRVFTHHSKGKQDSDNNKGTKEKKKSLGKLKHGETNSFIPLFREPSSIEKIFGDFEREQQLLGVRPATPPERPKTPPYVPPRAPSPRPPSPRAPSPRPPSPRAASPRVASPRV

SEQ ID NO: 245651 - protein, 352 aa, Glycine max
  Clone ID: PAT_MRT3847_63855C.1.pep
MALSASRAMSKGVVVSVPVLVLSALVATVFLFFLLSSLSSCSCPTPSEISASNVRSVGVGIGVPESSSGNVPLATRKESSSSNIPLSTRKEDVEWVKNQIQANGLHMHDNVLRKGINPRTRAQQLDDLKPLLPLYLAGISHYEGPDSDNHTALPCPGELLVEEHHSNYGEPWAGGRDVFEFLAEASQLRSDSQVLEIGCGTLRVGLHFIRYLNPEHFHCLERDELSLMAVFRYELPAQGLLYKRPSIVKGDDMDFSRFDSGIMYDLIYASAVFLHMPDKLVWTGLERLASKLKPYDGRIFVSHNIKFCSRLGGEECTKRLASLGLEYLGKHTHDSLLFNHYEIWFEFRRSKA

SEQ ID NO: 245652 - protein, 71 aa, Glycine max
  Clone ID: PAT_MRT3847_63856C.1.pep
CRMRYNMILCRRVFCLNTKGVVVILGLKDGLDLGRPSAQNAIGAHIELDSDIHSAAKESQGICSLASLATM

SEQ ID NO: 245653 - protein, 45 aa, Glycine max
  Clone ID: PAT_MRT3847_63857C.1.pep
GDGCFCDALSNIRFFQVFCQVVMLHVYRLITCISLSSQLICFFDC

SEQ ID NO: 245654 - protein, 117 aa, Glycine max
  Clone ID: PAT_MRT3847_63858C.1.pep
ENHLPLLGKGGPAIHSVFCCWKCINVQLVFFFLKSKIKPGKQATPVPFTRTKRFTKLIFSSDKEFCKTNGVFGFIFLRGALNFPDPLGGFKRTLFFFSKRVLFAPGFSWGKKKIFFL

SEQ ID NO: 245655 - protein, 54 aa, Glycine max
  Clone ID: PAT_MRT3847_63859C.1.pep
RSRVRITTYCLILGSVLWLICRTCFKENSRYQWLNSITESDYSSMVFYSLLFLV

SEQ ID NO: 245656 - protein, 59 aa, Glycine max
  unsure (1)..(59): unsure at all Xaa locations
  Clone ID: PAT_MRT3847_6385C.1.pep
NFRGVSPINILKPTRIHLXINYSDSITKHFNVVAPMWSKKWGANSHSLFIIELTQQPAL

SEQ ID NO: 245657 - protein, 40 aa, Glycine max
  Clone ID: PAT_MRT3847_63860C.1.pep
LLESLLQKLKRNLCEKHLRGKYDFTKDCRTTNAYWHAMGR

SEQ ID NO: 245658 - protein, 85 aa, Glycine max
  Clone ID: PAT_MRT3847_63861C.1.pep
SSEPDDRSSLSSPPCLPRRNRDNCILQFAFCNTNWKKRSLKLQLPIGIAVSRLYSGMLTQVATSFPFACNSAVQEKLLRTHDDFV

SEQ ID NO: 245659 - protein, 53 aa, Glycine max
  Clone ID: PAT_MRT3847_63862C.1.pep
RVELTLMYYSKKIRRPMVHLTLYKLARDSIQTLSYLLHRGPKGLDHRIDQKAD

SEQ ID NO: 245660 - protein, 69 aa, Glycine max
  Clone ID: PAT_MRT3847_63863C.1.pep
CRSCEKNTVGVPAGGWTVIRFRADNPGVWFMHCHLEIHTTWGLKMAFVVDNGKGPNESLLPPPTDLPKC

SEQ ID NO: 245661 - protein, 124 aa, Glycine max
  Clone ID: PAT_MRT3847_63864C.1.pep
MRTRRGACYSGVVSRMCSDARVSKKKNKDLHMHMHMHMHVPAGDSIIYSRKRQKKTPEKTAGADYEFFESLPDELVISIFCKLSSTATKPSDFVNILITCKRLNRLALHSLVLSKASPETFTIK

SEQ ID NO: 245662 - protein, 117 aa, Glycine max
  unsure (1)..(117): unsure at all Xaa locations
  Clone ID: PAT_MRT3847_63865C.1.pep
MSNAFCSDCNKQTEVVFHATLXNTVGSGCKLILDTHSIYKTYDWHTLPNESGDNNPNRIXGPSNPLLTDGGLSTVIDKPNGCRSSSELLFSSLNRSQNPSYNPDRTLIIAFKTITTM

SEQ ID NO: 245663 - protein, 105 aa, Glycine max
  Clone ID: PAT_MRT3847_63866C.1.pep
CDLDLRDRAALEKIFSTVKFDAVIHFAGLKAVGESVKKPLLYFDNNLIGTIVLFEVMAAHGCKKLVFSSSATVYGWPKEVPCTEEFPLSATNPYGRTKLFIEKIC

SEQ ID NO: 245664 - protein, 42 aa, Glycine max
  Clone ID: PAT_MRT3847_63867C.1.pep
DRAPPSRRSLPAYSFGARPAGAPILPIESLIRDSRDISPPPP

SEQ ID NO: 245665 - protein, 126 aa, Glycine max
  Clone ID: PAT_MRT3847_63868C.1.pep
VIRMSKTSFASQQENGAVEAEVIPSDLDSCLQQHSVSYNARSAFSNITGLGSLGQSGLSVDNLALMEQQILSGIGNRDNVNPCVNASSSLNMSQLKTDGDHLLGHNMSCDSTSLVGGVPLHGGMST

SEQ ID NO: 245666 - protein, 64 aa, Glycine max
  unsure (1)..(64): unsure at all Xaa locations
  Clone ID: PAT_MRT3847_63869C.1.pep
MHAYSSEFGSRGYNTHFXCACXPPXPXNXSXSXDXTLXPEDLPAVSSXDMYXNATFDWAYLSXX

SEQ ID NO: 245667 - protein, 78 aa, Glycine max
  unsure (1)..(78): unsure at all Xaa locations
  Clone ID: PAT_MRT3847_6386C.1.pep
ISKHHKILASVIKRTQRETNRQENDTYIPCSIGIIHHXEYSQTSTKKLTLSKDQPIILEESFKXHNTLNPPSQHTHPN

SEQ ID NO: 245668 - protein, 359 aa, Glycine max
  Clone ID: PAT_MRT3847_63870C.1.pep
CPSVGIGGHISGGGQGLMLRKHGLAADHVVDAYLIDANGKIHDRKSMGEDVFWAIRGGGASSFGVILAWKSSLVRVPPIVTGFNVPRTPEEGVTDLIHRWQYIAHDLHEDLVIRVIAQISGHDKSKKFRATFNSIFLGGVDRLIPLMNESFPELGLQAKDCTEMSWIQSVMFIAGYDIEDPLELLLNRTTMFKRSFKAKSDFVKEPIPKSGLEGAWKLLLEEEIAFLILEPYGGRMNEISESEIPFPHRKGYLYNIQYLVNWEVNSDEASKRHLQWAKMVYKYMTPYVSKSQKAAYFNYKDLDLGKTKHDNPSYSKASVWGEKYFKGNFRRLAQIKTEFDPQDFFKNEQGIPLLNSQHS

SEQ ID NO: 245669 - protein, 77 aa, Glycine max
  unsure (1)..(77): unsure at all Xaa locations
  Clone ID: PAT_MRT3847_63871C.1.pep
MGKAKXHISIVVXXHVDSGNPLTTGHLIYKLGGIDKRVIERFEKEAAEMXKXSXKYAXVLDKLKAXRERXITIDIAC

SEQ ID NO: 245670 - protein, 193 aa, Glycine max
  unsure (1)..(193): unsure at all Xaa locations
  Clone ID: PAT_MRT3847_63872C.1.pep
HASGHVLSRPKSESAMFTGLKRRINQPXALFMITIYHYANPVAPELPTNEPIAYYWYSSPLYLLDPIVSPYTLFPGPCPTSLSSLRSAPRTQLLSHVVLPLVMPVLPLILRVGMTTNGSTMTKALPTGXSNTAAITGHNAAGDYLXRCWITFNGSGGHLGTLNPYXSFENPVDVPAVFQYWYKLLISDLKAPL

SEQ ID NO: 245671 - protein, 65 aa, Glycine max
  Clone ID: PAT_MRT3847_63873C.1.pep
YIFASLFLEYVELEFAEEFRSHFLWLQDRPNKITHPSNSYMLAFARYILKIRNWNTSRGSSRVRM

SEQ ID NO: 245672 - protein, 161 aa, Glycine max
  Clone ID: PAT_MRT3847_63874C.1.pep
LIVVFVMKRSEFEFPAIDVSSAVPNNVVLFGKVITRRTEPAGPASESENRVLSKSRSSSGRTNGFVSWLRSPSGREGRCRRSESGRRSYKTVLKFPLQMELSDIKKRQDRREPLPPPPLPIITAKDDSDSDGGESCWELVRPLRRQGTLKNAFFGCFLPII

SEQ ID NO: 245673 - protein, 128 aa, Glycine max
  unsure (1)..(128): unsure at all Xaa locations
  Clone ID: PAT_MRT3847_63875C.1.pep
PPKTPKRGAPNQGDWPKTKSFFFGPQLKKPKGPRGKKKMGFPGGFKKKPKKKTRPNWFPINGERGFFFPPPPKGPREYFQRLVFFPRGPHRGLGQFLNFPKGKAPFILLRKKKKKKILGGRKGGKLXQ

SEQ ID NO: 245674 - protein, 139 aa, Glycine max
  unsure (1)..(139): unsure at all Xaa locations
  Clone ID: PAT_MRT3847_63876C.1.pep
ARAIYDGLVSGWRNPSTTLNGKLYALDCKDGCKIRVYDEVADSWSKHIDSKLHLGSSRALEAAALVPLNGKLCIIRNNMSISLVDVSKLEDLKGSSAEQLWETIAGKGQFKTLVTNLWSSLAGRXRLKTHIVHCQVLQA

SEQ ID NO: 245675 - protein, 182 aa, Glycine max
  Clone ID: PAT_MRT3847_63877C.1.pep
RVRVRRSAFLNKFQIEAIYSLKANAQNAINRVLELFKSAYFWNTKSQLMSGQSAQKDGKIAATILIDPVTQKSANITIRTPAQQLRMEQIEVPYKVRPFALIRQRSAQQTHSLAQLFHQFSIKYRPQCTVDGRKVNTFDDLIYTAPLSFNCYSVAAKDCGSDQPQIVVLMKEVAQQQQQQTN

SEQ ID NO: 245676 - protein, 302 aa, Glycine max
  unsure (1)..(302): unsure at all Xaa locations
  Clone ID: PAT_MRT3847_63878C.1.pep
MVHSAYDCLELVRECPAKIESIESYGSKLLVGCSDGSLRIFAPETESSSDGSKSYALEKNLAGFAKKPVLSMTVVESRDFLISLSESIAFHRLPFFETIAVITKAKGANLFCWDHRRGFLCFARQKRVCIFRHDGGRGFVEVKDFGVADTVKSMCWCGENICLGIRREYVILNASNGALSEVFTSGRLAPPLVVSLPSGELLLGKENIGVFVDQNGKLLPERRICWSXTPLEVVIHKPYAIALXPRFEEIRSLRAPYTLIQTVVLRNVRHLCQSNDSGILALDNSIHGLYPVPLGAQIVQLT

SEQ ID NO: 245677 - protein, 160 aa, Glycine max
  Clone ID: PAT_MRT3847_63879C.1.pep
KNNNFFFHCNMSSSEGVFEQGIEFSEANNVLLMSLMEEEQEEEYYGDDRLVSMIQSLEAEITDTEMGQMYEMGHVDDQDRSASVGVPDHWVDLELISSLPFDEMNAWIPYGYGMMEHVEMEYEAGNGIDDLQLCYGAFLDQQYRENHYLALGPSDAVFGN

SEQ ID NO: 245678 - protein, 35 aa, Glycine max
  Clone ID: PAT_MRT3847_6387C.1.pep
KRVGKLCLVDPYLVNEVSFRKCVPIYNSCQCHILK

SEQ ID NO: 245679 - protein, 57 aa, Glycine max
  Clone ID: PAT_MRT3847_63880C.1.pep
EPLCSPPLSATCQLYVVLRRPLTQTRMISYAHKLFTSMKRDSLSNSDGPCSLQSPIS

SEQ ID NO: 245680 - protein, 507 aa, Glycine max
  unsure (1)..(507): unsure at all Xaa locations
  Clone ID: PAT_MRT3847_63881C.1.pep
LKNDVIIAKSLPESLMERRRRNEFPTFKPTSSASLNFYIKEILPKLKKSKVIGLIIANGGALQSILPPSMAEIQRLRCRVAFHALQFRPEIQMLGRRMVHKLRALGQPFLAFHPGLLRETLAYNGCAELFQDVHTELIQHRRSRMIKEGVLKDELNVDSHLRREKGLCPIMPEEVGILLRVMGYPAKTIIYLAGSELFGGQRALIPLRSMFINTMDRTSLCSEKEFSDLVGPETPLPVNSFRPPPAKSENELKEEWKKAGPRPRPLPPPPGRPIYQHEKEGWYAWITETPTEPDPSPMDLRMEAHRLLWXALDYIVSLEADAFFPGFNNDGSGWADFSSLVIGHRLYENXSFRTYRPDRKVVAELFNMTRENLYHPKHNWTVLVQEHLNXSLAEEGLIRQSLLSKPAMFLSHPLPECSCRIASTKATNRFRGENGQVLYGGEDICPKWMQHANDEGSLEKEGSKSEDEGLADYESNDFVDESESEKNGSKTNQTPLWDQDEEMDPND

SEQ ID NO: 245681 - protein, 45 aa, Glycine max
  unsure (1)..(45): unsure at all Xaa locations
  Clone ID: PAT_MRT3847_63882C.1.pep
KKYYSLVNFVQFETDLVVCVCKICEKLXKKKKKXKKKXKAAPLLE

SEQ ID NO: 245682 - protein, 217 aa, Glycine max
  Clone ID: PAT_MRT3847_63883C.1.pep
MGISRDSMHKRRATGGKKKAWRKKRKYELGRQAANTKLSSNKTIRRIRVRGGNVKWRALRLDTGNYSWGSEAVTRKTRILDVVYNASNNELVRTQTLVKNAIVQVDAAPFKQWYLQHYGVEIGRKKKVASKKDSTEEGEAAAEETKKSNHVQRKLEKRQKDRKLDSHIEEQFGGGRLLACISSRPGQCGRADGYILEGKELEFYMKKLQRKKGKGAA

SEQ ID NO: 245683 - protein, 217 aa, Glycine max
  Clone ID: PAT_MRT3847_63884C.1.pep
MGISRDSMHKRRATGGKKKAWRKKRKYELGRQAANTKLSSNKTIRRIRVRGGNVKWRALRLDTGNYSWGSEAVTRKTRILDVVYNASNNELVRTQTLVKSAIVQVDAAPFRQWYLQHYGVEIGRKKKVAAKKDSTEEGEAAAEETKKSNHVQRKLEKRQKDRNLDSHIEEQFGGGRLLACISSRPGQCGRADGYILEGKELEFYMKKLQRKKGKGAA

SEQ ID NO: 245684 - protein, 217 aa, Glycine max
  Clone ID: PAT_MRT3847_63885C.1.pep
TGISRDSMHKRRATGGKKKAWRKKRKYELGRQAANTKLSSNKTIRRIRVRGGNVKWRALRLDTGNYSWGSEAVTRKTRILDVVYNASNNELVRTQTLVKNAIVQVDAAPFKQWYLQHYGVEIGRKKKVASKKDSTEEGEAAAEETKKSNHVQRKLEKRQKDRKLDSHIEEQFGGGRLLACISSRPGQCGRADGYILEGKELEFYMKKLQRKKGKGAA

SEQ ID NO: 245685 - protein, 75 aa, Glycine max
  unsure (1)..(75): unsure at all Xaa locations
  Clone ID: PAT_MRT3847_63886C.1.pep
HELLPAFDVLGNRTFLLCEVPNGAKIKLVDNMIMSSLINAFSEVLTLTXISGLNPITLLNMLYLLAICNCMFKLK

SEQ ID NO: 245686 - protein, 39 aa, Glycine max
  Clone ID: PAT_MRT3847_63887C.1.pep
FCLKPKAHPSVYRSCQLRRRKFVYLSWFQVLTLKHPSSA

SEQ ID NO: 245687 - protein, 42 aa, Glycine max
  Clone ID: PAT_MRT3847_63888C.1.pep
SYISSVKGVILLTHHFDHVHVHYPLVPAYGFIHGRLLVVTLN

SEQ ID NO: 245688 - protein, 126 aa, Glycine max
  Clone ID: PAT_MRT3847_63889C.1.pep
MDSIQEFMESCNTDITTTTATTTSNSLVGSSNSPSASSTTSSRYENQKRRDWNTFGQYLKNHRPPLSLSRCSGAHVLEFLRYLDQFGKTKVHTPICPFYGHPNPPAPCPCPLRQAWGSLDALIGRL

SEQ ID NO: 245689 - protein, 143 aa, Glycine max
  Clone ID: PAT_MRT3847_6388C.1.pep
MAMAFKMATTGMWVTDECKNSFMDMKWKKEHRYIVFKIDEGSRLVTVDKLGGPTEGYDDLTASLPTDDCRYAVFDFDFVTVDNCRKSKIFFIAWSPTASRIRAKILYATSKDGLRRALDGISYELQATDPTEMGFDVIRDIAK

SEQ ID NO: 245690 - protein, 106 aa, Glycine max
  unsure (1)..(106): unsure at all Xaa locations
  Clone ID: PAT_MRT3847_63890C.1.pep
MQDFSSMKTSPLDLMTGTFKGKXDPNNDSSSTNAAAADFLLENRDFRMLLTTSVAVHIGCVGDYIWRKSYFHKAKPLEXPNAELRSFPXIEVDDGTKKATILLGTQ

SEQ ID NO: 245691 - protein, 107 aa, Glycine max
  unsure (1)..(107): unsure at all Xaa locations
  Clone ID: PAT_MRT3847_63891C.1.pep
XRFSQXXTLXAWXGXVARRRIWXXRCXGGXXXXXKLWTXVXCAARXXPRXXXTKAEXIXPPHMXXXXLXXLSXEXVECXXXXXXXVXXXXLXTXREPNXEXRXXXXX

SEQ ID NO: 245692 - protein, 86 aa, Glycine max
  unsure (1)..(86): unsure at all Xaa locations
  Clone ID: PAT_MRT3847_63892C.1.pep
QFRKFLPHYIRXHLYSLLIYNLPSFLTAEIKYMRDLSNIHMTGLCYDGRYKFWTTHEANLDSTEEVKLDMITNRGITAGRLAKRAH

SEQ ID NO: 245693 - protein, 116 aa, Glycine max
  Clone ID: PAT_MRT3847_63893C.1.pep
WVSWDNSMPPHQDHKPSLFPAPADGRAVFCFKGFNFHYLSHQLPDLFSFIFKGEVKKDASFFFLSKTNLWFVILHTFALEQEVVVVIVVVLEEGVKNAPYIYIYTWGVFLFSTFLD

SEQ ID NO: 245694 - protein, 162 aa, Glycine max
  Clone ID: PAT_MRT3847_63894C.1.pep
TSFAPKKEKAKILGLFSFVVAVFSVVVLVSLFALHGNARKLFCGFAAAIFSIIMYGSPLSIMRLVIKTKSVEFMPFFLSLFVFLCGTSWFIYGLLGRDPFVAVPNGVGSALGTAQLILYFISRDKKGDQKKKPRTEKEEAMEMGTANKNPISNSKGEEQGHD

SEQ ID NO: 245695 - protein, 96 aa, Glycine max
  unsure (1)..(96): unsure at all Xaa locations
  Clone ID: PAT_MRT3847_63895C.1.pep
KLGRGQDKRHDESDAGMVAQLAHEVADAAHGGHGXYPSGAYQAPPEAYPPHQGCPSQHEHTPGEHRPHHGYSTAGYPPASYTGSYHAPHSHGHGGT

SEQ ID NO: 245696 - protein, 175 aa, Glycine max
  unsure (1)..(175): unsure at all Xaa locations
  Clone ID: PAT_MRT3847_63896C.1.pep
LKGTISWGLHFQATSLQHPIPLHAYCGSDWASDPDYRRSFLGPNLICXWSKKQSVVARSSXETEHRSMTLIVAKVTXIQSLLSELQVAHSTPLILCDNTSTVSLAHNLILHSRTKHMELDLFFVREKVLNKKLDVVHVPTMDQIADVLTKALSPSSFISFRSKLKVVERPSSNTS

SEQ ID NO: 245697 - protein, 97 aa, Glycine max
  Clone ID: PAT_MRT3847_63897C.1.pep
YSCDHRRPNLKTGSKSNRSLISRIVQFMPTPWRPICEGKEHTVCAGHRLRESYNSTLLVYWLNTLLYDTGLRVRSKLWLFLSQVSAHYQVHAGEILG

SEQ ID NO: 245698 - protein, 80 aa, Glycine max
  Clone ID: PAT_MRT3847_63898C.1.pep
PNLANPYKLNSCVLGHRKKYIKIICSQLGEETKLSFGIYTIRDCIIAILLTLADDVVHTCGAKTSKKDKFFWLEIRLGGG

SEQ ID NO: 245699 - protein, 45 aa, Glycine max
  Clone ID: PAT_MRT3847_63899C.1.pep
HAFAQFFSPFLTNEYPREKPRSLKDLKDLLFHTQIPSNNNEPYEI

SEQ ID NO: 245700 - protein, 51 aa, Glycine max
  Clone ID: PAT_MRT3847_6389C.1.pep
LPCSKLNSAVVKIKGQIHKYGKVIIVQSGAPQFKVIRYSLVTYIGGTLFGV

SEQ ID NO: 245701 - protein, 84 aa, Glycine max
  Clone ID: PAT_MRT3847_638C.1.pep
SPKTRKGPQRKPKPQKKNPGEGGKKKNPPLNRGSQQNPQTRTPGKTPPPGLKPHPPGGPPKIKTKNPRKKKGNLGMGGPQTQGH

SEQ ID NO: 245702 - protein, 38 aa, Glycine max
  Clone ID: PAT_MRT3847_63900C.1.pep
HLILAIIINVMCIIILNEVLFVLMMYVQVNHVIESLIY

SEQ ID NO: 245703 - protein, 52 aa, Glycine max
  Clone ID: PAT_MRT3847_63901C.1.pep
LTSKDRSREPVPNSWGRLFGNKKKSPIHQSPISMTSGSKEKKSRILIGPWAT

SEQ ID NO: 245704 - protein, 45 aa, Glycine max
  Clone ID: PAT_MRT3847_63902C.1.pep
SSAINLRVPKVMIQAVCHQPRVSISFPSVIDLEQVAISCDIRSNK

SEQ ID NO: 245705 - protein, 51 aa, Glycine max
  Clone ID: PAT_MRT3847_63903C.1.pep
EWREKIFPTFGLGFWFIVFGKVNGRLPSISKCKKQQILFGRCEVYQCECKI

SEQ ID NO: 245706 - protein, 115 aa, Glycine max
  Clone ID: PAT_MRT3847_63904C.1.pep
ADLEVAFLAVLLCMVAVTAPLALAGFPCGRVTSSLIIFVGFLRHGGTPPFACCHGSNSLIASVKTTADRRTACICLLSGVDRIYCLRANLAASLPGVCVVYIRYKISISINCAPI

SEQ ID NO: 245707 - protein, 67 aa, Glycine max
  unsure (1)..(67): unsure at all Xaa locations
  Clone ID: PAT_MRT3847_63905C.1.pep
PTCDDATMAFLHVMRDXDQFLDNVTQALIYMALGRPMPYCAHVXWLIAPDMRQLGQRHGATSPGQLP

SEQ ID NO: 245708 - protein, 79 aa, Glycine max
  unsure (1)..(79): unsure at all Xaa locations
  Clone ID: PAT_MRT3847_63906C.1.pep
TIHYQPVSDASFPKAGYPSWEKLILKDSQDPFTLNAFLYKTASRDKLIRQGYNIVGIIGDQWSDLLGSHIRXSRTFKLP

SEQ ID NO: 245709 - protein, 112 aa, Glycine max
  Clone ID: PAT_MRT3847_63907C.1.pep
MLKILMALLLLSLSFQAYGQFEEWCIADEQTPDDELQRAMEWACGKGGADCSKIQVNQPCYLPNTLKDHASYAFNNYYQRFKNKGGSCYFNSAAITTDLDPSHGSCKYEFVP

SEQ ID NO: 245710 - protein, 457 aa, Glycine max
  unsure (1)..(457): unsure at all Xaa locations
  Clone ID: PAT_MRT3847_63908C.1.pep
MEMEKEKESLTLGKRREPDLPVTVTETTSMPKKARSSERTCVHEVAVPSGYVSSKDEDLHGTLSNPLHNGPMAKSYPFTLDPFQQVSIACLERNESVLVSAHTSAGKTAVAEYAIAMSFRDKQRVIYTSPLKALSNQKYRELSQEFTDVGLIASDVTPAPNATCLVMTTEILRGMLYRGSEVLKEVAWVIFDEIHYMKDRERGVVWEESIIFLPPAIKMVFLSATMSNATEFAEWICNIHKQPCHVVYTDFRPTPLQHYVFPMGGSGLYLVVDENEQFREDNFLKLQDTFTKQNLGDGKRGGKGAGRGGKGGNASGGSDIYKIVKMIMERKFQPVIIFSFSRRECEQHAMSMSKLDFNSQEEKDTVEHVFQNAVLCLNEEDRNLPAFELMLPLLQRGIAVHHSGLLPVXIKELVELLFQEGLGKTLFATETXXICNGXLNMPAKTVIFTLLLRNGDG

SEQ ID NO: 245711 - protein, 99 aa, Glycine max
  Clone ID: PAT_MRT3847_63909C.1.pep
HLFYCRLSKESAKFVRLYPLGLVGLAPAFCPIGFGVPIPWMVEVEEVRGGLHPSSVPGLLFTEWVFVLHLSLVMCSSSGTYSSPAIVVFLDRSSLSRSP

SEQ ID NO: 245712 - protein, 100 aa, Glycine max
  unsure (1)..(100): unsure at all Xaa locations
  Clone ID: PAT_MRT3847_6390C.1.pep
MATLLLPLNSYSPTPIRNPNLSSLKIKVNQRHSPFQTRRLHRTPFVRALEEDSNPETVQDGEVNSLGVKVALSMLRFYQREISPILPKXCRYIPTCSEYS

SEQ ID NO: 245713 - protein, 71 aa, Glycine max
  Clone ID: PAT_MRT3847_63910C.1.pep
TQLFGIQKEISDHTHNAVRENGGFYFNVLAVIPLQLNLHFSLTHSHLRSKSRSLSEKCLRYSALVMFIQTR

SEQ ID NO: 245714 - protein, 70 aa, Glycine max
  Clone ID: PAT_MRT3847_63911C.1.pep
GGASLWFLVFPPGVFKRGVQGEGPQNPKFFGFFWASQKIWAPKGFKRFLKGFGPPKAPKVSPKTASFLGY

SEQ ID NO: 245715 - protein, 273 aa, Glycine max
  unsure (1)..(273): unsure at all Xaa locations
  Clone ID: PAT_MRT3847_63912C.1.pep
MAGLLLGDASHHGTSQGVSQRYSEEKLEDGSRWYFARKEIEEYSPSKHDGIDLKKETYLRKSYCTFLQDLGMRLKVPQVTIATAIIFCHRFFLRQSHAKNDRRTIATVCMFLAGKVEETPRPLKDVILISYEIIXRKDPAAIMRIKQKDVYEQHKELILLGERVVLATLGFDLNVHHPYKPLVEAIKKFKVAQNALAQVAWNFVNDGLRTSLCLQFKPHHIAAGAIFLAAKFLKVKLPSDGEKVWWQEFDVTPRQLEEVSNQMLELYEQNRMP

SEQ ID NO: 245716 - protein, 453 aa, Glycine max
  unsure (1)..(453): unsure at all Xaa locations
  Clone ID: PAT_MRT3847_63913C.1.pep
MSKSVTATKDSGDNTATHLNFFEKFKRFNPLESSWGVLAFFFVASLFIACFFYLDYKGFRSRGTTIIDLDFSSSSSSSSSVSVSGCCTTVKSIRDSGDKCDIFDGNFVWDESYPLFDSXSXALVHQLCRFSHHCQLVPLCFKWLWQPEDCHFPSLEASIILLKLRYKRLVFGGDSIGRNQWESLLCMLSSPFANYARDYVVNGDSIRNFTGSVAFNIEDCQSTNTYYDNDHLSIYYLXPCSTSSMCLQDCSHWCLPGVPDSWNEILYALLLKREDFFRNGDSIRTKXMNMTSEYNFRKSTETVVDWITNEVNINKTYVVFRTYAPVHFRGGDWNTGGGCHLETLPDLGSLPAVSDIHFRTVVDVLSERTNKSKVLNLDLLNVTQMSIRRRDGHASIYYIGPDSTASMQRQDCSHWCLPGVPDSWNEILYALLLKREDIFERRQNTTKISQVPP

SEQ ID NO: 245717 - protein, 53 aa, Glycine max
  Clone ID: PAT_MRT3847_63914C.1.pep
ENTITNCDIDDYVLVGNELHLHLEGSLKSKPTSHVPFESYRFHLEIYKSFSLK

SEQ ID NO: 245718 - protein, 90 aa, Glycine max
  Clone ID: PAT_MRT3847_63915C.1.pep
PFRIQLYNHCVGPALSQPFLLLHRHLSTPNPPSAYSSPPTSKPALCAAWASLTRNPMLTASVTSLVAAVRRRGKGPNQMVSITKNNLCDL

SEQ ID NO: 245719 - protein, 77 aa, Glycine max
  Clone ID: PAT_MRT3847_63916C.1.pep
PGPFMIFWKRIRLVLKRIKNRSGLVLCQRRRSHQFYTFFCMIIILALDWELKGLTIIFQGNKFFTPDRVHCYAVKIL

SEQ ID NO: 245720 - protein, 82 aa, Glycine max
  unsure (1)..(82): unsure at all Xaa locations
  Clone ID: PAT_MRT3847_63917C.1.pep
FLLWISPGLQGMSASEPXIGCISLCIKKNAXAARLNSLAFSVRTTCLQVAYFLLYSLPVLFENSGILCGGNGENYEALPRHC

SEQ ID NO: 245721 - protein, 35 aa, Glycine max
  Clone ID: PAT_MRT3847_63918C.1.pep
KMGFRSLLISYYYCIFKYIYCDPCCKEQYESVKIE

SEQ ID NO: 245722 - protein, 421 aa, Glycine max
  Clone ID: PAT_MRT3847_63919C.1.pep
MSCLLMQSLKSHPALLFSLSNHFSFSSHSVRSFLSSFSTCQHSKESTSIIDYLNAKFDFSRTQSFYISKRVSSSRFPQNPLSVLSFFKQFGFSEAQILFLIRHKPQILFTDVDKILRPKIELFQLLGLERSELCKFISKNSSILTFSLKKTLVPSVEAIGKILCSEKDFVHVLLRCGRILPNYKKFMDNVVFLESCGIVGSHLAMLLKLQPGIFITRQSIIGDYVSRAVDMGFNENSRMLVHAIHSISSLSYKTFRRKLKLIICFGFSNEEGLQMFRRSPTLLRTSEKKVKVGLEFFLHTVMLPKSVLVHQPRVLMYSMEDRVLPRYRVFQLLIEKKLCKKVPSYIHLLCLSEEVFLDKYIPHFRENAEELLVAYKCICFSNKKCLLYIGIFFTRSLGQFGDHKPCWCLWFFFLMTTYSSP

SEQ ID NO: 245723 - protein, 80 aa, Glycine max
  unsure (1)..(80): unsure at all Xaa locations
  Clone ID: PAT_MRT3847_6391C.1.pep
LQKHGEEVEHYIKVPLEDVYDRTTKKLFLFRNVLCSKCQGKGXKSGTTKKSCGGQRTGMKNTRTMIGLLMSQQKQQVSPD

SEQ ID NO: 245724 - protein, 82 aa, Glycine max
  Clone ID: PAT_MRT3847_63920C.1.pep
THCLINIFCGDIHHKEEKMLTGLMKKIASTTMGSCASNPSRKSSGQKRRKQKSGKRRGNGLPSALPELPLKRVSNAGSRVGD

SEQ ID NO: 245725 - protein, 90 aa, Glycine max
  Clone ID: PAT_MRT3847_63921C.1.pep
MLGINQGDSLSLLLLRSGVGGGIYFIFSSRAHDCFGFLHHGSRLLGWWSIDEGSQEEQARLYHEGAIGWGYHLVLLQLTKLSTSVVKGPS

SEQ ID NO: 245726 - protein, 572 aa, Glycine max
  Clone ID: PAT_MRT3847_63922C.1.pep
MMNYFPDEVIEHIFDYVVSHSDRNALSLVCKSWYRIERCTRQRVFIGNCYSITPERLIQRFPGLKSLTLKGKPHFADFSLVPYDWGGFVHPWIEALAKNKVGLEELRLKRMVVSDESLELLSRSFTHFKSLVLVSCEGFSTDGLAALAANCRFLRELDLQENEVEDHKGQWLSCFPDNCTSLVSLNFACLKGEVSLGALERFVARSPNLKSLKLNRSVPVDALQRIMMRAPQLSDLGIGSLVHDPESEAYIKLKNTILKCKSITSLSGFLEVAPHCLAAIYPICPNLTSLNLSYAAGIQGSDLVKLIHHCVKLQRLWIMDCIGDKGLGVVATTCKDLQELRVFPSVPFGDPAAVTEKGLVAISMGCPKLHSLLYFCHQMTNAALITVAKNCPNFIRFRLCILDATKPDPDTMQPLDEGFGAIVQSCRRLRRLSLSGKLTDQVFLYIGMYAEKLEMLSIAFAGDGDKGMLYVLNGCKKLRKLEIRDCPFGNMALLTDVGKYETMRSLWMSSCEVTVGACKLLAKKMPRLNVEIFNENEQEDCSLEDGQKVEKMYLYRTLAGKRKDAPEYVWTL

SEQ ID NO: 245727 - protein, 54 aa, Glycine max
  Clone ID: PAT_MRT3847_63923C.1.pep
PRSESESHPPPPIGQQRPIFQQAPPNNKGRAMGQGLSPEVGRTRPRYRGIAPGG

SEQ ID NO: 245728 - protein, 69 aa, Glycine max
  unsure (1)..(69): unsure at all Xaa locations
  Clone ID: PAT_MRT3847_63924C.1.pep
QSSLHLYCYNKQFTXVTLFCCCSMESCFFRYMTERCSLCHQFCTNPTSDSSQGLILVVVVWGGSTPPGC

SEQ ID NO: 245729 - protein, 76 aa, Glycine max
  Clone ID: PAT_MRT3847_63925C.1.pep
RVTGHQHVHQTNGKLKVGLKMLIWVPTNNYQIYSDQLGACTKSMQEPFLFQRAHHAGVFPINLMYVICDHCSRTRG

SEQ ID NO: 245730 - protein, 77 aa, Glycine max
  Clone ID: PAT_MRT3847_63926C.1.pep
KHCKCVLEKSLYSVLGFFTGVSIFVRQIISFGQGNNSDLRLVWAIYNFRLPPQVWCQLSLTTFGHSSSSSSNNYNES

SEQ ID NO: 245731 - protein, 38 aa, Glycine max
  Clone ID: PAT_MRT3847_63927C.1.pep
QLRINKGAKMGETTKNNTGSKFGVLNMIQMPQGRGLWG

SEQ ID NO: 245732 - protein, 171 aa, Glycine max
  unsure (1)..(171): unsure at all Xaa locations
  Clone ID: PAT_MRT3847_63928C.1.pep
RTTRAIRLTRFEGKRDVELGTGCGVAGXGLYLLGLTDLLLTVIFPVMPALKRNLKVSKPILRKTLKHSVLYWNNPQQIAALNPPFDFAVATDVVYIPRIRXRLVSAMETLVSDDGVVLLGYRLRAPEAHELFWELCERVFHVEKVPHEHLHPDYAYEETDVYLLGKKNKKQ

SEQ ID NO: 245733 - protein, 152 aa, Glycine max
  Clone ID: PAT_MRT3847_63929C.1.pep
MSTEKGGKDESSTWILEGIDIDPIVERPKRDDEAPPNGIMVLKSPNDADVNNNNNSNVRSRVGIQGNNGGRKMMRAESGAARGIKSLRFLDRTVTGKEADAWKSIEKRFTQNAVDGKLTKDKFGTCMGMGAESKDFAVELYEALARRKKVCA

SEQ ID NO: 245734 - protein, 48 aa, Glycine max
  unsure (1)..(48): unsure at all Xaa locations
  Clone ID: PAT_MRT3847_6392C.1.pep
PSLPQQKQVSTLLQLWKSEHGRVYHSHQEDANRHWMIXNNSNDIRDMN

SEQ ID NO: 245735 - protein, 55 aa, Glycine max
  unsure (1)..(55): unsure at all Xaa locations
  Clone ID: PAT_MRT3847_63930C.1.pep
FATRSSDIGNSEDXGGQSRIGTLKNKAIDSSSKFTHSLXKRGKREIYYPVPSMSL

SEQ ID NO: 245736 - protein, 147 aa, Glycine max
  Clone ID: PAT_MRT3847_63931C.1.pep
MDIRFPFSPAEVAKVRMVQFGILSPDEIRQMSVVQIEHGETTERGKPKVGGLSDPRLGTIDRKLKCETCTASMAECPGHFGHLELAKPMFHIGFLKTVLTIMRCVCFNCSKILADENDHKFKQALRIRNPKNRLKKILDACKNKSSV

SEQ ID NO: 245737 - protein, 70 aa, Glycine max
  Clone ID: PAT_MRT3847_63932C.1.pep
ETIDILMARLGRRLRCESYPILWSSILHGPGIVYSHISICYRAAPAYFPEVRILIQYTFIKQLLHLPLIV

SEQ ID NO: 245738 - protein, 59 aa, Glycine max
  Clone ID: PAT_MRT3847_63933C.1.pep
FLDFGKPFLLLKEHDLIIKLRGLDRQDATISSGIAQARFLLTYLGSKGLVKMLHIPDGD

SEQ ID NO: 245739 - protein, 62 aa, Glycine max
  Clone ID: PAT_MRT3847_63934C.1.pep
NLRVRLKIKFIKDAMPHTVDLKRLTLDKPNFFFEFPLLFNFPGLDHETHGLNCKPVFYFSPA

SEQ ID NO: 245740 - protein, 55 aa, Glycine max
  Clone ID: PAT_MRT3847_63935C.1.pep
RPRVRTSSRSRGPGRLLFFFCENVGPSRSQAIILAATIGVLLSFHAHIYTLHTYT

SEQ ID NO: 245741 - protein, 78 aa, Glycine max
  Clone ID: PAT_MRT3847_63936C.1.pep
VRANGPADVATPISRGSSRRFSTPRCNSSDTVAQSTARASRVSAQSGSRMRKVYRVPTRSTTYKRHEPPNHVDHHGWM

SEQ ID NO: 245742 - protein, 292 aa, Glycine max
  Clone ID: PAT_MRT3847_63937C.1.pep
MATITNTFIFKPPISHHPKQLLYSHRSSLRFLTKFKTPSGANSRRLVPKATAAPGAKKTEKPHERVQRVHSVEEFESALESAKDRLVVVEYAASDSEESSQIYPFMVELSRSCNDVEFILVMGDESEKTKELLKREKVENVPHFSFYKSKEKIHEEEGIGPDMLVGDVLYYGDNHSGVVQLHNVEDVQKLIEDHKLDHKLIVLDVGLKHCGPCVKVYPTVVKLSRQMDSVVFARMNGDENESCMQFLKDMEVIQVPTFLFIRDGNIEGRYVGSGKGELIGEILRYQGVRVTY

SEQ ID NO: 245743 - protein, 446 aa, Glycine max
  unsure (1)..(446): unsure at all Xaa locations
  Clone ID: PAT_MRT3847_63938C.1.pep
DDRVPHMDDGSQLLKALNVLMLKILDNADRTSSFVVLINLLRPLDSSRWPSPALNESLASRNQKFSDLVVKCLIKLTKVLQSTIYDVDLDRILQSIHLYLQDLGMEEIRRRAGADDKPLRMVKTVLHELVKLRGAAIKGHLSMVPIDAKPQPIILAYIELNLETLAAARMLTASGPGGQNHWGDSATNNSASGTHSADAQLKQELAAIFKKIGEKQTCTIGLYELYXRITELYPKRVRFAQLQNASEAFRTYIRDGLAQMEKNAAAGRTPSSLPMPTPPPASLNISSPDFAPLSPVNTNPLGDAKLNVKPDPTNFNLPPSSYNEENRAVNAITSRALNSDYTLGDQRNDRFMTGVTSGTLDAIRERMKSMQLAAAAGSTESGGRHLTSANDNLNHGLPPPSQIPHASEHVGTENTMHGGVLPMDEKALSGLQARMERLKSGSLEPL

SEQ ID NO: 245744 - protein, 100 aa, Glycine max
  Clone ID: PAT_MRT3847_63939C.1.pep
MEALQSWVSKHKLASIGALWASGIGATLVAYSCKKSPMKPSLRLIHARMHAQALTLAVLSGAAAYHYYEKRDVQPKPEADYIIPAPNVTQMVEYELQCPF

SEQ ID NO: 245745 - protein, 68 aa, Glycine max
  Clone ID: PAT_MRT3847_6393C.1.pep
LSVLTILELVTFPCVIFKGNVQCLFLHLPINFYQLWIKCQEFYVIVHRQHIQSLRKRRCFSNYFFLIF

SEQ ID NO: 245746 - protein, 97 aa, Glycine max
  Clone ID: PAT_MRT3847_63940C.1.pep
VQSWVSKHKLASIGALWASGIGATLVAYSCKKFPMKPSLRLIHARMHAQALTLPVLSGAAVYHFYEKRDVQPKPVADYTIPAPNVTQMVEYELQCPF

SEQ ID NO: 245747 - protein, 125 aa, Glycine max
  Clone ID: PAT_MRT3847_63941C.1.pep
APPVPKFFRVGVPFSACGVFSAPARVFSSLAVSPSPPWFPNFWTLQKLWLSKLVGLILFFGRFFPPGFFSPRGKIFRFFFLTPGFWEFWGFFAPPRGLGFFPKGFPGLENFCFFFSPKPQIFPFP

SEQ ID NO: 245748 - protein, 136 aa, Glycine max
  Clone ID: PAT_MRT3847_63942C.1.pep
SSPPQPSRAPGAHPWPVPSSRSHDFIICQVADGIGLGSQSSSGRVPHSFPPELNHADGSHLSPVLISDNNCIVNFDMADGIFQASDYLNVKDHLSGEDGATIDLLQLSSQLQRVEHERQSLQVKQENDSSCTLRIT

SEQ ID NO: 245749 - protein, 53 aa, Glycine max
  Clone ID: PAT_MRT3847_63943C.1.pep
QLKAGCPTDKQLILGETSFFKKNNLLRNYKRIKIPIPFSTNLGLRGRKRKPLR

SEQ ID NO: 245750 - protein, 139 aa, Glycine max
  unsure (1)..(139): unsure at all Xaa locations
  Clone ID: PAT_MRT3847_63944C.1.pep
STTKREDTHTSKVIAHQMGGAQNDALTISLHTLKTDISGSHPDQYSLQSTRRLDEPMNMPCKRHLYRTAFPMNEELDRQTLFSVHRPPGPIASXMLDWETDAGSADHFGHEDGLTDPRESETFRALDTHHGMEHQLALY

SEQ ID NO: 245751 - protein, 79 aa, Glycine max
  Clone ID: PAT_MRT3847_63945C.1.pep
RHKKKHKHRHKQKQTLVLRSDLRSSRENQGIHSDLMKSNPIMVLRNRFDWIAVFQRRYSTDEGRRWLQRTDGGAVVARV

SEQ ID NO: 245752 - protein, 89 aa, Glycine max
  Clone ID: PAT_MRT3847_63946C.1.pep
SAETETRQSLSRMWSLNQIGGLQYIYCEAKGEERASLKRLRLRRYVGWCFCECLCAAPFQFLICLLVLAPFFSVVLSLVTPFCRFSQPV

SEQ ID NO: 245753 - protein, 741 aa, Glycine max
  unsure (1)..(741): unsure at all Xaa locations
  Clone ID: PAT_MRT3847_63947C.1.pep
MVHGGSDMLGMRRMVATFAADSGNVPHEATSTSVGGSIDFGTAAAVQYVCSLTDVGTMTRLLYECSAHQTAVAVELYELPPKPTNLYPPLLHIHXSLRRSTSGRLHQVIYTVPAREPSPSRRCXRLRKPFACHDPDNCQKHVCTSHSNGDNSQLGRYVQTFLQIDAQYKDSGSDQLQRDRLLAAKKQLEGIVRKKLSAAVDQRDHPAILRFIRLFTPLGVEEEGLQVYVGYLKKVIAMRSRMEFEQLVEMMDQQNVNFVGCLTNLFKDIVLAIEENSEILSGLCGEDGIVYAICELQEECDSRGSVILNKYMEYRQLAKLSSEINAHNTNLLAVGGGPEGPDPREVELYLEEILNLMQLGEDYTEFMISKIKALTSVDPELLPRATKAFRSGSFSKVAQDLTGFYVILEGFFMVENVRKAIKIDEQVPDSLTTSMVDDVFYVLQSCLRRAISTSNISSVVAVLSGASSLLGNEYHEALQHKTREPNLGAKLFFGGVGVQKTGTEIATALNNMDVSSEYVLKLKHEIEEQCAEVFPAPADREKVKSCLTELADSSNAFKQALNAGIEQLVATITPRIRPLLDSVGTISYELSEAEYADNEVNDPWVQRLLHAVESNVAWLQPLMTANNYDTFVHLIIDFIVKRLEVIMMQKRFSQLGGLQLDRDARALVSHFSAMTQRTVRDKFARLTQMATILNLEKVSEILDFWGENSGPMTWRLTPAEVRRVLGLRVDFKSEAIAALKL

SEQ ID NO: 245754 - protein, 154 aa, Glycine max
  Clone ID: PAT_MRT3847_63948C.1.pep
KDAREGDDNLSTVHHELHFTVQECIDALGEVIYHIETYDVTTIRASTPMFLMSRKIKSLGVKMVISGEGSDEIFGGYLYFHKAPNKKEFHEETCRKIKALHLYDCLRANKATSAWGVEARVPFLDKSFISVAMDIDPQWKMIKRDSVQIEKWVT

SEQ ID NO: 245755 - protein, 148 aa, Glycine max
  Clone ID: PAT_MRT3847_63949C.1.pep
EYADNEVNDPWVQRLLYAVESNVAWLQPLMTANNYDTFVHLIIDFIVKRLEVIMMQKRFSQLGGLQLDRDARALVSRFSVMTQRTVRDKFARLTQMATILNLEKVSEILDFWGENSGPMTWRLTPAEVRRVLGLRVDFKSEAIVALKL

SEQ ID NO: 245756 - protein, 49 aa, Glycine max
  Clone ID: PAT_MRT3847_6394C.1.pep
SSAIEIGVLKSIEIGLAHLEGKCNDDGDHSFIFSCCLYLSLCVYYGLNH

SEQ ID NO: 245757 - protein, 32 aa, Glycine max
  Clone ID: PAT_MRT3847_63950C.1.pep
IYIYIYIYIYIYIYIYIYIYIYIIVFSNTTEY

SEQ ID NO: 245758 - protein, 86 aa, Glycine max
  Clone ID: PAT_MRT3847_63951C.1.pep
DNSTEGVGGASGETVSHICCSCSKSSSCKTNKCKCRTLGGICGSSCGCLASKCANRASGSNESPVEGTGNDSSIQEADKDHLLAAQ

SEQ ID NO: 245759 - protein, 192 aa, Glycine max
  unsure (1)..(192): unsure at all Xaa locations
  Clone ID: PAT_MRT3847_63952C.1.pep
AYGCEKTTEGDVVVQRDLSPLWEIDMNGKVNGAVETCRGDDQWVMSKHFRNYFNFSHPLVAQHLDPDECAWAYGMNVFDLRAWXMTTDVTFSFLCSXQNLRSNLTMWKLGTLPPALIAFKGHVHPIGPSWHMLGLGYQNKTDIESVRKAAVIHFNGQSKPWLQIGFDHLRPFWNKYVNYTNDFVRNCHILDS

SEQ ID NO: 245760 - protein, 139 aa, Glycine max
  unsure (1)..(139): unsure at all Xaa locations
  Clone ID: PAT_MRT3847_63953C.1.pep
VLTATYLINRMPTRVLNYRTPLDTFKTIFPACRLHTEMPLKVFGCTVFMHTPSISRSKLDPRAEKYIFVGYSPTXKGYRVFNPITKKLCVSMDVTFLEHQPFFQKNSLQGENDNVSEDNFLHLHEPLPIPVVHTENTDF

SEQ ID NO: 245761 - protein, 53 aa, Glycine max
  unsure (1)..(53): unsure at all Xaa locations
  Clone ID: PAT_MRT3847_63954C.1.pep
NSDGTCQGVIALNMEDGXLHRFQSCFQQFWXTXGYGRAYLLQCRQITWLRWGN

SEQ ID NO: 245762 - protein, 130 aa, Glycine max
  unsure (1)..(130): unsure at all Xaa locations
  Clone ID: PAT_MRT3847_63955C.1.pep
VFHWCDTNMIRGLVPGMRTRQXGLLDEGITAINVTTAHCLAIMLLLLPPKMGRVRPWYPKDVLGPMLKPLWETRTHLMEYPYTYFDYNDKNMIFILLKHNLRLYDRHTKRRYTNHFVAHMDAAHSAMNAL

SEQ ID NO: 245763 - protein, 60 aa, Glycine max
  Clone ID: PAT_MRT3847_63956C.1.pep
ALFYSLKLSSNVAFMILESRTIRRRPLRVDSGRFGSAHLGSTAAAVAIIAGRSPINNNST

SEQ ID NO: 245764 - protein, 45 aa, Glycine max
  Clone ID: PAT_MRT3847_63957C.1.pep
LLIFLYCYCINYFSLVCKTFGRVIIMSMEFSSFLHLTTHLLELLG

SEQ ID NO: 245765 - protein, 170 aa, Glycine max
  unsure (1)..(170): unsure at all Xaa locations
  Clone ID: PAT_MRT3847_63958C.1.pep
KHVNAYXKINRLLDTGRYRNIMDMNAGLGSFAAAIQSSKLWVMNVVPTIAEKSTLGVIYERGLIGIYHDWCEGFSTYPRTYDLIHSDSLFSLYKDKCDTEDILLEMDRILRPEGAVIIRDEVDVLIKVKKLVEGMRWNTKMVDHEDGPLVPEKILIAVKQYWVANATSTQ

SEQ ID NO: 245766 - protein, 65 aa, Glycine max
  Clone ID: PAT_MRT3847_63959C.1.pep
YLVALLSSIFIQCSVCVSLLFVAFSSIFFYFSKREKYIIKVNSDVNLELKHIFLSAKGNFIRHEN

SEQ ID NO: 245767 - protein, 176 aa, Glycine max
  unsure (1)..(176): unsure at all Xaa locations
  Clone ID: PAT_MRT3847_6395C.1.pep
MGSRKEEERNEKIIRGLMKLPPNRRCINCNSLGPQYVCTSFWTFICMTCSGIHREFTHRVKSVSMAKFTSQEVDALQNGGNQSARELYLKNWDFQRQRLPDHSNVDKIREFIKSVYVDVRNSXTKSSEKPPRDAHKPGIHEDEIRSASTYHSYSQIHPYDYQYENRLYSILFCLLT

SEQ ID NO: 245768 - protein, 106 aa, Glycine max
  unsure (1)..(106): unsure at all Xaa locations
  Clone ID: PAT_MRT3847_63960C.1.pep
RCLSRFCAWVAPAVRSRPLCGALFLASLWAPLFLSLWLLWCPFLGWAGXLWLGGGGWLPPPGLYMPPLFVVSTQPTGRSPPPWCDVTLIIWAQGWALLSGGLAQYS

SEQ ID NO: 245769 - protein, 87 aa, Glycine max
  Clone ID: PAT_MRT3847_63961C.1.pep
MSFGERAKLGNNSIRRRMVVIMACHARYQRVADDVGTAAALVGTDGKDGPGICWLNTNVEICPDNTPDVGSMLLSEAEKHNVAMVGD

SEQ ID NO: 245770 - protein, 79 aa, Glycine max
  Clone ID: PAT_MRT3847_63962C.1.pep
KTVDAWWSHGGWQGVVTRNADCGDDSAQVYFTGECMLMKVCKEDLRISKDWLGDSWINIMAKPEITKAIIFPAPNGFDP

SEQ ID NO: 245771 - protein, 59 aa, Glycine max
  Clone ID: PAT_MRT3847_63963C.1.pep
GNIELIQKLSRVAIDSKRPRLNQPILWKPLQSQLSQWQCLGVTQNQQTRSMKIFGVTLT

SEQ ID NO: 245772 - protein, 56 aa, Glycine max
  Clone ID: PAT_MRT3847_63964C.1.pep
TLVYINMLKQIGMGLLSSHILKCHLHCYTHTHRNCHYYYTKKNLNPHHYAHDLHTT

SEQ ID NO: 245773 - protein, 81 aa, Glycine max
  Clone ID: PAT_MRT3847_63965C.1.pep
LNMCNRQSAWATALSPWYCMHAMLAAPFPSWAPRVSPDPGSQVCSHLHLPHSPPLLVPDTSTPTWSSPIAHKRGGTRDELS

SEQ ID NO: 245774 - protein, 56 aa, Glycine max
  Clone ID: PAT_MRT3847_63966C.1.pep
DTMLYRAKLFVCSLLRNCYNSLRQLHMITECHHKSSRDVLACQGLIHMLSKTLARQ

SEQ ID NO: 245775 - protein, 170 aa, Glycine max
  Clone ID: PAT_MRT3847_63967C.1.pep
QCPGLQIQKHLGGVTSANATVVCVNNGGKGAQGERAYSACLDDYRKGCTCPPGFRGDGVQSCEDIDECNEKTSCQCPGCKCKNTWGSYECKCKSGLFYSRENDTCFGEYSASVLNIWVIILVLVVAVAGGYAFYKYRIQRYMDSEIRTIMAQYMPLDSQPDVSNQVHPNI

SEQ ID NO: 245776 - protein, 278 aa, Glycine max
  Clone ID: PAT_MRT3847_63968C.1.pep
RTRGAARDTVAQVIKSLGVDLKKIKDCVGDPHADIENPVLKAEQDAQIGKGSRGDVTILPTLVINNRQYRGKLSRPAVLKAICSGFLETTEPSICLTSDLETNECLENNGGCWQDKSSNITACRDTFRGRVCECPIVQNVKFVGDGYTHCEASGSLSCQFNNGGCWKGVQGGRAYSACLDDYRKGCTCPPGFRGDGVQSCEDIDECKEKTACQCPGCKCKNTWGSYECKCKSGLFYSRENDTCFGEYSASVLNIWVIILVLVVAVAGGYAFYKYRIQV

SEQ ID NO: 245777 - protein, 114 aa, Glycine max
  unsure (1)..(114): unsure at all Xaa locations
  Clone ID: PAT_MRT3847_63969C.1.pep
MHKFVEIARSNMMMMKLLVLVAATVLVSYECHGSDYQKFPLQMKTGFGGHYSNEVACTSWMLVVEANIVVXWQTVPASCGXYIADYLRGDQYSSSSTIVHQHAYFDATSLIITN

SEQ ID NO: 245778 - protein, 136 aa, Glycine max
  Clone ID: PAT_MRT3847_6396C.1.pep
PRVRGRVGFNTGVMVLDLERWRRAGYTQRIERWMEIQKSPPGRIYELGSLPPFLLVFAGHVAPIEHRWNQHGLGGDNVLGSCRDLHPGPVSLLHWSGSGKPWARLGAGRPCPLDALWAPFDLYGPAGAGAGGEESR

SEQ ID NO: 245779 - protein, 114 aa, Glycine max
  Clone ID: PAT_MRT3847_63970C.1.pep
MAQSYSWLFLATCATLFLLISSATTADAGGAGTAPGMEMTWMPSISMEGAEEEFMLDNEINRRMLASTRYISYCAIHRGSVPCSHRGASYYHCQPGAQANPYHRGCSAITRCRH

SEQ ID NO: 245780 - protein, 104 aa, Glycine max
  unsure (1)..(104): unsure at all Xaa locations
  Clone ID: PAT_MRT3847_63971C.1.pep
IIWCPXXGAXXVXXLXHXAFVXXWXCVPARAXXXXXVXXSXXWRXXXVWVXXXXXLXLLGGFSXWLXVXXVCXLXFXGGVGXIGXXVGVFXSVXWXGXXXVWFA

SEQ ID NO: 245781 - protein, 76 aa, Glycine max
  unsure (1)..(76): unsure at all Xaa locations
  Clone ID: PAT_MRT3847_63972C.1.pep
MNDSQSAATLIHSTTYKIQHLCMAFAKLQCYSSATINLERTELXAHTNRNDKSXNRRCYESEDQDKEIEFKTRQAP

SEQ ID NO: 245782 - protein, 148 aa, Glycine max
  Clone ID: PAT_MRT3847_63973C.1.pep
QLTALGELLYQCHYSYSTCGLGSDGTDRLVNLVQELQHSAASKAEGGTLYGAKITGGGSGGTVCVVGRNCLKSSEHIFEVQQRYKNATGYLPFIFEGSSPGAGKFGYLKIRRRATPEKANSSEDDGALTPEKPNASEDDGAVVVENKS

SEQ ID NO: 245783 - protein, 57 aa, Glycine max
  Clone ID: PAT_MRT3847_63974C.1.pep
KLDPSVYGDQTSKMTIDHLEINLEGLTVDKAIYIRCAIKDQRLFILDHHDTFMPFLR

SEQ ID NO: 245784 - protein, 113 aa, Glycine max
  Clone ID: PAT_MRT3847_63975C.1.pep
ALPPPPVPAYTPAPNIARATLTPTSALAVKSAKSSLPPLKSPMAGTFYRSPAPGEPSFVRVGDKVKKGQVVCIIEAMKLMNEIEADQSGTIVEIVAEDAKSVSVDTPLFVIQP

SEQ ID NO: 245785 - protein, 74 aa, Glycine max
  Clone ID: PAT_MRT3847_63976C.1.pep
MRAGDFFTKEGMPKAPFPHGWKGEQGMYTVGFTRRGLHGTSCEATKIAENIAEQWRTVEDKSHCDSQIILLNKS

SEQ ID NO: 245786 - protein, 262 aa, Glycine max
  Clone ID: PAT_MRT3847_63977C.1.pep
MASSLAPATKAATNLRLTHSLRFSPKPNNLRFATKPGNTLLCTRVKAQLNEVALDSSSNATSPPMKAKSKEEPPAKPLAEPSSSVLATQESVSQFITQVASLVKLVDSRDIVELKLKQHDVEVTIRKKEAMPQPPPAPQPSVVYSPPPPALPPPPVPASTPAPTLARATPTPTSAPAVKSAKSSLPPLKSPMAGTFYRSPAPGEPSFVKVGDKVKKGQVVCIIEAMKLMNEIEADQSGTIVEIVAEDAKSVSVDTPLFVIQP

SEQ ID NO: 245787 - protein, 97 aa, Glycine max
  Clone ID: PAT_MRT3847_63978C.1.pep
ARTGRLVIEDVQTVTFAAYVSWHWYSKHVWGWRTKIGHERKSVDHRWHVGGKRCNSMFCLKIMNVGSCGTFVHCLYGTYTVHSVSSLYGLKQAFVGW

SEQ ID NO: 245788 - protein, 63 aa, Glycine max
  Clone ID: PAT_MRT3847_63979C.1.pep
AMGINSTKPENLNTKKLTVTSHILYTNFLHRKLLLNTNFHAYIQNVYIFLGINQLHNIITPKN

SEQ ID NO: 245789 - protein, 55 aa, Glycine max
  Clone ID: PAT_MRT3847_6397C.1.pep
ILIAFQSDVKKRQREQRKSLCVATTLERVEKNLVITAPMLPDNSIKLGLDLFLEL

SEQ ID NO: 245790 - protein, 77 aa, Glycine max
  Clone ID: PAT_MRT3847_63980C.1.pep
GSSFIQKFCSSLTHGCMVLIDYTIDDWLTPSFISAFKKLSYMIPIFLDIRMCLLTNTLRAFFGEHTAYDHDDHSWGR

SEQ ID NO: 245791 - protein, 145 aa, Glycine max
  Clone ID: PAT_MRT3847_63981C.1.pep
LSWIPQLLLSLQRTEAPHCKLVLLKIATLYPQALYYWLRTYLLERRDVANKSELGRIAMAQQRTQQSISGTSVGSLGGLTDGNARVQGQAGSNLPSDIQAHQGSQPAGGIGSHDGGNSHGQEPERSTSAESSMHNGNDQPLQQGS

SEQ ID NO: 245792 - protein, 165 aa, Glycine max
  unsure (1)..(165): unsure at all Xaa locations
  Clone ID: PAT_MRT3847_63982C.1.pep
IPGXXTHAXPVPXSNSQNNKTLLDDVVPQQVKNDSSYNPSPRKKESTLARGQCEHSVQFALHPTEAPNDAVFSKHSFQTLARSSSNVLRRHHSRPRPEDRERSQFPSRLPRRPSPLQLPHPAPPPGRRPASENPRTWLLHRRQQDVHRPRPLLRRRPQPRIPPLR

SEQ ID NO: 245793 - protein, 174 aa, Glycine max
  Clone ID: PAT_MRT3847_63983C.1.pep
KPVSRARMDVAWSGPSGLSFGGGGCGLALSLKACCTCSQPTTEESISPNLSLRIAVQAYRREEESQFYRSPKRRRERFDQGGFGDSVVMEPSRSRGVQFPFAVMDRVIIKGNKRTPQRFVGREAIVTTQCLNGWYVVKTLDNAESVKLQYRSLAKVMDDPSKPAASSKMPPNWL

SEQ ID NO: 245794 - protein, 61 aa, Glycine max
  Clone ID: PAT_MRT3847_63984C.1.pep
VIIGIHDHSSYKKEKKNVPVTPQKFESLNKNLSCRCTVCYKLQLVKKMHEWAASSSVISYQ

SEQ ID NO: 245795 - protein, 49 aa, Glycine max
  Clone ID: PAT_MRT3847_63985C.1.pep
PKLLMVCPLSLVTRRERSNHNCTSELDDADVHLGSMRHCQRHRSLVDLA

SEQ ID NO: 245796 - protein, 122 aa, Glycine max
  Clone ID: PAT_MRT3847_63986C.1.pep
KLMHITQNNFWQHTDHKTKASCIPYKTTLYYTYKVKQYFTCVLLINPLQVGEREDKKRKRTKISYLQPNISYINLSNNTDFSSATQYMLHTLVTSSNCMHVNRNLVQKNKCLAQHYQVHSAL

SEQ ID NO: 245797 - protein, 196 aa, Glycine max
  Clone ID: PAT_MRT3847_63987C.1.pep
MGVSGGGRQVPRKKQTMFLKVQLHWNVIIAAENLQPEGLMLHRAIIVRLLSDFAVKKATKDLGYFLAVTTLEKIGEGKVRQHTGDVLFPVVFNAITFKFFKGEILEGVVHKVLKHGVFMRCGPIENVYLSNLKMPDYRYVPGENACFMNDKMSKIGKDVTVRFSVIGTKWMEAEREFQALVSLEGDYLGPISTPDI

SEQ ID NO: 245798 - protein, 80 aa, Glycine max
  unsure (1)..(80): unsure at all Xaa locations
  Clone ID: PAT_MRT3847_63988C.1.pep
EPIKVHRSRSSRITARTKRAAQRRAYLGVGRLRVREVVCEDRAKLLTLRMDERLWSXXRRRRRRRRVXSLKVEAKVAIMT

SEQ ID NO: 245799 - protein, 60 aa, Glycine max
  Clone ID: PAT_MRT3847_63989C.1.pep
GSFMVKHNQLIFHGEGKTPKKVVFPFLGDPPILWGKIDFYGPPQHDRSFFTFGMYSRVCS

SEQ ID NO: 245800 - protein, 55 aa, Glycine max
  Clone ID: PAT_MRT3847_6398C.1.pep
LPTLTDSWVDLVKRKRNLQACQITLYGLVLDPDQTSVITHAFTNIELGHFNIQQP

SEQ ID NO: 245801 - protein, 98 aa, Glycine max
  unsure (1)..(98): unsure at all Xaa locations
  Clone ID: PAT_MRT3847_63990C.1.pep
VKVQVQSRSPHGLAIVILXSGGTQGFTDVKLCQEECREWSRMRRAFGTVFDTEEPARGDIELRSQLGGDAQQXWDQSKNVISGNWQVVVVYVSEIQSG

SEQ ID NO: 245802 - protein, 82 aa, Glycine max
  Clone ID: PAT_MRT3847_63991C.1.pep
PVVPCRWWLGLVLAVHGVFLIGRCGRWWGCLCLSCWSLGGCRGPLRDIFVAAPPLVVFSPWGGVGRAGWFGPVPAGVPAFPC

SEQ ID NO: 245803 - protein, 44 aa, Glycine max
  Clone ID: PAT_MRT3847_63992C.1.pep
TFSWFINRVWIIALLTVSFKDQFISSHMLRLCSFCPPYCKYYSL

SEQ ID NO: 245804 - protein, 71 aa, Glycine max
  unsure (1)..(71): unsure at all Xaa locations
  Clone ID: PAT_MRT3847_63993C.1.pep
SASKCGNGCRGXKMYPDLSYTESTTKKTWDMGAAPLKAQIKSAKMGAPVENDGXKRGPNCTCNPCTRTEGN

SEQ ID NO: 245805 - protein, 70 aa, Glycine max
  Clone ID: PAT_MRT3847_63994C.1.pep
YHHPSRIWMVSQIDLILTSTCASTPFHTSAVYRFSLAASAHRRSEQCTRLYRDSASARARASFRELACER

SEQ ID NO: 245806 - protein, 60 aa, Glycine max
  unsure (1)..(60): unsure at all Xaa locations
  Clone ID: PAT_MRT3847_63995C.1.pep
KKEQNDATQKILRHLSLCVGVLYLGRXREEIXXXGXPXRXXPXXXXXXXVCVCCVDRDSL

SEQ ID NO: 245807 - protein, 223 aa, Glycine max
  Clone ID: PAT_MRT3847_63996C.1.pep
RRKCVMELLMVVDDFFVTASLALLLTFIVLKLVEAMNDTHAAPKRHVVHLEPDHPVSRAKTKVGLISPVQEEIATCAVGAKHGIEKKAAVKSVRPRGKRFTVNPAQSKVKVEPVPPAQSESTIGFVSPVQSAMCVETERKVEEAMVEPELVQLVKTEGTVGFISPIQADTCVGTEDKKEEATVEFDSHVVVESPVKSDTDIVVTEEIAEGNEGTQELDDSAEK

SEQ ID NO: 245808 - protein, 101 aa, Glycine max
  Clone ID: PAT_MRT3847_63997C.1.pep
LVITSPQLQFECTMQESLLRSCSRKADSPNRSSPGELSIHDLALALAPSLFQSSSHHVTNEAKTSMHLIANLAFKKGKFIHRSRSAPSLLFTDMGLDFQEP

SEQ ID NO: 245809 - protein, 154 aa, Glycine max
  Clone ID: PAT_MRT3847_63998C.1.pep
LPIFASSRTFRTLQFLSFLSCKSSDIYFVTASCNNNNCKGIPNFSKLFYTLLVRFERFQSCIFLNQTRIASHFRSHSQKTEDLASFPRRRFHVEPGAREKALLAEDATLKPFKSYKKSVKKLRKIGNALTIVVVAGCCYEVYVRAFTREEAQKL

SEQ ID NO: 245810 - protein, 40 aa, Glycine max
  Clone ID: PAT_MRT3847_63999C.1.pep
IEKETILLQFFLKLFILSIFYVCGAVDNESCSVLFFFFLE

SEQ ID NO: 245811 - protein, 71 aa, Glycine max
  unsure (1)..(71): unsure at all Xaa locations
  Clone ID: PAT_MRT3847_6399C.1.pep
SVAGRTPVXRPPSPKFTTDRELTNATFAFDRATEAFLSPRTYGEQPNSPAXGGRLHDTRDTSNCTESNVAI

SEQ ID NO: 245812 - protein, 77 aa, Glycine max
  Clone ID: PAT_MRT3847_639C.1.pep
KSINLVNLESVGGNAFGNPLNARMSFSKLVNFPMSVGMWLEIRFPSTLLFLFEYENFGEDGGTATRALALRAKGARA

SEQ ID NO: 245813 - protein, 90 aa, Glycine max
  Clone ID: PAT_MRT3847_63C.1.pep
MLGDFIIRCLILILGYAYPGFECYKSVEQNRGDNGELRFWCQYWVIVALFTVLEKFTDAVIGWWFPLYGELKLALFIYLWYPKTKGTGYV

SEQ ID NO: 245814 - protein, 155 aa, Glycine max
  Clone ID: PAT_MRT3847_64000C.1.pep
MYSGSSDGESHDAPQSQRKIPPASSMLWVRNLRRFIGSGAGLGSEALMELETKRILLDIFKEKQKKTAEAATIPTFYKKKPEDGSISHRVQRLAKYRFLRKQSDLLLNADDLDAMWVCLKENCVIDDATGAEKMNYEDFCHIASVCTEQIGPKCR

SEQ ID NO: 245815 - protein, 133 aa, Glycine max
  unsure (1)..(133): unsure at all Xaa locations
  Clone ID: PAT_MRT3847_64001C.1.pep
MYSGSSDGESHDAPQNQRKIPPASSMLWVRNLRRFIGSGAGLGSEALMELETKRILLDIFKEKQKKTAEAATIPTFYKKKPEDGSISHRVQRLAKYRFLXKQSDLLLNADDLDAMWICLRENCVIDDATVPKR

SEQ ID NO: 245816 - protein, 83 aa, Glycine max
  Clone ID: PAT_MRT3847_64002C.1.pep
SLILSHSRPKRGDLTNYWGSSIPILNKTLIITLSHVIICSTNNRSLQLVAQILHLPILLITCPLKHSTAIIINTQKNLISTLL

SEQ ID NO: 245817 - protein, 70 aa, Glycine max
  Clone ID: PAT_MRT3847_64003C.1.pep
VVFFCFPVSSVKPSFLLLPPPSFCFFVAFLFPGFPPLRVFFFLVLLFFGPPLNVGTIHKKLNKKKKKPPK

SEQ ID NO: 245818 - protein, 95 aa, Glycine max
  Clone ID: PAT_MRT3847_64004C.1.pep
DETSHPLSQKVSPGICILFHGVRFSHSLVNFIRKFTDLLNRVIARYHSHHPIMLLYHSPHEVSRTPHKQNLLHYLLEFHCASNSVYSDTLKSNPL

SEQ ID NO: 245819 - protein, 52 aa, Glycine max
  Clone ID: PAT_MRT3847_64005C.1.pep
LGESTDQNSWYGFYTFLHQREYITLQLILMLMKTLINVHLLHGCQHQNRFSM

SEQ ID NO: 245820 - protein, 114 aa, Glycine max
  Clone ID: PAT_MRT3847_64006C.1.pep
PSNFPICPFCPSQFIQLASIDGGRITARALNQTTGMPCVLSRAKAPDAYRIMLFYKTCQIEHHLTNACYNNSDQPSHNERLERCKCITRPRTAFTLNPNPMFKTGTQVLLRFYP

SEQ ID NO: 245821 - protein, 119 aa, Glycine max
  unsure (1)..(119): unsure at all Xaa locations
  Clone ID: PAT_MRT3847_64007C.1.pep
KIKALVSLVVPFWVDWNCXCYQMVPFRMDNWFWGRTSEGEWPSXRLVVKPNTIFAFKTFLEXCLETTKGFIHWEPFXSDFQTGNPQGYFYGRDLEVHSKDTFVVNIDWTVLFNISYFKK

SEQ ID NO: 245822 - protein, 129 aa, Glycine max
  Clone ID: PAT_MRT3847_64008C.1.pep
MRMGRKCSYCGNFGHNSRTCNTHKRGLKLFGVQLDLCSSSSSSSLPLTSPCTSSSSSTPFDIMKRSLSMDYLVSSRIISPSYNFLLGGGADENSSDKTITDGYIPSVGGGGLTSTTHHQERKKGVPWSE

SEQ ID NO: 245823 - protein, 82 aa, Glycine max
  Clone ID: PAT_MRT3847_64009C.1.pep
SDGGEDTRGPTGMIEKNGVFSFSDSRVHYFLVDPLSPSSSNGRPALPSGTAIILEDRQQVCLTSVRSTFGFSRKVSKVTAMD

SEQ ID NO: 245824 - protein, 50 aa, Glycine max
  Clone ID: PAT_MRT3847_6400C.1.pep
LLKGTPYSKNVWIREKIKPNYFPLMALQDTRYKKMFVTMKSGCVLLGKKG

SEQ ID NO: 245825 - protein, 56 aa, Glycine max
  Clone ID: PAT_MRT3847_64010C.1.pep
DKTTKRYSFQNTKARDLYPTKILSLQRKSEASLDDRISTMSVCDIITRHTSHHTFN

SEQ ID NO: 245826 - protein, 50 aa, Glycine max
  Clone ID: PAT_MRT3847_64011C.1.pep
TRKKSQAPSPQCFPKIEIFPHPKMGIIVRPFLNVYKGLFQISYLGFFSTC

SEQ ID NO: 245827 - protein, 483 aa, Glycine max
  Clone ID: PAT_MRT3847_64012C.1.pep
MLANNLSPSSVPTSEPFPCTENGTATNKRKRRPAGTPDPDAEVVSLSPKTLLESDRYVCEICNQGFQRDQNLQMHRRRHKVPWKLLKRETPVVRKRVFVCPEPTCLHHDPCHALGDLVGIKKHFRRKHSNHKQWVCERCSKGYAVQSDYKAHLKTCGTRGHSCDCGRVFSRVESFIEHQDACNMGRLRPHESRQEDKTTSTSGTRQSLLLERTCNEANQLHHAPNHLPWLQTTVPSFMNNPITAITTAETSSKSNNKLLHPNLDLQLSTPTNNNNSNTSNTNTSNIANPIDNAAISAKRDHYHENHSTHLQLSIGSSDMSEKNDQSNRNSSEKSSNNSNNINDQNNKQQSNNMALLRVQEQAREHLRIAMAEKAYAEEARKQAKRQIELAEKEFTNAKRIRQQAQAELDKAYALKEHAMKQINSTMLQITCHFCKQQFQARNATTTSPDDNSLVLSYVSSAITTEGGEVENDNIAKDHAKDNN

SEQ ID NO: 245828 - protein, 370 aa, Glycine max
  Clone ID: PAT_MRT3847_64013C.1.pep
CLHHDPCHALGDLVGIKKHFRRKHSNHKQWVCERCSKGYAVQSDYKAHLKTCGTRGHSCDCGRVFSRVESFIEHQDACNMGRLRPESQPLQPSACLSRTASSPSPSSETNFSTAPWPTRMIIPKPSEPPTIFMNNPITAITTAETSSKSNNKLLHPNLDLQLSTPTTTNNTSNVANRIDAAISPKRDHHHHHENHSTHLQLSIGSSDMSEKNESNRNSSEKSSNSNINDQNNNNKQSNNMALLRVQEQAREHLRIAMAEKAYAEEARKQAKRQIELAEQEFTNAKRIRQQAQAELDKAYSLKEHAMKQINSTMLQITCHGCKQQFQARNAATTPDENSLVLSYVSSAITTEGGGEVENDNNAKDHGKDNN

SEQ ID NO: 245829 - protein, 118 aa, Glycine max
  Clone ID: PAT_MRT3847_64014C.1.pep
SQEDFRNKSHLIGDDARRLQELLQSSELARRCCPCRATTYSRMGGRRSWFCERRKDTRRPNTRRRRRKKQQCKGVGETMLSAQTAMTTINMAAEAAVTMDTITEATVTTHRWVFEWLA

SEQ ID NO: 245830 - protein, 90 aa, Glycine max
  Clone ID: PAT_MRT3847_64015C.1.pep
HGGLSPELENLDQIREIQRPTEIPDSGLLCDLLWSDPDASIEGWAESDRGVSCTFGADVVAEFLDKNDVDLVCRGHQVNLSFHFWRVNRL

SEQ ID NO: 245831 - protein, 240 aa, Glycine max
  Clone ID: PAT_MRT3847_64016C.1.pep
MKGIDLFCSSSGSTAVTSSMHHRSTLQRSTKSFDHDRRKSQLHVPCSSQLPINPKPYFEKHRKSSADKQNWDMRRKSSADVNDFYTHTHASADGSSRRYLFGDGPFIEWVSESNKISAMVPSQHDVKVKDKLVVKNRNDLPTLRSSSSARSKDQVVVLRVSLHCKACEGKVRKHISKMEGVTSFSIDMETKKVIIVGDVTPLGVLASVSKVKNAQLWPSSTSSSSLLLSSSSRPTSPWST

SEQ ID NO: 245832 - protein, 56 aa, Glycine max
  Clone ID: PAT_MRT3847_64017C.1.pep
AASHPLLREDDYPQRRGAFTNYNVWVTPYNKTEKWAGGLFVDQSHGDDTLAVWTKQ

SEQ ID NO: 245833 - protein, 68 aa, Glycine max
  Clone ID: PAT_MRT3847_64018C.1.pep
TTILGTVEGKIQTDSEELLIIKTRQSLLEALTEHVKTNHEYDVPEVISLPITGGNLKYLEWIKESTRD

SEQ ID NO: 245834 - protein, 96 aa, Glycine max
  Clone ID: PAT_MRT3847_64019C.1.pep
NFVSVPNLHDRCSSSLLSAFRLFWASASTWVSVPAWVALAFLSFLSISSSLREWLTLLVFSCSLRSVSFRFSPSPFPFFAVLSAKMFFFLFLFPRA

SEQ ID NO: 245835 - protein, 48 aa, Glycine max
  Clone ID: PAT_MRT3847_6401C.1.pep
STSIGNGKIRNIILLSFYLSLLKYFSILHYLSFRIVKKFNFFNDILKK

SEQ ID NO: 245836 - protein, 101 aa, Glycine max
  Clone ID: PAT_MRT3847_64020C.1.pep
RWSPGCWLATCPGSLAVPHSSPPPARRSQSHAFLMCCSTCWDGGQPLFGDVTFSGILRTRASNQGGYAGGPLHPGGAPGVPGPGSVTPCLLSPGVRDARDA

SEQ ID NO: 245837 - protein, 97 aa, Glycine max
  Clone ID: PAT_MRT3847_64021C.1.pep
ASSSPRPPANLTRRPPQDIFRTPGVLSPNLEKTIIPRSRVMKVLKERGLVKSDSRLSSAILITEKLFLEKFVGRFQDRVPGLMEVYKGHVDHLDSVL

SEQ ID NO: 245838 - protein, 139 aa, Glycine max
  unsure (1)..(139): unsure at all Xaa locations
  Clone ID: PAT_MRT3847_64022C.1.pep
AAVVLVAWPCHGAGYQRFPLRMKTGYGEHSWEVKCSSIGLAVEAHSIRAXKTIPEECVEPTEDYITGEQFRSHSKTVNQEAFFCANEREIHHNDVXIFGLDSTVLCNNPYYEKHEYGVNDFSETLYGEWVNAVNTASMP

SEQ ID NO: 245839 - protein, 49 aa, Glycine max
  Clone ID: PAT_MRT3847_64023C.1.pep
NQTHHISVNFMIALFVLRVYNYASFSLIMNACSLLITNLNWQVTFVSFL

SEQ ID NO: 245840 - protein, 79 aa, Glycine max
  Clone ID: PAT_MRT3847_64024C.1.pep
IFGTKNVYQDNFFCYIKSLIPRIANRTTQKRSTNKITEGYRIYVIGTFFLPTSTLNLQQKYSTPIAFYLNRICFPYKIF

SEQ ID NO: 245841 - protein, 118 aa, Glycine max
  Clone ID: PAT_MRT3847_64025C.1.pep
HTSKKHVKDRKHSEGNNVTPFSSRSSTPTFGMSPIHLLHRHLAGRSDSAQTSPRTSNYENEQCDVDGSPSTSYHPETDETPMQVLGPHSTTEVPISTKHDINFSPSEFSFEKRNTRRD

SEQ ID NO: 245842 - protein, 35 aa, Glycine max
  Clone ID: PAT_MRT3847_64026C.1.pep
FAHKVTLHMYVIPFNSLSDKNDMILYYKASDKRDE

SEQ ID NO: 245843 - protein, 101 aa, Glycine max
  Clone ID: PAT_MRT3847_64027C.1.pep
GILLLGRYMHILSGNSVRSCLNYIINIHHGLSSSFKGRNPCKQGCEARVKLIEATSHFVTEKLASGPIITQTDERDDDTDNLQSYVQKSENLYKQCLSRGV

SEQ ID NO: 245844 - protein, 80 aa, Glycine max
  Clone ID: PAT_MRT3847_64028C.1.pep
GESPLVREVDQLKKKVDKVGKTQAPLFQKWAEGFKVFQKDKENFLKGLSKEEMELLDGLKMETGEVKKFFGGALPIRKIR

SEQ ID NO: 245845 - protein, 100 aa, Glycine max
  Clone ID: PAT_MRT3847_64029C.1.pep
ALFRPGRVPEKFTVPNGGPLYCAFPTCYGRLGLGHGSTLSGGGVFTVGSPGVQIREFGFPGSIGVQEGWHLAPFSALCSARLGRFFISPGPRVFSSMHAN

SEQ ID NO: 245846 - protein, 100 aa, Glycine max
  Clone ID: PAT_MRT3847_6402C.1.pep
IALPTLLFQTRQTPDAVLRYLTDNLGLSETQSLRIIRCIPRLLRTIVTGYPCILERKLHRQIIPSFDFFSNMFPSHHRSTSQPESNTWRTKLMVYSTTTG

SEQ ID NO: 245847 - protein, 58 aa, Glycine max
  Clone ID: PAT_MRT3847_64030C.1.pep
GHMISSIALEKYTTIAVQLQVVYIAHRVNLIYIRVSCQHHISRAETSNTPDTSAHGSP

SEQ ID NO: 245848 - protein, 68 aa, Glycine max
  Clone ID: PAT_MRT3847_64031C.1.pep
HAFDNTTFQHQLKPNYTFSVLITIKRTTQNATYNKARLISLENDQANSYERDSTKNTIDETVYSNLLD

SEQ ID NO: 245849 - protein, 178 aa, Glycine max
  unsure (1)..(178): unsure at all Xaa locations
  Clone ID: PAT_MRT3847_64032C.1.pep
ELKKSLCLQTWPNCLSCATLSAGSRYETPDNLGSAHVLRSACGLTTSSHSTFAITRLIQERGANLYAVNDRDSILYTMECNLQALEPCLKVLHAVTSNQVFKPWELSDNIPRLQYELALVPPEARVLDMLHGAAFRTGLGNSLXIPKYLLGSQGTETLQHFVGNTFLXNRTVVAGSGI

SEQ ID NO: 245850 - protein, 279 aa, Glycine max
  Clone ID: PAT_MRT3847_64033C.1.pep
ERQSFTDEIEKLKHDKEQLLVELQKYQHEWQAYEIQMHSSKDRLEKLEQNQQKMVSSVSHVLQKPVISVNILPLTETMDRKRRLPRSGHFYDEASVEDAMETSQMLPRENADNTTVLTLNVERLDQLESSMAFWEAIVHDIGDTFVQIQSSMDLDESTSCADSPSLSCAQLDVEVRHKSPGIDMNSEPTTAAVPEPVASKEQPAGTTVAATGVNDVFWEQFLTEDPGASETREVQSERKDYEGRKNEGKPSDLNKFWWNKRNANNLPEQMGHVGQAEKT

SEQ ID NO: 245851 - protein, 60 aa, Glycine max
  Clone ID: PAT_MRT3847_64034C.1.pep
FVITLPDKTITLDVKSSVPIDTVKARIPDMEGFPPDLHRLVFAGNHVVDGLTLADYNMPK

SEQ ID NO: 245852 - protein, 118 aa, Glycine max
  unsure (1)..(118): unsure at all Xaa locations
  Clone ID: PAT_MRT3847_64035C.1.pep
IFGNGLNPVRQFPSEPVVVNVPCGSERGGLPPPAWISSPVTNGPSEXHKRIRPALGKGKKIVFLTKVDPFPVAXRAVLFGVKNEILSSNAPTPMLTRLFENCKSPKYRVNKCPLAFVN

SEQ ID NO: 245853 - protein, 55 aa, Glycine max
  Clone ID: PAT_MRT3847_64036C.1.pep
GPSDFSLFLGEGLNVCPIVFNCWEGEPPFDPFGFHYQKSFGTRLLYCGGFNRVDI

SEQ ID NO: 245854 - protein, 52 aa, Glycine max
  Clone ID: PAT_MRT3847_64037C.1.pep
NFLLPRRKVVIQGRCCYDDFKRIGFLIFLLSNLDFFWLSVVVFFSFDNYARS

SEQ ID NO: 245855 - protein, 37 aa, Glycine max
  Clone ID: PAT_MRT3847_64038C.1.pep
GNIWIFGPRVLYSLSCEMFKTDEWVFGGGAVLAYIML

SEQ ID NO: 245856 - protein, 59 aa, Glycine max
  Clone ID: PAT_MRT3847_64039C.1.pep
KREVLSTSTLLISLLETTSFYTSRQVKVTLIEGRASIELHFTFAPLCVTNTECLSLAHM

SEQ ID NO: 245857 - protein, 172 aa, Glycine max
  Clone ID: PAT_MRT3847_6403C.1.pep
MKKCELCKVPARIFCESDQASLCWDCDAKVHSANFLVARHVRTLLCRTCRSPTPWKASGASLAHAASVCDRCAAAEETEESEAGNDDEPDTEDDDDVDNQVVPWSSTPPPPPPSSSSGSECSECKNNVASFSASEQETTTSSLKRQREDDDDASSDPDPQVLRRVGRLTEVA

SEQ ID NO: 245858 - protein, 221 aa, Glycine max
  Clone ID: PAT_MRT3847_64040C.1.pep
ICSSRFSPSSDAIGSPSHNYSSLRSGLSTSEPRALSSGSGANPRSASWLERQGDSEFGIPYSLRTLAVASEGGSSRLVSELRNVLGLMRRGGNVRFEDVVILDHQSFLSGIADVRDRHRDMRLDVDNMSYEELLALEERIGNVSTGLSEETLLKHLKQRKHSAEKGPQIDAEPCCVCQEDYGDEDDIGTLDCGHDFHSSCIKQWLMHKNLCPICKTTGLAT

SEQ ID NO: 245859 - protein, 91 aa, Glycine max
  Clone ID: PAT_MRT3847_64041C.1.pep
HFAFSLISIFDSTLTFSLLHLATLIYYVWYGLGWVPGRPIPNLQWIFYTLPTSWVLLTPNLHCCWIFVTYCIPLEHLVIPCSFSDSFNYII

SEQ ID NO: 245860 - protein, 101 aa, Glycine max
  unsure (1)..(101): unsure at all Xaa locations
  Clone ID: PAT_MRT3847_64042C.1.pep
MQGQRGTVGSMPETLEFDCGSASGNSTVDQQICWNNVNPAENQIPDYILSPGDMNSSYGNSIINHEWXKLSGWSLGEPSSSNTPNEVNINEQKRELGWSST

SEQ ID NO: 245861 - protein, 326 aa, Glycine max
  Clone ID: PAT_MRT3847_64043C.1.pep
MSQNLNLNAGLADSGSDDSQHLELPNLNKSSGSANECIPPNVGSGSFLLPSGNNAFLVEDTDGRPSCSLDTRRVSCKRKAVEGNNGQSSDAGSSSYSQHTDGSAWHTIPTQDNAGSSSRRSIPSEEVNARLGLGIGDEASENVSDSKTAGSSESFHGNFRLRLNPSNPPNSVPPTAFSTGSMIRHSGVPPSSQVSQRLHFVDNSLNLMSAPPIDNVVPQSQPLVIHVPALPRNRQSFRWSGGSSSRNIHSSNSVICADRDQQDASSRRMSRNMLEHPVFVPATDLRNLVQNPTVRASSSSSENLSIPGNVASSSRTGSNPATNPSS

SEQ ID NO: 245862 - protein, 213 aa, Glycine max
  Clone ID: PAT_MRT3847_64044C.1.pep
RKKKIGTIYPGNSGAWCLVFCFCLADSGSDDSQHLELPNLNKSSGSANECIPPNVGSGSFLLPSGNNAFLVEDTDGRPSCSLDTRRVSCKRKAVEGNNGQSSDAGSSSYSQHTDGSAWHTIPTQDNAGSSSRRSIPSEEVNARLGLGIGDEASENVSDSKTAGCSESFHRNFRLRLNPSNPANSVPPTAFSTGSMIRHSGVSILSSIPKTSFC

SEQ ID NO: 245863 - protein, 144 aa, Glycine max
  Clone ID: PAT_MRT3847_64045C.1.pep
QDRATAHYGAVTGLKATEDGMYLLSAGSDSRLRLWDVESSCNTLVNFETVRLQINKPLQLATTQDSALVFVPCMRSVKAFDMWSGNTYTILRGHYECVNSCWFNQHDQELYTGGNDRQILVWSPARSIADEMEGTAEDQDNWSS

SEQ ID NO: 245864 - protein, 83 aa, Glycine max
  unsure (1)..(83): unsure at all Xaa locations
  Clone ID: PAT_MRT3847_64046C.1.pep
LCYNHEMSSXLSHCDDYYRVTYPCSPGAVFYGLAANAIFKNYNYGSCGKALKIDLLSHPXYIELNATLVFQAAMCRWMNPMKK

SEQ ID NO: 245865 - protein, 174 aa, Glycine max
  Clone ID: PAT_MRT3847_64047C.1.pep
MEEEQSVNGTMSGSKTTQELAMEGQEYLEETIENAFQILSSMNDELCNPVLWSTSPSTSPNADATSDNSNHHADASAASAAAGGALEEARARYKKAVTALRTILTAIPTSQKEKTFDAGSAASPADEAEIDKLEERASSLRRELANKNLHLKTLIDQLRDLITDISTWQSPFST

SEQ ID NO: 245866 - protein, 66 aa, Glycine max
  unsure (1)..(66): unsure at all Xaa locations
  Clone ID: PAT_MRT3847_64048C.1.pep
VYYSNFFSFPFKSTLLITTSLTRISLXFCSLSDVHGFLGYLILNXXKSNNCKWLGVVTKKKLPELC

SEQ ID NO: 245867 - protein, 84 aa, Glycine max
  Clone ID: PAT_MRT3847_64049C.1.pep
THSTGLLVLQNEGLADRMSSWERKNSRWDSRSQPVFLPVGRKMCRRAGAYASSNRAVWKTRLSLSTCLGTGSSLKILCHSVLAS

SEQ ID NO: 245868 - protein, 97 aa, Glycine max
  unsure (1)..(97): unsure at all Xaa locations
  Clone ID: PAT_MRT3847_6404C.1.pep
SYPTRIAWHHKAGKNSRRKLKNLVHNKKYTPLILQLTYVSSITFNXNTKTGGPFEAIKHAAXRSHMANKLLYIGGNLYKPSKRDMPGVNFTGGYQVS

SEQ ID NO: 245869 - protein, 104 aa, Glycine max
  Clone ID: PAT_MRT3847_64050C.1.pep
YRLDRARLLVRTPLPPAIRMEVRVGVGDSQYGVWVAEEIGLEVGSARNRTALSEGWSEEILSEDVGDADDAINDGDTQPSCLPEPPHGKRTPSDIQGVEGETNG

SEQ ID NO: 245870 - protein, 74 aa, Glycine max
  Clone ID: PAT_MRT3847_64051C.1.pep
KTKEKKKILLKQQKKKKKEGKKRKEEEKEKKKKKKKKNCNREKKKKGGGPLRGPRFTSRALPSIIFFFGPPKSN

SEQ ID NO: 245871 - protein, 49 aa, Glycine max
  Clone ID: PAT_MRT3847_64052C.1.pep
RFKLFSFLSPPLLLLLLLPPFYLSLCGFCEKDPPPHFYLEGGFFPPGIK

SEQ ID NO: 245872 - protein, 123 aa, Glycine max
  unsure (1)..(123): unsure at all Xaa locations
  Clone ID: PAT_MRT3847_64053C.1.pep
MGPELTAHIERAFHKQPHVFQNKNIYVGKTNMVRXGGWRWVKDIGLGSRTSKTVIEGDYIDQKGAFTGGGCIRGRFLNGTAVSTKMHPPLVIRREDLHFIPKYFSVRALTQEPFRPRVVLFTG

SEQ ID NO: 245873 - protein, 42 aa, Glycine max
  Clone ID: PAT_MRT3847_64054C.1.pep
YFFYFALYVIPLTAIFQRRGFYVIRAKVISKKTSSVAGPLSH

SEQ ID NO: 245874 - protein, 38 aa, Glycine max
  Clone ID: PAT_MRT3847_64055C.1.pep
DKQTNHDHANTIDLFYPHGPYHHSLNLVQPQLGGGTPT

SEQ ID NO: 245875 - protein, 101 aa, Glycine max
  unsure (1)..(101): unsure at all Xaa locations
  Clone ID: PAT_MRT3847_64056C.1.pep
RRSYVIPCYIYYCGCQALSVHHMTNTVCADAVIGLCASPVNXHAVSSGLMRRSHAEXRKIELYSHGFDARCTGDGITRXGLNHMTVTHLDLVKCXMQIDPA

SEQ ID NO: 245876 - protein, 247 aa, Glycine max
  unsure (1)..(247): unsure at all Xaa locations
  Clone ID: PAT_MRT3847_64057C.1.pep
MTRRMHRRTVSPWIPLAGPPFFILFYFYFLFYFFFYFFFFFFFFFFFFFLKKKAPFFKGKGETISQPRRTGPKPWGGPQKIPKKPPNRGGGNPPEKTPPGGKNQXKKPEPNPGQRERDPGGLGLNPKGGPPGKNWGGPQGNRPGPMGKGGAPEPGPPPRGPPRGGGLKKRNKPGPPGKIKPGGPHRGKRKRPPCGRFKGKTPGGPQNRGQIPGGPRTPNQGTRNPGFRGGKKPFLKTRKNHPSPPFF

SEQ ID NO: 245877 - protein, 71 aa, Glycine max
  Clone ID: PAT_MRT3847_64058C.1.pep
FVRPRVRFVCVLQRKKKKMVSVAVKVMVYSFEHISLAMDLKLTLALVYNFFLKQVLYLRYLLIKSFTYTHI

SEQ ID NO: 245878 - protein, 446 aa, Glycine max
  unsure (1)..(446): unsure at all Xaa locations
  Clone ID: PAT_MRT3847_64059C.1.pep
MEISNDSGTKKPKSLTSVVWNHFERIRKADICYAVCVHCNKKLSGSSNSGTTHLRNHLMRCLKRSNFDVSQLLAAKRRKKDNTISLANIGFDEGQRKEEYIKPTIIKFEPEHKKDEIINFGSSKFDQERSQLDLARMIILHGYPLSLVEQVGFKVFVKNLQPLFEFTPNSSVEISCIDIYRREKEKVFDMINRLHGRINLSIETWSSTENSLYLCLSAHYIDEEWTLQKKLLNFVTLDSSHTEDLLPEVIIKCLNEWDIDCKLFALTLDDCSINDDITLRIKERVSDKRPFLSTRQLLDIRSAAHLIKSIAQDAMDALHEVIQKIRESIKYIRSSQVVQGKFNEIAQHAKINTQNLLFLDFPVQWKSTYLMLETALEYRTAFSLFQEHDPSYSSTLTDEEWEWASSVTGYLKLLVEIMNIFSXNKFPTANIYFPEMCDVHIQLIDW

SEQ ID NO: 245879 - protein, 95 aa, Glycine max
  Clone ID: PAT_MRT3847_6405C.1.pep
VISNLYFSAEKKKKKKKKKKKRGAAYERPIPPTLNSTPNRDRPPFPFTVWQIRFGLAWAKVFPVCKGKLLSVYHTTQHPSLKRKASGVPCVRTNP

SEQ ID NO: 245880 - protein, 39 aa, Glycine max
  Clone ID: PAT_MRT3847_64060C.1.pep
DFELMPPPGSHKKEYATPMDLDLSIFWLEESEIGSLHLE

SEQ ID NO: 245881 - protein, 89 aa, Glycine max
  Clone ID: PAT_MRT3847_64061C.1.pep
PPLAAPLPRSSSPPAPAPSTPPSRTSPHLRLSSQPSPPLNSTPMSSTLSPPSLTNLDPSPPSRLLSSPPPPPAQNRTEHSSPDGRGDGI

SEQ ID NO: 245882 - protein, 82 aa, Glycine max
  unsure (1)..(82): unsure at all Xaa locations
  Clone ID: PAT_MRT3847_64062C.1.pep
FSGCYTRTGKLSLPRGTCRNANRMPISIWGGAGAENDLHMNRPNAVPSMSRXYAGDVDSEAAKMTCPYLKGTDCFIIAHGKL

SEQ ID NO: 245883 - protein, 188 aa, Glycine max
  unsure (1)..(188): unsure at all Xaa locations
  Clone ID: PAT_MRT3847_64063C.1.pep
MTPTHVILCVSKLRRAGIKINPSKESESFLNVKFRRGVIEMPSLTADDFMSSFLLNCVALEQCYSGCSKHFTAYITLLDCLVNTYRDVEYLCDRNVVENHLGTEGEXASFINNAGKDVAVDLDLCYLSLLFNDVHKYYINSWHVQWASFKHTYFDTPWSFISLLAASILLLLTVAQTYFSASQYFHQT

SEQ ID NO: 245884 - protein, 64 aa, Glycine max
  Clone ID: PAT_MRT3847_64064C.1.pep
MCYSILSKCARHFILFLRVKILEVCYENLSTQKICICKIFKISFHIYGYMLRGLSKTTQRPFFF

SEQ ID NO: 245885 - protein, 92 aa, Glycine max
  unsure (1)..(92): unsure at all Xaa locations
  Clone ID: PAT_MRT3847_64065C.1.pep
PNRAAAFFCILFFYFWPLHLSVDFQWXSPTILTQVPFPFRDTLEAYSHARVLHALAIRRRLAYAPGIPARADPLIVSRWDSTNEDELLPSMP

SEQ ID NO: 245886 - protein, 93 aa, Glycine max
  Clone ID: PAT_MRT3847_64066C.1.pep
KKIADIMLIQLFDRLHVKQIALQATQTFMYRVVQNGYNPSYEARPLRTPIILLLQCSMVYNMLAREIKEADSVIVNLDSDGNVIVLNGNIAAP

SEQ ID NO: 245887 - protein, 128 aa, Glycine max
  Clone ID: PAT_MRT3847_64067C.1.pep
PTHPFNNYTSLTLSHQPYTKHNGQAPNSQNLSRLIFYPLYSPSISPTSTSNSFSITHSKIDYINHTKLKIITSLFTETTPNPTKTHTLITNLFTYYTLTQLILFQLSTPNSISLHIHLYINSLLISNT

SEQ ID NO: 245888 - protein, 48 aa, Glycine max
  Clone ID: PAT_MRT3847_64068C.1.pep
FFFFFFFFFFFFLRDQMVVHVSNHHSIAELMDKHHHIFSLQSHFIMYQ

SEQ ID NO: 245889 - protein, 154 aa, Glycine max
  Clone ID: PAT_MRT3847_64069C.1.pep
MAALLQAAATFMHPTKLSMSNTLQQMFTKSIFKALGLEPVGAKTVTCSIDADLKDLAHMCVDATNISGFDLAIFDLVVSGASADGVAKRLTFDVLQSRTYLEVMGTGTVYQCPTVDGRLDSFDFKTRKYIAKKLWLDPTSFTVKAEGVDQIAPI

SEQ ID NO: 245890 - protein, 104 aa, Glycine max
  Clone ID: PAT_MRT3847_6406C.1.pep
EKVKKRMAGKIKKRFAWDIMNGDDPIQKPPEKPITFFFENLVVKRRRSPQIKEIEDQSLEKIDGLNKASKKDLELLLADDKGTDPVVKEYNLKFKKGKGKKWRK

SEQ ID NO: 245891 - protein, 82 aa, Glycine max
  Clone ID: PAT_MRT3847_64070C.1.pep
TPKIPKNPFLKGFKNWGGGFAFFKPPKCSGWTQRTKIFFFLAPSRVYLGAPWGEVNHRVLTLLFSSSFPTRGRGGGGAPLGN

SEQ ID NO: 245892 - protein, 220 aa, Glycine max
  Clone ID: PAT_MRT3847_64071C.1.pep
MPETLVKRKGDNFIHTGNDPGKVFPLEAPYPIPLQPFEGNLHANISDASATAAISEGLHPALPSKNKGKHQQSEDASSLISSMNPTQTPKSVEDDFFTTATDAFSHAHVDAESNVIDFSYLEPPPLSNRGLLFKENPREAARFAEPTSKSDDAAGSHLLITSELSDSTPRNSITESSDILHSGNMSNLNMMPTSTGKPLKADGHTINDALPQTYKQLPDS

SEQ ID NO: 245893 - protein, 90 aa, Glycine max
  Clone ID: PAT_MRT3847_64072C.1.pep
SSSRIFSRAEAQLLDRHINPVARTDQYSNPVILTDYRCNPIQLTDVTTTSTFTSYSVFIILFILFHNFIYFFFNTLYNLYTIFYFIFNLN

SEQ ID NO: 245894 - protein, 100 aa, Glycine max
  Clone ID: PAT_MRT3847_64073C.1.pep
FSAYREPMGVIIVAYLFPSSLSPEILEGLLGSVGGVMAFLTLHEMLPLAFDYAGQKQSVKAVFLGMAFMSASLYFLSISLPEDLSFKVPSEGVSQSVQGQ

SEQ ID NO: 245895 - protein, 245 aa, Glycine max
  unsure (1)..(245): unsure at all Xaa locations
  Clone ID: PAT_MRT3847_64074C.1.pep
MDSQVAVALALSLVGGVSTSIGALFVIVNKAPSLKMLGLLQGFAAGLMLSISFFDLAHNALNSLGFLKGNLWFFAGKNGDEGGKDIMKKHRRQVLFSGIVTAVGMIVWEFGVHLGSLKAVLXINFVIAISLHNIPEGVAVALPVSFATQSKWQAFKLASLSGFAEPLGVIIVAYLFPSSLSPEILEGLLGSVGGVMAFLTLHEMLPLAFDYAGQKQSVKAVFLGMAFMSASLYFLSISLPEDLSL

SEQ ID NO: 245896 - protein, 241 aa, Glycine max
  unsure (1)..(241): unsure at all Xaa locations
  Clone ID: PAT_MRT3847_64075C.1.pep
RMLGLLQGFXAAGLMLSISFFDLAHNALNSLGFLKGNLWFFAGVIFFAVVASFIPEPTLTPTSDVKGRKKNGDEGGKDIMKKHRRQVLFSGIVTAVGISLHNFPEGMAVFLGSLKGIRVGINFALAIALHNIPEGVAVALPVYFATQSKWQAFKLASLSGFAEPLGVVIVACLFPTSLNAEILEGILGSVGGVMAFLTLHEMLPLAFEYAGQKQSVKAVFCGMAFMSASLYFLRISLPEDM

SEQ ID NO: 245897 - protein, 139 aa, Glycine max
  Clone ID: PAT_MRT3847_64076C.1.pep
PQLVKSAILLHFQLFRSHSTLSITIPTVFGPPYHYSLGLPTFFGRIQPYPSPFLSFRSGFSLIKTGLIRGLQDSSRGLPIKHTPKDQHPCLHAIGSYFFLSPTHFPKSIPPPPPPPPPPPPPPPKEGGRHTVMTGNLPW

SEQ ID NO: 245898 - protein, 131 aa, Glycine max
  unsure (1)..(131): unsure at all Xaa locations
  Clone ID: PAT_MRT3847_64077C.1.pep
LEGLSPARGTGGRIGASERERVTPQRGPNRGRQWTAPEAGGSPPVGRAVPSWQAGERGGGSSMPVYRKDEFCWAYHSDQLAEEIMLPSSALENVRLXRGGRNLSSSWGPVGGGNNEEESRVDLFSGPASLA

SEQ ID NO: 245899 - protein, 1245 aa, Glycine max
  unsure (1)..(1245): unsure at all Xaa locations
  Clone ID: PAT_MRT3847_64078C.1.pep
MKIQKKVNGVLILDPRAAEKILRSLIAKFDYVICAIEESKDLDSMTVDQLMGSLXAYEERFNRRHDEPLEQVLKAKASLKENGGESSQKARGRGRGRGRGRGHGQGRGGRGDRDNFDNNEWRSHQSTRSHGRGRGRGRNNYEKAYERRYDKSNVECFNCHKYGHYSWECRKNVEEKVNLVDDKEEVEESTLLLSLNNGEKEDKCLWYLDNGASNHMCGCKEKFVELDEKVKGNVSFGDSSKVQIQGKCTILISLKDGAHKLITDVYYVPKLKSNILSLGQLVEKGYEIHMKDCCLWLRDKNSNLXNKAPAMNRVNEFLAGAGTEAPEVDEENMISRPSVSYDDMWAKTLLESSELEEDDAKSLGSSSPDSTGSVETSISSHFGGMSYPSLFSSRPQTTDKAPASRGSTYEGYGSPIREEPPSYSSSVMQRHESFENPLAGNGLHSFGSQDDERASSGNPQHGSALYDFTAGGDDELSLTAGEEVDIEYEVDGWFYVKKKRPGRDGKMAGLVPVLYVXSILNHVRKLLXLPILAKRLFLLYFIQCCFHSKFPCSHVACHSGCSPSKYLVSWSLPNSSSCMLSKYHXHANKHVFIGYDASSKGYKLYNPNNGKTIVNRDVEFYEEGTWNWEEKEDTYDFFPYFEEIDEEALTPNDSTPALSLTPSTNEASSSSEGSSSERPRRMRNIQELYDETEVINDLFCLFVDSEPLNFDEAMKDKRWRQAMEEEIKAIEKNNTWELSSLPKGHEAIGVKWVFKIKKNAKGEVERHKARLVAKGYKQQYGVDYDEVFAPVARMETIRLLISLAAQMKWRIFQLDVKSAFLNGYLEENVYVEQPMGFVIEGQEGKVLKLNKALYGLKQAPRAWNTRIDKYFQDNGFVRCQNEYALYVKTFNNGDVLFICLYVDDLIFTGNNPNLFEDFKESMSREFDMTDMGLMSYYLGMEVKQTENGIFVSQERYTKEVLKKFNMLDCNPVNTPMEGGLKLSKFDRREKVDSTVFKSLVGSLRYLTNTRPDILYAVGVVCRFTEAPTSPHLKAAKRIFRYLKGTIDFGLFYSPSNNYKLVGFCDSDFAGDVDDRKSTTGFVFFMGDCVFTWSSKKQGIVTLSTCEAEYVAATSCTCHAIWLRRLLEELQLLQKESTKIYVDNRSAQELAKNPVFHERSKHIDTRYHFIRECIAKKEVELTHVKTQDQVADIFTKPLKFEDFRRLRARLGVQKNFPIKGGLKLVAKFLQKGSHRVSKDNNAPPCV

SEQ ID NO: 245900 - protein, 77 aa, Glycine max
  Clone ID: PAT_MRT3847_64079C.1.pep
MFMCVSVGAHTFYSNCFGTPRIRYIVIQVNEKLFPCQLSNKNVDMADKAVQLAVETWGKRSLTELEAYERLSYTCEK

SEQ ID NO: 245901 - protein, 67 aa, Glycine max
  Clone ID: PAT_MRT3847_6407C.1.pep
LQLKLSILSWVVSPDKRSVMFKQHPSIVLPMNSPLFMAMALCVGTLSGNDMCLGSQSMYLSFGGQGT

SEQ ID NO: 245902 - protein, 46 aa, Glycine max
  Clone ID: PAT_MRT3847_64080C.1.pep
AQNTARARNNSRSSASARRAPARRSTMAETESVAIQAEINQRLRRS

SEQ ID NO: 245903 - protein, 67 aa, Glycine max
  Clone ID: PAT_MRT3847_64081C.1.pep
LSHSLSLKYHSKVHILKVLNYIIWMLVVDAILPPRALDRRLQEDWARDTREGPRVLMSLRIDFGPMG

SEQ ID NO: 245904 - protein, 60 aa, Glycine max
  Clone ID: PAT_MRT3847_64082C.1.pep
AREREAKNCLILVSADPILNLSLTDRLSPDTHTLGTITLWTMRTRLHSLPEAPGSGLPLS

SEQ ID NO: 245905 - protein, 64 aa, Glycine max
  Clone ID: PAT_MRT3847_64083C.1.pep
FEPWNLAPPLLYKRSPLVHVGVVALKRPRINACCCLLQSSTKKPWAQKQKPFPGCVVPAYQKRP

SEQ ID NO: 245906 - protein, 101 aa, Glycine max
  Clone ID: PAT_MRT3847_64084C.1.pep
AFVVAWPNMIVFDDWLVLANTHEFSGGKLPVDTRDRIFGNGRYAVSKLPLEAEFANVTWGTELGGLPITGWIISVGNSRCLYIIRWFPTGLTQGWKNEFST

SEQ ID NO: 245907 - protein, 34 aa, Glycine max
  Clone ID: PAT_MRT3847_64085C.1.pep
KTSNLIGAVRMLTDLILPIIKHPPKRSNQKFVFY

SEQ ID NO: 245908 - protein, 114 aa, Glycine max
  unsure (1)..(114): unsure at all Xaa locations
  Clone ID: PAT_MRT3847_64086C.1.pep
FLSTTTNGEFVQGKDLAMAKVNVTCAAVGSTSSYTPTPLXESGLQKDRGXIVEYLGRMYYLAHNXVTSSQEKDLIEEDLSFDIKXRSRXENGSLTQTQFGSGKTLLYHIIDAGS

SEQ ID NO: 245909 - protein, 144 aa, Glycine max
  Clone ID: PAT_MRT3847_64087C.1.pep
EACSHKGLVDKARWNFDHMAKQYKILPDIKHYGCIVDLLSRFGLLEEAHQMIKTAPLQNSAILWRTLLGACRTQGSAGLAKVSFQQLAKLGRLTDGDYVLLSNIYAEAERWDEVERVRSEMIGLHVPKQVAYSQIDMTESDKLP

SEQ ID NO: 245910 - protein, 55 aa, Glycine max
  Clone ID: PAT_MRT3847_64088C.1.pep
ISSIVELNYPFKFFLSFSFFLSLFLLLRSPIYHSISSILLCWIVKPLRELLEFDL

SEQ ID NO: 245911 - protein, 46 aa, Glycine max
  unsure (1)..(46): unsure at all Xaa locations
  Clone ID: PAT_MRT3847_64089C.1.pep
WSFLWEFLNITCKMYSGFIXILIARHFXLHFSSMVLECLNPPSFCA

SEQ ID NO: 245912 - protein, 49 aa, Glycine max
  Clone ID: PAT_MRT3847_6408C.1.pep
HMEVQRLFFLTHTAQKLQGRTRGRRTCERAKYPTKEANGLSRLPPKLIL

SEQ ID NO: 245913 - protein, 68 aa, Glycine max
  Clone ID: PAT_MRT3847_64090C.1.pep
MVCFCFLVDQRRKVRRSKPAAGTCSRCGGGASVAEMMTQTRFCYVPFYSKSWKAIICTFCGATLKSYR

SEQ ID NO: 245914 - protein, 102 aa, Glycine max
  unsure (1)..(102): unsure at all Xaa locations
  Clone ID: PAT_MRT3847_64091C.1.pep
GLXLLPAXFXXXCPGXGLPPXLXXXLFXPRGWGXXXGFGLXLXRXXLXLLXGXVPFXRGAPRCXFXVLLXLPVXRXXSXXCCLLSPSPSGCFCVLLLPVPRS

SEQ ID NO: 245915 - protein, 98 aa, Glycine max
  unsure (1)..(98): unsure at all Xaa locations
  Clone ID: PAT_MRT3847_64092C.1.pep
KVLPSEISCQFLWQTWVQPVIHDDNWLEQGCRSFHRVLVEXEIERSILSLHVXHQQSIRLSRVGSFLESGDVCSSLQRASELWXRRTFIRPKVEVRSI

SEQ ID NO: 245916 - protein, 69 aa, Glycine max
  Clone ID: PAT_MRT3847_64093C.1.pep
HMSVIRYYRSKIVAVLYNVYYGILYLVDTLLVHFVVYGDFKVLYLKMKGDYHRYLVEFKTVADLNDAAE

SEQ ID NO: 245917 - protein, 78 aa, Glycine max
  unsure (1)..(78): unsure at all Xaa locations
  Clone ID: PAT_MRT3847_64094C.1.pep
NTYAGKDTTVANIDFRENPVFYTPQRAQEENIDSSASNIRTEQASKSSPPHTTRMPMAAIPILKDXSARRPDCNIEAA

SEQ ID NO: 245918 - protein, 107 aa, Glycine max
  unsure (1)..(107): unsure at all Xaa locations
  Clone ID: PAT_MRT3847_64095C.1.pep
SLCPAGYNRDRVLIHPPDVYYISLGLIDEDAIPKYELTNHDGRPLAKXYSTVLMLQHLAKQTAYSMLLTLKKDAVYALPNKLPTAAIVPDMTPFPANLYISTLTPPI

SEQ ID NO: 245919 - protein, 55 aa, Glycine max
  Clone ID: PAT_MRT3847_64096C.1.pep
QHYLLPRLHYQSYIGSALASAQLHDAPSCRFLLFDLHFLLLMYRAPNSASSSPSL

SEQ ID NO: 245920 - protein, 43 aa, Glycine max
  Clone ID: PAT_MRT3847_64097C.1.pep
IRVELYPNLLHCLFFFSHHPFFTRCLYSYERISSHSSYYPINL

SEQ ID NO: 245921 - protein, 290 aa, Glycine max
  Clone ID: PAT_MRT3847_64098C.1.pep
MDSQPGLSLGLSVPLSSPAAPLCDTTSVLWRLFNKRHPIKEEEEEDEDYGETINFMDQSVKRKIEGHQQPCFPSKRVAVDSSVGWWNQPLGVADPEIFYIMGKEKQRQFKGIELIASENFVCRAVMEALGSHLSNKYSEGMPGAKYYTGNQYIDEIEFLCCQRALLAFDLHPNNWGVNVQPYSCTSANFAVYTGILHPGDRIMGLDSPSGGHLSHGYYTLGGKKVSAASIFFETLPYKVNPQSGYIDYDKLEEKALDFRPKILICGGSSYPREWDYARVRQVADKCGAML

SEQ ID NO: 245922 - protein, 78 aa, Glycine max
  Clone ID: PAT_MRT3847_64099C.1.pep
VPPGGVFHRETVDPTASAEPSHVPQPASLRGPALRSANLRHLLPTISLRMHRRGPCRLMRSVVLCRTTMVSLRAVGEH

SEQ ID NO: 245923 - protein, 71 aa, Glycine max
  unsure (1)..(71): unsure at all Xaa locations
  Clone ID: PAT_MRT3847_6409C.1.pep
IXXXGXXXXXXRXXYXSXLXXTCXXXXXTRVXXXXXXQXXLXNXXXXAXXISLFXDVRXCWXGTCXVXXMR

SEQ ID NO: 245924 - protein, 58 aa, Glycine max
  Clone ID: PAT_MRT3847_640C.1.pep
DSLRGGGKWSNGAEMTEEEALAEQQRMFAEARARMNGGAIASKQPDAAQKKKKKIKPP

SEQ ID NO: 245925 - protein, 90 aa, Glycine max
  unsure (1)..(90): unsure at all Xaa locations
  Clone ID: PAT_MRT3847_64100C.1.pep
VPXXXXXXXXXKXLXTXXIIXLSYFPXKIPRLTSXYPRXLXLFPXXSEHLAVASXCXXXSSSADQVQFXLLLQPWKIHNLSLTGWXSVYX

SEQ ID NO: 245926 - protein, 80 aa, Glycine max
  unsure (1)..(80): unsure at all Xaa locations
  Clone ID: PAT_MRT3847_64101C.1.pep
IARSDFGLGNNQIMCKLISLVNFEWLMNTFKINLLRSQPRYFIGVCFLXAFKLDLYLLQVLQPFFKLNPCGNPDHWSFIW

SEQ ID NO: 245927 - protein, 124 aa, Glycine max
  Clone ID: PAT_MRT3847_64102C.1.pep
ERERTNPRRHRTARPGQTHALKSPTNRNRTKERAEGKSPTPPPPRREEEKKEREAGKKKGRKKGDTSGQTKGQGRRAAKKTTPKRTQNTIRDREQQKKQKQPERQRRQKKRRKKTGPEQRKKQK

SEQ ID NO: 245928 - protein, 47 aa, Glycine max
  Clone ID: PAT_MRT3847_64103C.1.pep
RGFFFPGVFPAPANNRSAADGPETPSGSNVGPVKPLFGFLIPKTLKG

SEQ ID NO: 245929 - protein, 47 aa, Glycine max
  Clone ID: PAT_MRT3847_64104C.1.pep
SLGGKHMTSPLSKSYNIYTFESHHEHQGVYLATLTKAFSNLGTNGVT

SEQ ID NO: 245930 - protein, 157 aa, Glycine max
  Clone ID: PAT_MRT3847_64105C.1.pep
MENKNLTSKCFFYYNPSHFFRLFFCLWILMVPVASEERWDGVVVTQSNFLALQAFKQELVDPKGFLRSWNDSGYGACSGAWVGIKCAQGQVIVIQLPWKGLKGHITERIGQLRGLRKLSLHDNQIAGSIPSALGLLLNLRGVQLFNNRFTGTIPPSV

SEQ ID NO: 245931 - protein, 437 aa, Glycine max
  Clone ID: PAT_MRT3847_64106C.1.pep
MIVRLGLIVAASLAAFTVKQLNVKSSKPELKDEGSEEEHVTRVTDLLQENERVEEEEKEEVKLISSIINRANDFEDDILPEFEDLLSGEIEFPIPPDKDEKDKVYEIEMAHNATELERLRQLVKELEEREVKLEGELLEYYGLKEQESDIVELQRQLKIKTVEIDMLNITINSLQAERKKLQEELTQGASAKRELEVARNKIKELQRQIQLEANQTKGQLLLLKQQVSTLLVKEEEAARKDAEVEKKLKAVNDLEVAVVELKRKNKELQHEKRELTVKLNVAESRAAELSNMTESEMVAKAKEEVSNLRHANEDLLKQVEGLQMNRFSEVEELVYLRWVNACLRYELRNNQTPQGKVSARDLSKSLSPKSQEKAKQLMLEYAGSERGQGDTDLESNFSHPSSPGSEDFDNASIDSSTSKYSSLSKKTSLIQKFKKWG

SEQ ID NO: 245932 - protein, 71 aa, Glycine max
  Clone ID: PAT_MRT3847_64107C.1.pep
SLPQDKNPPPENVMVIYLSPFPPMLEEQTMGLFVLLNFQMCLFTQLHFDISSLRNLLIVNMIFLKYIWLVK

SEQ ID NO: 245933 - protein, 170 aa, Glycine max
  unsure (1)..(170): unsure at all Xaa locations
  Clone ID: PAT_MRT3847_64108C.1.pep
LVIGYVSDYNGHSIDNELDDYLQDHGDVQSVVEICFVLYVMMSVLRILLGGQRSVDGALDNVQTDLETAFGIALNDAVNVAYAVHHALELTVVFSAVCFTIDVIIYXKLRSLAMDKVIYRLTNCXLTGAIIVGAYLIPNIIHTFQDTGPTSAACVGFSIGAIITLDDCFN

SEQ ID NO: 245934 - protein, 89 aa, Glycine max
  Clone ID: PAT_MRT3847_64109C.1.pep
PRVRNNVLLNAQEKVNCSKITKIREERNANSIYYGSATFRTYVQFSSNPLEIFHYLCKSFTDFEHTLGSLTLVFKILTIQETHYLLITI

SEQ ID NO: 245935 - protein, 186 aa, Glycine max
  Clone ID: PAT_MRT3847_6410C.1.pep
ILLPAMPGSIMVSVLEFMDLPLSSSTSIRASLGKIEYQVNDKGNLSFPLTSLRDDLIFKILDSEGNEISRTGVQIKLILEKGVLEDNFPLGGGHLRLKLQFILSDEERDRIRSLRQSALKKKHDELLSSSRRGEESDSRTVIGNAALPFRRNDECSIFSRITKETTSTRSRSPIARSCWFRRRQRI

SEQ ID NO: 245936 - protein, 50 aa, Glycine max
  Clone ID: PAT_MRT3847_64110C.1.pep
GKFTLSVTKTKFKKGKVKGVFQSFHPSDTNLGAKAPKDVKIQGIWYDQLK

SEQ ID NO: 245937 - protein, 71 aa, Glycine max
  Clone ID: PAT_MRT3847_64111C.1.pep
HTPIMTAWTDHIIIKTDYIGISLSVRVQYPCSIDRLLIIYSRIIYIRTKRITPDTFKLTTLRYIVSLKCFI

SEQ ID NO: 245938 - protein, 54 aa, Glycine max
  Clone ID: PAT_MRT3847_64112C.1.pep
PKGFSGGHFIGVGRSEPAEASIKSGCACSFLIFINTEFQEVAFRILNVANIEYH

SEQ ID NO: 245939 - protein, 232 aa, Glycine max
  Clone ID: PAT_MRT3847_64113C.1.pep
ILFLFPSTIKGRISTAGSLAHQRTKPNQSMPSFMAFLSHPYFFAALSASLTLLVVQLLFRKLNKRHSRKKYHPVAGTIFNQMLNFNRLHHYMTDLAAKHRTYRLLNPFRYEVYTTEPTNVEYILKTNFENYGKGLYNYHNLKDLLGDGIFTVDGEKWREQRKISSHEFSTKMLRDFSISIFRKNVVKLVNIVSEAATSNSTLEIQDLLMKSTLDSIFQVAFGTELDSMCGSS

SEQ ID NO: 245940 - protein, 81 aa, Glycine max
  Clone ID: PAT_MRT3847_64114C.1.pep
YLINIWGWGLLLTRRRKNLSTQLSLVLSQPLTYTMQKKGTRNGAKKRLQLLQSHFFKNMPHSLIYLVKSTPNITCPTKENP

SEQ ID NO: 245941 - protein, 103 aa, Glycine max
  unsure (1)..(103): unsure at all Xaa locations
  Clone ID: PAT_MRT3847_64115C.1.pep
XXLPRAXXXXAXVVXHRFXXDGXXXXXXTXALXSYXXXAXXXXXXXXXXXYSGKXXHXSSTXXPXXXXXXXXXXXYXXXXXXXXXXXLXXXVESXYXAXVXXX

SEQ ID NO: 245942 - protein, 45 aa, Glycine max
  unsure (1)..(45): unsure at all Xaa locations
  Clone ID: PAT_MRT3847_64116C.1.pep
KTSVISISTITFKINLKNEIPFIIYGXINSQSYVKLLGKSLPHHQ

SEQ ID NO: 245943 - protein, 75 aa, Glycine max
  Clone ID: PAT_MRT3847_64117C.1.pep
SEYFPPINEPLKQVLEKNRKSFLIYIKKGVHQEYVEATKEMTHMVFIGDGGKKTRKTENKNFIGGINTYRNRHYW

SEQ ID NO: 245944 - protein, 108 aa, Glycine max
  unsure (1)..(108): unsure at all Xaa locations
  Clone ID: PAT_MRT3847_64118C.1.pep
MERTAMASSATPPRPSLPTPSTSPHTVVTSTFSKPQLRRSHIALPTSTTISLLALFAPPNEAKAAVSIAKDQNGPSLNQVEKTLDQVXXMGSGVLDTAQRVAEVIRNA

SEQ ID NO: 245945 - protein, 77 aa, Glycine max
  unsure (1)..(77): unsure at all Xaa locations
  Clone ID: PAT_MRT3847_64119C.1.pep
YRCGFHRLPSLILFFCLRKQWAGKGEXPAIGIXLGTTYSXVGXWQHDXVEIIANDQGNRTTPSXVXFTDXEXLIGDA

SEQ ID NO: 245946 - protein, 248 aa, Glycine max
  unsure (1)..(248): unsure at all Xaa locations
  Clone ID: PAT_MRT3847_6411C.1.pep
MATAGVQEVRVPPLTSTSEPPSLFDGTTRLYISYICPYAXRVWITRNYKGLQDKIKLVPIDLQNRPAWYXEKVYPENKVPSLEHNGKVLGESLDLVKYIDDNFEGPSLVPSDPAKKEFGEELISHVDTFTKELYSALKGDPIHQAGPAFDYLENALGKFGDGPFFLGQFSWVDIAYVPFVERFQLVFADVFKHDITEGRPKLATWIEEVNKISAYTQTRADPKEIVDLFKKRFLVLLNSENLVAVGIL

SEQ ID NO: 245947 - protein, 76 aa, Glycine max
  Clone ID: PAT_MRT3847_64120C.1.pep
PKEVVGLKFQRSGPHPPPLKKNRFWNFNLAPPQRGSLRPQWKLGSGTIPRSLKAKVMSRCTSFPLMDIFSGPMKKK

SEQ ID NO: 245948 - protein, 88 aa, Glycine max
  Clone ID: PAT_MRT3847_64121C.1.pep
MGDLVFLLVLLLAALILMPEGLATYYKPIKKHPEYNPSMLNPPAYKPPAYKPKPPVYKPNPPVYKPPSTTTPYKRPPYGKIPTMEDNT

SEQ ID NO: 245949 - protein, 153 aa, Glycine max
  Clone ID: PAT_MRT3847_64122C.1.pep
LRASGFYVSALFSLPSLFISPLLLLVAPPPLLCMPPVVCLPRRMHSPLRCFVLPPPPCSLPLLLTVALCPPLPAPHRSFPCPSLAPLPSPPLLTSPCFSSLLLSATPRVLPLNPLQYSGQWAPVTPSAIVPSAPLGPSSSFFLFPSFFLMVKV

SEQ ID NO: 245950 - protein, 37 aa, Glycine max
  Clone ID: PAT_MRT3847_64123C.1.pep
IVSEPMLCYKKQLFFSCKLSPACVDIAWANEVHVVLN

SEQ ID NO: 245951 - protein, 84 aa, Glycine max
  Clone ID: PAT_MRT3847_64124C.1.pep
SFELYCVWSHQLCSAPKFHMVAELLNQPMTEDGLDMGLLNAICKDHSACMKNHPRRKQALKKKNNLGAKAASVVLIKWSLALGP

SEQ ID NO: 245952 - protein, 113 aa, Glycine max
  Clone ID: PAT_MRT3847_64125C.1.pep
GDIRDDVHNMKVSCVGRGLMGYLGNNGSISITMSLHQTSFCFICSHLTSGQKDGDELRRTSDVMEILIKTRFPPVLHIGGESSPHTILEHHRLVWLRDLSHGITLAYTADGLL

SEQ ID NO: 245953 - protein, 144 aa, Glycine max
  Clone ID: PAT_MRT3847_64126C.1.pep
CPLSVRLLLLKLVENQFSSVYKCKWIYDTEVMYYTSVLNKQPVPINDMVDANCTRATKTPMIGFDGKCSIKKKISSYTMYIFHILGPIFEIYTIKLMPIKFTTFALKLVEDQFSSGRCKLYKSNNTYFSCYVAIHKCCELQNVA

SEQ ID NO: 245954 - protein, 75 aa, Glycine max
  Clone ID: PAT_MRT3847_64127C.1.pep
RSFWMRLQSSDRSHNSQNSERARHQGCLQWMMNKGFTGRLREGSHHREACRRGWAHTSGDCTMAYNCCCVRHFFI

SEQ ID NO: 245955 - protein, 89 aa, Glycine max
  unsure (1)..(89): unsure at all Xaa locations
  Clone ID: PAT_MRT3847_64128C.1.pep
SSNCTSXVKNPLQWLPLYXITKLLIHILXHQRRLPHPAXTEXXTFKRVLLREXXIVXXSDAIGERKXRKERVTALXXAXVXXRSLCTSL

SEQ ID NO: 245956 - protein, 87 aa, Glycine max
  Clone ID: PAT_MRT3847_64129C.1.pep
MENQQPANKTTNLLNHLVKELLYAILDHLDENPFARKSLSQSCKCFHALEATHRTNLKPRRLECLPRTLHRYRSVWHLELTLCPCVD

SEQ ID NO: 245957 - protein, 248 aa, Glycine max
  Clone ID: PAT_MRT3847_6412C.1.pep
MRPALALLPLLFAFLLAATTESRKDTGEYWKMIMKDQEMPEGLQGLVSFQSENNPKTQEQLGKGSKNHCEESLVTNTQVNSDFEPIPSVTKYDDLEFKSSIIKNDDFESRPSVTKHDDFELKSSVTKNNDFEPRPSVTKYDNFEPRPSVTKYDDFELRSSVTENDDFEPRPNISKYDDFELRSSVTENDDFESRPSVTKYDDLELKSSITKSDDFEPRPNISKYDDFASRSNTKYDSEPKASATKYSD

SEQ ID NO: 245958 - protein, 104 aa, Glycine max
  Clone ID: PAT_MRT3847_64130C.1.pep
MAAISIPFDMKAWTYYEYGRTNEVLKNNQRVAMPDEKEDQPLVKDDDAFLNAIDHKIMAGYFKNRDCYLPTAPCYDAAGAVDKVGREVNKCKGGDEEYGDINEK

SEQ ID NO: 245959 - protein, 209 aa, Glycine max
  Clone ID: PAT_MRT3847_64131C.1.pep
MAPPIAAQILAFSLLVTVVSAAETGYHNHTVGGAAGWSFNSTTNTTATNYSSWASTQTFDLGDYLIFNTNSNQTVVQTYNKTTYLNCTAYDSDNGTFVYNGGSRGFGEALTVAVPLTIVGPNYFFSDAGDGVQCQHGLAFEIAVLRGLGLPPSLNQPPPPPYQEPPGPDAAQSPPITVAQSPSGSAFANLADLRVVVYGIVTGLLLQFL

SEQ ID NO: 245960 - protein, 32 aa, Glycine max
  Clone ID: PAT_MRT3847_64132C.1.pep
KLLFAKPCIYWGYVSLGLAKGLLLVSILVVLF

SEQ ID NO: 245961 - protein, 54 aa, Glycine max
  Clone ID: PAT_MRT3847_64133C.1.pep
RWFPLLSYLKATINLALEMRVCLASCCAASTLTKYRIFISDLISSYHCAQLNLL

SEQ ID NO: 245962 - protein, 47 aa, Glycine max
  unsure (1)..(47): unsure at all Xaa locations
  Clone ID: PAT_MRT3847_64134C.1.pep
LSSLEYMXMQDEFVEYLKSKXHRIXVIHLISHNHFAKARXXIIHKIR

SEQ ID NO: 245963 - protein, 89 aa, Glycine max
  Clone ID: PAT_MRT3847_64135C.1.pep
SQSHTVKDQNSESQLRKNTKHSLHQKSHEAKKVLKESQKTPTPLSEPCLTLTSSFLSCDPVTIPPLRSIFFSKTSPTTHFSFSSSRIGS

SEQ ID NO: 245964 - protein, 68 aa, Glycine max
  Clone ID: PAT_MRT3847_64136C.1.pep
SLYDVLLSLGGGGGQKQRMSKLHIKVPLDSGDGNREVSNAKIETGVRKPEWSNGVSWLSLQGSLDRSR

SEQ ID NO: 245965 - protein, 45 aa, Glycine max
  Clone ID: PAT_MRT3847_64137C.1.pep
FLKKNILKSLTRNIFLSRNILANQYCMLLKVIQVLLSFTFLPNLF

SEQ ID NO: 245966 - protein, 52 aa, Glycine max
  Clone ID: PAT_MRT3847_64138C.1.pep
LFINLPDLLSTIIYSLHDNIRTLKSQTLHPLIDYHAITLSTASMFYIYVHTL

SEQ ID NO: 245967 - protein, 90 aa, Glycine max
  unsure (1)..(90): unsure at all Xaa locations
  Clone ID: PAT_MRT3847_64139C.1.pep
ARNSARXXXPXXVPCKVTGKCXSVTVRXVPXPXXSRIVAXXVPXKXXXXPGXXDLXTSSIGXXXXXXXXVKAXFEXXMKDSQQILAVRSH

SEQ ID NO: 245968 - protein, 234 aa, Glycine max
  Clone ID: PAT_MRT3847_6413C.1.pep
MATAGVQEVRVPPLTSTSEPPSLFDGTTRLYISYICPYAQRVWITRNYKGLQDKIKLVPIDLQNRPAWYKEKVYPENKVPSLEHNGKVLGESLDLVKYIDDNFEGPSLVPSDPAKKEFGEELISHVDTFTKELYSALKGDPIHQAGPAFDYLENALGKFGDGPFFLGQFSWVDIAYVPFVERFQLVFADVFKHDITEGRPKLATWIEEVNRAKGTRADPKEIVDLFKKRFLAQQ

SEQ ID NO: 245969 - protein, 64 aa, Glycine max
  Clone ID: PAT_MRT3847_64140C.1.pep
KFFFLFIKNFALKKGLGLLHLLKGKMFIKLFSNYVGVVMSIFFLNFDGEPLGLIVCLKFLRFFL

SEQ ID NO: 245970 - protein, 45 aa, Glycine max
  Clone ID: PAT_MRT3847_64141C.1.pep
FLCYDTYNLVIYFVILHYLSFKILYNIKNLKLIQLQLNHCVNHSI

SEQ ID NO: 245971 - protein, 60 aa, Glycine max
  Clone ID: PAT_MRT3847_64142C.1.pep
VAYVQPYFSTYLYIRTVSSPRAIRVRILTPNGGLKRMEEIIKNHSDPTKDASQIWLYHSA

SEQ ID NO: 245972 - protein, 41 aa, Glycine max
  Clone ID: PAT_MRT3847_64143C.1.pep
SPIFIENCSANNIKMDKILVHEVCIQQKLVNFITLIGFFSP

SEQ ID NO: 245973 - protein, 167 aa, Glycine max
  unsure (1)..(167): unsure at all Xaa locations
  Clone ID: PAT_MRT3847_64144C.1.pep
MRRGSNRLSKSKQLAAFASLETKLRANALRSYCDQSHLRRQNRPGPLVQYRSLVDQGKLRHDPSHRXVASELENLLARLEQYEKDRAEVRVNLAYWEKQRENERRRLLMEEVELHQNDEYWWKRLNNKLTGRWESRKRPKNMESGVGKWVSYLTREKKWDXLVGHRP

SEQ ID NO: 245974 - protein, 94 aa, Glycine max
  unsure (1)..(94): unsure at all Xaa locations
  Clone ID: PAT_MRT3847_64145C.1.pep
AWASRTVVSLDPCNRLYSHVEAIFNTASHSPEFXASFSASAHQLGHVISVQLARLTVRQFQKKVLAFVLASSSGFLPLQSHAFRYPNQPVYRIR

SEQ ID NO: 245975 - protein, 146 aa, Glycine max
  Clone ID: PAT_MRT3847_64146C.1.pep
PTRPCKENITPIVPTSNIQTDVLAVGIIAGQKTDLQAVEENYQYREHVQRSPRADMEPNDHNMKNDLLARQNLMSCPASSDEVTTSNLNNEVIEDVPDALSDMFSQGMASEVPDQRVLEFTAINDENICGVEEKSRLQHIYWWTWF

SEQ ID NO: 245976 - protein, 88 aa, Glycine max
  unsure (1)..(88): unsure at all Xaa locations
  Clone ID: PAT_MRT3847_64147C.1.pep
GVIGHLDQCQGHGTPSPCPXKKKVILGFPQSPVGSKWSQPLLTKKLLIKKANEINGFYGGIRKLHTKEKIPRWKTLWPPKIVNHDCLD

SEQ ID NO: 245977 - protein, 192 aa, Glycine max
  Clone ID: PAT_MRT3847_64148C.1.pep
MMASFAGTTQKCKACEKTVYLVDQLTADNKIYHKSCFRCYHCKGTLKLSNYCSFEGVLYCKPHFDQLFKKTGSLDKSFEGIPRTARLERSTDQVQTNSKVSNLFAGTQEKCVACKKTVYPIEKVAVDGTSYHKACFRCTHGGCVISPSNYVAHEHRLYCRHHHTQLFKQKGNFSQLDKQENDEGVTENTITE

SEQ ID NO: 245978 - protein, 96 aa, Glycine max
  Clone ID: PAT_MRT3847_64149C.1.pep
TTGQCLRTLPIPTWAPNQLRLLPVFKFFIRSLMQNPNGVTPRNNAVRKGMPPPIKTPQAPVYGEPIQTPPSRYPTTPVYVTYTFGYYSFLGSLLTI

SEQ ID NO: 245979 - protein, 218 aa, Glycine max
  unsure (1)..(218): unsure at all Xaa locations
  Clone ID: PAT_MRT3847_6414C.1.pep
RQSLEFVQASLSHTSNSVSSLARSLLPAPRRLKLHPSNKLYFPXPGKQAKSAVRIKNTSKSNVAFKFQTNAPKSCFMRPPGGILAPGESIIATVFKFIEHPLNNEKPQKTGVKFKITSLKVKGPIDYVPEMFDELKDQVTVEQILQVVFLDPERSCPALEKLKLQLAEADAAVVEARKRAPEDAGPKILGEGLVIDEWKERRERYLAKQQGEVVVDSI

SEQ ID NO: 245980 - protein, 138 aa, Glycine max
  Clone ID: PAT_MRT3847_64150C.1.pep
MCGRLPQSFFYPENQCSNTTGGVHKDIAASGFGPCNSDSKDCLDIEFNEDDIMVEQLSLEEFTLQGFEMLIAQFTEKTRICFRDALYRLARNTKQHVVEDLDGDLNMHQEMPDSVYNDTMRSEDSKPMESETNSIDRA

SEQ ID NO: 245981 - protein, 189 aa, Glycine max
  Clone ID: PAT_MRT3847_64151C.1.pep
ESATELVLQWQQVAPHTDDRLFMRLLLQPVSSKVVKGQRTIRATVMALFLGGADEVATLMGKEFPALGLSKENCTELSWIDSVLWWGNFDNTTKPDALLDRDLNSASFLKRKSDYVQKPIPKKGLEGIWEKMIELGKTGFVFNPYGGKMSEVSSDATPFPHRAGNLFKIQYSVNGDDPGVELEKILLVQ

SEQ ID NO: 245982 - protein, 223 aa, Glycine max
  Clone ID: PAT_MRT3847_64152C.1.pep
HNPTYLLSELYKREPAIAWDSVLEDFPCVENLHKSFSYLENQCSNTTGGVQKDIAASGFVPCNSDSKDCLDIEDHAVKVLDTFEQSNGDDTMLEQLSLEEYTLQAFEMLIAQFTEKTRISFRDALYRLARNTKQHVIEDLDGGLNMHQEMPDSVYHETMRSEDNKPMESESNSVDRAVANLMFNKMEINILDLPLTTLVNLKQEVIGSKCLLGKSSKSLDVTQ

SEQ ID NO: 245983 - protein, 42 aa, Glycine max
  Clone ID: PAT_MRT3847_64153C.1.pep
DLIQSPFIYITYSLFIAHYLLSLPGEAQVTKLSVRSLHICPR

SEQ ID NO: 245984 - protein, 100 aa, Glycine max
  unsure (1)..(100): unsure at all Xaa locations
  Clone ID: PAT_MRT3847_64154C.1.pep
IFDEVLGLTETERGRAAGPGNESPFAHVCCDLRPAYASTMEAISAPTEALKSETCVYTGTGLXXPDSSSTADVDPNCPTDSHXMHRVSPPXLGDNLHHTC

SEQ ID NO: 245985 - protein, 65 aa, Glycine max
  Clone ID: PAT_MRT3847_64155C.1.pep
NSMLGSFVMLLKNPYCVSVLMVIVNRWALQFCQIYKIVNCSAFPRLQYMIRFLWWSYKPQKKKKQ

SEQ ID NO: 245986 - protein, 88 aa, Glycine max
  Clone ID: PAT_MRT3847_64156C.1.pep
VNHEKGMAQYGKVYKDAGEKEKRFQIFKNNVHLIESLHADGDKPFNLSINQFDDLHNEKLKAVLINGQKKEHYVRTGTATEALLSMTV

SEQ ID NO: 245987 - protein, 439 aa, Glycine max
  Clone ID: PAT_MRT3847_64157C.1.pep
FQFFLKRVSYEAMKTYKHYLETNEKQIRQCYAEKFPGMAQEKFVDMMLLDAVFIMELLLRNCELKSQSFKHEQKHKESKSFRGRNSEDLIMTQSWLSRNITRDLILIENQIPFFVLQKLYDDVVTCVKEKEEQHTSFVDLTIEYFAFYDSQMSSLNENETKKHYFCGLLRKSKSKDESPKPFTVVRRSGSEEPCISKSEDNGSKETCKSENKNSCCKPEHFTDLIRWFYLPTECNIGHADQVLRTATKLQDSGVSFEKDDMDGRLLDITFDKTPILSSFLCFGCSPLLNQFKARVRIPQLKVDHNTECIFRNLIAFEQCHYPEKPYICNYVSLIDSLIHTQLDVELLVEKEVIVHELGSHKDVASLVNGLCKHVVTNSTCYSDTINKLNDHYMNDWNHTVAALRLVYFRDLWRASGTVVGIVVLVFAVFQFLRVWRYLF

SEQ ID NO: 245988 - protein, 169 aa, Glycine max
  unsure (1)..(169): unsure at all Xaa locations
  Clone ID: PAT_MRT3847_64158C.1.pep
RKQDVVWITRMRNXPTAFELFTGSACMGLSRTINDYCIWRWDNIPLTDLMCDTNFISSPEGYFHTDVRNAQEFKNTTVNSDLHIIAWDNPPRQHPHYLSLDDMNRMVDMQRPLREKFHGHDPVLDTIDAELLSRGPGIVAHCGWCIGSRLNRIDPCAVVGNTTVLRPVP

SEQ ID NO: 245989 - protein, 71 aa, Glycine max
  Clone ID: PAT_MRT3847_64159C.1.pep
SKAFFPENNRKFFGFFFFFCQKKKSFFFYSFKRGKRKKNFCSMFMNLAKFFSDVFPGGFFFPSPLLRVGTA

SEQ ID NO: 245990 - protein, 100 aa, Glycine max
  Clone ID: PAT_MRT3847_6415C.1.pep
KKKNIPQVPPWWVGAIFLPFLQNPSQKGGPFLVDSVPLTAPRFLEWGKFFPPFPQKKTWRFFLKESVIRELKFFFIVGKPALSFGIFSQCSKFGLGWSEL

SEQ ID NO: 245991 - protein, 114 aa, Glycine max
  unsure (1)..(114): unsure at all Xaa locations
  Clone ID: PAT_MRT3847_64160C.1.pep
ASLSSSSISIATRDFFIFFLVIFFALRSSSGDCSDYQQYHSLVATIGRLHDSQSSHNSVXTDTLARFAVVDHFRWHNSLLEFATVVMAQEQVVAGTLHHLNLEAIYAGHNKLYE

SEQ ID NO: 245992 - protein, 68 aa, Glycine max
  unsure (1)..(68): unsure at all Xaa locations
  Clone ID: PAT_MRT3847_64161C.1.pep
MYGCKLSSSVAISSFPSRRRYNAAVLAXVTHAARVSAMAKELHLNQDGTAIKKLQHGVNRLRDLDGVT

SEQ ID NO: 245993 - protein, 104 aa, Glycine max
  Clone ID: PAT_MRT3847_64162C.1.pep
VLAIRAHEFEKHDAHERLMVQSPAVDKLDCTYGYWVAEFMILRQRVRVDVKLLTEGKFCEGKHLPGFHVSAWEIYVVQIPLMAHKESLPSSARDFRTALESKNI

SEQ ID NO: 245994 - protein, 110 aa, Glycine max
  unsure (1)..(110): unsure at all Xaa locations
  Clone ID: PAT_MRT3847_64163C.1.pep
YDCWTKHGTNLALTVDETMEVMIDGGIPAGVLAEGADEXANHVANEGLNDQITADDTADDTKVNTXANMMNLILSVVGDVELDTDGKTDEGKHIAEYNTRARENAGEQIP

SEQ ID NO: 245995 - protein, 116 aa, Glycine max
  unsure (1)..(116): unsure at all Xaa locations
  Clone ID: PAT_MRT3847_64164C.1.pep
DICVMSGVRRSYYYCTEWGHGILEDMDWLGMNLKFXSTYALEEXRXCCACDAVSLAYMLYYSCGGVFTDLQSIQGALHWRKTSWPKILMHRRRREFCTGTEAAARECDHLCRTPYP

SEQ ID NO: 245996 - protein, 460 aa, Glycine max
  unsure (1)..(460): unsure at all Xaa locations
  Clone ID: PAT_MRT3847_64165C.1.pep
MVQHRFLLITYPIQGHINPSIQFAKRLVSMGVHFTFATSLYLHRRMLKKPTIPGLSFATFSDGYDDGYKATDDSSLSSYMSELKRRGSEFLRNIITAAKQEGQPFTCLAYTILLPWAAKVARELHIPGALLWIQAATVFDIYYYYFHEYGDSFNYKSDPTIELPGLPFSLTARDVPSFLLPSNIYRFALPTLQEQFQXLDDETNPIILVNTFQDLEPDALRAVDKFTMIPIGPLNIPSAFLDGKDPADTSYGGDLFDASNDYVEWLDSQPELSAVYVSFGTLAVLADRQMKELARALLDSGYLFLWVIRDMQGIEDNCREELEQRGXGCGEGLSHGSLGWFVTHCGWNSTMESLGSGVPMVAFPQWTDQGTNAKMVQDVWKTGVRVDDKVNVEEGIVEAGEMRKCLDVVMGSGGKGQEFRRNADKWKCLAREAVTEGGSSDSNMRTFLHDVAKFGHDCFM

SEQ ID NO: 245997 - protein, 332 aa, Glycine max
  Clone ID: PAT_MRT3847_64166C.1.pep
ENSKAFLILNEIILTLKDGKDETRKEAYDYLLNISSTLRDSSFIGSIEPYHKLVSMIMGYLSGSSPHIKSGAVSALSVLLYKDTNLPISVSDLVPSLLSLLQTKDVEIIKAVLGFVKVMVSSLEARELQNILSEVITEILPWSSVSRNHFKSKVTVIFEILLRKCGSAAVKLVTPEKYKVFLKTVLENRHGKSSEAVTNDTKNMPEDSSAKRPERRKPENSDNLEKNSLKDNKRKRDKKFETDMPGQKGSLMSTSNDGLRLPKRSRYSNDKNPNVGRPEESEKGKKSWNKSFTGGGGKRKVKVTSTGKDKAASHVPIQPSKSHKLQRKFKRN

SEQ ID NO: 245998 - protein, 60 aa, Glycine max
  Clone ID: PAT_MRT3847_64167C.1.pep
DEAHSLSDYSNEHIIRLYLLLSCTTRLYCRFTCAMLEVININEGTHYEPHFAITTDGPIL

SEQ ID NO: 245999 - protein, 64 aa, Glycine max
  Clone ID: PAT_MRT3847_64168C.1.pep
DAIDQIDQMIAQRHAHDYPYRIWTWLMMTESLLYHDDTDDIVTVVRAIATVKYNVATNFATITP

SEQ ID NO: 246000 - protein, 50 aa, Glycine max
  Clone ID: PAT_MRT3847_64169C.1.pep
AVYNRGNRCLSIEIRKLLLIVWYRKKEDALKVLGRWNLSHLPLPWCLERP

SEQ ID NO: 246001 - protein, 243 aa, Glycine max
  Clone ID: PAT_MRT3847_6416C.1.pep
MAIGNENQPQQSEGKVWNLFKLPFRHSTSTPHNHNQVSTSNSVSSFAKSLLPSPRRLKLDPSNKLYFPYEPGKQGRSAIRIKNTSKSNVAFKFQTNAPKSCFMRPPGGILAPGESIIATVFKFIEHPLNNEKPEKTGLKFKITSLKVKGPIDYVPEMFDELKDQVTVEQILQVVFLDPERNCPALEKLKLQLVEADAAVEARKRAPEDAGPKILGEGLVVDEWKERSERYLAKQQGEVVVDSI

SEQ ID NO: 246002 - protein, 83 aa, Glycine max
  Clone ID: PAT_MRT3847_64170C.1.pep
MMIYITRHSVMKMKVLVFCDATNLVAWHCHAFDMFTLLMNTGYRARTTHVKCTQWRLAVEAHNMCGFETITDERGEASYEHIH

SEQ ID NO: 246003 - protein, 70 aa, Glycine max
  Clone ID: PAT_MRT3847_64171C.1.pep
SSLHVLLGQVHPHQAPTSFSVGPTRSWAPVLSLSLHRGLSSSSNSKRTREKEESYHLVATPQELGLPISI

SEQ ID NO: 246004 - protein, 44 aa, Glycine max
  Clone ID: PAT_MRT3847_64172C.1.pep
VDTFRFLGYFIILISCLFYLNKTKRIPKTRSKSDPHTPIPFWFL

SEQ ID NO: 246005 - protein, 95 aa, Glycine max
  Clone ID: PAT_MRT3847_64173C.1.pep
ISSQSPFPWNVTFGPWWFVCPRQNGSFRCYTRCSSVKKPWPWLLPHRSVTSGVLFFKGTSCHASQTLQGWIGVGPPSIGENPYPLLYPNSRRLGP

SEQ ID NO: 246006 - protein, 65 aa, Glycine max
  Clone ID: PAT_MRT3847_64174C.1.pep
IVALFLHFKLSGLSLLEKDRKIGMAQNSMQGHSMIARLSVFNTMKQQIFTSINYGASYKPSSLVY

SEQ ID NO: 246007 - protein, 58 aa, Glycine max
  Clone ID: PAT_MRT3847_64175C.1.pep
MASEKKLSNPMREIKVQKLVLNISVGESGDRLTRASKVLEQLSGQTPVFSKGYFSISF

SEQ ID NO: 246008 - protein, 66 aa, Glycine max
  Clone ID: PAT_MRT3847_64176C.1.pep
LEILFWSNVISCLTRLVFLFMLTMSLYILGKKNRPYIFEFKEKSIGNTILLWCVGACCLMKSPLRV

SEQ ID NO: 246009 - protein, 58 aa, Glycine max; identical to SEQ ID NO: 246007
  Clone ID: PAT_MRT3847_64177C.1.pep

SEQ ID NO: 246010 - protein, 36 aa, Glycine max
  Clone ID: PAT_MRT3847_64178C.1.pep
IPDRKIVLEELEKEKRLSNVKAWEESEKSKAEIKAQ

SEQ ID NO: 246011 - protein, 64 aa, Glycine max
  Clone ID: PAT_MRT3847_64179C.1.pep
KKLCRFSKMNFQGREILKGFSIDRLNRMTIVLDNSLFSQTFFFFFLNFTHRLRHSHQTCKTSNF

SEQ ID NO: 246012 - protein, 87 aa, Glycine max
  unsure (1)..(87): unsure at all Xaa locations
  Clone ID: PAT_MRT3847_6417C.1.pep
ARGGGGGGGVGRRVNYAFXASEEEVIIKHRXLTRATSGEGEPPLRKRQRRGTTVGSERDKDEESNYNELEKRGXAGLRERRTFEIPL

SEQ ID NO: 246013 - protein, 77 aa, Glycine max
  Clone ID: PAT_MRT3847_64180C.1.pep
VGFTKLYLRTGQIGALEDRRQHLLQGILGIQKSFRGYQARCHYHELKNGVTILQSFVRGEIARRKYGVMVKSLITFT

SEQ ID NO: 246014 - protein, 83 aa, Glycine max
  unsure (1)..(83): unsure at all Xaa locations
  Clone ID: PAT_MRT3847_64181C.1.pep
RSVHTYGSLIACGHDNRMSVHECVKPYFSGLNRQALXSKSNITMTDGMDKTSAALSIRKXADCDLLKRNYEQISNVMCAAPED

SEQ ID NO: 246015 - protein, 74 aa, Glycine max
  Clone ID: PAT_MRT3847_64182C.1.pep
KGQEPVYNSPIHTAETQFSTIHTAETQFSTIHSGVTQFSTNHNNSHWSNPIFNKVIKHRTLIRSINPSAFTIIN

SEQ ID NO: 246016 - protein, 165 aa, Glycine max
  unsure (1)..(165): unsure at all Xaa locations
  Clone ID: PAT_MRT3847_64183C.1.pep
MRWQPGTGTNRPDGAWKDISMDXGRTKSEGLSVLFILVVVDRQIGPFXPLKHPYIAASVATTFLNNIGKLHGVPATIVSDRDRVFTSSFWRGKLLDTKLQLSSAYHPQTEGQTERVXMNQCLEMYLRCSVSSTPXQWVKWLPLAWYNSAHHFCNPLQLKHSMVWP

SEQ ID NO: 246017 - protein, 107 aa, Glycine max
  Clone ID: PAT_MRT3847_64184C.1.pep
ACFQFAIVILFAHVFYTIVRLSTFCPVLCSTYKVPSPHFIEQSHVWIKFSIKIDNKCRIVPKTNKTRNLQYIINLGRTQKYDLICFLNSFTYKQKGENFYQTVCKRL

SEQ ID NO: 246018 - protein, 34 aa, Glycine max
  Clone ID: PAT_MRT3847_64185C.1.pep
RTTRSASVFSIRRAYSQRAGSELNSKGSHWLNGL

SEQ ID NO: 246019 - protein, 282 aa, Glycine max
  Clone ID: PAT_MRT3847_64186C.1.pep
MALGISNILHCPKLSFSHNNFLPKVPTSISLRFPQTAAWSDRKIICAAASAAGSSNPDGEFNPYEVLGVSPIEKFDMVKAAYAKKKKEAEMNGDEATASRLEKAYDKLMMAQLSNRKKGVTFGSFKVSKEIKYADKLPVIPWGPRLTKSSQNDMRINLAISAVFTAWILVKRSAEYKPLQVLAFAFVYRLFEKLKASESPVTPKYNEEGEDTGEGLRMGKRLLRSLALVFGCVAISSLAYTFILNIIEFAGGFIPTLLYNSQELIITTSSALMLYIMASYYR

SEQ ID NO: 246020 - protein, 114 aa, Glycine max
  Clone ID: PAT_MRT3847_64187C.1.pep
EKIISDAVHRASTFDPKVPARILRMFFHDCFIRGCDASILLDSTPKNLAEKDGPPNLSVHAFYVIDEAKAKLEKACPHTVSCADIIAIAARDVVALSGGPYWNVLKGKKDGRVS

SEQ ID NO: 246021 - protein, 46 aa, Glycine max
  Clone ID: PAT_MRT3847_64188C.1.pep
IGRNRFPFTPSQWQELEHQALIYNCMPLGVSIPPDLLLTIKRSYFF

SEQ ID NO: 246022 - protein, 82 aa, Glycine max
  Clone ID: PAT_MRT3847_64189C.1.pep
SLGLLQFMRGLSLPSLQGRVMCVIYTTTYHSKLSVCLMALLAPLLSNECCLSFCYFLMRCDQPASVHQIHGTGWISFMLKKG

SEQ ID NO: 246023 - protein, 34 aa, Glycine max
  Clone ID: PAT_MRT3847_6418C.1.pep
INLIPGPGGLPAFLNVTHLTTSRYKGHTCSLLES

SEQ ID NO: 246024 - protein, 69 aa, Glycine max
  Clone ID: PAT_MRT3847_64190C.1.pep
AHHSLPVKDDNGYSQPETRWVLTLLGHGFASIFISMGLLMGINLHPPGSLPRVCSYSTHTRQPAGFLPA

SEQ ID NO: 246025 - protein, 519 aa, Glycine max
  Clone ID: PAT_MRT3847_64191C.1.pep
VSEFGSSNHVLHTNNNPNTFTYEPTSVLDLCRSPSPEKKLTVPKPEPQHNNQLDLDDHVLPNSDWWESIMKDLTLPEDSPTPLLKTNPSCIPDFPPSSQDPSFDHPTPDFTSLSEIYNQNIPFNYPSNTLEPSFHDLNHSLHPHNNNWDFIEEFIRAADCYDSSHFQLAQAILERLNNRLLRSPMGKPLHRAAFHFKDALQSILSGSNRNGNGSNLLSSMAEIVQTIKTYKAFSGISPIPMFSIFTTNQALLETLNGSSFVHVIDFEIGLGIQYASLMKEIAEKAGPGTAPLLRITAVVPEEYAVESRLVRQNLNQFAQDLGISAQVDFVPLRTFETVSFKAVRFIDGEKIAVLLSPTIFSRLGGNGGSVGAFLADVRRMAPGVVVFVDGEGWTEAAAAASFRRGVVSSLEFYSMMLESLDASVASGGGGEWVSRIEMLLLRPKIFAAVEGARRRTPPWREAFYGAGMRPVQLSQFADYQAECLLAKVQIRGFHVDKRHAELVLCWHERAMVSTSAWRC

SEQ ID NO: 246026 - protein, 114 aa, Glycine max
  Clone ID: PAT_MRT3847_64192C.1.pep
EEVEITMSRNINNFTPLPGSWQRGFRSFDDHTFNHRESNEVPVFYGSHFYSCHRKFILLIVLVTLFLGHDDTEKKGKLNLFLWKQRMELSLFEDDSLYIISVHNISRMAEVRVY

SEQ ID NO: 246027 - protein, 122 aa, Glycine max
  Clone ID: PAT_MRT3847_64193C.1.pep
CMNKSDLGGWTRIVVEKPFGKDLESAEQLSTQIGQLFEEPQIYRIDHYLGKELVQNMLVLRFANRLFMPLWNRDNIANVQIVFRENFGTEGRGGYFDQYGIIRDIIQNHLLQVFCLVAMEKP

SEQ ID NO: 246028 - protein, 75 aa, Glycine max
  Clone ID: PAT_MRT3847_64194C.1.pep
RERTGSTYARGASLVRQKWHLQHCDLCILLLLSLSIDVTDRASDYDYDCVTLHTFEPGRLSTRLTDYMIALMPFY

SEQ ID NO: 246029 - protein, 42 aa, Glycine max
  Clone ID: PAT_MRT3847_64195C.1.pep
HITLHQVTFNLNKSDLFKNFKTKDHLLSSMDYFLDDLIIFKT

SEQ ID NO: 246030 - protein, 82 aa, Glycine max
  Clone ID: PAT_MRT3847_64196C.1.pep
VLFVFVAIFTSFSPNLLLFLFSANKTKRALYLPALEPKHPHRLGFVPHNRGSTSRRPKRKACSRVPPPLWGPPQKRPPPFFF

SEQ ID NO: 246031 - protein, 54 aa, Glycine max
  Clone ID: PAT_MRT3847_64197C.1.pep
QTTYRFPFHPESIVKQPPGPNAKRYESYTASYWGSQEKKIQIHLVELMQNFKQG

SEQ ID NO: 246032 - protein, 44 aa, Glycine max
  unsure (1)..(44): unsure at all Xaa locations
  Clone ID: PAT_MRT3847_64198C.1.pep
RRXXXXXXRXXXFWYXSXXHGXCYMYFMGRHSHXTQNFLHFXGC

SEQ ID NO: 246033 - protein, 145 aa, Glycine max
  Clone ID: PAT_MRT3847_64199C.1.pep
PRVRGRVGAHRRLLPAHPAAASAPSPPKESPQALPPPPPKESPQTPPRLPRTRSTLLSPSIPASFLGLGSQDAGLLGPARPRARRHAAHLRGFPRGGVGHCRRSCRAFPHDGASRAECSVDLKFSGLGEFGAADGTPRQPRGRCA

SEQ ID NO: 246034 - protein, 55 aa, Glycine max
  unsure (1)..(55): unsure at all Xaa locations
  Clone ID: PAT_MRT3847_6419C.1.pep
ISSQGLWWFHSQHLSMVDSGTYNGLSVREILXIRENRRQCQGFFNNSCTLFNQLS

SEQ ID NO: 246035 - protein, 76 aa, Glycine max
  Clone ID: PAT_MRT3847_641C.1.pep
CIMAMQYDHNKNRTKIFYRSIPSPTINSMLHLKFCNKSTHLFYVPRVSSYWNIVTLRIDQCCLQLVSTVNDEQWLG

SEQ ID NO: 246036 - protein, 134 aa, Glycine max
  Clone ID: PAT_MRT3847_64200C.1.pep
YDKTKSSCLIKHRQEQPEFSGPTPKSQRTKMGKSEDNDKKNLGKKLKDVEISIPIVYGNIAIWLGKKASEYQSHKWTVNVRGATNEDLGTIIKHAVFQLHSSFNNPTRVVESPPFELSESGWGEFEVAITLYFQ

SEQ ID NO: 246037 - protein, 87 aa, Glycine max
  Clone ID: PAT_MRT3847_64201C.1.pep
PLSMPHHNNNNTPATLPASTRDEASIPPPTPAFPPTILLTLTTPLFEASTTESIPTPHPHPILTTTTTTSTTTTTSTDLISRATRHI

SEQ ID NO: 246038 - protein, 82 aa, Glycine max
  Clone ID: PAT_MRT3847_64202C.1.pep
DTYSLAFLPSQIAMFPYTIGMLISTSLSFLPKFYTKPNPEMVIILVHQSTQRTYFSKTYRGICFHIVRHSKIIFEILVVQDG

SEQ ID NO: 246039 - protein, 61 aa, Glycine max
  Clone ID: PAT_MRT3847_64203C.1.pep
VLYYDQWPISVSNSWVLVMYRQNLCQKGLGSEAANFCFIPRWLRDGHVVTTEYTNGLENLV

SEQ ID NO: 246040 - protein, 77 aa, Glycine max
  Clone ID: PAT_MRT3847_64204C.1.pep
LIIGTRVTESFEIHEVEVGSHGLRLSLFLGKTFVTYEISMYDTCRRIRRRLNDHPETPSSQQCLLCSTQECSVADAW

SEQ ID NO: 246041 - protein, 79 aa, Glycine max
  Clone ID: PAT_MRT3847_64205C.1.pep
MCGLELGMAMIGMANGKYSCCRMPCYRLAACKPSVSRDQPAYTTTDCYSPIAMADLKCLCRIEDSGPLSLYGVDLTSCM

SEQ ID NO: 246042 - protein, 50 aa, Glycine max
  Clone ID: PAT_MRT3847_64206C.1.pep
CVDATIGFYKGFGISILIYAPSHAVWWTSYSMVHRLIWGAFGSYMANSDG

SEQ ID NO: 246043 - protein, 76 aa, Glycine max
  unsure (1)..(76): unsure at all Xaa locations
  Clone ID: PAT_MRT3847_64207C.1.pep
HYYTAQNEHNVLVXMMDHREAIIFHLTXTILIMAYHTLALNVHNDDTLDFGTSAMQMLIQTIFAHLIQXSAHGETY

SEQ ID NO: 246044 - protein, 44 aa, Glycine max
  Clone ID: PAT_MRT3847_64208C.1.pep
PRVRKKKLFTRIILQGPKKNFTRTIFKRHFLRTRKNKIKKQKYT

SEQ ID NO: 246045 - protein, 67 aa, Glycine max
  unsure (1)..(67): unsure at all Xaa locations
  Clone ID: PAT_MRT3847_64209C.1.pep
NLNTAFALFKENXMGKXKTLRLTRKSSLHYQXKEKKAPHSPKPLTESDKKAYLGLHYSRISKLPVKT

SEQ ID NO: 246046 - protein, 79 aa, Glycine max
  Clone ID: PAT_MRT3847_6420C.1.pep
VMPHMLVLLKSGPHRVYALSDSTATVHALVHPAASFCACCRHSACHLLTDSLRVQLAPIPAHACSCNSPAVGRLRDRKN

SEQ ID NO: 246047 - protein, 35 aa, Glycine max
  unsure (1)..(35): unsure at all Xaa locations
  Clone ID: PAT_MRT3847_64210C.1.pep
KTTPNVVLKLIKVXRLTIYHVKSHLQKYMTARYIL

SEQ ID NO: 246048 - protein, 164 aa, Glycine max
  Clone ID: PAT_MRT3847_64211C.1.pep
NSAEKGTLTKLNSLSLSLPHPLRSHPIPHFISDRTLLPPRTPFPIRCGVTHTHTLLGSHSDYSRECCGGSCFLRTMASPTGELTSHNDSTAEPMATEQCELSEKTPQIGSEGLEREQKELLTELTSFVIDEKSNQVSADVTENSVIQLPAPPQHDFEKNCQTVE

SEQ ID NO: 246049 - protein, 339 aa, Glycine max
  Clone ID: PAT_MRT3847_64212C.1.pep
DVVNLSEQVGELISNIGCGMILGRSKDDRFDLKGLAREVLRLTGVFNIADYVPWTGFLDLQGLKGKMKKMSKAFDEVFEQIIKDHEDPSASNKNSVHSEDFVDILLSHMHQAVNQQEQKYVIGRTNIKAIILDMIAGSFDTSAVAVEWAMSELLRNPSDMKKLQEELNNVVGENKLVEESDLSKLPYLNMVVKETLRLYPAGPLLVPRESLEDITINGYHIKKKTRILVNAWAIGRDPKVWSDNADMFCPERFVNSNVDIRGHDFQLLPFGSGRRGCPGIQLGLTTFGLVLAQLVHCFNWELPFGMSPDDIDMTENFGLSLPRSKHLLAVPTHRLFNKT

SEQ ID NO: 246050 - protein, 122 aa, Glycine max
  Clone ID: PAT_MRT3847_64213C.1.pep
RVFVSGLRCVGKDEGIGGSSNNASKMALKERFKSFNACFEEIYRVQTAWKVPDDQLREELRISISEKVIPAYRSFVGRFRCQLEGRHVGKYIKYTPEDLETYLLDLFEGSPAVLHHIRRKST

SEQ ID NO: 246051 - protein, 503 aa, Glycine max
  unsure (1)..(503): unsure at all Xaa locations
  Clone ID: PAT_MRT3847_64214C.1.pep
MLSETLAIPAVLLVILILILSSVLFHLQDERTNPPGPKPLPIIGNLHMLGKLPHRSLQALAKNYGPIMFIKLGQVPTVVVSSPETAELFLKTHDTIFASRPKTLASEYMSYGSKGLVFSEYGPYWRNVKKLCTTQLLSASKVEMFAPLRRRGVRSIFLQPHVYVVNLSEQVGELISNIVYTMILGXRIKDDRFDLKGLARVALRLTGVFNIADYVPXQASLDLQGLKGKIKKMSKAFDEVFEQIIKDNEDPSTRFRNIPGCSKRRGHNHVINALRGISASGSMSGGLIDLEFHSXVVQWGDTCQVLGSLPLCDSEFHQRHFQAIKCFKVELQNVVGENKLVEESDLSKLPYLNMVVKETLRLYPAGPLLVPRESLEDITINGYHIKKKTRILVNAWAIGRDPKVWSDNADMFCPERFVNSNVDIRGHDFQLLPFGSGRRGCPGIQLGLTTFGLVLAQLVHCFNWELPFGVSPDDLDMSEIFGLSLPRSKPLLAIPTYRLFIKA

SEQ ID NO: 246052 - protein, 191 aa, Glycine max
  Clone ID: PAT_MRT3847_64215C.1.pep
FLPRTLELYSCNMKNIAMAIIGQMGKALKIEEMEIRELFEDEIQKMRMNYYPPCPQPEKVIGLTNHSDGVGLTILLHVNEVEGLQIKKDGVWVPIKPLPNAFVVNIGEILEIVTNGIYQSIEHRATVNSEIERLSIATFHSPELDVVVGPVASLITEQTPARFKRIKMEDYFRGRFARKLDGKCYLDTIRI

SEQ ID NO: 246053 - protein, 117 aa, Glycine max
  unsure (1)..(117): unsure at all Xaa locations
  Clone ID: PAT_MRT3847_64216C.1.pep
IPQYNEVQAQMETNLLKLSLDDXVETTKGSMLDLKIIKSKIALPKNTVGGTILRRDLLANLLTEGNFRACVDLQRTKLIKGMSKMAATDGITDNTGIALACAINSSFRGRARYDLYT

SEQ ID NO: 246054 - protein, 35 aa, Glycine max
  Clone ID: PAT_MRT3847_64217C.1.pep
GKIGGKKSPLIRENTRGQKIIFLPIKFYGTLWPKF

SEQ ID NO: 246055 - protein, 98 aa, Glycine max
  Clone ID: PAT_MRT3847_64218C.1.pep
GSRNRIKNHQKEVVFVVVGVNLSTMKMAIKMVVERLVLDISVMSSVLGTSSSQTECWGQAFTENKVFYLCRDLPHLFWFLHWNSKQNAGTLIIAFRHT

SEQ ID NO: 246056 - protein, 223 aa, Glycine max
  Clone ID: PAT_MRT3847_64219C.1.pep
HASGGLEAAQGSPGRTEMFSICIPNVLNHSGFMDSKSEYVRCLRFSCQDSLYVATNHGYLYLAKLCDTGGAQWNQLVQVSNGAPIICMDLLSKDSFELDCGAEDWIAIGDGKGNMTVIGVSNDDCTPTVRLCFTWPAEMERQLLGTYWCKSLGCRYVFTADPRGTLKLWRLPDPSQSDLPSSMRSNNVSCIAEFTSNYGMRIMCLDACMGEEVLACGDVRGNM

SEQ ID NO: 246057 - protein, 52 aa, Glycine max
  Clone ID: PAT_MRT3847_6421C.1.pep
MNKDCEKVGRWKSNLLSTQQRENPLMGYTSTGDPYSYVGDTALTLDSKQAAK

SEQ ID NO: 246058 - protein, 78 aa, Glycine max
  Clone ID: PAT_MRT3847_64220C.1.pep
RRRSRYRPIYADGECTGACLALADAALDPDIALVLDTANPAAYLLRSSLQVLTALLEAYALSLVCDLTNILMTLKVNL

SEQ ID NO: 246059 - protein, 315 aa, Glycine max
  Clone ID: PAT_MRT3847_64221C.1.pep
MAPLLRTLFFVALSILSLLACFTNAQLSTNFYDKTCPNLQTIVKNAMQQAINGEARLGASILRLFFHDCFVNGCDASILLDDTATFVGEKNALPNRNSVRGYEVIDTIKTNVEAACNGTVSCADILALAARDGVVLVGGPSWAVALGRRDARTASESAANNEIPSPFLDLPTLVSMFAAKGLSARDLTVLSGGHTIGQAQCQFFRSRIYNETNIDPNFAASRRAICPASAGDTNLSPLESLTPNRFDNSYYSELAAKRGLLNSDQVLFNDPLVTTYSTNNAAFFTDFADAMVKMSNISPLTGTSGEIRRNCRVLN

SEQ ID NO: 246060 - protein, 38 aa, Glycine max
  Clone ID: PAT_MRT3847_64222C.1.pep
LLFTPPSLFCVHSVFQLKSYPLATWPLDRYDPGFTVLT

SEQ ID NO: 246061 - protein, 126 aa, Glycine max
  unsure (1)..(126): unsure at all Xaa locations
  Clone ID: PAT_MRT3847_64223C.1.pep
PEALKKEATFGFSALMGNPLQDRAGPNIPLYDRESVFFQHXRPFPPPKEVIPPDKARMAISPMPNLGSAELAGSAASEPVCPLCLTHPKDMGFGCGHTTCKEGGLALFFCPMGRAPISTCLRPVPL

SEQ ID NO: 246062 - protein, 161 aa, Glycine max
  Clone ID: PAT_MRT3847_64224C.1.pep
MGNCIVLQRNVVRVMKSDGKILEYKAPIRVHQVLNQFRGHAISESLPPVLHHLNPYTRLLKGQLYYLVPPPQASSKKVNKKRVRFAEPDEDDQVEDKGCVVRIKLVLSKQELKDMVQKGGISVNEVLSLVQGKGIVGGVDACRRDDEGFHGWKPALETIPE

SEQ ID NO: 246063 - protein, 63 aa, Glycine max
  Clone ID: PAT_MRT3847_64225C.1.pep
CHGTQKCGMLMVGDTCSVVDFDQRDWQPNNHGVWRSFQPVAILWQRDASAKFSVMAIMSHLIL

SEQ ID NO: 246064 - protein, 37 aa, Glycine max
  Clone ID: PAT_MRT3847_64226C.1.pep
LFIFFYTSHLSYFIAYSIITHSALSSCISIFCNQTHN

SEQ ID NO: 246065 - protein, 41 aa, Glycine max
  Clone ID: PAT_MRT3847_64227C.1.pep
INVVTVVKYIISFLLKKSLIIKSRVLICQYLNNDFNYDLKI

SEQ ID NO: 246066 - protein, 141 aa, Glycine max
  Clone ID: PAT_MRT3847_64228C.1.pep
MLRTCRWRWSTLRFTQSKPVMATTSDFPSVTAFRYLVAAVSLQSLWSLSLGVADMYAILVRRGYRNVRIVRLFSIGDGITSTLTFSAACASAGITVLIGNDLNDCAQNHCSRFETATAMAFMSWFAASPSFILNFWTLASK

SEQ ID NO: 246067 - protein, 182 aa, Glycine max
  Clone ID: PAT_MRT3847_64229C.1.pep
MSMAMVHPSVHPIEAPPMTEHAIAIAMPRHTLKDTQGMPGTLGGFLLRFAQFSFALVSLSVMATTSDFPSVTAFRYLVAAVSLQSLWSLSLGVADMYAILVRRGYRNVRIVRLFSIGDGITSTLTFSAACASAGITVLIGNDLNDCAQNHCSRFETATAMAFMSWFAASPSFILNFWTLASK

SEQ ID NO: 246068 - protein, 64 aa, Glycine max
  Clone ID: PAT_MRT3847_6422C.1.pep
KKKKKKKKKKKKKKKKKKKKKKKKKKPVPKKFPKGKIIFSLKKPFKGKKERGKKNPIGVKRGKI

SEQ ID NO: 246069 - protein, 53 aa, Glycine max
  unsure (1)..(53): unsure at all Xaa locations
  Clone ID: PAT_MRT3847_64230C.1.pep
GCITWWCPCVTFVRVAEIVDRGSTFGXLYTLICCVIGCGWLYSCFYRSKMRLI

SEQ ID NO: 246070 - protein, 53 aa, Glycine max
  Clone ID: PAT_MRT3847_64231C.1.pep
GHCRRGRFIAINCILHDTCEDQSSTCCPVGNKGAYNLKLCLLAKSTKQIISAR

SEQ ID NO: 246071 - protein, 68 aa, Glycine max
  Clone ID: PAT_MRT3847_64232C.1.pep
LPLFSHQLSNPELYMGYGCIPAYGLNESNFFISNLSFLQSSSRFKSLVSIFSLDIYPDVLVHVDGRVG

SEQ ID NO: 246072 - protein, 83 aa, Glycine max
  unsure (1)..(83): unsure at all Xaa locations
  Clone ID: PAT_MRT3847_64233C.1.pep
KNXGDPPIRTXKIFLPVFHFIYKNIKLVGSQQIKLDLSSSLQKPYLLLQTKHIHVTYLILISQVLYALTHLSLLYIYLQNFNP

SEQ ID NO: 246073 - protein, 73 aa, Glycine max
  Clone ID: PAT_MRT3847_64234C.1.pep
EELILTLGHGHENQTPNILNGINLYRYPSCRALCKKLETTNEKVVIIFNGHDTTAGIDKEAAYAEKNPQQFCL

SEQ ID NO: 246074 - protein, 150 aa, Glycine max
  unsure (1)..(150): unsure at all Xaa locations
  Clone ID: PAT_MRT3847_64235C.1.pep
MEESLGQKWKQREFALASVSDLSSAXSSASPGIARFDSDGLQIHHQSHQIPFNVDPRTVQLFKVSPVQSVCVVEGSDVGKKTLYSRGVTIQFRNDEESAAFHCVVQQLEERSHAQEGNGRNGTIIXLSKAKFVEKDMSASSRKKRIFHLL

SEQ ID NO: 246075 - protein, 102 aa, Glycine max
  Clone ID: PAT_MRT3847_64236C.1.pep
PPRKKPYKYPSPPPPVHKYKSPPPPYKYPFPPPPPKKPYKYPSPPPPVYKYKSPPPPVYKYKSPPPLLDSDFSIAPHGSEELVQIKEREEAPCSLYSEEWNL

SEQ ID NO: 246076 - protein, 357 aa, Glycine max
  unsure (1)..(357): unsure at all Xaa locations
  Clone ID: PAT_MRT3847_64237C.1.pep
MASSSSSGLTFKLHPLVIVNISDHYTRVKSQMNPTHAPPHNNNNANGGDGVVSPLSPRVYGCVIGVQKGRTVEIFNSFELLYDPSSHSLDRTFLEKKQELYKKVFPHFYILGWYSTGSDAEESDMHIHKALMDINESPVYVLLNPSINHSQKDLPVSIFESELHVIDGIPQLIFVRSSYTIETVEAERISVDHVAHLKPSDDGGSCYTXLAAHLTGIHSAXIKMLHSRIKVLHHYLLAMQYAVGPSANALVALGAALRTGLPAIESGKFQDDFLMEYNDTVLISYLAMLTNCSSSMNELVDKFNIAYDRQESRGKIFAFMRLMLGCSFLVDILKALFQLCRHRCFFLNSFCWLGVDY

SEQ ID NO: 246077 - protein, 193 aa, Glycine max
  Clone ID: PAT_MRT3847_64238C.1.pep
MASSSSSGLTFKLHPLVIVNISDHYTRVKSQMNPTHAPPHTTTNNNNANGGDGVVSPPLHPRVYGCVIGVQKGRTVEIFNSFELLYDPSTHSLDRTFLEKKQELYKKVFPHFYILGWYSTGSDAEESDMHIHKALMDINESPVYVLLNPSINHSQKDLPVSIFESELHVIDGIPQLIFVRSSYTIETVEAERI

SEQ ID NO: 246078 - protein, 80 aa, Glycine max
  unsure (1)..(80): unsure at all Xaa locations
  Clone ID: PAT_MRT3847_64239C.1.pep
GXXGXXXSSXXXXSLXEXALNSRXVARXSAGCPPLRFANIXHHLTDQDVVGVGRXHXHXXGWPLRRRGGRAESKECTXHR

SEQ ID NO: 246079 - protein, 86 aa, Glycine max
  Clone ID: PAT_MRT3847_6423C.1.pep
TSQALCIWAGTVSTLPSLSLANTKIDDSAQAYIGMISLLRTIDLSQTPTKKEFWQTNFVCFLDNINLLLATKKINFILWQVLFAVK

SEQ ID NO: 246080 - protein, 59 aa, Glycine max
  Clone ID: PAT_MRT3847_64240C.1.pep
ILHTTYSLLATYSTTRTMFRLYSNYTLHTPIKLMHTQCMSTTMDLFSDDTYFSIAASMC

SEQ ID NO: 246081 - protein, 89 aa, Glycine max
  Clone ID: PAT_MRT3847_64241C.1.pep
YFRGTRHGEREGDIYQIYGLLLTGLRGFTVYGTWGRPDRAHSMVTRDMLQGSTSGRLDTQEDKKVGCDTTYIERIDEGCLGALDTHQKS

SEQ ID NO: 246082 - protein, 146 aa, Glycine max
  Clone ID: PAT_MRT3847_64242C.1.pep
MPPFLYIEKLQSRQFSSSTTESSLDPLKCSKTSLNVAPSSKFFNYSTTELSVAFNLVEFTSFVSLTLCRLFVNPPSLVNESFCTSEPLTGRVGTSLISKLHFSVELMAEMPSSQCLSTWHVSKVGPDKFEALCAGSPSFSVWILPD

SEQ ID NO: 246083 - protein, 137 aa, Glycine max
  Clone ID: PAT_MRT3847_64243C.1.pep
LNSCRKLTKLPSDMCNLVNLRHLEILGTPIKEMPRGMSKLNHLQHLDFFAVGKHEENGIKELGALSNLRGQLEIRNLENVSQSDEALEARMMDKKHINSLQLEWSGCNNNSTNFQLEIDVACKLQPHYNIESLYIKG

SEQ ID NO: 246084 - protein, 161 aa, Glycine max
  unsure (1)..(161): unsure at all Xaa locations
  Clone ID: PAT_MRT3847_64244C.1.pep
PRVRLDRPQKYQREAAAAALSEFVRYSGGLGSLLEQMVEVLCRHXDESSTVRRLCLRGLVQIPLIHILKYTAQVLGVILALLDDLDESVQLTAVSCLLMILNSSPDDAVEPILLNLSIRLRNLQTSMNAKMRATSFAVFWALSXYGIGVLSEAFVEQVHAA

SEQ ID NO: 246085 - protein, 95 aa, Glycine max
  unsure (1)..(95): unsure at all Xaa locations
  Clone ID: PAT_MRT3847_64245C.1.pep
RPPPFSFFLFGKKKLLXGLFLGPAGSPLRNLVFAPWFGKKISSPSQDAVGLRRVGCFFVPLFFCSYIKFPRLLFFLPLKKCFFPPGVEKKIKKEK

SEQ ID NO: 246086 - protein, 50 aa, Glycine max
  Clone ID: PAT_MRT3847_64246C.1.pep
ISKIAQPPYLTKQVIRAFLRFHLTSSLMPICRPVTFAKTCYSTLICAVKC

SEQ ID NO: 246087 - protein, 52 aa, Glycine max
  Clone ID: PAT_MRT3847_64247C.1.pep
EQEKEKDGRIKLIRRLIRKKNDVVAAASISSNIQRGRLEAITSTDSYVVVDY

SEQ ID NO: 246088 - protein, 98 aa, Glycine max
  unsure (1)..(98): unsure at all Xaa locations
  Clone ID: PAT_MRT3847_64248C.1.pep
HQRVLFTEEQLKHGGDHIDSFIRMESPLLSVLSXRAGIYWFVQSRRGPSIRRQVDSSGPVLNVKAKIQDKXEIPQFQQRVISAGNELQDVRILAAYTS

SEQ ID NO: 246089 - protein, 111 aa, Glycine max
  unsure (1)..(111): unsure at all Xaa locations
  Clone ID: PAT_MRT3847_64249C.1.pep
NNMPGFNVMSPGPTLTPYERGDFXLGLLLPEKYPMAVXRGRFCEKXYHSNIYKLVTVCVDTFGRKWSPVLXIRTVLLSIXALLNAPHPHNTAFENIAQHFRYNEGPAVETA

SEQ ID NO: 246090 - protein, 84 aa, Glycine max
  Clone ID: PAT_MRT3847_6424C.1.pep
LGCFFLSPDYSYLKTEALSKIIPLGLSTILLLSTVYGAVSGLDMPIIGLDNAHAAMSGIDGGLMTMFYQREHKDRQSDCALHQT

SEQ ID NO: 246091 - protein, 133 aa, Glycine max
  unsure (1)..(133): unsure at all Xaa locations
  Clone ID: PAT_MRT3847_64250C.1.pep
MDITPTTTIINTTTTPSAAKSPEHETETPTRITTPITPTTTKTLSFSNGVLKRHHHHHLHHPMPXVVTYKECLKNHANLGXHALRCEFMPSPTATATPAHKTPPLHSPREDPAEDPSRNHYGGVNVGANGSSS

SEQ ID NO: 246092 - protein, 341 aa, Glycine max
  Clone ID: PAT_MRT3847_64251C.1.pep
MDITPTTTINNNNTTPSATTKSPENETETPTRITTPITPTTTKTSSFSNGVLKRTHHHHHLHHPIPPVVTYKECLKNHAANLGGHALDGCGEFMPSPTATAADPSSIKCAACGCHRNFHRREPEEPPIASTTTHVIEYQPHHRHHPPPPLHAAAVATRSPNSASPPPISSSYYPSAPHMLLALSAGLAAPPESTAAPSAALSRKRFRTKFSQEQKEKMHKFAEKVGWKIQKRDEDLIHEFCNEVGVDRSVLKVWMHNNKNTFAKKDNNIVISNDINITTSNNINTSIIDDNDANGGDVKVFENPNNNHGSGSGGGEDPAEDPSRNHYGGVNVGANGSSSSS

SEQ ID NO: 246093 - protein, 115 aa, Glycine max
  unsure (1)..(115): unsure at all Xaa locations
  Clone ID: PAT_MRT3847_64252C.1.pep
FXFFFFNXXFFFFFFFFFFFKCQPFFLFQTILLKRHNLGTIWFIIKRPFFFFKIQGNPLGKTPLNKIPPATYKKSKSNKLLGEKFLANFPIKKGFFFFWFKARHQRGPCFPNLVF

SEQ ID NO: 246094 - protein, 62 aa, Glycine max
  Clone ID: PAT_MRT3847_64253C.1.pep
VRSMIIAFFLWIRGKESCPLINKQHLARTAVMFRFFFAWIQKNEELYKTLFLKRCASRKSQD

SEQ ID NO: 246095 - protein, 147 aa, Glycine max
  Clone ID: PAT_MRT3847_64254C.1.pep
LSLQPCSSEIPSDKNGKGSRDKRPVYKVAAEFRRIQACNLRTVSFTSYNLQDGTEKTCNGEVFLNCILEDPKKVSDYDDLADFLECKTGKNYSKWLNGREVYRNRRYQRKIDLRKKKKETFWNSSKYRKIGKSLKRQNICTFMKHWK

SEQ ID NO: 246096 - protein, 68 aa, Glycine max
  Clone ID: PAT_MRT3847_64255C.1.pep
GELQIRPCQGTILIEVDTYPALKSIVTWQRIWRFVFHLVLDYKSQSPEVHCGQLLQHLFGILFTHFFA

SEQ ID NO: 246097 - protein, 62 aa, Glycine max
  unsure (1)..(62): unsure at all Xaa locations
  Clone ID: PAT_MRT3847_64256C.1.pep
VCVQTETVLLQALGERIKPVLTENNMDKCFXELQVXERKAYQTFQRVIDNANVIMVSYKNTL

SEQ ID NO: 246098 - protein, 122 aa, Glycine max
  unsure (1)..(122): unsure at all Xaa locations
  Clone ID: PAT_MRT3847_64257C.1.pep
NKRFAGFDKKKKELHAEVHRKYVCGAHVAAYMKISAQDDPEQYQSHFREYITRGIXDDGVQALAQEVHDTIRDDRTLRKFDNEPPKEHKRYNMKQLTYQESKPQXIARVAAIDFVVDSDEDD

SEQ ID NO: 246099 - protein, 37 aa, Glycine max
  Clone ID: PAT_MRT3847_64258C.1.pep
KKKKKNSRGGPVPNSPYSESYYARSLAVVLQRRDWEN

SEQ ID NO: 246100 - protein, 208 aa, Glycine max
  unsure (1)..(208): unsure at all Xaa locations
  Clone ID: PAT_MRT3847_64259C.1.pep
MGETVNTNLLASDAADIANSGLPVKTDLQRQFSFPKMFDKQHSFSENMVTPFAHQATKLTRMLSGSERMGLSWPEPPLHLLSQRVLDRPTSFKSLKSFKSSKSFKTFNSFKSIMDEMPGIVGLPEIDLEALIKRKRRSPYVRIVSKQMVGIFITDWVRRSLRKQIQNLKVSTVGVGVMGYIDNKGSISDSMSIHQTFVXLICTHLTSG

SEQ ID NO: 246101 - protein, 58 aa, Glycine max
  Clone ID: PAT_MRT3847_6425C.1.pep
AEMSSLSTTTATTMNSMPQSSATNYKIKFRQKISILDLESHSPCSTLTDTITSSTIRA

SEQ ID NO: 246102 - protein, 244 aa, Glycine max
  Clone ID: PAT_MRT3847_64260C.1.pep
MRLQHGRQENLSNREIKIFSLAQITTSVGSYHSVCRFFFPSISCHISKTFTNHTPKSNILGTFTLVSSHEEFVFFLYLFLSICQRTNQARIMDCICNYPTEEPDEDNNDGNFRLFTYRELNSATRGFHPSEKIGEGGFGTVYKGQLRDGTLVAVKVLSIELDSLRGEREFVAELNTLTNIKHHNLVNLRGCCVEGAHRYIVYDYMENNSLRYTFLGSEQKRMEFSWGNSEGCIQRCGQRACLSP

SEQ ID NO: 246103 - protein, 94 aa, Glycine max
  Clone ID: PAT_MRT3847_64261C.1.pep
ADSRYDYVKCFEVEDEAMFPNIILVWINACKLHKPHDSYTLQLMNSCAVAVLEQYAHVFFAYGSSDEYTFVFKKTFKFHVRRASQMLSIITSFF

SEQ ID NO: 246104 - protein, 152 aa, Glycine max
  unsure (1)..(152): unsure at all Xaa locations
  Clone ID: PAT_MRT3847_64262C.1.pep
VNASNLTIAWSAGNAYLYMSSRALYALAISGQAPRVFLRCTKGGVPYAAVLACGLFGFLAYLNXGNSSSPVFPWFVTITNTSGFVSWICCCIVYLRFRAACKRQGVHELPYRSWLQPYGAWFGLVFFIVLALINGFNVFFPSQLTASSFLTA

SEQ ID NO: 246105 - protein, 121 aa, Glycine max
  Clone ID: PAT_MRT3847_64263C.1.pep
ECGGVRSGHRSWSEVKDFLDCATCPRTFVDGGDDEGVFLCSGEDLIALRGDTWQKMASLPGEIRNVSYVGAFDGTLVLIGSSGYGEVHVAYAFDVKSCNGRKLESPEGFRGHVQTGCVLEI

SEQ ID NO: 246106 - protein, 158 aa, Glycine max
  Clone ID: PAT_MRT3847_64264C.1.pep
MEGGRSSVSNGNVEVRYRGIRRRPWGKFAAEIRDPTRKGTRIWLGTFDTAEQAARAYDAAAFHFRGHRAILNFPNEYQSHNPNSSLPMPLAVSAPPSYSSSSSTSNYSGDDNNNHLVRPAFSGEIMQGGDHDDDTFELEYFDNKLLEELLQMQDNRHF

SEQ ID NO: 246107 - protein, 532 aa, Glycine max
  unsure (1)..(532): unsure at all Xaa locations
  Clone ID: PAT_MRT3847_64265C.1.pep
MKCCDVICRGEEGMAAYMCADSGNLMAIAQQVIKQKQQQEQQQQQQQQQQQQQHLLHHQQNPLSLHTPIPWNNTPPLGYPLPPTTDFPPDPFQPDPPFHFQPDPHSFRFSDFDSDDWMDSLIAAADTTDFXLPPLRSQPAPSPTXLPPSPPPPPAQSPVDSDSDSSVHPLLXALAECASLAETEPDQAAESLSRLRKSVSQHGNPTQRVGFYFWQALSRREEKGHNSTWDEELTLSYKALNDACPYSKFAHLTANQAILEATQTASNIHIVDFGIVQGIQWAALLQAFATRPSGKPNKIRISGIPAVSLGPSPGPSLSATGNRLSDFARLLDLNFVFTPILTPIHQLDHNSFCIDPNEVLAVNFMLQLYNLLDEPPSAVDTALRLAKSLNPRIVTLGEYEASVTRVGFVNRFRTAFKYFSAVFESLEPNLAADSPERFQVESLLLGRRIAAVIGGPGSVRRESMEDKEQWRVLMERAGFESVSLSHYAISQAKILLWNYSYSSLFSLVESTPPGFLSLAWKDVPLLTVSSWR

SEQ ID NO: 246108 - protein, 72 aa, Glycine max
  Clone ID: PAT_MRT3847_64266C.1.pep
TKNMKSVGARRKKTDYDLQVFFFILFYVSNSKTPRKPLQRGFKNTCPWCPLTPKKKKKKHSKSAMVKIPTKP

SEQ ID NO: 246109 - protein, 62 aa, Glycine max
  Clone ID: PAT_MRT3847_64267C.1.pep
KGSIFFANPKPKFWKKAGVFGSGPLLQPGGFFPRKRPNLGKIRQEWFLKKKKKRQPAQKNPS

SEQ ID NO: 246110 - protein, 160 aa, Glycine max
  Clone ID: PAT_MRT3847_64268C.1.pep
MATKYPLDEKVDSSADHIDDVETQQERVLSTQENEAHQEHVFDPKETKRILRKVDFRLIPVLAVLYLLAFLDRSNIANARVAGMNAELELTGPQYNMALTVFFFPYAIFEVPSNVVLKLMKPSVWISILMVTWGIVMTLQGIVETYEHLIVTRVLLGLFE

SEQ ID NO: 246111 - protein, 71 aa, Glycine max
  Clone ID: PAT_MRT3847_64269C.1.pep
KGGTNPSQGKIRGKPCPIGAVCGIAFLLLKFCLNRWKRKKKRPKAMAFASGTCLDYYAINKILYLETHKPG

SEQ ID NO: 246112 - protein, 299 aa, Glycine max
  Clone ID: PAT_MRT3847_6426C.1.pep
MAEVLTKASLVSSSWHGVSQRHHHRRVSTVLSNNTCSFRSGVGKFSSLKMNSQVLRSWSSSSEFQGKKLVFHVNIGLPNRVNSRLRASTGTQMNLRLGKVQKWWEKGLQPNMKEVTSAQDFVDSLLNAGDKLVVVDFFSPGCGGCKALHPKICQFAEMNPDVQFLQVNYEEHKSMCYSLNVHVLPFFRFYRGAHGRLCSFSCTNATIKKFKDALAKHTPDRCSLGPTKGLEEKELEALAANKDLSFTYSPKPLQPSHENEELATETASAPALGSGSLPSPSMTLNAVASNERTLTTSGR

SEQ ID NO: 246113 - protein, 66 aa, Glycine max
  Clone ID: PAT_MRT3847_64270C.1.pep
AFHPWHHIEGNEFFQPQQSNSIRNLNTLKSHQSFVFFFFCVKNRRPTPKRKRAQQEPNPSLSSHTT

SEQ ID NO: 246114 - protein, 45 aa, Glycine max
  Clone ID: PAT_MRT3847_64271C.1.pep
DAQIIIQTPRANATHQADVNDHEQVLAYISYHYQAPHSSLHFPSA

SEQ ID NO: 246115 - protein, 98 aa, Glycine max
  unsure (1)..(98): unsure at all Xaa locations
  Clone ID: PAT_MRT3847_64272C.1.pep
TQLLENNKHKVHDXPMYEGMYQNTDTMETLISNVVTNICTLKAAYMQDKAAHTPYDPDKIHTDDKLXMSELKNLNELKHFYRENNPKPVCVCSQDSRL

SEQ ID NO: 246116 - protein, 69 aa, Glycine max
  Clone ID: PAT_MRT3847_64273C.1.pep
MDLDGGCSSTVSTGAQAISGRSTRHGAFYRFTQQNLPACKPVLTPAADIATSLLMGINFIPDGLVTLRA

SEQ ID NO: 246117 - protein, 42 aa, Glycine max
  Clone ID: PAT_MRT3847_64274C.1.pep
VQLLCVEFNMSLKGCFEGGVASIVIGWSTQRLDFITVRMQLQ

SEQ ID NO: 246118 - protein, 202 aa, Glycine max
  Clone ID: PAT_MRT3847_64275C.1.pep
EADGLECLHLKDCALEFFELIGKGTLKHFKIDDVSVIHLDIGETVENLETVDISNFPIIWPKFYQMISRSSNLKRLRLWDVMFDDEDEVVDLETIATCFPYLSHLSLSYDVRDGVLYYGLQGSSYLESVVVLELGWTVINDLFSHWVEGLLKRCPNLKKLVIHGIVSEAKSHEECQMLANFTTSMVELMRRYTHVDPYFKYE

SEQ ID NO: 246119 - protein, 79 aa, Glycine max
  unsure (1)..(79): unsure at all Xaa locations
  Clone ID: PAT_MRT3847_64276C.1.pep
APPQTPPPPPPPPPPPPPPPHHTPPPDPPPPPPPPPPPTPPPPTPPPPPXXXNPXXPXXPXXXXPLRLAVKCYLSFLRF

SEQ ID NO: 246120 - protein, 105 aa, Glycine max
  unsure (1)..(105): unsure at all Xaa locations
  Clone ID: PAT_MRT3847_64277C.1.pep
XXXAXXXXXXXXXXXXXXTXXXXXXXRHXXXHXGKXGPNXXPXHXTXXXTXXHTTRXXXNXFXPCXXSXXXXCXXXLXXSXXFLXFXFFXYLEPNSEXXVRVQXT

SEQ ID NO: 246121 - protein, 88 aa, Glycine max
  Clone ID: PAT_MRT3847_64278C.1.pep
KTTFITMSPKASPSASLIKIGSDGFDLIERHYGRFRRNQVPPFEVPIIVNSNNPGASFGGANIDNKENPKPPRRNWAGRSLVSLSSIN

SEQ ID NO: 246122 - protein, 75 aa, Glycine max
  unsure (1)..(75): unsure at all Xaa locations
  Clone ID: PAT_MRT3847_64279C.1.pep
NLIIIDIRQIINAVTVASLNLIIXIIRRCTSRSLSLNYYSKTCPHVECIADKAVNDATARDKTVPPALLRMHLHD

SEQ ID NO: 246123 - protein, 172 aa, Glycine max
  Clone ID: PAT_MRT3847_64280C.1.pep
EEKRKILLETRTTQTVRMTVGAGQASSTRALDDFLREVGPLFPSLRMRRPLSTHSLDFTVEDIRKQNIRRFTLENDVLKKRMLSVTRSARETRFLFHSRDTVLYYGKSWGFLKKDQMDIFEQLVKAQIHHDEEGVDEARWDNSLRYALALLMAKSKHQLDRDFEPDEMVSHP

SEQ ID NO: 246124 - protein, 98 aa, Glycine max
  unsure (1)..(98): unsure at all Xaa locations
  Clone ID: PAT_MRT3847_64281C.1.pep
IIXLXXXKIXNPXLQXXPSKPXXXKQXXXXTYXIXXXPKXXXXXKKXXNXXPPTNQXKXKKKXTKXXKLKXNXXXXHXXXXXXXXXPHQPKTTQHNKN

SEQ ID NO: 246125 - protein, 65 aa, Glycine max
  Clone ID: PAT_MRT3847_64282C.1.pep
MGEPRFGNGELPFSGLLPRGNCSARYHLTRRPSGRGLGAEFFTNVRDNKIFSLYVRDWNYGLVDD

SEQ ID NO: 246126 - protein, 144 aa, Glycine max
  unsure (1)..(144): unsure at all Xaa locations
  Clone ID: PAT_MRT3847_64283C.1.pep
ISVRLCTRFALQSTHISHIFSHTDPQKSFMEILSNDPNPFDRYTARGEHAMPPEFPFSSFRVGSQFFILTRRHARVVVRDIMLWNKFRLPCVTEETCYPEEHIFXTLLSMQEPNGQTGVILTWGNGVEYVMGLTPSNPTKLFSR

SEQ ID NO: 246127 - protein, 271 aa, Glycine max
  Clone ID: PAT_MRT3847_64284C.1.pep
MASLIESGWQYLITHFSDFQLACLGSFFLHEGVFFLSGLPFIWLERAGWMSKYKIQAKNNTPAAQEKCIVRLLLYHFGVNLPVMVFSYPVFRYMGMRSSLPLPSWKVVLIQIIFYFILEDFIFYWGHRILHTKWLYKHVHSVHHEYATPFGLTSEYAHPAEILFLGFATIFGPAITGPHLITLWLWMVLRVLETVEAHCGYHFPWSLSNFLPLYGGADFHDYHHRLLYTKSGNYSSTFTYMDRIFGTDIGYRKLKALKSIGVEDNSEQKKQ

SEQ ID NO: 246128 - protein, 443 aa, Glycine max
  Clone ID: PAT_MRT3847_64285C.1.pep
MILQFFVLSQRGDNIVYRDYRGEAQKGSAETFFRKVKFWKEDAEGDAPPVFNIDGVNYFHVKVAGLLFVATTRVNVSPSLVLELLQRIARVIKDYLGVLNEDSFRKNFVLVYELLDEVIDFGYVQTTSTEDLKSYVFNEPIVIDAARMPPLGPASIFMQGTKRMPGTAITKSVVANEPGGRKRDEIFVDVIEKISVTFNSSGFILTSEIDGTIQMKSYLTGNPEIRLALNEDLSIGTSDYRGSGAVILDDCNFHESVHLDSFDVDRTLSLVPPEGEFPVMNYRMTQPFKPPFRINALIEETGSLKAEVTIKVRAEFNSSINANTVLVQMPLPSFTSRVTFELEPGAVGHTTDFKEANKRLEWGLKKVVGGSEHTLRAKLTFSQELHGNIMKEAGPVSMTFTVPMYNASRLQVKYLQIAKKSKAHNPYRWVRYVTQANSYVARL

SEQ ID NO: 246129 - protein, 76 aa, Glycine max
  Clone ID: PAT_MRT3847_64286C.1.pep
TLGNIIVTVVGTGVLGLPFAFRIAGWVAGSLGVAIVGISTYYCMLLLVGHLSSLFAQSLHLFFLLECKNLFFFLSL

SEQ ID NO: 246130 - protein, 139 aa, Glycine max
  Clone ID: PAT_MRT3847_64287C.1.pep
NRWIFIKKTAGPQRGSPPQRPGFLHLTKELKGLAKKTLRGYYPGGEGAFITLKTVPSSRNRILITGNFRAMGHRGHKTPHKPFWGRKRGTFWKRGKLFQGWGPNPPRGGSTPPNSRARPGGPFMQKGGPQLGGFWTLLG

SEQ ID NO: 246131 - protein, 135 aa, Glycine max
  Clone ID: PAT_MRT3847_64288C.1.pep
QKKQSSFPSPGARVCPKPRGFVNLAKRDPWEPNRPMPNPFWGEGSPPIFSFHGEFGGGAQKSRFLPGLIFKNNPPLICPGRGLQKMGGFWGPIRAGGVPLGGSQSCLGNNLGFNERGLRGLFETFFFPPPCLRGA

SEQ ID NO: 246132 - protein, 81 aa, Glycine max
  unsure (1)..(81): unsure at all Xaa locations
  Clone ID: PAT_MRT3847_64289C.1.pep
LLIVDFYIYPCLVELIWEPLHVSPRIKKNQKFRHLRTQNGFKNNRSSAICVFLISFSVLVWCFFLQVQMHNHTLSEVXTRG

SEQ ID NO: 246133 - protein, 106 aa, Glycine max
  Clone ID: PAT_MRT3847_6428C.1.pep
HIQTEILRGVPINQYVNKYIPPFEEFEIDCCILPQGEKVVFPAVPGPSIFLVTVGEGMMTTESPKGYPITEGHVLFVAANTEITVSSAPQLHLFRTGVNSRFFQDS

SEQ ID NO: 246134 - protein, 65 aa, Glycine max
  Clone ID: PAT_MRT3847_64290C.1.pep
KHATAPCYTLPPSPYPPSPSFSLPFTLPPSFPPLSYSLYCCPFTLPSAHSPPPPSPPHHPKPLHT

SEQ ID NO: 246135 - protein, 54 aa, Glycine max
  Clone ID: PAT_MRT3847_64291C.1.pep
LWPPHGRNTRRNKNVCSGRDLKIVNSSNIFSKFLSFNVALTSLTRSSGGPPQSM

SEQ ID NO: 246136 - protein, 104 aa, Glycine max
  unsure (1)..(104): unsure at all Xaa locations
  Clone ID: PAT_MRT3847_64292C.1.pep
AEEIQKKAENKLSGWGXTGSKYDNAGDLFHKDANRFNLAKXSDKAGARYLKLAGXERKTESSHEAAQAHGYAGQGCKKTNINESVSSLNRAGNHFWDVGRLHMA

SEQ ID NO: 246137 - protein, 60 aa, Glycine max
  Clone ID: PAT_MRT3847_64293C.1.pep
APGERGRTRGRTRGRTRGIFSVCTFQLEILLQGFRCFKISSSNFMIMGFFILVYLSSFNF

SEQ ID NO: 246138 - protein, 92 aa, Glycine max
  unsure (1)..(92): unsure at all Xaa locations
  Clone ID: PAT_MRT3847_64294C.1.pep
NIMKKLWKTFFFFNGLKXFXFYLGPNFFFFIKEGTLRVRGRHKDDFFLLGKPNYFFAKIKFWFFPKKGIVKFVFFFFSPFYPFKGEKKFFFH

SEQ ID NO: 246139 - protein, 56 aa, Glycine max
  Clone ID: PAT_MRT3847_64295C.1.pep
ERRYVSASSVTTGACNSSPSFICLFQTSLSLISVFYTLYPTIAIYRETHISHTVLG

SEQ ID NO: 246140 - protein, 132 aa, Glycine max
  Clone ID: PAT_MRT3847_64296C.1.pep
KEVLFWNCLKLNQQSLEAIALNAQINVMKFANRRLSVSNHDDVENYNDYDKKYHFYQVVYVYPGSSVLEWLEYKTRNNYIIIDMSSAPPSLPVGFIFCFALGMYGDTSLERIEANITISDREGEGKKDSVGM

SEQ ID NO: 246141 - protein, 43 aa, Glycine max
  Clone ID: PAT_MRT3847_64297C.1.pep
MPTKNIAFERPKYSTHPYTLKAELAKFISTLIFLFAGSSSGIA

SEQ ID NO: 246142 - protein, 87 aa, Glycine max
  unsure (1)..(87): unsure at all Xaa locations
  Clone ID: PAT_MRT3847_64298C.1.pep
SLHQSPAFPLEDHIAGWAPEGSQSGARXCDGNMNELLVAVGQHFXTLYDXGLESYDALILQYNLMRGIYAYDVEKPYEIDQREGDPF

SEQ ID NO: 246143 - protein, 75 aa, Glycine max
  Clone ID: PAT_MRT3847_64299C.1.pep
RPWPYGTAVENYVVKPLIVQNFGCLHWIFKPHSLVYNFLQEFHIESTHKCCLSNIVLQITTILLKTLYFDVEVQK

SEQ ID NO: 246144 - protein, 81 aa, Glycine max
  Clone ID: PAT_MRT3847_6429C.1.pep
DICVRCKMLERSSSPDFCLEKTSTLTFIAAWTNYTFNIIIASEMDLKGANIGQVKLASYGLANVRHYNLEFIYSSSHHTQA

SEQ ID NO: 246145 - protein, 52 aa, Glycine max
  unsure (1)..(52): unsure at all Xaa locations
  Clone ID: PAT_MRT3847_642C.1.pep
KTXKLVSIRSLFRANIVDHLIFSILHYTTFNKIVPHGSHFHPHPHLFISTYI

SEQ ID NO: 246146 - protein, 78 aa, Glycine max
  unsure (1)..(78): unsure at all Xaa locations
  Clone ID: PAT_MRT3847_64300C.1.pep
MPPKSAKSKGATSELPILXGVFFFHLRIGIGGLSNVXSILLLILITKWAIPAXNFFSCTIXPNEARSNVPDERLLWLF

SEQ ID NO: 246147 - protein, 309 aa, Glycine max
  Clone ID: PAT_MRT3847_64301C.1.pep
LLLLNNFFLSFFLLVLQQQNQHQANGSNSPHELLPPLPQPPQAPHVGVESEQIRSGLMADRAKIPAPEGVLKCPRCESTNTKFCYFNNYSLSQPRHFCKTCRRYWTRGGALRNVPVGGGCRRNKKNKRSRSKSPVSTEKPSLPNNTSAIPELIGRFPQPFMASLQSMNRYGVGINTGVNLREIQAQNASQMEFQIGGLGNGSSVATAGGGGGGGVEQWRFQQFPFLNGFESTSAASNSYPFQSEIVEGLVGDINATSSRITQLPARVKMEYNGGLNLSRSPLNVSENSNHFYSWTDLSGLASSSASHLL

SEQ ID NO: 246148 - protein, 95 aa, Glycine max
  unsure (1)..(95): unsure at all Xaa locations
  Clone ID: PAT_MRT3847_64302C.1.pep
KHAAGFVRSYSVGFQVVNGFHWYENGLDTCDIWGSTLHDVNHALLAGSYGVXNGVPYCVITCSWRDRXCENGYYRVDLTKNMSDVASCASYAVVS

SEQ ID NO: 246149 - protein, 92 aa, Glycine max
  unsure (1)..(92): unsure at all Xaa locations
  Clone ID: PAT_MRT3847_64303C.1.pep
PRERKKKLKNNVDFSFYFIIIRVDFLILCLSPXQNPXPXLXIXXNTNPNSFNITTTXHSXTSPPSXXPLPIPKKKXPIPTPXXNSPPNPTPP

SEQ ID NO: 246150 - protein, 97 aa, Glycine max
  Clone ID: PAT_MRT3847_64304C.1.pep
GIKKVSLSGAGNFPGKYLFFPYFGGKRLLRGFFRVVLTPVLLGWDWFVVGEAFPFPWGGSRLPNNLLFSPITPFLGPGVFFGGPKMGNWGFFFPPPF

SEQ ID NO: 246151 - protein, 250 aa, Glycine max
  Clone ID: PAT_MRT3847_64306C.1.pep
KVLEQALSSGMAMVRCFSLLPVRKDKHKGNERSSKEDFNTLLAKLQSTKKITSESTTFDAIGIQKNSRFNATRIMTLESPVKDEAHETYKDEDSPLIKRELSDFDLQDHEAVASNAYDTTDKKVEYPILYENQVNNELEDKNDRYSQKSVDTTESGHITDPGIGKADSWASPKFKRHFSNLEKFDEHGKITRHLPASKSKSFENFQELSAMVNLESPRSSMSHYTTDRVFTTRHIESCWKGTLQFRYSLP

SEQ ID NO: 246152 - protein, 382 aa, Glycine max
  Clone ID: PAT_MRT3847_64307C.1.pep
MASIATFFNKFLYFFILLVHLGCFIFTTAGKQSPPSKKRKTSPLSQPSSPSHTKFKTHKALSSSWHFIKHLFSTKSCKTPNTATTQSSPQSTATTTTTTASAAAASSLISLSQPDPDRNQPVSCPESGISTDTNLFFPLRNDIFPCTACGEIFQKPHLLEAHQTLKHAVSDLPGSDPGHNIVQIIFKSGWPESKPFPTITRILKIHNSPKILSKFEEYREAVKSKAARHGAHTRRRDERCIADGNELMRFHCSTFLCDLGHNGDSAICSQQFCNICGIIKSGFSPKLDGIATLSTSWRAHVAIPEDIEREFRFMNVKRAMLVCRVIAGRVGSDSDEVEKEDGGFDSVMASGESGVYTRLDEEELLVFNPRAVLPCFVIVYSV

SEQ ID NO: 246153 - protein, 79 aa, Glycine max
  Clone ID: PAT_MRT3847_64308C.1.pep
RLAYSEQGMLVLYSYLACISVGRSVNGQFKDFEVNGCVPVCFKAWSYAISLDSEQWDKPSCNTLLSYYWLVRSVSCSFH

SEQ ID NO: 246154 - protein, 267 aa, Glycine max
  unsure (1)..(267): unsure at all Xaa locations
  Clone ID: PAT_MRT3847_64309C.1.pep
IRPGCVVLSIYASMSSADWEKLEENLLQHVHALXQNSDSDFWRNGRFLVHSGSQFVSHKDGKIRICKPWRTWKSPELISVSPLAIVSGQETSIXIEGSSRNLSTLGTKIHCTGTGSYASAEVIGSAHSGVMYDKIKLSGFKVQDVSPGVLGRCFIEVENGFKGNSFPVIIADETICKELRPLESEFDEEEKICDAISEEHEHHFGRPRSREEALHFLNELGWLFQRERFSYVHEVPCYSLDRFKFVLIFAVERNCCMLIKTLLDVLV

SEQ ID NO: 246155 - protein, 82 aa, Glycine max
  unsure (1)..(82): unsure at all Xaa locations
  Clone ID: PAT_MRT3847_6430C.1.pep
LIGEETTHAGGNAELTDEPTWIVDPLDGTTNFVHGFPLXCVFIGLTNGKDPTXGVVYNPIINEGENLSFCMTGVTPKLFQIP

SEQ ID NO: 246156 - protein, 62 aa, Glycine max
  unsure (1)..(62): unsure at all Xaa locations
  Clone ID: PAT_MRT3847_64310C.1.pep
LHPDKLCYQISDAVLYTCLXHYPYSNFSCETCTKTNFVMLFXXITTKVHVHYDNIYRDTCNN

SEQ ID NO: 246157 - protein, 104 aa, Glycine max
  unsure (1)..(104): unsure at all Xaa locations
  Clone ID: PAT_MRT3847_64311C.1.pep
PTRPRSATEPRLLCCGANATGRYAYWAATYSEENALFLDILHEAPVFYYIKAARDIRSEHYCILXGYTTMAIGAHWIFKPVQGLMYTVLCSYDILLLLYTRIYQ

SEQ ID NO: 246158 - protein, 60 aa, Glycine max
  Clone ID: PAT_MRT3847_64312C.1.pep
KQNGWSVLLKYMLVRDHNFKQAGHFTLSERTGYLDVQNPLLLSRRGRAPSSNCTALTVGA

SEQ ID NO: 246159 - protein, 489 aa, Glycine max
  Clone ID: PAT_MRT3847_64313C.1.pep
MDMYVIKVTADWEKLEENFLQHVHSLIQNSDSDFWRNGRFLVHSGSQFVSHKDGKIRICKPWRTWKSPELISVSPLAIVSGQETSISLKGRNLSTLGTKIHCTGTGSYASAEVIGSAYSGVMYDKIKLSAFKVQDVSHGVLGRCFIEVENGFKGNSFPVIIADETICKELRPLESEFDGEEKLCDAFSEHEQHFGRPRSREEALHFLTELGWLFQRERFSYVHEVPYYSLDRFKFVLTFAVERNCCMLVKTLLDRLVGKHLQGEWLSTGSVEMLNAIQLLNRAVKGKYVGMVDLLIHYSIPSNNGTSRKYVFPPNLEGPGGITPLHLAACTSGSESVVDSLTSDPQEIGLKCWESLVDANGQSPHAYAMMRNNDSYNALVAHKLADRQRGEISVTIANAIEQQSLRVELKQKQSYLVKRGQSSCAKCANAEIRYNRRVPGSHGLLHRPFIYSMLAVAAVCVCVCVFFRGRPFVGSVAPFSWENLDYGTM

SEQ ID NO: 246160 - protein, 45 aa, Glycine max
  Clone ID: PAT_MRT3847_64314C.1.pep
SPFPFFKKKHSRVSVSKVRGPAPFFVWKRKQVVLPDLRPQYPQQL

SEQ ID NO: 246161 - protein, 35 aa, Glycine max
  Clone ID: PAT_MRT3847_64315C.1.pep
PLWHSCPRDLVQYWYLIPFSCGCSLFLEDSGSSSE

SEQ ID NO: 246162 - protein, 95 aa, Glycine max
  unsure (1)..(95): unsure at all Xaa locations
  Clone ID: PAT_MRT3847_64316C.1.pep
SILYDTLNDYTGLSIQTGERGVTDHNIHTTSSYIRGTNSTYHGIDPLLIFFNHTTLYIDQCERMIKRAFTSNLNPYHSDXFKFYNSTINHLKEYH

SEQ ID NO: 246163 - protein, 84 aa, Glycine max
  Clone ID: PAT_MRT3847_64317C.1.pep
PNEHVLYILVQHALIACLCTLEFHSRVRGASNYCQHARYINSTVFVWCLISKALFGVLEHRRLSLSLLYVSSRAHIQSAEAIIL

SEQ ID NO: 246164 - protein, 214 aa, Glycine max
  unsure (1)..(214): unsure at all Xaa locations
  Clone ID: PAT_MRT3847_64318C.1.pep
FNITDFDFESATTLASPDLKDWINQHDLNXADDGYNLRQICGSRTYRDMRYNNPRAWYVQKLFGVETGADPTQMDLPFICHPKHRLAVEDIKQAMSSHYQGTPYDPYGGEKGGQVRSIALNRNLELHVLEIRAGVAAVHWLAFGPNTFNALVPFYANVTDTPSAYRDTSGQYDPTKAYWLAHTLAAIGDHHYRALAPKVEAYEQTVTALGRQLQ

SEQ ID NO: 246165 - protein, 517 aa, Glycine max
  Clone ID: PAT_MRT3847_64319C.1.pep
MEAEAEGEEGAKLSIYKAARSIKRRENSLYNALRSIYQDSIFVSEISLLWPQLPLLANLRCGLWYSRPAAFHSTCYFKSTDGHTNNCSFTTARLNLHVALLAGQKGGCIIVDSTRRGKRFPDSMSKTIPIWTSVLNRAIKDFRDSNGCPLEWDCSLHLPLWVSQTERASIERRLDEWTLLLKASGADIASLAACLRKPLRPLWISQKTVIWLNEVPHHESWDFTPIILLSASSSSSVVGASQHRTTSEFSWNYIPGAGDDEESWARGLTPAFFWKHVYDLINSAPEVCNQKVADIVEKSRVSRAYRGESAPQITVKPLKSASLSLHEEPSVACDFSNIKIDSESSEDFGISWLGSTNLAVGTAQAAADAADVDCILNCDQESISVCLPSAESYLHLPMVTSKFDRFSLLNNLPKAVSFAKFNLSLGKRLLVCCNNGEDISVCVCLAILMSLFDEKGMFDGGKSFSAAQVTKWDMRRRLVFVCKFATDARPSRGNLRQVFNFLIGGKFNHPLDTGRDE

SEQ ID NO: 246166 - protein, 80 aa, Glycine max
  unsure (1)..(80): unsure at all Xaa locations
  Clone ID: PAT_MRT3847_6431C.1.pep
QRKCXRLRERITKPTTPKXCFDNFSININSCKCNASRVSNQRKPYLSEKPRPACSKNITNTTNQKQFPRNHKHPETVSAS

SEQ ID NO: 246167 - protein, 93 aa, Glycine max
  Clone ID: PAT_MRT3847_64320C.1.pep
FQKWLERAQSRRWCEEFWCAYEINGTSAKAIVQTVERRIAIAGGDGGRGHEGIAGRGFGPCVHDYVCYLTIMVVAGVSLCRNCGNRTIRLEAK

SEQ ID NO: 246168 - protein, 88 aa, Glycine max
  Clone ID: PAT_MRT3847_64321C.1.pep
DFGLVLMGCLTGQLHRSPAGCGQTRWLHVSRHRLARAARFGVCLCKLTYRPWCLYNTVFVSTFLCAKLPRQLRGDLLSSPASIHLFVS

SEQ ID NO: 246169 - protein, 753 aa, Glycine max
  unsure (1)..(753): unsure at all Xaa locations
  Clone ID: PAT_MRT3847_64322C.1.pep
VHDYFNGNXNNILWPIIXYLGLXWEDRLATDRSFKSQFKAYLKAIWTCPTVVTKVDDVGDVVWCHDYHLMFLPQCLKNYNRKMKVGWFLHTPFPSSEIHRTLPSRSELLHAVLAADLVGFHTYDYARHFVSACTRILGLEGTPEGVENQGKLTRVAAFPIGIDSERFIRALDLPQVKEHIKELQERFKGRKVMLGVDRLDMIKGIPQKILAFEKFLKKNRDWRDKVVLLQIAVPTRTDVPEYQKLTSQVHEIVGRINGRFGELTTVPIHHLDRSLDFHALCALYAVTDVALVTSLRDGMNLVSYEFVACQDKKKGVLILSEFAGAAQSLGAGAILVNPWNITEVATAIAKALNMPSAEREKRHKHNYEHVKTHTAQEWAETFVSELNDTVVEAQIRTKQVPPRLPTETAVERYLQSNNRLLILGFSGTLTEPVEKTGDQIKEMELKVHPKLRQPLTALCSDPNTTVVVLSGSGRQVLDDNFKEYDIWLAAENGMFLNPSKGEWMTTMPEQLNMEWVDSVKHVFDYFTDRTPRSYFEEREASLVWSYRHADAEFGRLQARDMLQHLWTGPISNASVDVVQGSRSVEVRAANVTKGAAIDRILGEIVHSKFMTTPIDYVLCIGHFLTKDEDIYAFFEPELPSIGVGLQRSKGTEGVKFPVERVSSLKNPASRNGAAKSSSQKKGQRPVSNNEKKRNNHVCRGPRRLAPEKISWNVLDLKKENYFSCAVGRTQTNARYTLGSPDEVVAFLKELANV

SEQ ID NO: 246170 - protein, 57 aa, Glycine max
  Clone ID: PAT_MRT3847_64323C.1.pep
QLVYFYVHVHHLLIASCVLCFAETLTLLKTYTAHRRHSLRPSRCSFHVNFQQHNLSF

SEQ ID NO: 246171 - protein, 118 aa, Glycine max
  unsure (1)..(118): unsure at all Xaa locations
  Clone ID: PAT_MRT3847_64324C.1.pep
HXPPTHTPXTXXXSTXLPXTTPTNTXTSPXTPXHPRXXXXXXNTQKNTPTXTXXXXPXXPPXXXTSLQPNYPNXXXTSXPHTXXTTHXPTTXPPPPTNISXTPYPXXKHLEHNYSPNL

SEQ ID NO: 246172 - protein, 43 aa, Glycine max
  Clone ID: PAT_MRT3847_64325C.1.pep
LIKLYIIKVSKYYKFLFYKKYIYNKLIDIDVKFLLIKKKLFIL

SEQ ID NO: 246173 - protein, 127 aa, Glycine max
  unsure (1)..(127): unsure at all Xaa locations
  Clone ID: PAT_MRT3847_64326C.1.pep
GLKEDEFGNXDNLSDEYENPVDAXCTYLATTTVDGGXTDDDINQHHDTPSAYRAHTGKQHCSGGCDGDTRSHHGTTAGSDDDTDRHDGTTGDYGYXTERRAHGTTGGYASDTARXHVNIAGHYYRTN

SEQ ID NO: 246174 - protein, 69 aa, Glycine max
  unsure (1)..(69): unsure at all Xaa locations
  Clone ID: PAT_MRT3847_64327C.1.pep
SFHLCLXXXRTASSLAGAGRVKPVPYPQSCHAYLKXXQVYNAMEIKKNNRKXXXSSXXXXKGILFXXXK

SEQ ID NO: 246175 - protein, 41 aa, Glycine max
  Clone ID: PAT_MRT3847_64328C.1.pep
KIVVSHCHKPSPSSKSRESPRGYAPTGNLHKMIEQCDIAHP

SEQ ID NO: 246176 - protein, 183 aa, Glycine max
  Clone ID: PAT_MRT3847_64329C.1.pep
NSARGRMSEILAPIKTVRLTRNRDEDAKMMKNLLGQGDLVVCPEGTTCREPYLLRFSPLFSEMCDEIVPVAVDSHVSMFHGTTAGGLKCLDPFFFLMNPEPVYTVQLLNHVFPSQLLSSHTSNTSVLDHQTSRFHVANRVQTQIGTALGFECTKLTRKDKYLMLAGNEGIVNSNTKCKSKSKL

SEQ ID NO: 246177 - protein, 48 aa, Glycine max
  Clone ID: PAT_MRT3847_6432C.1.pep
RHISQSQIHLCQHRNYVRLNLNSHEIHFVTKSEEQPNYPILGNPKQAL

SEQ ID NO: 246178 - protein, 76 aa, Glycine max
  Clone ID: PAT_MRT3847_64330C.1.pep
IGEPKRTIYYTGDQLVRTTSLETVLQPKSLTRAHASIIKRVLRDRRSIRSELPLMRDLESFYVSPMRHGLFSTTGT

SEQ ID NO: 246179 - protein, 86 aa, Glycine max
  Clone ID: PAT_MRT3847_64331C.1.pep
PEKSPTPTPKEEVDKSGSEAMTLSDFMGWNNDQGDSDAKKDHFADSDDFDKNIDNGKPQKLPNVVTDKKVSSLETLGGMRSPTSRH

SEQ ID NO: 246180 - protein, 65 aa, Glycine max
  unsure (1)..(65): unsure at all Xaa locations
  Clone ID: PAT_MRT3847_64332C.1.pep
MGPNAAGAKHEEKLGIDGITYFKKDRLGGAIGADTEANTLRPNVTGYXTNRALCHLKHADWERVE

SEQ ID NO: 246181 - protein, 115 aa, Glycine max
  unsure (1)..(115): unsure at all Xaa locations
  Clone ID: PAT_MRT3847_64333C.1.pep
MLLDKNDIQETHYEVLHVKEHANYEEIRASYRSVVLSLHPDKLLKTSKTSSSNQTXERFLKVQKAWEILCNSSSRSFYDNELRSSRKDVLAADIAEDLSLKKDVLAADVAENLSL

SEQ ID NO: 246182 - protein, 315 aa, Glycine max
  Clone ID: PAT_MRT3847_64334C.1.pep
MKEHDNDVITNAVSGSGFRRTRSQAEPDWSVTESLILVNEVAAVRADCSVALSLYQQWNIIAENCAALDVPRSLPQCRRKWRALLAAYDGARGARGAMPPPGFDRELFEAIERVVRAREERGMVDPGSDDEDGNEARDATVEIGSKRKRQRSKSRCQVQKPKKFHEQRPEDSYEEGLEDDNLEDEYLKDFLESRPKLKGTAERPPKHLVMPPKSPGRVELNENHHIKRPKPIGTENITFNREENEETLTLKLQVLAVEIGTIASESAADYKGGVSQNLEDSHFDFTRCQGDKLIASLGNFFNTLKHLRDTPQECN

SEQ ID NO: 246183 - protein, 86 aa, Glycine max
  Clone ID: PAT_MRT3847_64335C.1.pep
TPYGCRNQQVTVHSSSASHRKAFAHGGVVSLHCPISWSSQYQSYINCPHHSVIVKALCVLAKICIMIVHKVSYGCLSFIQCDDRIR

SEQ ID NO: 246184 - protein, 515 aa, Glycine max
  Clone ID: PAT_MRT3847_64336C.1.pep
SRKGNVQKNIGCLTLCTALLSLITIFIIPFCESFNYGQALSQSLLYFESQRSGRLPYNQRVTWRHHSALTDGLEQGVDLVGGYYDAGDNVKFGLPMAFTITLLSWGAIEYGEQIAAAGEYAHALEAIKWGTDYFIKAHTQPNVLWVEVGDGDTDHYCWQRPEDMTTSRQAYKVDSNNPGSDVAGETAAALAAASILFRRTNPHYSQLLLHHAQQLFEFGDKYKGKYDESVGVVKGYYASVSGYMDELLWAAVWLYRATQKEEYLTYFLDKAYDFGGTTWAMTEFSWDVKYVGVQAIASMFLMEEKKHKKHQVILKQYRSKAEHYLCACLNLNNITNVERTPGGLLYIRQWNNMQYVATASFLLTVYSDHLLATDQKLHCQKGEVGPHEMLAFAKSQVDYILGTNPMAMSYLVGYGPKFPQKVHHRGASIESYGENKGFIGCTQGYDNWYGRVEPNPNVLIGALVGGPDIKDQFKDERRNYIQTEACTYNTAALVGVFARLHQSHAHAETPLVASS

SEQ ID NO: 246185 - protein, 326 aa, Glycine max
  Clone ID: PAT_MRT3847_64337C.1.pep
SHRRGGECWVENPILFVFLVFFLFFCFSCGCETESMTSQSAKNLLVLLGLGLAGIVLITRKLKKSVRKDLGAFIEKLQLLPPPQPAPPKAPHPLTALTFALSDLFDIEGHVSTFGHPEWARTHEPASSTAPAVSALVEGGATCVATTVLDDLALGIGGENKHYGTPTNPAVPARVPGGSSSGAAVAVAVISLTLHWVLIHRVGQEFLQAPFVMQRSPRQIVIADDCFQHINVPLDRSSQVVVKATEKLFGRQVLKHINLGDYLSSRVPSLKGCSGQKTNGEVKASSLKLLANIMQSLQRHEFRLKHDEWMNTVKPELHPGVSAQLH

SEQ ID NO: 246186 - protein, 89 aa, Glycine max
  Clone ID: PAT_MRT3847_64338C.1.pep
GAIPLLVSLLKSGGFCAKNDASTALYSRCTATENKTHGAKAGIRNVHEELKGDFQSITVDNSGYVETLLEVVDDAIARQAVHGDVRPPL

SEQ ID NO: 246187 - protein, 307 aa, Glycine max
  Clone ID: PAT_MRT3847_64339C.1.pep
MAKNLLVLLGLGLAGIVLITRKLNKSVREDFGAFIHKLQLLPPPQPSPPKAPHPLTSLTFALSDLFHIHGHVPSFGHPDWARTHEPSSSTAPAVSALVEGGATCVATTVLDDLTLGIGGENKHFGTPTNPAVPARVPGGSSSGAAVAVAANFVDFALGIDTTGGVRVIRLECGILGFRPSHGAVSHMGIIPISTSLDTVGWFAKDPNILRRVGHILLQAPFVMQRSPRQIVIADDCFQHINVPLDRSSQVVVKATEKLFGRQVLKHINLGDYLSSRVPSLKGCSGQKPNGEVKASSLKLLAHIMQFL

SEQ ID NO: 246188 - protein, 96 aa, Glycine max
  unsure (1)..(96): unsure at all Xaa locations
  Clone ID: PAT_MRT3847_6433C.1.pep
DATMILRNVFSDADTRSLRLAPDYLRLADLAHTCAHHDNDDDGLMIIVHKDEDVDDXPPMCDPVRHAETFPIPAAICSGWRERCVIENDNYSLHAG

SEQ ID NO: 246189 - protein, 122 aa, Glycine max
  unsure (1)..(122): unsure at all Xaa locations
  Clone ID: PAT_MRT3847_64340C.1.pep
RFAWADIYTMWSHDCELWNPACTKAMTMPFNPNPCSAAWSGEXIEXTGCHRDIICVTGWTATPMHEVQATIDRIMCSNESVPRTYXDLKTHNPLVXNKWMGKLTFPHCTFRRVKRMPFFIGG

SEQ ID NO: 246190 - protein, 134 aa, Glycine max
  unsure (1)..(134): unsure at all Xaa locations
  Clone ID: PAT_MRT3847_64341C.1.pep
MKWRAALPCSRMATPPTCSTSRHTAGSGGSKLRFAQHGIEGARHQRAPILSAFHALPTPFPNDFRLLVRPRRAISAPMILPIIVTLKNGLLDPHGKAIHNALGGLVFDGDXDIRAVRILELDVDDSTSDACIDE

SEQ ID NO: 246191 - protein, 50 aa, Glycine max
  unsure (1)..(50): unsure at all Xaa locations
  Clone ID: PAT_MRT3847_64342C.1.pep
AFELGRAYVVRPEGXHHASIVWLHGLRDNGYSWSQVLXTLTLPNIKWICS

SEQ ID NO: 246192 - protein, 62 aa, Glycine max
  Clone ID: PAT_MRT3847_64343C.1.pep
NSSELSVSSANSFEAITIDFWSVSNLVKFKTCLRTVLFHRMVAKGLHLICLNSKVANYEVHM

SEQ ID NO: 246193 - protein, 68 aa, Glycine max
  Clone ID: PAT_MRT3847_64344C.1.pep
EIGFRRCLRFPLDSFYAIWSLPWPYSTVDPPLIVSNILKKVIGVVVLVNITSFSFFCFFFPAFVVMLF

SEQ ID NO: 246194 - protein, 38 aa, Glycine max
  Clone ID: PAT_MRT3847_64345C.1.pep
SCHFHAMRLMTHALWHAFQVYTLVLLHRELPLSIDTRA

SEQ ID NO: 246195 - protein, 202 aa, Glycine max
  unsure (1)..(202): unsure at all Xaa locations
  Clone ID: PAT_MRT3847_64346C.1.pep
MEVEIKLRLPDSATHQKLSNLLAPFHTKTLIQENIFFDGMNKELTSNLAVLRIRFYDLEHCVLSLKAKPVISAGISCMEEHEEPFDVALGRACIAEPWRLLSVESSEILKRVRDEYRVGENGXVCLGGFRNVRAVHQWKGLKLELDETNYDFGTNYELECESDDPERHKRLLGEFLQGNGINYSYSXLSKICCFSVQGSCPD

SEQ ID NO: 246196 - protein, 66 aa, Glycine max
  Clone ID: PAT_MRT3847_64347C.1.pep
TRKFRSTSSFFFVFILLKFISRPPKKIKGTCGAIRTVWHVPTFNGKPLLHCAQTHHCGHKKKKKAW

SEQ ID NO: 246197 - protein, 204 aa, Glycine max
  unsure (1)..(204): unsure at all Xaa locations
  Clone ID: PAT_MRT3847_64348C.1.pep
MAFLLPNLQPSLLAQSKSNKDKANLHQTLSPQKPTSQFPISSTTCSSSSLQTAQAAQVSTPQDKQQQQPKDEFYLNLGLAVRTIREDLPLVFVKDLNYDIYRDDITFMDPLNTFTGIEKYKLIFWALRFHGKILFREIALDVYRVWQPSENVILVRWNLRGVPRXVPGRLKGEFQGTSRYKLDRNGKIYEHKVDNLAFNFPQIL

SEQ ID NO: 246198 - protein, 62 aa, Glycine max; identical to SEQ ID NO: 164557
  Clone ID: PAT_MRT3847_64349C.1.pep

SEQ ID NO: 246199 - protein, 38 aa, Glycine max
  Clone ID: PAT_MRT3847_6434C.1.pep
MKGGSDDFHHHHHHHDHNHHRQNFPFQLLEKKEDQQDP

SEQ ID NO: 246200 - protein, 301 aa, Glycine max
  unsure (1)..(301): unsure at all Xaa locations
  Clone ID: PAT_MRT3847_64350C.1.pep
NHGFSSIQPETLTATPNQIKTHSSNAFTIISKTHFSKSAFLLLHFKPSLLPQPKSKPIPQTPSPSSKTHFSNSSLHLAPLSALQSSTAQVAQGHTPTTGARDELQQXVKDEFYLNLGLAVRTLREDMPFIFVKDLNYDIYRDDITFKDPLNTFTGIEKYKLVFWALRFHGKILFREIALDVYRVWQPSENVILVRWNLRGVPRVPWEAKGEFQGTSRYKLDRNGKIYEHKVDNLAFNFPQNIKPVSVLDLVTACPASPNPTFLWGPVDAYSSSWIAFYKAVRDTLDQERSLLPQDGLATCS

SEQ ID NO: 246201 - protein, 54 aa, Glycine max
  Clone ID: PAT_MRT3847_64351C.1.pep
DIASTKPYIPIPSWLQSQAYAHPRQLSTTPHQNDAAHHSSLTPHSPLNPNRLAT

SEQ ID NO: 246202 - protein, 79 aa, Glycine max
  Clone ID: PAT_MRT3847_64352C.1.pep
KQHNCISDEHYVQTLLAMHDLEGELERRTLTYTLWNQSTTKMENKGWHPITFGYSNASPQRIKEIKVINHVSYDASYLT

SEQ ID NO: 246203 - protein, 45 aa, Glycine max
  Clone ID: PAT_MRT3847_64353C.1.pep
LFPLSYILFSAATRDPKHAPSPSEQMPFVALLHYIIFIKVHYFHS

SEQ ID NO: 246204 - protein, 77 aa, Glycine max
  Clone ID: PAT_MRT3847_64354C.1.pep
EPNSAFWNCLSNGIRHPISGNSKVSQSLAKNKLKKKEVGPVKIWPIIFQPTLGILKTNSSKQRSILLVRHGNNGKKK

SEQ ID NO: 246205 - protein, 358 aa, Glycine max
  unsure (1)..(358): unsure at all Xaa locations
  Clone ID: PAT_MRT3847_64355C.1.pep
MFSSPFVLTLSLLISLPILFLVAPRILPPPPPPQSFHISPSDEVDDIKLFNRAISLSSPHSHFHLSSKNPSLKIAFLFLTNSDLHFSSLWDQFFSNTPSNLFNIYIHADPSVNLTRPLSPLFINKFISSKRTFRSSPTLIXLATALLDDPSNAYFALLSQHCIPLHSFSYTYKSLFLSPTFDSQDPESSSSTRFGLRLKYKSFVEILSHAPKLWKRYTSRGRYAMMPEIPFEAFRVGSQFFTLTRRHALVVVKDRTLWQKFKIPCYRDDECYPEEHYFPTLLSMADPDGCTKYTLTRVNWTGTVNGHPYTYRPTEVSPELILRLRKSNHSESYLFARKFTPDCLEPLMRIAKSVIFRD

SEQ ID NO: 246206 - protein, 57 aa, Glycine max
  Clone ID: PAT_MRT3847_64356C.1.pep
SLRSQSFWYHGNAKHRTCYHSQRRLIIARVIRDVKCTSSTLHVQAQHSFRLEQDHQP

SEQ ID NO: 246207 - protein, 85 aa, Glycine max
  Clone ID: PAT_MRT3847_64357C.1.pep
WIRKLLSLSVVVFYLKISVFWTIILIFLSVSYSYSENDSLLFMLCAMWGLLELLGATIKLFVVVHCAIQNKKHHDFVCVNHALCL

SEQ ID NO: 246208 - protein, 53 aa, Glycine max
  Clone ID: PAT_MRT3847_64358C.1.pep
GLVGIDQNIARIQSLLLMESSEVLFVGIWGMGGIGKTTIARAVFDKFSLQYDG

SEQ ID NO: 246209 - protein, 275 aa, Glycine max
  unsure (1)..(275): unsure at all Xaa locations
  Clone ID: PAT_MRT3847_64359C.1.pep
MACEVPIKSMMSSAVTLLTPRHVAVIGAGAAGLVAARELRREGHRVVVFEKGEEVGGMWVYSPEVDSDPLGLEAKRRLVHSSLYDSLRTNLSRESMSFRDYPFRRREGKGRDSRRFPGHREVLLYLQDFAAEFEIGELVRFGTEVLFAGLDQCGKWRLTSTSPHTHPVDEIYDALIICNGHYVQPRLPHIPGINAWPGKQMHSHNYRTPEPFQDQVVVLIGSSASAVDISRDIATVAKEVHIAARSVEEDKLXKVPGHENMWLHSMIDSVHEDGT

SEQ ID NO: 246210 - protein, 77 aa, Glycine max
  Clone ID: PAT_MRT3847_6435C.1.pep
PLFQIPCPFCKPQFPARNGTPPRPGDNFLGLGSVFFAFPPEGGEVLTLNFSKGLSKAPPFFFFFERDFYLFLPPLFL

SEQ ID NO: 246211 - protein, 51 aa, Glycine max
  Clone ID: PAT_MRT3847_64360C.1.pep
TGFFLLLHISLALVLHCMSLPCHQFISWCSFFTSISYFCNFILLTILYLNL

SEQ ID NO: 246212 - protein, 38 aa, Glycine max
  Clone ID: PAT_MRT3847_64361C.1.pep
KTCLIIVSNLIYIFIHLYMSQLLVFIKTIYFSSSFINM

SEQ ID NO: 246213 - protein, 201 aa, Glycine max
  Clone ID: PAT_MRT3847_64362C.1.pep
KVDARKWAGERVIPSKHKVQVTVELRVPESGYNRNLGIFQTRVDFLLSNGKAIASSSQPCMLRFRSEPIRLITTFLKIAPLLTGYISETQTLNVKMRGFVEGDVPTSCLKVTLEQRAEYQPGAGIPEIYDASLIIESELPLFKRMIWLWKMSIFIWIAMMAFFAELLFALVCCTPIIIPKTRQRVASGRSPATLNHLQAQH

SEQ ID NO: 246214 - protein, 47 aa, Glycine max
  Clone ID: PAT_MRT3847_64363C.1.pep
VTCRRMLNIHMMDFNGRCFLNGFIFGSYRTKSTHYDVDNNIQLLRSG

SEQ ID NO: 246215 - protein, 69 aa, Glycine max
  Clone ID: PAT_MRT3847_64364C.1.pep
KTDWIFFNYSYNIFSFLMTGFLLRKTLFCWNSGSNYEVNLNLTKQWSKKILIPFSYQRLPTTASCVCVH

SEQ ID NO: 246216 - protein, 56 aa, Glycine max
  unsure (1)..(56): unsure at all Xaa locations
  Clone ID: PAT_MRT3847_64365C.1.pep
YNFIKKGRAPPFFEFFYTRNIYFXDRVLLRRFTIFFFFEVLFISFGVFICLNFFFF

SEQ ID NO: 246217 - protein, 164 aa, Glycine max
  Clone ID: PAT_MRT3847_64366C.1.pep
EESSKAVEVEQEASEAKAPHEALFLVLSYLPVYEVVVMSQVCTSLRDAVNNDILLWLNVIVQRPLSWRLNDEILIKITSKANGRLKTLALINCMHVTDHGLQRVVQQNPLINKLHIPACTGITPEGVLGAVKTLCQRKHCLKTFSINGIYHIQKEHFDTLILTL

SEQ ID NO: 246218 - protein, 280 aa, Glycine max
  Clone ID: PAT_MRT3847_64367C.1.pep
MKQATLFFFSLFLLLSSTTMAISPAPAAAPKATAKTPPTPKATAPSPKPLVPTIPQSPDSPDSVPDDITRILKKAKMFSVLIRLLKTTEIMNNINSQLITAKSGGITILAPDDSAFSNLKAGFLNSLNEGQKIELVQFHILPEFVSSSNFDSLSNPVQTVAGKDPARLPLNVNALGNSVNISTGVVNATVLGVVYSDNKLGIYHVDKVLLPLDFFITNKAPASAPSTLAKSPKAAKDNSSDDDQEETNQHQNKSGAVSVVSIGGATLMSLGIALVATMLS

SEQ ID NO: 246219 - protein, 50 aa, Glycine max
  Clone ID: PAT_MRT3847_64368C.1.pep
LRSQQKSLHDLHVSHEAHASVSSATYAMYHKVYILVSAFNPRCSQILSLF

SEQ ID NO: 246220 - protein, 116 aa, Glycine max
  Clone ID: PAT_MRT3847_64369C.1.pep
GYPLCSLLFFFFFFFVFFLVFEKKKLNMGRTTTPHEQDKLSGENAPKLLPPRRGGGKKRSKKPRTPRLLAKRAPPHARGSAPPKGAGGPTGRAVLPRGIPRGGPPLGKKRGGPKRG

SEQ ID NO: 246221 - protein, 25 aa, Glycine max
  Clone ID: PAT_MRT3847_6436C.1.pep
QNQALSFRVENPNPNRFYKNWRTPG

SEQ ID NO: 246222 - protein, 51 aa, Glycine max
  Clone ID: PAT_MRT3847_64370C.1.pep
FLQAFKNCVTECVDGDGTLVCADVYVMPYCSACTLERSLTVRNLTFTGASA

SEQ ID NO: 246223 - protein, 210 aa, Glycine max
  unsure (1)..(210): unsure at all Xaa locations
  Clone ID: PAT_MRT3847_64371C.1.pep
MVLEATMICIDNSEWMRNGDYSPSRFQAQADAANLICGAKTQSNPENTVGVLTMAGKGVRVLVTPTSDLGKILACMHGLEIGGEMNLAAGIQVAQLALKHRQNKKQQQRIIVFAGGPVNHEKKMLEMIGRKLKKNSVALDVVNFGEXSEGSSVYLYTLLSADFYNDTSLLVHVRSFMHTPLSYYSVFFSFPLGGGGKWYFAPFPVMLSIF

SEQ ID NO: 246224 - protein, 70 aa, Glycine max
  Clone ID: PAT_MRT3847_64372C.1.pep
PILATDYFNLSTSSTNTPIPNPTLYYHIKLHSPTYIILNHSTNIIYLITKLPLYYNHHSHTYHNTTFLKS

SEQ ID NO: 246225 - protein, 78 aa, Glycine max
  unsure (1)..(78): unsure at all Xaa locations
  Clone ID: PAT_MRT3847_64373C.1.pep
RFRPFKELSTLNPAEDLQQQLVVLIQLATVYTQLQQLQPYHQLAALKSSXHXQQQILLAFSELAAASRASFLTQQQLL

SEQ ID NO: 246226 - protein, 222 aa, Glycine max
  Clone ID: PAT_MRT3847_64374C.1.pep
RCSFVFFVFQIYAVSITIRIVFGFMFIALIWKFDFSPFMVLIIAILNDGTIMTISKDRVKPSPLPDSWKLQEIFATGIVLGSYLALMTVIFFWAMKETDFFPDKFGVRHLSHDEMMSALYLQVSIVSQALIFVTRSRSWSFIERPGMLLVCAFVIAQLIATIIAVYADWGFAKVKGIGWGWAGVIWLYSIVFYIPLDVMKFATRYVLSGKAWVNMLENKTAF

SEQ ID NO: 246227 - protein, 35 aa, Glycine max
  Clone ID: PAT_MRT3847_64375C.1.pep
KSNPSYLTYSKVQKMCPSNKKSNTQCTNVLALPLD

SEQ ID NO: 246228 - protein, 96 aa, Glycine max
  unsure (1)..(96): unsure at all Xaa locations
  Clone ID: PAT_MRT3847_64376C.1.pep
TQNEDVSLSITLTMALVLLTSKANSAXTVTFSWNKFLPKQPNMILQGDAMVTYSGKFNSIXVDENGTPKPSXIGRALYSTPIHIWDKETDSAASYA

SEQ ID NO: 246229 - protein, 80 aa, Glycine max
  unsure (1)..(80): unsure at all Xaa locations
  Clone ID: PAT_MRT3847_64377C.1.pep
QISLDKKLTDEENPRDLVIENGQNLDENSHNVGSNQLQNIREGLRDDYGDLKGNNTMMRCSARMSAEYTXTHAYLNLIPL

SEQ ID NO: 246230 - protein, 215 aa, Glycine max
  unsure (1)..(215): unsure at all Xaa locations
  Clone ID: PAT_MRT3847_64378C.1.pep
LELGGLSKEFLTDISKGAFSPEYGLFSQKXTSDRLLIPTASARYLENGLQMIEFLGRVVGKALYEGILLDYSFSHVFVQKLLGRYSFLDELSTLDPELYRNLMYVKNYDGDVKELSLDFTVTEESLGKRYVVELKSGGKDISVTNENKMQYIHAMADYKLNQQILPFSNAFYRGLTDLISPAWLKLFNASEFNQLLSGGNYDIDIDDLKNNTRYT

SEQ ID NO: 246231 - protein, 727 aa, Glycine max
  unsure (1)..(727): unsure at all Xaa locations
  Clone ID: PAT_MRT3847_64379C.1.pep
MFSQNGTGNGGSSNRAQVGKEDGPSCTHCLQFAVTWSLLVNGFLQSLPLPFKSGKKKCQKVCDEDKLCSCTKPTVSSCEVKQNESKGGQFGRAVREKGVRRKDGKNVSLECLIGFIFDQLSQXLERLDYGVHENNDDLDNGKTSLPQPSFSHFGHVNALAGFLEEHKVYVNSFLGNLRFAKVGGVPSSVPGEESPSTNGEGDISSNNGNNGNGNNENKDENGGNSPQKVANNIFSIPLSNVERLKSTLSTVSLTELIELLPQLGRTSKDHPDKKKLISVQDFFRYTETEGRRFFEELDRDGDGQVTLEDLEVAMRKRKLPRRYAKEFMSRARSHLFSRSFGWKQFLSLMEQKEPTILRAYTSLCLSKSGTLKKSEILESLKNAGLPANEDNAVAMMRFLKADTEESISYGHFRNFMLLLPSDRLQEDPRSIWFEAATVVAVPPAVEIPAGSVLRSALAGGLSCALSCALLHPVDTIKTRVQASTMSFPEIISKLPEIGRRGLYRGSIPAILGQFSSHGLRTGIFEASKLVLINIAPTLPELQVQSVASFCSTFLGTAVRIPCEVLKQRLQAGLFDNVGEAFVATWEQDGLRGFFRGTGATLCREVPFYVAGMGLYAESKKVAERLLERELGPLETIAVGALSGGLAAVVTTPFDVMKTRMMTAQGRSVSMTLIAFSILKHEGPLGLFKGAVPRFFWIAPLGAMNFAGYELAKKAMNKNEEGKAGSSE

SEQ ID NO: 246232 - protein, 93 aa, Glycine max
  Clone ID: PAT_MRT3847_6437C.1.pep
MASSSMSATGSWSAKDNKAFERALAVYDKDTPDRWKDVARAVGGKTPDEVKSHYELLLRDISQIESGKVPYPNYKKSAEHDEEEKRMRNLKIQ

SEQ ID NO: 246233 - protein, 187 aa, Glycine max
  Clone ID: PAT_MRT3847_64380C.1.pep
QDAINKKEEFLKEVEILSQLHHPNMVLLLGACPESGCLVYEYMENGSLEDYLLKKNGKPPLPWFFRFRIVFEMACGLSFLHNSKPEPIVHRDIKPGNVLLDRNYVSKIADVGLAKLLVEVVPDNVTEYRESILAGTLHYMDPEYQRTGTVRPKSDVYAFGVITLQLITGRHARGLIVTVEDAIQMAS

SEQ ID NO: 246234 - protein, 157 aa, Glycine max
  Clone ID: PAT_MRT3847_64381C.1.pep
LKVALTAISVVLSLNPTSTIAHISGIGIKAIPSISHLSSLRAVNLSNNFIVHISPGVLPKGIQTLNLSKNKISTLEGLRELAKLRILDLSYNRISRIGQGLSSCTLIKELYLAGNKISDAEGLHRLLKLTDVDLSFNKITPAKALGQPVANFTHLGP

SEQ ID NO: 246235 - protein, 67 aa, Glycine max
  unsure (1)..(67): unsure at all Xaa locations
  Clone ID: PAT_MRT3847_64382C.1.pep
WXTNLSYTXHPLIDXNXHGXAIINSXXXQALEPTSTETHQENXXKGXTDXXTKETQEXHLNDRDXXX

SEQ ID NO: 246236 - protein, 55 aa, Glycine max
  Clone ID: PAT_MRT3847_64383C.1.pep
AIAVSEEETSSSVVVVPIMKNTISCWSISLVDQVKCNSLESSHMERADGCAVGLA

SEQ ID NO: 246237 - protein, 89 aa, Glycine max
  Clone ID: PAT_MRT3847_64384C.1.pep
NVFSRISAYVVGIITDFLLHRLTSREKNAMQSVWIQQVNFLFLFLVRQVPECHLFCNLSKDTPHLFTLLFLYWELLHIQTHGGGPLCRR

SEQ ID NO: 246238 - protein, 99 aa, Glycine max
  unsure (1)..(99): unsure at all Xaa locations
  Clone ID: PAT_MRT3847_64385C.1.pep
VLLHSNSVNARETRIPYPWVVXFNEKIKVNSVFLRDSTAVPDSVVLLLGGSISIGDTDGHLRMSGGYLEFFMKPAVANMYQSIRKELDNLIRSKLQFPL

SEQ ID NO: 246239 - protein, 56 aa, Glycine max
  unsure (1)..(56): unsure at all Xaa locations
  Clone ID: PAT_MRT3847_64386C.1.pep
FCGFRLFLFWPDFPRPPCGVCRXXXLPLLGVWAPLVLXPAFAPSVEFSRSXGRVGR

SEQ ID NO: 246240 - protein, 49 aa, Glycine max
  Clone ID: PAT_MRT3847_64387C.1.pep
FKINLELICKNSKLIFQKMLFLSNQSSIKISFGLNLLKNQAMPFFLQLL

SEQ ID NO: 246241 - protein, 84 aa, Glycine max
  Clone ID: PAT_MRT3847_64388C.1.pep
KMLHKKCRSHSQPMPHILPSAAVNIDNISLPRILCTDKVRQHFSLQLSHKFRPSQIQGKVVTVGRSLQIKNSGSIGSVLIAGRC

SEQ ID NO: 246242 - protein, 56 aa, Glycine max
  unsure (1)..(56): unsure at all Xaa locations
  Clone ID: PAT_MRT3847_64389C.1.pep
ILMADPFRTLQLLIFLPAAFSSVAYQHLLRXFALCLLRPFSEGGAFPCVPGRVACA

SEQ ID NO: 246243 - protein, 73 aa, Glycine max
  unsure (1)..(73): unsure at all Xaa locations
  Clone ID: PAT_MRT3847_6438C.1.pep
LLGLHCISGTYYQIPTAYDPYSDANADDSLAESXEYVHIRDSQLNLNFSLTTVLESKYKFISNTILIDTYNEF

SEQ ID NO: 246244 - protein, 366 aa, Glycine max
  unsure (1)..(366): unsure at all Xaa locations
  Clone ID: PAT_MRT3847_64390C.1.pep
RQAIPVLLQGRECFACAPTGSGKTRAFVWPMLMKLKDPEKGSSGAVILCHTRELSVQTYRECKKLAKRKKFRIKLMTKNLLRNADFSKFPCDVLISTPLRLRLAIKRKKIDLSRVEYLVLDESDKLFEPELFKQIDSVIKACSNPSIIRSLFSATLPDFVEDRARELMHDAVRVIVGRKNMASETIKQKLVFTGSEEGKLLAIRQSFAESLNPPVLVFLQSKERAKELCSELAFDSIRVDVIHSDLSQAERENAVDNFRAGKXWVLIATDVVARGMDFKGVNCVINYDFPDSAAAYVHRIGRSGRAGRTGEAITFYTEDDIPFLRNVANLMAASGCEVPSYLMKLRKKKWKKHRPKRDSISTKPDL

SEQ ID NO: 246245 - protein, 215 aa, Glycine max
  unsure (1)..(215): unsure at all Xaa locations
  Clone ID: PAT_MRT3847_64391C.1.pep
MATLQASLLSKPSLPFPFLSPNHSPFSLSFPPTRRVPSTLLCCTFRPEPNPSELEPEPGSANTEEEPGINSPEEEKEGAASVSDLGLEEEGAEALDSGADSEKIANGRRLSIVAFFVGLWVKARESLKRAFSELLDWWPFWRQEKRLERLVADADANPQDAAKQSALLVELNKQSPESVIKWFEXRDRAVDSRRVAEYLRALVVTNAISEYLPDE

SEQ ID NO: 246246 - protein, 50 aa, Glycine max
  Clone ID: PAT_MRT3847_64392C.1.pep
MRECISIHIGYDIKKVGHACWDLYCLRYGMQPDGQLPSDQVACGCDGAFN

SEQ ID NO: 246247 - protein, 84 aa, Glycine max
  Clone ID: PAT_MRT3847_64393C.1.pep
HTTPHPLRHNANQTLLHRRPVPPAAHRPSARPHGCRCSSWQDLRRQLRHHPRLPPSPSALAGPPMVDAVRLGHTARSSHQSPIQ

SEQ ID NO: 246248 - protein, 323 aa, Glycine max
  Clone ID: PAT_MRT3847_64394C.1.pep
MEVSCKILRRSTHTFLQNYHHFTSTAAFLAFPFSASILLSQALVPSPSSLLPQIYSRLRTLFDAAGFPSSHLFTILNLKVSQTITSSILALPFTLTFLLIAKASIIQALNHHKPTFPPSFKSILSLYKPLLHTYFCNCFLILSANATAFGLMFLAFSFIERLGYSSPTGLTLFISVTGAILFSVILANARVLCSMALALSGMEGHGGYLAILKACLLLRGRTSMALFLALPVNVALAAIEALFQFRVVRPYHIAGIARPCVALEGIFIAYLYSIFIILDTIVSCIFYKSLKTGSWISQEDKHSLRIEFPEEGKYGYMGTKDLP

SEQ ID NO: 246249 - protein, 407 aa, Glycine max
  Clone ID: PAT_MRT3847_64395C.1.pep
MESPSPPSPFRDLLLRLSTGIAESLATVPYTPHQSSNVSVKAFLEPLLVPTATVRDFALACALISSSTAVDSSGILSWIPSNLSSLATSSFSDLSRAYLGNRDLAVPPEKRLVLELMPEVLPFLKERIKESSIDVSDETDEFSAATARVPVGFAILAAFQFRWFVTQVDYPHLGKLCGLVIPCALTAVDHWSPVVKGQGMISLMHVGKNVDAAQLGGYVDVILDACCQNTASDDEIWHHVVEASVVLVTLTQRSNPRSPWFERMLNEMLSHLERQPRNKERRIAWLKSADSLFNGVGIMLLAHFRRIFPLFFQWMHADDNETIILVNKLALVYKEAALRTAREEIRANICQILILLQESKGLYFNAAWDKHRSDPDLTTLDFSLSGRSNTNTVPSEDCPQQGLVPVQ

SEQ ID NO: 246250 - protein, 83 aa, Glycine max
  Clone ID: PAT_MRT3847_64396C.1.pep
SSRSRAPPFFFFFLDNQSFYCREAEKSLVGRKVSLAQAMLNLNKIISLIINPKPQHNWDCCKYPYACPKRHLDLYKTGILHDC

SEQ ID NO: 246251 - protein, 119 aa, Glycine max
  Clone ID: PAT_MRT3847_64397C.1.pep
PRTFGLTIDMIWKSRNHTVFRNQTWSIEESIARIQRMELFACNLGRSSVLQAGLWAIFHGIQLARERVLFKLEFQSDSREAIDLVNEGWDDSNEAFPMVKAIKEAILPYLQVIFKHILR

SEQ ID NO: 246252 - protein, 452 aa, Glycine max
  Clone ID: PAT_MRT3847_64398C.1.pep
MESPSPPSPFRDLLLRLSTGIAESLATVPYTPHQSSNVSVKAFLEPLLVPTATVRDFALACALISSSTAVDSSGILSWIPSNLSSLATSSFSDLSRAYLGNRDLAVPPEKRLVLELMPEVLPFLKERIKESSIDVSDETDEFSAATARVPVGFAILAAFQFRWFVTQVDYPHLGKLCGLVIPCALTAVDHWSPVVKESFQLYVWKELESRNSVIIQSVGQGMISLMHVGKNVDAAQLGGYVDVILDACCQNTASDDEIWHHVVEASVVLVTLTQRSNPRSPWFERMLNEMLSHLERQPRNKERRIAWLKSADSLFNGVGIMLLAHFRRIFPLFFQWMHADDNETIILVLKCTYVILRLTWIRNSPFVAKLVDKLALVYKEAALRTAREEIRANICQILILLQESKGLYFNAAWDKHRSDPDLTTLDFSLSGRSNTNTVPSEDCPQQGLVPVQ

SEQ ID NO: 246253 - protein, 87 aa, Glycine max
  Clone ID: PAT_MRT3847_64399C.1.pep
ILMAGGLNRVLMGTFGVSGSSLTDNVKPSLTIQSSQPVLPISSNAYETHPLFYDDPVIRHGEASQYPLQHGLGPSNNSAHNIQEIPV

SEQ ID NO: 246254 - protein, 59 aa, Glycine max
  Clone ID: PAT_MRT3847_6439C.1.pep
GCEKTTEGMSVFSTYDTSLTYMYKLLLRPLLREQGSFVHSCLSPLCLICWGGVGYLLIC

SEQ ID NO: 246255 - protein, 106 aa, Glycine max
  Clone ID: PAT_MRT3847_643C.1.pep
GFTVSTSIISTASTSYQHPLSIFPVRPQLEMKENKIEKLMAHNYKQRMIETKRKSKNSKTVRNITKLRMRLDEMKGTTQNYSKHYAAEKTGSQFNSMFRDQIQRNK

SEQ ID NO: 246256 - protein, 187 aa, Glycine max
  unsure (1)..(187): unsure at all Xaa locations
  Clone ID: PAT_MRT3847_64400C.1.pep
SGRIRAASEADTSSFSKSKTAVDRQPPPNAAADKAAQIPKAAEQDVLHTDDRPRVNTDNILEERDPKFDAMLGQMVGRITSKPGGKPEMGEAFVVEKFNRPMPKLRNTKPDFGRNEERPVPAGTLNVAQLRHIILLHEGKADDYNGPYGXHQIAEKFRVNVVQIQTILQFLSLPPENSSKDKNKAPR

SEQ ID NO: 246257 - protein, 78 aa, Glycine max
  Clone ID: PAT_MRT3847_64401C.1.pep
ARKKSTFLQGSHKRPPPPLASKAWQNLSIVCRAKVNEQSARAVITGYWLCDPPPAHKLSFQKLNIMEISCVNQGYITW

SEQ ID NO: 246258 - protein, 98 aa, Glycine max
  unsure (1)..(98): unsure at all Xaa locations
  Clone ID: PAT_MRT3847_64402C.1.pep
SSSXYIXYPPXXSXYPFXXYTTXXLTXLFHXNIISXPPXXXXXNFSKPXXQXSXXXXPFTPPPFFXXXITTTXXXXTHITNNTTPLXXISLXTXXTXT

SEQ ID NO: 246259 - protein, 87 aa, Glycine max
  unsure (1)..(87): unsure at all Xaa locations
  Clone ID: PAT_MRT3847_64403C.1.pep
HEGEPVQEVYICATWAXLIGCXGFVTDAIGIHAMFDAIADRIKDPSDGXHANAFVVKVDDLGPGLFVTLDLGTSGSKTNVTTIKQAQ

SEQ ID NO: 246260 - protein, 139 aa, Glycine max
  unsure (1)..(139): unsure at all Xaa locations
  Clone ID: PAT_MRT3847_64404C.1.pep
HCDIICVTGWTATPMHDVHATIDWFVSXYEWGPRTYXVVNSQNPFGLNRWLGKLTFPQCTIRSVKRMPFSIGGGAGAKNAILMNMPNAFFLMWRYFGGDLDFEASKKTFPYIKCTGCLLIAFGNLADDTINFEAFSHKL

SEQ ID NO: 246261 - protein, 64 aa, Glycine max
  unsure (1)..(64): unsure at all Xaa locations
  Clone ID: PAT_MRT3847_64405C.1.pep
IRRIDRISVPNCMLSRSSSIISIVAMHFRTNRHIGIIGPRALHRADGXXRHGRRVPCGLAVPPV

SEQ ID NO: 246262 - protein, 72 aa, Glycine max
  unsure (1)..(72): unsure at all Xaa locations
  Clone ID: PAT_MRT3847_64406C.1.pep
HRLLRLRSAEAPSIFARACKIVHNKXLTLRSWNHTEENKTRTLPKTDFAGAFTRTVTCDSLGDIVPREDLKD

SEQ ID NO: 246263 - protein, 484 aa, Glycine max
  Clone ID: PAT_MRT3847_64407C.1.pep
MGLLWKTHTRIHVIRTFFAILLVALLSSERVESRKAKVVTTSLEYNAINCRAHSAALTDFGGVGDGKTSNTKAFQSAISHLSQYASEGGSQLYVPAGKWLTGSFSLTSHFTLYLDKDAVLLASQDITEWPVLEPLPSYGRGRDAPAGRFTSLIFGTNLTDVIVTGENGTIDGQGEFWWQQFHRKKLKYTRPYLIELMFSDNIQISNLTLLNSPSWNVHPVYSSNIIVQGITIYAPVTSPNTDGINPDSCTNVRIEDCYIVSGDDCVAVKSGWDEYGIKFGWPTKQLVIRRLTCISPYSATIALGSEMSGGIQDVRAEDITAIQTESGVRIKTAVGRGGYVKDIYVKRMTLHTMKWAFKMTGDYNSHADGHYDPNALPEIKNINYRDVVAENVTIAARFQGISNDPFTGICIANVTLRMAAKAKKQPWTCTDIEGMTSGVTPPPCGLLPDQGPEKITACDFPADNLPIDIVELKKCTTTMTYVEV

SEQ ID NO: 246264 - protein, 77 aa, Glycine max
  Clone ID: PAT_MRT3847_64408C.1.pep
TRPGRPFFYAARTAPIQERRQNGLRAERRKTVFLIAMKWRHSYFIITSFFKHNIVKYLLTIFCQILLLIFLGIIYYF

SEQ ID NO: 246265 - protein, 24 aa, Glycine max
  Clone ID: PAT_MRT3847_64409C.1.pep
VTVIGIYSYSFYTTVINILKRCMC

SEQ ID NO: 246266 - protein, 66 aa, Glycine max
  Clone ID: PAT_MRT3847_6440C.1.pep
LLTKGDTNHYPQDIMIKKKEGENFKNLYLRLKSENDMKFQRNVIPKFSSLLDLILRFIYEASCRIP

SEQ ID NO: 246267 - protein, 65 aa, Glycine max
  unsure (1)..(65): unsure at all Xaa locations
  Clone ID: PAT_MRT3847_64410C.1.pep
PERERERGRRRGYQSSSSSFLFYFLYLRDRFFLVCKGQERFRVNDVMRTKPXLGGRVTWLKDRSG

SEQ ID NO: 246268 - protein, 100 aa, Glycine max
  unsure (1)..(100): unsure at all Xaa locations
  Clone ID: PAT_MRT3847_64411C.1.pep
MGSNGTSWADQWDNGPDPVTVSNESKKKNNKAFGKTKAVASTGVKKLKEGTXLLASIGSRPSITTPPRSIKLLLTYLNLIPSVHIYNNLCLHMFFFFSFC

SEQ ID NO: 246269 - protein, 211 aa, Glycine max
  unsure (1)..(211): unsure at all Xaa locations
  Clone ID: PAT_MRT3847_64412C.1.pep
MAFLNPFSLHIPMSLLLFLLFFFCFCKASTTTTTSTTTKSLSPSSSPSTTTSSSDVQLLLGKIKASLQGSNSDNLVLSSWNSSTPLCQWSGLKWVFSNGTPLSCTDLSSPQWTNLTLLKDPSLHLLSLRLPSANLSGSLPRELGGFPMLQSLYLNINSLEGTIPLELGYSSSLSEIDLGDNMLGGVLSPSIWNXCERLVXLRLHRYSLSGL

SEQ ID NO: 246270 - protein, 65 aa, Glycine max
  unsure (1)..(65): unsure at all Xaa locations
  Clone ID: PAT_MRT3847_64413C.1.pep
TDYRARIXLINQDMNKCITPKFRFVVRFSNKDIDVQLISANIARHLDLATAYSHELSRYCLEVRL

SEQ ID NO: 246271 - protein, 53 aa, Glycine max
  Clone ID: PAT_MRT3847_64414C.1.pep
GFLFIFFFFFCVFFCTENRGPPDSHSWPVGLLFITRTIKTLVALNEKFKLFLG

SEQ ID NO: 246272 - protein, 49 aa, Glycine max
  Clone ID: PAT_MRT3847_64415C.1.pep
PRVRSHTWRGNRQPPRPPRRLRRRTLATTNPWNPYTGSGITESWNEPFS

SEQ ID NO: 246273 - protein, 36 aa, Glycine max
  Clone ID: PAT_MRT3847_64416C.1.pep
SRQNQSSNTGVKQSRQNTVVKTQRQKRGRQNTGRQT

SEQ ID NO: 246274 - protein, 48 aa, Glycine max
  unsure (1)..(48): unsure at all Xaa locations
  Clone ID: PAT_MRT3847_64417C.1.pep
XXXSCXSLNXLDLHSQXCHSXXXXSTREDXERVXKGLPHXELRXVLXS

SEQ ID NO: 246275 - protein, 55 aa, Glycine max
  Clone ID: PAT_MRT3847_64418C.1.pep
VTVLIFVQQQEFCKGKGPSAGFLQFYPFSNKMELWNTRMYQFLTRQGACAKKSKN

SEQ ID NO: 246276 - protein, 58 aa, Glycine max
  Clone ID: PAT_MRT3847_64419C.1.pep
RYEPVNEPTLDNCFVSTSYDATTHFESTVDDVLNMYTLITGKVIDLSVDLSAASAAEE

SEQ ID NO: 246277 - protein, 104 aa, Glycine max
  Clone ID: PAT_MRT3847_6441C.1.pep
LKPKSFKELCTKLQETAHPGLNEKQKFSLLKLERKSHQRVLRTITSDYFVAISESGVLEKGKREKICSEAWVNCKKDSLDLSLIEEKSRCEKNMRKLWKRKLGK

SEQ ID NO: 246278 - protein, 106 aa, Glycine max
  unsure (1)..(106): unsure at all Xaa locations
  Clone ID: PAT_MRT3847_64420C.1.pep
FAVRWPGTSEQFQNFVCSRLKVQVPISDKVXVNSQXAAPLYTFLEYQKAEIFGNGFKCQFAQFLVLRKRKIVGCYALSTSPLKFEKHIKQILPSSIVNFDFSFLMC

SEQ ID NO: 246279 - protein, 120 aa, Glycine max
  Clone ID: PAT_MRT3847_64421C.1.pep
GSSDPSSKHRHLRNALESARRAVELMPNSVEYAHFRATVMLEAASEGKDYEEVVHECERGLAIENPSDPAKETLQDESEHKALSLEERIGHVQNELRQLIQKSNIASLSSWMKNLSNGEE

SEQ ID NO: 246280 - protein, 51 aa, Glycine max
  unsure (1)..(51): unsure at all Xaa locations
  Clone ID: PAT_MRT3847_64422C.1.pep
FIIIILXLXHSSLSLVXNSEWSDGQVXCVSVXQGPXXESXFSELRYKXXAI

SEQ ID NO: 246281 - protein, 76 aa, Glycine max
  Clone ID: PAT_MRT3847_64423C.1.pep
AGNSEAEASACAAGGFPAPKACAPMVLASVPNRCVVVESDAEIASPSDVTDHVLHSIRHESMCDFKSISLSQPTAI

SEQ ID NO: 246282 - protein, 38 aa, Glycine max
  Clone ID: PAT_MRT3847_64424C.1.pep
NARTMLYFLLSLPPIDMLKLIQLTNAILSRLVCMSIIG

SEQ ID NO: 246283 - protein, 324 aa, Glycine max
  Clone ID: PAT_MRT3847_64425C.1.pep
MNLAKGVGGNIDKSQVLSAVEKYEKYHASYGGQEEERKANYVDMVNKFYDLATSFYEYGWGQSFHFAPRWKGESVREGIKRHEHFIALQLCLKPGQKVLDVGCGIGGPLREISRFSSTSITGLNNNEYQITRAKADFMKMPFPDNNFDAVYAIEATCHAPDVYACYKEIFRVLKPGQLFAAYEWCMTEAFDPNNEEHQKIKEEIEVGDGLPDIRLTTKCVEALKQAGFEVIWEKDLAVNSPVPWYFHLDASHFSLSTFPLTSIGRFFTRSLIRALEFVRLAPRGSLKVQEILQRAADGLLEGGKKEIFTPMYFFLARKPNFGGQ

SEQ ID NO: 246284 - protein, 104 aa, Glycine max
  Clone ID: PAT_MRT3847_64426C.1.pep
KTWEKKFFFFYFGKKKKKKKGLKAFTAYLILKKQRVTVSRGKKKLLKNIIKSQFPSMGGEPISHTIRLGGKKNKPHFPEKTTPFGPYKFHDTIGRGMGLNPIFH

SEQ ID NO: 246285 - protein, 210 aa, Glycine max
  unsure (1)..(210): unsure at all Xaa locations
  Clone ID: PAT_MRT3847_64427C.1.pep
MNLAKGVGGNIDKSQVLSAVEKYEKYHASYGGQEEERKANYVDMVNKFYDLATSFYEYGWGQSFHFAPRWKGESVREGIKRHEHFIALQLCLKPGQKVLDVGCGIGGPLREISRFSSTSITGLNNNEYQITRAKELNRNTGVDKTCNFVKADFMKMPFPDNNFDAVYAIEATCHAPDVYACYXEIFRVVKPGQLFAAYEWCMTESFRSQH

SEQ ID NO: 246286 - protein, 93 aa, Glycine max
  Clone ID: PAT_MRT3847_64428C.1.pep
QKYRVGKYGGGTTPEEGKKADKKETGEMLDNLDGTSGMRITEEGKLKKEGQKRLQEQGEAQRQRRSRREAQGIFFAPHNGGGERLRGGAMGES

SEQ ID NO: 246287 - protein, 81 aa, Glycine max
  Clone ID: PAT_MRT3847_64429C.1.pep
PQRSPPPRRFFRWAFQPLWNAPFCNRPLQPLSPTRGMLKIPLNIGGEPLSSPLEDGKLDLVGPSRPSEPPPPPHLKVRVAP

SEQ ID NO: 246288 - protein, 113 aa, Glycine max
  Clone ID: PAT_MRT3847_6442C.1.pep
VCVVGRNCFKSSEPLFGVHHRAKKAPGYLPFLFEGSSPGAGKFGALKIRCRAPPKKANPLKDDGALPSEKATPSKDDGAVPMKNNSLSWLFFTPFKGFPFVVFPPTRYSMVKF

SEQ ID NO: 246289 - protein, 206 aa, Glycine max
  unsure (1)..(206): unsure at all Xaa locations
  Clone ID: PAT_MRT3847_64430C.1.pep
LKFSFLWSLLLSVSLLGFKSQHGHQNGGRRTIPLTCKRIEFPTHDVIEVGDGYEIRRYNNNSTVWMIPPTIKDIYRLDPTGTEVSGLFDYIRPNNNSTLKIGMTAPKITEASPPDAPFLHVQXWNSFFVAAWHQAGHVNDSNVAVEAGNLRASIDGTKWSGAIDKNQKAGHASVYTVAQYNDPFEYQNRVNEILFLFEMESERHAI

SEQ ID NO: 246290 - protein, 601 aa, Glycine max
  Clone ID: PAT_MRT3847_64431C.1.pep
NFVLWDFTFEDALAKAKKALQMQKELSEKLKKIPQLNKSSTQNSQGSSNLGSMNESAVPSSAAGVASKSSTSASLVHAANMSIFPSTAFAASANTPVIGTSAAGIPNATLPNWEAVRRAQELAARMGFRQDPQFAPLINMFPGQMVTDVTLLQKPMKAPVLRLDAQGREIDEHGNVINVTKPINLSTLKVNINKQKKEAFEILQPVLDVDPESNPHFDASMGINKTKLLRPKRMNFQFVEEGKWSKDAETIKLKSKFGEAQAKEHKAKQAQLAKAKAAPDINPNLIEITERVVIKEKPKDQIPEIEWWDVPLLHSGNYGDVDNGIIGEDKLKIEKINFYVEHPRPIEPPAEPAPPPPQPLKLTKQEQKKLRTQRRIAKEKERQEMIRQGVIEPPKPKVKISNLMKVLGTEATQDPTRLEKEIRTAAAEREQAHIDRNIARKLTPAELREKKERKLFDDPNTLETLVSLYRINDLSHPKARFRVDVNAQENRLTGCAVICDGISVVVVEGGSKSIKRYGKLMLRRINWSEVSKEKEENEDSDDDKPANKCVLVWQGSVAKPSFNRFSVHDCITEAAARKVFVDAGVPHYWDQAVNYKEDEAV

SEQ ID NO: 246291 - protein, 71 aa, Glycine max
  Clone ID: PAT_MRT3847_64432C.1.pep
SNGPFYKLFATIPFFLLLLHFTLKGNPPIRTFIKTPPYFRSHKPPLFFLYHTPNPSKFFYKQPPYIFFSKP

SEQ ID NO: 246292 - protein, 119 aa, Glycine max
  Clone ID: PAT_MRT3847_64433C.1.pep
MIQLHRTFFSTTTSSVPCSYPLSLGHFMLQFRALQAPPIALAPHATSSLIGATVQCRTRLLFPRRVTAKCHATSFSNFRFPFALNSTTSFGGSVFSRGFATRAAENGKQKKRARAAVVR

SEQ ID NO: 246293 - protein, 341 aa, Glycine max
  unsure (1)..(341): unsure at all Xaa locations
  Clone ID: PAT_MRT3847_64434C.1.pep
LTVLKLSILMRIRKNGYAMYVMEDADXESMERDFSVVSGWKFVHVDVFQVLRIYVSLSVVVGSGAQRGFLLLLVXLVASFSVVGSLTTISYAYVSGALCSLIGGXNWIKSMGLTASLFPFMCFGIGFILNTIAIFYGSLAAIPFGTMVVVFVIWAFISFPLALLGTVVGRNWSGAPNNPCRVKTIPRPIPEKKWYLTPSVVSLMGGLLPFGSIFIEMYFVFTSFWNYKVYYVYGFMLLVFLILTIVTVCVTIVGTYFLLNAENYHWQWTSFFSAASTAVYVYLYSVYYYYVKTKMSGFFQTSFYFGYTLMFCLGLGILCGAVGYLGSNLFVRRIYRNIKCD

SEQ ID NO: 246294 - protein, 60 aa, Glycine max
  Clone ID: PAT_MRT3847_64435C.1.pep
YIEMQAEKNENGIYVHLIELINNKNMRIRWCVSLYLQGNERVKEVLHLPPAENSRRDSVA

SEQ ID NO: 246295 - protein, 58 aa, Glycine max
  Clone ID: PAT_MRT3847_64436C.1.pep
PLLPNSPLSDSPPAATPSQSHSTSPPSPTPSTSSTNSTKPPSPTFTPTTKCTLLQSLN

SEQ ID NO: 246296 - protein, 72 aa, Glycine max
  Clone ID: PAT_MRT3847_64437C.1.pep
GIGWMTAFLFVTSFVGLLALVPIRKIMIIDYKLTYPSGTATAVLINGFHTPKGDVMAKKQVQCPLFRDSQSL

SEQ ID NO: 246297 - protein, 169 aa, Glycine max
  Clone ID: PAT_MRT3847_64438C.1.pep
QAIGTAIGCVVAPLTFFLFYKAFDVGNPDGDYKAPYAIIYRNMAILGVEGFSALPHHCLQLCYGFFAFAIAANLVRDLAPKNIGKWIPLPMAMAVPFLVGGYFAIDMCMGSLVVFLWHKLNRNEAGLMVPAVASGLICGDGLWILPSSILALFKIRPPICMSFLSASAS

SEQ ID NO: 246298 - protein, 552 aa, Glycine max
  unsure (1)..(552): unsure at all Xaa locations
  Clone ID: PAT_MRT3847_64439C.1.pep
ACVIVGGFGSYLLGLNRRTYEQAGVGTEGNNPGSTKEPGIGWMTAFLFVTSFVGLLALVPIRKIMIIDYKLTYPSGTATAVLINGFHTPKGDVMAKKQVHGFLKFFSASFLWAFFQWFYSGGDNCGFVQFPTFGLKAWKNSFYFDFSMTYVGAGMICSHLVNLSLLLGAVISWGIMWPLIRGLKGEWFPASIPESSMKSLNGYKVFISIALILGDGLYNFVKVLYFTATNIHATVKRKNPETFSDNQKPLPLDDLRRNEVFARESIPIWLACTGYILFSIVSIIVIPLMFPQLKWYYVVFAYLFAPSLGFCNAYGAGLTDMNMAYNYGKVALFVLSALAGKNDGVVAGLVGCGLIKSIVSISSDLMHDFKTGHLTFTSPRSMLLSQAIGTAIGCVVAPLTFXFYKAFDVGNPGXYKAPYAIIYRNMAILGVEGFSALPHHCLQLCYGFFTFAIAANLVRDLGPKKIGKWIPLPMAMAVPFLVGGYFAIDMCMGSLVVFLWHTLNRNEAGLMVPAVASGLICGDGLWILPSSILALLKIRPPICMSFLSASAS

SEQ ID NO: 246299 - protein, 209 aa, Glycine max
  unsure (1)..(209): unsure at all Xaa locations
  Clone ID: PAT_MRT3847_6443C.1.pep
FLGLYFFRSRSPIHGRSEPTNPGDTLYVTGLSSRVTERDLEEHFSKEGKVSSCFLVVEPRTRISRGFAFVTMESAEDAERCIKYFFXSVLEGRYITVERSRRKRARTPTPGHYLGLKNTREYGFRGDRGGDRGRYRDGPDRDNYSRRRSPRRSPYRGGQDYSPQRSPYGXEGLGGIALGRFLILHMVAQTGSMLVDLGDVYLSILLKYT

SEQ ID NO: 246300 - protein, 108 aa, Glycine max
  unsure (1)..(108): unsure at all Xaa locations
  Clone ID: PAT_MRT3847_64440C.1.pep
MVRNPNQSQFIRNHPYNELIEKLASMGFRGDHVASVXSRMEDSGQAIDCKSGLDRVKAHSSAGPHRGGWPGGGRTALHSGPGAPAPRPGGGGARPAPRAARGGGGRGG

SEQ ID NO: 246301 - protein, 160 aa, Glycine max
  Clone ID: PAT_MRT3847_64441C.1.pep
ITGTFPIHELKILRDDNCWCILAKHAFGNQGYDKYPILAEIGRQIATKCKGLPLAAKTLGGLLRSNVDAEYWNGILNSNMWANNEVLAALCISYLHLPPHLKRCFAYCSIFPRQYLLDRKELILLWMAEGFLPQIHGEKAMESIGEDYFNELLSRSLIEK

SEQ ID NO: 246302 - protein, 56 aa, Glycine max
  Clone ID: PAT_MRT3847_64442C.1.pep
FRMCLVLSSLCRKKNQYFGCNLEKAKKQKKSREPTKKTFISPQQGKLSPNQIFIKI

SEQ ID NO: 246303 - protein, 105 aa, Glycine max
  Clone ID: PAT_MRT3847_64443C.1.pep
GSQLDDETVFPPRMRAPFPTNYLDVVKTIFKRLLDVYAHITHSHFQKIVSLCKRVTLTGFQATCLTAWKFRVISRAELAPLKHLVESIVQVKFCWCFLSLMFSKD

SEQ ID NO: 246304 - protein, 67 aa, Glycine max
  Clone ID: PAT_MRT3847_64444C.1.pep
RMLVSKIKVRGLKLMIKYIHGDKILRNYVSEEQDEISEELISSFRAQNQLFVACVVLTLDQVLVLYY

SEQ ID NO: 246305 - protein, 61 aa, Glycine max
  Clone ID: PAT_MRT3847_64445C.1.pep
VLLFQLCGIVEGNLKEAIRIFIEIKGWYLKGRLVVVGIMQMYVCFGLHVYVAWVSIGEPVS

SEQ ID NO: 246306 - protein, 90 aa, Glycine max
  unsure (1)..(90): unsure at all Xaa locations
  Clone ID: PAT_MRT3847_64446C.1.pep
LEPKQNNLXFTFSHNNIDFFSEFTNSSRGYSPQLFASTYHSFISNIYHFSSFSKLPNNPXLLYLLIYIQKIPQLIPFNHFPIXFSFQSTL

SEQ ID NO: 246307 - protein, 39 aa, Glycine max
  Clone ID: PAT_MRT3847_64447C.1.pep
RIYSNNDFFIFFLILMRYRLPNTPYLICIELSHHFLRLI

SEQ ID NO: 246308 - protein, 90 aa, Glycine max
  Clone ID: PAT_MRT3847_64448C.1.pep
FEVDTNKQCNLATCLIHMNKIKEAKFLLQAVRTATKNRKMDDSFAKSFERASQMLIEIETSSSQNAAFSMTTQCPPQSFENSIRMSSDSA

SEQ ID NO: 246309 - protein, 63 aa, Glycine max
  Clone ID: PAT_MRT3847_64449C.1.pep
GLDSKKVWKYYRERNQLDDQRCGSISNLLSISEMGNTKRVVKVWDTIWFGLGFGLEHIDRTYE

SEQ ID NO: 246310 - protein, 138 aa, Glycine max
  Clone ID: PAT_MRT3847_6444C.1.pep
RLREDDRRGLFPYFMLVAFEAGGVLRSLILFLSYPLVWLVGENQLGLKIMVFLSFFGLRKDTFRTGSAVLAKFFLEDVGLEGFEAVICCERKVASSKLPRVMVENFLKDYLGVDAVIARELKSFSGFFLGVFESKKPI

SEQ ID NO: 246311 - protein, 55 aa, Glycine max
  unsure (1)..(55): unsure at all Xaa locations
  Clone ID: PAT_MRT3847_64450C.1.pep
QLMAHQFMPRALYVVSYGQMMCTFTQEPSPSMSTSSYHTTXHMYRSHACSDLARA

SEQ ID NO: 246312 - protein, 356 aa, Glycine max
  Clone ID: PAT_MRT3847_64451C.1.pep
LVGKDNNWNNATENKVCNYAKGKWVPDNNRPLYSGFGCKQWLSGMWACRLMQRTDFEYEKLRWQPKDCQMEEFEGSKFLRRMQNKTLAFVGDSLGRQQFQSLMCMITGGKDKLEVEDVGREYGLVIAEGSARPSGWAFRFSSTNTTILYYWSASLCDVEPIDVNNPNTDYAMHLDRPPAFLRQYIHKFNVLVLNTGHHWNRGKLTANRWVMHVGGVPNTDKKIAVIWGAKNLTIHSVVSWANSQLPKYPGLKVFYRSISPRHFVGGDWNTGGSCDNTKPMSVGKEILGEESIDEGAASAVKGTGVKLLDITALSQLRDEGHISRFSLTAKPGVQDCLHWCLPGVPDTWNEILFAQI

SEQ ID NO: 246313 - protein, 87 aa, Glycine max
  Clone ID: PAT_MRT3847_64452C.1.pep
ASDTRMALCLLQSVPVYQSIRCYTAFSCNAVAYVILLAHNQSEVVSLVIDEVQPSCAIRGLYSPCLMGAPPPCTGNRASPSIHQAKN

SEQ ID NO: 246314 - protein, 174 aa, Glycine max
  unsure (1)..(174): unsure at all Xaa locations
  Clone ID: PAT_MRT3847_64453C.1.pep
MELAPVKSELSPRSHRLLMIDGSEVIGTKCVKRRRRDSSTAVLGGYGQQGEQLEEQKQLGGQSTATTVNRSSRFRGVSRHRWTGRFEAHLWDKGTWNPTQKKKGKQVYLGAYNDEEAAARAYDLAALKYWGISTFTDIPVSDYEKEIEIMKTVTKEEYLASXRRRSSGVSRGVS

SEQ ID NO: 246315 - protein, 100 aa, Glycine max
  Clone ID: PAT_MRT3847_64454C.1.pep
MAVFLKCGNLFVYLDSLAATPIFSDSCFSSNAIATTNILDLSKDPRVFEWLVGIRRKIHENSELGYEEFVTSLLIRVELVELGILYKHPVALTVVVGFIG

SEQ ID NO: 246316 - protein, 53 aa, Glycine max
  Clone ID: PAT_MRT3847_64455C.1.pep
RCILLFRVKAMNHLSIHGIRQLQFSVFQLIISGSLVFMNCYFTFYFILFFIFD

SEQ ID NO: 246317 - protein, 74 aa, Glycine max
  unsure (1)..(74): unsure at all Xaa locations
  Clone ID: PAT_MRT3847_64456C.1.pep
HSSQAHLDTSYELXEDINETPVTDDVPVNANIKGGTVNSWRRDNQAYNEEGVRSGIEKWQGNSQPYPNAGIPHN

SEQ ID NO: 246318 - protein, 323 aa, Glycine max
  unsure (1)..(323): unsure at all Xaa locations
  Clone ID: PAT_MRT3847_64457C.1.pep
MRIGSPSSSSSSSGCSRFWSSALRSKRLMSPAEKAARESSDLGLSRRLGVLDLVLLGIGASIGAGIFVVTGTVARDAGPGVTISFILAGASCVINALCYAELATRFPAVVGGAYLYAYTAFNELTAFLVFGQLMLDYHIGAASIARSLASYLINILELFPVFKDNIPKWIGHGEDIGDVLSINVLAPILLVLLTFILCRGVQESSVVNSLMTVTKIIIVIIVIFAGAFEGDVSNWSPFAPNGLKAIFTGASSLFFAYVVFDACKNSAEISXPLRGIPIGILGSAFKYVLFCIGVCLVSLXGMGAYNLLGEDAPLAEAFSSKGL

SEQ ID NO: 246319 - protein, 100 aa, Glycine max
  Clone ID: PAT_MRT3847_64458C.1.pep
PYMFILAILHMVTVQGSECTPSLAHSRKLPPLCELLSSYLCGYGHPQQDTPSIVPSLDPSPANPPTCTSQRSSHDQCFQSTHQEQTVAFLIDSLRPISIM

SEQ ID NO: 246320 - protein, 88 aa, Glycine max
  Clone ID: PAT_MRT3847_64459C.1.pep
SAFVGSRFSFGLLLLSAFFRGACLLRLLRCLVLRVRLVLRCGVFVLFRFFGFGLFAVGFVAGLGGFGRFGSFGVSVPRWSPLLLRLVR

SEQ ID NO: 246321 - protein, 249 aa, Glycine max
  unsure (1)..(249): unsure at all Xaa locations
  Clone ID: PAT_MRT3847_6445C.1.pep
GSSQNPNPSSSKEMADSPLARNSRSPSPWKAQSRSRSRPRSRSRSRGRSRSPIRGRSRSPIHGRSEPTNPGDTLYVTGLSSRVTERDLEEHFSKEGKVSSCFLVVEPRTRISRGFAFVTMESAEDAERXCIKYLNQSVLEVLKGRYITVERSRRKRARTPTPGHYLGLKNTREYGYRGDRGGDRGRYRDGPDRDNYSRRRSPRRSPYRGGQDYSPQRSPYGGRSRRERSRSLPYSPHGSPDRKYARGSR

SEQ ID NO: 246322 - protein, 39 aa, Glycine max
  Clone ID: PAT_MRT3847_64460C.1.pep
TLELMIRVLHSMQIMVNTVTATNITLYFQSSETIDNLKD

SEQ ID NO: 246323 - protein, 439 aa, Glycine max
  Clone ID: PAT_MRT3847_64461C.1.pep
MASRLEQQQQPTNVGGENKQKNMGGEGRNRRVLQDIGNLVGKQGHGNGINVSKPVTRNFRAQLLANAQAATEKNKKSSTEVNNGAVVATDGVGVGNFVPARKVGAAKKPKEEPEVIVISSDDESSEKQAVKGKKAREKSAMKNAKAFSSVLSARSKAACGLPREFVMNIDATDMDNELAAAEYIDDIYKFYKETEEDGCVHDYMGSQPDINAKMRSILVDWLIEVHRKFELMPETLYLTLNIVDRFLSVKAVPRRELQLVGISSMLIASKYEEIWAPEVNDFVCISDNAYVSEQVLMMEKTILRKLEWYLTVPTPYHFLVRYTKASTPSDKEMENMVFFLAELGLMHYPTVILYRPSLIAASAVFAARCTLGRSPFWTNTLMHYTGYSEEQLRDCAKIMANLHAAAPGSKLRAVYKKFSNSDLSAVALLSPAKDLSALS

SEQ ID NO: 246324 - protein, 191 aa, Glycine max
  Clone ID: PAT_MRT3847_64462C.1.pep
AAATYCTSLVLPRVRPSVGFTGILVLLVFLSACCSSTHGSLETEKTFAIIKPDGLLGNYTDDIKRTIVEYGFRILKEKIVQLDEGTVKSFYAEHSSKSFFSSLIKYMTSGPVLIMVLEKDNAIADWRALMGPTDASKAKITHPHSIRAKCGLDMEKNCVHGSDSPKSAQREISFFFKELSAEFLLKLIVVF

SEQ ID NO: 246325 - protein, 62 aa, Glycine max
  unsure (1)..(62): unsure at all Xaa locations
  Clone ID: PAT_MRT3847_64463C.1.pep
PIGCFYNFLGSRSSARFWNLESFGSFEKVKHILRELEVGIVKRSTRACCAVRXDDVRRRNXS

SEQ ID NO: 246326 - protein, 81 aa, Glycine max
  unsure (1)..(81): unsure at all Xaa locations
  Clone ID: PAT_MRT3847_64464C.1.pep
TSEWEKRKVKGKVAIQKMVVDLMVLYLHRLKQRRSLYPKSPAMAEFAALFPYEPKPDQXRAHIDVVTDLTDRETPWTDYLW

SEQ ID NO: 246327 - protein, 163 aa, Glycine max
  unsure (1)..(163): unsure at all Xaa locations
  Clone ID: PAT_MRT3847_64465C.1.pep
MAPTPSSKQNHPTQLKTPQSKHRLNFNALKSAPQTHPSPNPNSVANKEPPPEHPIEVIARIRDYPDRKDKPLSVLQTSSNSSSIRVRADFGYRDFTLDGVSVSEEEDLDVFYKKFVESRIHGVKLGDKCTIMMYGPTGSGKSHTMFGSSKQXGIVYRSLKDIL

SEQ ID NO: 246328 - protein, 108 aa, Glycine max
  Clone ID: PAT_MRT3847_64466C.1.pep
MAPTPSSKQNHPTQLKTPQSKHRLNFNGLKSAPSPNPNSVANKEPPPEHPIEVIARIRDYPDRKDKPLSVLQTNSNSSSIRVRADFGYRDFTLDGVSVSEEEDLDVFY

SEQ ID NO: 246329 - protein, 48 aa, Glycine max
  Clone ID: PAT_MRT3847_64467C.1.pep
VSWQGINLLCSDDKPVIAHNHLFSDGNLITEKMSEECEVFSISRPFTI

SEQ ID NO: 246330 - protein, 80 aa, Glycine max
  Clone ID: PAT_MRT3847_64468C.1.pep
LIQGIGNGLIPSVLDFNLLDEVIQMGISSGAAAAAAIKLGKRPENAGKLIVVVFPSYGERYLSSPLFESIRHEAEQMTFD

SEQ ID NO: 246331 - protein, 181 aa, Glycine max
  unsure (1)..(181): unsure at all Xaa locations
  Clone ID: PAT_MRT3847_64469C.1.pep
NSTRCYRLRQIVNHANPRNQFETTGPEIRRDSGGKDDALVAGVGTGGTITGAGRLIKERNSNVKLYGIEPVESAVLSGGPPGDHLIQGIGNGLIPSVLDFNLLDEVIQISSEEAIETAKLLALKEXGISSGAAAAAAIKLGKRPENAGKLIVVVFPSYGERYLSSPLFESIRHEAEQMTFD

SEQ ID NO: 246332 - protein, 146 aa, Glycine max
  Clone ID: PAT_MRT3847_6446C.1.pep
ENQKRLKRRQRNLVSGLQKAGISTLKTNNAGLFCWVDMRHLLHSNTFEAEMDLWKKILYEVRLNISPGSSCHCTEPGWFRMCFANMSEDTLNIAMKRLKTFVEAESNDNGCDKKRVQSSGNSSRRKSLSNWVFRLSSRDHREQEER

SEQ ID NO: 246333 - protein, 49 aa, Glycine max
  Clone ID: PAT_MRT3847_64470C.1.pep
SLQLVLFNQLIITFTRNNIKITPSCYRNLYKQYMKYFTKKYFIIHTMTH

SEQ ID NO: 246334 - protein, 41 aa, Glycine max
  unsure (1)..(41): unsure at all Xaa locations
  Clone ID: PAT_MRT3847_64471C.1.pep
RXTGKLXIQLRNXXTTIYXYXXXXXXXXLFXPKLYSIEXQC

SEQ ID NO: 246335 - protein, 110 aa, Glycine max
  Clone ID: PAT_MRT3847_64472C.1.pep
PKLIGLVSQEPILFSCSIKENIAYGKDGATNEEIRAATEVANAAKFIDRFPHVSSHFHILKFPLFCLCNNINFKFHNTKTTTASGTRKSELFVADVNTQLKNKNITTDIK

SEQ ID NO: 246336 - protein, 52 aa, Glycine max
  Clone ID: PAT_MRT3847_64473C.1.pep
YCINIERSTRGTDRDTIQMVPYIFLTKALTPSNFATYRSKLGVAEKFTSSLS

SEQ ID NO: 246337 - protein, 45 aa, Glycine max
  unsure (1)..(45): unsure at all Xaa locations
  Clone ID: PAT_MRT3847_64474C.1.pep
ETLNSRLLXXHSVHSLQHRRVKNGXTKXSRLQMVSXANVLXLGTG

SEQ ID NO: 246338 - protein, 43 aa, Glycine max
  Clone ID: PAT_MRT3847_64475C.1.pep
YSIRSQNLFEVVHNSRVLSMGSLIVVGEHDHKRWLVFSSLCMI

SEQ ID NO: 246339 - protein, 46 aa, Glycine max
  Clone ID: PAT_MRT3847_64476C.1.pep
LRPNLELAKYLILIEETCTSYITVSLEHTSGEWPLCKRFQSLEDSY

SEQ ID NO: 246340 - protein, 258 aa, Glycine max
  unsure (1)..(258): unsure at all Xaa locations
  Clone ID: PAT_MRT3847_64477C.1.pep
MASQNPNQRNSLYPQVIDSNPDAPPPLLNPNRSSSSQPSLYPSVDYNDLVQNLFPEDATAAGSPSAPLEATEEALLRIPGAILNLIDKDYSVELACGDFSVIRLRQGDNAVAVYARVADEIQWPLAKDATTVKVDDSHYFFSFRVPKGSDPGEEEEDMLSYGLTIASKGQEGLLKELDVVLENCSCFSVQSVSENVKKKGEALDGSVAREVSPKDMESGKKKEMMEXRCAAYWTTLAPNVEDYSGKTAKMIAAGSGHV

SEQ ID NO: 246341 - protein, 52 aa, Glycine max
  unsure (1)..(52): unsure at all Xaa locations
  Clone ID: PAT_MRT3847_64478C.1.pep
LTNQHRVQYHPGNHTMKDMQARAHGIAKLRGSAQFLLILLTTFSIIQFXFVF

SEQ ID NO: 246342 - protein, 95 aa, Glycine max
  Clone ID: PAT_MRT3847_64479C.1.pep
FSFHFISFSLDVTFSILKVTHSTFSLILTLSHVSSVSSMESEALTLLIPCPRSRCCFRFFDSSLLSSSHFTFRFVAFFWFLNIMIVTASICNRVD

SEQ ID NO: 246343 - protein, 35 aa, Glycine max
  unsure (1)..(35): unsure at all Xaa locations
  Clone ID: PAT_MRT3847_6447C.1.pep
ECQSVISTQVCSSKISLGFRVXLNPGPINIVNKXH

SEQ ID NO: 246344 - protein, 93 aa, Glycine max
  Clone ID: PAT_MRT3847_64480C.1.pep
VVHTSSKIHGQVYIPEINWLLMLLCLAVTIGFRDTKLMGNASGKITITSNIEAILNQEDGIFPEEKCWPHILLHTSFNRLSVIGNYKNNLKTH

SEQ ID NO: 246345 - protein, 100 aa, Glycine max
  Clone ID: PAT_MRT3847_64481C.1.pep
ANGPRLVRLNHKSAVNPYFFCPPFCFLRKVIATGSTRCPKGSRTVSASLFVCALMRLSLLFNYTFRLVFGGCLILHVNFDLTQVMAMAAFMSNTNPSLYR

SEQ ID NO: 246346 - protein, 49 aa, Glycine max
  Clone ID: PAT_MRT3847_64482C.1.pep
KQRKVVCRFFLPKKGSVLHQGVLIRPHAYAQRIHFEIDQKVVEVIPNKK

SEQ ID NO: 246347 - protein, 54 aa, Glycine max
  Clone ID: PAT_MRT3847_64483C.1.pep
GFGIPRRPTRSPTLPPTHSYGFLEDYRRGPRGRGSFFCMKSFLLERHFTAPKVN

SEQ ID NO: 246348 - protein, 87 aa, Glycine max
  Clone ID: PAT_MRT3847_64484C.1.pep
IYSMLPFSNSRLLLSSLLRSTRPRKAPTDQDMYKAGWDGNYWGAISATADASSRLSAWLSKAARLHKHTMLPTPSTGSGTNSTTPHF

SEQ ID NO: 246349 - protein, 41 aa, Glycine max
  Clone ID: PAT_MRT3847_64485C.1.pep
GFMLYYCIVICMFGCNRYLRVLCHHCKGNKQSCMLCGSQVE

SEQ ID NO: 246350 - protein, 169 aa, Glycine max
  Clone ID: PAT_MRT3847_64486C.1.pep
MGGDSHSALKSREVSAMIKQGFIPDPTHSFSPSRTFSPPPSSTRPSQTQTQTQSHTHSHPHTQTLFDMMSEEHKFSDEKRRKTQDRVSRLLDEPALRGGGDVRLTVVARDGFRASMEVRKTVLADKSRFFADKLRCAGGDLSHSVEISDCDDIEVYVEGIVLMHCEDLK

SEQ ID NO: 246351 - protein, 123 aa, Glycine max
  Clone ID: PAT_MRT3847_64487C.1.pep
HASEKKKKKKKKKKKKKKKKKKKKKKKKKKKKKKKKKKRGTRFKGPKASIPGHAEGNKFYLGGGGPFKGPRVFPRGVGKNPVFSGAPFFDSRAPFFTGGGGENPRAAPLYRLWPPPLFPGGAP

SEQ ID NO: 246352 - protein, 99 aa, Glycine max
  Clone ID: PAT_MRT3847_64488C.1.pep
ESRHGDPPLEKQRRKDAEEDDDDDVDLDGEETHQKTKAVNEREAAEKGSPKNQERGKPTVFFYAKPRDDEHDMKTPQQIGKSAETERMRRGAATPERVG

SEQ ID NO: 246353 - protein, 36 aa, Glycine max
  Clone ID: PAT_MRT3847_64489C.1.pep
LGSGRRCSIPQVRRGRPIWIKRILAESGVMEIPTMT

SEQ ID NO: 246354 - protein, 443 aa, Glycine max
  Clone ID: PAT_MRT3847_6448C.1.pep
MKKEQEEGLKIEVATLTVTVVVVMLSLLCTCGASNLDPLILIPGNGGNQLEARLTNQYKPSTFICESWYPLIKKKNGWFRLWFDSSVILAPFTQCFAERMTLHYHQELDDYFNTPGVETRVPHFGSTNSLLYLNPRLKHITGYMAPLVDSLQKLGYADGETLFGAPYDFRYGLAAEGHPSQVGSKFLKDLKNLIEEASNSNNGKPVILLSHSLGGLFVLQLLNRNPPSWRKKFIKHFIALSAPWGGAIDEMYTFASGNTLGVPLVDPLLVRDEQRSSESNLWLLPNPKIFGPQKPIVITPNKTYSAHDMVDFLKDIGFPEGVYPYETRILPLIGNIKAPQVPITCIMGTGVGTLETLFYGKGDFDERPEISYGDGDGTVNLVSLLALQSLWKEEKNQYLKVVKIDGVSHTSILKDEVALNEIVGEITSINSHAELGLSNLFSG

SEQ ID NO: 246355 - protein, 51 aa, Glycine max
  Clone ID: PAT_MRT3847_64490C.1.pep
VCIRKSTGAASTVSAAILAIATISSAVKDVALTSHASLVPTQCGSFLMLVG

SEQ ID NO: 246356 - protein, 98 aa, Glycine max
  unsure (1)..(98): unsure at all Xaa locations
  Clone ID: PAT_MRT3847_64491C.1.pep
LADHAXMVEWGEKVVNSRTNGQHTFTQMGSGHFAEDGFGKASYFRNLQTVDTDNNLSSVQGISTLAENTNCYDIKSYYSNEWGTYFYYGGPGNNPQCP

SEQ ID NO: 246357 - protein, 51 aa, Glycine max
  Clone ID: PAT_MRT3847_64492C.1.pep
YGCEKTTEGEGTLFFLGCKHARKPLISVTSKQYRNSCSASVSDPCVKLTLS

SEQ ID NO: 246358 - protein, 85 aa, Glycine max
  Clone ID: PAT_MRT3847_64493C.1.pep
RTTRFFSIARILITHIIVFTKFFKSGRFYYSGSLWPAHIVILFPVTNRTLMNTYSLMVSGNRVISASAPGSNLRLPVFPFLRNST

SEQ ID NO: 246359 - protein, 513 aa, Glycine max
  unsure (1)..(513): unsure at all Xaa locations
  Clone ID: PAT_MRT3847_64494C.1.pep
METTRRWFSKFKSNDKMNSAKDKETTGMTKEGSKPPTSEEAPSNVTKQRVEAAKQYIENHYKKQMQSLQERKERRNMLEKKLADAEVSEEEQHNLLQHLEKKEREIMRLQRHKMGADDFEPLTMIGKGAFGEVRICREKATGHVYAMKKLKKSEMLRRGQVEHVKAERNLLAEVDSNCIVKLYDSFQDEEYLYLNVEYLPGGDMMTLLMRKDILTEDEARFYVGETVLAIESIHKHNYIHRDMRKLDYSRVGTPDIISPEFVLVAERKNFRVVIKNFQKKLTLQQKQRILLVEXVCNVNQRRRSYRCLPMEIGSYEMLVGYPPFYSDEPMLTCRKIVNWRNYLKFPEEVKLSAEAKDLISRLLCNVDQRLGTKGADEIKAHPWFKGIEWDKLYQMKAAFIPEVNDELDTQNFEKFEEADNQTEPSSKSGPWRKMLSSKDVNFVGYTYKNYEIVNDDELPEIAELKKKSTKPKRPSIKSLFDDESATAANQPVQGSFLNLLPTQTEVPEKSESQ

SEQ ID NO: 246360 - protein, 234 aa, Glycine max
  unsure (1)..(234): unsure at all Xaa locations
  Clone ID: PAT_MRT3847_64495C.1.pep
QVADPCVDKLRHLNFFFFSIPQAYSTVGTPDYIAPEVLLKKGYGMECDWWSLGAIMYEMLVGYPPFYSDEPMLTCRKIVNWRNYLKFPEVVKISAEAKDLISRLLCNVDQRLGTKGADEIKVLXAHPWFKGIEWDKLYQIKAAFIPEVNDELDTQNFEKFEEADNQTQPSSKSGPWRKMLSSKDVNFVGYTYKNYEIVNDDQLPEIGSYIFNFMCIFVYVLFKPFYLIFIIFVL

SEQ ID NO: 246361 - protein, 394 aa, Glycine max
  unsure (1)..(394): unsure at all Xaa locations
  Clone ID: PAT_MRT3847_64496C.1.pep
VEHVKAERNLLAEVDSNCIVKLYCSFQDEEYLYLIMEYLPGGDMMTLLMRKDILTEDEARFYVGETVLAIESIHKHNYIHRDIKPDNLLLDRNGHMKLSDFGLCKPLDCSNLQEKDFSVGINRSGALQSDGRPAAPNRTQQEQLQHWQKNRXILFIDILHCAYSTVGTPDYIAPEVLLKKGYGMECDWWSLGAIMYEMLVGYPPFYSDEPMLTCRKIVNWRNYLKFPEVVKISAEAKDLISRLLCNVEQRLGTKGADEIKAHPWFKGVEWDKLYQMKAAFIPEVNDELDTQNFEKFEEGDKQTVPSSKAGPWRKMLPSKDINFVGYTYKNFEIVNDHEIPGIAELKKKNTKPKRPSIKALFDDESATAANQPVRGSFLNLLPPQMEVPEKSESQ

SEQ ID NO: 246362 - protein, 134 aa, Glycine max
  unsure (1)..(134): unsure at all Xaa locations
  Clone ID: PAT_MRT3847_64497C.1.pep
MGEAQPLQHVGHGAGXEDHAYWAPSAAPPLMIARIRAVIPKHXWEKNTLGYVEAVXLRDETYGTALEADGIWLNSWILWPLYWPAQGTMCWALCVLGHDWGHGSIXNSAVLNSMVGHMLHSSILVPYHGWRMSH

SEQ ID NO: 246363 - protein, 74 aa, Glycine max
  unsure (1)..(74): unsure at all Xaa locations
  Clone ID: PAT_MRT3847_64498C.1.pep
MAGKGLTFAAVIICVSALSLSTSVAVAAANDGLVXNLYKESCPHAEDIITEQVKLLYKRHKNTAIYWLMNNDHD

SEQ ID NO: 246364 - protein, 180 aa, Glycine max
  Clone ID: PAT_MRT3847_64499C.1.pep
MASRRSFLSNPNRYIFPTTSDTHLSPSQEGKGMFELDEAELWNNNHSSATTDQSKKGLPSPGSRSVLKKASRNNNNGWRGRITPASLPVNIPDWSKILKEDYKEHPKWESEEEEEEEEEDNNVRDEQNHGLRNIKVPPHEYLARTRGASLSVHEGIGRTLKGRDLRSVRNAIWKKVGFED

SEQ ID NO: 246365 - protein, 59 aa, Glycine max
  Clone ID: PAT_MRT3847_6449C.1.pep
LMAERKSCTRWHLGRFHVSVFYPTMHKFGYALLWQCSCHHPLFHVIYLLLMLHFLGKKI

SEQ ID NO: 246366 - protein, 167 aa, Glycine max
  unsure (1)..(167): unsure at all Xaa locations
  Clone ID: PAT_MRT3847_644C.1.pep
SVYVNPLLNPVENLTQWKTVKAKRAPPLVSQKENLVXNQESRAAFGAETETPKKLNREIAVDASLSNWLGSSETTPVVSKGLYAGTPERSSSSSQGSNSVVSHEDRPILGALTVEELKHFSASSLPRKSPRDEMMPIIGSVGSYWNCGGYAEDSGSANRVRSRKGYI

SEQ ID NO: 246367 - protein, 70 aa, Glycine max
  Clone ID: PAT_MRT3847_64500C.1.pep
GFISWTPIPGFPRASLPLQGATIIDLICKPKRIKGTMNSRPNFQGPSAAKDKKAVPSGGKIEDNNLIKAK

SEQ ID NO: 246368 - protein, 65 aa, Glycine max
  Clone ID: PAT_MRT3847_64501C.1.pep
VVRASINPSLIMLVRAKRTTPTSVASTPTTIATTTIFAFIYSMCITLPICFVKILACIIGCPSPR

SEQ ID NO: 246369 - protein, 258 aa, Glycine max
  Clone ID: PAT_MRT3847_64502C.1.pep
MRIHHIACLQDNYSYLIVDESTKEAAAVDPVEPEKVLEVASSHGLTLKFVLTTHHHWDHAGGNDKIKQLVPGIKVYGGSIENVKGCTDKVENGDKVSLGAEITILALHTPCHTQGHISYYVTGKEDEQPAVFTGDTLFIASCGKFFEGTAEQMYQSLNVTLASLPKSTRVYCGHEYSVNNLQFALTLEPDNLRIQQKLTWARNQRQAGQATIPSTIEDELETNPFMRVDLPEIQERVGCKSPVEALGEIRKQKDNWRG

SEQ ID NO: 246370 - protein, 85 aa, Glycine max
  Clone ID: PAT_MRT3847_64503C.1.pep
KVLLNRKHAPSVCLRIIIVVKYFYLVAHGLSLFYIVCKCFDMVHIVALVHFFDYRVCILDSFCILQCFTVRLISIYANTCTMPHD

SEQ ID NO: 246371 - protein, 107 aa, Glycine max
  Clone ID: PAT_MRT3847_64504C.1.pep
VTFIGVLCACARAEMLDEGRSYFKQMTDVFGVKPNYAHFWCMANLLASVKLVGEAEEFLRSMAEFDGDMSCESLVWASLLGLCHFKRDVYLGERIAKLLVDMDPKNL

SEQ ID NO: 246372 - protein, 118 aa, Glycine max
  unsure (1)..(118): unsure at all Xaa locations
  Clone ID: PAT_MRT3847_64505C.1.pep
ETIMTFVISKLDKNAHAFSSSFSSNHEEYTGEGVHNLGGTAXMSHRTHIQKAAHYCLEDHESSADMDPSLVSDGTTTQALADXHCDTGDLNYQLLXQIMTIDPETNPIXHFLGNNLIL

SEQ ID NO: 246373 - protein, 100 aa, Glycine max
  Clone ID: PAT_MRT3847_64506C.1.pep
PPPITCQKIHTNPHPQTHTTPHTLTTQQQHPPTPKKHTPNKPNQVNPALLVGAGVGGSFWGVVFWVLPITCLELEEPGSYCNLFGISQPPPPPKQAPLHT

SEQ ID NO: 246374 - protein, 530 aa, Glycine max
  Clone ID: PAT_MRT3847_64507C.1.pep
MELSTPNSSSKHLSITPGSRVLRSPLSDEQIWKRLRDAGFDEESIKHKDKAALIAYIAKLEAEIYDHQHHMGLLILEKKDLASKYEQVKALAESSELMHKHDSTMNKSALTESRKREESLKKTVSIKDACIASLEKALHELRTESAETKVAAESKFVEARQLIDEAQKKFTEAEAKVRAAESLQAEAKRYHNVAERKLHDVEAREDNLRRQIISFKSDCDEKDKEMIIERQSLSERQKGLQQEQERLLQSQSLLNQREEHFLSRSQELNRLQRELEDTKVKFEKEHEALYDEKTTLKLKEATLIQQEEELAKWKSELSKKEQELLEFQAKLSNRESDKTQKVVASQEAALRTKKYNLEVELQMQRKLVENEIEEKRRAWELKEVDLKHCEDQILERQHELEVLSRSLSEKEKDLKDLSSALEEKDQRLSAAEKKFELNKVLLQKEKDHVEQANQDLQKSLASLEDKIRQVDIEKEKLEAMKSETGDMSILEVKLKEEIDLVRSQKLELLAEADKLKTEKAKFEADWELLD

SEQ ID NO: 246375 - protein, 54 aa, Glycine max
  Clone ID: PAT_MRT3847_64508C.1.pep
PEAVLLNSCYSAIALQNFLDLQLWFPPLSWLPSMLWLWHASCILASLQPIELLR

SEQ ID NO: 246376 - protein, 82 aa, Glycine max
  Clone ID: PAT_MRT3847_64509C.1.pep
LHMGSGEATQEGEKFEFEDKVKVLSKGLERLKEVSGGEIKPIVDLAEDNDKVLQCEKIRAESEVEVWKDKYKTLESWAFPSR

SEQ ID NO: 246377 - protein, 79 aa, Glycine max
  unsure (1)..(79): unsure at all Xaa locations
  Clone ID: PAT_MRT3847_6450C.1.pep
LXXVNHSSXRARAIASEXEATGXPQLDFCCRILXLXKTGVGXXATXKXXYLXXPKXTXXAFQXXTSXXPXCCGXXXWLN

SEQ ID NO: 246378 - protein, 95 aa, Glycine max
  Clone ID: PAT_MRT3847_64510C.1.pep
HVTSCGHPRIFHKGSSCSRTCTRVSLLDDLLPLDFFKESKINHTFLFLITTNTRESITREKQQHSRSASHLGSGWREEKEGGEEEEEEKPHVLVS

SEQ ID NO: 246379 - protein, 43 aa, Glycine max
  Clone ID: PAT_MRT3847_64511C.1.pep
MFVSKKKKKKKKKKKKKIKKKKKKVKMKNKILYFKKKKKKKKF

SEQ ID NO: 246380 - protein, 111 aa, Glycine max
  Clone ID: PAT_MRT3847_64512C.1.pep
IMLLIFLFQFLPKVYHSICMMRRMQKVTGYIFVTIFWGFGLNLIAYFIASHVAGGCWYVLAIQRVASCLRQQCERTNGCNLSVSCSEEICYHSLLPASAIQIHVVVLNSGK

SEQ ID NO: 246381 - protein, 131 aa, Glycine max
  unsure (1)..(131): unsure at all Xaa locations
  Clone ID: PAT_MRT3847_64513C.1.pep
MEVLITFAPIARLEAIRVKLXFAAHKNINLFQMDIKSGFLNDFIEEEVYVRQPPNFVDHTLLDHIFKLQKASYGLKQAPYAWYDRLSFFLLENGFMKGKDXTLFKREVGKDFIIVXIYIDDIIFGATNESL

SEQ ID NO: 246382 - protein, 31 aa, Glycine max
  Clone ID: PAT_MRT3847_64514C.1.pep
EGAKLNIVYIASFSLVTHKSFISLFTYEMYI

SEQ ID NO: 246383 - protein, 78 aa, Glycine max
  Clone ID: PAT_MRT3847_64515C.1.pep
GRFKWIIVFFALPLDILAIGLMIHFRQPGTDVGFIIMTQIFTAVAGGSIVIGGELAMMAPSDHQHMAVITRCLISSAL

SEQ ID NO: 246384 - protein, 70 aa, Glycine max
  Clone ID: PAT_MRT3847_64516C.1.pep
RCLPRSLPFDIQFHHHSSVSPNNLSLLLRLILIFSGFVSNPLFYSPSYFLDFILFFHLQSPSDLSRVLQF

SEQ ID NO: 246385 - protein, 72 aa, Glycine max
  Clone ID: PAT_MRT3847_64517C.1.pep
EHLVITCELLKANLYERYTFNTVSRGEGYFTMPRLQSITIQSLEAYKCFVSHGLIYCDLQPENILGKSSTMC

SEQ ID NO: 246386 - protein, 102 aa, Glycine max
  Clone ID: PAT_MRT3847_64518C.1.pep
FFGHLENFLVQPIFRGAFYQENLFPGVAHGLAIFVYRSISSSLSVPLFNLNYPQAPSGECSSPKTSVGLFFGSIFCKTVLEFFEKFVVKFQKRPPFFPYILV

SEQ ID NO: 246387 - protein, 74 aa, Glycine max
  Clone ID: PAT_MRT3847_64519C.1.pep
ELKFDFPPAPILETCEEGCICIAFFQPQRSTFYEIRLSFMLNQCHNSTVTFLIQSRSNGGNIPKTTTASNELSS

SEQ ID NO: 246388 - protein, 70 aa, Glycine max
  Clone ID: PAT_MRT3847_6451C.1.pep
LFNPKLREFTGIFTVILCEITIVRKFHITLLNFQDATYMFVGQLHLIPFGFKFKSNMISKPIAHLGSRLL

SEQ ID NO: 246389 - protein, 91 aa, Glycine max
  Clone ID: PAT_MRT3847_64520C.1.pep
SFGTIEIDWDSHPVTLKFKVRDKDSVTVTGVDVSLTELQPSNSEILDRVKAEHNNSKHCTLEVSLPWIVRYRLAILFFSTLFGKSLLSSTC

SEQ ID NO: 246390 - protein, 279 aa, Glycine max
  unsure (1)..(279): unsure at all Xaa locations
  Clone ID: PAT_MRT3847_64521C.1.pep
MPENMSISVNGQSQVPPGFRFHPTEEELLQYYLRKKVSYEKIDLDVIRDVDLNKLEPWDIQEKCKIGTTPQNDWYFFSHKDKKYPTGTRTNRATAAGFWKATGRDKVIYSNGKRIGMRKTLVFYKGRAPHGQKSDWIMHEYRLDDNNTADTNIVSNVMGDAAQEEGWVVCRIFKKKNHLKTLDSPLASGEGRRSHLFDSCDEGALEQILQQMGRGCKEESSYEGNYNSYGRFAMGLNNGGGGGYNDRFMKLPSLESPKSASMENHHNTNNXCNNNMKSN

SEQ ID NO: 246391 - protein, 137 aa, Glycine max
  Clone ID: PAT_MRT3847_64522C.1.pep
MGRGRGKGKKLTVTNFEDPASGEDEKVPTQKRRGRPQKPLKDDFDEEEVEKIEDDSDNVKNGVSNKEMKSPTATENGRKRKRNSQVKEKLDSVEEENGIGNGSNTTDELTKTNGFRHNGSRRKSTPRRAAEAGVQCK

SEQ ID NO: 246392 - protein, 77 aa, Glycine max
  Clone ID: PAT_MRT3847_64523C.1.pep
QNNATLLFLSFYPYFASVSFGPLFLTSHTLCLKLKLPLSPILNLLNLINVSSSGFHSLSLMLDMPILSSSFLISLFA

SEQ ID NO: 246393 - protein, 123 aa, Glycine max
  unsure (1)..(123): unsure at all Xaa locations
  Clone ID: PAT_MRT3847_64524C.1.pep
WTWSYSPPTSXXRAXSRRQCTNASDAFCRKKRRKPRRSWITGPSPQTMLGLGPNWKIILRRRSRRRSCRRRGCKRRCGPSSTGPGSGEALLSATNNNKLVNHDLCTRVTFPFDENSTKNAFGV

SEQ ID NO: 246394 - protein, 40 aa, Glycine max
  Clone ID: PAT_MRT3847_64525C.1.pep
PKTTFLMIISIDQHDPFTCSELKFSIQLKPNLFNTTLFTT

SEQ ID NO: 246395 - protein, 52 aa, Glycine max
  Clone ID: PAT_MRT3847_64526C.1.pep
NSIPIKFDLPFHIYAMQTQSRVHMLLIRISIHAQDCPILTTNMHQNALYKCF

SEQ ID NO: 246396 - protein, 371 aa, Glycine max
  Clone ID: PAT_MRT3847_64527C.1.pep
MSGPRLRSMNVGDSEAARPVFGPAGNKTGPLSSRKPASKPLRKAEKLYNEAKEKKSYEVSTVVASPQSYSASVLRRHEQLLHCNLSLNASCSSDASTDSFHSRASTGRLTRSNSLGCTRKRSVSKPRSVASDGVLESPPHGSQSKKRCAWITPNTEPCYATFHDKEWGVPVHDDKKLFELLVLSSALSELTWPAILSKRHILGEVFADFDPVAISKFNEKKIMAPGSTASSLLSDLKLRAIIENARQISKVIEEFGSFDKYIWSFVNHKPIISRFRYPRQVPVKTPKADVISKDLVRRGFRGVGPTVIYSFMQVVGLTNDHLISCFRFQDCMAVAEGKEENAVKDDAQQKEGDHVESDLSIAIDNLSLSSE

SEQ ID NO: 246397 - protein, 125 aa, Glycine max
  unsure (1)..(125): unsure at all Xaa locations
  Clone ID: PAT_MRT3847_64528C.1.pep
GSRPDDIYILLNFQILNLSHNGIHVAIPASLATITSLQVLDLSYNLFSGSISESLGQLTSLQILNLNSNLLSGRVPSTVXGRLLYRASFNFTDNACLCGIPGLPTCGPHLFDGGKVGIGLRASFT

SEQ ID NO: 246398 - protein, 81 aa, Glycine max
  unsure (1)..(81): unsure at all Xaa locations
  Clone ID: PAT_MRT3847_64529C.1.pep
MLYVVNEMTFSGYNVYSLDILYLVAILLGIFVIISKNPIVSVLFLIGLFFXISXYLIXTGLNFIGLSYLLVYIGAVSILFL

SEQ ID NO: 246399 - protein, 63 aa, Glycine max
  Clone ID: PAT_MRT3847_6452C.1.pep
LRRNTKIQKKDTKRMNSAAIFPFASWCFLLNPFGGFEGLSFYALVLIFLYCFMLFDVSLVGSH

SEQ ID NO: 246400 - protein, 43 aa, Glycine max
  Clone ID: PAT_MRT3847_64530C.1.pep
IMRAKKSSGSELQIWSTHPDLRITISALSLGVNMIIQPNERSL

SEQ ID NO: 246401 - protein, 60 aa, Glycine max
  Clone ID: PAT_MRT3847_64531C.1.pep
EPHPNLLRRTTIGNGPPESVFDWTREIDSDLSNQNINNQAFSRKHWRLLQCQDGLLHLFT

SEQ ID NO: 246402 - protein, 83 aa, Glycine max
  Clone ID: PAT_MRT3847_64532C.1.pep
MQSTSYIYVNATMGKLVEILDQGVRIAARFHSNGPQTGRKNYHPPSLSDNHGHHYHAGATTTSAGGVKEAVAARSIDIILYSV

SEQ ID NO: 246403 - protein, 89 aa, Glycine max
  Clone ID: PAT_MRT3847_64533C.1.pep
GSSLSLHFRLGTPLLFVSLSFLLFLIIISQFSTSFKGQRKPQPTTRLEGEASQERGIIVPFLGTTVPPLCYLHHLFLHTIPPLRCFSSN

SEQ ID NO: 246404 - protein, 464 aa, Glycine max
  unsure (1)..(464): unsure at all Xaa locations
  Clone ID: PAT_MRT3847_64534C.1.pep
ENCRSEMEKSCTLVVHFDKGTPALANEIKEALEGNDVAAKIDALKKAIMILLNGETIPQLFITIIRYVLPSEDHTIQKLLLLYLEIIDKTDSRGKVLPEMILICQNLRNNLQHPNEYIRGVTLRFLCRLNESEIIEPLIPSILFNLEHRHPFVRRNAVLAVMSVYKLPQGEQLLDSAPEIVDKFLSTEQDPSSKRNAFLMLFSCAQDRAINYLFMNIDRIIDWGEQLQMVVLELIRKVCRSNKGEEXGKYIKIIISLLNAXSTAVIYEXCASTLVSLFSAPTAIRAAASTYCQLLLSQSDNNVKLIVLDRLNELKTSSREIMVEMVMDVLRALSTPNHDIRRKTLDIALELITPRNIDEVVMMLKKEVVKTQSGEHEKNGEYRQMLVQAIHTCAIKFPEVASTVVHLLMDFLGDTNVASAMDVVVFVREIIETNPKLRISIITRLLDTFYQIRAAXVCSCALWI

SEQ ID NO: 246405 - protein, 58 aa, Glycine max
  unsure (1)..(58): unsure at all Xaa locations
  Clone ID: PAT_MRT3847_64535C.1.pep
NLVIPLYFYXGAYQKPIVRLHMFTLFMWETNEGIRNDSQSKCLPWLPHLYSEAHSRKL

SEQ ID NO: 246406 - protein, 51 aa, Glycine max
  Clone ID: PAT_MRT3847_64536C.1.pep
KKKFFFFSEAKTQKNEHRPNRSPFCQLPAVITRLILPLGDILPDLRTRGSA

SEQ ID NO: 246407 - protein, 70 aa, Glycine max
  Clone ID: PAT_MRT3847_64537C.1.pep
FSLQVTLKILNGLSTYGSMITQIPCFVQLKSLKLKMKSSSSISDEGVSRIVEYLLKKCPLAKVDVINCRE

SEQ ID NO: 246408 - protein, 57 aa, Glycine max
  Clone ID: PAT_MRT3847_64538C.1.pep
PNLSENNIILYVNLLFHQNNPLYIHNFTQTYYTFKLHHIYHCSLKFVHQRVNNPKKS

SEQ ID NO: 246409 - protein, 37 aa, Glycine max
  Clone ID: PAT_MRT3847_64539C.1.pep
FNHKYWAHLACSSCTQSYLCCARNIYQCVLTRSYETT

SEQ ID NO: 246410 - protein, 71 aa, Glycine max
  Clone ID: PAT_MRT3847_6453C.1.pep
NEMMQIMSMGSGLWPLMMGFRPPQLPIPPLSAITDNRLIQMFGSPNQIPPMPMPHAPFFPIIEILPHNHTG

SEQ ID NO: 246411 - protein, 65 aa, Glycine max
  Clone ID: PAT_MRT3847_64540C.1.pep
QSIFLCHASACTCNQLLVSSLWWKLRFRCPRSLENGMRQLPGLQSSNPDFKSCATGSYALSNSIK

SEQ ID NO: 246412 - protein, 62 aa, Glycine max
  Clone ID: PAT_MRT3847_64541C.1.pep
QTTKIIKFPRQRSIWVEVGALRCCAVPRLCCECEPGWFGQWGQALWQCILHRPGCPGVRKHH

SEQ ID NO: 246413 - protein, 69 aa, Glycine max
  Clone ID: PAT_MRT3847_64542C.1.pep
IQTFFFFNKSFNPVPFRLGLGFFLSTPKTEKFFEDGENACLSFGYSSIQGWRAPLEDAHAEYTVLVKST

SEQ ID NO: 246414 - protein, 67 aa, Glycine max
  Clone ID: PAT_MRT3847_64543C.1.pep
VCFVYLFRAKELSDTFRLHEDQIQKPLTGFMNNPSCVCICQLINLLIYFGCFGSWTTCVKLVVHVKP

SEQ ID NO: 246415 - protein, 104 aa, Glycine max
  Clone ID: PAT_MRT3847_64544C.1.pep
LELKRSSISFFEIEKHETAVSRWSRARTRAAKVGKGLLKDDKAQKLALQHWLEAIDPRHRYGHNLHFYYDRWLQCQSREPFFYWLDIGEGKEVNLEKCPGSKLQ

SEQ ID NO: 246416 - protein, 66 aa, Glycine max
  Clone ID: PAT_MRT3847_64545C.1.pep
SHPLIASTDTAASHEGHLGAACSHSMTLGTLPIPWMLSNSIFHFLRHPFGTIAKHSSRTIPLIINQ

SEQ ID NO: 246417 - protein, 47 aa, Glycine max
  Clone ID: PAT_MRT3847_64546C.1.pep
CTFDKRPYDKVAPPKNLTLPPPGVPESVVTLVKMVNEATANIPNWWS

SEQ ID NO: 246418 - protein, 155 aa, Glycine max
  Clone ID: PAT_MRT3847_64547C.1.pep
ESEITVELDDHEFTTIRSPPPAPPTPPQPPSVKTRSERKSDRRKSTVKREMAMIWASVLSNQRKKKKKQKTKNNENQDPQYDDNADELTNNTTVPPPPPPPPPLPSVFHSLFRKGLGKSKKIHSVSAPPPPPPPPPSKRKSQTPPPPEPPQRRNS

SEQ ID NO: 246419 - protein, 50 aa, Glycine max
  Clone ID: PAT_MRT3847_64548C.1.pep
FIPRLVGLQPVFSPSLKSDHHCQRFFPGKFFSFQAFSKFLAPMWQVIMLT

SEQ ID NO: 246420 - protein, 315 aa, Glycine max
  Clone ID: PAT_MRT3847_64549C.1.pep
MFSLQKREVGDAFNDSDPQWLVPGLPDPVPSSVLPDAFFNKQGGYATYYKLAQRFKDSKGIIVNSFSELEQYAIDALCDGQIQTPPIYAVGPLINLKGQPNQNLDQAQHDRILKWLDEQPDSSVVFLCFGSRGSFEPSQTREIALALQDSGVRFLWAMRSPPTSDNADRTLPEGFLEWMEEGKGMVCGWAPQVEVLAHKAIGGFVSHCGWNSILESLWFGVPILTWPIYAEQQLNAYRMVREFGLAVELKVDYRRGSDLVMEEEIEKGLKQLMDRDNAVHKKVKQMKEMARKAILNGGSSFISVGELIDVMTGSI

SEQ ID NO: 246421 - protein, 80 aa, Glycine max
  Clone ID: PAT_MRT3847_6454C.1.pep
AIRAAPDPLISPAITLPFPANSPLPRYESRVVRSISPFSIALTIPFIFAIVVPVFQKGVCGFAQFVRIGCFPGVGVGGCL

SEQ ID NO: 246422 - protein, 163 aa, Glycine max
  Clone ID: PAT_MRT3847_64550C.1.pep
RFLWAMRSPQTSDNADRTLPEGFLEWMEEGKGMVCGWAPQVKVLAHKAIGGFVSHCGWNSILESLWFGVPILTWPIYAEQQLNAFWMVRGYELAVELKVDYRRGSDLVMAEEIEKGLKQLMDGDNVVHKNVKEMKEKARNAVLTGGSSYIAVGKLIDNMLGSN

SEQ ID NO: 246423 - protein, 58 aa, Glycine max
  unsure (1)..(58): unsure at all Xaa locations
  Clone ID: PAT_MRT3847_64551C.1.pep
TAXHRLXXLKTGNKSNRYLXSRIXCNFFLFXCVXFLKGKXXXXLWXXTXXVNHXLXXS

SEQ ID NO: 246424 - protein, 240 aa, Glycine max
  unsure (1)..(240): unsure at all Xaa locations
  Clone ID: PAT_MRT3847_64552C.1.pep
MGPCICSSHAQRLPYAANLNPNSSILRRRAQFISFASNSSPPQDEEATAKKSFAVATGELFLGLATRLIKSRNKGSSSLAEDSGSVGMFENNSEERIGAVVEDEIDPDVVWEQRVKDVEAERNRYSRLVTSPGFSFSAAGLLFPXHLGVAQFLIQNGYIKETTPLAGSSAGAIVCAVIASGASMEEALNATKILAEDCRNRXTAFRLGAVLRDILDKFLPDDVHIRSNGXRVRVAVTQLL

SEQ ID NO: 246425 - protein, 406 aa, Glycine max
  unsure (1)..(406): unsure at all Xaa locations
  Clone ID: PAT_MRT3847_64553C.1.pep
MFIYCLISTGSGSRMGPSIFSSHAHSHRLPYAANLNPNSSLLRRRAQFISFASNSSPPQPRPQGGFKDDEATAKKSFAVSTGELFLGLAARLIKSRNRGSSLAEEDSRSVAMFEERIEAAAVVVEDEIDPDVVWEQRVKDVEAERNRYRRVVTTPGFSFSAAGLLFPYHLGVAQFLIQNGYIKETTPLAGSSAGAIVCAVIASGASMEEALNATKILAEDCRNQGTAFRLGAVLRDILDKFLPDDVHIRSNGRVRVAVTQLLWRPRGLLVDQFDSKEDLINXVFTSSFIPGYLAPRPATMFRNRLCIDGGLTLFMPPTSAAQTVRVCAFPASRLGLQGIGISPDCNPENVCSPRQLFNWALEPAEDAILDRFFELGYLDASVWAKENPVEVIVQDDSPAFGSSSAT

SEQ ID NO: 246426 - protein, 49 aa, Glycine max
  Clone ID: PAT_MRT3847_64554C.1.pep
KSYTIISRCSLFLLPYSHRASFSQAQRPSTECILMFPTFTLIISIQFCS

SEQ ID NO: 246427 - protein, 120 aa, Glycine max
  Clone ID: PAT_MRT3847_64555C.1.pep
SVVSEPPAHHVAIDKLSLNYHRENQIANPLSIRQNPSTLTFLLFRLHHRTILLLCRGHKNDIAIHGHRMPFSPPYESPVSHCCAQSLRAWQIPSLLPLHLNPKPPLFFSFAISICEFLFR

SEQ ID NO: 246428 - protein, 75 aa, Glycine max
  Clone ID: PAT_MRT3847_64556C.1.pep
PLYIPDPKAVPKSLALAIWMFCSSSTYSNVDHFSPCSLWALFNLSSTSCSFNLFERAFIGHIRCQPPPPSIGLPI

SEQ ID NO: 246429 - protein, 120 aa, Glycine max
  Clone ID: PAT_MRT3847_64557C.1.pep
MGSSTTFCAFFLVCTILSVHVAQSSSSTLDLDTFFLPLKSGCRGSVAECSLLAGDDDTEFLMESESNRRILAGRSYISYGALRRNTVPCSRRGASYYNCRPGAQANPYSRGCSAITRCRR

SEQ ID NO: 246430 - protein, 67 aa, Glycine max
  Clone ID: PAT_MRT3847_64558C.1.pep
FKFGYPKGNLSHGIVKELNIEFIKGETIFYFIFFVFMFFLSFFYLYPFPFFFFFFFFFFFFFFFFFF

SEQ ID NO: 246431 - protein, 201 aa, Glycine max
  unsure (1)..(201): unsure at all Xaa locations
  Clone ID: PAT_MRT3847_64559C.1.pep
MAATQKPSQGQTPKKLRNLCKTRRRFGHLRPRSRFRASETSSGSGVVSCISVLDQDFESPQDEVTVYLKDPLTSRNECYLLDSFFGQEDNNVGQIFCGEVSPLIPGMFSGCNSTVFAYGATGSGKTYTMQGTEEQPGLMPLAMSMILSICQRTGSTAQISYYEVYMDRCYDLLEVKAKEISVWXDDKDGKIHLRGLSQVPI

SEQ ID NO: 246432 - protein, 124 aa, Glycine max
  Clone ID: PAT_MRT3847_6455C.1.pep
RDVEVLEFRTPQHPSLGTNNWGGSSPLLARNVPKESLEQKYSRLNSVRTKDEIFPADYEYYVVNPSNETGASASSAKRWNKVRGVLLKLIFVRKENKTTVTLGSRLRKRRWIPRMDPTTRWPQA

SEQ ID NO: 246433 - protein, 83 aa, Glycine max
  unsure (1)..(83): unsure at all Xaa locations
  Clone ID: PAT_MRT3847_64560C.1.pep
XXXYXXSCIXXXXDXXKERXNXLXQFIXXXLXXXXHXXFVIHXXXXXXGMKXXSXXXTXHNXFGSLLXLXFAFSHDXFDLTNV

SEQ ID NO: 246434 - protein, 78 aa, Glycine max
  Clone ID: PAT_MRT3847_64561C.1.pep
SWMISGRVLTVQGFISNPLHQEDGHTQCIREKLFGDISRNGIREILGRSNSIDGCHSIPRDDQEYAEELLVGLPESHL

SEQ ID NO: 246435 - protein, 107 aa, Glycine max
  unsure (1)..(107): unsure at all Xaa locations
  Clone ID: PAT_MRT3847_64562C.1.pep
VAGXXXXRXXXVXXXXXXLLPXXKSWXTVXXLXXXXXRXRXRXFXXEVMXXXXPXXAPKIXXQGTXPQRSLMMILRSXTSXYLXXSIQXXNSXHHLXXXXXTXLPXS

SEQ ID NO: 246436 - protein, 59 aa, Glycine max
  Clone ID: PAT_MRT3847_64563C.1.pep
SCTFGGSPYKGCGRPIFLSLAVLRLCPPLNGGSSLIKIMWTFFHVGRYTHFFFLSIIWQ

SEQ ID NO: 246437 - protein, 199 aa, Glycine max
  unsure (1)..(199): unsure at all Xaa locations
  Clone ID: PAT_MRT3847_64564C.1.pep
PRVRVAGIFKSEGSTDMPELPDQPLKRGKESHSCLLTHXDPSSRPSAQKLIEHPFIRDQSATKATNVRITRDAFPYMFDGSRTPPPVLDHSNRTSLTSFDGDYATKPIPVTSRTVRSPRDNTRMITSLPVSPCSSPLRQYGPAHKSCFLSPPHPTYTLMGQNTLPSYPVRSNATFTLDPFHETAFYKAHTPGGSPRRLI

SEQ ID NO: 246438 - protein, 123 aa, Glycine max
  Clone ID: PAT_MRT3847_64565C.1.pep
SPVSVVETYDYLFLHGADILDGSRSLTSKWESPSLLSLGDDVEANASPNEGYTFIDVNKEAEYYSELMLKLRTLTEQDIRESDCPSKRVRETENFGDICLMFEHKIFDHLLYEVVNEVLELYY

SEQ ID NO: 246439 - protein, 195 aa, Glycine max
  Clone ID: PAT_MRT3847_64566C.1.pep
LGLNVTFLSYLLGITVTLCMLAVLEIKWSGIELEEWWRNEQFWLIGGTSAHLAAVLQGLLKVIAGIEISFTLTSKSGGDDVDDEFADLYIVKWTSLMIPPITIMMVNLIAIAVGVSRTIYSVIPQWSRLLGGVFFSFWVLAHLYPFAKGLMGRRGRTPTIVFVWSGLIAITISLLWVAINPPAGTDQIGGSFQFP

SEQ ID NO: 246440 - protein, 45 aa, Glycine max
  Clone ID: PAT_MRT3847_64567C.1.pep
MPIRNILVSRPEKATHPNTLKASLADFISTFIYIFSDSHSRIAYN

SEQ ID NO: 246441 - protein, 53 aa, Glycine max
  Clone ID: PAT_MRT3847_64568C.1.pep
VLQISFGVRWRTSYLQKLSSMSMRHSQMFDPFAFADVLMARSYGNSVCPGPCE

SEQ ID NO: 246442 - protein, 48 aa, Glycine max
  unsure (1)..(48): unsure at all Xaa locations
  Clone ID: PAT_MRT3847_64569C.1.pep
LHALSXYGAATFTRTGKAAQVTIQSSGTFTSKFQVDNNNRLLLQQVSL

SEQ ID NO: 246443 - protein, 107 aa, Glycine max
  Clone ID: PAT_MRT3847_6456C.1.pep
EKKENTYSHPIQTIRVGDHTYLSPTKLNDPLAGANKQTINWLDHSLHSLFHPNSIAGKTLFNQTHPLLFNGRSLPPPFLSFTKRGGHNWLRTTRLRGRLKHTPHYLE

SEQ ID NO: 246444 - protein, 160 aa, Glycine max
  unsure (1)..(160): unsure at all Xaa locations
  Clone ID: PAT_MRT3847_64570C.1.pep
MKAALLLSAVASAAVGVVAEDLKIDVTLPVVCDRKTQKGDRVQMHYRGTLKDSGKQFDASYDRGTPLDFVVGSGQVIRGWDEGLLDMCIGEKRLLTIPPEYGYGQRAIGPIPAGSTLVFETELVXIQGVPKPEKIETKVVEGAETAAETISEAVESAASA

SEQ ID NO: 246445 - protein, 52 aa, Glycine max
  Clone ID: PAT_MRT3847_64571C.1.pep
GLLFVGLESPVLFIDRPPLKKTIVSLCRSHSKFFNTHLMAFHVRCSFCKERL

SEQ ID NO: 246446 - protein, 55 aa, Glycine max
  Clone ID: PAT_MRT3847_64572C.1.pep
GESCTCSTLRKIFPGLHALSSGGALFFFFFERNFKMSMRSEIYGLEQFWGLTTFQ

SEQ ID NO: 246447 - protein, 65 aa, Glycine max
  Clone ID: PAT_MRT3847_64573C.1.pep
GSSGSRRLRYDVCWGSKLGLMTHSASLVCLYLSLAILLASGTAASATPRSVVTCHHVSSGIRSLL

SEQ ID NO: 246448 - protein, 217 aa, Glycine max
  unsure (1)..(217): unsure at all Xaa locations
  Clone ID: PAT_MRT3847_64574C.1.pep
ARNSARVCVLGSIAGSVLRASATWTCVAGRAGRKGAGWECGGARSFSSAAVTMAPIKVGDTIPSVEVFEGEPGKKVNLAELFKDKKGVLFGVPGAFTPGCSKTHLPGFVEQAGALNAXGAQVVACLSVNDVFVTADWGRAHQAXCKVQLLADPTGAFGKETDLLLDDSLVSLFGNRRLKRFSMVIDKGVVKALNVEPDGTCLTCSLAPNILSQLLSP

SEQ ID NO: 246449 - protein, 178 aa, Glycine max
  Clone ID: PAT_MRT3847_64575C.1.pep
VRNSRVDPRVRSVRSTIKRSLSDGNILSESDTTIRNLNVTNGQNSSEKPDKRFLSGSTPDIFTCGSDICHCRQIYVKGQICESDHICYDEHGDACDCSNFLDVDWLSSSGNSCEEELLERSTSISSENIANELITTETSASESGSSIKGRPSGEELNKDSKYSESFERWITQGEMLFV

SEQ ID NO: 246450 - protein, 232 aa, Glycine max
  Clone ID: PAT_MRT3847_64576C.1.pep
MFEYTALSGPVENEDGEDIPEEEAVCRICLIELGEGSDTLKMECSCKGELALAHQECAVKWFSIKGNRTCDVCKQEVQNLPVTLLRVLNGQTLYLTRSRSQQYRVWQNVPILVIINMLAYFCFLEQLLVSSMGSGAVAISLPFSCILCLLASMTSTIMVTCEHVWVYAIAQFVMVVLAGRLFYSLLNKQAVLSILLATFTGFGAVMCGAYILIEFLKWRRRWLGSQEVVLPH

SEQ ID NO: 246451 - protein, 202 aa, Glycine max
  unsure (1)..(202): unsure at all Xaa locations
  Clone ID: PAT_MRT3847_64577C.1.pep
RFPEEEAVCRICLIELGEGSDTLKMECSCKGELALAHQECAVKWFSIKGNRTCDVCKQEVQNLPVTLLRVLNGQTLYLTRSRSQQYRVWQNVPILVIINMLAYFCFLEQLLVSSMGSGAVAISLPFSCILGLLASMTSTIMVTCEHVWVYAIAQFVMXVFWLGRLFYSLLNKEAVLSILLATFTGFGAVMCGAYILIEFLKW

SEQ ID NO: 246452 - protein, 86 aa, Glycine max
  unsure (1)..(86): unsure at all Xaa locations
  Clone ID: PAT_MRT3847_64578C.1.pep
SSVSADYEMVVEKAINKLTCFITVKRSTPLQSRSAWHSVGSDDVRSKSCRPFVTHKSPXERSHGSYSSLDIAVRRLEPLRADFPSL

SEQ ID NO: 246453 - protein, 110 aa, Glycine max
  unsure (1)..(110): unsure at all Xaa locations
  Clone ID: PAT_MRT3847_64579C.1.pep
VKHIGGALSVAGAQQMTVMDRLMVVCKSSKNALCMFYTLWYKLHHELLRLGFFFDFHRSAQITVTVSSINKMLKRHAXDEAVPLTPHIQMVEVTAPATAETYAAVASAVS

SEQ ID NO: 246454 - protein, 41 aa, Glycine max
  Clone ID: PAT_MRT3847_6457C.1.pep
LGITRATEFSLPSQNCPFVRNWWCPTTLCGRFIPWGVRTHE

SEQ ID NO: 246455 - protein, 106 aa, Glycine max
  Clone ID: PAT_MRT3847_64580C.1.pep
YRLRLVIVLLSIHEDLAGHGHSIAATALTRPTARMEIFIVLLLRPVIATSRVQAWTVHELTMMGSARVALTELVRSGLAYITVYVWDYDTHVVVGSNVRRMGHTLE

SEQ ID NO: 246456 - protein, 88 aa, Glycine max
  Clone ID: PAT_MRT3847_64581C.1.pep
RTNFIQEAPLEEEFPINSNNFWVVLCLCNLILNITLKEAQGDWKEKEKNHIYIHIFWHNSFFCTLSLTENEKYHCIAITDVELMLRLA

SEQ ID NO: 246457 - protein, 68 aa, Glycine max
  unsure (1)..(68): unsure at all Xaa locations
  Clone ID: PAT_MRT3847_64582C.1.pep
CICDVKYGDNSISRGFLSQERLTITATDIVHDFLFGCGQDNEGLFRGTAGLMGLSRHPIXFVQQTSIY

SEQ ID NO: 246458 - protein, 269 aa, Glycine max
  unsure (1)..(269): unsure at all Xaa locations
  Clone ID: PAT_MRT3847_64583C.1.pep
MVSFKNQDIANDPNSFFICSIKMSGSNDGSGSWSSRFLKVASAAAATAAVAGGLYAILSSSTSASSEMEVPFGSARRESKERDDGGSGSHPREGATTVSRWKKPEIGWVKLNVDGSRDPYKSSSAGCGGVLRDASAKWLRGFAXKLNPTYAVHQTELEAILTGLKVASEMNVKKLIVESDSDSVVSMVENGVKPNHPDYGVVELIRTKRRRFDWEVRFVSVSNKANRVADRLANDARKLACDDVCEEYLHPPANCNQLLLEDEIGCESF

SEQ ID NO: 246459 - protein, 67 aa, Glycine max
  Clone ID: PAT_MRT3847_64584C.1.pep
SIFAFSMQAMLFPLDCSCRQRNYILCLYLFFLYKKNKLLRDYHMYAWLHGSLRFSLMHLRFIIKVKE

SEQ ID NO: 246460 - protein, 107 aa, Glycine max
  Clone ID: PAT_MRT3847_64585C.1.pep
GLIPRENNQRAPFFSRSPNFPQQKAANKPKVEALPFYSLTPPGETRGAPFRGFGPGPKGKISPLKTCFGPSIRKALSFNPFFFSPPKWAGAWKRLLFGNNLGTPGPL

SEQ ID NO: 246461 - protein, 224 aa, Glycine max
  Clone ID: PAT_MRT3847_64586C.1.pep
MAALRKAVFFVIAQCFTFSAYAARFEITNRCTYTVWAASVPVGGGVQLNPGQSWSVDVPAGTKGARVWARTGCNFDGSGRGGCQTGDCGGVLDCKAYGAPPNTLAEYGLNGFNNLDFFDISLVDGFNVPMDFSPTSNGCTRGISCTADINGQCPSELKTQGGCNNPCTVFKTDQYCCNSGSCGPTDYSRFFKQRCPDAYSYPKDDPTSTFTCNGGTDYRVVFCP

SEQ ID NO: 246462 - protein, 163 aa, Glycine max
  Clone ID: PAT_MRT3847_64587C.1.pep
TCEKTTEGKESNNDSVSVGGLLGECDIFDGKWVRDEFKPYYPLGSCPNVDRDFDCHLNGRPDSDYVKWKWQPNGCDIPSLNATDFLEKLRGQKLVFVGDSLNRNMWESMVCILRQSVKDKERVFEISGKTEFKKKGVYAFRFEDYNCSVDFVRSPFIVQESTF

SEQ ID NO: 246463 - protein, 354 aa, Glycine max
  Clone ID: PAT_MRT3847_64588C.1.pep
MALSFRPVIHPRVTDRSLFQFLPPKPPPLPTSPPPSVLLPLTRRRGGFLPSCLSDDAVSTRNFDRGFTVIAAMLRRIEPLDNSAISKGVSPAARDSMKQTISTMLGLLPSDHFAVTITVSKHPLHRLLFSSIVTGYTLWNAEYRMSLARNLDMSGSRNEGSDCETCSEVLEVKDVAKTVGDEKIDVVNDLESCSSSGSLKEFGDLPSQALSYIQQLESELTSVMEELNAQKQEMMQLEYDKGKWNNLLEYLRSLDPNMVTELSRPSSLEVEDIIHQLVQNILRRFFVDDGSSSFMEQSVEGNVDNRAGSGDELSNTIATSRDYLAKLLFWCMLLGHHLRGLENRLHLSCVVGLL

SEQ ID NO: 246464 - protein, 134 aa, Glycine max
  Clone ID: PAT_MRT3847_64589C.1.pep
KKGGVLKKGSPQKKHKPQPLCGNPPPNYKKGRRNITLGEKRRITKQCPLNKQGQKKFILGKNGKRENPKRKPKAPRPPGRQRQFGGKNLNKGGNKNPGRTPDGGKTHPFPPGRPPPTGRAIIKTRAIWIPQTIG

SEQ ID NO: 246465 - protein, 102 aa, Glycine max
  unsure (1)..(102): unsure at all Xaa locations
  Clone ID: PAT_MRT3847_6458C.1.pep
IANTQRPKISGQSSKTIMLKCISFKSSTSSSTIPNPSQEGTPSISREYNLAVHTTSYTEIRSNVEAQLHHLNPNRDRVQDALTLIPTRLTRXXLTFFDHTET

SEQ ID NO: 246466 - protein, 115 aa, Glycine max
  unsure (1)..(115): unsure at all Xaa locations
  Clone ID: PAT_MRT3847_64590C.1.pep
MDGQSLYSLVFLVLALAIVNTVHGQGTRVGVYSSTCPRAEFIVRSTGQSHVRSDPTLGAGTLPMHLHDCYVQGCDAYCLIVGDGTDRTAFANLALRGFDVTDNAXTQLEASCPRG

SEQ ID NO: 246467 - protein, 110 aa, Glycine max
  unsure (1)..(110): unsure at all Xaa locations
  Clone ID: PAT_MRT3847_64591C.1.pep
MSMSFLFTFTIIISFGLCILYASAELQKLSHSSKHDGALSFLVLADWGRRGAYNQSQVSFQMEKVXEKXDIDFGVSTGDNXFDKGLTCDHDNPFQGXFTQIYTXKKLCKK

SEQ ID NO: 246468 - protein, 197 aa, Glycine max
  Clone ID: PAT_MRT3847_64592C.1.pep
SQTNLSYFSFKAHSESIALFFPLQELIGLGARTLMVPGNLPIGCSVIYLTIYETIDKTQYDQFGCLKWLNEFGEYYNHKSHRFGAKLRVFHPRANIIYADYYNAALPLYRDPTKFGFTDLKICCGMGGPYNFNKLTNCGNPSVIACDDPSKHIGWDGVHLTEAAYRFIAKGLIKGPYSLPQFSTLCFRNVSFGYFNS

SEQ ID NO: 246469 - protein, 60 aa, Glycine max
  Clone ID: PAT_MRT3847_64593C.1.pep
ESNCHGLVCHVCPFKFNCLSQGLTLKCQILIIYILIPQTLYFIDGISVKCWLYENILHWR

SEQ ID NO: 246470 - protein, 59 aa, Glycine max
  unsure (1)..(59): unsure at all Xaa locations
  Clone ID: PAT_MRT3847_64594C.1.pep
NAQQEHALAVEHLTPXLAALRMDLYPKYISNSNFXKIYFILIHPKLXKTNTTILSTPQV

SEQ ID NO: 246471 - protein, 92 aa, Glycine max
  unsure (1)..(92): unsure at all Xaa locations
  Clone ID: PAT_MRT3847_64595C.1.pep
TRAIVRYDWDVSVDGKSVNHTDGMXIVPSVDAYQDGNCDEEDAIDEGYFGTLSARSHAPMVSGLDGAQICKGXCADAESVTQCDNVWTLEMR

SEQ ID NO: 246472 - protein, 51 aa, Glycine max
  Clone ID: PAT_MRT3847_64596C.1.pep
CIHINQGINCTNIYLIVNSTLIKGTKLNNNRHFNGSVRRDFFFIFFPLLFL

SEQ ID NO: 246473 - protein, 45 aa, Glycine max
  Clone ID: PAT_MRT3847_64597C.1.pep
SSSLASDRPLQYINNSCIHGYLCFNSKALVYIMHSVPDHRLGRSI

SEQ ID NO: 246474 - protein, 126 aa, Glycine max
  unsure (1)..(126): unsure at all Xaa locations
  Clone ID: PAT_MRT3847_64598C.1.pep
GGFFLRDAGFFSRLAGQVAXSLFTSLRVLEDQVYRXNRFEAFHSGSQDVAIKCKAGVDGXMSLDQTXLAMLSSCIACLRLGNTDAQILMGPGRIFIAHGHFFKNLIQKVAVQIVTSEKSXWGVFDP

SEQ ID NO: 246475 - protein, 49 aa, Glycine max
  Clone ID: PAT_MRT3847_64599C.1.pep
SGHLQVLPTDLFHQVDHLQQTSVIVNSLNAQSSPAWAPLSSPLGRVRTP

SEQ ID NO: 246476 - protein, 129 aa, Glycine max
  unsure (1)..(129): unsure at all Xaa locations
  Clone ID: PAT_MRT3847_6459C.1.pep
IQDELLWLFLSCSVNVKNLNLSASKFTVIPECIKDCRFLTTLTLDYCDRLQEIRGIPPNLKYFSALGCLALTSSSISMLQNQELHEVGDTFFILPSGKIPGWFEXSRGPSIFFWFRNKFPAIVVCFVRK

SEQ ID NO: 246477 - protein, 44 aa, Glycine max
  Clone ID: PAT_MRT3847_645C.1.pep
VPPHIDFALVSANIIVRAILTNPELRVVSRSDDRSSFPIHYTAE

SEQ ID NO: 246478 - protein, 72 aa, Glycine max
  Clone ID: PAT_MRT3847_64600C.1.pep
LEVAFTDCPGPQSESAGKSDACEGCPNQQICATAPKGPDPGTLHLYLIILCFFPETINFFKMALFIYVKYMI

SEQ ID NO: 246479 - protein, 56 aa, Glycine max
  Clone ID: PAT_MRT3847_64601C.1.pep
TEKNGGDHIAESMSKFISHAFHILSSQISTLSIVHVYKDKLDNKQNIRTRPARAPH

SEQ ID NO: 246480 - protein, 61 aa, Glycine max
  unsure (1)..(61): unsure at all Xaa locations
  Clone ID: PAT_MRT3847_64602C.1.pep
XTFERFYXIEILKXTGINXRXFXDXHXLGXQFNWXGRMVSXKWSXNSHXLXIXELXDXLLG

SEQ ID NO: 246481 - protein, 150 aa, Glycine max
  Clone ID: PAT_MRT3847_64603C.1.pep
LCYIFFSSIYSDDSYYPALKQQGAPPEKRRKDKAKQSTPRQGEEVVFPPPVPQKKKRGLPQKKTMGDKKKKSEARPGGCPGHPTKSKRPRPPCGTNTEPPPLLWRTPSQDIMPPPTPRAAHRIQWGGRGPNFRHAQPKKTPRGGGEKEFL

SEQ ID NO: 246482 - protein, 785 aa, Glycine max
  Clone ID: PAT_MRT3847_64604C.1.pep
MDAASQLVSCGIDPFHRASSPSPRHRRHSNLLLLRRRSSRVFAVSAEPKPAVNGANSRPPPTRAVNGGVSTRIGDVSKEIKRVRAQMEEDEQLATLMRGLRGQNLRDSLFAEDDVELRLVEVDESSEFLPLVYDPASISAYWGKRPRAVATRIVQLLSVAGGFLSRIAGDVINKKVKENEVARAIELREIVTSLGPAYIKLGQALSIRPDILSPVAMTELQKLCDKVPSFADDVAMALIEEELGQPWQNIYSELSSSPIAAASLGQVYKGRLMENGDLVAVKVQRPFVLETVTIDLFIIRNLGLALRKFPQVSIDVVGLVDEWAARFFEELDYVNEGENGNRFAEMMRKDLPQVVIPRTYHKYTSRRVLTTEWIDGEKLSQSTESDVGELVNVGVICYLKQLLDTGFFHADPHPGNLIRTPDGKLAILDFGLVTKLTDDQKYGMIEAIAHLIHRDYPAIVKDFVKLGFIPDGVNLEPILPVLAKVFDQALEGGGAKNINFQELASDLAQITFDYPFRIPPYFALIIRAIGVLEGIALVGNSEFAIVDEAYPYIAQRLLTDESPRLRDALRYTIYGKSGVFDAERFIDVMQAFENFITAAKSGGGENMNGNMAELGILSTSQSEYLLPGFQSVIPLSQQPVQTRAALAFLLSDRGNFFREFLLDEIVKGIDAVTREQLVRVMSLLGVQNVTPVFSMVPTVGPFKPAALIPTITEEDEVILNNVQMVVEFLTAGSSLSRTSGQALNIPQIIQELLPVLPGISVKVLPEVVSRLSSRVLARLIRDTFL

SEQ ID NO: 246483 - protein, 121 aa, Glycine max
  Clone ID: PAT_MRT3847_64605C.1.pep
IVKGIDAVTREQLVRTMSLLGVQNATPVFSMVPTVGPFKPAALIPTITEEDEVILNNVRMVVEFLTAGSSLSRTSDQALNIPQIIQELLPVLPGISVKVLPEVVSRLSSRVLARLIRDTFL

SEQ ID NO: 246484 - protein, 137 aa, Glycine max
  Clone ID: PAT_MRT3847_64606C.1.pep
ASYGSCPSIKNILLLDSEGKRVAVKYFSDDWPTNNSKIAFEKFVFSKTVKTNARTEAEITLLDNNIIIYKFVQDLHFFVTGGDDANEIILASVLQGFFGAITLLLRNNVDKREALENLHLILLCLDEIDDGGIILET

SEQ ID NO: 246485 - protein, 42 aa, Glycine max
  Clone ID: PAT_MRT3847_64607C.1.pep
NMFNLALISGSHKAWSVTTKSKCMGVSLGIIDIIALIRHTNQ

SEQ ID NO: 246486 - protein, 477 aa, Glycine max
  Clone ID: PAT_MRT3847_64608C.1.pep
MYSGSSDGESHDAPQNQRKIPPASSMLWVRNLRRFIGSGAGLGSEALMELETKRILLDIFKEKQKKTAEAATIPTFYKKKPEDGSISHRVQRLAKYRFLRKQSDLLLNADDLDAMWVCLRENCVIDDATGAEKMNYEDFCHIASVCTEQIGPKCRRFFSPSNFMKFEKDEQGRIAILPFYLYVMRTVSLTQARIDMSELDEDSDGFLQPHEMEAYIRGLIPNLAQLRDMPAAFVQMYCRIAAHKFFFFCDPHRRGKACIKKVLLSNCLQELMELHQESEEEVTDTEQAENWFSLTSAQRICDMFLALDKDTNGTLSKQELREYADATLADIFIERVYDEHVRRGKSGGGNAREMDFESFLDFVLALENKGSSKRLTYLFRCLDLQGRGYLTTADVHSLFRDVHHKWIEGGNYELCIEDVRDEIWDMVKPEDPLKITLADLLACKQGGTVASMLIDVRGFWAHDNRETLLQEEEPEEE

SEQ ID NO: 246487 - protein, 155 aa, Glycine max
  unsure (1)..(155): unsure at all Xaa locations
  Clone ID: PAT_MRT3847_64609C.1.pep
AGFHHIDSAHVYNNEEQVGLAIRSKIADGSVKREDIFYTSKLWSNSHRPELVRPALERSLKNLQLDYVDLYLIHFPVSIKPGEXVIPKDENGKILFDTVDLCATWEAMEXCKDAGLAKSIGVSDFNHRLLQMILIKPGLKYLGSDLGKPNSSSLA

SEQ ID NO: 246488 - protein, 61 aa, Glycine max
  unsure (1)..(61): unsure at all Xaa locations
  Clone ID: PAT_MRT3847_6460C.1.pep
THRDHSIAPKRLLCDLRDLPRDPTTKCIAYPISEDMPHXYVTLMSPAHRTYALRVLLMTNH

SEQ ID NO: 246489 - protein, 217 aa, Glycine max
  unsure (1)..(217): unsure at all Xaa locations
  Clone ID: PAT_MRT3847_64610C.1.pep
AAAFVQMYCRIAAHKFFFFCDPHRRGKACIKKVLLSNCLQELMELHQESEEEVTDTEQAENWFSLTSAHASXDMFLALDKDTNGTLSKQELREYADATLADIFIERVYDEHVRRGKSGGGNAREMDFESXFLDFVLALENKDTPEGLTYLFRCLDLQGRGYLTTADVHSLFRDVHHXWIEGGNYELCIEDVRDEIWDMVKPEDPLKITLTDLLACKQ

SEQ ID NO: 246490 - protein, 92 aa, Glycine max
  unsure (1)..(92): unsure at all Xaa locations
  Clone ID: PAT_MRT3847_64611C.1.pep
AYDYIGTEHGQIIKSSDLEXTFRHLLIAFGGLAGLEESIEEDDNLKGKKAQDAFNLYLNTCPHQGSRTIRTEEAIFISLQYFQEPISRAFQC

SEQ ID NO: 246491 - protein, 53 aa, Glycine max
  Clone ID: PAT_MRT3847_64612C.1.pep
KTKANIRRVRQGILFFIESPKFNHRTGVLKGLEWKNLVCTKINALRTNPFFTL

SEQ ID NO: 246492 - protein, 61 aa, Glycine max
  unsure (1)..(61): unsure at all Xaa locations
  Clone ID: PAT_MRT3847_64613C.1.pep
AKKRPQEXHNSKAGAINSLLTVYFNITKGKIMLRGDXDMCSNNSLFGRDALCYCMDDHKGQ

SEQ ID NO: 246493 - protein, 39 aa, Glycine max
  Clone ID: PAT_MRT3847_64614C.1.pep
GSQSNNNGYNAAATGIGKKIIPKGKGGFQITIVDALDGP

SEQ ID NO: 246494 - protein, 142 aa, Glycine max
  Clone ID: PAT_MRT3847_64615C.1.pep
PFGEYGPTRPTPMRKLIPQENDPDYEKFIQNPQLVFLSSLPIQLQATKVMAVQDTLSTHSPDEEYLGHLKPLQNLWINVHEIMELFNKFSASLEEIEEIINARTKAPRFKNKSGAGVPPYELLLPSSGPGVTGRGIPTSISI

SEQ ID NO: 246495 - protein, 49 aa, Glycine max
  Clone ID: PAT_MRT3847_64616C.1.pep
VFIGIVEAHALTVHATHWIFKGFQGGNVSPRKTSFSFLKVGLERTVPNL

SEQ ID NO: 246496 - protein, 85 aa, Glycine max
  unsure (1)..(85): unsure at all Xaa locations
  Clone ID: PAT_MRT3847_64617C.1.pep
KSGQTMSRKIQESGWKPXWFRRXGENXTFXYVGGXWXXQNXGXWXXCXXXFXEFNXDSTDPGSFGSGNLYIFSQIELDKVELHTD

SEQ ID NO: 246497 - protein, 84 aa, Glycine max
  unsure (1)..(84): unsure at all Xaa locations
  Clone ID: PAT_MRT3847_64618C.1.pep
GEVTDSIYSGGSFDPLGLADDPKAXAELKVKELKHAVLAMFSMGGFFVQAIVTDXGPLENLADHLTDPVDNNAWAYASIFVPGK

SEQ ID NO: 246498 - protein, 70 aa, Glycine max
  Clone ID: PAT_MRT3847_64619C.1.pep
LRQRKMHYERHWLIRFTSANILWNRHIEISVRVQDISLKINGVEMCMLGIPWKAFCARTEYFNCHYQQRW

SEQ ID NO: 246499 - protein, 82 aa, Glycine max
  Clone ID: PAT_MRT3847_6461C.1.pep
EHHFESKADAGASNTYPQQATTIHKNGYILIKGHPYKVIKFSTSKTVKHSHTKFHFIMINISTANKLKDIIPSSHNYNVPHV

SEQ ID NO: 246500 - protein, 76 aa, Glycine max
  Clone ID: PAT_MRT3847_64620C.1.pep
QKVFKISRGRFRVSKGRPPPRGDFFLEIFRASVGAPPPKGGFVFSFSLLKKKYPRLDHFRPPPFFGFFFPRLKYSP

SEQ ID NO: 246501 - protein, 451 aa, Glycine max
  Clone ID: PAT_MRT3847_64621C.1.pep
MLDNNNCSASNSGAPSSSDAAFALSENGVANNKRKRRPAGTPDPDAEVVSLSPTTLLESDRYVCEICNQGFQRDQNLQMHRRRHKVPWKLLKRETAQGGHQKKRVFVCPEPTCLHHDPCHALGDLVGIKKHFRRKHSNHKQWVCDKCSKGYAVQSDYKAHIKTCGTRGHSCDCGRVFSRVESFIEHQDACTVRQHRPELQALQPACSSRTASSASPSSEANFSIAPPLQGLPVLPKPAEQQQQPATTTVLLTSEIHGNKSTTSHNLELQLLPSSTNSQAKRNTKENYGLKLSIGSCSNDKGNSSEPPERACSEAHRSPPERNNNNNNNNVSDYSTLEVARLQEFAGEELKLAIAEKAYAEEARREAKRQIEIAELEFENAKRIRKQAQAELSRAEELRKQAIKKIGSTVMEIACHTCKQQFQSSTVGVPSSEETSIVMSYMSSATTEGEAE

SEQ ID NO: 246502 - protein, 235 aa, Glycine max
  unsure (1)..(235): unsure at all Xaa locations
  Clone ID: PAT_MRT3847_64622C.1.pep
PVLTAMSAGHVLHVFINDQLAGTVWGGLANPKLTFSDNVKLRVGNNKLSLLSVAVGLPNVGVHFETWNAGVLGPVTLKGLNEGTRDLSSQKWSYKVGLKGESLSLHTESGSSSVEWIRGSLVAKKQPLTWYKTTFSAPAGNDPLALDLGSMGKGEVWVNGRSIGRHWPGYIAHGSCNAWDYAGFYTDTKCRTNCGQPSXRWYHVPRSWLSSGGNSMVVFEGWGGDPNGIALVKRT

SEQ ID NO: 246503 - protein, 111 aa, Glycine max
  Clone ID: PAT_MRT3847_64623C.1.pep
MKRISMFKFAGNLDPTYQKTLVNAMISFFEWYNKLHPGRMLTVRDLISWVDFFIAMEESLGPKHALLHGVFLILLDGLSLGIIFLLMIFIYSTSLVSYVISLFFDFIFITY

SEQ ID NO: 246504 - protein, 75 aa, Glycine max
  Clone ID: PAT_MRT3847_64624C.1.pep
DPNTFFCPHTQVLCLNFQASRLVENFGIRCFPHLPILVYGSSCGSTLAIYCPFPFTSSSFSLDLAFARSKGGPYF

SEQ ID NO: 246505 - protein, 37 aa, Glycine max
  Clone ID: PAT_MRT3847_64625C.1.pep
LTVNTCTLEFTSAKLHEINTTMTYFGIFEVIIQIQLS

SEQ ID NO: 246506 - protein, 107 aa, Glycine max
  Clone ID: PAT_MRT3847_64626C.1.pep
GCVGTTFSAPASNDPLALEVGSMGKGEVWVNGRSIGRHWPGYIAHGSCNACNYAGYYTDTKCRTNCGQPSQRWYHVPRSWLSSGGNSLVVFEEWGGDPNGIALVKRT

SEQ ID NO: 246507 - protein, 493 aa, Glycine max
  unsure (1)..(493): unsure at all Xaa locations
  Clone ID: PAT_MRT3847_64627C.1.pep
FYCENFKPNKNTKPKMWTENWTGWXYTDFGGCSPXRPAEDLAFSXVARFIQNGGSFVNFYMYHGGXTNFGRTSGGLFIATSYDYDAPLDEYGLENEPKYEHLRALHKAIKQSEPALVATDPKVQSLGYNLEAHVFSAPGACAAFIANYDTKSYAKAKFGNGQYDLPPWSISILPDCKTVVYNTAKVGYGWLKKMTPVNSAFAWQSYNEEPASSSQADSIAAYALWEQVNVTRDSSDYLWYMTDVNVNANEGFLKNGQSPLLTVMSAGHVLHVFINGQLAGTVWGGLGNPKLTFSDNVKLRAGNNKLSLLSVAVGLPNVGVHFETWNAGVLGPVTLKGLNEGTRDLSRQKWSYKVGLKGESLSLHTESGSSSVEWIQGSLVAKKQPLTWYKTTFSAPAGNDPLALDLGSMGKGEVWVNGRSIGRHWPGYIAHGSCNACNYAGYYTDTKCRTNCGQPSQRWYHVPRSWLSSGGNSLVVFEEWGGDPNGXALVKRT

SEQ ID NO: 246508 - protein, 127 aa, Glycine max
  Clone ID: PAT_MRT3847_64628C.1.pep
MTSTATLEARIKSYKGRKNKWPYKRKDTVPLDKLAIAGFIHKPLSNHTDNVECFLCETAVNGWDSHDNDPFRRHIQHAPACAWAMLICVRRGRVPSLDSSGENVQNNQFDSTVDAELMQYLKGQLIE

SEQ ID NO: 246509 - protein, 90 aa, Glycine max
  Clone ID: PAT_MRT3847_64629C.1.pep
RCLNWTVSALIAAFLCSPCSLFMFFMILQLFKSPSTCNFFDWDKGPVNVIGANVDGRQMAVADPSQGIFFRTKQQLEQQLKKAQRKIIKL

SEQ ID NO: 246510 - protein, 31 aa, Glycine max
  Clone ID: PAT_MRT3847_6462C.1.pep
SDVQEPHISQIPLQLQTRYILEGKKQVTCHK

SEQ ID NO: 246511 - protein, 48 aa, Glycine max
  Clone ID: PAT_MRT3847_64630C.1.pep
PNRFPISSQERDGRLSQLTRRQNGKGSLTWRSISMVTPPGSTEFGRAQ

SEQ ID NO: 246512 - protein, 76 aa, Glycine max
  Clone ID: PAT_MRT3847_64631C.1.pep
TNAYADEEDVKCCDTKLCWLLFVNEIIYKKTCFGGRGNHIMSLLESDIKEIYILQASLSLHTSPLFFRASNISSIG

SEQ ID NO: 246513 - protein, 72 aa, Glycine max
  Clone ID: PAT_MRT3847_64632C.1.pep
HYILKWDLQWKQTDGGCHLRNNIIFSNGIFNGNKLMEDAIFLFLTWLRNYEKDFVTNYNQWSSNLIEAFAVR

SEQ ID NO: 246514 - protein, 69 aa, Glycine max
  Clone ID: PAT_MRT3847_64633C.1.pep
PFLPLKFNLASHGGDFWDPKWLPKPFFLVYKGSYSQNWQLNLPKTVPPLNNRRVLNLPGWAFFFTHLPF

SEQ ID NO: 246515 - protein, 121 aa, Glycine max
  unsure (1)..(121): unsure at all Xaa locations
  Clone ID: PAT_MRT3847_64634C.1.pep
XDXGXXXXXAXWXRXHXGXXXXXXXXXXHXXXXXXXPXXXRXAXGLLRQXXXVGXXXXXXXXHXXVPXTXCXXWXXXXKXTXRXGXXXWXGXXXHGXXRXXXXXGKREXLLGXCRXTSLGX

SEQ ID NO: 246516 - protein, 56 aa, Glycine max
  Clone ID: PAT_MRT3847_64635C.1.pep
SVASQDKELQDYLTQMEDIGKNETVLLRDLTITNNLTFCRRNLEKCAPNYPTFWAT

SEQ ID NO: 246517 - protein, 177 aa, Glycine max
  Clone ID: PAT_MRT3847_64636C.1.pep
GFASSPPLFPPSSSSSPTSLKQFSHSISHKLHVTNYLLWLQQVELVIKSRHLHHFLVNPLIPKKYALVKDCDSDTTTEVYHGWKEQDQFFLAWLRSTIYGDMLTHVIGCKSSWQLWDRLQLHFQSLTRARVRQLRNELRCLSHGNRSTTGYLLYVQNPVYEITWISESMSSSNKHLN

SEQ ID NO: 246518 - protein, 118 aa, Glycine max
  Clone ID: PAT_MRT3847_64637C.1.pep
FLVSAGGCRRVVFCFLVSFSADIVLICPLVRFSSGVPCRPFSSPPFFVPPLSPRAVPCLLFPGLLRAWCLCVGARAALFGGVLGSRCSPFLRGVCGFGLLEPCLVSGRPLPWVSSARG

SEQ ID NO: 246519 - protein, 99 aa, Glycine max
  Clone ID: PAT_MRT3847_64638C.1.pep
FCLFFFFFFFGFFSTLTFFFIICKKQCGTQKTTRLKMAKENDALKPPPPQRMKASQNRPKHKKTVTERTIGDRPKISLIARPRPKNWANTLGPLKSEPS

SEQ ID NO: 246520 - protein, 75 aa, Glycine max
  Clone ID: PAT_MRT3847_64639C.1.pep
EFEVPEDFITIGAIKIENQHRIEVFVESVVIESAPIVPITVPCESWVHSKFTNPESRVFFDDKVSCLPSQTPSGL

SEQ ID NO: 246521 - protein, 72 aa, Glycine max
  unsure (1)..(72): unsure at all Xaa locations
  Clone ID: PAT_MRT3847_6463C.1.pep
NHGRANQLIQLDDSNISTVIVXSPGVCINSGSXTVIPGYCRFNIALEEHESNRALDCILQFKIVALGENFVF

SEQ ID NO: 246522 - protein, 53 aa, Glycine max
  Clone ID: PAT_MRT3847_64640C.1.pep
MMGVLSNQSTNKRDIKDPEHPYSLEELKVITEEAVEVDDQRNYVRVTFTPTVE

SEQ ID NO: 246523 - protein, 124 aa, Glycine max
  unsure (1)..(124): unsure at all Xaa locations
  Clone ID: PAT_MRT3847_64641C.1.pep
ICLAVICFSALALSPGLAEDTGLAMNFYKDSCPHAXDIIIEQAPLLYMRHRNTAVYCLIDISHDCAAHSCDASLLLDSTXWSLSVTDTDGSCALRNFKYIETMIEALDRECPXVVSCADILVLS

SEQ ID NO: 246524 - protein, 73 aa, Glycine max
  unsure (1)..(73): unsure at all Xaa locations
  Clone ID: PAT_MRT3847_64642C.1.pep
LRSASANDIHFVLNFINDGLTRSSHLETVNVICFSGYLYVLLCHCQPVILDYLASKTICSDDXVVVSPDVGGV

SEQ ID NO: 246525 - protein, 143 aa, Glycine max
  unsure (1)..(143): unsure at all Xaa locations
  Clone ID: PAT_MRT3847_64643C.1.pep
EPRLPVLVLGLDTLASXCVLLGSAYCEKGNPKHNMXSRSCNNQRGWYRXNQACHARCNLLKVEKEECEXGEIPPARPRPQHPEREPQQPGEKEEEEDEQPRPIPFPRPQPRQEEEHEQREEHEWPXREEKRGEKGXQQEDEDE

SEQ ID NO: 246526 - protein, 221 aa, Glycine max
  unsure (1)..(221): unsure at all Xaa locations
  Clone ID: PAT_MRT3847_64644C.1.pep
MAVAENVGAKIGSSSQNLENNVVSSNSGEVEQSKPRSGSINDDQKLNNGVFNHQDRVPGTMPVPNSNYNYEAQMGQMHTNGVNNDGYGMNGVICGENGGESFKRDMRDLEELLSKLNPMAEEFVPPSLTNTHGYLPGPGAGAGAGFGYPXNFILLNNFGDANGQTNRRRKNGYNHGKRRVNHKMDMEKREEMIRRTVYVSDIDQLVTEEQLAXLFLNCGQV

SEQ ID NO: 246527 - protein, 89 aa, Glycine max
  Clone ID: PAT_MRT3847_64645C.1.pep
GLGPKKSLAEAVNTVINLLGLEPCEGTEEVPPNSRSHTCLLSGVFIGNVKVLVRLSFGLDGPKDVAMKLSVRSEDETVSDAIHEIVASG

SEQ ID NO: 246528 - protein, 56 aa, Glycine max
  Clone ID: PAT_MRT3847_64646C.1.pep
TKSGQGHHSRSLWPAQRVVFFPLSNRTHRSRPNLRDSCNQVTIAFVSGFKVRRPED

SEQ ID NO: 246529 - protein, 211 aa, Glycine max
  Clone ID: PAT_MRT3847_64647C.1.pep
MEKGGKGASLFSKGGLGSLKGKDDIATKSAKGRRVQFSTDGPLFESGVSSNSATSLKSGGKGGMGDNVAKGGKNSQSKDSHPSDYRVDQKLPENIKCLMDCEAVDILQGIQERMVMLSRDSTVKMPISFDKGLQYAKSNSKYLDLQSIRHILDRLAKCGVTDSEICVIGNVCPETIDEVFALLPSLKDRRNIDSQVLKDSLSELAKFRQTM

SEQ ID NO: 246530 - protein, 61 aa, Glycine max
  Clone ID: PAT_MRT3847_64648C.1.pep
STEKLSYLDNVTKLDNVVPKILWITRKSYAQHSRHTKTNVGPQKKGYCINPNTNKGIGMNL

SEQ ID NO: 246531 - protein, 204 aa, Glycine max
  Clone ID: PAT_MRT3847_64649C.1.pep
MYSQSSYCVHQFGNIAFERILITIFKLIAHNFLAFLVKLLFTGLLFFFHGDFIEGGKGDNVANGGKSSQSKDSHSSDHRVDQKLPENIKCLIDCEAVDILQGIQERMVMLSRDSTIKMPISFDKGLQYAKSSTKYTDLHSIRRILDPLAKCGLTDSEICVIGNVCPETIDEVFALLPSLKDKRNIDRQVLKDSLSQLAKFRQSM

SEQ ID NO: 246532 - protein, 92 aa, Glycine max
  Clone ID: PAT_MRT3847_6464C.1.pep
TQAPHGPHASHETASCVAAQGEKGKKQNHFAIDYGFNAIVAAANGSKLTILKSPTGREIEAHYELGRELDHSEFGITYLCTNKELGISYGCR

SEQ ID NO: 246533 - protein, 135 aa, Glycine max
  Clone ID: PAT_MRT3847_64650C.1.pep
MGLEFLSLFQLETKRLLWLIGITFAVILTFQYLEFPYGTVLLSLFSAEKIPTPGSSTFKASDAPSISELVNNVTLFNPANSTGDHAFEIANKTKSGENDTIPRIGLVLEPGSTPNNSLGLDGSDQSSKTKSINRS

SEQ ID NO: 246534 - protein, 98 aa, Glycine max
  Clone ID: PAT_MRT3847_64651C.1.pep
PGAKSICLSFSNLGSFWELPSPAISSCDGSGRTLLERLISVDAESGRTQGNVFEDGGTNCQFGFSKFNLSTVCWKVRSKFELDVNGVPHCVQGKSPLR

SEQ ID NO: 246535 - protein, 56 aa, Glycine max
  Clone ID: PAT_MRT3847_64652C.1.pep
EGKHTMGGKTILNYSPKGGSLRPKNTWLFLERCPCNSQGDTIIVVNLSTLATRLQG

SEQ ID NO: 246536 - protein, 231 aa, Glycine max
  Clone ID: PAT_MRT3847_64653C.1.pep
MGLEFLSLFQLETKRLLWLIGITFAVILTFQYLEFPYGTVLLSLFSAEKIPTPGSSTFKASDAPSISELVNNVTLFNPANSTGDHAFEIANKTKSGENDTIPRIGLVLEPGSTPNNSLGLDGSDQSSKTKSINRSENVAETPQGGDPGPISFNNTIDLSFSANQFQEDNISSTEQKSGSQYASSTNVSTNIVTAVLSNDSSISLFQKDHTTNSIKEESIRSSNDAKVSVPN

SEQ ID NO: 246537 - protein, 178 aa, Glycine max
  unsure (1)..(178): unsure at all Xaa locations
  Clone ID: PAT_MRT3847_64654C.1.pep
KKDMPNEIAMKCKDLKEELESKSTKXXLLEELLXXTASSYGEKKIKQEDLALAAGKLAECQKTIASLGNQLKSLATLEDFLIDTASIPASPSLIGQAGGELWKLHSNGTFLPKRDSICSRLADGSSYPSLNKNEETSPLSSSSSTSSPALQNHVSSERSRNGFAKFFSRTKSGIRLEI

SEQ ID NO: 246538 - protein, 65 aa, Glycine max
  Clone ID: PAT_MRT3847_64655C.1.pep
PLNNTLSLNFCAPNMPIISSYFNGFVIHICSATVDSSAYSHEIAFRCILVTNHNMTVTAKIVMII

SEQ ID NO: 246539 - protein, 132 aa, Glycine max
  Clone ID: PAT_MRT3847_64656C.1.pep
PNLLEGNITVHKFVGRLDNSAISATGAKLAFKSNEEIAFQVRTVPLDEVIPKSERVLLLKIDVQGWEYHVLKGASKLLSRKGSQAPYLIYEEDERLLRASNSSAKEIRDFLRSVGYHDCTQHGTDAHCVKKD

SEQ ID NO: 246540 - protein, 76 aa, Glycine max
  unsure (1)..(76): unsure at all Xaa locations
  Clone ID: PAT_MRT3847_64657C.1.pep
MVLTAEGCLISGAKIYAXKGNRFVRGDSQVFLFASSKCSRYFDNRLKPSNLTWTAMYMQHVNFDIAQEAVMKTISA

SEQ ID NO: 246541 - protein, 78 aa, Glycine max
  unsure (1)..(78): unsure at all Xaa locations
  Clone ID: PAT_MRT3847_64658C.1.pep
FERFFPQXSARLSVPGGPSVACSTAKAVEWDAAWSNNLDPSXRAALGVHASAYGNQVKAVEPEKXIHTMEVSPXGVAI

SEQ ID NO: 246542 - protein, 78 aa, Glycine max
  unsure (1)..(78): unsure at all Xaa locations
  Clone ID: PAT_MRT3847_64659C.1.pep
CHPLFKRCEKALKGQAEVIRSMPHGAFILLRELDNIRVLDNKLEGGLEXLLEKADFAIKKEDVMEFCYLPRSTKKSHA

SEQ ID NO: 246543 - protein, 57 aa, Glycine max
  Clone ID: PAT_MRT3847_6465C.1.pep
QTSAYSSGNCCNFLSLNVSKSRNYFVVRGKRLCVSQSLSLDRAKVLPAESIWERLTC

SEQ ID NO: 246544 - protein, 49 aa, Glycine max
  Clone ID: PAT_MRT3847_64660C.1.pep
FSFTFRFVSSSTFIEFLYLDVLVFLMLLGFFSLKVFLFKSCRSFIFFYY

SEQ ID NO: 246545 - protein, 119 aa, Glycine max
  unsure (1)..(119): unsure at all Xaa locations
  Clone ID: PAT_MRT3847_64661C.1.pep
MASVTFAAVLNGLGSIFLRGRNRSRTLLATAVGGKVGAAAVTVXPRTHIAAAAAAPLNSCLPGVRGGGPLVDPQSLDASLPRDCGSHPLXLGKDPAFLKCXTQPQLIHARWAMPALLRI

SEQ ID NO: 246546 - protein, 91 aa, Glycine max
  Clone ID: PAT_MRT3847_64662C.1.pep
VAGNCVGNLLKISVNDSSCLANSLFYASKASYDVSSNKLLFVGMCVLSCKIAWSMTAMFSISSIASSGVFNFVFLPAEPFCRLSQPYSSRI

SEQ ID NO: 246547 - protein, 147 aa, Glycine max
  Clone ID: PAT_MRT3847_64663C.1.pep
MAASGPRPPRTRTTRGPSIRPVYETFEPKSEMKEKEEAYFLHIYLPGFVKEKIKINFVGSSRVVRVAGERPLGGNRISNFEQAYPVPENCEVGKLQGKYELGTLIITMPKKPIISQVSPKAKVETTPRIGPTPLISPPKKSVPDQSP

SEQ ID NO: 246548 - protein, 268 aa, Glycine max
  Clone ID: PAT_MRT3847_64664C.1.pep
MATIILENDPLNWSHAADSLKGSHFEEVKRMVAEYRKPLISLGGGETLTISQVAAVAVANANHNLQAKVDLSESARAGVDASCDWITQNINKGTPIYGVTTGFGAASHRQTQQGLALQKEMVRFLNCAIFGYQTELSHTLPKSATRAAMLVRVNTLLQGYSGIRFEILEAITKLLNHNVTPILPLRGTVTASGDLIPLSYIVALLTGRRNSKAVGPSGESLNAKEAFHLAGLHSGFFELKPKEGLALVNGTAVGSGVASTVLFEANIL

SEQ ID NO: 246549 - protein, 66 aa, Glycine max
  Clone ID: PAT_MRT3847_64665C.1.pep
FHRGPEMFGFMEQFILPLQCLSPFFYYIWVIIYNFCWWHILGPLIIHENVYFFSNPLSLLREFSIL

SEQ ID NO: 246550 - protein, 61 aa, Glycine max
  Clone ID: PAT_MRT3847_64666C.1.pep
TKMTDPDATDLTQLWCCTCIYACVDLYSEVSFVIRFKNVIFLNMLQDIKRINESTATFMIT

SEQ ID NO: 246551 - protein, 78 aa, Glycine max
  Clone ID: PAT_MRT3847_64667C.1.pep
HFVHLFSLLVHCSCNLPVSVMLVPSPLFMLLCCCGDPFFMLLNCLLSSVYVLYAVFEEWVKKKIGQLILHGSTVISPP

SEQ ID NO: 246552 - protein, 57 aa, Glycine max
  Clone ID: PAT_MRT3847_64668C.1.pep
YSLPQGANPTRVYSSISMAGGLSTAPLLKPYNLVQPPIPLSKPTTLLFFNPLKMFPS

SEQ ID NO: 246553 - protein, 48 aa, Glycine max
  Clone ID: PAT_MRT3847_64669C.1.pep
IKLWGLPMNFIPRRGVLYFSSGDPTIFVSPHEMFFHKKGSLPIKFTPK

SEQ ID NO: 246554 - protein, 203 aa, Glycine max
  unsure (1)..(203): unsure at all Xaa locations
  Clone ID: PAT_MRT3847_6466C.1.pep
PGLXPILTLVQAARPSFFFVYSFLFFYFFLFFFFFFFFFLKKKGPPLVKKRGGIIIETPPPGKKKYKKPPLTWALAQPTAKKMLGAGQIQGNPFLWKFRGFLKNPEQYPKLTGNLGPGRQIIRPFSNKLNFSGFRNTRRPKNWKNNFARKAGDPSPNFFNQNCFPIWGGPSQIKNTPLLGKNRFKIQSPPAPFCNDFCPPKAP

SEQ ID NO: 246555 - protein, 116 aa, Glycine max
  Clone ID: PAT_MRT3847_64670C.1.pep
ICFGLITFCMCDPGKVVWCVLVWYRWCKQRVSRAAECQVSRIHTQCQHQGSRGPRRSTRARLSTLLPELGRHGQHSKQLYQLSSQAQPNKPATRHWVYNVKPPPPPSPPSVPRVQA

SEQ ID NO: 246556 - protein, 66 aa, Glycine max
  Clone ID: PAT_MRT3847_64671C.1.pep
FRTRVHFSSFYQSIFCTLFYGHIFGPLNPHHTSKRFLTAVAIIRNHGGMEDLETHHHQHYSIVRKP

SEQ ID NO: 246557 - protein, 65 aa, Glycine max
  Clone ID: PAT_MRT3847_64672C.1.pep
TGGKRTPKGASGSQDMKINTLTVLKKIDHGRVTDFYLLTLHSRAKELLHPYSKEGSNALHSNNRA

SEQ ID NO: 246558 - protein, 435 aa, Glycine max
  Clone ID: PAT_MRT3847_64673C.1.pep
MSIVYSHAVKYSQGETRMNPEMDSNIGQHCHQQNSGLMRYRSAPSSLLTSLANNNNINNNTTTNGCVNGKAFRSVHNHHQQQRYPPSTSSEMETMLAKLISSNNSEPLQVKEEAVASVSQPPQQHNGYSYGSSPQMMYQTQQIQGLSMPNGSLGNAFDGSFSAVNSLASQNSTQPRLGASTNCNNLIRQKSSPAGFFSNYSVDNAMRDVASFRGCDVSNGQAITSSSGLHGGTLNLSSRPSSCSTRMPQIAENGNEDVEANYVESRNLRNDNINTTKCYMPSFTTDFWDGSAFSASRTASNRGEISFSTSKAMDIQDEDFGYQKVGLTHHLSLPGSSSRMATMEKLYQIQGSVPCKIRAKRGFATHPRSIAERERRTRISARIKKLQDLFPKSDKQTSTADMLDLAVEYIKDLQKQVKILRDTRAFGTSTSNQKH

SEQ ID NO: 246559 - protein, 84 aa, Glycine max
  Clone ID: PAT_MRT3847_64674C.1.pep
YQKYIIKQTKSISDFCPVKIRHHCGFFHCVTQYCCWMRMIKDVPYMSSVAETYYKAVADSLGAIIICIPNSTIFVCLLNFLAIN

SEQ ID NO: 246560 - protein, 108 aa, Glycine max
  Clone ID: PAT_MRT3847_64675C.1.pep
NDLDCRCLVSLRNNLLLLNDYVYESEKDNDQYHNRNQYQQNITCHAKATTYEYGEREKATAAAPARGQKQIQTLTETQEDNSHSDSSSSNKNKILAQTATEPKPNPIL

SEQ ID NO: 246561 - protein, 269 aa, Glycine max
  Clone ID: PAT_MRT3847_64676C.1.pep
MADSLNPATALGVGVGVIPLLAATPCLESDNIILGSRTRGGGGIQLWQDHQQHHQSHYMKKQLQQGLLDHYSNTSSGNLIQNSGEVTASGTSSGGTTCQDCGNQAKKDCANRRCRTCCKSRGFDCPTHVKSTWVPAARRRERQLMTSATAAVAGSSGSTSGTKKPRLIASQTTTTSHTSTSNTTPPRSFDTSSSHQDAGFKESLPAQVRAPAALKCVRVTAVDDGQDEYAYQAVVKIGGHVFKGFLYDQGVENTDVSPILSELHLGGGS

SEQ ID NO: 246562 - protein, 66 aa, Glycine max
  Clone ID: PAT_MRT3847_64677C.1.pep
LRWKICPSCSSGSSSSCSSSPCSSSSIHTKAFQDCLNGYGNDISKCQFYMDMLAECRKNSGATLSM

SEQ ID NO: 246563 - protein, 394 aa, Glycine max
  Clone ID: PAT_MRT3847_64678C.1.pep
MSDDEREEKELDLSSAEVVTKYKTAAEIVNKALKLVISECKPKAKIVDICEKGDSYIREQTGNVYKNVKRKIERGVAFPTCLSINNVVCHFSPLASDEAVLEEGDILKIDMACHIDGFIAVVAHTHVLQEGPVTGRAADVIAAANTAAEVALRLVRPGKKNKDVSDAIQKVAAAYDCKIVEGVLSHQMKQFVIDGNKVVLSLSNPDTRVDEAEFEENEVYAIDIVTSTGDGKPKLLDEKQTTIYKRAVDKSYHLKMKASRFIFSEISQKFPIMPFSARALEEKRARLGLVECVNHELLQPYPVLHEKPGDFVAHIKFTVLLMPNGSDRITTHPLQELQPTKTIDDPDIKAWLALGTKTKKKGGGKKKKGKKGEKADESAEAEPMDSTNEATPQE

SEQ ID NO: 246564 - protein, 64 aa, Glycine max
  Clone ID: PAT_MRT3847_64679C.1.pep
FFLCFSCNKYSFDLSYVEKTTTETLVLGVGSVKAQLEGAEMGVAAENGGCNCGSSCTCDPCNCK

SEQ ID NO: 246565 - protein, 69 aa, Glycine max
  unsure (1)..(69): unsure at all Xaa locations
  Clone ID: PAT_MRT3847_6467C.1.pep
FNSIKAWGSQCISWVGPFVGAAVXATFLLSLYENPGCQCLVGNTGFFYLNSKKKKGEGGRCTGFKLACV

SEQ ID NO: 246566 - protein, 62 aa, Glycine max
  Clone ID: PAT_MRT3847_64680C.1.pep
TSALRAYLDILPSFVALTCIPSICLNTMILPSCPALTDLHSTYSNLTIKSHTGRLECHGKIN

SEQ ID NO: 246567 - protein, 82 aa, Glycine max
  Clone ID: PAT_MRT3847_64681C.1.pep
RPNKSFLHARLYEACCYYRGIVRVIGGGRSIGSIATFAYWRPLYSSKVSPRGISLSVFLELHDGETPGVAHLIRLPAYPRFR

SEQ ID NO: 246568 - protein, 394 aa, Glycine max
  unsure (1)..(394): unsure at all Xaa locations
  Clone ID: PAT_MRT3847_64682C.1.pep
MSDDEREEKELDLSSAEVVTKYKTAAEIVNKALKLVISECKPKAKIVDICEKGDSYIREQTGNVYKNVKRKIERGVAFPTCLSVNNVVCHFSPLASDEAVLEEGDILKIDMACHIDGFIAAVAHTHVLQEGPVTGRAADVIAAANTAAEVALRLVRPGKKNKDVSDAIQKVAAAYDCKIVEGVLXHQMKQFVIDGNKVVLSLSNPDTRVDEAEFEENEVYAIDIVTSTGDGKPKLLDEKQTTIYKRAVDKSYHLKMKASRFIFSEISQKFPIMPFSARALEEKRARLGLVECVNHELLQPYPVLHEKPGDLVAHIKFTVLLMPNGSDRITTHPLQELQPTKTIDDPDIKAWLALGTKTKKKGGGKKKKGKKGDKADETTEAEAMDSTNGATPQE

SEQ ID NO: 246569 - protein, 63 aa, Glycine max
  Clone ID: PAT_MRT3847_64683C.1.pep
LPRDIYKLWTKRFLRLGINLHYTRAIHLSKRILIHTTTLIRAALSYLHEYSHRYTHQLSIQKN

SEQ ID NO: 246570 - protein, 138 aa, Glycine max
  Clone ID: PAT_MRT3847_64684C.1.pep
ASRGCKKLGLQLSLPGLYIYKSTDRRSQPALVIIKIIIALSSSRFTTKSTVLHGTSGREIRLVCIVLNEKDPKVCMYGLNRAVKVRLRIRKVETRMRQLLASLSLALTILAWHTFLSNSLGVVCTLIAGHDLIISLMV

SEQ ID NO: 246571 - protein, 110 aa, Glycine max
  unsure (1)..(110): unsure at all Xaa locations
  Clone ID: PAT_MRT3847_64685C.1.pep
SXVXMASAXKTTXYYGXRSXXHXQXXLXXHXXXXXEXSXYXXXLXXXRSAHGSRVSRXXXHRVXYVXXATXLXXXCXXXPXVLLRXEXXXXXXXLXIXXXTXXXDEIXXX

SEQ ID NO: 246572 - protein, 90 aa, Glycine max
  Clone ID: PAT_MRT3847_64686C.1.pep
LAFSVVDIFLSLVLVKQYFLTRIGIRSEDLEDFLERTIKGSGISLSSPRLVIPATIYGLWILFHQYFTNDIFDFQVILGSMYIKKSYLKS

SEQ ID NO: 246573 - protein, 69 aa, Glycine max
  Clone ID: PAT_MRT3847_64687C.1.pep
CTSGDDPNHKTHNYKGEDGLCTTWDNPSRLSTYEQPFVVEDEEVIIFRTLARHHSTPSYALFSPHEQIS

SEQ ID NO: 246574 - protein, 152 aa, Glycine max
  unsure (1)..(152): unsure at all Xaa locations
  Clone ID: PAT_MRT3847_64688C.1.pep
EIGTSFLSSTISFNSAPFLSSTTCFTPSISLSSLTYFTSXTTLSSMTSFTPSTPLSSSTSSTLSCFLSXFTASTPFFLSSFTCSTPYSFVSSLAASTPSSWVTFVTTSTPSSILSYLASFTQSCFLSSLASFTTTIFLSSSTLTHHQLSYLK

SEQ ID NO: 246575 - protein, 55 aa, Glycine max
  Clone ID: PAT_MRT3847_64689C.1.pep
PIIAFPKLFFKPVAMATLGARMVDVSPTVTSAGSLDYETFAFRRRRLTIPYTTSS

SEQ ID NO: 246576 - protein, 75 aa, Glycine max
  Clone ID: PAT_MRT3847_6468C.1.pep
KYNADIIICPQTLFGLRNQHTQGIQGVTTICTPNPTRIDVAVRKPPNCQCTLKKKTTTTPLQVMYDVSVNPLPGG

SEQ ID NO: 246577 - protein, 65 aa, Glycine max
  unsure (1)..(65): unsure at all Xaa locations
  Clone ID: PAT_MRT3847_64690C.1.pep
RVAAXYSLIDTNTVHDGPSNRSTLAMPLWAYTRSVLTDYNRYPLFGNGLDSISSLDNPGPRPIGS

SEQ ID NO: 246578 - protein, 29 aa, Glycine max
  Clone ID: PAT_MRT3847_64691C.1.pep
MRFSLGASPTNSSIVPLEGNFQNFGGKGK

SEQ ID NO: 246579 - protein, 58 aa, Glycine max
  Clone ID: PAT_MRT3847_64692C.1.pep
RPISSSPISSTLTRAYVSNSRWAGSILTHVSSFRPPEPSPHLFKARHFMCVSQFDPRN

SEQ ID NO: 246580 - protein, 125 aa, Glycine max
  unsure (1)..(125): unsure at all Xaa locations
  Clone ID: PAT_MRT3847_64693C.1.pep
HAKSCSDLYNVIGEDFWLATWSYSTAFEWKLLDSTWIYLVNMGELGFVFAIITPCSPARWDDCDEDMTVAWVTLCNAYCGEYYXATDSDTLENVRDAISWMTFYWYNCMPLSRGSAGVGFIVMLG

SEQ ID NO: 246581 - protein, 57 aa, Glycine max
  Clone ID: PAT_MRT3847_64694C.1.pep
ASKRLCYFLDRCFLSRGRVRSYDVEPPYRGRHLKRIDLNGSCPYQWNCSNPRKKKFP

SEQ ID NO: 246582 - protein, 120 aa, Glycine max
  Clone ID: PAT_MRT3847_64695C.1.pep
VELKHAAEGVPEENCSAKPTKQGEGLPHYYALNIHEHQLLLGQMTHDLDRVEAQRIDPHLRVRMHADELQVLLEPGFDVGEVVIVLGNNTDLGKVHPPGTYAVGLGQTIDITMTTPFTRD

SEQ ID NO: 246583 - protein, 71 aa, Glycine max
  Clone ID: PAT_MRT3847_64696C.1.pep
MGLPLYGRTWQLLEPNVHGIGAPASGPGPGSNGAMALFQVLEFNNETGANVVCDKETASVYSYSGSYWVGY

SEQ ID NO: 246584 - protein, 78 aa, Glycine max
  Clone ID: PAT_MRT3847_64697C.1.pep
SGRFCFFFFFFFESQSVKDMSHTHFIYTPTKFHHLCYMRGKSNESLKHGQYIGLTCNALIKKRSFLKQTKGSLVPLYR

SEQ ID NO: 246585 - protein, 250 aa, Glycine max
  unsure (1)..(250): unsure at all Xaa locations
  Clone ID: PAT_MRT3847_64698C.1.pep
MDYERIQKPQGGGGFSPGKLRSMLLGVEKKRKEEEELDSTFTTRSQNSDMDESGGSSSDHCKDVDVVSVLPEYSTSAIVRTSSVEAVGGDRFVKANAGVNSRSRILEDPSSDYDSGHDNMSMSSSMFEFQKAERAPQRVPVGPFSKPAPSKWDDAQKWIASPTSNRPKTVQSQGQGGQSGHVGPRKVGSLGYGSRQSSMKVVVEVPDQKEIALDEPDTKQIDTXQTKMETGGQXXVSWEADPYAIASSCV

SEQ ID NO: 246586 - protein, 176 aa, Glycine max
  unsure (1)..(176): unsure at all Xaa locations
  Clone ID: PAT_MRT3847_64699C.1.pep
VAVLLTRKTDGLLLTGSQDRTVKCWDLSTADLEEPDEKHRFKSHYTIQAHDKDINAIAIAPNDKIFATGSQDKLAKIWNLQEGTLMGTCKGHKRGVWSVQFXPVDQCLATSSGDRTIKLWSLNDFSCLRTFEGHTNSILKVDFLTSGLQLVSCGSDGLVKLWTIRSNECVATLDNH

SEQ ID NO: 246587 - protein, 83 aa, Glycine max
  Clone ID: PAT_MRT3847_6469C.1.pep
FPVDHACAVTVHDDTTHIMIYQYGLYMRAETISYMRYACPPMDTLAIRHSLHTESQAPEPVSVSQYSISVQCYYLSYKHYNDQ

SEQ ID NO: 246588 - protein, 100 aa, Glycine max
  Clone ID: PAT_MRT3847_646C.1.pep
MESSVGGERSGRVALSEVVADCVKRWFRDALKEAKAGDINMQVLVGQMYNSGYGVPRDAQKGRVWVTKASKARSSVWKVGDKHPGYNASDSDSDELKEDS

SEQ ID NO: 246589 - protein, 91 aa, Glycine max
  unsure (1)..(91): unsure at all Xaa locations
  Clone ID: PAT_MRT3847_64700C.1.pep
SHNHFFSPHTKPXRPQNKQKRPAPHNLFTHPPKYSSFFTITHILHPLSTLYSLTNSSFSHTPQXXXHNNTSSIYTSLSTTILILHNTSLTP

SEQ ID NO: 246590 - protein, 144 aa, Glycine max
  unsure (1)..(144): unsure at all Xaa locations
  Clone ID: PAT_MRT3847_64701C.1.pep
RACSSAMXLISTRTSSVITLAKVRMQSDEIVXNVDPAIERIVNLLPXKWGNVRSLHLHPLESVAIPVNQPDPNEEFKIDLFTPQEKHNKKQRHGEVSDSIEGRPHTKNKKKGRIREVRYMHENVGRLGWNLNWRVMTMIVKMRW

SEQ ID NO: 246591 - protein, 97 aa, Glycine max
  Clone ID: PAT_MRT3847_64702C.1.pep
PALVFDGTFICLQFRKSSKAAYGFRRHHPCCSPQCYADPCLFTYNVPHFSKTEKVGVKIVSSRDFIRLGSQWPFLFPPKYIRRCPTVHTSKSLREGL

SEQ ID NO: 246592 - protein, 55 aa, Glycine max
  Clone ID: PAT_MRT3847_64703C.1.pep
RCPFRCPHFSLIVSSRFTHDHPICSLGPYFKLASNSTVKQLCYALTVPCPAVVSM

SEQ ID NO: 246593 - protein, 79 aa, Glycine max
  unsure (1)..(79): unsure at all Xaa locations
  Clone ID: PAT_MRT3847_64704C.1.pep
LTYRLLLINXIICXSHIPHPMSYKCKQKTGGPPGVHFQPXIIHISXXTLSPLKFXPPTLXPPPSXTIPFPSQKPFPSLN

SEQ ID NO: 246594 - protein, 240 aa, Glycine max
  unsure (1)..(240): unsure at all Xaa locations
  Clone ID: PAT_MRT3847_64705C.1.pep
AKISQKENVADFYDKACDIFNFTYNPVHIWGFSGQTTQFFLNDKFRLPNDFPGQLGKEVVLELQVHGLPDFIGGNGGNEMILDRFQTECSHSGSVIMNGSPDNVIPCISATNHFXGSSCRAIQSLGLTGLQNLGNTCFMNSAIQCLAHTPKLVDFFLGDYCKEINYENPLGMNVCYLFSVXGELALAFGDLLRKLWVPGAAPIAPRTFKMKLAKFAPQFSGYSQHDSXELLAFLLDGLHE

SEQ ID NO: 246595 - protein, 61 aa, Glycine max
  Clone ID: PAT_MRT3847_64706C.1.pep
TFLFPLSITLFKLNFNQIFNIILKNNLGHFNISLTIRTCMFPQTSYNLTFFFLCDYFNFFI

SEQ ID NO: 246596 - protein, 56 aa, Glycine max
  unsure (1)..(56): unsure at all Xaa locations
  Clone ID: PAT_MRT3847_64707C.1.pep
KETRHPVYRGLPRRNTIKWLXEMCAPNRRLRFCLETYPTSYMGGRAHDDTALGLMG

SEQ ID NO: 246597 - protein, 30 aa, Glycine max
  Clone ID: PAT_MRT3847_64708C.1.pep
AVFSLLLLKYIRFYNNKGALYPLGDAISEA

SEQ ID NO: 246598 - protein, 49 aa, Glycine max
  Clone ID: PAT_MRT3847_64709C.1.pep
LLKKKDPLRRVGSFSLHPQERTPLFSRMKICGNLKEFSFNILYVFSNES

SEQ ID NO: 246599 - protein, 140 aa, Glycine max
  unsure (1)..(140): unsure at all Xaa locations
  Clone ID: PAT_MRT3847_6470C.1.pep
DSFEEVSLSAALNGVQGLDYMERIPVATSEGKPHGLPRKNGEKGKRRLVSGDGEEMTLIPGTTDEEAYNKLITELEKSDPTWVGIECPKDEKPARLKILDKPXTRCFTILPMEFNLVDPQKFLKFERPNMKKRDMLNCQV

SEQ ID NO: 246600 - protein, 210 aa, Glycine max
  Clone ID: PAT_MRT3847_64710C.1.pep
MQQTPPMIPMMPSFPPTNITTEQIQKYLDENKKLILAILDNQNLGKLAECAQYQAQLQKNLMYLAAIADAQPQTPAMPPQMAPHPAMQPGFYMQHPQAAAAAMAQQQQQGMFPQKMPLQFGNPHQMQEQQQQLHQQAIQGQMGLRPGGINNGMHPMHNEGGNSGGPPSATGPNDARGGSKQDASEAGTAGGDGQGSSAAAHNSGDGEEAK

SEQ ID NO: 246601 - protein, 72 aa, Glycine max
  Clone ID: PAT_MRT3847_64711C.1.pep
GIKKIANPFIALQRGGPLGGEESLSPGGGPFPRMGRAHDPADLTILFFFLTKQSRRAGVFFLKFAVQAKETV

SEQ ID NO: 246602 - protein, 213 aa, Glycine max
  unsure (1)..(213): unsure at all Xaa locations
  Clone ID: PAT_MRT3847_64712C.1.pep
MQQTPPMIPMMPSFPPTNITTEQIQKYLDENKKLILAILDNQNLGKLAECAQYQAQLQKNLMYLAAIADAQPQTPAMPPQMAPHPAMQPGFYMQHPQAAAAAMAQXSRGMFPQKMPLQFGNPHQMQEQQQQLHQQAIQGQMGLRPGDINNGMHPMHSEAALGGGNTGGPPSATGPNDARGGSKQDASEAGTAGGDGQGSSAAAHNSGDGEEAK

SEQ ID NO: 246603 - protein, 74 aa, Glycine max
  unsure (1)..(74): unsure at all Xaa locations
  Clone ID: PAT_MRT3847_64713C.1.pep
PVRNSGVDQAVRTVAKAPQRVSLEDGSTWARLKLEDXLVNRGKQLIYTLTEDAATSTGAPCWSGPNRFPRPLQF

SEQ ID NO: 246604 - protein, 96 aa, Glycine max
  Clone ID: PAT_MRT3847_64714C.1.pep
MGGLGKTTLAQHVFNDPKMEDQFSIQAWVCVSDEPDVFKVTRTILEAITKSTDDSRDLEMVQGRLKDKLAGKRFLLVLDDIWNENRENWEAVQTPL

SEQ ID NO: 246605 - protein, 67 aa, Glycine max
  Clone ID: PAT_MRT3847_64715C.1.pep
TRIPYTRHGYPSKLSTTPPRHHATCGFLSHSRSSSSSAAANFPAAWCRAPPPPPKEGGRHTVMTGNL

SEQ ID NO: 246606 - protein, 66 aa, Glycine max
  Clone ID: PAT_MRT3847_64716C.1.pep
MCLVFVCDEEERVLGRQTAPGACPYCGGMVQAIDVESQWRFCFLPLCFKTKRIYYCTMCTRRLEVI

SEQ ID NO: 246607 - protein, 314 aa, Glycine max
  Clone ID: PAT_MRT3847_64717C.1.pep
MRGEKEGVVAWDIWKRLFPARRSRSGWLPNIRMGNNINLFKLCSGLRVLGYLMILLFGAIVALTYYAVVFITWGPLLFFSSPLRIPSFFILLLFHTLLLLLTWSYLMVLLNDPGPVPLNWIHLGSDSDPTSSPSYCSRCQNGKPPRCHHCSICQRCVLKMDHHCIWVVNCVGARNYKYFLLFLLYTFLETVLDCLALVPSFIRFFAGSNNHSLSPGGFAVIFLASILNLAFALSLLCFVVMHASLLLSNTTSVEVHEKKKGVRWMYDLGWKRNFEQVFGTKKALWLFPLFSKEDLDNIPALRGIEFPTRSDVDV

SEQ ID NO: 246608 - protein, 68 aa, Glycine max
  unsure (1)..(68): unsure at all Xaa locations
  Clone ID: PAT_MRT3847_64718C.1.pep
QXRKTRAPGXGNXNRDSXKPAKEXTQKGQGKTRPAXRPRXKNTQEGRGXGXHAGARAXARGKXPKQGG

SEQ ID NO: 246609 - protein, 36 aa, Glycine max
  Clone ID: PAT_MRT3847_64719C.1.pep
GSSDHYVHETVIRATDDLQIITGEFWRTFANTTPLT

SEQ ID NO: 246610 - protein, 177 aa, Glycine max
  unsure (1)..(177): unsure at all Xaa locations
  Clone ID: PAT_MRT3847_6471C.1.pep
HSSTRSCSSSNTNCQLCKLYPRASRSPCPYMPARWPLRWCGNLVPSHIPRTRSCIQFSSSIMFYPHLFISFITPFSSITHGMLLILARIPGHACINSPRTELSGGLFKTHRLTRLVYGLXGCFPSDPLFPFLILGRSFAVSVCGGFIIPTLNLYSPPPPPNEGGRHTVMTGNLPWNG

SEQ ID NO: 246611 - protein, 66 aa, Glycine max
  Clone ID: PAT_MRT3847_64720C.1.pep
TSSFDTLSEIFLLTFPVNQFLCKFLKLLFKLTLILPLSHPIFEFLLWHSNIFLKLITGRNESQMRN

SEQ ID NO: 246612 - protein, 80 aa, Glycine max
  unsure (1)..(80): unsure at all Xaa locations
  Clone ID: PAT_MRT3847_64721C.1.pep
RAVLQGDKIELSADKFILRSPLHYIPIPTHLSLYSYCFQKLXQIHDRPCLIYCYTTKTLTYSDDNLYDRRMCTGLHKIII

SEQ ID NO: 246613 - protein, 121 aa, Glycine max
  unsure (1)..(121): unsure at all Xaa locations
  Clone ID: PAT_MRT3847_64722C.1.pep
MKMVHGALFLLAAVATFHVSSEAEAPPLAPELSAEAREFLEAHNQARAAVGVEPLRWSEQLANVTSKLARDQRDKLGCEFANLSTGKYGANQLLAWGTGGTPRMGVEEWVXQKQFFNHAGN

SEQ ID NO: 246614 - protein, 107 aa, Glycine max
  unsure (1)..(107): unsure at all Xaa locations
  Clone ID: PAT_MRT3847_64723C.1.pep
LSPLGGVEPGGDPPEFILLGATXFQVCPGVFMPGFGFVKKLCFWLPAFFKKPLFPSLEVFRGVFFGAFPPPPPLVKSPKEPFPKRKPLKKGFPSPKNWPGNGFFPKP

SEQ ID NO: 246615 - protein, 49 aa, Glycine max
  Clone ID: PAT_MRT3847_64724C.1.pep
VKHRLLLIHGGVAYPKDPEAVISLSGEVILPARHRHLRGIRRFPPFPSL

SEQ ID NO: 246616 - protein, 129 aa, Glycine max
  Clone ID: PAT_MRT3847_64725C.1.pep
NDNCAPPFLSLNLLLFLASRDASDNIAMQLANVVPFQGTFLNRRMRYCSFVPSKMCYRLKHKLAEKKVARGVGSGSKLRNKVAALMDYNLPDLIGNGSREKKSKMSPKDALDDLDIFLICKRFPSITLG

SEQ ID NO: 246617 - protein, 51 aa, Glycine max
  Clone ID: PAT_MRT3847_64726C.1.pep
ISLLVSINIDSINCIRILFSSCLFSSYYIFMSFYVKYLNYCKKKKKKRGAA

SEQ ID NO: 246618 - protein, 141 aa, Glycine max
  Clone ID: PAT_MRT3847_64727C.1.pep
MWSCPKHATPFNKALVVIPSVSATTWRQRHGVSANAKQQGEKLGYTLLATLESNSTPIPKAAQEEGEISGSDVLWALQRASARKNKKKNKKEHRRDSSSVVTPTEETAVNYTNVRPLRINANWGSKLDEFDKRLRELSNTI

SEQ ID NO: 246619 - protein, 152 aa, Glycine max
  unsure (1)..(152): unsure at all Xaa locations
  Clone ID: PAT_MRT3847_64728C.1.pep
APTPAGKAPAPIPVTPLCPLDAYTSPNDAPPGLFPWILHQXSDRIEKRVLKCVPNVLPVPHIILSDQTEXLECQTRQSCATKLCPPVQSATXICDHDRRFSNTGHAICQFMLSSTXTSTLMLHTVVHLVMAPKNHPKASLYKDGLLRLGVST

SEQ ID NO: 246620 - protein, 76 aa, Glycine max
  Clone ID: PAT_MRT3847_64729C.1.pep
FNFVKLFWFKTRETTNNQTCLRNFFAFLTIEFNHYLTLFFAKTSLKSIVNLLFSVLYKILTFNHIKPLFFNNINSR

SEQ ID NO: 246621 - protein, 74 aa, Glycine max
  Clone ID: PAT_MRT3847_6472C.1.pep
IAKIGKKMPIITPAGYFEELGENAIAGAQAIDSVNDALENGSPLTNGLKRMHVYHVPAGYYEQLPGQVLKTIRA

SEQ ID NO: 246622 - protein, 66 aa, Glycine max
  Clone ID: PAT_MRT3847_64730C.1.pep
TRPLTTQSTLYRRQGKEILYARLNMLIKALDVVRLMLKIGLNMAGQFLHGQLTLRTLFKKLKEIVS

SEQ ID NO: 246623 - protein, 285 aa, Glycine max
  Clone ID: PAT_MRT3847_64731C.1.pep
MSVVPCNCNHTTEKDNLSGESESFHKFFECWISEQKQHLKDLLAAESTQLISDEELQALNDKVVEHYEYYYKAKSRCAKQDVLAMLSPTWMSSLEEAFLWIGGWRPSMAFHLIYSKSGLQFEARLDEVLQGLRTHDLGDLSASQLAQLDEMQRRTILEEREITDLMARHQETVADASMVELSHVVSEMIRANQRGEVDQSKEIENKVESTLVLKEEGLEKILLKADELRFITLKDVVDVLTPKQAIHFLIAAAELHLRLHEWGKKMDARKCNQGFGEGKSHNSSS

SEQ ID NO: 246624 - protein, 313 aa, Glycine max
  Clone ID: PAT_MRT3847_64732C.1.pep
MEIKQDSLWMCDRYQQLELLAHKLHLSKCYGLLPPFFSDINKCSQVPVKSTIVTGLVASLLAFSMEVSELAGMVSVGTLLAFTMVAISVLILRYIPPDEVLLLPSLQELIVSASTQYSWCSLEANEEDAKTHVGASGSKKPTVFKEDVPIDCPLIAKDPVIGKYVHEGNRRKVIGWVIAFTCLGVFVLTFAASNKTMISSVRFALCGVGGCLLLSGFVFLTCMDQDDARHNFGHSGGFTCPFVPLLPVACILINSYLLVNLGAATWARVSIWLAIGVIVYVFYGRTHSTLKDAVCVPATQVVDIYHTSTSCLA

SEQ ID NO: 246625 - protein, 182 aa, Glycine max
  Clone ID: PAT_MRT3847_64733C.1.pep
FREFLLNAAVPTNSRIRQVADRFDENDTWHRHIHGNTTTSDSASLLTNYKDVLSFLSFDAREGSKPGQDISNFLNLCISSNCLLLLRVLDLEGVYKAKLPKNIGRLTRLRYLGLRWTYVESLPSSISSLLKLQTLDLKYTYIHTLTSSIWKMELRHLFLSETYRTKFPPKPKGIRIGSSLSD

SEQ ID NO: 246626 - protein, 75 aa, Glycine max
  Clone ID: PAT_MRT3847_64734C.1.pep
LSLAASTDTHFLSLESETFGQLGTDLSLQRTELDGIGDSTVWATRDVAIHSQTLREKNCFFFLLFQDFRFSIPYL

SEQ ID NO: 246627 - protein, 121 aa, Glycine max
  Clone ID: PAT_MRT3847_64735C.1.pep
PRVRESLLKPILSPDEVSVCVHGTYRKNLDSILQFGLKRMARLHVHFSSGLPSDGEVTSGVRQNVNILIHLDVSKALKGGMKLYISDNKVILTEGFDGVVPVKYFERVETWPGRAPIPFQR

SEQ ID NO: 246628 - protein, 181 aa, Glycine max
  unsure (1)..(181): unsure at all Xaa locations
  Clone ID: PAT_MRT3847_64736C.1.pep
VQNVGWEYGLVKPRGAIRPDGWAYRFPKTNTTILYYWSASLCDLQPFNITDKQTNVSMHLDRPPAFMRRFLHRFDVLVLNTGHHWNRGKLNANRWVMHVNGKPNEDKKIAEIANAKNLTIYSVARWLDLQLVSHPRLKAFFRTISPRHFXHGDWNTGGSCDNTIPLTNGSEIMXEGSSDPT

SEQ ID NO: 246629 - protein, 50 aa, Glycine max
  Clone ID: PAT_MRT3847_64737C.1.pep
SVLRAYVDKYNGIIMMIDYVIISWRNIGVVPYVASYKSYRSLVVKDGNVK

SEQ ID NO: 246630 - protein, 49 aa, Glycine max
  unsure (1)..(49): unsure at all Xaa locations
  Clone ID: PAT_MRT3847_64738C.1.pep
SVGRWLPLSLXWGPLGVLFWAAVSFGXLFXVLAGLGCALVGLXAALPFL

SEQ ID NO: 246631 - protein, 51 aa, Glycine max
  Clone ID: PAT_MRT3847_64739C.1.pep
AGRLLLPLRGRNRVRPTRPSSRFASKFDSLGQHSIIIYGFFTFLRKQKHYR

SEQ ID NO: 246632 - protein, 382 aa, Glycine max
  unsure (1)..(382): unsure at all Xaa locations
  Clone ID: PAT_MRT3847_6473C.1.pep
MLKPRAFPNAFSLLLLLLHSLLALVSARGSHRTTWNTLSGSPPLVIARGGSSGIFPDSSEYAYELAAQISLKNLIVWCDVQLTKDGEGICISNIKLENATDIDKIFENRSKTYSVNGVQTSAYFAVDYTLTELRSNVLLIQGDFARNPNFDDNFEILTVNEMITITPASGPWLNIQXDAFYAQHNLSMKNFVLSVSRTVNVSYISSPEADFLRSIKAHINPRITKLVFRFLEKDEVDPSTNRTYGSLLKNLASIKTFASGILVPKGYIWPVDPTGLYLLPHTSLVSDAHKVGLEVFASDILNDIPISYNYSYDPVAEYLNFIDNGNFSVDGVLSDFPXTPSEAIDCFAHIGLNSXKKVNILVISKYGASGRYPSCTDLAYEK

SEQ ID NO: 246633 - protein, 31 aa, Glycine max
  Clone ID: PAT_MRT3847_64740C.1.pep
REAQHSLAQLKSVQMKYRLKLGPRWLHATLR

SEQ ID NO: 246634 - protein, 92 aa, Glycine max
  unsure (1)..(92): unsure at all Xaa locations
  Clone ID: PAT_MRT3847_64741C.1.pep
LKNPPPVPWPPKGGPPQGGQTPQTGGLGGPPIPNPQSXKAKPPNLPPKKPPGPPFPPKDSLLFKKKFPRGPGLKTGGAQFFAPGGPQISRNP

SEQ ID NO: 246635 - protein, 535 aa, Glycine max
  unsure (1)..(535): unsure at all Xaa locations
  Clone ID: PAT_MRT3847_64742C.1.pep
MEVYDVSETRNHDADMIEGADLNSHFTSPNIERTEVMINEGAPEFFVDQNLYYPAATNYGYYCSGFGTPGEQEDQHRIFGVDGPNIQFTGAQNESFPYVYYSYGYAQSPYNPYNPYIPGAMIGADGSFGGGQQYYTLPNYQNPISSPAYIPLVQPDNFPNSSVDSFFDTSASVSKPDGKGLKPKFNSASGSFTRNSSKSLSNPTSSLARTSEGPRDNDGVKKDLTSGRGFLNMASSPVHQARSIDASTHAVDISNGNVLSHSNQLKIASPLSSGFSDYGSNANGQSVVAKLRPKVHVGKGLSEVNGSSDVLGEQNRGPRISNYKSKFPLAVKAYANKGDDNTQENIIISTDQYNREDFPVNYENAKFFVIKSXSSEDDVHKSIKYNVWSSTPHGNKKLQSAHEDAKRIASGNFGSCPIFLFFSVNASGQFCGVAEMIGTVDFNKNMDFWQQDKWSGSFPVKWHIIKDVPNPNFRHIILENNENKPVTNSRDAQEIMYLKGLEMLKIFKSNTLKTSLLDDFIYYENRRKIMQDDTA

SEQ ID NO: 246636 - protein, 80 aa, Glycine max
  Clone ID: PAT_MRT3847_64743C.1.pep
MIQMAQCANSIYTILTKNLSLLRSEFGCKKMFNNFRQPLQCKPGKCIFLLLSAPSRDIKSTFTRERVIHKGYQYHSYKCW

SEQ ID NO: 246637 - protein, 39 aa, Glycine max
  Clone ID: PAT_MRT3847_64744C.1.pep
MSYKITNKFKVRLSRNINSTIQMKPSFIEYAHPFYALTS

SEQ ID NO: 246638 - protein, 108 aa, Glycine max
  unsure (1)..(108): unsure at all Xaa locations
  Clone ID: PAT_MRT3847_64745C.1.pep
MGVFAYDEQTSCTVXPVLSYKAVTKDAHSITPKIIGAIQSLDTDEGKGGPRTVKKITAHEGDQPSLPLQKVDAIDEAYLVYDHSLPAGTVPHDSWEKATFQTEVAPGP

SEQ ID NO: 246639 - protein, 113 aa, Glycine max
  Clone ID: PAT_MRT3847_64746C.1.pep
MGSFHLFLLLPTFFSLFLHTSPSPIIQAAIDQGTKAYYNCTRNSTFASYSAYRSNVKILLDFLSSNGTNNAKFYNTTVYSEDTADPVHGNFLCTKDTIPKQCAECVTQPAKLI

SEQ ID NO: 246640 - protein, 49 aa, Glycine max
  Clone ID: PAT_MRT3847_64747C.1.pep
NFIFTINVFVLKTNHMHPCSIVISALVDCFYKREWLIRSWIRTSQVSNT

SEQ ID NO: 246641 - protein, 42 aa, Glycine max
  Clone ID: PAT_MRT3847_64748C.1.pep
SSLITECTIIYRSKPNYITTNSTQKHKFAIILITKINRLELE

SEQ ID NO: 246642 - protein, 64 aa, Glycine max
  Clone ID: PAT_MRT3847_64749C.1.pep
ASKSHVDHLVVPSPLASFNIELVPTNWKQGMVRCSIQMGALAMFVNATLCYVGKLVNSHPVPPC

SEQ ID NO: 246643 - protein, 53 aa, Glycine max
  Clone ID: PAT_MRT3847_6474C.1.pep
FCTKFLSLIIFGVELYQTQTVTVLLFNDNLGYQEKYKGNMEEKEMKCRNTKGN

SEQ ID NO: 246644 - protein, 39 aa, Glycine max
  Clone ID: PAT_MRT3847_64750C.1.pep
VLPCGFVEGGHAGLPVGLQMIGAAFNEVLAFPVGSLCYL

SEQ ID NO: 246645 - protein, 226 aa, Glycine max
  Clone ID: PAT_MRT3847_64751C.1.pep
FLRYISSKNKANKAKHRIHHTTGSKSFLAVSYDARDPVTGKEPDLQTFWQLTHKRENGEWIDEASKEINDKVAEQINEKRCQIEDSQEVVETMEQEIINTAFKTVVGKESFMQGFGAGLRSSSSSSGTIQQLQAELDAQKRETENARKECNEIRAKLVEVESCLEGERLKCKEIEARLLDHQSEMQEISSQVQTTIQAALSQFLPQKTEARTSSCWIFNFMYIGLS

SEQ ID NO: 246646 - protein, 854 aa, Glycine max
  Clone ID: PAT_MRT3847_64752C.1.pep
RNSRVEIDIRKLGLCLLSLLLLVTFTVASSANVSYDGRSLIIDAQRKLLISASIHYPRSVPAMWPGLVQTAKEGGVDVIETYVFWNGHELSPGNYYFGGRFDLVKFAQTVQQAGMYLILRIGPFVAAEWNFGGVPVWLHYVPGTVFRTYNQPFMYHMQKFTTYIVNLMKQEKLFASQGGPIILAQIENEYGYYENFYKEDGKKYALWAAKMAVSQNTGVPWIMCQQWDAPDPVIDTCNSFYCDQFTPTSPNRPKIWTENWPGWFKTFGGRDPHRPAEDVAFSVARFFQKGGSVHNYYMYHGGTNFGRTAGGPFITTSYDYDAPVDEYGLPRLPKWGHLKELHRAIKLCEHVLLNGKSVNISLGPSVEADVYTDSSGACAAFISNVDDKNDKTVEFRNASYHLPAWSVSILPDCKNVVFNTAKVTSQTSVVAMVPESLQQSDKVVNSFKWDIVKEKPGIWGKADFVKNGFVDLINTTKDTTDYLWHTTSIFVSENEEFLKKGNKPVLLIESTGHALHAFVNQEYEGTGTGNGTHAPFTFKNPISLRAGKNEIALLCLTVGLQTSSPFYDFVGAGLTSVKIKGLNNGTIDLSSYAWTYKIGVQGEYLRLYQGNGLNNVNWTSTSEPPKMQPLTWYKAIVDAPPGDEPVGLDMLHMGKGLAWLNGEEIGRYWPRKSEFKSEDCVKECDYRGKFNPDKCDTGCGEPTQRWYHVPRSWFKPSGNILVLFEEKGGDPEKIKFVRRKVSGACALVAEDYPSVALVSQGEDKIQSNKNIPFARLACPGNTRISAVKFASFGSPSGTCGSYLKGDCHDPNSSTIVEKACLNKNDCVIKLTEENFKSNLCPGLSRKLAVEAVCS

SEQ ID NO: 246647 - protein, 80 aa, Glycine max
  Clone ID: PAT_MRT3847_64753C.1.pep
RAEIAIIRDNRLAYLITGNKSKRCLLSRISEFLATTQCTISQGKENHSLCWSQTSRIMYVSTPRLFAEHSSIGCRTSCQM

SEQ ID NO: 246648 - protein, 109 aa, Glycine max
  Clone ID: PAT_MRT3847_64754C.1.pep
LGLVLLLFCGCVCVFSHLKTSSCRGNWGSGSSCKCGNGCTGCKIYPYSSYSVSTTTQTLVTGVAPVHAQSEGAEMLVPAENVGSICGPNCYCNPCTCKLGGGRASFQPR

SEQ ID NO: 246649 - protein, 336 aa, Glycine max
  Clone ID: PAT_MRT3847_64755C.1.pep
MGTGEESTAKVPKPSSTSSIQIPLAPSYPDWSSSMQAYYAPGATPPAFFASNIASPTPHSYMWGSQHPLIPPYSTPVPYPAIYPPGNVYAHPSMAMTLSTTQNGTEFVGKGSDEKDRVSAKSSKAVSANNGSKAGDNGKASSGPRNDGTSQSAESGSEGSSDASDENTDQQESATNKKGSFDQMLVDGANARKNSVSTIPHSSVPGNPAVSMSPTSLNIGMDLWDASPAGAEAAKMRHNQSSASEAVTPPTIMGREVPLGEQWIQDDRELKKQKRKQSNRESARRSRLRKQAECEELQKRVESLRSENRTLREELQRVSEECKKLTSENDSIKVIQ

SEQ ID NO: 246650 - protein, 73 aa, Glycine max
  Clone ID: PAT_MRT3847_64756C.1.pep
KNIVSTHNVVTLNLLLYYNQPISIHTLRSIGFVLHIMIHDLYFIVIHYFLIRHSYILQIYFLHLSAKNIAKGG

SEQ ID NO: 246651 - protein, 341 aa, Glycine max
  Clone ID: PAT_MRT3847_64757C.1.pep
MGTGEESTAKVPKPSSTSSIQIPLAPSYPDWSSSMQAYYAPGATPPAFFASNIASPTPHSYMWGSQHPLIPPYSTPVPYPAIYPPGNVYAHPSMAMTLSTTQNGTEFVGKGSDGKDRVSAKSSKAVSANNGSKAGNNGKASSGPRNDGTSTSAESGSEGSSDASDENTNQQESATNKKGSFDQMLVDGANARNNSVSIIPQPGNPAVSMSPTSLNIGMNLWNASPAGDEAAKMRQNQSSGAVTPPTIMGREVALGEHWIQDERELKKQKRKQSNRESARRSRLRKQAECEELQKRVESLGSENQTLREELQRVSEECKKLTSENDSIQGRVRTIVWTRSSC

SEQ ID NO: 246652 - protein, 159 aa, Glycine max
  Clone ID: PAT_MRT3847_64758C.1.pep
MAEQTEKAFLKQPKVFLCSKKGGKGKRPGKGGNRFWKSIGLGFKTPRDAIEGTYIDKKCPFTGNVSIRGRILAGTCHSAKMTRTIIVRRNYLHFIKKYQRYEKRHSDIPSHISPCFRVKEGDHVIIGQCRPISKTVRFNVLKVIPAGSSSGAKKAFTGM

SEQ ID NO: 246653 - protein, 60 aa, Glycine max
  Clone ID: PAT_MRT3847_64759C.1.pep
LRGYVLMNNLRWITLAYLTAAIYWWDDQREVPMWFRGVSWIRRQRSRLVTWTDLKTEILD

SEQ ID NO: 246654 - protein, 86 aa, Glycine max
  Clone ID: PAT_MRT3847_6475C.1.pep
MGKPFFILALSSLCLLLVSSACVAMTCMTFNECQLLHLNALETEQRVESEGGLIDSWNSQDLELQCAGVTVSRLTVMGIGPKLPAL

SEQ ID NO: 246655 - protein, 265 aa, Glycine max
  Clone ID: PAT_MRT3847_64760C.1.pep
WQTTGSLTGSDVKYKAGAHLSVSNIMMAAAVLVTLLFFMPLFYYTPNVVLAAIIITAVIGLIDYQSAYKLWKVDKLDFLACLCSFFGVLFISVPLGLGIAVIISVFKILLHVTRPNTLVLGNIPGTQIFHNINQYIEALRVPSFLILAVESPIYFANSTYLQERILRWVREEEEHIKANNGAPLKCIILDMTAVTAIDTSGLDTLCELRKMLEKRSLELVLANPVGNVMEKLHKSNILDSFGLKGVYLTVGEAVADISSIWKAQP

SEQ ID NO: 246656 - protein, 89 aa, Glycine max
  unsure (1)..(89): unsure at all Xaa locations
  Clone ID: PAT_MRT3847_64761C.1.pep
XXXXXASXXXXXXXLXRXXXXXXXPXLXPXXXXXXLXXXXXXXXXXXLXAXXPRXXXXXXXXXXXXLXXXYXXXSXLXXXSVLXVLXAX

SEQ ID NO: 246657 - protein, 98 aa, Glycine max
  Clone ID: PAT_MRT3847_64762C.1.pep
FILREGSKINFFEGKENLVKFFSNRTPGKKREGNNGHLFPNLKWKKGHVNHSPRYHGVKRGQWLFYQKPWLPYGRLIKNLLQSTQMCNPKIEKDVQVR

SEQ ID NO: 246658 - protein, 50 aa, Glycine max
  Clone ID: PAT_MRT3847_64763C.1.pep
HYIRLTVYQAPVRKLGSYRGITVSTLIFNSPKHDDDHHALPRFCARRNPP

SEQ ID NO: 246659 - protein, 73 aa, Glycine max
  unsure (1)..(73): unsure at all Xaa locations
  Clone ID: PAT_MRT3847_64764C.1.pep
MLRRPKGIASIGPXVDQSTDGGQAVXRIARQPDAQGKIRGTLLLSMAFKEALTLHGLVVALALISANPFGNPK

SEQ ID NO: 246660 - protein, 76 aa, Glycine max
  Clone ID: PAT_MRT3847_64765C.1.pep
MAFWGTRVMEIVKKHDSGGLVWKRIKLTTTRKANAKKRLLRVWQNEAVLKACVAQVPSATTTTATTAATTSTSTST

SEQ ID NO: 246661 - protein, 101 aa, Glycine max
  unsure (1)..(101): unsure at all Xaa locations
  Clone ID: PAT_MRT3847_64766C.1.pep
DVNKVGIRIEIGFYFTSVAGNITVSDTTFKTKQYHPHQQRYXXIKIKTNIIIIESNHQVGANMTEKKRKERDEGNRQRLKPKKKPNTQWKKRGPRLHSSLQ

SEQ ID NO: 246662 - protein, 42 aa, Glycine max
  Clone ID: PAT_MRT3847_64767C.1.pep
GGDELGVNLRVYLMSCDSLMDCCTNQHLLIGGYNLLLLQKPI

SEQ ID NO: 246663 - protein, 89 aa, Glycine max
  Clone ID: PAT_MRT3847_64768C.1.pep
LPPRSNFRGGFVSPFSSIMGGGIPTNNRAPPSGGNPNFFNSGPINQKLFFRKLIGSFWVFFFFFGKKKILFFFIRLNVGKGKRIFVQCF

SEQ ID NO: 246664 - protein, 45 aa, Glycine max
  Clone ID: PAT_MRT3847_64769C.1.pep
GTGKNRLYYGEAPLKMGDIIQFQTLICCETNFPYSESNQKLPSSS

SEQ ID NO: 246665 - protein, 90 aa, Glycine max
  Clone ID: PAT_MRT3847_6476C.1.pep
GKKNGKGGLRCYSQKNPIGYSSPRIAPNIKPSWNTTGFSFPLINLSRQLGCSNPFKLPALFFFLAYVTPYFVFCQDQFMIPRISVSYSFV

SEQ ID NO: 246666 - protein, 44 aa, Glycine max
  Clone ID: PAT_MRT3847_64770C.1.pep
FSQQAAIIIIMTSCYNTPHNRRRWAGRRRRCIIGWTHAAGSRSR

SEQ ID NO: 246667 - protein, 216 aa, Glycine max
  Clone ID: PAT_MRT3847_64771C.1.pep
MALISSLSFVSHNLITTTTPTFSQFQSAKYRKPIRHHISKIACSENTLEGEKLPHRRNVLLGLGGFCGAAVMSLNNKNIPFASAAPTPMFPLVLDSAVSTVVKRPSKSRSKKQKEEEEEVLVIEGIEFEGNTHAKFDVIINADDYNEIRPDHTEFAGSFASLPHSNNKKIVTSMSLGLTDLLEDLGADDDDSVVVTLVPRDGRVKIRAIKTRLLAE

SEQ ID NO: 246668 - protein, 42 aa, Glycine max
  Clone ID: PAT_MRT3847_64772C.1.pep
IHNTHRRDKKLREILITHCISIPFFPYPRQQRAYFSPQATNS

SEQ ID NO: 246669 - protein, 39 aa, Glycine max
  Clone ID: PAT_MRT3847_64773C.1.pep
KKKGIGFSLEIRMVLETINPTRYAFSNAASCQLICICRS

SEQ ID NO: 246670 - protein, 106 aa, Glycine max
  unsure (1)..(106): unsure at all Xaa locations
  Clone ID: PAT_MRT3847_64774C.1.pep
SVLFGHQHNTTVLFISANYTYEYILLYEELYCLASNYPDRFKIYYMLNQPSEVWDGGEXFVSKEMFYTHCPSPAQDIKIFVCYPPPMNMAMAAHLKALGYASEMPF

SEQ ID NO: 246671 - protein, 87 aa, Glycine max
  Clone ID: PAT_MRT3847_64775C.1.pep
CFGRISSCTPFRSFLCFTGGKSSLACNPNYLFGGKNVSNIPGTVHCHDVLLKDSDKFISLQGGTQLYRRITRYEYMYRSTFYPVSAE

SEQ ID NO: 246672 - protein, 101 aa, Glycine max
  Clone ID: PAT_MRT3847_64776C.1.pep
NGLFCNPFKIFFCNWHSFKWPFPGYFQGGTGALVFSPKFEKAGEIKHQPTPNLPNWNGSRVFEQKKFFLFGDLETSGRNEFKGPGNWGFKNSTVLSNVFLK

SEQ ID NO: 246673 - protein, 83 aa, Glycine max
  Clone ID: PAT_MRT3847_64777C.1.pep
ACMKVVSILEGYASVWFNIQHSAFTMSPTYTFRVYQTLQSSYHKSVRTSSIHWTSVVGEPWPLHIEMSMSGSAKRHATQCHAS

SEQ ID NO: 246674 - protein, 93 aa, Glycine max
  Clone ID: PAT_MRT3847_64778C.1.pep
KGINLGHWGKKHPGNTGGEKGAKKRGKGGNPPWGEEGLKLAKNLTPPGGEITILSKFGKKGGGTIPSGGKSHAKKVKIGNQPKRRFLEKKGGP

SEQ ID NO: 246675 - protein, 99 aa, Glycine max
  unsure (1)..(99): unsure at all Xaa locations
  Clone ID: PAT_MRT3847_64779C.1.pep
RVLLTIVYSRESWKKGQSPGLLVSYGAYGEDLDKSWCSDHLSLLDRGWVVAFADVRGGGGGGXLWHKXGSGLNKLNLIFEFVYCGNYRGKGGYVQSDLV

SEQ ID NO: 246676 - protein, 96 aa, Glycine max
  Clone ID: PAT_MRT3847_6477C.1.pep
RAFGEHPPVQTPPFWIAHPFQAMKTSLSRFRPISGWPMMDLPYTVRTADFFFPPPYSKGPPGFLINQGVPPFFFPPLEFRMFPGKNPVLFFFNVIL

SEQ ID NO: 246677 - protein, 106 aa, Glycine max
  Clone ID: PAT_MRT3847_64780C.1.pep
MDVEGRASKGKSLTLNLEQGQQEKGTQNDDYGLASAHAIDQDSWQQVGLMLVTSFNCGWILSFSNLVMWPLGWTWGIICLIVVGFYTVYANWILVAWQLGDDWRFI

SEQ ID NO: 246678 - protein, 48 aa, Glycine max
  Clone ID: PAT_MRT3847_64781C.1.pep
TSCRLLFIAGVAFLLVVTKYRVCCWSRGTTLFLRCKHQVILAIFVVKY

SEQ ID NO: 246679 - protein, 188 aa, Glycine max
  unsure (1)..(188): unsure at all Xaa locations
  Clone ID: PAT_MRT3847_64782C.1.pep
MAVEARHLNLFPSQFIPNREVMNSVEANMNMYNNTTPMGGYSSFLPLSGAVTETVLPSSVFNNHSLGNAVKSESGVTYNNNNNHHHHHINNVVMTPTSRKRSRDNSNNYGYNNNINNDSFSFLGQDVSLQIQQQQLDIEHLIMQRMEKVRMEIDEKRKRQAREVXRLFEVGVMKEAEAKEEEIEKIGN

SEQ ID NO: 246680 - protein, 364 aa, Glycine max
  unsure (1)..(364): unsure at all Xaa locations
  Clone ID: PAT_MRT3847_64783C.1.pep
TLFLAEDAVILGIDDEKYWPLMPPLPSYVRGREHPGPRYGSLIHGXQNLEDVVITGHNGTINGQGQTWWKKYRQKRLNHTRGPLVQILFSSDIVITNITLRDSPFWTLHPYDCKNVTIKKVTILAPVFHAPNTDGIDPDSFEDMLIEDCYISVGDDAIAIKSGWDQYRSSYGRPSKNIVIRNLVVRSNVSAGISIGSEMSGGVSNVLVENILVWESRRAMRIKTAPGRGGYVRQITYKNLMLKNVRVGIVIKTDYNEHPGAGYDPRALPILRDISFMNIRGQGVRVPVRIQGSEQIPVRNVTFQDMKVGITYKKKHIFQCAFVQGQAIGTIFPSPCDSFDRYNEQGQLVKHAASQNVTDIDYEI

SEQ ID NO: 246681 - protein, 100 aa, Glycine max
  Clone ID: PAT_MRT3847_64784C.1.pep
LEYFFGRFCFTPIPKIKVGENYPCSFEPPLAEGLLRTLLSLNAAKVGYFFFPEPEPVVFLLFFWVGPPIPVPQNFVFYSSMILLTTQSFCNSLVWDENYI

SEQ ID NO: 246682 - protein, 149 aa, Glycine max
  unsure (1)..(149): unsure at all Xaa locations
  Clone ID: PAT_MRT3847_64785C.1.pep
SRRGMRIKTAPGRGGYVRQITYKNLMFKNVRVGXVIKTDYNEHXXTGYDPRALPILRDISFINIRGQGVRVPVRIQGSEQIPVRNVTFQDMKIGITYKKKHIFQCAFVQGQAIGTIFPSPCDSFDRYNEQGQLVKHAASQNVTDIDYEI

SEQ ID NO: 246683 - protein, 68 aa, Glycine max
  Clone ID: PAT_MRT3847_64786C.1.pep
HPPYVYNKAFIISIASERHDLLGVDQQKERLFIQWPALSSQKYHRAALPRRLKGFDLHLFMVLTLPEL

SEQ ID NO: 246684 - protein, 32 aa, Glycine max
  Clone ID: PAT_MRT3847_64787C.1.pep
CPILDDLHWSMGRRSYTFLVVSMNSYQRLLQT

SEQ ID NO: 246685 - protein, 148 aa, Glycine max
  Clone ID: PAT_MRT3847_64788C.1.pep
MKSNPKSKPPPHLLYFLIILSLSFFFPCVSSSRKQQFKEAPQFYNSPNCPSIEHHDILSSSEEAVHVAMTLDTTYIRGSMAAILSVLQHSSCPQNTFFHFVCSSNANANANANANTNASLLRATISNAFPYLNFQLYPFDDAVVSNLI

SEQ ID NO: 246686 - protein, 174 aa, Glycine max
  Clone ID: PAT_MRT3847_64789C.1.pep
ASANRLSRLQEQAEEYAALIMEELDPEGLGYIELWQLETLLLQKDTYLNYSQALSYTSQALSQNLQGLRKKSPIRRMSRRLVYYLQENWRRLWVLTLWVSIMIGLFTWKFIQYKNKDAFQIMGYCLLTAKGAAETLKFNMALILLPVCRNTITWLKSTKLGYVVPFDDNINFHK

SEQ ID NO: 246687 - protein, 246 aa, Glycine max
  Clone ID: PAT_MRT3847_6478C.1.pep
QIRSPPQRRNDAQNDYFSVVSQGIGKLSFVAASAANVVQVGTKEFTSKVKEGGYDHKVNETVNVVTQKTSEIGQRTWGIMKGVMAMASQKIEEYTKDDPNWKNDNWQRNENDTNGYYQDFNREKKGWNSSTGREQSSSGEYKTESSSSWDDWDHKDSRKEEPAKGSTHSSGGQFSTYNSSSWDDWEHKDSRKEEPAKGSAPHNNDDWAGWDNAKDDGFDNIYEGANKKGVGHKGKSDGTWTEEGFL

SEQ ID NO: 246688 - protein, 49 aa, Glycine max
  Clone ID: PAT_MRT3847_64790C.1.pep
SFVFYQFEKFHKVHPWLLILFFFFFFFFFFSKYEYMNYTFIKNIYVITL

SEQ ID NO: 246689 - protein, 50 aa, Glycine max
  Clone ID: PAT_MRT3847_64791C.1.pep
TEHHHLLGGLPKIRHIIHLAADDDQQSSLELCLATASRVKTLDMAAACCL

SEQ ID NO: 246690 - protein, 49 aa, Glycine max
  Clone ID: PAT_MRT3847_64792C.1.pep
QIYSTVLSNAIPIVVYSMGRAPNNVVSVEAAYRAVVLIVEVVIDVYEPV

SEQ ID NO: 246691 - protein, 124 aa, Glycine max
  Clone ID: PAT_MRT3847_64793C.1.pep
MASTSAVSLAMPVTYASQKRVLVPSSDALFLKPLPLRSYSSKAMAASKVPNGRFQVRASMKEKVVTGLTAAAFTASMMAPDVAEAAVSPSLKNFLLSIAAGGVVVAAIIGAVVGVSNFDPVKRS

SEQ ID NO: 246692 - protein, 57 aa, Glycine max
  Clone ID: PAT_MRT3847_64794C.1.pep
AGGFGSYLFGMSSDIAKQSPEATAQDIKDPGLGWMIAFAFVVSFLGLFSLVPLRKVH

SEQ ID NO: 246693 - protein, 135 aa, Glycine max
  Clone ID: PAT_MRT3847_64795C.1.pep
MVLNKVEEASLAKTIVSLILLALFIELSADLYKAGISNNIEAYILFAAAEFIWFFLDRTWPGFTLACIVGLGCPLAEVPIMKLFHLWYYPQANIEIFGQGLVTWTLTCYFVYTPFLINLSRWLRTVYAPQTEDSA

SEQ ID NO: 246694 - protein, 200 aa, Glycine max
  Clone ID: PAT_MRT3847_64796C.1.pep
MASHGVLENSPNAAINKAVIGRLMELPLPPNKVLATYVWIDGTGENLRAKSRTLDFIPKAVSDLPEWNYDGSSTYQSEGSNSDTYLRPVAMYRDPFRGGENKLVLCDTYKYNKKPTETNRRAACAAAMEAAKEHVPWFGIEQEYTLLDMDGRPFGWPKNGFPGPQGPYYCGVGANKVYARDIVEAHYRACLSAGINISGE

SEQ ID NO: 246695 - protein, 27 aa, Glycine max
  Clone ID: PAT_MRT3847_64797C.1.pep
YSKTLFAIPCTQLKYKISFTLEFQALN

SEQ ID NO: 246696 - protein, 50 aa, Glycine max
  Clone ID: PAT_MRT3847_64798C.1.pep
IIPEKTRREICRYLFQEGVCFAKKDFNMVRAPMIDEPNVQVIELMQSFKS

SEQ ID NO: 246697 - protein, 195 aa, Glycine max
  Clone ID: PAT_MRT3847_64799C.1.pep
MRLPQLNLFLVSFLLLFVARANGSLLPFIDPPTTLLADLWSDRFPDPFRVLEQIPFGVDKDEPSMAMSPARVDWKETPEGHVIMLDVPGLKREEIKIEVEENRVLRVSGERKKEEEKKGDHWHRVERSYGKFWRQFRLPQNVDLDSVKAKLENGVLTLTLDKLSPGKIKGPRVVSIAGEDQQQGNLNSDGVKQEL

SEQ ID NO: 246698 - protein, 476 aa, Glycine max
  unsure (1)..(476): unsure at all Xaa locations
  Clone ID: PAT_MRT3847_6479C.1.pep
MAAASRRLRDLQSEAGNKICVDCSQKNPQWASVSYGVFMCLECSGKHRGLGVHISFVRSVTMDSWSDIQIKKMEAGGNDKLNAFLAQYSIPKETDIVTKYNTNAASVYRDRIQAIAEGRPWRDPPVLKENLSAGKGKPPLTQTRRNNEGGWDDWGNEASPRSKSKSTGDFRNLNGGGGAPARSRSTEDIYTRTQLEASAAKKEDFFARKIAENESRPEGLPXQGGKYVGFGSSXSPQRRNEAQNDYFSVGSHGIRKLSLFASSAASVFLCGTRSFTHRVIGVGNLHXANETPKDSWSDIQIKKMEAGGNNKRNTFMAPXSIAKYTDVDPNCNTNAAQRNENDTNGIYQDFPRQNKGWNSSTGREQSSSGESKTESSSSWDDWDHKDSRKEEPAKGSTHSSGGQFSTYNSSSWDDWEHKDSRKEEPAKGSAPHNNDDWAGWDNAKDDGFDNIYEGANKKGVGHKGKSDGTWTEEGFL

SEQ ID NO: 246699 - protein, 55 aa, Glycine max
  Clone ID: PAT_MRT3847_647C.1.pep
TKGNTNKLSSNSFPGTSRFQPQEFGIQATSLMGTTSSGTPKATPFLSQCNGANAN

SEQ ID NO: 246700 - protein, 86 aa, Glycine max
  Clone ID: PAT_MRT3847_64800C.1.pep
CRILAVVRLMTLSSREAVDQTQLELDDVRVSIDSSRSISNPLPQEKSYLGLFLEMAINKSLEDQIQSMAVIQFQEMTKNMGRNFFV

SEQ ID NO: 246701 - protein, 56 aa, Glycine max
  Clone ID: PAT_MRT3847_64801C.1.pep
TTLKWGVLLSLCIYCLALLITTTILYPKPPLCFFFFLNLIRFSFPHYAVVKLYSLL

SEQ ID NO: 246702 - protein, 34 aa, Glycine max
  Clone ID: PAT_MRT3847_64802C.1.pep
QVHQLDLKNLLQNDVNYASRNVFLFLIICKGKLN

SEQ ID NO: 246703 - protein, 148 aa, Glycine max
  unsure (1)..(148): unsure at all Xaa locations
  Clone ID: PAT_MRT3847_64803C.1.pep
GGRPARGPSGPCTRAICACSPACPLGLGPFSLARAPATRIRQGLRRGTTNDVAGKPTSSKTHDPVSHPEIAAXDISSPPTVILIIDWACTGAPSVTRATGLSGILLXXKMVEGASLKTMLILDAALLADYVVGSGQDMPVEDVQFCWG

SEQ ID NO: 246704 - protein, 94 aa, Glycine max
  Clone ID: PAT_MRT3847_64804C.1.pep
NLMPRGFPPAPGFFGPLLPFKKRGFCGRPLPFFLSLGVPGPPFFSQTGLFFFGPHFGPFSLRPNNGFLTLWKVFYAVQIRFLFSLCFRENFFYK

SEQ ID NO: 246705 - protein, 112 aa, Glycine max
  Clone ID: PAT_MRT3847_64805C.1.pep
APTRAILRCIKGNIVNGGGGLVADISCRGYMNRESNYDSNSYAPSNDYNTRTNYNQDSAYSRHTNGYDIGGMSMFDLLSHFDRYNNDNGYRKGSSSSESYSSSGSHERKRKC

SEQ ID NO: 246706 - protein, 56 aa, Glycine max
  unsure (1)..(56): unsure at all Xaa locations
  Clone ID: PAT_MRT3847_64806C.1.pep
HFHWNRLHXRHSSGEHXXVVHLXLXKQXLLHXGXLLLTTLPSXAXSSLNPXIQRXS

SEQ ID NO: 246707 - protein, 101 aa, Glycine max
  Clone ID: PAT_MRT3847_64807C.1.pep
SLAFGGAGGLYLRWSKRRASVWTPIRTGCGAIVVPGKREPRQTVNCEYKNVLTRCRTARDDEKHKGYHKAGIKNYPDNGGAPDKTEELGQTYEGKRDPEMQ

SEQ ID NO: 246708 - protein, 204 aa, Glycine max
  unsure (1)..(204): unsure at all Xaa locations
  Clone ID: PAT_MRT3847_64808C.1.pep
MPMLSSRGFIAYLVSAFSCAVLSALFLTNHIHHDDNKPITLLASRVSETLKVWPDLEPSWRLVLATVIGFLGSACGTVGGVGGGGIFVPMLNLLLGFDTKSAAALSKCMIMGASASSVWYNVRVPHPTKEVPILDYDLALLFQPMLMLGITVGVALXVVFPYWLITXLIIILFIGTSSRSFFKGIQMWREETIFKREKTMQRAT

SEQ ID NO: 246709 - protein, 99 aa, Glycine max
  Clone ID: PAT_MRT3847_64809C.1.pep
RKAGSPLGGFFFGNRDLRFFPGLERVPPLAKGPGFFGWVRVPSQGAPVLLGPHFQDFSRGGRLGFLKTPWALNPWGFFFWGGFGPFWIFRVFFGHSGFI

SEQ ID NO: 246710 - protein, 60 aa, Glycine max
  unsure (1)..(60): unsure at all Xaa locations
  Clone ID: PAT_MRT3847_6480C.1.pep
MAATAVTETEAVWSVKCYCCGLTEECTPRYIDGVREKYQGRWICXLCAEAVKEEGLKLKE

SEQ ID NO: 246711 - protein, 58 aa, Glycine max
  Clone ID: PAT_MRT3847_64810C.1.pep
LGSKGFKKRSMLLVLFAGGAGYRVEKKNGCLMFGGQNGPLIATSAWKLPPPNGLPCKL

SEQ ID NO: 246712 - protein, 30 aa, Glycine max
  Clone ID: PAT_MRT3847_64811C.1.pep
HSRPVNNKSSLELVVINSDLNLNITKWNSY

SEQ ID NO: 246713 - protein, 57 aa, Glycine max
  Clone ID: PAT_MRT3847_64812C.1.pep
TSCVLHILGCDLMPCDNPVVTPASDVHYYVLIFDISLAKIYRHCISRTVRFIPSYAL

SEQ ID NO: 246714 - protein, 56 aa, Glycine max
  unsure (1)..(56): unsure at all Xaa locations
  Clone ID: PAT_MRT3847_64813C.1.pep
CLPKKWKSRKXRNXSLTLQLAPXNPSXLYYLSIAVXDXQRRIEAFXTERKRXREXR

SEQ ID NO: 246715 - protein, 33 aa, Glycine max
  Clone ID: PAT_MRT3847_64814C.1.pep
MSSSVVWCSLVIYNTIGSRLLSGYCRNLTCCSR

SEQ ID NO: 246716 - protein, 88 aa, Glycine max
  Clone ID: PAT_MRT3847_64815C.1.pep
AHRHRKVLRHNIQGITKPPIIRLPTSGGLKSISGLICKKTLGVHKIFLENVICDAVANTEHAPRNTVTAMNVVYALNRQGSPLSGFGG

SEQ ID NO: 246717 - protein, 70 aa, Glycine max
  Clone ID: PAT_MRT3847_64816C.1.pep
DGKGIQEHLFTLCSAENWLELEEIKGFLPLLILRTKGKLALFHSLPWPVQFIPNCPIPFYNQTLLELAIP

SEQ ID NO: 246718 - protein, 47 aa, Glycine max
  Clone ID: PAT_MRT3847_64817C.1.pep
TAAKTPQRGTYMYIHSTDTDARCIHPGLHWMEHVLMLVIKLACEECG

SEQ ID NO: 246719 - protein, 101 aa, Glycine max
  Clone ID: PAT_MRT3847_64818C.1.pep
LGIQRDCQLRGFRQVFGEERTSSKSIREGLFKKSLGPLTTEEVKQMVQKLHVTLTTLKNRKHSSRRSSRIKLQSIQLSYQEPITKTGECRSFEIKRPPKNY

SEQ ID NO: 246720 - protein, 489 aa, Glycine max
  Clone ID: PAT_MRT3847_64819C.1.pep
MALNLIHRPATKPPSSSSSFVTPRPLRTTQSIPVRNSRRSIAVRAAATEAPVATITAARECRVKSVKARQIVDSRGNPTVEVDLVTDGLFRAAVPSGASTGIYEALELRDGDKSVYGGKGVLNAVRNINEVLAPILVGVDVRNQADVDAIMLEIDGTPNKSKLGANAILGVSLSVCRAGAGAKGVPLYRHIQEISGTKELVMPVPAFNVINGGSHAGNNLAMQEFMILPVGATSFAEALRMGSEVYHVLKGIIKAKYGQDACNVGDEGGFAPNVQDNREGLVLLMDAIDKAGYTGKIKIGMDVAASEFYTKDGKYDLNFKKPNRLEAHVHSAQSLGQLYKDFVKEFPIVSIEDPFDQDDWGSWASLLASVDIQLVGDDLLVTNPKRIAEAIKKKACNGLLLKVNQIGTVTESIQAALDSKAAGWGVMVSHRSGETEDNFIADLSVGLASGQIKTGAPCRGERLAKYNQLLRIEEELGSVRYAGETFRSP

SEQ ID NO: 246721 - protein, 92 aa, Glycine max
  unsure (1)..(92): unsure at all Xaa locations
  Clone ID: PAT_MRT3847_6481C.1.pep
CHESCLNCYLVFTSNCFIFSLSGQPKRHLLTTXWSVFVSAKRLVAGDSVLFIWNEKNQLLLGIRRANRPQTIMPSSVLSSDSMHIVFLICRH

SEQ ID NO: 246722 - protein, 238 aa, Glycine max
  Clone ID: PAT_MRT3847_64820C.1.pep
QIIKAKYGQDACNVGDEGGFAPSVQDNREGFVLLVDAIEKAGYTGKIKIGMDVAASEFYTKDGKYDLNFMKQPNDGAHVHSTQSLGQLYKNYVKEFPIVSIKDPFDQDDWGSWASLLASVDIQLVDDLLVTNPKRIAEAIKKKACNGLLLKVNQIGTVTESIQAALDSKAAGWGVVVSHRSGETEDNFIADLSVGLASGQTKTGAPCRSERLAKYNQLLRIEEELGSVQYAGETFRSP

SEQ ID NO: 246723 - protein, 429 aa, Glycine max
  unsure (1)..(429): unsure at all Xaa locations
  Clone ID: PAT_MRT3847_64821C.1.pep
MALNLTHQPAIKAPSSSSFAASRPLRAPQSVPLRSPQRSLAVRAAATESPAPAVTAVRECKVKSVKARQIVDSRGNPTVEVDLVANGLFRSAVPSGASTGIYEALELRDGDKSVYGGKGVLNAVRNINEVLAPKLVGVDVRNQADVDAIMLEIDGTPNKSKLGANAILGVSLSVCRAGAGAKGVPLYKHIQEIAGTKELVMPVPAFNVINGGSHAGNNLAMQEFMILPVGATSFAEAFRMGSEVYHVLKGIIKAKYGQDACNVGDEGGFAPNVQDNREGLVLLMDAIEKAGYTGKIKIGMDVAASEFYTKDGKYDLNFKKQPNDGAHVHSAQSLGQLYKDFVKEFPIVSIEDPFDQDDWGSWASLLSSVDIQLVGDDLLVTNPKRIAEAIQKKACNGLLLKXNQIGTVTESIXAALDSXLXSWXVMVSH

SEQ ID NO: 246724 - protein, 56 aa, Glycine max
  Clone ID: PAT_MRT3847_64822C.1.pep
NHRIDCSVGHVTAASEISAAKLIHHPARTPPPITTHAMHVSQGSPAGGIEALLREP

SEQ ID NO: 246725 - protein, 92 aa, Glycine max
  Clone ID: PAT_MRT3847_64823C.1.pep
GGGYVYKENEIVVTEGKCYLFMVWGNRCRCREQVWGCVCRWLIRACNYLQCQHRNPDSFIQFFLPAGPHSSPFPCKYAVSLVLSHTHCPFAK

SEQ ID NO: 246726 - protein, 42 aa, Glycine max
  unsure (1)..(42): unsure at all Xaa locations
  Clone ID: PAT_MRT3847_64824C.1.pep
FIVDXILNNYVNDRSLLFEFNLAICFCXWVFLCFYVEFLIVS

SEQ ID NO: 246727 - protein, 68 aa, Glycine max
  unsure (1)..(68): unsure at all Xaa locations
  Clone ID: PAT_MRT3847_64825C.1.pep
GEVTTMASACVTLKANTHLANSEKGFLGERIKSGFNNSALVMNQMAIRSRSHKRVKHXVGVVSSSLTS

SEQ ID NO: 246728 - protein, 58 aa, Glycine max
  Clone ID: PAT_MRT3847_64826C.1.pep
KMNLPWLKGNLFKHFLRREVSGWQANLPSLNLQMWFTFKSKAFLSSSRTLGRFVGFEL

SEQ ID NO: 246729 - protein, 51 aa, Glycine max
  unsure (1)..(51): unsure at all Xaa locations
  Clone ID: PAT_MRT3847_64827C.1.pep
CFFYLFFYLIPFASVVXXSTKTYIIFKCREQMYIFRRKDQNVHCLDIKTNK

SEQ ID NO: 246730 - protein, 110 aa, Glycine max
  Clone ID: PAT_MRT3847_64828C.1.pep
LISCPAATTVNRAEAGMVAPFTVLKTMAGFPTRKTNNDITSIASNGGREQCMQVWPPGGKTKSETLCYLPDLDDAQLATVVEHLLRQGRIPCLEFESEHGFAHREHSRSP

SEQ ID NO: 246731 - protein, 61 aa, Glycine max
  Clone ID: PAT_MRT3847_64829C.1.pep
SCIFQTPFVDNKSPNLLKKHLIVTYSKISPPTHSHLFFFLSLTTPNFQNTKIGCNENQFRF

SEQ ID NO: 246732 - protein, 50 aa, Glycine max
  Clone ID: PAT_MRT3847_6482C.1.pep
PRVRRLREDDRRVMSTCLRPTFHTRNKQINYSSNQVLMSPYFAFKILKRL

SEQ ID NO: 246733 - protein, 64 aa, Glycine max
  Clone ID: PAT_MRT3847_64830C.1.pep
KKIRRKRAEKGRCSLRGGGGSPIICQGLVASRRPKPKVRKVTFFWCGDEKGVIDGNKTWRERRD

SEQ ID NO: 246734 - protein, 77 aa, Glycine max
  Clone ID: PAT_MRT3847_64831C.1.pep
SNSISFRNYFQNGLLFKLFLEGYFGNLPAPVARSMPRWKKVTACFANTNGKTHVMLPRDVSFVMRAERFEKINPLQK

SEQ ID NO: 246735 - protein, 109 aa, Glycine max
  unsure (1)..(109): unsure at all Xaa locations
  Clone ID: PAT_MRT3847_64832C.1.pep
DXXLXLXVXLWXXXXXXXXXVCXXXVXXXLSXXXXXLXXXSXLXXXCSXXXXVXXXXXXCXXLXVFLCXFCXXLXXLCXXFFXFCXXXXCXXXXXXCXXCWVXGVXLXX

SEQ ID NO: 246736 - protein, 265 aa, Glycine max
  unsure (1)..(265): unsure at all Xaa locations
  Clone ID: PAT_MRT3847_64833C.1.pep
VEGCIRMYELAHRMRGTEGLRQWQEEQERKVRALSEMASEQLKRFDELKELKLHKEFQDLQEVMEKSTREALGHQEKLKEEHRHRAKILNLKLREAEQQRVKQAEQEQLRKEEGQVRLRSLYSLQEEVLQLNQQLDASSQHKELLSVDLAAFQTRGNQLCGLISSIIRTTLESGYPTAENQAEAERALQEMRDLLSDLEQEITRASQVKKKHEEEAKVKRQESQVQQGPAPXTQTSAPSPSPVGAQNEAPAVKVQDSTMPVGTSN

SEQ ID NO: 246737 - protein, 65 aa, Glycine max
  Clone ID: PAT_MRT3847_64834C.1.pep
TFVIYHYCDKTTDDLCDVFFLHIVTVFFLLIYSHCCYCDYHDCCINIIKKHWSKFHLFYDSFISQ

SEQ ID NO: 246738 - protein, 90 aa, Glycine max
  unsure (1)..(90): unsure at all Xaa locations
  Clone ID: PAT_MRT3847_64835C.1.pep
RKNKLVSGEEHGDGVQRQGRTGRNFPAARSPTPVTSEKLGNIGTVKQLRSSRLGLEKSERAGRPPTRKLSDRKAYARQXHSALVLSRFSV

SEQ ID NO: 246739 - protein, 158 aa, Glycine max
  unsure (1)..(158): unsure at all Xaa locations
  Clone ID: PAT_MRT3847_64836C.1.pep
LLAFAHALNYQVVPVVDGNVVRVIARLRAISANPKDSATIKKFXLRKLAAQLVDPVRPGDFNQALMELGATVCTPLNPSCLSLIASELCHALSNALHEITLVSYWHNLFILKSSLYFFSFTFFCGLQWRLRKLAAQLVDPVRPADFNALMELGATVCT

SEQ ID NO: 246740 - protein, 155 aa, Glycine max
  Clone ID: PAT_MRT3847_64837C.1.pep
MQIFVKTLTGKTITLEVESSDTIDNVKAKIQDKEGIPPDQQRLIFAGKQLEDGRTLADYNIQKESTLHLVLRLRGGAKKRKKKTYTKPKKIKHKHKKVKLALLQFYKVDDSGKLQRLRKECPNAECGAGTFMANHFDRHYCGKCGLTYVYQKSEA

SEQ ID NO: 246741 - protein, 155 aa, Glycine max
  Clone ID: PAT_MRT3847_64838C.1.pep
MQIFVKTLTGKTITLEVESSDTIDNVKAKIQDKEGIPPDQQRLIFAGKQLEDGRTLADYNIQKESTLHLVLRLRGGAKKRKKKTYTKPKKIKHKHKKVKLALLQFYKVDDSGKVQRLRKECPNAECGAGTFMANHFDRHYCGKCGLTYVYQKAEA

SEQ ID NO: 246742 - protein, 199 aa, Glycine max
  Clone ID: PAT_MRT3847_64839C.1.pep
ESCGFIPEIKTWTILIQGHCVANEVDRALLCLNRMIEKGCNADAAVLGVLIGSFLGQKRIDDAYKLLVEIVSKHGTSPRHGTYAKLIDNLLGIGKLEEALDLHCLMRNHEFTPIIEPFVQYISKFGSIEDAIKFLKSNGTPRSHSVYFRVFISLLGNGRLSDAIDLLSKIPYISKRKKIPELFSSMENCTVHGLSHISQ

SEQ ID NO: 246743 - protein, 60 aa, Glycine max
  Clone ID: PAT_MRT3847_6483C.1.pep
PRFIPKKPPKQKFHKKRLFPLPGVGKMRTFCPLFLEGKVVKLGFSPFFGPPFFPSVFYGG

SEQ ID NO: 246744 - protein, 67 aa, Glycine max
  Clone ID: PAT_MRT3847_64840C.1.pep
KVENSQKPFFLPMSSFQPFYKSLYLREIFSPFFKTLFLKNIPPPYFLFYWQKIDLYSYFQIPQKSLG

SEQ ID NO: 246745 - protein, 86 aa, Glycine max
  Clone ID: PAT_MRT3847_64841C.1.pep
FLAVATFQYILQSTSISQARHMIKKPVTKPPSTFNLLLQNWSFFINFYTRNNRVLHPICQRIAETFFFALSHFQACSKALSKISLG

SEQ ID NO: 246746 - protein, 235 aa, Glycine max
  Clone ID: PAT_MRT3847_64842C.1.pep
HASAHASGEIPPSFNNLTFLSKFSVAHNRLEGPIPTGGQFLSFPSSSFEGNLGLCREIDSPCKIVNNTSPNNSSGSSKKRGRSNVLGITISIGIGLALLLAIILLKMSKRDDDKPMDNFDEELNGRPRRLSEALASSKLVLFQNSDCKDLTVADLLKSTNNFNQANIIGCGGFGLVYKAYLPNGAKAAVKRLSGDCGQMEREFQAEVEALSRAQHKNLVSLKGYCRHGNDRLLIY

SEQ ID NO: 246747 - protein, 65 aa, Glycine max
  Clone ID: PAT_MRT3847_64843C.1.pep
PTDSSPHIYPYLSQSPTFHPSPVTLFPLMTTTPYSSTLTTPKPSHKIHILTMIHRITLLASHSPP

SEQ ID NO: 246748 - protein, 106 aa, Glycine max
  unsure (1)..(106): unsure at all Xaa locations
  Clone ID: PAT_MRT3847_64844C.1.pep
KTPKRKPQRNPDPKPEGTRTGQTRKQTHPTHTRTQPPPKPKKRRNRNTPRKPDHXHPRNQERPKQENKPPQPKHEQPQPPHTRKRGKGTPRGDPTEPTRKKANTHP

SEQ ID NO: 246749 - protein, 99 aa, Glycine max
  Clone ID: PAT_MRT3847_64845C.1.pep
KKNGKIPWGRSTNIDFLAFHTKTPNWTPPAFCNTNSTEIYPLGSSPFVRNPLTWKILLSYNHALEKLCAAENGSVNHLREGCFSPPSSYGLGSPSTGAA

SEQ ID NO: 246750 - protein, 98 aa, Glycine max
  Clone ID: PAT_MRT3847_64846C.1.pep
DRTVTIYDPRRWSALSRLVHCSKYEITGLAFSTIDPDCIYIQGVDYEVFCGQWKENNKIFSFRGDSNWLGFSKCSDKDVLAGWCDSGSIFIADVASAS

SEQ ID NO: 246751 - protein, 35 aa, Glycine max
  Clone ID: PAT_MRT3847_64847C.1.pep
SQRSCPRHLRAAKWKKSGRSSRRRRHRRKTCLDYR

SEQ ID NO: 246752 - protein, 74 aa, Glycine max
  Clone ID: PAT_MRT3847_64848C.1.pep
SITDIYNRLHKSLRNLQKDHSSSLIDYHISIIDYIVLLRPCLFCGVSSLINYIVLESVPISDQEHFNRLNQNCN

SEQ ID NO: 246753 - protein, 87 aa, Glycine max
  Clone ID: PAT_MRT3847_64849C.1.pep
PVCPCFSFGGSRGPPRWALPPVVFSPAGVCWASACFALWVVPSPVACGRPARPRPVWVGGPPPAFWCPPGPAGRALIGAWRPGSGRS

SEQ ID NO: 246754 - protein, 158 aa, Glycine max
  Clone ID: PAT_MRT3847_6484C.1.pep
LLVHVENTSGQRNDIDIGAEEVLASTIFHLQLRLGVNHEVLPSVVCALCLLMFGASKFAVSRTDLLKDYNTLISSYSSRVRCPPEANPTWRWSFYQPWKDDSLELTDSQKMEEYHACLTLLVIISNVLGAKKLESASLSPVDLERSGLFQWEISLLRN

SEQ ID NO: 246755 - protein, 83 aa, Glycine max
  Clone ID: PAT_MRT3847_64850C.1.pep
MSWRWWYTSSFRWPELHLTVPWPVFRWPALDFSYLNPSWNVESVIQWNLSLVDDILWALVTGLESIALLAMLCYFFLSCGCTL

SEQ ID NO: 246756 - protein, 72 aa, Glycine max
  unsure (1)..(72): unsure at all Xaa locations
  Clone ID: PAT_MRT3847_64851C.1.pep
TMFAGTYATRXALASMSKNYDDISPSLDGLSYKEIGVLNDWENKFQAKYPVVARLLNDLYSIYHMTSSHLNS

SEQ ID NO: 246757 - protein, 100 aa, Glycine max
  Clone ID: PAT_MRT3847_64852C.1.pep
QNMSVFSLCMVRNSHTFPSRTWSVSFYTFGFVPRVLPSWLVQPTGKGCSSFYYVPFPSSQYWFIVNDLMVIISIEKRTRCLCSSLMIYENVMFQKNKNHK

SEQ ID NO: 246758 - protein, 40 aa, Glycine max
  Clone ID: PAT_MRT3847_64853C.1.pep
VCCLSPVRTGFVSSLGGLSSNVSCVLFYPLSKSFGHSFNI

SEQ ID NO: 246759 - protein, 49 aa, Glycine max
  Clone ID: PAT_MRT3847_64854C.1.pep
PRVRPRVRKKKKKKKKKKKKKKKKKKKKKKKKKKKKKKKKKKKKKGRPV

SEQ ID NO: 246760 - protein, 102 aa, Glycine max
  Clone ID: PAT_MRT3847_64855C.1.pep
LDIRHGHLGCFITGSFFCSFWSSLEHPLAVAVPVSHKVSSGGVLVFWKFPGFFPEGSNRLSFVQFFSGLLFPPPFFISRNRVFRFFLIKFFLGCNQKKKLNK

SEQ ID NO: 246761 - protein, 60 aa, Glycine max
  Clone ID: PAT_MRT3847_64856C.1.pep
LLSQKLLALVKTNCSPSRTSTWCTMLVTSSVPWSRTQRVYPGNTCIIRLADLNSRCMLPL

SEQ ID NO: 246762 - protein, 101 aa, Glycine max
  Clone ID: PAT_MRT3847_64857C.1.pep
QPHSLALCAAPRLEFQPHPLRETQIRCFLRRIVSIESQLWVELQRFVHIMVRHQRRRCHQLEMEYRTILKFHEQGRNYCSVFSSLAQMGQLYEELALTMDS

SEQ ID NO: 246763 - protein, 293 aa, Glycine max
  Clone ID: PAT_MRT3847_64858C.1.pep
MEGTSSQSTFAFIPSTIETPSPSIPEISSSSSPGSLARIAQSYPPGFPRKVLAEIIGTFLLVFVGSGSAGLSKIDERMVSKLGASLAGGLIVTVMIYSIGHISGAHMNPAVSLAFTAVRHLPWPQLPFYIAAQLTGAISASYTLRELLRPSNEIGGTSPAGSHIQALIMEMVTTYTMVFISMAVATDSNATGQLSGVAVGSSVCIASIVAGPISGGSMNPARTLGPAIATSYYKGLWVYFVGPITGAVLAAWSYNVIRDTEHPGFPISLSSISSKVRQSIGGTEQKSDQRCLV

SEQ ID NO: 246764 - protein, 295 aa, Glycine max
  Clone ID: PAT_MRT3847_64859C.1.pep
MEGTTSQSTFTFIPSTIETPSPSIPEISSSSPSPGGSLARVAQSYPPGFPRKVFAEVIGTFLLVFVGSGSAGLSKIDESMVSKLGASLAGGLIVTVMIYSIGHISGAHMNPAVSLAFTAVRHLPWPQLPFYVAAQLTGAISASYTLRELVRPSDEIGGTSPAGSHIQALIMEMVSTYTMVFISMAVATDSNATGQLSGVAVGSSVCIASIVAGPISGGSMNPARTLGPAIATSYYKGLWVYFVGPITGAVLAAWSYNVIRDTEHPGFPISLSSISSKVRQSIGGTEQKSDQRCLV

SEQ ID NO: 246765 - protein, 288 aa, Glycine max
  Clone ID: PAT_MRT3847_6485C.1.pep
AFSKGQQQSKRKKERKCNFLCFAPLFKPYHKLRMAHKEFSIALVTLIVLFVNTNLQGATADYGGGWQSAHATFYGGGDASGTMGGACGYGNLYSQGYGTDTVALSTALFNNGLSCGSCYEMRCDDDPRWCKPGSITVTATNFCPPNPSLPNNNGGWCNPPLQHFDMAEPAFLQIAEYRAGIVPVAFRRVPCVKKGGIRFTINGHSYFNLVLITNVAGAGDVNSVSIKGSKTGWQPMSRNWGQNWQSNSYLNGQSLSFQVTTSDGRTVTSFNVAPANWQFGQTFQGGQF

SEQ ID NO: 246766 - protein, 112 aa, Glycine max
  Clone ID: PAT_MRT3847_64860C.1.pep
DHCVVGCIVPSPLPKLPKTRRLTSPITRSARRNLERKKLLLLLLLLLVVLLLPPICKFYFLLASYVCYVCIFLCHRRKIDRYVYDIWMMKRKEGKTEKAIYDCMMINRSGIG

SEQ ID NO: 246767 - protein, 39 aa, Glycine max
  unsure (1)..(39): unsure at all Xaa locations
  Clone ID: PAT_MRT3847_64861C.1.pep
MIREMLHIHGGQCGNQIGAKFWEVVCAXIGIDSIGMYGG

SEQ ID NO: 246768 - protein, 153 aa, Glycine max
  Clone ID: PAT_MRT3847_64862C.1.pep
ESIPAELGRIETLEIALNLSCNSLSGIIPAQMFALNKLSILDISHNQLEGDLQPLAELDNLVSLNVSYNKFSGCLPDNKLFRQLASKDYSENQGLSCFMKDSGKTGETLNGNDVRNSRRIKLAIGLLIALTVIMIAMGITAVIKARRTIRDDD

SEQ ID NO: 246769 - protein, 99 aa, Glycine max
  Clone ID: PAT_MRT3847_64863C.1.pep
MGVERKWLFTLFTAAFLSFIILMFSSLSCFNSPVPFPSSVHYGPHYPPAFAYFISGGNRDGDRIFRLLLAVYHPRNRYLLHLGLDARDEERQKLAAAAM

SEQ ID NO: 246770 - protein, 50 aa, Glycine max
  unsure (1)..(50): unsure at all Xaa locations
  Clone ID: PAT_MRT3847_64864C.1.pep
WGRRSGCRRGCVSNPPPPFSVGGADLGFYLLRLCEFDNAEKVAVCRVXCV

SEQ ID NO: 246771 - protein, 183 aa, Glycine max
  Clone ID: PAT_MRT3847_64865C.1.pep
LPEGSSLSVEKQNDTIVSSNGDFSAGFFQVGDNAFCFSVWFTRSERPTVLWMANRDKPVNGRGSHLSLWKDGNVVLTDAGGTIIWATATLSSSQQLHLKLRNNGNLVLLASKSTNTTIIWQSFDSPTDTLLTLQPLTEQASLVSSRSTTNHSSGFYKLYFDNDNVLRLLYKGPTLSSVYFPEP

SEQ ID NO: 246772 - protein, 112 aa, Glycine max
  Clone ID: PAT_MRT3847_64866C.1.pep
GLLDNHPPGKRGMYPNANKFGKARVFPINIVVKFRAMNFILGTPKENYLACHPAKVKLAPLKRPPHFFNIILFSVLFFFFMSKVHPPFFGIVQESMFSICLQQCSNKPERVA

SEQ ID NO: 246773 - protein, 42 aa, Glycine max
  Clone ID: PAT_MRT3847_64867C.1.pep
FNFHKIVIPFLCQSEGRHQLSCGSMIRCSQLTIYRRLPAAFH

SEQ ID NO: 246774 - protein, 86 aa, Glycine max
  Clone ID: PAT_MRT3847_64868C.1.pep
SFFGNPNNGVGLTKLKPHPPPNNPSFGSLSLYKKENHRNRPPPVPFLGTLFFFFIKKCPLELNNEHFPPMEHFGGGPFGKPLISGQ

SEQ ID NO: 246775 - protein, 324 aa, Glycine max
  unsure (1)..(324): unsure at all Xaa locations
  Clone ID: PAT_MRT3847_64869C.1.pep
QSSANGNTKQVINCIWKHPDARTVYLTCNMXGQEEILVNVSETFGAXIYVDKAKYSXCFENLALTVPEIXEDPTSRFRLFDGSQNLYERARAKLVEAXATLQPEPLVVRPSAQWYACEEKFSDIENTRKKRMDEAVKEQLXDKFGVWHVCYSMHSSKXELEWALQARRWVVSTTSSCRTMELDYVKTHLFNSKGALNNSMWKLLDMTPETSDHVDASEKSASFNLFLEETPQSLXQTGVQTKSPVKQFTETKTLKALLLNNGKDLPISLFGRARFTLQDSGFSIGGCNTLPVNVLRQTVSNDARHESMSDAAAKESLPVNRMIF

SEQ ID NO: 246776 - protein, 57 aa, Glycine max
  Clone ID: PAT_MRT3847_6486C.1.pep
SECSRPTKKSCDMLKEKLTALLVVGLHWMNSTFSFKNKITFSPLKAIYLCTQQITMI

SEQ ID NO: 246777 - protein, 56 aa, Glycine max
  Clone ID: PAT_MRT3847_64870C.1.pep
MADTFLFTSESVNEGHPDMLCDQISNAVLDACLEQDPDSKVACETCTKTNFWYGLS

SEQ ID NO: 246778 - protein, 420 aa, Glycine max
  unsure (1)..(420): unsure at all Xaa locations
  Clone ID: PAT_MRT3847_64871C.1.pep
MNNVAERPLNGDVEDDDEDDGGGLEAWERTYAEDRSWVALQXDESGLLRPXGLIRYLYIPIDQSKAASWRDFRPSRMVVMGKQVPAFIWEFFDQSPLSHVGLVTIKDGIAHCITELGGSPESHIKALMGKLECSGDASLQNALGLVHGYLTQIRSYGYPEVLILYSALSTCDPGDLMETIHPIKKSKIRCAVIGLAPEMFVCKHLCEETGGTYSVALDECHFKELILEHAPPPPAIAEYSTANLIKMGXYKELMLEHAPSPPAIAEYATANETIVEDAQRAAVGSVPICTCHEEAKTGGGYTCPRCKVRVCELPTECRVCGLTLISSPHLARSYHHLFPIVMFDEVTPSSQNDSNHSFPNTCFGCQQSLLSQGNKPGLSVICPKCKQQFCLDCDIYVHESLHNCPGCESSRHSKSVTASQ

SEQ ID NO: 246779 - protein, 81 aa, Glycine max
  Clone ID: PAT_MRT3847_64872C.1.pep
LRLYTCLILGSVRRCTLVVNLITHGPSTAGLSRHVATVSWYFDLSIVAAYYTPSYVLSLALSLIPNFIPYPWHHGCLFNSL

SEQ ID NO: 246780 - protein, 306 aa, Glycine max
  unsure (1)..(306): unsure at all Xaa locations
  Clone ID: PAT_MRT3847_64873C.1.pep
AQSVEGEGEESLVLTMDRFEHLGFLIQFGDKGSEGNSFSQSSPFFANSDPDMPAVPVPAAQVHDWLLQNIVSALEYISERTSSKENGPASASDQDVAMTDACTASVXKVSTSTRSASFIEGISKSSYVKHASDIKGSSVKVLNCHESAIYILAPLRYATVYGCSDATIVIGAVGKAVRVEHCERVHVIVAAKRICIANCRECVFFLGVNQQPLILGDNHKLQVAPYNTFYSQLEKHMNEVGIVPTVNRWDEPLALGMVDPHDSLSHPAXVSDVQAESATRVDPDQFTDXVIPNWFGGESTXATKGT

SEQ ID NO: 246781 - protein, 565 aa, Glycine max
  unsure (1)..(565): unsure at all Xaa locations
  Clone ID: PAT_MRT3847_64874C.1.pep
MTEPTEPSTSSSLARDPTTVVHPRREPFEHGLLPIPRLIFSDPTQTLISLKQKLLELSSNQRVDSAAISESLQIPIEHARLVLDTLASILHSDSEPLVAAKLEEIDSVGVDVHDLVLFLYIQSYKRLLPRTHKDSAAVADVWPSTSAFDGYLSALSPLQLVRSNSRRFMPSQADEEAHQLSYLQKHLANIVSLLAEPVEGEGDESLVLTMDRFEHLGFLIQFGDKGSEGNSFSQCSPFFANSDPDMPAVPAHEAQVHDIFLQKNFFYVEYISXGSDQKVAVTVVCIITFKKVVMRPLSAIRSEGILEAPDLLHXISKSSFANYGSNFKGSSLKVLNCYESAIYILAPLRYATVYGCSDATIVLGAVGKAVRVEHCERVHVIVAAKRICIANCRECVFFLGVNQQPLIVGDNHKLQVAPYNTFYSQLEEHMNEVGIVPTVNRWNEPLALGMVDPHDSLSHPAGVSDVQAESATLVDPDQFTNFVIPSWLVAESTGSTKDNPFTLPDAYMASQHKNHKNLEEIRQLLREASLEESRKRELSSALHVYFKDWLYASGNIRQLYCLQGD

SEQ ID NO: 246782 - protein, 56 aa, Glycine max
  Clone ID: PAT_MRT3847_64875C.1.pep
PFSGISCFGASLCAEFLLKPRAFYFTCYWSAVTTPTSGAVSTLVIVRRFFLTRETS

SEQ ID NO: 246783 - protein, 86 aa, Glycine max
  Clone ID: PAT_MRT3847_64876C.1.pep
SNREGFFFFGKENQDFGNGFKGLGILKVGRVKNESRGVFGNLGRSIFVCPPFWSSFCWPRKNRKNKEQRMDVSKKEKNNTKKQSKQ

SEQ ID NO: 246784 - protein, 167 aa, Glycine max
  Clone ID: PAT_MRT3847_64877C.1.pep
ILFHFSKTMGSKPSFKKRFYQVKIKSLEVTSLREVGQLMGQLQRQAFRKAYGKIWDLARVEVSMEPIASLSQYYDQPLRCFTFEDFQLVPTVKEFEEILGCPLGGRKPYLFCGFYPSTTRVAKVVKISAQELDRVKQNRNGVVGVPRKCLEERAKALENQGEWAFFY

SEQ ID NO: 246785 - protein, 81 aa, Glycine max
  Clone ID: PAT_MRT3847_64878C.1.pep
FLQATKQFVLMHYSDMISITNEITSNSRSTGWTLPEGFTGVVLCYTNIYSRFFCLRVYDKQCSPMDYTTVLSNCIYRVSFC

SEQ ID NO: 246786 - protein, 101 aa, Glycine max
  unsure (1)..(101): unsure at all Xaa locations
  Clone ID: PAT_MRT3847_64879C.1.pep
MRNGLAMDLNQIQLALRSCGRFQAIKHAKSLHSLIIKLCLFNHVFLLNNIISVYAKCSHFNDARTLFDDMPQRNIIFXTTMVSAITNSGRPHEALTLYNHM

SEQ ID NO: 246787 - protein, 290 aa, Glycine max
  Clone ID: PAT_MRT3847_6487C.1.pep
TAARRRQKGTAEQKKERNCNFLCFAPLFRPFHKLRMTHKEFSIALVTLIAVLFVNMNIQGATADYGSWQSAHATFYGGGDASGTMGGACGYGNLYSQGYGTDTVALSTALFNNGLSCGSCYEMRCDDDPRWCKPGSITVTATNFCPPNPSLPNNNGGWCNPPLQHFDMAEPAFLQIAEYRAGIVPVAFRRVPCVKKGGIRFTINGHSYFNLVLITNVGGAGDVNSVSIKGSKTGWQPMSRNWGQNWQSNSYLNGQSLSFQVTASDGRTVPSFNVAPFDWQFGQTFQGGQF

SEQ ID NO: 246788 - protein, 53 aa, Glycine max
  Clone ID: PAT_MRT3847_64880C.1.pep
INGGPPLDRGKLPGGHIFTRNGPQLLLIWGPGQCLGRYFFTGRGFYPMAKKDN

SEQ ID NO: 246789 - protein, 32 aa, Glycine max
  Clone ID: PAT_MRT3847_64881C.1.pep
IYNINTLENRYIKLIKKVIFLNHISHFNINKK

SEQ ID NO: 246790 - protein, 37 aa, Glycine max
  Clone ID: PAT_MRT3847_64882C.1.pep
TRVFQISYVLRFSPEYIYIYIYIYIYIYIYIYIYIYI

SEQ ID NO: 246791 - protein, 60 aa, Glycine max
  Clone ID: PAT_MRT3847_64883C.1.pep
GFFHKRASKTPFFLLLKGDRLLQKNTSEWGLKTPHKGWPQIPYLGQKNSPKLKIMRAWTL

SEQ ID NO: 246792 - protein, 102 aa, Glycine max
  Clone ID: PAT_MRT3847_64884C.1.pep
TNSPQAEHCGACKGTKSEPHSGEWIPPKGGGGPNKGVEKGGPGGANQTSGGLSFPIGKPKQGTGFDNLWGNPQEFEKGGKTPKPSFFGPQGTGRTSEKGGTP

SEQ ID NO: 246793 - protein, 43 aa, Glycine max
  Clone ID: PAT_MRT3847_64885C.1.pep
TAAASEAASTEIEPKRGHALMCLPRVSLFLCALTPSAPQGSTT

SEQ ID NO: 246794 - protein, 44 aa, Glycine max
  Clone ID: PAT_MRT3847_64886C.1.pep
EFGEFFVFCFYNNQYIIIYGQTCVILFNLINQYDLYVWKNLNKI

SEQ ID NO: 246795 - protein, 201 aa, Glycine max
  unsure (1)..(201): unsure at all Xaa locations
  Clone ID: PAT_MRT3847_64887C.1.pep
GILTKTEEKPGYTIHGGKLYFKDRLVLSRNSTRIPLLLKELHNSPLGGYSGFFRTFKRVANVVFWKGMKKTIRDYVALCEICQRNNTIAPAGLLXLLPIPTKVWTDISMDFIGGLPKAQGKDTILVVVVRLXKHAHFLCIKSSXTAKEVAELFIXEVVSLHGFPASIVSDRPKLXMSLFWKELLKKASISLKMSTAYHRTR

SEQ ID NO: 246796 - protein, 83 aa, Glycine max
  unsure (1)..(83): unsure at all Xaa locations
  Clone ID: PAT_MRT3847_64888C.1.pep
AAQSLPHCRLRIYHRQLATVVIVSETHDHSRGAYGNLDIQRISTLPYVYDKHSQYIINXSVNHTSNTIISSYSTNHSAQCSYG

SEQ ID NO: 246797 - protein, 68 aa, Glycine max
  unsure (1)..(68): unsure at all Xaa locations
  Clone ID: PAT_MRT3847_64889C.1.pep
ARKTFVSMFQALIMMPTSLKLRLTISTRQHIEGHFITVRTALGSTYVVRNLRHWTTALFXTSSIAYTR

SEQ ID NO: 246798 - protein, 234 aa, Glycine max
  Clone ID: PAT_MRT3847_6488C.1.pep
HASGVENLSAGSCELASSAPLVVPNDNITRYDVDDIGDQSHPEIVMEQEELSDSEEDIEEHVEFECEEMTDSEGEDGSGCEQALEVQNKEVPISSEENVVKYMDCMKKPCEPRGNYGTEVDGGLLTNSTTLNIALTNDGQDDRSSSSWLSLDSCTADNPVLSKAILQQSTLGEASASKNFSIGKAVREERHTVDMIQQLSVGPHVSTTPRKLRKRSSKSNANLNIGLTVERSKP

SEQ ID NO: 246799 - protein, 108 aa, Glycine max
  Clone ID: PAT_MRT3847_64890C.1.pep
MEKMGVMLITLFLFIAATVAEDADNIGEAIIPENPKFKKFVTDCTSHVAERCSSGSEALHGEGGLALCLFDSMENCLVEHGAAKVNQRSLFVLPKGSIHESMCLSQWS

SEQ ID NO: 246800 - protein, 105 aa, Glycine max
  unsure (1)..(105): unsure at all Xaa locations
  Clone ID: PAT_MRT3847_64891C.1.pep
MDLVPEKTTSGREYKVKDAXQADFGRLXSELGLVEMPGLMAXRTEFXLCQSFKGARITDSLHIIMHTAGVIETLTDLRSEIRWSYYNILFINNHFNCLICMIQRR

SEQ ID NO: 246801 - protein, 39 aa, Glycine max
  Clone ID: PAT_MRT3847_64892C.1.pep
NVDIIIIETSGSLMATRVIPPRILKELRYNTSTRPLNAA

SEQ ID NO: 246802 - protein, 144 aa, Glycine max
  unsure (1)..(144): unsure at all Xaa locations
  Clone ID: PAT_MRT3847_64893C.1.pep
MEKMGVMLITPFLFIAATVAEDADNIGEAIIPENPKFKKFVTDCTSHVAESLISCVCTWTSMVPSTRLLNNQQLGQGFYYFQYEPLLQFRTVLRTCSLESARTCLNAPNVATSPLXRLSHSIHESXCVYPSGAESGTGSLPIKA

SEQ ID NO: 246803 - protein, 220 aa, Glycine max
  unsure (1)..(220): unsure at all Xaa locations
  Clone ID: PAT_MRT3847_64894C.1.pep
MEKMGVMLITLFLFIAATVAEDADNIGEAIIPENPKFKKFVTDCTSHVAERCSSGSEALHGEGGLALCLFDSMENCLVEHGAAKVNQRSLFVLPKGSTPIEPKDSLPSFIPSPPIPPKSKFECWCESLISCVCTWTSMVPSTRLLNNQQLGQGFYYFQYEPLLQFRTVLRTCSLESARTCLNAPNVATSPLXRLSHSIHESXCVYPSGAESGTGSLPIKA

SEQ ID NO: 246804 - protein, 50 aa, Glycine max
  Clone ID: PAT_MRT3847_64895C.1.pep
NILNSKTILHLRPSYNDIRSMTVMRRDRLSMYAMLQRSSRRNRLRMNVIP

SEQ ID NO: 246805 - protein, 164 aa, Glycine max
  unsure (1)..(164): unsure at all Xaa locations
  Clone ID: PAT_MRT3847_64896C.1.pep
LEPLAKVINDSFGVFEGLMTTGHSITASHMTDDGPSSMDWRGGRAALFNIIPSCTGAAKAVGKDLPALNGTLTGMAVQVPTVDVSLXDLTVRLEKEASYDEIRDAIXEGSEGQDEGILGYTEDDVVSTDCMGDSRSSVFDAKAGIALNNSFAMLVXWYDNEWGY

SEQ ID NO: 246806 - protein, 66 aa, Glycine max
  Clone ID: PAT_MRT3847_64897C.1.pep
RLREDDRRVRLRIDYRRVQLRLVVRSITMVCAGLQKTALILFLKTADLPFSGEHPFKTFGLVDKAA

SEQ ID NO: 246807 - protein, 51 aa, Glycine max
  Clone ID: PAT_MRT3847_64898C.1.pep
QSAVTVTRHRLRKGKGFLSNHSKVHSSLSFSLLLRFCVFCCRILFTDFPHL

SEQ ID NO: 246808 - protein, 192 aa, Glycine max
  Clone ID: PAT_MRT3847_64899C.1.pep
MKTILSSETMNIPDGVSIKVHAKVIEVEGPRGKLVRDFHHLNLDFQLITDDGGKRKLKIDSWFGSRKTSAAIRTALSHVENLITGVTKGYRYKMRFVYAHFPINASIGNNSKSIEIRNFLGEKKVRKVDMLEGVSVVRSEKVKDELVLDGNDIELVSRSCALINQKCHVKNKDIRKFLDGIYVSEKGTILEE

SEQ ID NO: 246809 - protein, 94 aa, Glycine max
  Clone ID: PAT_MRT3847_6489C.1.pep
MDTTTQESAPWTSNCLKRVVGWVPARVAPMTTSKRLADRKIARFEKNISKKGSESSKKGYAYPVGPIVLGFFVFVVVGSSLFQIIRTATSRGMA

SEQ ID NO: 246810 - protein, 253 aa, Glycine max
  Clone ID: PAT_MRT3847_648C.1.pep
LYFLIGAPSLAEDNREACMSSPDLSSLWLSTPQSATPGPDTSRAPPPPPPQSQSPLQRRLQTLLEGARESWTYAIFWESSHDNFSGATLLRWGDGYYQGEEEDKAKGKAPKTTTSAEQARRKKVLLELNSLISGPSVSADDVDEEVTDTVWFFLLSMTQSFANGTTLPGQAFFNSTPVWVAGSDRLSELACERARQGRMYGLRTLVCIPSANGVVELASTEVIFQNPDLMNKVLDLFNFNAVDGHPTLPPRQR

SEQ ID NO: 246811 - protein, 192 aa, Glycine max; identical to SEQ ID NO: 246808
  Clone ID: PAT_MRT3847_64900C.1.pep

SEQ ID NO: 246812 - protein, 90 aa, Glycine max
  Clone ID: PAT_MRT3847_64901C.1.pep
NHNKNGVWLKKKEEEEMLGLGCLNLNRFSHFPSPPSLPSSRSDLLKVASRRFALSVTKTQQSPVTKPQSTSTAIIASSLISSRSYLFDLI

SEQ ID NO: 246813 - protein, 122 aa, Glycine max
  Clone ID: PAT_MRT3847_64902C.1.pep
PTRPRTRGLSSEYHAPLSPPPPQPSPFAWISIPLHILHSKLSSFRLRGPIWSFGLPAAALLMSCWILIAFRKNKRTLTPNEARLINIINNKDRKIAKLLHQIAQMNEILIDRHKALAAKVMK

SEQ ID NO: 246814 - protein, 72 aa, Glycine max
  Clone ID: PAT_MRT3847_64903C.1.pep
TIKLMILEDHITISGFIHNSSHPVHSVSLLCPTNCKACQCGQEVTLREVCLRVSMAYPECSASFCVSNPLST

SEQ ID NO: 246815 - protein, 517 aa, Glycine max
  Clone ID: PAT_MRT3847_64904C.1.pep
YQYNMQSLRPSSTSYGGAYTAALAQLVFSAVAQAASDSLAIFGEEPAYTSELVMWATKQTEAFALLVKRHALASSAAAGGLRAAAECVQIALGHCSLLEARGLALCPVLLKLFRPSVEQALDANLKRIQESTAALAAADDWVLTYPPTSNRQTSRPSSISISNTTAFQHKLTSSAHRFNLMVQDFFEDVGPLLSMQLGGQALEGLFQVFNSYVNMLIKALPGSMEEEASLEDSGNKIVRMAETEAQQIALLANASLLADELLPRAAMKLSPINQAAYKDDNRRRTSERQNRHPEQREWRRRLVGSVDRLKDTFCRQHALDLIFTEEGDSHLTADMYINMDGNAEEVEWIPSLIFQELFVKLNRMANIAADMFVGRERFATLLLMRLTETVVLWLSEDQSFWDDIEEGPRPLGPLGLQQFYLDMKFVVCFASHGRYLSRNLQRIVNEIITKAMAAFSATGMDPYGELPEDEWFNDICQDAMERLSGKPKEINGERDLNSPTASVSAQSISSVRSHSSS

SEQ ID NO: 246816 - protein, 597 aa, Glycine max
  Clone ID: PAT_MRT3847_64905C.1.pep
MAYVEVYCPASVKKQLAKVFEESLRITVPDEPDVVPSIDACAVNKAGVKFADYQCNNAMGICSKMKGKQTGFRGPQAIGQAILNNLPQSEMIDSCSVAGPGFVNIVLSKKWIAQRLERLLIDGIDKWAPRLPVKTVLVDFSSPNIAKEMHVGHLRSTIIGDTLARMFEFSRVETLIRRNHLGDWGTQFGMLIAHLFDTYPNPGGFNEATIGDLQAFYKASKVRFENDHEFKMRAQQSVVRLQSGEEKYHRAWQQICDISQAEFEKVYQRLGVRLEARGESYYNDLIPQTLERLDNLGLIEEGDGARVIFVEGVNIPIIAVKRDGGYNYSSTDLAALWNRLNVENVEWNIYVTDVGQWQHFDMVFKAFRRAGWLPNHENEFPKCTHIGFGLVLGEDGKRFRTRSSETVRLVELLDEAKRRCKASLLERDAVKDWSEEEIEKTAEAVGYGAVKYADLRINRLTNYTFSFDQMLNDKGNTAVYLQYAHARICSIMRKSGKDIEEIKKNGNIVLNHEDERALGLHLIQFPEVFEESLTNLLPNVLCEYLYNLTEIFTKKFYTNCQVVGSPEETSRLLLCEATVTVMRQCFYLLGIEPVYRL

SEQ ID NO: 246817 - protein, 81 aa, Glycine max
  Clone ID: PAT_MRT3847_64906C.1.pep
IWLVAQALRLLSHTKHAWFGHTTLCMIQPSSGKQGMFRPIYFSMHEVIITVVVAWFGNGCLMRWNFQCLEAQNGARGVRRM

SEQ ID NO: 246818 - protein, 52 aa, Glycine max
  Clone ID: PAT_MRT3847_64907C.1.pep
ANSNGKSFSILMLIKMVRFDGRNYSFPIGESRFEFAKDNLFLHIHMCKKIFI

SEQ ID NO: 246819 - protein, 83 aa, Glycine max
  Clone ID: PAT_MRT3847_64908C.1.pep
PGYLKHFLILFPLPVICSSIHVAPPLNFSFKWLHSHISYPIFSSFIPVFTFRSTSPLSFTTTSPIHDLFPKHKHNFNMGLSLN

SEQ ID NO: 246820 - protein, 40 aa, Glycine max
  Clone ID: PAT_MRT3847_64909C.1.pep
LIRVHSRPTAQWSKSPITLTKIMVYSNEQCIRSKRTISFL

SEQ ID NO: 246821 - protein, 88 aa, Glycine max
  Clone ID: PAT_MRT3847_6490C.1.pep
QPLRPMLDGRHDSIRPCSWDHLESSVCRLVLVRTQSLYSQAASSGFVWITYIRLFVEFNFLFQRVVIVTFIVILRLDHVFSFICSICI

SEQ ID NO: 246822 - protein, 47 aa, Glycine max
  Clone ID: PAT_MRT3847_64910C.1.pep
IFRWLGIRNTCPVCRFELPTDDPDYEQGKVNRAARGLLELAAARMQF

SEQ ID NO: 246823 - protein, 73 aa, Glycine max
  unsure (1)..(73): unsure at all Xaa locations
  Clone ID: PAT_MRT3847_64911C.1.pep
DGSIKEITTPNTNDNFERPXXXXXXXFGDSEKINNNRPMIHKLSENLTPPLIDRPMSRPSNAYQRPPQYFHTT

SEQ ID NO: 246824 - protein, 97 aa, Glycine max
  unsure (1)..(97): unsure at all Xaa locations
  Clone ID: PAT_MRT3847_64912C.1.pep
YKINSHAIDIIVRVHTLSVLPFXNNNNKYTCMHLSNFINKESSQFQNMHQSLEFAVYLNNHITIKSIISKINNSKVIYPEAQISMLSYQKLLCHSNL

SEQ ID NO: 246825 - protein, 250 aa, Glycine max
  Clone ID: PAT_MRT3847_64913C.1.pep
GPISSWVNQDASDKARGSRNAKEQVEEGKDGSWLAWLDSKKEGSVLYVCFGSMNNFPTTQLGEIAHALEDSGHDFIWVVGKTDEGETKGFVEEFEKRVQASNKGYLICGWAPQLLILEHPSIGAVVTHCGMNTVIESVDAGLPLVTWPLFAEQFFNERLLVDVLKIGVAIGAKKWNNWNDFGDEIVKREDIGKAIALLMGGGEESEEMRKRVKALSDAAKKAIQVGGSSHNSLKDLIEELKSLKLQKLNA

SEQ ID NO: 246826 - protein, 156 aa, Glycine max
  unsure (1)..(156): unsure at all Xaa locations
  Clone ID: PAT_MRT3847_64914C.1.pep
EPEAGSELRVPLMCACPDSYNFTRSMKVKYLVTYPLILGDDPVXLSEKFGISTEEFYAVNSLNPFSTVYPDTVVFVPIKDGPIRIHDIPDSPSPPPGFLSTNPVVTTEESTQSSNLYIAGSVIGFFLLITLLASGLYMKRIRKSDDVHSISQTNSL

SEQ ID NO: 246827 - protein, 40 aa, Glycine max
  Clone ID: PAT_MRT3847_64915C.1.pep
NAAHFVIFFPHLSLVNRLGAILRTNDRFFDRERQLLNCFQ

SEQ ID NO: 246828 - protein, 101 aa, Glycine max
  Clone ID: PAT_MRT3847_64916C.1.pep
MATPNSDATTQTQDSDTVPYSNSPNALVPAAPAVCLLRFATDSAAGALMGSVFGYGAGLFKKKGFKGSFVEAGSYAKTFAVLSGVHSLIVCFPKRLCGPDD

SEQ ID NO: 246829 - protein, 46 aa, Glycine max
  Clone ID: PAT_MRT3847_64917C.1.pep
ELAYHSAACPTFNPYTMYISMAQKYIMKHSQQNMLSNSFCRLLAAV

SEQ ID NO: 246830 - protein, 60 aa, Glycine max
  Clone ID: PAT_MRT3847_64918C.1.pep
GAKKSPTREILVGNQEGVRLMCRKSQFPFFPFLLVTFLYFVQILSGLKTFLFTSLSSSNL

SEQ ID NO: 246831 - protein, 189 aa, Glycine max
  Clone ID: PAT_MRT3847_64919C.1.pep
GHHHRMDLNQFSSFNVISSAGFPCASSCTPISPISNRLLGSLKLDIGNSPNSALSTHFDSDTVSSALSDSQEQHNCGEIHSGVNSCNSLQESNHYLHRPVSSVDHLEDGLHLSTRSFFPQDASYDHETRHALLELETSLMAPDDEDQVTTSSTSLGDSSRPTASDQRNRSWSHEGQSSDVAYVEKRHKS

SEQ ID NO: 246832 - protein, 97 aa, Glycine max
  Clone ID: PAT_MRT3847_6491C.1.pep
MLIYFCTMNLKFANILTCSCQICECSLLFDRLEVLNISGNRLTDACGSYLSTILKNCTGKLHDMKLCQFEYCFSYFLKNADFHVLPFSSFYYNVVKW

SEQ ID NO: 246833 - protein, 154 aa, Glycine max
  Clone ID: PAT_MRT3847_64920C.1.pep
PPRNLGGPLGNAPPTRGPGFFSHAPPLVPSRRGGLFYPPGGTPRGVLKKETNFGNFGAFSGGAGIFRPFFFFHFWGGGGPPHFFFKQKVAPVLFQGGGGGSFNTPPGFFLLFKEEIPSFVSPCFNPVVPAGFSLFPAAQIPRVSPGFFQGFPAV

SEQ ID NO: 246834 - protein, 81 aa, Glycine max
  Clone ID: PAT_MRT3847_64921C.1.pep
GHHHRMDLNQFSSFNVISSAGFPCASSCTPISPISNRLLGSLKLDIGNSPNSALSTHFDSDTVSSALSDSQEQHNCGEIHS

SEQ ID NO: 246835 - protein, 96 aa, Glycine max
  unsure (1)..(96): unsure at all Xaa locations
  Clone ID: PAT_MRT3847_64922C.1.pep
KKIKKQIFFTPNNYIIIPLVCFKLXLLPKQNPXHXLSIPNNXXXNSFNITXTIHSPTSPPYTPPLPIPKIIXPTPTPSPNSPPNPTPSFPTNIPSS

SEQ ID NO: 246836 - protein, 87 aa, Glycine max
  Clone ID: PAT_MRT3847_64923C.1.pep
NHATMVGIDVLVKHCGCIPRNRGTISSNTHTSIWWVLGYSDGRLGGSPWHGVFGIIEKGLFSQMTASKVTQIDGGCFVLPLNMAYIQ

SEQ ID NO: 246837 - protein, 60 aa, Glycine max
  Clone ID: PAT_MRT3847_64924C.1.pep
MQLMVGESAIQQIYIQEQRHDHISEQASGNVKEHSRNEIQCVIMNYHDMVYVSVHHTVLE

SEQ ID NO: 246838 - protein, 355 aa, Glycine max
  unsure (1)..(355): unsure at all Xaa locations
  Clone ID: PAT_MRT3847_64925C.1.pep
GKLVNFLKKASVRDRADETFSESETDRXSVDVSIPESGVILKLLAXEGDTVELGNKIAIISRSADATHVAPSETISEKGAPQPTQKVSEEKKAPKVETAPAKEKPKAPPAILKSPTEPQLPPKERERRVPMTRLRKRVATRLKDSQNTFAMLTTFNEVDMTNLMKLRSDYKDAFVEKHGVKLGLMSGFVKAAVNALQHQPIVNAVIDGDDIIYRDYIDISIAVGTSKGLVVPVIRNADTMNFADIEKQINAFAKKANDGTLSIDEMAGGTLTISNGGVYGSLLSTPIINPPQSAILGMHSIVSRPTVVGGNIVPRPLMYVALTYDHRIIDGREAVFFLRRIKDIVEDPRRLLLDI

SEQ ID NO: 246839 - protein, 88 aa, Glycine max
  Clone ID: PAT_MRT3847_64926C.1.pep
NIFCSWKPPSSTVVLHPYGDDDACCCIACPNCSRSHDPHNDHTPSPPSPSTFRRPYVSRMATRPGERGDDRFILFYFGVPFCRLLAAV

SEQ ID NO: 246840 - protein, 77 aa, Glycine max
  Clone ID: PAT_MRT3847_64927C.1.pep
NQSNIQITGLFYDGRYKFETKYERNLAMTEDEKMEVISNRGIPADGLEKRAHEFDIHVAHESLKDRIPAVDTLYSSN

SEQ ID NO: 246841 - protein, 292 aa, Glycine max
  Clone ID: PAT_MRT3847_64928C.1.pep
TCGEEMRKWDSLLLDKNRKMEHELTQLKVTLSEKTSLLETAEQKIAELTAKVNEQQKLVQKLEDHILKGYSSNSKDRKGNFLDDWDLSEAGGGEVSENTDQRQVSLDQDQSSMLKVICNQRDRFRTRLRETEEEIRQLKEKIGVLTVELEKSKADNVKLYGKIRYVQDYNHEKVISRGSKKYAEDLESGFASDVESKYKKIYEDDINPFAAFSKKERDQRYKELGFRDRITLSSGRFLLGNKYARTFAFFYTIGLHILVFTCLYRMSALSYLSNGPEEFLVGEKNVDLPRGP

SEQ ID NO: 246842 - protein, 98 aa, Glycine max
  Clone ID: PAT_MRT3847_64929C.1.pep
KGFQNAFRASLGARFHSSPPGFPGFALDFSFLSPPFFFLDVNDPPPQFGFPPLFYCGFFFCPRGFCPFWFFLTRGGQSNGGAPLLNPFPPRPLSWGGA

SEQ ID NO: 246843 - protein, 77 aa, Glycine max
  Clone ID: PAT_MRT3847_6492C.1.pep
CVSIGDDVKRGKFQVLLPIILLASSDTPQEYMNVKRQERVVGLSNKPPRNPFYLCFNGMDGSDMIQCPPFPLFTLCI

SEQ ID NO: 246844 - protein, 70 aa, Glycine max
  Clone ID: PAT_MRT3847_64930C.1.pep
WYLMRFSLEWPLRTLCERTSSRGSAFISSVSSYQPAVFDQLVCSRCVLSRFIFSSPASKTLSRFFRPRVS

SEQ ID NO: 246845 - protein, 50 aa, Glycine max
  Clone ID: PAT_MRT3847_64931C.1.pep
LAAKGLGFKILRGPITRTDFHKVLCTERPTVNKAALHVGERFAKEFVEEG

SEQ ID NO: 246846 - protein, 43 aa, Glycine max
  Clone ID: PAT_MRT3847_64932C.1.pep
MASILHYFLALSLSCSCLGFLSDSVTPTRPINLVDLPVHNDGS

SEQ ID NO: 246847 - protein, 52 aa, Glycine max
  Clone ID: PAT_MRT3847_64933C.1.pep
ISVFGFCINFSDLKKIEYYLESSISVLDYLFYVGPSLFVVFLKAMEKQWFHQ

SEQ ID NO: 246848 - protein, 41 aa, Glycine max
  unsure (1)..(41): unsure at all Xaa locations
  Clone ID: PAT_MRT3847_64934C.1.pep
RXPSGTLXNRKGSLTFSGEAXXXVXXGFRMEYXHCGWXRRL

SEQ ID NO: 246849 - protein, 82 aa, Glycine max
  unsure (1)..(82): unsure at all Xaa locations
  Clone ID: PAT_MRT3847_64935C.1.pep
LLSSMKDHNIQVIFDTHTXTPVIGTSSGGGGLTFHNIPPSLSYIRNTNLTSKSIVPMLILFNYTVQYTNHVLDKTKSALTLY

SEQ ID NO: 246850 - protein, 67 aa, Glycine max
  Clone ID: PAT_MRT3847_64936C.1.pep
IHCNWFYFVVVVINLPGLARCGKSCRLRWLNYLRPNLKRGNYTKEEEETIIKLHKLEKSYEIVNPIF

SEQ ID NO: 246851 - protein, 57 aa, Glycine max
  Clone ID: PAT_MRT3847_64937C.1.pep
MKKIVLLIVRNCYSHLSIVIFIPHMCQKNIFQKYPFNKIIIVLLKLYNRIIFTLKMR

SEQ ID NO: 246852 - protein, 86 aa, Glycine max
  Clone ID: PAT_MRT3847_64938C.1.pep
SYSCVVCSVSLISPKPRTPSNRTKHLKEPAGKESKTGPWNLTIVVVENSDYPIHPNRRKDKRTKLFTENQGKVGFSESGVCKRRSS

SEQ ID NO: 246853 - protein, 56 aa, Glycine max
  Clone ID: PAT_MRT3847_64939C.1.pep
KPVVFQINCLEGHSFFSIWRIIRRGPFGLILLTLIQLFWRLLPSLKRGINPRGPLF

SEQ ID NO: 246854 - protein, 191 aa, Glycine max
  unsure (1)..(191): unsure at all Xaa locations
  Clone ID: PAT_MRT3847_6493C.1.pep
MFRSVVFKKKAILXLGISGVFNGVIKNMHLHWNHQKHVKLITKQKTLAFVEDTARLLEYESGGILVAIDKVPKGFSLIYYRGKNYRRPMTLRPRNLLTKAKALQRSVVMQRHEALSQHVTELGEKIEEMKKKLGLSQDLGTKDRWNVEDHNQIDHISEFTQSEEEYSDGDDTDGNFNDDEYSECNDNDSEF

SEQ ID NO: 246855 - protein, 344 aa, Glycine max
  Clone ID: PAT_MRT3847_64940C.1.pep
MESATSWSNPLPLSSLPSPSHSRHPSAFKFMAFSTLHTFSLPSLSSPSSFHPFPLSSLSPKPTSFNPRPLFPRTMHASRIQDAVGGALALVQSSPATWQSALLSNALIFFLGSPILVSGLSLSGIGAAFLLGTLTWRAFGPSGFFLVATYFVIGTAATKVKMAQKVAQGVAEKRRGRRGPGSVIGSSAAGCICAFLTIFGVGGEAFSRLWRLGFVASFCTKLSDTVSSEIGKAYGKTTYLVTTFKIVPRGTEGAVSVEGTLAGILASIVLALVSFLMGEVGSHEAIICVLAAQIANLGESIIGAALQEKEGFKWLNNDAVNVINISMGSIIAIFMQQALQICGS

SEQ ID NO: 246856 - protein, 347 aa, Glycine max
  Clone ID: PAT_MRT3847_64941C.1.pep
MESATWRNPLPLSTLTSPSHLRHPSPYKFSTLHPFPLSSLSSSFSFHPFPLHLTPSLSPFSPKPISFNPLRPLPRTMHATRIQDAVGGALALVQSSPATWQSALLSNALIFLLGSPILVSGLSLSGIGAAFLLGTLTWRAFGPSGFFLVATYFVIGSRAATKVKMAQKVAQGVAEKRRGRRGPGSVIGSSAAGCICAFLTIFGVGGEAFSRLWRLGFVASFCTKLSDTVSSEIGKAYGKTTYLVTTFKIVPRGTEGAVSVEGTLAGILASIVLAFVSFLIGEVGSHEAIICVLAAQIANLGESIIGAALQEKEGFKWLNNDAVNVINISMGSIIAVFMQQALQIWGS

SEQ ID NO: 246857 - protein, 81 aa, Glycine max
  Clone ID: PAT_MRT3847_64942C.1.pep
KGGGWKRKGFVLLTKRKKRTRSSPLTESLWTGSMFFIIMSSNLRHESTKAELCLRLEPCLIAHKNEVKDRSCAAKTPSSIY

SEQ ID NO: 246858 - protein, 83 aa, Glycine max
  Clone ID: PAT_MRT3847_64943C.1.pep
IFPPVFLKPHSWDIACFRIPFTDPIIQFGLKMPILGLFPCLSKKFHFEKIQHLKAFSKPFTVGPKKTNKLCVIKLNQIFQNPK

SEQ ID NO: 246859 - protein, 98 aa, Glycine max
  unsure (1)..(98): unsure at all Xaa locations
  Clone ID: PAT_MRT3847_64944C.1.pep
TSHGALYQRFPLPMKTSYGXLTSEVKCASYMLAXESHNIRAFKTIPEECVEPTNDYINGQHIKSYSKTVNQPSFFYAXEPQFHHNYIFIFPIYYTLTP

SEQ ID NO: 246860 - protein, 175 aa, Glycine max
  Clone ID: PAT_MRT3847_64945C.1.pep
ESLTENEPECLAWLDNQPAGSVLFVTFGSGGVLSSEQQNELAWGLELSGVRFVWVVRVPNDASAFAAFFNAGGDDDATSYLPEGFVSRTRERGLVVRSWAPQVAILRHASTGAFVSHCGWNSTLESVANGVPVIAWPLYAEQRMNGTTVEEDVGVGVRVRAKSTEKGVVGREEIE

SEQ ID NO: 246861 - protein, 66 aa, Glycine max
  Clone ID: PAT_MRT3847_64946C.1.pep
LKREIKTSGSNKWGNHTICCVQSIEKFLLRGRIWKYFWHIVLLFVLVKLKYSQCHKYMFTIFKKMV

SEQ ID NO: 246862 - protein, 120 aa, Glycine max
  Clone ID: PAT_MRT3847_64947C.1.pep
LAGHCLCTLSLTTSRSITSGNSCKQRFFLTFCYEPRFCPSSRLCHGYGIGHFGPSLIHWLWVVLLYHRLLFSPSNGGINTLSSTVLPPTWLVTLAARGTTMGSRRYSPIPAPSPRPSFMR

SEQ ID NO: 246863 - protein, 48 aa, Glycine max
  unsure (1)..(48): unsure at all Xaa locations
  Clone ID: PAT_MRT3847_64948C.1.pep
QQQXXHXXYXFNLXXLLLLGFRXXQRTTXFXSSXLTLXXNSIRLEKVS

SEQ ID NO: 246864 - protein, 56 aa, Glycine max
  unsure (1)..(56): unsure at all Xaa locations
  Clone ID: PAT_MRT3847_64949C.1.pep
SHENRSTIIALMVCAFSLIMYFTFRFFKKGSFSSTESXKHLSLFYSLKQAVYYESA

SEQ ID NO: 246865 - protein, 60 aa, Glycine max
  Clone ID: PAT_MRT3847_6494C.1.pep
LYNHHNGLSRCRSLPSTKINLLICFVFANSSLFININININIGDIKYIVNSILFVLINKG

SEQ ID NO: 246866 - protein, 71 aa, Glycine max
  Clone ID: PAT_MRT3847_64950C.1.pep
PLHDPFQYLAKNYLVMKNWLALWIYRFFQLSSKIGLIFLPLKKCFPKIVCLAWEYIFQCCLLLAITKIPFM

SEQ ID NO: 246867 - protein, 74 aa, Glycine max
  unsure (1)..(74): unsure at all Xaa locations
  Clone ID: PAT_MRT3847_64951C.1.pep
PQTXEXPXXXXTPPXXPRXMXXAXKMFXHSNXNMGTXNVHSXRQHVXVLXXFSVGXLEXIXRVXIWRPXLSXGX

SEQ ID NO: 246868 - protein, 38 aa, Glycine max
  Clone ID: PAT_MRT3847_64952C.1.pep
CQRLNPSSTKTGNGCAGTLERATSELDDDEVWIVYIET

SEQ ID NO: 246869 - protein, 77 aa, Glycine max
  Clone ID: PAT_MRT3847_64953C.1.pep
CLPILRIRFSVCGTPDCKSVPMFDSLHYRALINVIGLCVSGVNSQLWKSPVYQSQVELVLQWSGLDPGPRGPSVRVE

SEQ ID NO: 246870 - protein, 73 aa, Glycine max
  unsure (1)..(73): unsure at all Xaa locations
  Clone ID: PAT_MRT3847_64954C.1.pep
FGLKSGRRGRVTCMASDKVKLITPKGXVEFECPDDDFIDDKAQDQRIELPYSRKVGSCDSCVVLIVEGNAGPN

SEQ ID NO: 246871 - protein, 82 aa, Glycine max
  Clone ID: PAT_MRT3847_64955C.1.pep
VDLVGGYYDAGDNVKFGLPMAFTITLLSWGAIEYGEQIAAAGEYAHALEAIKWGTDYFIKAHTQPNVLWLEVLISIPVNILF

SEQ ID NO: 246872 - protein, 69 aa, Glycine max
  Clone ID: PAT_MRT3847_64956C.1.pep
FCTCPTFVLISFFYFLYIFHIYILILSLSCTPISHAPNIIVLDKYIAQSILGFFMTMTRQWRRTIMKGA

SEQ ID NO: 246873 - protein, 89 aa, Glycine max
  Clone ID: PAT_MRT3847_64957C.1.pep
RKKNAILPLSYMWLLQVFLGQGIETFITSIGENTLFFQLEPGMHLHCAQTQDRNQSHSGIHHGSFYNATPTPSTAAAIDAEASSRVLLF

SEQ ID NO: 246874 - protein, 55 aa, Glycine max
  Clone ID: PAT_MRT3847_64958C.1.pep
KVKHRKSHLTIYEPEGKILMTSAPLKTKILVNCQARFEKRVLIHGKHYSLQHGKI

SEQ ID NO: 246875 - protein, 417 aa, Glycine max
  unsure (1)..(417): unsure at all Xaa locations
  Clone ID: PAT_MRT3847_64959C.1.pep
IIIAINKIDKDGANPERVMQELSSIGLMPEDWGGDIPMVPISALKGKNIDDLLETVMLVAELQELKANPDRSAKGTVVEAGLDKSKGPFASFIVQNGTLRRGDIVVCGEAFGKVRALFDDGGKRVDEATPSIPVQVIGLNNVPIAGDEFEVIESLDTARERAETRAESLRNERISAKAGDGKVTLSSLASAVSSGKLSGLDLHQLNIILKVDLHGSIEAVRKALEILPQDNVTLKFLLEATGDVSTSDVDLAVASKAIILGFNVKAPGSVKSYAENKAVEIRLYKVIYELIDDVRNAMEGLLEPVEEHVTIGSAVVRAVFSSGSGRVAGCMVTEGKILQDCGIRVKRKGKVVHVGILDSLRRVKEIVKEVNAGLECGLGLEDFDDWEEGDILEXSTQFRRGGPLKRPQHQWQLLWRE

SEQ ID NO: 246876 - protein, 144 aa, Glycine max
  Clone ID: PAT_MRT3847_6495C.1.pep
HKKPRGKKPTFFFNEKDPGKKTGGFPPGTGGAGFYLLEALNNPLVGGGPLKQGGTLAPPERKTRTSPKKGVKKPFLAPLLLPQKGGGQGAPKPIGGGKFPLLKTKKGPLGFGGAPQPERGREPFSPPGWGFLGKKNSPQGGSFF

SEQ ID NO: 246877 - protein, 501 aa, Glycine max
  unsure (1)..(501): unsure at all Xaa locations
  Clone ID: PAT_MRT3847_64960C.1.pep
KVAASEAGGITQGIGAYKVEVPVDGKKLPCVFLDTPGHEAFGAMRARGASVTDMAIIVVAADDGIRPQTNEAIAHAKAAGVPIIIAINKIDKDGANPERVMQELSSIGLMPEDWGGDIPMVPISALKGKNIDDLLETVMLVAELQELKANPDRSAKGTVVEAGLDKSKGPFASFIVQNGTLRRGDIVVCGEASGKVRALFDDGGKRVDEASPSMPVQVIGLNNVPIAGDXFEVVESLDTARERAEARXESLRNERISAKAGDGKVTLSSLASAVSSGKLSGLDLHQLNIILKVDLQGSIEAVRKALEILPQDNVTLKFLLEATGDVNTSDVDLSVASKAIILGFNVKAPGSVXKSYGENKAVEIRLYRVIYELIDDVRKAMEGLLEPVEEQVTIGSAVVRAVFSSGSGRVAGCMVTEGKILNDCGIRVKRKGKVVHVGILDSLRRVKEIVKEVNAGLECGLGLEDFDDWEEGDILEXPSTHFRRRGPLKRPQPQWHLPWRE

SEQ ID NO: 246878 - protein, 103 aa, Glycine max
  Clone ID: PAT_MRT3847_64961C.1.pep
KDIYFYLVCTIGQLITGSWDKTLKCWDPRGASGQERTLVGTYPQPERVYSLSLVGHRLVVATAGRHVNIYDLRNMSQPEQRRESSLKYQTRCVRCYPNGTGEL

SEQ ID NO: 246879 - protein, 74 aa, Glycine max
  Clone ID: PAT_MRT3847_64962C.1.pep
FMGFFDYIFYPGDSLVGGSLLELLDKESFRKNPALPFPEGAFVQKAMLAGFPCCKKKFRGWLIRADPGGHQENG

SEQ ID NO: 246880 - protein, 166 aa, Glycine max
  Clone ID: PAT_MRT3847_64963C.1.pep
RVLSQYVLPIAKTVLIPGCFPAKLGNLPFSERLYPGTKRKRGGRPSTRSQGSGWWSLTRAIQETIQSKASKKKQKDSQSSRDSSRRQVLQRKLSIQREDRGGEEHRGREALERQDGVPLLHVFGLSFSCVDASKAAPSPPPPSALPVGYLRGLELRDCLLNVPYLT

SEQ ID NO: 246881 - protein, 94 aa, Glycine max
  Clone ID: PAT_MRT3847_64964C.1.pep
EPLPMGFAVLKVHLATIPVTGTGIILARSFGPSVIFNTAKAWPNLWINWVGPFVEVGVAAFSHQYIVRGSAKNVLASFRGGVIIKGKNNKKKSR

SEQ ID NO: 246882 - protein, 332 aa, Glycine max
  Clone ID: PAT_MRT3847_64965C.1.pep
PFLWDMVKSTFEGLKKGNHPVRSSEGTGGTYFMHDSTGHEHVSVFKPMDEEPMAVNNPKGLPNSSNGEGLKRGTKVGEGAFREVAAYLLDHPKSGPRLASGEAVGFSGVPPTVMVQCLHQEFNHPNGFASSSKHVKIGSLQKFISNDGNCEDYGPSAFPVEEVHKIAVLDIRLANADRHAGNILIKKEADGQIKLIPIDHGYCLPDKFEDCTFDWLYWPQVRQPYSPETVNYINSLDAEKDLELLKCYGWDIPLECARTLRISTMLLKKGVERGLTPYAIGSIMCRENLNKESVIEEIIGEAQDSLLPGMEESAFLEAISQIMDYHLDKLAN

SEQ ID NO: 246883 - protein, 112 aa, Glycine max
  unsure (1)..(112): unsure at all Xaa locations
  Clone ID: PAT_MRT3847_64966C.1.pep
TPLHIKYISNCFNKITIDNPYCINFSIFLNQSVYSFFSKRIFKVFYQFLYFYCSHFISYSSIYNTYDLSLTLYFYFFLFYFLFLYYLLLYFXFIFLCHFFLLLYISFLFNFL

SEQ ID NO: 246884 - protein, 74 aa, Glycine max
  Clone ID: PAT_MRT3847_64967C.1.pep
TTQASFGSQDGRRKIVDPIVLTTCSQESLSIAISITTKCISPESSFRPSFEDVLWNLQYAAQVQATTDADHKSD

SEQ ID NO: 246885 - protein, 77 aa, Glycine max
  Clone ID: PAT_MRT3847_64968C.1.pep
ASAIMFKDWSGQDVSSIASEICGFITVLTGTIILHMTREQEESNMQKTSTWFIGEDLMKGVENEHLIRIHDSDYLER

SEQ ID NO: 246886 - protein, 79 aa, Glycine max
  Clone ID: PAT_MRT3847_64969C.1.pep
KLLESTQKNLFITLAFNLTRTFNIYWQITMGFWPFNLTSGSKPLACSRGGFNLSGPTELVREPLIYFCSNFVCLMATTP

SEQ ID NO: 246887 - protein, 85 aa, Glycine max
  Clone ID: PAT_MRT3847_6496C.1.pep
HSYAHASLNLELHLIRYLKPWHPECHDSHTLPLKVKCSVLSKRASVRDRTSVPPLKCRARQLEHHVADGNAYMNTQLMNRETSTC

SEQ ID NO: 246888 - protein, 65 aa, Glycine max
  Clone ID: PAT_MRT3847_64970C.1.pep
DISSIASEICGFITVLTGTIILHMTREQEESNMQKTFTWFIGEDLMKDVENEHLILIHDSDYLER

SEQ ID NO: 246889 - protein, 119 aa, Glycine max
  Clone ID: PAT_MRT3847_64971C.1.pep
RHLFCIPLSWCIRSNQSLVEPSRVPDGPESVSNTNTSATLKRHLGLGFLQFPNLYLPKIRVFSSHGGRLLEPATCVSASLRHAQTVAFRLRYACLRSVFQVMRCIIILLVMMTVLVTEC

SEQ ID NO: 246890 - protein, 337 aa, Glycine max
  Clone ID: PAT_MRT3847_64972C.1.pep
MTETGVSDNFKGLILAMGSSAFIGSSFILKKKGLKRAAARGTRAGVGGYTYLLEPLWWAGMVTMIIGEIANFVAYIYAPAVLVTPLGALSIIVSAVLSHFLLKERLPKMGVLGCVSCIVGSIVTLFHAPQEQTPSSVQEIWDLATQPDLLFYVMAMVSVVLALIVHFEPRYGQTNMLVYLGICSLVGSLTVVSIKAIGIAIKLTLDGISQIVYPQTWFFLTVATICVITQLNYLNRALDTFNATIVSPVYYVMFTTLTIIASAIMFKDWSGQDVSSIASEICGFITVLTGTIILHMTREQEESNMQKTSTWFIGEDLMKGVENEHLIRIHDSDYLER

SEQ ID NO: 246891 - protein, 70 aa, Glycine max
  Clone ID: PAT_MRT3847_64973C.1.pep
EKGFLWQPPGNPPNDARLKRFFLRPARPRRNFVINSPLKKTGWGNLKKSTQLGSSSLPFKNGVSILKAIL

SEQ ID NO: 246892 - protein, 62 aa, Glycine max
  Clone ID: PAT_MRT3847_64974C.1.pep
DRKGINHVYYETEYLIEWRHTNSTFVPCFLFARKFSQGAAMRLLSQEVVNHFEVSALLATPT

SEQ ID NO: 246893 - protein, 39 aa, Glycine max
  Clone ID: PAT_MRT3847_64975C.1.pep
TMFPPKCYLHHRLNLEPQINIWRVKLYIAKLIGLERKAG

SEQ ID NO: 246894 - protein, 54 aa, Glycine max
  Clone ID: PAT_MRT3847_64976C.1.pep
WGGYWQLHPYTRHHFTAPYFRFLPFLSLHFWRLSPASPKKVETLRSLKDCYTGL

SEQ ID NO: 246895 - protein, 82 aa, Glycine max
  Clone ID: PAT_MRT3847_64977C.1.pep
CGGWTGGRLCERRAITERMFSLMDGYLKNDPLNLQKDILNHVEYTRARSRFNFDNFKAYQALSHSVGYRLIGRMHDTHVYVK

SEQ ID NO: 246896 - protein, 93 aa, Glycine max
  unsure (1)..(93): unsure at all Xaa locations
  Clone ID: PAT_MRT3847_64978C.1.pep
KXREKNEYXYVTSXKPXXPYGVXRVSRCXDDDGQMVMTSDFEKKXESEXRGRWLLLLLLGVGGDLILXSIFLLSKVSIGVTLDWDWEAKKTNQ

SEQ ID NO: 246897 - protein, 55 aa, Glycine max
  Clone ID: PAT_MRT3847_64979C.1.pep
NYDVKHTGGQRIGCPHMTLTFTAMSIGMPSQNTPKLHKKLRPENSHAYRLCRCEK

SEQ ID NO: 246898 - protein, 52 aa, Glycine max
  Clone ID: PAT_MRT3847_6497C.1.pep
RGFESPSMMQRFYLIAWKMVIVVCFRLWFYVCKHMNEYLSFLCVIKNVQLNF

SEQ ID NO: 246899 - protein, 64 aa, Glycine max
  Clone ID: PAT_MRT3847_64980C.1.pep
ISSMGLFMLTFTVDKDTYTAYIMCDKNFNSLHILIVQETQKPSHAYCRCYKIKYIINNSTHTML

SEQ ID NO: 246900 - protein, 418 aa, Glycine max
  Clone ID: PAT_MRT3847_64981C.1.pep
TRCIWKPAFMNGTDWPSPAANLSIVEQQIKKILAATGVDVPSLAIDGNAPATLPLPLAALLSLTITYKLDKSCERFVILAGPSLIALSSGCPWPCMPIVGALWAQKVKRWSDFFVFSASATVFHHSRDAVVQLLRSCFASTLGLGSACIYNNGGVGTLLGHGFGSHYSGGFTPVAPGFLYLRVYRSIRDVMFLTDEIVSLLMLSVRDIANGGLPKGEVEKLKKTKYGIRYGQVSLSGSMTRVKHAALLGASFLWISGGPCLVQSLITETISSWFLSAQGLEQEGGESGVVVAMLRGYALACFAVLGGTFAWGIDSSSPASKRRPKVLEIHLEFLANALDGKISLRCDCATWRAYVSGVMSLMVSCTPLWIQELDVGILKRMSNGLRQLNEEDLALHLLEIRGTSVMGEVAEMICQTRL

SEQ ID NO: 246901 - protein, 72 aa, Glycine max
  Clone ID: PAT_MRT3847_64982C.1.pep
SLSCSILIQIKGISLFWSSSISSLTNSLIIPICLTFLVLFLPPIVHGVYFSFFWISSCSYYNSTEPPAYVIK

SEQ ID NO: 246902 - protein, 218 aa, Glycine max
  Clone ID: PAT_MRT3847_64983C.1.pep
MRLTRSCNSVILPHQVAILAYRGQLARCLIAVSIGPLSSRMRGESVALVSLVGEFGVPRAIVSDQGTHFCKKSMYALLKKYGVVHRISTPYHPQTNGQVENSNREIKRILEKIVQPNKKDWSTRLDDALWAHRTAYKAPIGMSPYRVVFGKACHLLAGEERKLQLSELDEIRLEAYENSKFYKEKTKKFHDSLIAKKDFVLRSTVNPQIRASRSMDTG

SEQ ID NO: 246903 - protein, 66 aa, Glycine max
  Clone ID: PAT_MRT3847_64984C.1.pep
PTNKLTVNIYHKKKYSILIKHHNSCDDKIKYFGILLASTKIRTNFLKPHTHSQKKKNEREKKFNMY

SEQ ID NO: 246904 - protein, 118 aa, Glycine max
  Clone ID: PAT_MRT3847_64985C.1.pep
RGVIKLKTFFCQRICPRPGTLSFFRRKKKWVHPPNQGALQVFLGLEPPPKVFFFFLPPRKKDLGFFYPQVPQGQKRSPPWGQFSKGREKTDFFISQGIRGFFKKKGTNLKVPGPRFNV

SEQ ID NO: 246905 - protein, 66 aa, Glycine max
  Clone ID: PAT_MRT3847_64986C.1.pep
CCRSHAPPLGHGAAHAVRMMSVRTVRCVGGSVSVHGLERPVASHMFCINYELLNYVAISGHQIKVP

SEQ ID NO: 246906 - protein, 83 aa, Glycine max
  Clone ID: PAT_MRT3847_64987C.1.pep
GLLGGSTSTDLLSTTVAPSTGVSEKSASSASVTVSSAYSSVSPGGSVSLVVFPSPFYHLLTTMPFYHLHDHASLSSSDDDARL

SEQ ID NO: 246907 - protein, 83 aa, Glycine max
  Clone ID: PAT_MRT3847_64988C.1.pep
LFPQSTYYLFKHFGECHGDRSVSPFAYSTQTIFLYFEHHGLGWQPSSVALMISLVTSARCINSALHASEHGFGLYDIVIAKEK

SEQ ID NO: 246908 - protein, 71 aa, Glycine max
  Clone ID: PAT_MRT3847_64989C.1.pep
VSFLKRVKSILVKAKILQVLLACVKSKASMMLSNQHICTIVNTCFRIVHQAGTKSELLQRIARYTMHELVR

SEQ ID NO: 246909 - protein, 60 aa, Glycine max
  unsure (1)..(60): unsure at all Xaa locations
  Clone ID: PAT_MRT3847_6498C.1.pep
RNAKXXXXWITNXSXXTICCVSSSFLRRPLVVFFKSRFMLSCELVQXXALNTILWQFLVA

SEQ ID NO: 246910 - protein, 50 aa, Glycine max
  Clone ID: PAT_MRT3847_64990C.1.pep
KSSPRLLMLCLVFNSFSFWGVCLVSHGSLCLYFPLIYCLRCNAGLANTCA

SEQ ID NO: 246911 - protein, 105 aa, Glycine max
  Clone ID: PAT_MRT3847_64991C.1.pep
SVRMEVAVPRQHQPKNQHNEDKIEFSRYSKHSRTVQRKADKIPEYGHNKQELKGEETMRCLKKNNAVGLETTITQGEQVNQPTKDKILKSSKSLGTTKTRKAEEI

SEQ ID NO: 246912 - protein, 110 aa, Glycine max
  Clone ID: PAT_MRT3847_64992C.1.pep
KFQMSRAQDADQSFFPLGNPFLMISPKSPKIGSQLLIILHAGEASLEERRRTQNAQDHPVITDILDCTERSCGAEEVVLRTPYRGRPSIAPWLHRGSTTEPSWWHPKGRG

SEQ ID NO: 246913 - protein, 201 aa, Glycine max
  Clone ID: PAT_MRT3847_64993C.1.pep
MALCRFAYSYSPASASTIFRFPKYPSKHTKFSLLPLSFSTMEAPPEGYRRNVGICLMNNHKKIFAASRLDIPNAWQMPQGGIDEGEDPRNAAIRELREETGVNSVEVIAEVPYWLTYDFPPKVREKLNIQWGSDWKGQAQKWFLFKFTGQDQEINLLGDGTEKAEFGEWSWISPEQVIELAVDFEKPVYKEVLAVFAPHFQ

SEQ ID NO: 246914 - protein, 42 aa, Glycine max
  Clone ID: PAT_MRT3847_64994C.1.pep
KAASTSNSNHSDQFLAHDYTATLFPYFEHWRKQYGLLYTYST

SEQ ID NO: 246915 - protein, 71 aa, Glycine max
  Clone ID: PAT_MRT3847_64995C.1.pep
FKMLLKEALGTRLQSDSHYHSYVCLKTKLETPNQHQKLKLTKQIICSIPKSLLIYSSIFSKLLIYLFMKFP

SEQ ID NO: 246916 - protein, 90 aa, Glycine max
  Clone ID: PAT_MRT3847_64996C.1.pep
ASISQILHPIYFSCYFPFFSEPKEVKFDSYNVFYFYFPCLNSGYTPTCKYKIGFIVVPYFTLLLWWHRFNVPGCFDLNYCYYLRRPLLSD

SEQ ID NO: 246917 - protein, 247 aa, Glycine max
  Clone ID: PAT_MRT3847_64997C.1.pep
HASGSKYRGVTLTKCGRWEARMGQFLGKKAYDKAAIKCNRREAVTNFEPSIYESEMKPEAINEGGSHDLDLNLGIATPGHGPKENRGHLQFQSIPYNMHPGRSSRMETNVNSVIGDPSLKRLVVTEERPSVYSTFFPNLERAERMGIDPSKGVPNWAWQTNGQVNATPVPPFSTAASSGFSISATFPSTAIFPTKSMNPIPQSFCFTSHSTPGSNAPQFYYEVKSSQAPSQPLSCNTSINGSPPHKF

SEQ ID NO: 246918 - protein, 55 aa, Glycine max
  Clone ID: PAT_MRT3847_64998C.1.pep
DAWADAWVLPQLGRTSKDHPDKKKLISVQDFFRYTEAEGMGILYRIGRTILNLLA

SEQ ID NO: 246919 - protein, 45 aa, Glycine max
  Clone ID: PAT_MRT3847_64999C.1.pep
YTLGHKLKHDHYIKKVHVFNPKKKKKTVVQKLKPLIYMDHRNLGK

SEQ ID NO: 246920 - protein, 35 aa, Glycine max
  Clone ID: PAT_MRT3847_6499C.1.pep
VVGDASGSCFMVPMVSQSTKLDPLDTQFVCNKELW

SEQ ID NO: 246921 - protein, 69 aa, Glycine max
  Clone ID: PAT_MRT3847_649C.1.pep
TQFLSKHVIFPSPIATASLNEFIAITVDFTNPQVSRDEVDDSNVPPSLLTVRKVDVMFALLVGFAVENV

SEQ ID NO: 246922 - protein, 118 aa, Glycine max
  Clone ID: PAT_MRT3847_64C.1.pep
IGPARLFSPGARLVFCLALWAENLSTGETGFPLVPARFFRVTPGDGGKPVGTGPGFPGGPGCPLFWCPLFSGLRVAILVWSFFVPPVFFFWGCPFFCFFFLGPPLLFFLGPGFFGFEH

SEQ ID NO: 246923 - protein, 66 aa, Glycine max
  Clone ID: PAT_MRT3847_65000C.1.pep
LLFIYSNSYFESLKSHYKFRSYSCNNSYSGATIRGWMFSTATTLLLLWSYKLCYDAGVTVKACGDC

SEQ ID NO: 246924 - protein, 93 aa, Glycine max
  Clone ID: PAT_MRT3847_65001C.1.pep
KLGIRLDAKYEAEPEGCMQSKNQTMGHRDTIFLALIATSIAKDAYAAQHVVGGSHGCDQNTDSKAWTSGQTFRGAVLLCAKHSSHIRWWKLAP

SEQ ID NO: 246925 - protein, 54 aa, Glycine max
  Clone ID: PAT_MRT3847_65002C.1.pep
MKVLIVALALLALAASAACSTSGGCGCQTPPFHLPPPFYMPAPFYLRAQQQPQH

SEQ ID NO: 246926 - protein, 82 aa, Glycine max
  unsure (1)..(82): unsure at all Xaa locations
  Clone ID: PAT_MRT3847_65003C.1.pep
QILEKTLTGETITSEVETSYIINNAKAXIHDKERIPPDLQCLIYAGKHLDDGRTLVDYTMQNESTLYLVLRLRGGAKNRRKK

SEQ ID NO: 246927 - protein, 54 aa, Glycine max
  Clone ID: PAT_MRT3847_65004C.1.pep
CLEQLRGWLVGGTCWIVTKARYTVLKFHQLCPPVCYIGKVESAFPPAGGGFLFI

SEQ ID NO: 246928 - protein, 82 aa, Glycine max
  unsure (1)..(82): unsure at all Xaa locations
  Clone ID: PAT_MRT3847_65005C.1.pep
MATLIAPSNHSPXEXAXALRKAXXGXGXDXNTVIXIXGHRTVYQRQXIXKXXEEXXQXDLVKRXXSEIKXDFEKAVYRWXMV

SEQ ID NO: 246929 - protein, 171 aa, Glycine max
  Clone ID: PAT_MRT3847_65006C.1.pep
MLSEREYDTHASGEIKMRKTMCRSIHHVSLLFLLTMCLLINADCSESSSLNRSAIPSNYHLSSNDTNINILFLSIASGMSPNDPPVFFFYNYGETRIYLHPGKPFTKLANFDHKVILMYWDVLCVIFYAYDPTMEGGHQKIYWLVKPDGVFHSWDNNNWEKRKTWNNQACN

SEQ ID NO: 246930 - protein, 48 aa, Glycine max
  Clone ID: PAT_MRT3847_65007C.1.pep
TGNLSIMCTLSAAYISGVYCASVKDCTRSGRSHCFLSNACCTFDIAYA

SEQ ID NO: 246931 - protein, 144 aa, Glycine max
  unsure (1)..(144): unsure at all Xaa locations
  Clone ID: PAT_MRT3847_65008C.1.pep
RTRFKHGDARRPXXQGRGGKKMKPKGTTPHXRWPNPCKDEVPHPQGPRQGTQEQAQPSQLPSHTLRHIDEQAAARRQTRVPRYDAPKLTPPKAASTLPRRRCPPQKGGLAAQRGKTKLESPGRIAVAVRRQRAIRRSRGGEHHR

SEQ ID NO: 246932 - protein, 60 aa, Glycine max
  Clone ID: PAT_MRT3847_65009C.1.pep
MDRSKTASESDVSVHAIFGSRYVRTSLPKFKMAEESIATEAAYQIINHELMLGWNSKLSL

SEQ ID NO: 246933 - protein, 45 aa, Glycine max
  Clone ID: PAT_MRT3847_6500C.1.pep
KDSKESYAMEVEDLIPNHNDSMSSVLSRFQAIGIDVEATVALLGI

SEQ ID NO: 246934 - protein, 188 aa, Glycine max
  Clone ID: PAT_MRT3847_65010C.1.pep
GGLTRKPKTETGKGNQNPKKETEKKGEKKREKKKTGGKRKPPKKPKKKKNGKKKGKKGGGQRRKKKKKKRKGPRARSQAEKPGGKGEKKKKKTPGKRGAGNGPQKGIPFSPGKRKKTEGPAPGGPGKGKKRGPPRGAPGGKKPDGGGERGGKKKNRPRNGGNPPPKKPHKTQTGDRKGNRRGPGQPNR

SEQ ID NO: 246935 - protein, 42 aa, Glycine max
  Clone ID: PAT_MRT3847_65011C.1.pep
PSAKGDECYVSLLSFYVAMGRRLSRDSGCLHTCFGNEDGPVF

SEQ ID NO: 246936 - protein, 75 aa, Glycine max
  Clone ID: PAT_MRT3847_65012C.1.pep
THKFDFLKANQAKIEHKYKVDIEKANQQRSGTALKLAALNTYVMRGSHTHNTLKQNDKRSLAIVEQEPNSGNKSC

SEQ ID NO: 246937 - protein, 53 aa, Glycine max
  unsure (1)..(53): unsure at all Xaa locations
  Clone ID: PAT_MRT3847_65013C.1.pep
QLFKYLSRPPQPXFPQQKTTTSLFLPISILTTKKPTKLPPFINTSQFHPLLTS

SEQ ID NO: 246938 - protein, 41 aa, Glycine max
  Clone ID: PAT_MRT3847_65014C.1.pep
NFINSPPLVGLNSRKFLLKNFWVWPRKILIWLQGFIDKGLN

SEQ ID NO: 246939 - protein, 177 aa, Glycine max
  unsure (1)..(177): unsure at all Xaa locations
  Clone ID: PAT_MRT3847_65015C.1.pep
VKEKQVYCPSLQYYYLGYYIHSCNKMRYKAAYHPSELLCPLRYQWVPFDIARPLLDRKPYVVLSDSSILQNGESSLPQITDDVMGRDFDDVGQEDANDVPMLDEEIXNALMKTTSDDDPEIVDVSKVLLGIKGSHVKYKDLWVVFDPEQRSYLESRLRRYRKVVGPALSERMVHSLG

SEQ ID NO: 246940 - protein, 62 aa, Glycine max
  Clone ID: PAT_MRT3847_65016C.1.pep
DDELLQTETRTIMTSDDAELCIQALNTCEARFNACDLASKPVGAGAATKDYKALFSQITTRF

SEQ ID NO: 246941 - protein, 62 aa, Glycine max
  Clone ID: PAT_MRT3847_65017C.1.pep
FFNYFFFKHNQLTALNEQKNHSLDYCKKKIFSSLFTTWSRQSNILYENYTYNDYFLKEKRLF

SEQ ID NO: 246942 - protein, 312 aa, Glycine max
  Clone ID: PAT_MRT3847_65018C.1.pep
TNAKVKRQKLEIRLNSSSFDPEEFALYRRYQLKVHNDKPQNVTENSYRRFLVDTPLIQVSPTGDSTVPPCGFGSFHQQYLIDGQLVAVGVIDILPKCLSSKYLFWDPDFAFLSLGKYSAFQEIGWVKENQVYCPSLQYYYLGYYIHSCSKMRYKAAYRPSELLCPLRYQWVPFDIARPLLDRKPYVVLSDSSILQNGESSLPQTTEDVMRRGFDDVGQEDANDVPMLDDEEMVESESECSDDEPDLETTSDDDPEIADVSKVLLGIKGSHVKYKDLRVVFGPEQQSYLESQLRRYRKVVGPLLSERIVYSLG

SEQ ID NO: 246943 - protein, 119 aa, Glycine max
  Clone ID: PAT_MRT3847_65019C.1.pep
LQCTISRWVPFDIARPLLDRKPYVVLSDSSILQNGESSLPQITDDVMGRDFDDVGQEDANDVPMLDEEEMVDSESECSDDEPDLETTSDDDPEIVDVSKGLLRIKGSHVKYKVCLNGGE

SEQ ID NO: 246944 - protein, 45 aa, Glycine max
  Clone ID: PAT_MRT3847_6501C.1.pep
VSQMMDFSTQIKHLGADQHNPFGTYPWNPGTDQLSRRAKLVSLPQ

SEQ ID NO: 246945 - protein, 101 aa, Glycine max
  Clone ID: PAT_MRT3847_65020C.1.pep
MPHTSNGKVTLPDGGDIQTHDNGDGASLTGPRAQCIGAGHCELLVVIAGIVPSSLLETMSFPKMMSPSFIGLGNLCSSSFSMKHSHGQHQSFMQVEVGVSI

SEQ ID NO: 246946 - protein, 34 aa, Glycine max
  unsure (1)..(34): unsure at all Xaa locations
  Clone ID: PAT_MRT3847_65021C.1.pep
NSFTGMHTWIIDMPSSRPCVPSLTRPLFVAPICX

SEQ ID NO: 246947 - protein, 407 aa, Glycine max
  unsure (1)..(407): unsure at all Xaa locations
  Clone ID: PAT_MRT3847_65022C.1.pep
EEMASSSSNTPKESVVVDWGRRRTSCGYCRSSRDNSISHGMWAHSLTVDDYQDLLDRGWRRSGCFLYKPEMERTCCPSYTIRLKASDFVPSKEQLRVSRRMQRFLDGTLDVKKVDVMEDPTKSGIFTRPMSEESLAAGSENKDEVEKSLHYLSNQIDNVIHILIXGEFASGIQLPKASVKRVSQGKRKLLVNGSEDLLYSSNIAFQIAASIKRAQSCDKVVNDSKPSRVCEKENDSSPKIIAEKLVASLDPTVKNSGLSIRACNGHINFYASSKQVSLNRSVQNAPVPKNSRMKHYSGGNCLIGQVKRQKLEIRLNRSSFDPEEFALYRRYQLKVHNDKPQNVTENSYRRFLVDTPLIQVSPTGDSTVPPVGFGSFHXTYLIDGQLVAVGVIDILPKCLSSKYLFWD

SEQ ID NO: 246948 - protein, 49 aa, Glycine max
  Clone ID: PAT_MRT3847_65023C.1.pep
FNTCTNNVEVLYIVIYIESTMYRKFFYFYNNYVKSYIKNYFGLVASNFT

SEQ ID NO: 246949 - protein, 62 aa, Glycine max
  Clone ID: PAT_MRT3847_65024C.1.pep
GGRFLFFFFFFILSFFKKQYIYNGGDLQKIGGIIFLYIKPDKRDIGNYNFQILKSKILLEKF

SEQ ID NO: 246950 - protein, 64 aa, Glycine max
  Clone ID: PAT_MRT3847_65025C.1.pep
PTSNARTGHSAQSYLSAISPIRHQYICKSFTSVESTPTTCPNRIVELSSFRCVARSESAVPLRN

SEQ ID NO: 246951 - protein, 125 aa, Glycine max
  Clone ID: PAT_MRT3847_65026C.1.pep
KKKLRNSKLGAGVLDIFDEYSPTGTELRVDTKMSPFFKPDADMACCHDLEAYLPLVDGFLASNCPFRANPKQSLVRLMQDQGANVKKLYSSKAKKYKFQFSKTGFLFYFWLFAKPFLKLIKCESH

SEQ ID NO: 246952 - protein, 87 aa, Glycine max
  unsure (1)..(87): unsure at all Xaa locations
  Clone ID: PAT_MRT3847_65027C.1.pep
MQIRGSSHRVCXVGNNRYRIATLLMYMIDNVASIYAAATMXLDPDNPRHLMMELDRITRQGQSAISVDDTLKIITLQEQLEKLDALE

SEQ ID NO: 246953 - protein, 93 aa, Glycine max
  unsure (1)..(93): unsure at all Xaa locations
  Clone ID: PAT_MRT3847_65028C.1.pep
KARSACPCVIFFDEFDSLAPARGASGDSGSVMDRVVSQMLAEIDGLMVSLLLAYYYLFIIGASNRPDLIDPAXRFDKLLYVGVNSDASYREQF

SEQ ID NO: 246954 - protein, 65 aa, Glycine max
  Clone ID: PAT_MRT3847_65029C.1.pep
VWDHAVGIICVHEAGGKVTDWQGSDIDLAVGHVGRRIIFPYGGVLVTNSNLHDKILQIIDQTSRV

SEQ ID NO: 246955 - protein, 49 aa, Glycine max
  Clone ID: PAT_MRT3847_6502C.1.pep
VKRVKTQTFSGISNPGITPKTTSTIMSKDHLTFETIYKHFPKHACSNLS

SEQ ID NO: 246956 - protein, 108 aa, Glycine max
  Clone ID: PAT_MRT3847_65030C.1.pep
SSNSLTGRLTAKSDVYSFGVVLLELLSGRRALDRSKAGEEQNLVEWAKPYLGDKIRLFQIMDTKLGSQYPQNGAYMAATLALKCLNSEAKARPPMTEVLETLEQIAEC

SEQ ID NO: 246957 - protein, 166 aa, Glycine max
  unsure (1)..(166): unsure at all Xaa locations
  Clone ID: PAT_MRT3847_65031C.1.pep
YFLATTNQQTSLPAEAEPSDAQSSVXQKIIHEMMMSSQKNGPWWNGLVPGSLGNDMKNVNGIXQGVTNTGLNSGSVSGLVGNVAVNSNSGVGVGGYGTIGLGPAGMTNGMRPVMGHNSIMNGRGGMASLARDQVMNHQQDLSSQLLSGLGGVNGFSNLQFDWKPSP

SEQ ID NO: 246958 - protein, 392 aa, Glycine max
  Clone ID: PAT_MRT3847_65032C.1.pep
MFTYNFSSRCIGISKTSPSSVPSNLSILSYSEASDFSNLPTPRSEGEILSSPNLKAFTFNELKNATRNFRPDSLLGEGGFGYVYKGWIDEHTFTASKPGSGMVVAVKKLKPEGLQGHKEWLTEVDYLGQLHHQNLVKLIGYCADGENRLLVYEFMSKGSLENHLFRRGPQPLSWSVRMKVAIGAARGLSFLHNAKSQVIYRDFKASNILLDAEFNAKLSDFGLAKAGPTGDRTHVSTQVMGTQGYAAPEYVATGRLTAKSDVYSFGVVLLELLSGRRAVDRSKAGVEQNLVEWAKPYLGDKRRLFRIMDTKLGGQYPQKGAYMAATLALKCLNREAKARPPMTEVLETLEQIAASKTAGRNSQLEQKRVHAPVRKSSVQKGSHLNHTPTAFP

SEQ ID NO: 246959 - protein, 423 aa, Glycine max
  Clone ID: PAT_MRT3847_65033C.1.pep
MTRFLPALGLMGNYLDSSAKVEAAHSSRTPSGISKTSPSSVPSNLSILSYSEASDFSNLPTPRSEGEILSSPNLKAFTFNELKNATRNFRPDSLLGEGGFGYVYKGWIDEHTFTASKPGSGMVVAVKKLKPEGLQGHKEWLTEVDYLGQLYHPNLVKLIGYCLEGENRLLVYEFMPKGSLENHLFRRGPQPLSWSVRMKVAIGAARGLSFLHNAKSQVIYRDFKASNILLDAEFNSKLSDFGLAKAGPTGDRTHVSTQVMGTQGYAAPEYVATGRLTAKSDVYSFGVVLLELLSGRRAVDKTITGMEQNLVDWAKPYLSDKRRLFRIMDTKLEGQYPQKGAFTAATLALQCLNSEAKARPPMTEVLATLEQIEAPKTAGRNSHSEHHRLQTPVRKSPARNRSPLNLTPTASPLPAHRQSPRVH

SEQ ID NO: 246960 - protein, 192 aa, Glycine max
  Clone ID: PAT_MRT3847_65034C.1.pep
MGNCLDSSAKVEAAHSSRTPSGISKTSPSSVPSNLSILSYSEASDFSNLPTPRSEGEILSSPNLKAFTFNELKNATRNFRPDSLLGEGGFGFVYKGWIDEHTLTASKPGSGMVVAVKKLKPEGLQGHKEWLTEVDYLGQLHHQNLVKLIGYCVEGENRLLVYEFMSKGSLKNHLFRMRMKVAIGAAKDFFFL

SEQ ID NO: 246961 - protein, 108 aa, Glycine max
  Clone ID: PAT_MRT3847_65035C.1.pep
KKSNNNYWGLFITLNWCVFVKSVLTRNTLMGDHTTALAHRNNVIPQCFAWQALQVYNNYNIIKRMLFYHDVLFSEKHTTLTTRCRQYLIGNLFAVCRLKQRIPRDCII

SEQ ID NO: 246962 - protein, 56 aa, Glycine max
  Clone ID: PAT_MRT3847_65036C.1.pep
VWSCRTNGSARCIHLIRPTACARSSSSIGSGILRLGLRSNVRNHSPNCVAVWACRK

SEQ ID NO: 246963 - protein, 390 aa, Glycine max
  Clone ID: PAT_MRT3847_65037C.1.pep
YRCGRDGKHGISKTSPSSVPSNLSILSYSEASDFSNLPTPRSEGEILSSPNLKAFTFNELKNATRNFRPDSLLGEGGFGFVYKGWIDEHTLTASKPGSGMVVAVKKLKPEGLQGHKEWLTEVDYLGQLHHQNLVKLIGYCVEGENRLLVYEFMSKGSLENHLFRRGPQPLSWSVRMKVAIGAARGLSFLHNAKSQVIYRDFKASNILLDAEFNAKLSDFGLAKAGPTGDRTHVSTQVMGTQGYAAPEYVATGRLTAKSDVYSFGVVLLELLSGRRAVDRSKAGEEQNLVEWAKAYLGDKRRLFRIMDTKLGGQYPQKGAYMAATLALKCLNREAKARPPMTEVLETLELIATSKPAGRNCQLEQKRVHAPDRKSSVQKGSHLNHTPTAFP

SEQ ID NO: 246964 - protein, 545 aa, Glycine max
  unsure (1)..(545): unsure at all Xaa locations
  Clone ID: PAT_MRT3847_65038C.1.pep
MSLCLLQLLKRIQILFSLKQKSSDFNSCFCDSPATFLASSPQLVLHIIQFICILTPSMLCCNPALNPHLLSFFLLITKTQAFFLNYPTQLLIPLITSFEIETTKIVFFFFSFTRSNILKSVVLWVENLWQGLMGNCLDSSAKVDAAQSSKSTSASGISKTTPSSLSIPSYSEKSNASSLPTPRSEGEILSSPNLKPFTFNELKNATRNFRPDSLLGEGGFGYVYKGWIDEHTFTASKPGSGMVVAVKXLKPEGFQGHXKEWLTEVNYLGQLYHPNLVKLIGYCLEGENRLLVYEFMPKGSLENHLFRRGPQPLSWSVRMKVAIGAARGLSFLHNAKSQVIYRDFKASNILLDAEFNSKLSDFGLAKAGPTGDRTHVSTQVMGTQGYAAPEYVATGRLTAKSDVYSFGVVLLELLSGRRAVDKTITGMEQNLVDWAKPYLSDKRRLFRIMDTKLEGQYPQKGXAFTAATLALQCLNSEAKARPPMTEVLATLXQIEAPKTAGXNSHSEHHRVQTPVRKSPARNRSPLNLTPTASPLPAHRQSPRVH

SEQ ID NO: 246965 - protein, 79 aa, Glycine max
  Clone ID: PAT_MRT3847_65039C.1.pep
DLYNHDLIVLGYQTWTVFRFLYLTHYITRLRYTQDYVWYLKPITPSQIHILSVTFIGYKLESRLSNQMSMDQFDHNLLC

SEQ ID NO: 246966 - protein, 59 aa, Glycine max
  Clone ID: PAT_MRT3847_6503C.1.pep
CAKNCPRTYTLTSPGKGLQTNVGTDPPSFYGHRIEPTFKECIQPDPQLRLYLQANLMQY

SEQ ID NO: 246967 - protein, 79 aa, Glycine max
  Clone ID: PAT_MRT3847_65040C.1.pep
NKFPGGYGSPFLRRGLKGAPIGAAVTPPKNFPGYNTGCQGPTIWGPLYLFFVLAFLDDSSQFNFPCCTKLPLLSSSRSR

SEQ ID NO: 246968 - protein, 228 aa, Glycine max
  Clone ID: PAT_MRT3847_65041C.1.pep
MDEFLLKAEKANAIPRHNNNNILAFVSKALRILELCLALLLLSWILTRLPFALALSAEFLRRLFAFAASPLFVFAVSNAIIAALLAQSRRLSSPHSADALYREFLQTRTAVSEPHAPPSPTPPEPVFHDKQIIADMVQDTPSADAAAAAKYRRSQSEKIKVDAAGKPPRRKQLLRSETEKRSDSSPEILYPQDELSNEEFQRAIEAFIAKQLRFLREESSAIVVQNPS

SEQ ID NO: 246969 - protein, 88 aa, Glycine max
  unsure (1)..(88): unsure at all Xaa locations
  Clone ID: PAT_MRT3847_65042C.1.pep
LNGPKDRVYFVAFSPNGGYIPSGFPHRSRLIGSLKEGKIVKPSPGDGGIFXVCWNKEGAKIPACFANKTVCVLDFRMYPEKPQVILAI

SEQ ID NO: 246970 - protein, 174 aa, Glycine max
  unsure (1)..(174): unsure at all Xaa locations
  Clone ID: PAT_MRT3847_65043C.1.pep
XEXXHKRTSTQXXXXXAVAXXKXXKCXSAKEVIKPLTAQLXEMVERLPEXHNTDSSTEPFAENTSSXXHNSLDESHIRNXVIPKNEGSSIVTNLILANGTKTQSGKAEWVVQDEPGVYVSLSSQPGGGNELKRVRFSRRHFTEEQAEKWWAENGTKILERHNIVALLNARESVP

SEQ ID NO: 246971 - protein, 107 aa, Glycine max
  Clone ID: PAT_MRT3847_65044C.1.pep
SLFSYNEDLSSQIQVNYTFRVSYWILNYLGINSIVWPFYFYLSASIHNGSSSTWSLTMLILSLWSSLLTVLLLGKPILKLFHSSSFLTAENFPLLPTLLLQLLLFLF

SEQ ID NO: 246972 - protein, 171 aa, Glycine max
  unsure (1)..(171): unsure at all Xaa locations
  Clone ID: PAT_MRT3847_65045C.1.pep
ISLHSLNLKISTRVKAGCDMTKILMATTLSRLVLTDHSKLTLGQDGAIEPLVRMFNSGKLESKLSALNALQNLSSLTENVRRLVGTGIVGSLLQLLFSVTSVLMTLREPASAILAXIAESETVLVNLGVAQQILSLLNLSSPVIQGHLLEALNSIASLPCASKERRKMKEK

SEQ ID NO: 246973 - protein, 43 aa, Glycine max
  Clone ID: PAT_MRT3847_65046C.1.pep
FFSEQHERIQRSEPESKKGTSSCPLPLIKYHNLQTGGQVGRKH

SEQ ID NO: 246974 - protein, 105 aa, Glycine max
  unsure (1)..(105): unsure at all Xaa locations
  Clone ID: PAT_MRT3847_65047C.1.pep
WTGLGNTILYKGKHIMSRDYASFHGMITNQVMSKMAPKINRLCGGDXKMVLEKTHLLLAXCSKMAICTNDVRRVLCGMPSGMTFTVNLQYAFSMRCSFDIGMKNY

SEQ ID NO: 246975 - protein, 96 aa, Glycine max
  unsure (1)..(96): unsure at all Xaa locations
  Clone ID: PAT_MRT3847_65048C.1.pep
LFCDIPPPEGGETPYVPSFKVTEKMMEGFPEEVXKYEEKGLKYTFTAPSANNVSSMRGRGWEDTFGTEDRKEAEKRANALGMDVEWLPNGGIKTIL

SEQ ID NO: 246976 - protein, 99 aa, Glycine max
  Clone ID: PAT_MRT3847_65049C.1.pep
TSFQKLSLCLFAVTFENYCLNKIGSDKKLHVNAPPFQKTYLIPTLFFCWGVTQTPPLFFGIPPKFFLPKPPPPLGGKNPGGLSTSIFFAGLQETIPHLY

SEQ ID NO: 246977 - protein, 181 aa, Glycine max
  unsure (1)..(181): unsure at all Xaa locations
  Clone ID: PAT_MRT3847_6504C.1.pep
MAALRSSSRLVGAFSRTAAFRPGAVFTRSMASVSEPPKDSNANLKSFQIYRWNPDTPSEKPRLQTYTLDLNKTGPMILDALIRIKNELDPTLTFRRSCREGICGSCAMNINGQNTLACLCRIPTEAASDVKIYPLPHTYGVKDLGPDLTPFYKQYKRIQAYLQRDTPXENAKESRQTKEDR

SEQ ID NO: 246978 - protein, 90 aa, Glycine max
  Clone ID: PAT_MRT3847_65050C.1.pep
EPTRAPAEKRKERPYPKGEELTQTKLTETKRPKAALSKGRNHGGEPGFEGPKRTKPNKKKTGQSEKQREKKAGDTNKWEGRPPQGRGRWE

SEQ ID NO: 246979 - protein, 41 aa, Glycine max
  Clone ID: PAT_MRT3847_65051C.1.pep
LTNRIWAWAKVFTNCEPVLLNEIDYICCLFFILYLSRSFHL

SEQ ID NO: 246980 - protein, 111 aa, Glycine max
  Clone ID: PAT_MRT3847_65052C.1.pep
MAEEKHHHHFHHHKGDDVPGEVDYKKEEKHHKHLEHLGELGAAAAGAYALHEKHEAKKDPEHAHRHKVEEEIAAAATVGAGGFVLHEHHEKKEVKKEDEEAHGKKHHHLFG

SEQ ID NO: 246981 - protein, 77 aa, Glycine max
  Clone ID: PAT_MRT3847_65053C.1.pep
QRNAGDHRGHIKLLRQDRTVITFSISSVKIHLLSYLIHSPASFFFCSCFFFLFFFFYFWLPYIQQKGDDKSIILIQA

SEQ ID NO: 246982 - protein, 48 aa, Glycine max
  Clone ID: PAT_MRT3847_65054C.1.pep
ILIIYEYLSCSAATVGAGGFVLHEHHEKKEVKKEDEEAHGKKHHHLFG

SEQ ID NO: 246983 - protein, 111 aa, Glycine max; identical to SEQ ID NO: 246980
  Clone ID: PAT_MRT3847_65055C.1.pep

SEQ ID NO: 246984 - protein, 88 aa, Glycine max
  Clone ID: PAT_MRT3847_65056C.1.pep
ICPGFDAKTIAVLICLKRPLFFKIAHKQSLQKIFNSPIGGSGILNHNSSLHGTFFLWDYHVCSTLNDGKFSQPFLFVPGKKDIWSSVK

SEQ ID NO: 246985 - protein, 74 aa, Glycine max
  Clone ID: PAT_MRT3847_65057C.1.pep
VYKYPLSQYLSRSSSTILSKSGLREHILLNPPPAEVYAPHNHTQPLLLLPGFHSCSSHSSVSPHTHSSLHTRIH

SEQ ID NO: 246986 - protein, 65 aa, Glycine max
  Clone ID: PAT_MRT3847_65058C.1.pep
LQGVFFVSILKITPIIFFTPTFCYLFHRSQKSFCRGGFVKNQSFSPSKKGKILLVADFVPPPSIF

SEQ ID NO: 246987 - protein, 99 aa, Glycine max
  unsure (1)..(99): unsure at all Xaa locations
  Clone ID: PAT_MRT3847_65059C.1.pep
EPSSSSGQLSLSHLXXVYMIVTSNRRXVSSFRFLXPAFIFRFXLVLXXEXVCAIVPXYYLLPMFXGCXNYLXKSXIQLPSVXILTFPXDCKGXXVIWVI

SEQ ID NO: 246988 - protein, 78 aa, Glycine max
  Clone ID: PAT_MRT3847_6505C.1.pep
LDDGYKWRKYGQKVVKNTQHPRSYYRCTQDNCRVKKRVERLAEDPRMVITTYEGRHVHSPSNELEDSQTPFELSNFLW

SEQ ID NO: 246989 - protein, 46 aa, Glycine max
  Clone ID: PAT_MRT3847_65060C.1.pep
YYLAKLKYDSLYEKVVRLPVAARICRVAPRVRLGSSDDTRVLDVFA

SEQ ID NO: 246990 - protein, 104 aa, Glycine max
  Clone ID: PAT_MRT3847_65061C.1.pep
SFSRPSYHKGAELKNRCSCFCPVLFWSGGGRLRLNFLCPIKGPSTSPLFKSRWFFSPPTRFAKFTQSRIPALKNPPPCQGYQGPPLTPTPRANCLLPTKGAETP

SEQ ID NO: 246991 - protein, 196 aa, Glycine max
  Clone ID: PAT_MRT3847_65062C.1.pep
MNTVLSPSSAFPTLSKTYVSFGPLFSSFAVPSSSSSHIELPRKRGSQNTGLRCNCSIWPGGPGSGDSDSSNRSILDAFFLGKAVAEALNERIESTVGEILSTVGRLQAEQQKQVQDFQEEVLERAKKSKENAAREAMEAQGFISKSAVETKVTDSTTSKTSNSATGPVTSVQSTDASETDSEPAKEEEPTSSTSDE

SEQ ID NO: 246992 - protein, 111 aa, Glycine max
  unsure (1)..(111): unsure at all Xaa locations
  Clone ID: PAT_MRT3847_65063C.1.pep
MVTSKRTALYSTGXGKLPRSSLKPRMYSGTAPTTDGVNKPHRYWPRSVALCEIQKEQRSTVLLIRKLSFQRMIRVIAHNMKTDLRFQSHAVLALQXEAXEAYLGELFEDTN

SEQ ID NO: 246993 - protein, 579 aa, Glycine max
  unsure (1)..(579): unsure at all Xaa locations
  Clone ID: PAT_MRT3847_65064C.1.pep
KKTALATRRGGRASEENLAKECEQIMLAEFXSELQGQLEVLCQERSNLLDTIRQLEAANTEPEATAIHDGEYQLTKNEFSSLGRGKYSECSTTESSDDIEKQEMEEVSHEDEISYYDTRECFTEPXXKCEXSGSYESSXRCREPNTLYTDTENIHPEKMVCNYKHPQLARRKKLPDPVEKEKGVSLWSMIKDNVGKDLTRVCLPVYFNEPISSLQKCCEDLEYSYLLDQAYEYGKSGNGLLRALYVAAFAVSGYASSEGRNCKPFNPLLGETYEADYPDKGIRFFSEKVSHHPTLIACHCEGRGWKFWADSNIHSKFWGRSIQLDPVGVLTLEFSDVEIFQWSKDXVTTTIYNLILGKIYCDHHGNMDIRGNRTYSCRLKFKEQTILDRNPRQVHGFIEDVTGKKVATLFGKWDDSMYYMNGNVNVKPKDFTSSNASLLWKRTMPSPNLTRYNLTPFAITLNELTPGLKLFLIPGIXDHGLKEKLPPTDSRLRPDQRDLENGEYERANLEKQRLEKRQRMSRKIQESGWKPRWFRREGENGTFRYVGGYWEAREHGRWDGCPNTFGEFNEDSTDPLGAS

SEQ ID NO: 246994 - protein, 137 aa, Glycine max
  Clone ID: PAT_MRT3847_65065C.1.pep
VTTTIYNLILGKIYCDHHGNMDIRGNRTYSCRLKFKEQTILDRNPRQVHGFIEDVTGKKVATLFGKWDDSMYYMNGNVNVKPKDFTSSNASLLWKRTMPSPNLTRYNLTPFAITLNELTPGLKEKAPPTDSRLRPDQ

SEQ ID NO: 246995 - protein, 100 aa, Glycine max
  Clone ID: PAT_MRT3847_65066C.1.pep
FIESKLDNIRFYIFTGTKTLHLRTDSRNDRVGWIQTLVSTRGLYPLRPLSDHFSLAPNDISVSTEGIKRRLLEEGSRESLAKDCKQIMLAEKSGRECQGK

SEQ ID NO: 246996 - protein, 129 aa, Glycine max
  Clone ID: PAT_MRT3847_65067C.1.pep
MTEDETEDTSTFGSSRIDGYLYKLEQRPFVGQIRRKYWFVLPRDTPVLYWYKSPTDFNCAGRILLTGAAFLYNPREQGIFEIHVDNKCYLLEAPDSRARLDWLSAMQQSRRRHYRPREGGHQRDIIIEG

SEQ ID NO: 246997 - protein, 55 aa, Glycine max
  Clone ID: PAT_MRT3847_65068C.1.pep
NLKASYHEIPKMFYGLVAASSVSLPVRRHYVIVVAGSLLHHHHRCLPFCRLLAAV

SEQ ID NO: 246998 - protein, 75 aa, Glycine max
  Clone ID: PAT_MRT3847_65069C.1.pep
SLTFGGPPHKRCSQTIFFYNSFFQIGFHLKHGNLRPFLFCGPLINIGGFKNHFFCGLFGRKKTLRLFFKMRGPSF

SEQ ID NO: 246999 - protein, 38 aa, Glycine max
  Clone ID: PAT_MRT3847_6506C.1.pep
KMTSTYCLPFSFLLYLFCYFLHFCYCSILHTTSNMLLI

SEQ ID NO: 247000 - protein, 53 aa, Glycine max
  Clone ID: PAT_MRT3847_65070C.1.pep
SSVTAFGPRNRRNCRPKMAHWEISIPWHGATEQLLRLTYLNGKIGRRLGTRRE

SEQ ID NO: 247001 - protein, 136 aa, Glycine max
  Clone ID: PAT_MRT3847_65071C.1.pep
VEWGELPPELLESISKTLTIYVDYLRFRSVCRSWRSSVPKIPLHLPPQLPWLMLSRRAFFDLSLNKTHLLNPQPSHRTRICGSSHGWLVMLDETPQIRLLNPLTRATRPLPSVYAFPNVVAFDHANVGRGVLIQNP

SEQ ID NO: 247002 - protein, 151 aa, Glycine max
  unsure (1)..(151): unsure at all Xaa locations
  Clone ID: PAT_MRT3847_65072C.1.pep
DPSLFVYKQQQYTVFLLVYVDDITITGNCVLLIQQLISQLNSQFALKQLGLLDYFLGIEVKYLPDKXDLLPKTKMAEAQPISSPMVSSCKLSKSGSDLFQDPTLYGSVVGALQYATLTRPEFSYSVNKVCQFMSQPLESHWTAVKQILRYL

SEQ ID NO: 247003 - protein, 52 aa, Glycine max
  Clone ID: PAT_MRT3847_65073C.1.pep
EFHAGGNHKHIGNASIVRSYAHPGQKVGIIAARRTGRFRGQGVAGAAKGDKA

SEQ ID NO: 247004 - protein, 92 aa, Glycine max
  Clone ID: PAT_MRT3847_65074C.1.pep
ILFYKSSFTRNLALSYSSSASFKISFTSFFICSLLINALTAFPDLELPQTTILTTRWTPVTYFEKKMCLMFVFGEDEKVVSRQPAISPFAFS

SEQ ID NO: 247005 - protein, 103 aa, Glycine max
  Clone ID: PAT_MRT3847_65075C.1.pep
RGTFPPRKVAGSKGPLFNPKTAPPFFPTFPKEKPFPKSQKPPIKKGFKKRKFWVKKKKYPRKFKKRGPRVKTQRGGKFLFPCYFSHPIFSPFLVSPNLPNGLG

SEQ ID NO: 247006 - protein, 49 aa, Glycine max
  Clone ID: PAT_MRT3847_65076C.1.pep
DWIMHIEDVQISASLNCILNRPVVSREHYRSIHVHQRPKCFSYKTTLNG

SEQ ID NO: 247007 - protein, 59 aa, Glycine max
  Clone ID: PAT_MRT3847_65077C.1.pep
PLVSLFSLRMQTLENSPLRPNPRVARSNLSQLLHYRNSAYRSHIPLICFFPNSPIRIGF

SEQ ID NO: 247008 - protein, 96 aa, Glycine max
  Clone ID: PAT_MRT3847_65078C.1.pep
TRVNGERGIDGDRVVNCCWSVSFKKVEMMKLWLSDENATGRSLHVSLENRCHSPLGEGVVPLPPSLSGITVNPELAHLNLRSISMGNGGDNYRFMN

SEQ ID NO: 247009 - protein, 104 aa, Glycine max
  Clone ID: PAT_MRT3847_65079C.1.pep
NESHLGLRHSHGTARSLPFSLTHASARPLTHIIAPPSQMPPCTCCRAHTEIRTSSDPHHRVAAVEPTLPLHTLPRTCRHAHASCFVIFIFFYLLSASFLFDMIF

SEQ ID NO: 247010 - protein, 51 aa, Glycine max
  Clone ID: PAT_MRT3847_6507C.1.pep
ATGYMYTRGLSYGWSRMSTTVIYTTHQCLMMTMHHDVRHITNFNRTHTLYA

SEQ ID NO: 247011 - protein, 45 aa, Glycine max
  Clone ID: PAT_MRT3847_65080C.1.pep
HSRVLMEDVLFSQIRVKQPRNFRYVIGCGRHQFKWPTKSLFYETY

SEQ ID NO: 247012 - protein, 105 aa, Glycine max
  Clone ID: PAT_MRT3847_65081C.1.pep
NSARGLQEVHDLLFNPTNPEASRNFNKAQQHQDPTGLACSQGRYLQLVLLNLTNCCIVYMLGTQILKPGFTIIADHEMKCLLLFIRGTHSIKDTLTAVTGNVIAD

SEQ ID NO: 247013 - protein, 53 aa, Glycine max
  unsure (1)..(53): unsure at all Xaa locations
  Clone ID: PAT_MRT3847_65082C.1.pep
IVDGKEHAMDKGNLACAAGFSTSSYTPAPXLEWGWQTDRGLIADFLEQLLYHC

SEQ ID NO: 247014 - protein, 47 aa, Glycine max
  Clone ID: PAT_MRT3847_65083C.1.pep
IKKIYLKSLAISLNKCFVIHPNLRIKLLITYLSNIIICSSYIIRHRC

SEQ ID NO: 247015 - protein, 60 aa, Glycine max
  unsure (1)..(60): unsure at all Xaa locations
  Clone ID: PAT_MRT3847_65084C.1.pep
SHDHDGYTLKVLHVYILCTPYTTSEPISWXRTYYSXLARDQTRMKHLTSLSATKSITPRA

SEQ ID NO: 247016 - protein, 70 aa, Glycine max
  Clone ID: PAT_MRT3847_65085C.1.pep
ECFNRRRYILEHCFKSVNLRTLYGRNRILATLNPHEYGGTMLNQHLPCAFENKKYLANLDGKVLMTAYSN

SEQ ID NO: 247017 - protein, 23 aa, Glycine max
  Clone ID: PAT_MRT3847_65086C.1.pep
QIQAGFIEIGQLVAFMEVWPHTT

SEQ ID NO: 247018 - protein, 57 aa, Glycine max
  unsure (1)..(57): unsure at all Xaa locations
  Clone ID: PAT_MRT3847_65087C.1.pep
RSHKNKGNLAWGQTVPAQEELDKPLGRGKIGVRLQWVGAQGNSSDRVXLDPGNLRHR

SEQ ID NO: 247019 - protein, 31 aa, Glycine max
  unsure (1)..(31): unsure at all Xaa locations
  Clone ID: PAT_MRT3847_65088C.1.pep
XXHHHHLXXPEXXVECKTNLALSYFXGXLXP

SEQ ID NO: 247020 - protein, 55 aa, Glycine max
  Clone ID: PAT_MRT3847_65089C.1.pep
NSSTKLWVSSVLLSTLRSPSSEISIMSNDLTPVTAKGFCPLRYMRVTTRRAKLVQ

SEQ ID NO: 247021 - protein, 200 aa, Glycine max
  unsure (1)..(200): unsure at all Xaa locations
  Clone ID: PAT_MRT3847_6508C.1.pep
MLIKEGRTKPLIQGRLSRFCVLGEESGYAPVSFSLDTNETKMSCSHNDNEAVLETRPHVRKKTNLIQLSHEMTLWSMAKSPLMYGGDVRKIDPSTYDVITNPTLLEINSFSSNNMEXFPYITSVNSEDRDLGKQMRRSSKEIKTTYTHSLGLTSCTESKASGLASGSLNQYPERLCWKRSLGNKHLAPFCVHKRELYFPL

SEQ ID NO: 247022 - protein, 146 aa, Glycine max
  Clone ID: PAT_MRT3847_65090C.1.pep
MAIIGDALRQAFMPKREYESLREEDKAWGKLQRPVTVASVAVIVLAIAVSTVISLKIVFPSSDGRRAFCVDRRLQSIQLGMKGGPDSDLFPGAFYLTDQEIADYYWMVVFIPSMIVFALSVVYLVAGKEVNFIAELFGYVFLSDYC

SEQ ID NO: 247023 - protein, 58 aa, Glycine max
  Clone ID: PAT_MRT3847_65091C.1.pep
AAFNGDESFPYFGFLGAEDALMFSCMEAAYGTTNTGVVVVCMSVMRPELDDEDLLSLV

SEQ ID NO: 247024 - protein, 292 aa, Glycine max
  Clone ID: PAT_MRT3847_65092C.1.pep
MAIIGDALRQAFMPKREYESLREEDKAWGKLQRPVTVASVAVIVLAIVVSTVISLKIVFPSSDGRRAFCVDRRLQSIQLGMKGGPDSDLFPGAFYLTDQEIADYYWMVVFIPSMIVFALSVVYLVAGMAVAYSAPNRHGCLKVVENNYCASRRGGVRCLSILNLIFAIVFGGLALFLGSSLLTMMSNCSKPLFWCYEIACWGLVVLYGGTAFFLRRKAATILDEGNFSGRNLGLEMLEASPLEVTPEVERRVNEGFKAWMGPSLLSSDEEDEPDSYDEAPHSTHTNLNRQRL

SEQ ID NO: 247025 - protein, 47 aa, Glycine max
  Clone ID: PAT_MRT3847_65093C.1.pep
TKLPCFHTNYKGLHKGNFKPLEHWFIKQHLLNNFICIKLNKIKYLTL

SEQ ID NO: 247026 - protein, 81 aa, Glycine max
  unsure (1)..(81): unsure at all Xaa locations
  Clone ID: PAT_MRT3847_65094C.1.pep
LLHYYWIFRFLAYRKNQPFLHVYTNPTRSVKGSAISRHYHHRPLSCICYCYCYCYCKWAISRRSSIISSQECCISIDHLXR

SEQ ID NO: 247027 - protein, 52 aa, Glycine max
  Clone ID: PAT_MRT3847_65095C.1.pep
VTVSSQTMDTINHPRKTYDIFIYITGWKGQTGQPRDTAKLTVAFDLHTFLLA

SEQ ID NO: 247028 - protein, 76 aa, Glycine max
  Clone ID: PAT_MRT3847_65096C.1.pep
KRNKKVIGFNLPSQYLLALDSICLSSFWTIGESFDWGFKTVFCCMKTNVTLVNPLFFLRRNITYLLFKMDPRKSKK

SEQ ID NO: 247029 - protein, 41 aa, Glycine max
  Clone ID: PAT_MRT3847_65097C.1.pep
SFNITPPKTVKAKHCLASKPFTHYHLSCKTVKTNSRASLLL

SEQ ID NO: 247030 - protein, 166 aa, Glycine max
  Clone ID: PAT_MRT3847_65098C.1.pep
MSLADSSSRKQGFVVVETNFRVYAYSTSKLHCEILRLFSRVEYQLPNLIVGAITKESLYSAYENGITAEQIVTFLQQNAHPRVAERVPSVPENVTEQIRLWEADLNRVEMTDTYYYDEFPSRDVFEGACDCAREWNGLLWEDSKKMHMVVKTEVHPYVRDYLRRQK

SEQ ID NO: 247031 - protein, 61 aa, Glycine max
  Clone ID: PAT_MRT3847_65099C.1.pep
YLTQLFHTTYEIKTVLQLTVARSQFFLYSKPSSRTSHQFCFLFRPGRGLRNIIVLFYEVHT

SEQ ID NO: 247032 - protein, 202 aa, Glycine max
  unsure (1)..(202): unsure at all Xaa locations
  Clone ID: PAT_MRT3847_6509C.1.pep
MGKSSKKSAIKVDAAPAVVPPSKSAKKGGKRQAQDEIEKQVSAKKQKIEEVAQKQKKEAKVQKKEAKVQKKKESSSDDSSESEEEKPAPKPVLSKKVPAKNGAALPKKDKPVSSSSEDDSSDEDEVNAKKPHKVVAEKQKNGATKESSSDDSSSDSEDEKPVAXAAVPSKKTPAKSSNIKSKPASSSSSSDSSEDDSSDEDE

SEQ ID NO: 247033 - protein, 100 aa, Glycine max
  Clone ID: PAT_MRT3847_650C.1.pep
STALFHSLMLNRFIKLIKRLCLPSMIYTVLHDQGFKRTVPHVPLMSGPVQPSYKCSPAILNAGACRFGRSSPKHNLFRSAFENFPLKDHDFVQYSMVNSI

SEQ ID NO: 247034 - protein, 45 aa, Glycine max
  Clone ID: PAT_MRT3847_65100C.1.pep
VISEAVECVYLTRRRTETPISLISLICRPLPPKVEAVLRLGLHSY

SEQ ID NO: 247035 - protein, 101 aa, Glycine max
  unsure (1)..(101): unsure at all Xaa locations
  Clone ID: PAT_MRT3847_65101C.1.pep
RSPHEFIKAYSYDLKRSDEMELXEWTDIEKTGRVMELAPYDPDWYYLRDACMAGKIYSRGXLVSEPIRXIDGGSKMNGCRPADFCKSSGADDSHSLNHCRT

SEQ ID NO: 247036 - protein, 97 aa, Glycine max
  unsure (1)..(97): unsure at all Xaa locations
  Clone ID: PAT_MRT3847_65102C.1.pep
MVMKKGDWGLDLKLSIPVSDQSNLAKFLTVSATFQDGDLMVNMDTVRIASQNDVIAPAAFTPTNNQVALADTDAIKVVGXGLRGGVQLVHHHWTRHF

SEQ ID NO: 247037 - protein, 97 aa, Glycine max
  Clone ID: PAT_MRT3847_65103C.1.pep
HRLFFINNASNLLWICTPWHPSCIMLLCFPMHLECHRYYQKISSHCYKPKLTNMKETFPLKGFPFTKSLFLLYKWQLIPFALILPPFIWNKPFQLTT

SEQ ID NO: 247038 - protein, 92 aa, Glycine max
  unsure (1)..(92): unsure at all Xaa locations
  Clone ID: PAT_MRT3847_65104C.1.pep
MEDAPSPREKNVYMANIAQQAERYEKKVELMKKVSSFXNTHHPTGEERNRLSVAYKNEMEERRASGEIFSSIXQKEESHAKXDHDAVIREYR

SEQ ID NO: 247039 - protein, 70 aa, Glycine max
  Clone ID: PAT_MRT3847_65105C.1.pep
KNTVNSKYKYQRWRDGSLGRMYCYSRGLGSRVSYHSSVLVVMLRLLGLGFSVSIHSVIIRDVWEGTEEER

SEQ ID NO: 247040 - protein, 86 aa, Glycine max
  Clone ID: PAT_MRT3847_65106C.1.pep
SNQGVNQLAWKRKKKQTNEKKENRTDKTRREQAIHYMNESDHWKAENRRQAVECLPWIWSWPRTKTLICAKRSSWPTRIEVECRCA

SEQ ID NO: 247041 - protein, 69 aa, Glycine max
  unsure (1)..(69): unsure at all Xaa locations
  Clone ID: PAT_MRT3847_65107C.1.pep
LNSSGSHNGSHHNTRRAXLVTLKGSYSCVIVQFIAHNTIHISIYMYSIIHHMFNSPHILTIWIIISYPQ

SEQ ID NO: 247042 - protein, 36 aa, Glycine max
  Clone ID: PAT_MRT3847_65108C.1.pep
LLSLHHCPFLNTYIVVPPNTLDPLEYLDLLLISCGF

SEQ ID NO: 247043 - protein, 299 aa, Glycine max
  Clone ID: PAT_MRT3847_65109C.1.pep
MAAWLILLLLCMAMIQSTFASSSSSSCLPELPSFRYNLQSQCPISIPSNPPLQVDGNFVEGIFSDIKRTEYTSILFYASWCPFSRKMLPQFEILSSTFLQVEHLVLEKSSVLPSFFSKYGIHSLPAILLVNQTSKLRYHGPNNLLSLFEFYERKTGFAPSSNIVISPSTSTMSDENSTTNLFSLSMKETWSREPYLLLSVLFLCLRLLLFVLPKIKSHLRAFWISCIPHLNLQIFGETCQMMGRVLQVIDVRRVWFKLRLCKTRTFHEKARSARVWASSITSVSLGESSSARSSTQSLN

SEQ ID NO: 247044 - protein, 79 aa, Glycine max
  Clone ID: PAT_MRT3847_6510C.1.pep
SLAILKRKRFISPQPTCAYNVSSGVFLLNGKFTPPSICQDAPHIRPTHHHRFDTLVNRSGDNAIKINNGLLSLRRGATA

SEQ ID NO: 247045 - protein, 92 aa, Glycine max
  Clone ID: PAT_MRT3847_65110C.1.pep
WCISTGFQIYFPVSVFFLSLFCLTRRSLLQQKEFSFGVGIVCVTCYCLVWCFCFFGGLFTFFGPPGMDGNFRPNTIKKTPKKKKKTKEKNQK

SEQ ID NO: 247046 - protein, 61 aa, Glycine max
  Clone ID: PAT_MRT3847_65111C.1.pep
FLRVAEKEKSGQSFTLALSTLAFPFSTLSFTYLILNLTNISFPSRSTYPLFLFRLVLILNF

SEQ ID NO: 247047 - protein, 151 aa, Glycine max
  unsure (1)..(151): unsure at all Xaa locations
  Clone ID: PAT_MRT3847_65112C.1.pep
MEENFKCEQVGLIDELMQGKELAKQLCDHLLVSSSSSSSSHETNEVLIEKILSTYEKALAMLNCKADVGESKAKNGSMMDSHCPLTNGSPKSEVLEPEVKNKNVFKKXRAMSTCTEQVKVCLGTAHEGSLDDGYSWRKYGQKDILGAKFPR

SEQ ID NO: 247048 - protein, 264 aa, Glycine max
  Clone ID: PAT_MRT3847_65113C.1.pep
MFSVNPKPFSAVAVAMSGSHSQQAQPKSPIPTENYPVPLSPPLPPISKQLELSRAMSAASNSSLFSLSPADILYHDDHLIAVNKHPGIYCETLLSSLASQSHQLHLANRLDRDTTGVLLLTKSHKVAAKLVKAFTDHKVKKTYIALCTGPPPNWERVTLRSGHGRSKFGAWRVYAASDVGRALPGGSVVRSMETSFELLSVNRKGNFREVSDSEFGNVEGENVLVVEEKAVKEDGNNESEIVVRAYPRSGRTHQIRLHCQYLGI

SEQ ID NO: 247049 - protein, 99 aa, Glycine max
  Clone ID: PAT_MRT3847_65114C.1.pep
SKIFTQKNPNFGGILLNWKPAAKKTKKKGGGGAKTHNIFKRGLKFLEINPGGIGGEKNLFFLKKNYGTLGVTERKAPTTSTWDLGSSIPPHRGVPNNHF

SEQ ID NO: 247050 - protein, 36 aa, Glycine max
  Clone ID: PAT_MRT3847_65115C.1.pep
KWSACYSNSQNSDFVGWINPVQLWFLLHTHKIIDID

SEQ ID NO: 247051 - protein, 93 aa, Glycine max
  Clone ID: PAT_MRT3847_65116C.1.pep
PRGKPTLVQQRPGKHRNPVWILQKFRRAKRATPSRCCSTGSRPVWRFRSGDLNAESNVEQEKKKVGSNLKKGGGPFWWKCQFRHSPRSLRFAC

SEQ ID NO: 247052 - protein, 183 aa, Glycine max
  unsure (1)..(183): unsure at all Xaa locations
  Clone ID: PAT_MRT3847_65117C.1.pep
MRSTMNLVVKMKREVHFLEWARPPRKKRKRELAERFLALSATIPGFTKTDKTSILANASSYVKQLQQRVRELEQEVQSNVSSNEGATSSCEVNSSNDXTLVGGPNEILPEVKVKSVTERDVLIXSHCEKQKGIMLKILSQLENVNLXVVNSSVLRFGKITLDTHPLCLRFIIFLSTNVNYFFC

SEQ ID NO: 247053 - protein, 59 aa, Glycine max
  Clone ID: PAT_MRT3847_65118C.1.pep
TVGVYCQGTAILLSINPNLWHPLSLEMTEPSAGVFEDNPDLTLRLGQGLLSGGLLELSS

SEQ ID NO: 247054 - protein, 65 aa, Glycine max
  Clone ID: PAT_MRT3847_65119C.1.pep
RGASSLNSQSSNNGYTEDDLCSTEPGRFQERESQESLRRSPIPFSPLPLSWSDLDSHFTTVHHSL

SEQ ID NO: 247055 - protein, 45 aa, Glycine max
  Clone ID: PAT_MRT3847_6511C.1.pep
ININHNSSGIILYWLLVLFCCITITLCYGMGAPPINFHTIKVNGI

SEQ ID NO: 247056 - protein, 63 aa, Glycine max
  unsure (1)..(63): unsure at all Xaa locations
  Clone ID: PAT_MRT3847_65120C.1.pep
NGPPFCYFYYNPYVMTLSGAFDYNFCLYLYNETFLLLSNFLCFXAKEEHLLKFLAKEFTSILF

SEQ ID NO: 247057 - protein, 70 aa, Glycine max
  unsure (1)..(70): unsure at all Xaa locations
  Clone ID: PAT_MRT3847_65121C.1.pep
EHVRGDLLNYKRWSEPLSYIINKXLENVQKNEVSXFFFDTCQSDGKERISDMYPPNVSALDIMHETKSYV

SEQ ID NO: 247058 - protein, 45 aa, Glycine max
  Clone ID: PAT_MRT3847_65122C.1.pep
GGDLGANNGTLAIFAGGEEPTGKLLDTALSHLGKVNYMGGSGKGQ

SEQ ID NO: 247059 - protein, 202 aa, Glycine max
  unsure (1)..(202): unsure at all Xaa locations
  Clone ID: PAT_MRT3847_65123C.1.pep
VRFYHASAFGSYFRITAPLEGSSPYVDPPSLPPFNADEFLAILSARGPRKFILKQMKSNWLDFYRRFLNGPNFMPWFQRRRAVAEQKQDRLWRHARMKTDIQKLISKMAELEVVDSFSVIERLLLGELLLQQPGNGGIDSTVTCHKQMXDLQAVTSALTKDMQQLMFSNPQRASLLQDRPDLTKLPALALVQARGASSTSLP

SEQ ID NO: 247060 - protein, 268 aa, Glycine max
  Clone ID: PAT_MRT3847_65124C.1.pep
LHKFNHFISTAESGVHQVSEKGVLQVLLNFKFATDVLSGGDSNMVGELSSNPKAKLPGRRKQDQSLTTSAIRERSNQLLNRLSQKLDPIDWLTYEPYLWENERQSYLRHAVLFGFFVQLNRMYTDTVQKLPTNSESNILRCSTVPRFKYLPISAPALSSRGTKKAFTPSSSEISSRSSWNSITNGELSQKINLDDSSSLGVAAPLLKSFMQVGSRFGESTFKLGSILTDGQVGIFKDRSAAAMSSFGDILPAHAAGLLSSFTAPRSDS

SEQ ID NO: 247061 - protein, 60 aa, Glycine max
  Clone ID: PAT_MRT3847_65125C.1.pep
MLQSFIKKVWVPMKPYYTQVYQEIWVGVGLMSLIVYKIRSADKRSKALKGCSPAHAHGHH

SEQ ID NO: 247062 - protein, 84 aa, Glycine max
  Clone ID: PAT_MRT3847_65126C.1.pep
YSSAMVHRLRLSEYSRIMGHGSSLILNIGSHTVPAVCVSKAFVVSIRALDLSCQFSWSIKLQRTRIKHTGLRTGWCLRGHTAPR

SEQ ID NO: 247063 - protein, 96 aa, Glycine max
  Clone ID: PAT_MRT3847_65127C.1.pep
LVLQIGHNVVIGKNCLLCGQVGIAGSATIGDYVTMGGRVAIRDHVSIISKVRLAAASCVTKDIKEPGDYGGFPAMPLHQWRRQVASRCQALVRRDP

SEQ ID NO: 247064 - protein, 65 aa, Glycine max
  Clone ID: PAT_MRT3847_65128C.1.pep
LENMETETQFHEHFLQLIVKEYVVHVHLMNISPFHNTTHPQKKKRQIVLRNFLIYTRANVSIYDK

SEQ ID NO: 247065 - protein, 113 aa, Glycine max
  Clone ID: PAT_MRT3847_65129C.1.pep
AQDSSEPFVAITPSTGQQLATEVKCSSVVRNTQSSNAIAPFDIGRQAHESTASSPPTEHKLVASVSTPVSYDIEVEPIQIKFVARIRSNSIKTHKHINRHINKHINQPKGSKP

SEQ ID NO: 247066 - protein, 78 aa, Glycine max
  Clone ID: PAT_MRT3847_6512C.1.pep
LKTHNSVNATCIPVYTPYSNIHNKYLTVQLISLKRRVPIYSVKIHKHRPHTETMSIKHLQPKYTTTICCPLAPVRTPV

SEQ ID NO: 247067 - protein, 41 aa, Glycine max
  unsure (1)..(41): unsure at all Xaa locations
  Clone ID: PAT_MRT3847_65130C.1.pep
PPPPPPPYHPQPPXPPPPPLRSYPPPPPRPPPPPSVVFSQP

SEQ ID NO: 247068 - protein, 204 aa, Glycine max
  unsure (1)..(204): unsure at all Xaa locations
  Clone ID: PAT_MRT3847_65131C.1.pep
SKFLILLMAWLPTAVTFVFLPVIRHHRGVQQPNDSKAFYNFLYTTLVLAGFLMVVIILQKSFTFTKSEYYITTSLMLLLLILPLAVVMVEEKKIWKRKQEHINSENPLKALNITTEMPNLEKSTQAPQKQASCWKSMFRPPSRGDDYXILQALFSLDMVILFLATICGLGGTLTVSNNLSQIGTSLGYSAHSITTFVSLMPFGS

SEQ ID NO: 247069 - protein, 99 aa, Glycine max
  Clone ID: PAT_MRT3847_65132C.1.pep
RMDYRRLWNSGVDRVLAIRQASIITEAVTILSSGIHVRPGYIGSGFLAVMNLRCCWQGICISWIGQVLWCANDTRTPRKTGGMFILYGKFIQFCVKNGP

SEQ ID NO: 247070 - protein, 50 aa, Glycine max
  Clone ID: PAT_MRT3847_65133C.1.pep
MQDEKKMNVKKGFLGVQVGLEDDEEGGYSPQRFVIPISYLSHPLFKHLLD

SEQ ID NO: 247071 - protein, 25 aa, Glycine max
  Clone ID: PAT_MRT3847_65134C.1.pep
PYDKLSIFLVLCISIEVVGSSHESH

SEQ ID NO: 247072 - protein, 124 aa, Glycine max
  unsure (1)..(124): unsure at all Xaa locations
  Clone ID: PAT_MRT3847_65135C.1.pep
GGKTQSFRSLNLTGVVIVLVSIPPLFHSSILFYLFFFLRFQNSFRQLRNQSTRFSFSLSLSHRRAGAMAGAMNMKVDKIRQIVRLKQLMTRWKHISLRRRSDDEPSAARRPPPGFIFVYVGXER

SEQ ID NO: 247073 - protein, 97 aa, Glycine max
  Clone ID: PAT_MRT3847_65136C.1.pep
TEIYGHALDLAAHVHELREHVTLVPLFGYTEEKFLEKFDDNFEEEFALLCTCSQRCDLSVKCNVDLECFNGYGYKSQIFSFGLNKLGFGLDLGVKRK

SEQ ID NO: 247074 - protein, 51 aa, Glycine max
  Clone ID: PAT_MRT3847_65137C.1.pep
ALVLNQRVPCTYISYTSILIFIFTLSIFLIMFIFLLILHNFILTLFFHFNS

SEQ ID NO: 247075 - protein, 71 aa, Glycine max
  Clone ID: PAT_MRT3847_65138C.1.pep
AHLATKSIVLKNMFLKELFRGTNTRIDNYDYVKRQFKYQTTPYSLVIVDLPSSKSDFVGFVRNDSNSDFVC

SEQ ID NO: 247076 - protein, 629 aa, Glycine max
  unsure (1)..(629): unsure at all Xaa locations
  Clone ID: PAT_MRT3847_65139C.1.pep
MSLLPKTEQNDVPVVDIDSDENGVAAVAPAKNDASSHKTPSPQVELVQQETPASGSALSASDGLSRSFWKAGDYVVGPSSKPTPFQGHLEHARVHPKFLHSNATSHKWAFGAIAELVDNAVDEIQNGATFVKIDKFDVKKDNSPALCFLDDGGGMNPNAIRKCMSLGYSSKKSKTTIGQYGNGFKTSTMRLGADVIVFSRAMHSGRATQSVGLLSYTFLRRTGQDDVVVPMIDFDISGHWAEPIIYSSQDEWSANLKTILDWSPFTSKEELMLQFDDIGSHGTEVIISYWWFHSDREEELDFDDNTVDIXKQHVVNHGADKHLRKKTVQHQSLISYRLRFSLRAYVSMLYLRKFSNFSIILRGKLVDQFNIADDLIYSKVIPYKPQLAMATNEAIAETKTTIGFIKEAAEIKVTGFNVYHKNRLIKPFWKVVADGSSKGRCVVGVLEANFIEPAHDKQDFERSVLFIRLENKLKQMTMDYWRDHCHLIGYQPLNFKSQKCSKRSPXRKSAQHSINPQNQLLADQQDTSLVAEHQSDLSQPIVGLAVIGMQGSSREQLGTMLETPVSVSPDEICAENIKLFERCEEYREKETELKQTVVDLEEELKQIKKKCDLLSSLLETKRKAKSVKG

SEQ ID NO: 247077 - protein, 82 aa, Glycine max
  Clone ID: PAT_MRT3847_6513C.1.pep
DTSDFVRQLYNEDQLQKDDVNLLNWSGLPSQGQEQHHGRDSINITSLLPRINPNSSIACLTRRPRSDFRSLPSLNTSFCIII

SEQ ID NO: 247078 - protein, 81 aa, Glycine max
  Clone ID: PAT_MRT3847_65140C.1.pep
ACEHVREVHLREDHRLPRPLQDHKLGWLPHTTPCIQTLTGIPCASLSSTQPNMTYTCGNCDWTDKTTWTKANSYGDIGETG

SEQ ID NO: 247079 - protein, 146 aa, Glycine max
  Clone ID: PAT_MRT3847_65141C.1.pep
GLWLVWRYNLLCFHVLQMQWIHNTFLSVSKSSIWWHCLPAKLEILLEDMNLETVRPKKLRICQNIQLFNRRSKYIRDPISFLETSSKRGELGVGVLSNFEEQISVIFTKPLKAVIFQNYKFERQSECIIFSKSELRGSVESDSLFC

SEQ ID NO: 247080 - protein, 55 aa, Glycine max
  unsure (1)..(55): unsure at all Xaa locations
  Clone ID: PAT_MRT3847_65142C.1.pep
FFSFQFILSYLLFLPTYFPYTLFXPLKKCRNVHRKPDNCCIYDILFYQFRLFLSN

SEQ ID NO: 247081 - protein, 53 aa, Glycine max
  Clone ID: PAT_MRT3847_65143C.1.pep
RKNLFIYNLQQHHGLRSSFEIYNNKKKNVVFLLRLTNQVWISGYFFLFCTRYP

SEQ ID NO: 247082 - protein, 79 aa, Glycine max
  Clone ID: PAT_MRT3847_65144C.1.pep
MQKEDGLITVLYIARMCCVTNRSITAYDHASDQINIGHVDENGGYNGHLFTFALCGYMRAQSDAYSALDRLWQKTKVEF

SEQ ID NO: 247083 - protein, 74 aa, Glycine max
  Clone ID: PAT_MRT3847_65145C.1.pep
PSPSQVKTSKLDIFNHMKNSPIFYFLLKIFRLQLLKLPFLLHLLLFDSYLQFVSLLYCVSFNILFLRLSNKFVF

SEQ ID NO: 247084 - protein, 142 aa, Glycine max
  Clone ID: PAT_MRT3847_65146C.1.pep
GVTTLLHTSFGSRLPLIQGPSFVYLAPVLAIINSPEFQGLNANKFKHIMKELQGAIIIGSAFQTFIGYSGLMSLLVRLINPVVVSPTIAAVGLSFYSYGFPLVGTCLEIGAVHILKDIAFSLYLRKISVLGHRIFLIYAVSL

SEQ ID NO: 247085 - protein, 47 aa, Glycine max
  Clone ID: PAT_MRT3847_65147C.1.pep
ATLAYQLNSKKETHVNNDSRATNNILRKTFKSILIVKVHNDQNQRLS

SEQ ID NO: 247086 - protein, 60 aa, Glycine max
  Clone ID: PAT_MRT3847_65148C.1.pep
CLQAPNVCLSASFLCSWLPYTLDPTLNSYHKMKVLNYFPFYFYLMGFYVLIMCVLEISLL

SEQ ID NO: 247087 - protein, 95 aa, Glycine max
  Clone ID: PAT_MRT3847_65149C.1.pep
QSAPLINCNNFDMWRFHNVAWNHVLRDAHKPSLMLMLRFYKNRLGMFTAYYGFLLTMAIEILVFKWRLYPWVIPPSFLHSAATFTPPQPCLCKSP

SEQ ID NO: 247088 - protein, 59 aa, Glycine max
  Clone ID: PAT_MRT3847_6514C.1.pep
VNVIVDCFRCESLIQGGPLLKKEMLCLIVFVHYLKFALFVDSYIMCILFLFSSTSYVLI

SEQ ID NO: 247089 - protein, 136 aa, Glycine max
  Clone ID: PAT_MRT3847_65150C.1.pep
GFGSCGMATSSSSSSWREGMSSDNIKGLCLALSSSFFIGASFIVKKKGLKKAGASGIRAGIVHSSPPSITFLFLLCIQFIFRVCFNFSRDLDVFSFTSLGHEFFNCLKSLKFTLDALLCQPFFFFVISSRRIPQDK

SEQ ID NO: 247090 - protein, 112 aa, Glycine max
  Clone ID: PAT_MRT3847_65151C.1.pep
MDEEGSRGRAKEDAGDVRYRGVRRRPWGKFAAEIRDSTRQGQRVWLGTFNTAEEAARAYDRAAYAMRGPFAILNFPDEYPMTAGGATNAATYSSAASSSSSASSSRHANVAR

SEQ ID NO: 247091 - protein, 243 aa, Glycine max
  Clone ID: PAT_MRT3847_65152C.1.pep
HASDIILRERLHIFGILGCLLCVVGSTTIVLHAPQEREIESVSEVWDLAMEAAFLFYAAMVITATFILIFHFIPLYGQTHIMVYIGVCSLVGSLTVMSVKALGIVIKLTLSGMNQLIYPQTWAFTLVVLVCVLTQMNYLNKALDTFNTAVVSPIYYVMFTTFTIVASVIMFKDWDRQSPTQVITEICGFVTILSGTFLLHKTKDMADGLQTSLSIRLPKHSEEDGFDGGEGIPLRRQESMRLP

SEQ ID NO: 247092 - protein, 350 aa, Glycine max
  unsure (1)..(350): unsure at all Xaa locations
  Clone ID: PAT_MRT3847_65153C.1.pep
MATSSSSSSTSSWREGMSSDNIKGLCLALSSSFFIGASFIVKKKGLKKAGASGIRAGSGGYSYLYEPLWWVGMITMIVGEIANFAAYAFAPAILVTPLGALSIIISAALAHIILRERLHIFGILGCVLCVMRSTTIGLHAPKVVCNLLIISLXHIFYLIQLGRRMRVSYHCSFGLLMIMLSDLALHAHLHSIPETKCXVIFCTLFIYSVPQLXMKILSGKFQLIQPQTVAFTLFXLFCVITQMNFVHVALDTFNTAVVSPIYYVMFTTFTIVASVIMFKDWDRQSPTQVITEICGFVTILSGTFLLHKTKDMADGLQPSLSVRLPKHSEEDGFDGGEGIPLRRQEAMRSP

SEQ ID NO: 247093 - protein, 254 aa, Glycine max
  Clone ID: PAT_MRT3847_65154C.1.pep
ARRRQKGTANAKSQVNSLSPLFTNTNTTYSLAKLRMKEELVVEEGYLFKEETHFTVLKTSLFFNGDGFAVYDCKGQLVFRFDSYGPRARDKDELVLMDPHGRSLLTLRRKKPSLHQRWEGFKGERTEGHKPIFSVKRSSIIGRSRTSVAVEVYDSPGVEYLIEGCFPQRCCKVFNAAKELVAEIRRKVDPTTSVMLGKEVFWLCVKPGFDAAFAMGLVLVLDQINGENYFDDRILEPSVHPAAEDLGFVSPVPV

SEQ ID NO: 247094 - protein, 83 aa, Glycine max
  Clone ID: PAT_MRT3847_65155C.1.pep
DSKCKLLNFASSFFTFHISNNMSCLPNFCPSLNLAFQIILQNMSLIHSHCVGSLYFWFNDNSNSLLCSIEVIEIENEIFFKHI

SEQ ID NO: 247095 - protein, 46 aa, Glycine max
  Clone ID: PAT_MRT3847_65156C.1.pep
YIIVESNTALNHLYGRCQKPKYGLYNLGLLAKPTYPYILGCDRYSL

SEQ ID NO: 247096 - protein, 74 aa, Glycine max
  Clone ID: PAT_MRT3847_65157C.1.pep
GIPLCIGFCLYPYIADYFFGFYAAVTATGIIWSRYSTVITPKNWNLFSVNIAMAGTGIYQLSRKWRHDYSSEAE

SEQ ID NO: 247097 - protein, 65 aa, Glycine max
  unsure (1)..(65): unsure at all Xaa locations
  Clone ID: PAT_MRT3847_65158C.1.pep
MXXVXXXXXTXXXXXTXXSHSPXXXEXXXXXSXXLARXTPRCRXXXXDXXXXXXXSXLXXXCXXI

SEQ ID NO: 247098 - protein, 129 aa, Glycine max
  Clone ID: PAT_MRT3847_65159C.1.pep
SKLSQCTINETLMKINEKSSVALPQDLQSWFQVENSNLGPEFLPNMCTNLSTQHYGNNALMMEDLNPIGVNNENSGAMEESSSFSSFDESSNNSYSMSYDMQTNRRTWGFHEVEDLHSVAFGYGTRSHS

SEQ ID NO: 247099 - protein, 75 aa, Glycine max
  Clone ID: PAT_MRT3847_6515C.1.pep
LATIDKNRTRFLRHFIHFIGCHLIFSFGGSQNCTQLVFVILFLSQFFLVFDPKERGLVRAFQIIGCPLQLMVELV

SEQ ID NO: 247100 - protein, 186 aa, Glycine max
  unsure (1)..(186): unsure at all Xaa locations
  Clone ID: PAT_MRT3847_65160C.1.pep
IKYSEVADFYDYYKGQMEAWDGPALLLFSDGKTVGACLDRNGLRPARYWRTSDNMVYVASXVGVVPVDDXKVVLKGRLGPGMMITVDYLXGQVYENTEVKKRVALSSPYGNWIKENLRSLKPGNFLSASVLDNEAVLRHQHAFGYSSEDVQMVIESMAAQGKEPTFCMGDDIPLAALAQNPHMLFD

SEQ ID NO: 247101 - protein, 212 aa, Glycine max
  Clone ID: PAT_MRT3847_65161C.1.pep
QVDFHKKKNGKSENGLLGRFLGFGKKSKKGELEETTYTNKSKNQNSGAENKKGKEGKLEDHGNNDFDFHDYDDTPPHPKNGKSGKGSNNVKEGQMGPGPIMGNNLPMRHQMENIQAVQGLPAMNGDGGYYQGVQMQHAPYNNLQQHYMGMMMNQHQHQQANMNNNMYPTPMMYGRPHPSMNYMPPPPMPSHPIADPITHTFSDENVESCSIM

SEQ ID NO: 247102 - protein, 61 aa, Glycine max
  Clone ID: PAT_MRT3847_65162C.1.pep
ETMRWFNLIHKDHVNWAAYFMHPTYLRYLLACSLNTRDLMFSCIPWLKHRYSGFIMMFALL

SEQ ID NO: 247103 - protein, 54 aa, Glycine max
  Clone ID: PAT_MRT3847_65163C.1.pep
MFCPKMGSVQLFEAKSFTYTYLLGCTKTRPALVIDPVIETVERDASLVHELGLD

SEQ ID NO: 247104 - protein, 107 aa, Glycine max
  Clone ID: PAT_MRT3847_65164C.1.pep
LCLAKEGIQSPIYKGFYSKEETKKALELNKDINKIKKALKPQNTTIFINTDQTKVNHKTNKDIVSPTIPKPINGLNLENFKKTQSLLFKVHNSQIHSGSLHRRACLL

SEQ ID NO: 247105 - protein, 192 aa, Glycine max
  unsure (1)..(192): unsure at all Xaa locations
  Clone ID: PAT_MRT3847_65165C.1.pep
MTSIPKEPEEVMKRRGGSVLGKKTILKSDHFPGCHNKRLHPHIDGAPNYRQAESLLVHGVAIPTTDGIRNVLKHIGARAEGKKAQVLWINLREEPVVYINGRPFVLRDVERPFSNLEYTGINRERVEQMEXRLKEDILMEAARYENKILVTDELPDGQMVDQWESVSCNSVKAPLEVYPELQVEGYLLDYER

SEQ ID NO: 247106 - protein, 48 aa, Glycine max
  Clone ID: PAT_MRT3847_65166C.1.pep
NTIFLVNREMKQVLVQWHNPPKPETDAYIRCFCRDQSYRELDQNRVSS

SEQ ID NO: 247107 - protein, 91 aa, Glycine max
  unsure (1)..(91): unsure at all Xaa locations
  Clone ID: PAT_MRT3847_65167C.1.pep
CFDSTYPFEIATVFVYVNHSLPNILFMSSLPSNNELHFLKAYPTINNARFKVVHESVYLFISNKSLYVSLIWFGTGITRCSYLXSLFILXG

SEQ ID NO: 247108 - protein, 364 aa, Glycine max
  unsure (1)..(364): unsure at all Xaa locations
  Clone ID: PAT_MRT3847_65168C.1.pep
MKETCCCASFSFGKAKPYLLTVGLQFGFAGAYIFSVASLNHGMNRYVFVVYRNAIAALALAPFALIFERKIRPKITLPVFLQIVALGFVEPVIDQGFTFLGMQYTSASFASAIMNAVPSVTFVLAVILRLERVNVKEVRSLAKVIGTLVTFSGALLMTXYKGPQIKLFFSPDTTHHQDGSHSPQVIKHWLSGTLFLLLGCVAWSSFFILQXSITLKRYPAELSLSSLVCLSGALQASVVAIVATRHSGLVAWALGWDFRLYGPLYTGIVTSGITYYAQGLILQTRGPVFLTAFNPLCMVITSALGSFLFAEQLHLGSIIGAVIIALGLYSVVWGKGKDYSNPTPSSPTTKHTETPQLPITSSDI

SEQ ID NO: 247109 - protein, 64 aa, Glycine max
  Clone ID: PAT_MRT3847_65169C.1.pep
DKKLELKAFLNTREYSSEFPVEMCTIHMRKVGMYMSPKLQPEFNTIYCCPLLESSHQRVKARLL

SEQ ID NO: 247110 - protein, 114 aa, Glycine max
  unsure (1)..(114): unsure at all Xaa locations
  Clone ID: PAT_MRT3847_6516C.1.pep
MGQKPARFNRQFRTNPSPRXRFCLGVPDPKIRINDVGMKKKGVDKFPFGVNLFSWLKEYVFMETFKFFRFFLIRLLSKFFINDIFLFWMFNFLRLNFLCFKRVYFDFLFFVCYY

SEQ ID NO: 247111 - protein, 322 aa, Glycine max
  unsure (1)..(322): unsure at all Xaa locations
  Clone ID: PAT_MRT3847_65170C.1.pep
MAAKLQIFTGLPPAPFQSSSSTLCVLKKPLTTSFFGTARVEVLKLRVMRIAKPARGGGALGARMNLFDRFARVVKSYANAVLSSFEDPEKILEQAVLEMNDDLTKMRQATAQVLASQKRLENKYKAAQQASEEWYRKAQLALQKGEEDLAREALKXRKSYADNASSLKAQLDQQKTVVENLVSNTRLLESKIQEARSKKDTLKARAQSAKTATKVSEMLGNVNTSSALSAFEKMEEKVLTMESQAEALGQLTSDDLEGKFALLEGSSVDDDLANLKKELSGASKKGDLPPGRSTTSANTGIPFRDAEIELELDQLRQRAKEF

SEQ ID NO: 247112 - protein, 105 aa, Glycine max
  unsure (1)..(105): unsure at all Xaa locations
  Clone ID: PAT_MRT3847_65171C.1.pep
ISCXFXGVVXXXXAXXLXVILLSAXPXPXXXXXXXLXXXPXXXAPXPFRXXSPLXXXXSALXXLXXLXXXXXXFAXXXPXSVLXAPSXXPSSSPPSVXXXRVRAP

SEQ ID NO: 247113 - protein, 90 aa, Glycine max
  unsure (1)..(90): unsure at all Xaa locations
  Clone ID: PAT_MRT3847_65172C.1.pep
TKKLSGAPHASSFALGLGIFLFGEMHFHGATGYYCGWQGGHATFYGGGEAFGTMGGGWCYWNLCRQGFXTNTGALSTVLVNNGLSCGAWY

SEQ ID NO: 247114 - protein, 130 aa, Glycine max
  Clone ID: PAT_MRT3847_65173C.1.pep
MQLAISQVAHQTPTTVPENETTEVIKTQETTPEPVPATEAPATEQAAAEVPAQEEQQATEVPAPESTTEAPKEETTEAPTTETVETTTTEEAKPEEPKEEEKPAAQEKSEEKTEEVKEEAEEPKELPETR

SEQ ID NO: 247115 - protein, 36 aa, Glycine max
  Clone ID: PAT_MRT3847_65174C.1.pep
LYAYEHLDLRLHVTRAILRYCSVNRTYALISDKANG

SEQ ID NO: 247116 - protein, 102 aa, Glycine max
  Clone ID: PAT_MRT3847_65175C.1.pep
PLGKARTRRGRLRRNTTARPNTSPTKKTGRGKQKSERPQRLDPRGGSIQKIQRPQTTGRNCQPKLMRMTGNQTGYGGHDEKPSTAHEASPAIQKRRTKKTEE

SEQ ID NO: 247117 - protein, 36 aa, Glycine max
  Clone ID: PAT_MRT3847_65176C.1.pep
FGSRGLAGATPLLIFFSPLLVPGALGIRMAVTAALA

SEQ ID NO: 247118 - protein, 38 aa, Glycine max
  Clone ID: PAT_MRT3847_65177C.1.pep
SQTILVFQPITLIWALARTNLINCPPLPSKSIKTTNQT

SEQ ID NO: 247119 - protein, 61 aa, Glycine max
  Clone ID: PAT_MRT3847_65178C.1.pep
LLPFIFCRFPSCKLAQIIFKFFHFILKRLLGPNPLQFKLLVSKPKKGSGGGGIGDESILCF

SEQ ID NO: 247120 - protein, 147 aa, Glycine max
  unsure (1)..(147): unsure at all Xaa locations
  Clone ID: PAT_MRT3847_65179C.1.pep
LEVTLTWNAFIFAHAHHGRGEEAVCCLEALHTXRGIKPDQATXTSFLTACSHARLVDDGLRILDTLVNVYGFVPSVDHIARIDDLWGRSEYLAEAERVIKSGSYGPQFNICWSLFRACAANGKLGLGRTAXKLILEREHNNPSVSVL

SEQ ID NO: 247121 - protein, 49 aa, Glycine max
  Clone ID: PAT_MRT3847_6517C.1.pep
VPKPLEHQVLSRLRKVKGPDLSILLLVLYQLHVRLVGTAGNGPLPTDVA

SEQ ID NO: 247122 - protein, 69 aa, Glycine max
  Clone ID: PAT_MRT3847_65180C.1.pep
PRVRFNKKQMIGNYGSSDCFRCCHDSSLVSSCLSSLHIMVLLQTGDNVVQYAENSYYYPLDNATMSLRQ

SEQ ID NO: 247123 - protein, 47 aa, Glycine max
  Clone ID: PAT_MRT3847_65181C.1.pep
RPVRVESYPLMAPCMSTWRHLHTMVRDRFNLDLTHHMYVSGLLLVGS

SEQ ID NO: 247124 - protein, 58 aa, Glycine max
  Clone ID: PAT_MRT3847_65182C.1.pep
ILKERLIKVSLCFCQDWPLAFVSAEDLVKFAESCMYTPAHRSCRWKVIIINRRFFLFL

SEQ ID NO: 247125 - protein, 80 aa, Glycine max
  Clone ID: PAT_MRT3847_65183C.1.pep
NLSHILLHQGYCSFIIACVLSARTTKKHLKRIVVYPPPGNIGNNPPPTYYGGHQSERHVSDVFNYSNYSAYTSPPAFHNH

SEQ ID NO: 247126 - protein, 46 aa, Glycine max
  Clone ID: PAT_MRT3847_65184C.1.pep
LPSYPVYYNIMVSRRLMLITTFSQRNQCRFHQGLIGCTVQCDLVLY

SEQ ID NO: 247127 - protein, 72 aa, Glycine max
  Clone ID: PAT_MRT3847_65185C.1.pep
FVYMFIHRNKFINNFQFIQIYTKKNTTSLCILNFLTLKNKSKPCSSPHRKAEAEAISPLNKERVNFYVTRLI

SEQ ID NO: 247128 - protein, 126 aa, Glycine max
  Clone ID: PAT_MRT3847_65186C.1.pep
EFATVKTDHMARALSKTYRSPVVDTIQSLPHHQQIVLCSSMKHFRGAKKDAILGELYKSYVGVCKSCLIPPAGILEFSNMCRVLNDQGLIKLGQSREDKLRRVSPKIDEGDITFALQGIRFFQNCL

SEQ ID NO: 247129 - protein, 66 aa, Glycine max
  Clone ID: PAT_MRT3847_65187C.1.pep
SFENYTSMFRPLLRHKILCSFSPSPSTHLLLPSSSYPWLPMVVSFFLTHLLLEVASPLKSSSSPFR

SEQ ID NO: 247130 - protein, 69 aa, Glycine max
  Clone ID: PAT_MRT3847_65188C.1.pep
RVPHLRILLKRYEIFWAPISNFCFKKANLAMTLSCMTIALEVGSLFDISTYCHEPGPMYEFPRNNMNFY

SEQ ID NO: 247131 - protein, 49 aa, Glycine max
  Clone ID: PAT_MRT3847_65189C.1.pep
PFTVRTKLITFKPIFLIPFPSEIIFDIICASEMDGFLVQGVAEVFGSRF

SEQ ID NO: 247132 - protein, 88 aa, Glycine max
  Clone ID: PAT_MRT3847_6518C.1.pep
VCSIDHTSSTSFSSHGSLQKKVHALHHLPLFCYSLGSFFSFSVCVLNPHSVLPHPIILSLCSVLIVLSFYFFLPSLVTLEAVVVDLFV

SEQ ID NO: 247133 - protein, 1250 aa, Glycine max
  Clone ID: PAT_MRT3847_65190C.1.pep
MEASVLLGNSYGVVARVAVAGLRGGVMGSAISPFEAYLSRSWRAVELIKFESGTTTLYFVDNHHMTIKKGSFSDVRVRSRKATLSDCSFLRTGIDICVLSASQGNDNSDESSANHVWLDAKINSIQRKPHNPECSCQYYVNFYVNQGSLGTELRTLRKEVKVVGINEIAILQKLERNTCQHKYYRWESSEDCSKVPHTKLLGKFISDLSWLVVASAIRKVSFCARSVENNIVYQILGSDATTSSLYMDSEISVVNFKVNEDGMQMPVIHLVDLFETDTNTSGDKHDSHYDEVPSSYGFEGLRRSKRRNIQPERYSDCGNVSEIKVGNVRTWPYKLNKRKDDDGGGEESLPLAQENSDNSQKVNELSSCREIIVYHGRNETLELKSGEANQTQLASVPLLQEGDSLALEHHHLNDNVTRRSDAYYSTPKLKRKRLVDLEADVDFDPGREGINSNKGVSEKRHGSSWYSRSRSHAAEHSYKDRSLNATAYKEMIDSYLKDVNRTPTTEEPPVMDQRKEIGNFGQKKEAEIPEREDEEQISEIDMLWREMEMALASSYLEETEGSNSANFAKTTEESNRTCPHDYRLSEEIGIYCYKCGFVKTEIKYITPPFIEMQRSVRHQEEKQCNGKDTKEKASKDDDFHLLSTHAPTDEHNSMEHDNVWKLIPQFREKLHDHQKKAFEFLWQNIGGSMEPKLMDAESKRRGGCVISHAPGAGKTFLIIAFLVSYLKLFPGKKPLILAPKGTLYTWCKEFNKWEISMPVYLIHGRGGTQKDTEQNSIVLPGFPNPNKDVKHVLDCLQKIKLWQEKPSVLVMSYTAFLALMREGSEFAHRKYMAKALREGPGILILDEGHNPRSTKSRLRKGLMKLKTDLRILLSGTLFQNNFCEYFNTLCLARPKFISEVLDTLDPITRRKSKTVEKAGHLLESRARKLFLDKIAKKIDSGIGNERMQGLNMLRETTNGFVDVYESENFDSAPGLQIYTLLMNTTDKQREILPKLHTRVDECNGYPLELELLVTLGSIHPWLVKTTSCANKFFTADQLKQLDKYKYDMKAGSKVKFVLSLVFRVMQREKVLIFCHNLAPVKLLIELFEMFFKWKKDREILLLSGELDLFERGKVIDKFEEHGGASKVLLASITACAEGISLTAASRVIFLDSEWNPSKTKQAIARAFRPGQEKMVYVYQLLVTGTLEEDKYKRTTWKEWVSSMIFSEAFEENLSHSRAVNIEDDILREMVEEDKSKTIHMILKNEKASTN

SEQ ID NO: 247134 - protein, 71 aa, Glycine max
  unsure (1)..(71): unsure at all Xaa locations
  Clone ID: PAT_MRT3847_65191C.1.pep
IRPLIRSYEARGCLPVAFPVFGTAMARDGNGQGTXLTYWVRXIXTGAVPSFCGDVLGTAVAYXGIPIVQNL

SEQ ID NO: 247135 - protein, 275 aa, Glycine max
  unsure (1)..(275): unsure at all Xaa locations
  Clone ID: PAT_MRT3847_65192C.1.pep
MEPESPALLLILFATLLWFLATTLSRGKSPPPSPTTIPKAYPVIGSVFSIAANNRRRIHWISDILHASPSSTFVLHRAFGSRQVFTANPTVVQHILKTNFPVYPKGLTLNRALGDFLGQGIFNSDGAGWKVQRQISSHEFNTRALRKFVETVVDAELSGRLLPLLAAAAKNKTVIPDLQDILQRFTFDNICKIAFGFDPEYLLPSLPLTPFATAFDDATRISSERFNAAXPLFWKIKSXLNLGFEKRLKKAISEVRGLAGRIIVEKRKEFQEKET

SEQ ID NO: 247136 - protein, 86 aa, Glycine max
  unsure (1)..(86): unsure at all Xaa locations
  Clone ID: PAT_MRT3847_65193C.1.pep
LKRXSIISIIDILIQHHVTVEKTMQEESLKHFLSKTFFSLRIAFTRXNPGYICXSLIYFCLVLIVCYNPLFXCCQLNLFCFCYFVI

SEQ ID NO: 247137 - protein, 84 aa, Glycine max
  Clone ID: PAT_MRT3847_65194C.1.pep
GMFPRLSPKQFYGAFLAFHPIKILESTSIFGLPPSWPSILTQFDQSWFPTREMYAPQNWLRPKGTCHGLVFFYPGKEEEAIFLK

SEQ ID NO: 247138 - protein, 91 aa, Glycine max
  Clone ID: PAT_MRT3847_65195C.1.pep
LIDPSIDNSYSESEVLRCIQVGLLCVQERAEDRPTMASVVLMLSSDTASMSQPKNPGFCLGRNPMETDSSSSKQEESCTVNQVTVTMLDAR

SEQ ID NO: 247139 - protein, 229 aa, Glycine max
  unsure (1)..(229): unsure at all Xaa locations
  Clone ID: PAT_MRT3847_65196C.1.pep
VKAVYXTRVSVGMRFRMLFETEESSVRRXGWDESTAGERQPRVSLWEIEPLTTFPMYPSPFPLRLRRPWPSGLPSLYGLKDGDMGIGSPFMWLQGGLGDQGMQSLNFQXXGVTPWMQPRLDASIPGLQPELYQAMASSAFQEIRTMDPSKSSQSLXQFQQTSNVPSAHASEVQXQYYHSLSLKHPSTNYQENQVPAQSQLLQQQLHRYHPYYDPRQQQQQLKNLPVQQQ

SEQ ID NO: 247140 - protein, 148 aa, Glycine max
  Clone ID: PAT_MRT3847_65197C.1.pep
YGCEKTTEGYGCEKTTEGDHKVPSLRSTLSAKNLFAGRPILNQITEFCNELKKLAIRAKERENAENLSPKESEEVVEKTPCSVQALAESDQKEKERKPLLEVSKTERLEGMSVKGKQQRKKRPDEAENNNMSITLDLENLKHKREGTL

SEQ ID NO: 247141 - protein, 280 aa, Glycine max
  Clone ID: PAT_MRT3847_65198C.1.pep
NPRASPSEFVIPLAKYVKAVYHTRVSVGMRFRMLFETEESSVRRYMGTITGISDLDPVRWPNSHWRSVKVGWDESTAGERQPRVSLWEIEPLTTFPMYPSPFPLRLRRPWPSGLPSLYGLKDGDMGIGSPFMWLQGGLGDQGMQSLNFQGLGVTPWMQPRLDASIPGLQPELYQAMASSAFQEIRTMDPSKSSQSLLQFQQTSNVPSAHASEVQRQVLPQSQPQNTLLHNYQENQVPAQSQLLQQQLHRYHPYSDPRQQQQQLKNLPVQQQLPNVISPLS

SEQ ID NO: 247142 - protein, 75 aa, Glycine max
  Clone ID: PAT_MRT3847_65199C.1.pep
CVSVIHLLLSKKKIYACHPLLNMLTCELTPDLYFHVFHIYTKLYQIYASLDICIIAIMFKYDNRYTDYTIYTSYT

SEQ ID NO: 247143 - protein, 56 aa, Glycine max
  Clone ID: PAT_MRT3847_6519C.1.pep
WLKIYTTIRPPLGMVAPFINEQKNYDMTEGGGLPSLINNPAKFFFGFWQQPAFLLG

SEQ ID NO: 247144 - protein, 149 aa, Glycine max
  unsure (1)..(149): unsure at all Xaa locations
  Clone ID: PAT_MRT3847_651C.1.pep
HGFCYHEDSNLLLYEYMENGSLGEQLHSSATTSALDWGSRYKIALGAPXSLCYLHYDCKPQIIHRDIKSNNILLDEVFQAHVGYFGLAKLIDFSYSKSMPAVAGSYGYIAPEYAYTMKVTEKCDIYSFVVVLLDLITVRLPVQPLAQGG

SEQ ID NO: 247145 - protein, 156 aa, Glycine max
  unsure (1)..(156): unsure at all Xaa locations
  Clone ID: PAT_MRT3847_65200C.1.pep
DTITLDLAKRVNEKAHIIIIVIGHVDSXKCTTSGYLSYNLGGIDTRDTEILXKDADEMNSMLVKIACIXYDYLNAEREKXITIDTAXARCKPPCSIAQLMDSDIHRDLINNMMTVTTTADXAALIIEFTTVEGASVTIYDXQTREHALTSLTLGVK

SEQ ID NO: 247146 - protein, 47 aa, Glycine max
  Clone ID: PAT_MRT3847_65201C.1.pep
GFGSRINPNSHTVSSNMCIKKVSQSHDPEECQDVKHLLPVATPTDGS

SEQ ID NO: 247147 - protein, 138 aa, Glycine max
  Clone ID: PAT_MRT3847_65202C.1.pep
ARNSARGGRGRGSYNNRGDNSNNERQDSGYGGRWGSNNTKDSDDGLSNFPGAKVQNSPGREAFPGGWGGGGGSGGGSSGWGGGGGGASNSDNGGWGGQASGGAGPSDGEQGSSGWGSAPKKAASGNGWGSGNSGGRGW

SEQ ID NO: 247148 - protein, 210 aa, Glycine max
  Clone ID: PAT_MRT3847_65203C.1.pep
SSPSSTASSPSTTPPSRKVCPPPPETPRSRPFPPCLDCSPPTTFLSSTLSPNTPSTASSSPPTGRGEYRNNGNQDEHPSGVPRPYGGGRGRGRGRGSYNNRGDNSNNERQDSGYGGRWGSNNTKDSDDGLSNFPGAKVQNSPGREAFPGGWGGGGSGGGGASNSDNGGWEQASGGAGPSDGEQGSSGWGSATKKAASGNGWGSGNSGGGW

SEQ ID NO: 247149 - protein, 308 aa, Glycine max
  unsure (1)..(308): unsure at all Xaa locations
  Clone ID: PAT_MRT3847_65204C.1.pep
VDELLKMEKAEYPMRIVYSFGISHEHPGTFILTYIRSTNPHHEYIGLYPKGFRFRKKMFEDIDRLVAYFQRHIDDPQHDSAPSIRSVSAMVPMRSPATGGSSGASGGSGWGGGSNSEGGWRGHSYDRGDRSSTPAQDRXGEYRNNGNQDEHPXGVPRPYGGGRRRGRGRGRGSYNNRGDNSNNERQDSGYGGRWGSNNTKDSDDGLSNFPGAKVQNSPGREAFPGGWGGGGGSGGGGTGWRRGGGGASNSDNGGWEGAASGGGHGGWEQASGGAGPSDGEQGSSGWGSAPKKAASGNGWGSGNSGGGW

SEQ ID NO: 247150 - protein, 37 aa, Glycine max
  Clone ID: PAT_MRT3847_65205C.1.pep
VGKCVHYLTILTLTPQIILAAAATSAVSAVLLFILGS

SEQ ID NO: 247151 - protein, 52 aa, Glycine max
  Clone ID: PAT_MRT3847_65206C.1.pep
TNVLIKTKCTIFVSYNRAEGIHQNFSTKLSTHFIDLGIGQILHIISTGFSIA

SEQ ID NO: 247152 - protein, 49 aa, Glycine max
  Clone ID: PAT_MRT3847_65207C.1.pep
YTLASSAQNSTAWNMASYPNDSCLVTPTPESAPCLQHLLQTKPYALART

SEQ ID NO: 247153 - protein, 413 aa, Glycine max
  unsure (1)..(413): unsure at all Xaa locations
  Clone ID: PAT_MRT3847_65208C.1.pep
RGYLLVHTNGGLNQMRSGICDMVAVARIINATLVIPELDKRSFWQDTSNFSDIFDEEHFMNSLANDVKIIKKLPKELVNATRVVKQFISWSGMDYYENEIASLWEDYQVIRASKSDSRLANNNLPSDIQKLRCRACYEALRFSPRIEQMGKLLVERMRSFGPYIALHLRYEKDMLAFSGCTHDLSPVEAEELRSIRENISYWKIKAIGPLALRSKGLCSLTPKEVGIFLTALGYPSTTPIYIAAGEIYGGESHMAELHSRYPLLMSKEKLASIEELEPFSNHASQMAALDYIVSIESDVFIPXSYSGNMAKAVGDVHGMRLFYRPVDLNKKALGHLIDPLDQRMITXGKKLLNSIILHVWHRHGSPRKRKGPISGTKHMDRFRSEEAFYANPLPDCLCRTETEPPPLNVSQIV

SEQ ID NO: 247154 - protein, 143 aa, Glycine max
  unsure (1)..(143): unsure at all Xaa locations
  Clone ID: PAT_MRT3847_65209C.1.pep
KGLAFPNGVALSKDNSFIIVAESTTFKILKIQVRDSKTNNNNIEPFAQVPRXPDNIKRNAKGEFWVALNSGRGLIQKLENEIETTLPWNADPVAIKFDEKGRAIEVLDGEYGRQLDSVSEVEEHEGSLWIGSAVQPYIGLIKA

SEQ ID NO: 247155 - protein, 68 aa, Glycine max
  Clone ID: PAT_MRT3847_6520C.1.pep
KFSWILQRTTRGLRACGAEFQPYFVLGDLWESFREWSAYGAGVPLVLNDKDSVVQYYVPYLSGIQIYS

SEQ ID NO: 247156 - protein, 78 aa, Glycine max
  unsure (1)..(78): unsure at all Xaa locations
  Clone ID: PAT_MRT3847_65210C.1.pep
PSYIFXTFSPDSFLVLSFSSLSSIXTPKAYPNRPPHQKRRYLSSRFHLYNFXFLLLTPXQDIVXPKGXDIVLCQYHKF

SEQ ID NO: 247157 - protein, 45 aa, Glycine max
  Clone ID: PAT_MRT3847_65211C.1.pep
YEGNFKLPPFHVLKTLIHAHLKMYKNGTQNDTQKARKMEIAKDGK

SEQ ID NO: 247158 - protein, 145 aa, Glycine max
  unsure (1)..(145): unsure at all Xaa locations
  Clone ID: PAT_MRT3847_65212C.1.pep
HETKTSAKNIVRNIGNKAKSGVNKVKKIGSGIKSPVRKPAPAKRAPVKRSAPAKRAQRTPVKRSAPVKRSTPAKRTPVKRSAPVKRAAPVKRAPVKRSAPAKRAPAPRRPAPAKRAAPVRRPAXXARKPAPRPAPRAPSTVRRPG

SEQ ID NO: 247159 - protein, 127 aa, Glycine max
  Clone ID: PAT_MRT3847_65213C.1.pep
FFHFFQHFPRGKKKKKHREKIEESLAAEGCVDLEQNGERSIHFQGKRLVISQSVEELVDVDICGCYAAAAAIQRAEEGATGRETQRQRGVPPERRGGAHAGQDGAREKWCWCGGSKEGVGHKEGGGG

SEQ ID NO: 247160 - protein, 53 aa, Glycine max
  Clone ID: PAT_MRT3847_65214C.1.pep
SPPVRFQQNIEKGPQADLNFFPPGGFHKGNSCPKSTPGVLGLFHPQNRAGDLK

SEQ ID NO: 247161 - protein, 93 aa, Glycine max
  unsure (1)..(93): unsure at all Xaa locations
  Clone ID: PAT_MRT3847_65215C.1.pep
XRPGTNKMWPFGHXIMPAXXXXCPRXLEXSXXGYLXFRPPXTQLPXFQLXXVXVCXDAXLXXFEDFRFXXPXRTXLPXNGIXRFXXSIXXXXE

SEQ ID NO: 247162 - protein, 89 aa, Glycine max
  unsure (1)..(89): unsure at all Xaa locations
  Clone ID: PAT_MRT3847_65216C.1.pep
ARDDKDSEGYLPLKVCAIDSPRPEELGNFWVPSXTGSHMDEVVRFYYSHHTRPQSFKVATPAKWKPGVPVFISPGVSNQQAKEMFLKGL

SEQ ID NO: 247163 - protein, 481 aa, Glycine max
  Clone ID: PAT_MRT3847_65217C.1.pep
MPSPVPTLLSKCTVFPDQKSTLGNLKLSVSDLPMLSCHYIQKGCLFTHPNLPLHSLIPLLKSSLSRTLSLFPPLAGRLITDSDSYVYIACNDAGVDFIHANATALRICDLLSQLDVPESFKEFFAFDRKVSYTGHFSPILAVQVTELADGVFIGCAVNHAVTDGTSFWNFFNTFRYYSRGASSCMHNTPDFRRDSFLISDAVIRLPEDGPQVTFDANVPLRERIFSFSREAIQKLKAKANNRRWPENNNNNNIAGELMRKQSNDNLLKENKATTILETWFRVNSKPQTVTETVEISSFQSVCALLWRGVTRARKLPSSKTTTFRMAVNCRHRIEPKLEAYYFGNAIQSVPTYASAGEVLSRDLRWCAEQLNKNVKAHDDAMVRRFVEDWERNPRCFPLGNPDGASITMGSSPRFPMYDNNFGWGRPLAVRSGRANKFDGKISAFPGKDGTGTVDLEVVLAPETMEALESDPEFMKYATCQL

SEQ ID NO: 247164 - protein, 215 aa, Glycine max
  Clone ID: PAT_MRT3847_65218C.1.pep
GVFIGCAVNHAVTDGTSFWNFFNTCAQLSRGASNCIRNIPDFHRESVLISDAVLRLPEGGPQVTFDANAPLRERIFSFSREAIQKLKAIANNRRWPENNNFAGELLRKKSNDNLLKENKATTILENWFKVNSNSISKPQTVEISSFQSVCALLWRGVTRARKFPSSKTTTFRMAVNCRHRLEPKLEAYYFGNAIQSVPTYASAGEVLSRDLRWCA

SEQ ID NO: 247165 - protein, 64 aa, Glycine max
  unsure (1)..(64): unsure at all Xaa locations
  Clone ID: PAT_MRT3847_65219C.1.pep
MFGRAPKKSDNTRYYEILGVSKNVSQXDDLKERLTRXPAIKXNNPDXXGDPXERFKEWGXXXXV

SEQ ID NO: 247166 - protein, 546 aa, Glycine max
  Clone ID: PAT_MRT3847_6521C.1.pep
LCLFVISTLRLESHSHSHTATQGRNETIHNDDDAHCAVRTLTSLINTNRYLNQLKRGIGISASAPDLDLDLDAVAVAAFVAFGANGSRNAGSDHVFRLVHRFADEMKPVRPPTGYWPDRWSMGYYRMLLTGDILRRKIKVGGARYQLLFPSHGSKTMSLGNDFGWLHYTWIDIGTPSTSFLVALDAGSDLLWIPCDCVQCAPLSSSYYSNLDRDLNEYSPSRSLSSKHLSCSHQLCDKGSNCKSSQQQCPYMVSYLSENTSSSGLLVEDILHLQSGGSLSNSSVQAPVVLGCGMKQSGGYLDGVAPDGLLGLGPGESSVPRTNHPTVYFILAFGWIIVDSGTSFTFLPGHVYGAIAEEFDQQVNGSRSSFEGSPWEYCYVPSSQELPKVPSLTLTFQQNNSFVVYDPVFVFYGNEGVIGFCLAIQPTEGDMGTIGQNFMTGYRLVFDRGNKKLAWSRSNCQDLSLGKRMPLSPNETSSNPLPTDEQQRTNGHAVAPAVAGRAPHKPSAAPSRMISSCRHVRFLTRTGPLSVKPAFARGTVKYRVDC

SEQ ID NO: 247167 - protein, 154 aa, Glycine max
  Clone ID: PAT_MRT3847_65220C.1.pep
LERIEMTQVMRGEVIEKAYAGSWKAHKSPDKPYLIEKINRNDPQEVIFCFPGSGAVRDWYSQKNFGETKIDLGLFPSLRSIGIDEQAFVNEAFQKKFQEILSAKPSLADEVFYDNNNSLTLYDLVMQTITFWLFSFLFASATIINHLYLLVKSN

SEQ ID NO: 247168 - protein, 62 aa, Glycine max
  Clone ID: PAT_MRT3847_65221C.1.pep
RGVQTAMRSQSQPHDNRGQASKIRRSSPYIANDDTGATWNRVMESTMFKNRPMDHMLDAILT

SEQ ID NO: 247169 - protein, 65 aa, Glycine max
  Clone ID: PAT_MRT3847_65222C.1.pep
FINFFPVTWFVVILNAVANTCIVGVQLVALLALFLHLVFIFISINLICSFLFEFNSPQGLNCICF

SEQ ID NO: 247170 - protein, 55 aa, Glycine max
  Clone ID: PAT_MRT3847_65223C.1.pep
LSYPDTNYFLGETSLNGTTDISECDHDRDRSVIWTRFNLTLVAISINDSHLADLC

SEQ ID NO: 247171 - protein, 123 aa, Glycine max
  unsure (1)..(123): unsure at all Xaa locations
  Clone ID: PAT_MRT3847_65224C.1.pep
NIVIRMKVLAFFVATILRACQCHAYYMFPLXMNTGYGARSSKVNCSFWRLAAXTHNIFGFETIPEECVEATYEYIHCQQYISYFRTVNQHSHFYAXDLELHSKDTFVFNIYVTVLFNIPYYLI

SEQ ID NO: 247172 - protein, 106 aa, Glycine max
  Clone ID: PAT_MRT3847_65225C.1.pep
TPFSHFSFNTIARKTNSIIFTFLLCSWVVVVVAKEVAIAKSESESLREPGLEKRETLEIITGGGGGGGTPPSVFCQLCREICNDSMNANRCTCSNKRAYGLTSAPP

SEQ ID NO: 247173 - protein, 57 aa, Glycine max
  unsure (1)..(57): unsure at all Xaa locations
  Clone ID: PAT_MRT3847_65226C.1.pep
VYAVRSPRKNDTILFRCLRFATPIIXTLSLVVXXXHYLCRFIRNFSRLPSLLFSIHC

SEQ ID NO: 247174 - protein, 68 aa, Glycine max
  unsure (1)..(68): unsure at all Xaa locations
  Clone ID: PAT_MRT3847_65227C.1.pep
RLLRLSKESICKKKKKKKKKNKKKKKKKKKKKKKKKKKKKKKTKKMQXRKKNKNNKKIWGGPFFGSKI

SEQ ID NO: 247175 - protein, 42 aa, Glycine max
  Clone ID: PAT_MRT3847_65228C.1.pep
TNFTVLIFVNGVGVQTNFVILCNGFHEIWACVSKEKKKKKTP

SEQ ID NO: 247176 - protein, 115 aa, Glycine max
  unsure (1)..(115): unsure at all Xaa locations
  Clone ID: PAT_MRT3847_65229C.1.pep
LERVTSYSRAPQASAVYVGALDSMNDSXMXPDCSIIRAMLRVDTYHTMPEHASRQISRAHFKVQWPYSGDSFDTILQIEPDMKFIWISSXSTNGECGPGTDFEMVKVSVACTCVS

SEQ ID NO: 247177 - protein, 85 aa, Glycine max
  Clone ID: PAT_MRT3847_6522C.1.pep
GGLFGVSTLDTGNALGISKDGALGGLIISETSGGSNSGTSSTSKERLASTSSGGTSTSGEGASLPSVGSGASGEASSQTCREHGR

SEQ ID NO: 247178 - protein, 737 aa, Glycine max
  unsure (1)..(737): unsure at all Xaa locations
  Clone ID: PAT_MRT3847_65230C.1.pep
MATDSSFEGLALDPSKCSKLSMEEKRELVYEVSNWSHGASEMLQSWSRQEILQILCAEMGKERKYTGLTKLKIIENLLKIVSEKKSGGNETATDPEPQSSPAPGQKPAKRQRKSENPSHIPVPATSVPVNNGGDSINTTFCKNSACKATLNQSDAFCKRCSCCICHQYDDNKDPSLWLICSSENTFPGVSCGLSCHLECALKHDASRIGKDGELPKLDGSYYCVSWITEQAILLRFTRIATNLLLTIRPIYTLTVPLLKVWAFLLMQILCQTSSMLEERLPPYLVLMXLKLENKHSPEEQVTEDMSTDDGLNSPALTGRECVPLXVAQKDLPLSPKPTNQDAYLLAPNMLRFEDVTATTLTIILGSEEPSGEILAGYTLWHRKVDDVDYPMDPTCTSLLPNRRFSVSGLIPGTEYSFKVVSNDLRESGMCEVQVSTEHGEEEVPNCSATERSQSPVTNCSSLSNPSSVEDETNNCNPYSDLTDNRADHYPSYHKDSNKLASGNLSNDAINCSNLGGAGLPPDADSLSDKQHAGGTTASIPSSDVLKLENKHSPEEQITEDMSTDDGLISPALTGRECVPLVGSSEGGLPNTPCKLETLKDGPGKNKRSKSSGKDQENVSGKREGPQDGSTSKKRSGERQEEGRVANGFSDRDFEYYVKVIRWLECEGHIEKNFRQKFLTWYSLRATPQEVRIVKIYIDTFLEDPASLAEQLVDTFSECLSSKRTSVVPAGFCMKLWH

SEQ ID NO: 247179 - protein, 171 aa, Glycine max
  Clone ID: PAT_MRT3847_65231C.1.pep
WLNSALTGRECVPLVGSSKGGLPNTPCKLETLKDGPGKNKRSKSSGKDQENVSGKREGPQDGSTSKKRSGERQEEGRVANGFSDRDFEYYVKVIRWLECEGHIEKNFRQKFLTWYSLRATSQEVRIVKIYIDTFLEDPASLAEQLVDTFSECISSKRTSVVPAGFCMKLWH

SEQ ID NO: 247180 - protein, 129 aa, Glycine max
  unsure (1)..(129): unsure at all Xaa locations
  Clone ID: PAT_MRT3847_65232C.1.pep
SRIVLVFWFWHQLIYYWELVTRITFYYNIQLDFLYFHFHQKLHSSMDGLSWDASQLWSTIQQPPDFEGGYSMPPNVLNQIQEMQKAQTGHAYSNSERTIYHSAGATTTXSEMMDVMXKQDTXLSQHVSI

SEQ ID NO: 247181 - protein, 58 aa, Glycine max
  Clone ID: PAT_MRT3847_65233C.1.pep
GFAIGRLVSPPGYVARRLVLAGHEPLHLVFKGDPEGPDSTMTVVCYGCMFCLGWSFSL

SEQ ID NO: 247182 - protein, 50 aa, Glycine max
  Clone ID: PAT_MRT3847_65234C.1.pep
AKKKSWERVFYKIAKNGLLFNKKRALIPAPNLTITFFTQINFFIKLMLYF

SEQ ID NO: 247183 - protein, 57 aa, Glycine max
  Clone ID: PAT_MRT3847_65235C.1.pep
GAIAQIIRTVTNKVYNITFSVGDAKNGCHGSMMVEAFAAKDTFKAPFKSEGKGTFKL

SEQ ID NO: 247184 - protein, 61 aa, Glycine max
  Clone ID: PAT_MRT3847_65236C.1.pep
VTRITFSYKIQLDFLYFHFHKKLHSSMDGLSWDASQLWGTIQQPPVFGGGYSMPLNVLNQI

SEQ ID NO: 247185 - protein, 73 aa, Glycine max
  Clone ID: PAT_MRT3847_65237C.1.pep
NSEIYHGRNVKSSVSTFIRYVKVQNYGITLRNLLLITDSHNLRKPSPIGDRCSPQRLHVLHRTPRRSCPSVSC

SEQ ID NO: 247186 - protein, 75 aa, Glycine max
  Clone ID: PAT_MRT3847_65238C.1.pep
IGCTLALCVGPLKHRLYRRGGHAFTYQAVLDDQLALANTQDFFDGNCPGDPRLPIFVHRMYTVSQFASKAVHAMS

SEQ ID NO: 247187 - protein, 55 aa, Glycine max
  Clone ID: PAT_MRT3847_65239C.1.pep
VRLLHSDTAISNLCFPSLYQVVESLVLRSTPLNVRMCLRLRKGAEELARIWGPKC

SEQ ID NO: 247188 - protein, 137 aa, Glycine max
  unsure (1)..(137): unsure at all Xaa locations
  Clone ID: PAT_MRT3847_6523C.1.pep
PTVSRRFMPEPGTXPEYEEPKSAPAQAFLKTITAEFQTLLGASLIXVLSRPSTEQVFLGQCENPEWTLDAEPLAAFDRFRHKLLEIESNIIERNKAKRLKNRNGPVKMPYTLLFPNTSDYFREGGLTGKGIPNSISI

SEQ ID NO: 247189 - protein, 120 aa, Glycine max
  Clone ID: PAT_MRT3847_65240C.1.pep
KNVIKSCFVKNQLPKGKTVALKSLPHPLLGELEQTSPDGVEPFKKSRAAPPFEFKRQAQAQSPPPNGDVRVKSDPWVMGIFFGPSNVYVTVVKASSPLSLVSPSWLKVVNLRPIFSLLTP

SEQ ID NO: 247190 - protein, 62 aa, Glycine max
  Clone ID: PAT_MRT3847_65241C.1.pep
TFQIRGRPRLAFFIFDCRGISVKVGGTGKGKNIPLVSDIENPSGFNKHVLFGQGVGIGFFFC

SEQ ID NO: 247191 - protein, 77 aa, Glycine max
  unsure (1)..(77): unsure at all Xaa locations
  Clone ID: PAT_MRT3847_65242C.1.pep
SFXMARTKQTARKSTGGKAPXEGSLQTXAARKSAPXTGGVKKPHRYRPGTVALREXXRYXRXTELLIXKLPXQRFVS

SEQ ID NO: 247192 - protein, 59 aa, Glycine max
  Clone ID: PAT_MRT3847_65243C.1.pep
LIQILQEDHWSIAILGSNSTRVFRAIGNSGENSHCLRELSKLIGHGLSCCLFMAAYTGD

SEQ ID NO: 247193 - protein, 424 aa, Glycine max
  unsure (1)..(424): unsure at all Xaa locations
  Clone ID: PAT_MRT3847_65244C.1.pep
MITLTDFYHVMTAMVPLYVAMILAYGSVKWWKIFSPDQCSGINRFVALFAVPLLSFHFIASNNPYEMNFRFIAADTLQKMIVLVVLGIWANVSKRGCLEWTITLFSISTLPNTLVMGIPLLKGMYGEFSGSLMVQIVVLQCIIWYTLMLFMFEYRGARLLISEQFPDTAGTIVSIHVDSDATALDGRQHPLETDAQIKEDGKLHVTVRKSNASRSDIFSRRSQGFSSTTPRPSNLTNAEIYSLQSSRNPTPRGSSFNHTDFYSMMAAGRNSNFGANDVYGLSASRGPTPRPSNYDEDASNNNNGKPRYHYPAAGTGTGTGTGTGTGTGHYPAPNPGMFSPTASKNVAKKPDDPNKDLHMFVWSSSASPVSDVFGGGHEYDHKELKLTVSXXKVEGNINRDHSEEYQPEKDEXSXWNRGIEDEHE

SEQ ID NO: 247194 - protein, 99 aa, Glycine max
  Clone ID: PAT_MRT3847_65245C.1.pep
RDPTAFSEPESFQPHRWLRNSQPATPRIQHPFGSVPFGYGVRACLGRRIAELEMQLLLARLIQKYKVVLAPETGELKSVARIVLVPNKKVGLQFLQRQC

SEQ ID NO: 247195 - protein, 33 aa, Glycine max
  Clone ID: PAT_MRT3847_65246C.1.pep
LAADAARIVSLEMVLHNKLHKESQPPCLMRNWT

SEQ ID NO: 247196 - protein, 73 aa, Glycine max
  unsure (1)..(73): unsure at all Xaa locations
  Clone ID: PAT_MRT3847_65247C.1.pep
IAYGTPSYRITIPRVTRSFSFAGIAIGRETSGGVENVLAXHIDLFNMVVGIHIMTNSGRGGPIHNNTVAHVYV

SEQ ID NO: 247197 - protein, 109 aa, Glycine max
  Clone ID: PAT_MRT3847_65248C.1.pep
MGHLGQNILNYELENGVNMCCDEDCSKNEINTTLIQYAVKDLLTGLGEDINREGIIKTPLRVAKALCDGTRGYSQSAMEIVEGALFPAAGVGHTIGWYGCGVCGLVIVR

SEQ ID NO: 247198 - protein, 56 aa, Glycine max
  Clone ID: PAT_MRT3847_65249C.1.pep
NIQTDITSTGGKAPMNPIATEAALSSAPTTVGVKTPHLYRLVTIARREIKKYRKNT

SEQ ID NO: 247199 - protein, 57 aa, Glycine max
  Clone ID: PAT_MRT3847_6524C.1.pep
IDHDRDRVKAMERIIDSKFKLRRTIASVSFGEFYLHIHIGSFKIVGSKSVNGLTKHS

SEQ ID NO: 247200 - protein, 113 aa, Glycine max
  unsure (1)..(113): unsure at all Xaa locations
  Clone ID: PAT_MRT3847_65250C.1.pep
SFSRRNYFLPFFEVKVYCMFNALLKKSXTKIHFAWHERPVRIGXYRLQIPSVDGVKCSKYSAVVYSSQSRLIGSSSTARNVPDDKHLLTAIAFKARKSNPGIDGSNALNLRPS

SEQ ID NO: 247201 - protein, 139 aa, Glycine max
  unsure (1)..(139): unsure at all Xaa locations
  Clone ID: PAT_MRT3847_65251C.1.pep
PRARDRGGAPLRRSAPRPRFATWYSRSPSYSRGHPKGRSRSQSPARSQSRSPVPDPRSQARSRSRSQEREEDAVNRGNTLYVTGLSSRVTERDVKDYFSKHGRVXWCHVVLEPHTRVXRGFAFVSMDTVEXAERCIKYL

SEQ ID NO: 247202 - protein, 79 aa, Glycine max
  Clone ID: PAT_MRT3847_65252C.1.pep
QGIGSGSSEITKLVKCIEAAWYWYCFCLSGSAIYVTAFQRSNHRTCLMCRCAHAITVYQNYQQKATHIFFSLHYSLLKL

SEQ ID NO: 247203 - protein, 38 aa, Glycine max
  unsure (1)..(38): unsure at all Xaa locations
  Clone ID: PAT_MRT3847_65253C.1.pep
EMYDQDGEDVIKEGVGGGGGHDPFDIFXYDFGGGSTFG

SEQ ID NO: 247204 - protein, 76 aa, Glycine max
  Clone ID: PAT_MRT3847_65254C.1.pep
SLSKKNQQSPLVILSLEPSWIRTSSQNPKSQKLHSRFQVKDQTSFPEPGKKPDFRAQNGRGGSRRKSGFRRETLAK

SEQ ID NO: 247205 - protein, 108 aa, Glycine max
  unsure (1)..(108): unsure at all Xaa locations
  Clone ID: PAT_MRT3847_65255C.1.pep
VGPVKPQPTHITGCRGFTKHSVGIESETSSTSKDSGSMVDAKDRNNTQTAASHGAASKRRLAYAPKIPYVEXLAQAQSAXVYFDFTXLQADSHDAATHIEEPKSGIYI

SEQ ID NO: 247206 - protein, 73 aa, Glycine max
  Clone ID: PAT_MRT3847_65256C.1.pep
MVQIARRRKKGRPSKADLARRSGQSPAAASQPDSRRSLRRRSVRYNIIDYDGDYLSDEEDERRREKNKLTLML

SEQ ID NO: 247207 - protein, 421 aa, Glycine max
  unsure (1)..(421): unsure at all Xaa locations
  Clone ID: PAT_MRT3847_65257C.1.pep
MVATMTMRKRGRKKLGWDIHSPAQTGIMDDLNVGVAEYSLFGSILTIGAMIGAIISGRIADYAGRRTVGWWLYVGRLFVGCGMGLLSYVVPIYIAEITPKNLRGGFTTVHXLMICCGVSLTYLVGILELILAGXCVNATYYVIPCSSKLRGQLIFCNFIGFLRLAKFWERSESALQRLRGKNADVYQEATEIRDQKPFKSKQNSIIGLFQMQYLKSLTVGVGLMILQQFGGINGIVFYANSIFISSGFSESIGTIAIVAVKIPMTTIGVLLMDKSGRRPLLLVSAVGTCVGCFLAALSFILQDLHKWKGGSPILALVGVLVYVGSFSIGMGAIPWVIMSEIFPINVKGSAGSLVTLVSWLCSWIVSYAFNFLMSWSSAGTFFIFSSICGFTILFVAKLVPETKGRTLEEVQASLNPYSTKT

SEQ ID NO: 247208 - protein, 144 aa, Glycine max
  unsure (1)..(144): unsure at all Xaa locations
  Clone ID: PAT_MRT3847_65258C.1.pep
MVLTVKETWSVPAILILTTLVAVSGSYVFGSAVGYSSPAQTGIMDDLNLGVAKYSLFGSILTIGAMIGAIISGRIADYAGRRTAMGFSEVFCILGWLVIAFSKVGWWLYIGRLLVGYGMGLLSYVVPVYIAEXTPKNLRGGFTT

SEQ ID NO: 247209 - protein, 179 aa, Glycine max
  Clone ID: PAT_MRT3847_65259C.1.pep
MDETKSTEPSEFSSPLLPIGAQGYGGNHDYEEKRQKETWSVPPILILTTLVAVSGSYVFGSAVGYSSPAQTGIMDDLNVGVAEYSLFGSILTIGAMIGAIISGRIADYAGRRTAMGFSEVFCILGWLAIAFAKVGWWLYVGRLFVGCGMGLLSYVVPIYIAEITPRSSRGFTTGSSGHF

SEQ ID NO: 247210 - protein, 642 aa, Glycine max
  Clone ID: PAT_MRT3847_6525C.1.pep
MPLANKLDNNVPPSKELCDPAMEFAAVSSPHASAHASDNGSSHDTDLNKTPQQKPRRRKHRPKVIKEGKPKRTRKPATPKPVQSKEKQPVKRKYVRKNALNKTSTPPTEETGELTKEMSCKRSLNFDIGTTYESSAAIENTRTLLGKENGVLVQETNVGPAFDLNTSMKQASNSYMSLPEDTQALNTSSGRKSSGTKPEENPPPKRKYVKRKGVNKTSAPPIEVPGNLTEETTSASAQTSCTGSINFDERASEQSYAVKENPTGHPGSEIGVVMKEMNVGLAYDLNTSMKQALNDDMTLPKDTQAPSSSSKIKLPGTKRKENLTGKRKNARKKGSNPSPIPPTEMTELTEAMILESNMSWRRSLNFDIGNVGRENLDLDIGKENMVLEERKVGPTYKDTWLKEAVNICMSLPEETQHPSTSISKCTSPGAKLNANSVEKKNKKGRATAWGGNISNSQSSSIRLQMVGSKRKHSDTFNRADDSSMNLIGVQYNGLPSYQHLSTSISKCTSPGAKLNANSVEKKNKKIRATARGGNISNSQSSSIGLQMVGSKRKHSGTFNRADDSSLNLIGVQYNGLPSYHTSLCLQFPKIQKKRRTEKGNATKEVQLTCPQEDALGHPYASSSSCWTYGSGYNTARVPATSN

SEQ ID NO: 247211 - protein, 381 aa, Glycine max
  unsure (1)..(381): unsure at all Xaa locations
  Clone ID: PAT_MRT3847_65260C.1.pep
MEVPEMEGKTESHMTSAAAFVEGGVQEACDDACSICLEDFCKSDPATVTNCKHEFHLQCILEWCQRSSQCPMYFLPISNRDXLRDSTSRELLEAVELERILNDETLRNFVILHHADFEYXDLPQGVKEADIEERIKPNXTAAAPMRRSRHLSRREGHRTRPSAHGRPHFLVYSTQPSAPPSAAGGGSEPAAIPVGSPSTPLTFDGNEQSSLQQIPHVQTQSSSLTSASTVSTTNLQGVHSDDRSFASHSFPASQDRAQPSEQSFSDSLRSRFNAVSMRYKDSISKGTRGWKERLFSPNSSMSELGSEVRRELNAKIASVSRLMERLETRENNSAAGTSLSNHLVNRSIAETSNQSNVEARGENSLHGNNTPTTFSASSDSK

SEQ ID NO: 247212 - protein, 72 aa, Glycine max
  Clone ID: PAT_MRT3847_65261C.1.pep
LPTYPIPNINYATFDSFTVLTPQKFPEGTIISSLSAWFSAKTNPKFCLSIVWHTGTTQDQALINDNSLVRAQ

SEQ ID NO: 247213 - protein, 48 aa, Glycine max
  unsure (1)..(48): unsure at all Xaa locations
  Clone ID: PAT_MRT3847_65262C.1.pep
HVKCSIFKLALXAHTILSFKTIPKNCFXPTKDYINYEQFTSYSKTFNQ

SEQ ID NO: 247214 - protein, 383 aa, Glycine max
  Clone ID: PAT_MRT3847_65263C.1.pep
MEVPEMEGKTESHVTSAEAFVEGGVQEACDDACSICLEDFCKSDPATVTNCKHEFHLQCILEWCQRSSQCPMCWQPISLRDTTSQELLEAVELERSLRDTPSRNAAIFHHPALGDFELQHLPMAMNEADIEERIIQHLTAAAAMRRSHHLGQREGHRTRSSAHGRPHFLVYSTQPSAPPFAAGGESEPAAIPVGIPSTPLTFDGNEQSSPQQIPIPQTRGSSLTSGSTVATTNLQGVHSNDRRFASHSFPASQDRAQPSEQSFSDSLRSRFNAVSTRYKESISKGTRGWKERLFSPNSSMSELGSEVKRELNAKIASVSRLMERLETTRENNRAAGTSLSNPNHLVNCSIAETSNQNNVEARGENSLRDNSTPTTFSASSDSK

SEQ ID NO: 247215 - protein, 67 aa, Glycine max
  Clone ID: PAT_MRT3847_65264C.1.pep
PHDEKHQCCIGTKVISFLQNLFPSWLFFHAGWINATSCISNPMSKLSSAIGRLENFDTISEFGAQLT

SEQ ID NO: 247216 - protein, 152 aa, Glycine max
  unsure (1)..(152): unsure at all Xaa locations
  Clone ID: PAT_MRT3847_65265C.1.pep
ELKTVTNYRKRKRTRGIPFFQXQIGSCWNPPPTXXWFDETLDFSTVKTQVLHILLREVQDHLGAVHLHQHALDLPLHLLHPHKPVVEDLDRDHHLRHRIALAVMLPVEVVIVEIEVVVVGVESMGLKWTVRKGIGVVIVEALDFSAALHDGF

SEQ ID NO: 247217 - protein, 59 aa, Glycine max
  Clone ID: PAT_MRT3847_65266C.1.pep
LVRNGFLSCFFSHLGSYFYVSMAYITDSSLFPPYLFSWIKEGYLDMRYFLIIFFPSATA

SEQ ID NO: 247218 - protein, 253 aa, Glycine max
  Clone ID: PAT_MRT3847_65267C.1.pep
MDSGAWLLFLVVVAVSTSGHIHSEAILRLPSESEEISRDYCDSWMLAVETNNAGTWNRVPASCVDFVAEYITGDRYRRDCDVIRNLSAAFAKSVGLAGDGRDAWVFDVDETLLSNVPYYQGVGFGSEIFNETSFDNWVDLAAAPALPAILSLYNELKELGFKIFFLTGRSEFQRNATETNLLLSGYRDWERLILRGSSDQGKPATTYKSEKRAELENEGYRIHGNSGDQWSDLWGYAVSARSFKLPNPMYYIP

SEQ ID NO: 247219 - protein, 245 aa, Glycine max
  Clone ID: PAT_MRT3847_65268C.1.pep
MALHDLPFTPMTTISLFIILFSLFSTPSHSALTCASQKLNRTYANCTNLPTLGATLHFTFNATNRTLSVAFSASPPSPSGWVAWGLNLAGGGMAGAEALLALPSTSGSAVTLRRYNLTSYKSIDVVKAFTFESWDLSAEETNGAITIYGTVKIPDSAENVSHVWQVGPVAAGVPAVHGFKDDNIHAKAALPVALAGSSGSSAASGENATTPASGDKKNGAAAAERLGLGFHFWLVFALMVGVVAL

SEQ ID NO: 247220 - protein, 72 aa, Glycine max
  Clone ID: PAT_MRT3847_6526C.1.pep
PEGKGKIEKVRQLPKVAEELGATTTHLALAWTLVNKNVSPCILGAPKPDQIVDNLKALDVLPKLTPEVLEKI

SEQ ID NO: 247221 - protein, 159 aa, Glycine max
  Clone ID: PAT_MRT3847_65270C.1.pep
MGTQILRPQDCFVERIMSPPADFSRRRSSGNYCNYYYHSNHVATSRSCRKPVARPDKKKRVVPASGMPLVAETSAAVFRRPSSDDSRVARSNGLEKVTILRRGQSLDSAVKSDVYAGSAFAVSPSPEALPLPSFSTKKQASAAVDDSATRDLRRLLRLE

SEQ ID NO: 247222 - protein, 38 aa, Glycine max
  Clone ID: PAT_MRT3847_65271C.1.pep
ARMASSLMASEALKPAPFTVGEVLHLEAFPPFQGTVLH

SEQ ID NO: 247223 - protein, 124 aa, Glycine max
  Clone ID: PAT_MRT3847_65272C.1.pep
MECWNSVDGVVEEIMRIHRSLPARPGIDEVEAARGLIGNVEKEDQARLEAIARQSKGVDVPEELFMVLQEMQRNVLYYQSKEQKREAVKLLDLDNVHSLFDELIQRASKCVASPSAKTVTLTAL

SEQ ID NO: 247224 - protein, 52 aa, Glycine max
  Clone ID: PAT_MRT3847_65273C.1.pep
TRIYYINYKLSGLRYSVAIYPHFTIPLIHIIKMNERGEKNRLIYTHIYNTPF

SEQ ID NO: 247225 - protein, 121 aa, Glycine max
  unsure (1)..(121): unsure at all Xaa locations
  Clone ID: PAT_MRT3847_65274C.1.pep
FLIVYTKQPSKLDKVSCTTPQFVSAETTLIPTIGAAQASSKYFSEAEDHERPGKSDALLXTKTRHLPTTEVHAQMETNLFXLSLDDVDTSKSSMLDLKISSSXKMHFPRTQFGGTILRSDL

SEQ ID NO: 247226 - protein, 52 aa, Glycine max
  Clone ID: PAT_MRT3847_65275C.1.pep
RMNHTEYDLVQFGKFFQNKYYPHSSARTGIRWPLSKVHVIVLNISGAGLLVM

SEQ ID NO: 247227 - protein, 178 aa, Glycine max
  Clone ID: PAT_MRT3847_65276C.1.pep
MNVLTTQSTTCYRLSLFIAINFFLVTYKNVAFLKPPQQSLAVSFIVTVAVKFYIPEFSWFIFPILALFNYGFNLFTKSINRRFLSSFSQCELIIVSQGILTFLAQSTLCELVPSVPDLALSCSNDPTTRVLQILFFGLSMTVAAMLYSATQNDNLIYVYTSFFTGLFLIYSRIAVILN

SEQ ID NO: 247228 - protein, 59 aa, Glycine max
  Clone ID: PAT_MRT3847_65277C.1.pep
GGLCNCRGSVHGSPNLCTRACGTFCMRSKFVPPGLPVNREVCGTCFHDMTTHGFKTKCP

SEQ ID NO: 247229 - protein, 60 aa, Glycine max
  Clone ID: PAT_MRT3847_65278C.1.pep
VLKSCHPKLPQMCCETFSNPPSIRPCIILSYSARPDSSYIASKTPTLSRAFFSFPAHASF

SEQ ID NO: 247230 - protein, 53 aa, Glycine max
  Clone ID: PAT_MRT3847_65279C.1.pep
VKGQILEAAHDLRIIRRCNGLTTSEDKHVYIVKKHTLRVVMVNTMHQCIDALP

SEQ ID NO: 247231 - protein, 72 aa, Glycine max
  Clone ID: PAT_MRT3847_6527C.1.pep
QVLVLVSSSCALQLLNQVTGIGLQEINVLTFILPPLPKSARYSTLFLLPAGLLTLILLCSSWLSGLEPSPLV

SEQ ID NO: 247232 - protein, 62 aa, Glycine max
  unsure (1)..(62): unsure at all Xaa locations
  Clone ID: PAT_MRT3847_65280C.1.pep
DKGVLLDXLCWLASYCSVRLLVDGKCWILVAIYGFFKLFLFVFLALMLLDFNLTKHQLCPVF

SEQ ID NO: 247233 - protein, 360 aa, Glycine max
  Clone ID: PAT_MRT3847_65281C.1.pep
VGWHSGSSCGPRPRNQRGNARHVLVRARPVTLNPFHPNGSSLRPPPLRALPPSLFGARGESGRIERLAGTAVLPAGLDPETNVESKDIVISEENGIYARLFVPKRTTFSPPPQQKLPLLVYTHGGAFCIETPFSPNYHNLLNKVVSKANVVAVSVHYRRAPEHPVPTGHEDSWIALKWVASHVGGNGVDEWLNEHVDFEKGFLAGDSAGANIASYLGIRVGTEGLLGVKLEGVVLVHPFFWGEEPFGCEANRPEQAKKIHDLWRFACPSESGSDDPIINPSKDPKLGKLACERLLLCVAEKDLVRDRGLYYKELLEKNGWSGVAEVVETKDEDHVFHLFKPNCENAQVLIDQIVSFLKQD

SEQ ID NO: 247234 - protein, 61 aa, Glycine max
  Clone ID: PAT_MRT3847_65282C.1.pep
FLYVSFYEPSIFLDVHLCSTKLLSGHKTQCCLSLSTTTSRLNLFNFTHFDMHLNLSKGLYW

SEQ ID NO: 247235 - protein, 55 aa, Glycine max
  unsure (1)..(55): unsure at all Xaa locations
  Clone ID: PAT_MRT3847_65283C.1.pep
FCIRWMVLGVSLKVGRKXLEYMNXFYXXTLEESIXSGTLVXEXKFELTLLCSXXY

SEQ ID NO: 247236 - protein, 36 aa, Glycine max
  Clone ID: PAT_MRT3847_65284C.1.pep
HHHTINYQLITYFLTHLNKGYFKIDIPFCRILLEPN

SEQ ID NO: 247237 - protein, 170 aa, Glycine max
  unsure (1)..(170): unsure at all Xaa locations
  Clone ID: PAT_MRT3847_65285C.1.pep
KXAHVISELEEILEMTSMAEFQKIMVXPLFRRMAFSLNSSHYQVAERAHLLWNNEHILNLITQNRQVILPLVFSAIVHNGQSHWNQAVLNLTQNIRKMLSQMDEELVAACQRRIEEEDSSASSAAERRRVTWERLEAAAANCVPVQSTTSVGGAGDVLVPVKSATCSVAC

SEQ ID NO: 247238 - protein, 175 aa, Glycine max
  Clone ID: PAT_MRT3847_65286C.1.pep
VPNTQKELMSISELEEILEMASMAEFQKIMVPLFRRMACCLNSSHYQVAERAHLLWNNEHILNLITQNRQVILPLVFSALVHNARSHWNQAVLNLTQNIRKMLSQMDEELVVACQRRIEEEDSSASAAAERRRVTWERIEAAAAAASTSCVQSSSVGGGGDVLVPVKSATCSVAC

SEQ ID NO: 247239 - protein, 69 aa, Glycine max
  Clone ID: PAT_MRT3847_65287C.1.pep
RGQLYQFSTRHLFSSVLKISFIQRLIWVLDRNPDNSRYEAKVLSLLLFLVFFKRIAFSTDLGFAFSFEI

SEQ ID NO: 247240 - protein, 110 aa, Glycine max
  unsure (1)..(110): unsure at all Xaa locations
  Clone ID: PAT_MRT3847_65288C.1.pep
IKPNIFELFTNRVVERYFDGGFHVFGRRKAIIVRGKVSKMFTQVQCKELVWKSFLEETLFAWIQVDPIPVQEDCPWKKGFWDRXRLSFGPYSLKFQPFLIIVGITPSLLF

SEQ ID NO: 247241 - protein, 85 aa, Glycine max
  unsure (1)..(85): unsure at all Xaa locations
  Clone ID: PAT_MRT3847_65289C.1.pep
TKAVSTGRHTLGLSYKGPTGXLTTVRAGSSAAVLSATSSPRAGKPLLPMDANEDEENEKAQPVTXSHAIFHMRFSLASMYSAMLL

SEQ ID NO: 247242 - protein, 71 aa, Glycine max
  Clone ID: PAT_MRT3847_6528C.1.pep
TNLIKNSSAWRGTFSTWLFPLKNQRTHWFPNFTKWEGTLLNSRVSVSYTYRRLCVYIYFEGKNVRERKFLN

SEQ ID NO: 247243 - protein, 262 aa, Glycine max
  Clone ID: PAT_MRT3847_65290C.1.pep
AKLGSDDLRTQDAAAWLEYFESKALEQQEAARNGTPKPDASISSKGHLSVSDLLDYITPDADQKVREAQKKARAKLKGKPGQNWETASDENQKDEDMCQGYLITETTSDKENKSEAQIKDHGIDKVESTHLDQTMLNESDNLAQDDSSDEGWQEAVPKGRSLTGRKSSSSRRPTLAKLNTNFMNVSQSSRYRGKPTNFSSPRTNLNETIAGPSPSVAKKFIKSASFSPKLNNGNAPDAGAEKLADSKSAPASPASSDQIAKP

SEQ ID NO: 247244 - protein, 80 aa, Glycine max
  Clone ID: PAT_MRT3847_65291C.1.pep
ACCPQRVLTEQPFAPLPKCFSHKTTLNGNAHQCLVHSENKGSNSEVHPRSPILDTTVRALIPVMASVSLYVSRGLRDTQK

SEQ ID NO: 247245 - protein, 119 aa, Glycine max
  Clone ID: PAT_MRT3847_65292C.1.pep
MAKGEGRIELKFRIYDGTDIAHSTYSSSTTVGTLKQKLVAEWPQGKPVTPMSVSDLKLIHAGKVLENNKTLADSRITFGDIPGDVVTMHVVVQPRVTKKKTEKNKENNQKMNSCSCTIL

SEQ ID NO: 247246 - protein, 49 aa, Glycine max
  Clone ID: PAT_MRT3847_65293C.1.pep
MSKHSIFSHWFNQDLIGSSHKSRVRDVPAEYNRAAFRTLMHISSSTLNA

SEQ ID NO: 247247 - protein, 99 aa, Glycine max
  Clone ID: PAT_MRT3847_65294C.1.pep
LCNRNHSCPQFTKTSSKLPKELHLNFWPAKILLSFAQKFLQHQRSQQNWDRNLKPWGHINPKNLDILQRKNRKNLDIAAEIGVTDHFPKPHQNHLKNNI

SEQ ID NO: 247248 - protein, 80 aa, Glycine max
  Clone ID: PAT_MRT3847_65295C.1.pep
VDMNGELSVKHKLSGHQKPVSSVSWSPNDQELLTCGVEEAVRRWDVSTGTCLQVYEKNGPGLIPCAWFPSGKYILSGLSD

SEQ ID NO: 247249 - protein, 45 aa, Glycine max
  Clone ID: PAT_MRT3847_65296C.1.pep
NNKKCPPLSTCFEPNTLVNHAAYAMNLLYQTAGRNPLTCDFSQTA

SEQ ID NO: 247250 - protein, 126 aa, Glycine max
  unsure (1)..(126): unsure at all Xaa locations
  Clone ID: PAT_MRT3847_65297C.1.pep
RGPPLPLPRPRAPPPPCSGARLPPPLPLYLSIYIYGFRASLCFSLVRRINMCAPPPPPSWVFFRPERSWGXSSLLPRQRXSVXPPSPLSLAVSSLPAGVFLSVLSCPLPPCCARXFWXSXGGXRXS

SEQ ID NO: 247251 - protein, 73 aa, Glycine max
  Clone ID: PAT_MRT3847_65298C.1.pep
RTLDRAYDEIKYLSFGLGVNDERMAEQALTFYKITVLSTCSRRKTTTYEWLLIFLHQCWRKQRCRNQIFLHRC

SEQ ID NO: 247252 - protein, 223 aa, Glycine max
  Clone ID: PAT_MRT3847_65299C.1.pep
MASSLIISPRKLRSDLYSYSYQEDHYSTPLVINVLASLIERSMARTERIVKNGSRSLSKAISTNIFDCREILDMTIQSYLERIFRYTRAGPSVYVVAYVYIDRFCQNNPGFRINARNVHRLLITTIMLASKYVEDMNYRNSYFGRVGGLTTDELNKLELEFLFLMDFKLHVNVSVFESYCCHLEREVSIGGGYHIERTLRCAEEIKAKHREERGYTHIARVML

SEQ ID NO: 247253 - protein, 45 aa, Glycine max
  Clone ID: PAT_MRT3847_6529C.1.pep
WAPSTYLFSFWSQNWLKLDRTSRPCIKKQWLHFFTTKENKKVGEE

SEQ ID NO: 247254 - protein, 67 aa, Glycine max
  unsure (1)..(67): unsure at all Xaa locations
  Clone ID: PAT_MRT3847_652C.1.pep
XKSTGKTTFITYISFAIIVTKQIMTKNIIQTDNNSLEGTNININIQHTWVNHQASITTKPNMVWLSL

SEQ ID NO: 247255 - protein, 46 aa, Glycine max
  Clone ID: PAT_MRT3847_65300C.1.pep
GNQSAIRFLGIKQHSYSFFNQYKRSFKNILTSVVCCSVEASVQGSA

SEQ ID NO: 247256 - protein, 67 aa, Glycine max
  Clone ID: PAT_MRT3847_65301C.1.pep
DVVVLTVAPASVCACDYLFLGWITIKSHKGALTSDERAQQNRDRNRKHSRSTRLRRKAYVQKLRELV

SEQ ID NO: 247257 - protein, 154 aa, Glycine max
  Clone ID: PAT_MRT3847_65302C.1.pep
TSQDLINDSDQTGQFVAGYKGEDDVSQITHWLANIISDGDSRDLPFFTLRTPKLVPDDTEPIWSMSAQNIPLQNLKQSVLGVLSGLSAYREDPRVGPFLLLGALISLGTIWLRRSQQVQSPELNQPSFNQPSDSNQPSQPSSMDERQPSDRVRR

SEQ ID NO: 247258 - protein, 47 aa, Glycine max
  unsure (1)..(47): unsure at all Xaa locations
  Clone ID: PAT_MRT3847_65303C.1.pep
KCSETLCLSIAFLKRAAADQCGAQSGGALMPNRXCASNFGGVVTHIA

SEQ ID NO: 247259 - protein, 72 aa, Glycine max
  Clone ID: PAT_MRT3847_65304C.1.pep
KNQKQICIPNNVNHHDDDNIHYLLNSHKTHMEKIIKHKTQFRKLDTSRFHFFFFFCEGVKKNIIIEGLLPLV

SEQ ID NO: 247260 - protein, 229 aa, Glycine max
  Clone ID: PAT_MRT3847_65305C.1.pep
MYAETGLFFPYLHNVSHGLHQLEEYCKTQKSNASMDDLVQSSAMSEYDLAAEGDLFKAPEPIIEEPIMDMSAAISMMSCGEDVSSQGLKSTDIDILQNDQFLSEVFYECEKDLLEKAAIESPFSEILEIKVPFLNIDENTIQENKPFTDMQLAKSVSSGSLSSMDWMRGAAMKPAFIDISAIDFNADYGMRRSFSEGDIKTLGNGNMNIVQSPLERPLLISNCTSEERF

SEQ ID NO: 247261 - protein, 50 aa, Glycine max
  Clone ID: PAT_MRT3847_65306C.1.pep
LVKEIIVRRSLRNQPRVEPQPHRHLSRPRSYDSTRYVRRIESMQSRSNFK

SEQ ID NO: 247262 - protein, 281 aa, Glycine max
  Clone ID: PAT_MRT3847_65307C.1.pep
MYAETGLLFPYLNNISHGLHQLEEYCKTQKSNASMDDLVQSSVMSEYDLAAEGDLFKAPEPIIEEPIMDMDPMTATISMISCGEDVSSQGLKSTDIDILQNDQFLHEVFYECEKDLLEKAAIEPPFSEILEIKVPLLNIDENTIQENKLLPDMQLAKSVSSGSLSSMDWMRGAAMKPAFIDIPAIDFNADYGMRRSFSEGDIKTLGNGNMNIVQSPLERPFLISNCTSEERFQKLSRYRNKRTKRNFGRKIKYACRKALADSQPRIRGRFARTEESDVKRE

SEQ ID NO: 247263 - protein, 62 aa, Glycine max
  Clone ID: PAT_MRT3847_65308C.1.pep
ITFFHACQAYGADLLIHLLILSVSPYFCQNVLGQEYDYRIKRAPLESARNIYEIRDLARKPS

SEQ ID NO: 247264 - protein, 126 aa, Glycine max
  Clone ID: PAT_MRT3847_65309C.1.pep
GSSGSSGSRDGISKIRTHNIGVCTEKKKKKKKKKKKKKKKKKKKKKKKTNLKKKRYTNGAAPKNRPFNPENKPLTEPGRHTTFPKKEPNKNWNKQCQNESPVQKGYPPKIPPKIRPGSKSGNPRGP

SEQ ID NO: 247265 - protein, 143 aa, Glycine max
  unsure (1)..(143): unsure at all Xaa locations
  Clone ID: PAT_MRT3847_6530C.1.pep
MAEPPSPVHCVAVFFLTDTVSEKEGFVKLELWFQDPPGSLSAKKVRTDEKKAPMIVNVXWGSGFNSMQLHPPAAPFPQSYGSLASCSSAPMSAAPSPSSYRSSFFFFRWHGLSLLSLLFLVLAGALQTAGPFYSVFMNFIFTY

SEQ ID NO: 247266 - protein, 64 aa, Glycine max
  unsure (1)..(64): unsure at all Xaa locations
  Clone ID: PAT_MRT3847_65310C.1.pep
IIVSGRXXTXGSSAAKKVTSRXXXXAXXSPFVXSXRYHKXGKXAERVGAGAPVPRCRNISWSCR

SEQ ID NO: 247267 - protein, 67 aa, Glycine max
  Clone ID: PAT_MRT3847_65311C.1.pep
LKKSIPRGILFNPRLPAYILTRTQNTTLSIPIRSKPQTSHLNLLPFHGTPWFHPLYPPQEQTQPLLT

SEQ ID NO: 247268 - protein, 207 aa, Glycine max
  unsure (1)..(207): unsure at all Xaa locations
  Clone ID: PAT_MRT3847_65312C.1.pep
MFMSRRLRYCLSLSIPNFPPFLPNLCFHSHSLPPLTHNADDAVSQFNHMFHVHPTPHTFHFNKILISLVNVKRYPTAISLYKQMELSEVEPDYFTLNIIINCFCHFGQVVLAFSGVSKILKLGYQPNTITLNTLMKGLCLEGKVKEALRFHDKVLAQGFRLSGISYGIXINGXCKIGETRAAIPLLRKDERWSIRPNVGIYSMIIDR

SEQ ID NO: 247269 - protein, 69 aa, Glycine max
  Clone ID: PAT_MRT3847_65313C.1.pep
ICIVDHDLDTIVLPLIIARGSSCQHAFDDSTHAYTSQDRSYTADLIPLMRLEYRIIQAIVINNLQQCSS

SEQ ID NO: 247270 - protein, 56 aa, Glycine max
  Clone ID: PAT_MRT3847_65314C.1.pep
MVRGSGCDIVQVEGGHIVRSTRHKDRHIKVCTLKGPIDRRVRLSAHTAIQFYDVQD

SEQ ID NO: 247271 - protein, 68 aa, Glycine max
  Clone ID: PAT_MRT3847_65315C.1.pep
KIEGGEAAPTPLKKKLKQSPSQSWLHDKIYVEPPNDIVHHVRNTLSCGLSGSQKIVFRALCFSRRGLC

SEQ ID NO: 247272 - protein, 70 aa, Glycine max
  Clone ID: PAT_MRT3847_65316C.1.pep
HRYQATETHKGGGREKGHEKRLTDRQPTLNGYEGGQTTRQRKRVQENRCNETKHLNQNTKQKGQIGHPLN

SEQ ID NO: 247273 - protein, 385 aa, Glycine max
  Clone ID: PAT_MRT3847_65317C.1.pep
MSEGNAGKGKRIAIIGVSTLLLVAMVVAVTIGVNLNENGSNNDIEDNKKNHVASSIKAVQTLCHPTNYEKECEESLIAGAGNTTDPKELIKIFFNITITKIGDKLKETNILHEVEEEPRAKMALDTCKQLMDLSIGELTRSLDGINEFNLINVDKILMNLKVWLSGAVTYQDTCLDGFENTTSDAGKKMKDLLTIGMHMSSNALAIVTDLADTVNDWNITKSFGRRLLQDSELPSWVDQHRLLNENASPLKRKPNVTVAIDGSGDFKSINEALKQVPEKNRKPFVIYIKEGVYQEYVEVTKKMTHVVFIGEGGKKTRISGNKNFIDGTNTYRTATVAIQGDHFVAINMGDVCVASFKILSFRHGLINIDSLMKMQVHSNASLMLL

SEQ ID NO: 247274 - protein, 44 aa, Glycine max
  Clone ID: PAT_MRT3847_65318C.1.pep
FVYSFFIQIKMIIEKVQKNICFKSLTHSYMISNKNKFFNSWFVT

SEQ ID NO: 247275 - protein, 44 aa, Glycine max
  Clone ID: PAT_MRT3847_65319C.1.pep
FFTSFFFLSQAQKIKKLIFLTILFTQPKKLFPCRKNPLSEFLIF

SEQ ID NO: 247276 - protein, 85 aa, Glycine max
  Clone ID: PAT_MRT3847_6531C.1.pep
LGLSAVHCSLDLPPRINLHILKLFPNIKYSSFYFYFYWVCFARSIGDESLCKEVFEEYIAQLKEEAKENERKRKEERAKKEKDRE

SEQ ID NO: 247277 - protein, 55 aa, Glycine max
  Clone ID: PAT_MRT3847_65320C.1.pep
RFVLSFCSTGGNARGIAGSDGRQSKPARTSSDLLGSGRHCVGGVKDAISWLLSRG

SEQ ID NO: 247278 - protein, 62 aa, Glycine max
  unsure (1)..(62): unsure at all Xaa locations
  Clone ID: PAT_MRT3847_65321C.1.pep
LTSIQKSLNSKCIIINFSNSSCSGLNQIQLCVCDQNQLLHLDLKAHAPFLDLHLLDLSXHDH

SEQ ID NO: 247279 - protein, 55 aa, Glycine max
  Clone ID: PAT_MRT3847_65322C.1.pep
KVAVRAGLNNKLSGQISVRTSSSDQLQIALIVILPIAKAIYKNFWLGASENYSIY

SEQ ID NO: 247280 - protein, 305 aa, Glycine max
  Clone ID: PAT_MRT3847_65323C.1.pep
PDASRASSNGVWTTTLSAEPEAVRDHVPRTSPQNEKGKSEMLEPTTTSSSGGSGSSLGKNCSLSTRNQGQKRKGIDVEESEEQSEDTELKSALGNKSSQRAGLARRNRAAEVHNLSERRRRDRINEKMKALQQLIPHSSKTDKASMLEEAIEYLKSLQLQLQLMWMGSGMAPIMFPGIQHYMSQMGMGMATPPFPPIHNPMQLPRLPLDQSVSASQTPNQTLMSQNPILGAFNYHNQMQNPALSEQYARYMGYHLMQNASQPMNVFRYGPQGVRHSQTMITPSSNSSGNMSGAANIDEAVSGKMG

SEQ ID NO: 247281 - protein, 146 aa, Glycine max
  Clone ID: PAT_MRT3847_65324C.1.pep
YEKRQEMAAAALAYKCLEVVYMRLVYCKHSSINRDRHELQSTLQMVSQGESPSSSASDIDNLNNLAVADKATLTRGSNTHVPSNQVISARNRPNIVRLLDFTQDINLAMEASRKCKTTYMAASLNMEDSWNRDCITSIRKAVDFSF

SEQ ID NO: 247282 - protein, 73 aa, Glycine max
  Clone ID: PAT_MRT3847_65325C.1.pep
YFKRAIIIGFIGQSDSQLDSSNLESRVGNKSFLSTLATFGKRQTHNITRYVPTSAKVRTPYMLYVVFQGCQIN

SEQ ID NO: 247283 - protein, 71 aa, Glycine max
  Clone ID: PAT_MRT3847_65326C.1.pep
LILSLKINSTFSRYKAGTMFIYESGIICLIISALSCSLTHIDPYPSNYPNSTTPTHIHALLFTYCYALICF

SEQ ID NO: 247284 - protein, 64 aa, Glycine max
  Clone ID: PAT_MRT3847_65327C.1.pep
LGIRLEADLRLTTTLSLIDRRAPTQYRRGRHFSGTTALLAIITFNMKIDFTPFEAEKVVDTNQL

SEQ ID NO: 247285 - protein, 74 aa, Glycine max
  Clone ID: PAT_MRT3847_65328C.1.pep
VYMHCIEVYTKNNLQNYFTNEQFGSYVEGERDFPFHFHFPSRQTSEPKYQTQAFIKIPLLSSPSPTIKQIAKPK

SEQ ID NO: 247286 - protein, 54 aa, Glycine max
  Clone ID: PAT_MRT3847_65329C.1.pep
LIGGSTTAMLSTLQLIDTDAAFLNANIIQLPVHMIILDTTEKLFLLLLSLLFLS

SEQ ID NO: 247287 - protein, 112 aa, Glycine max
  Clone ID: PAT_MRT3847_6532C.1.pep
WGSRKGFSSPQSKGRAPRAAPSSRDSPAPPRRRESSPPGLRASGSPAMTSRHHRRVGQRRGGRPRPPPRRRSSRSRSRSRSRSRNRRKGHFVGESLAGLGRSPFGESDNAIG

SEQ ID NO: 247288 - protein, 69 aa, Glycine max
  Clone ID: PAT_MRT3847_65330C.1.pep
KKKLETATIHPKSFKISGSTGFKFLNSPPTQQILKLHPLVFVFYSINFTRGIPLQNIKPQRPPKKTPQF

SEQ ID NO: 247289 - protein, 96 aa, Glycine max
  Clone ID: PAT_MRT3847_65331C.1.pep
FRFYNARKANQHLYPLVHSSNTLKTLSPFHHTLSDHIGQSHFTHEPRQYERTLMDHQIVIAAAEVVNIIGLLVTCLLSEANRLDETSLLLFATLVS

SEQ ID NO: 247290 - protein, 62 aa, Glycine max
  Clone ID: PAT_MRT3847_65332C.1.pep
LYSHKALYLKLNIYTNHYKKNSARKFKVDLESENTHQYLYKWSAIMASVLLFLYCHIAMSKT

SEQ ID NO: 247291 - protein, 62 aa, Glycine max
  Clone ID: PAT_MRT3847_65333C.1.pep
PGLGLGLLNWGGLSCVCVRLGGLALCMLCVVWINIYIFFVVVAFLFYWLFYIFVFLSGCLVG

SEQ ID NO: 247292 - protein, 95 aa, Glycine max
  Clone ID: PAT_MRT3847_65334C.1.pep
QGQNWQKLSKSFLTKGKPLFFGHMAGKKEGPFTAPVLLVSPNLFSVFFVGGFLFNLINPLFLKIHKSCLGFPICTLAVCDFPFGEPLGQKKSEYN

SEQ ID NO: 247293 - protein, 51 aa, Glycine max
  Clone ID: PAT_MRT3847_65335C.1.pep
SCILHYITFIMYPKFNKLTNKLQPPDLENPSLPKLNCHAIHLLYCNLNKIK

SEQ ID NO: 247294 - protein, 114 aa, Glycine max
  unsure (1)..(114): unsure at all Xaa locations
  Clone ID: PAT_MRT3847_65336C.1.pep
MPSVAVKLYSVFFKFLLKHRLQNRIQGRPEDSDPFGVTTRPDESVAPANPSFSDGVATKDIHIDPLTSSXIRILPSDSALEPNSQPSFKPVPGSEAQQLRAGDFLAAGGGAAEQ

SEQ ID NO: 247295 - protein, 56 aa, Glycine max
  Clone ID: PAT_MRT3847_65337C.1.pep
QLLSVIKFQDRNVSPRLCLPNTQVVPSPSFVWHPPQTYHRNQSCLAKLDRLPVNQK

SEQ ID NO: 247296 - protein, 272 aa, Glycine max
  Clone ID: PAT_MRT3847_65338C.1.pep
SRAESARGEKTTEKDVAAETKAVEPEPPVYANKMEAKDAFKALLESVNVGSDWTWDRSMRLIINDKRYGALKTLVERKQAFNEYLNQRKKQEAEEKRMKQKKAREDFKKMLEESTDLTSSARWSKAVSIFENDERFKAVERDRDRRDMFDSFLEELLNKERAKVQEERKRNIMEYKKFLESCDFIKASTQWRKVQDRLEADERCSRLEKIDRLEIFQDYLHDLEKEEEEQKKIQKEELRKTERKNREEFRKLMEEHIASGILTAKTHWRDYY

SEQ ID NO: 247297 - protein, 118 aa, Glycine max
  Clone ID: PAT_MRT3847_65339C.1.pep
MDGDSSWSARLSSASRRYQSALQSRSDMFMGFDENDGDDDIREEFLCPFCSEYFDIVGLCCHIDEEHPMEAKNGVCPVCALRVGVDMVAHITLQHGSIFKMQRIRIARKGGVDSTLSL

SEQ ID NO: 247298 - protein, 97 aa, Glycine max
  unsure (1)..(97): unsure at all Xaa locations
  Clone ID: PAT_MRT3847_6533C.1.pep
RSVKRVPLSIGGGAGAKNAMLMNMPNAVLSMGRYXVGDLDFEXVCKMTAXYMKCTDSYLIAFGKLAEDXIKYEAFSXELGESGKEQEKRDVEWTQEE

SEQ ID NO: 247299 - protein, 105 aa, Glycine max
  Clone ID: PAT_MRT3847_65340C.1.pep
LLDASTGGKIKMKTPEEAMDLIESMAASDIAILRDRAHILTKKILLELTSQDALLAQNKLLSKQLETLTETLSKLPTQLHSAHTSHSSILHVAECTICGRAHESG

SEQ ID NO: 247300 - protein, 118 aa, Glycine max
  unsure (1)..(118): unsure at all Xaa locations
  Clone ID: PAT_MRT3847_65341C.1.pep
AICGAGLAKGFQKSFYNTYGGGVNTDINGYNKSTAFGADIIDTFVLLYTVFXSTDPKMNSKYSHVTVFTPLSIGFAVFMVHLPTILVTVTLIIHARICEPHVIFNIHIICDNHWIYLV

SEQ ID NO: 247301 - protein, 219 aa, Glycine max
  Clone ID: PAT_MRT3847_65342C.1.pep
MDGDSSWSARLSSASRRYQSALQSRSDMFMGFDENDGDDDIREEFLCPFCSEYFDIVGLCCHIDEEHPMEARNGVCPVCALRVGVDMVAHITLQHGSIFKMQRKRKSRKGGSYSTLSLLRKELREGNLQSLFGGSSCIVSSSNADPLLSSFILPLANEHASSQPHLHTETRSSKKCSDETVSTRNVETSTLSVKDKEEKAKRCEFVQGLLLSTILDDNL

SEQ ID NO: 247302 - protein, 121 aa, Glycine max
  Clone ID: PAT_MRT3847_65343C.1.pep
KVVWVAQLFCWIGQFIGQAVFKKGAPVLWATLPQAFLRAPFFGLLRVLQFVGIDPYPGSNPRGRAGINANSNQGQAKNQKNLFYPEQVSSKGNVMDPSTSPKVKTHRFFPDPLFTKKKKKK

SEQ ID NO: 247303 - protein, 45 aa, Glycine max
  Clone ID: PAT_MRT3847_65344C.1.pep
KKKVIHLPQFLCGCSPVNKILTKSSLRFFPIVVKLIKITNLPEKL

SEQ ID NO: 247304 - protein, 51 aa, Glycine max
  Clone ID: PAT_MRT3847_65345C.1.pep
QGWGPPIGVKPFPKSPNILFPSTGKKGPFFPQPNFFFSTGSSIERRHLRIQ

SEQ ID NO: 247305 - protein, 47 aa, Glycine max
  Clone ID: PAT_MRT3847_65346C.1.pep
LTKSTLSQYLFFSRTICSHKHIIDVSNENYFFTMRNEIYKWSRLKVS

SEQ ID NO: 247306 - protein, 37 aa, Glycine max
  Clone ID: PAT_MRT3847_65347C.1.pep
RCSIFWGCNSIVGEITWRCYLYFFQNLPASRSSLLLF

SEQ ID NO: 247307 - protein, 104 aa, Glycine max
  unsure (1)..(104): unsure at all Xaa locations
  Clone ID: PAT_MRT3847_65348C.1.pep
INRRKETERIKRNTRINRKNVKNKRRKKEERKKKEKNVEERRTKEGRXRNKKKKTEKKNQETEKKRDEEKKEIRKRKRKRKDDIEEKEKENMYEERGHDSNRHG

SEQ ID NO: 247308 - protein, 57 aa, Glycine max
  Clone ID: PAT_MRT3847_65349C.1.pep
LAAMASSSNPFLGYFLLRDDDLGNVSHNKPLQITFTVSHALYHWKKHNLKHLYAFTN

SEQ ID NO: 247309 - protein, 52 aa, Glycine max
  Clone ID: PAT_MRT3847_6534C.1.pep
HYLYSSQRMQNVYEGRSLQLIWVFVRHHQRLHKGFCFLRKLNKPPQPHRVLI

SEQ ID NO: 247310 - protein, 89 aa, Glycine max
  unsure (1)..(89): unsure at all Xaa locations
  Clone ID: PAT_MRT3847_65350C.1.pep
MSVRFPLLVXLGTVFLASDCVSLKVREDEDNPCYLRNSKSFQTLFENXNGRIRLLHRFDERSAELENIRDYRIVRFQSIPNTVLLRPRC

SEQ ID NO: 247311 - protein, 49 aa, Glycine max
  Clone ID: PAT_MRT3847_65351C.1.pep
YSRGGKGTSLACVLFTRRLVSSEFSANKTFLAVLISPNVRGTLPLKIEG

SEQ ID NO: 247312 - protein, 62 aa, Glycine max
  Clone ID: PAT_MRT3847_65352C.1.pep
TREGIFTQTPLTLFFLFALFFACTKHKFHCKPTKIILAAINSMLVQICWVDHKGSIITISVI

SEQ ID NO: 247313 - protein, 66 aa, Glycine max
  Clone ID: PAT_MRT3847_65353C.1.pep
STFRNICCRGWLVSSILAANGPMSCEGSQVVGAQEVDSDPTTMDTVPSLDQLDLEPSAHDVSLCRM

SEQ ID NO: 247314 - protein, 46 aa, Glycine max
  Clone ID: PAT_MRT3847_65354C.1.pep
NDMFSNKAYLKAKGNEIAILRDIPIPHFQEIRSHKCSYINGNDMFS

SEQ ID NO: 247315 - protein, 329 aa, Glycine max
  unsure (1)..(329): unsure at all Xaa locations
  Clone ID: PAT_MRT3847_65355C.1.pep
AMKKKLPWLRYDMKQAEYREAKERENDAAKALEEAAELLNDLKEPIMKQKEEKAALYAKCKKVSNHASENAKKRTELMEEENKLDVELKGKYKEMEELRRQEETRQQKLVKAREEVAIAELELENLPLYVPPXMSLRLTAKIAELDYSAKQMRQKKSQAENEINHKKSSMNRIKERLIEMNNKSTKCLHALQRSGAEKIFEAYKWVQDHRHEFNKEVYGPVLLEVNVSNKDHAAYLEGQVAHYTWKSFITQDSGDRDLLAKHLRFFDVNVLNYTGGDGPQREPFEISEDKRALGIYSRLDQIFDAPIAVKEVXISQFNLDYSYIGIRKI

SEQ ID NO: 247316 - protein, 33 aa, Glycine max
  Clone ID: PAT_MRT3847_65356C.1.pep
AARWIFLLFSQQSVALFTGVYQSSLCSVVSMLE

SEQ ID NO: 247317 - protein, 139 aa, Glycine max
  Clone ID: PAT_MRT3847_65357C.1.pep
DARIHLVFHCSLLKPFHGTPDSHNFAELPDKFINDQPFLTPLAILDYRRSSSAANAPWEVLVQWHGLSPDEDKVILQGPKDDSISEEEAEPQTEVIIANIEVQESEPETGVVTTANTGVHKEKAKRRTIRPPSYLSDYV

SEQ ID NO: 247318 - protein, 56 aa, Glycine max
  Clone ID: PAT_MRT3847_65358C.1.pep
KKLVTLLFPNTIRAFSIFLLPRAFLHVASNILFFFCGYIFNNCKILLRKKRFIILL

SEQ ID NO: 247319 - protein, 34 aa, Glycine max
  Clone ID: PAT_MRT3847_65359C.1.pep
TGGEDWTLFCYQTHVLNISDPFNKQFFPSAHCAH

SEQ ID NO: 247320 - protein, 257 aa, Glycine max
  unsure (1)..(257): unsure at all Xaa locations
  Clone ID: PAT_MRT3847_6535C.1.pep
MAATATNNPQITREEIQTAIAKAVELRALHAALTQGSSPGTNNARFPSPSPASHFSAQDYPVFTPSYEDEAHQNSTRSRTISESCDENGVEGGENSMTPSDYKEKSNSRKGLPFGFGNLDSHMCPADDDTKSVTSWSEDHIKGLKTYSEEFSKFCDQKMSCINSSLKWTRPWPEQVLQAFFVTDKCMWLIHLLAFSFNPPLGILRVEENKTFVPQYMXNMCLRSQGPTKVKIMVMPGFYVQDRVLRCKVLCRFKSAA

SEQ ID NO: 247321 - protein, 155 aa, Glycine max
  Clone ID: PAT_MRT3847_65360C.1.pep
MANFPPNSDEEFDRGNFSSLSGMVGMNQRHLDWLMKNISREDMAELQQRTGQCARKCAVTYGGPIVVVTIGFLEFLRRKQNLPITAPRFLIGYPIMCLTSVALGSSIGFKRSGCGAEMRLFLDKLYAKVRHPKTIFLCLKHTDGYFLVFSVRLPN

SEQ ID NO: 247322 - protein, 74 aa, Glycine max
  Clone ID: PAT_MRT3847_65361C.1.pep
WWCPRVRLLLFVVKRLAALKLSCAVTSCISVPHSHHAGQPHHTTEYISLVEDCTKGEELLGERHCFLSRRSVSC

SEQ ID NO: 247323 - protein, 89 aa, Glycine max
  Clone ID: PAT_MRT3847_65362C.1.pep
KRQKETQILVFNKAKCTASPKQNKPYSPHIGFVYHKPPGCEPYCLLVLPTPTKVALNRKGSTSYTTDLTCPAPMMHLWKTFTVGETVET

SEQ ID NO: 247324 - protein, 172 aa, Glycine max
  Clone ID: PAT_MRT3847_65363C.1.pep
RSSAPLINKSDIIPVIVPRTSMRSEPVADSRKEVGVSGRTMPFPSQSKAADVRKFPNNRDDVDKPLSPVIESAASKGSELSGFADKNNFPASVSSTQDEARGLKVNRDVCSVEVQKGGRMRSLLNLEKRERSLNYEGPRQGISHGRISSVHVLPFRGRGQFGHKHVHLAQLF

SEQ ID NO: 247325 - protein, 95 aa, Glycine max
  Clone ID: PAT_MRT3847_65364C.1.pep
KKPVHDHLTAAEEQIADALGPMIAKKVMLGPDQAKSLHMLDIPPEIEALNAAKMELEDAAFPHLKGDVATTDEADACTEVNIAEMVGGFPTKEGM

SEQ ID NO: 247326 - protein, 213 aa, Glycine max
  Clone ID: PAT_MRT3847_65365C.1.pep
KACTEMGSLKLGRRVHDFALKNGFELEPFLGTALIDMYSKCGYLDDARTVFDMMQVRTLATWNTMITSLGVHGYRDEALSLFDEMEKANEVPDAITFVGVLSACVYMNDLELAQKYFNLMTDHYGITPILEHYTCMVEIHTRAIELDEIYTSGNTMEANHDVAELLHKNKLTSFDDIKKLIHKKYGDLDFSELVLDHSSTSSSGMQIDISKIR

SEQ ID NO: 247327 - protein, 334 aa, Glycine max
  unsure (1)..(334): unsure at all Xaa locations
  Clone ID: PAT_MRT3847_65366C.1.pep
LRVRFWILAAHSEMNLLAAGHDSGMIVFKLERERPAFAVSGDALFYTRDRFLRFYEFSTQRETQVLPIRRPGSPSLNQSPRTLSYSPSENAVLLCSDIDGGSYELYCISKDGYGRGDLQDAKKGVGVXAVFVARNRFAVLDRSSNQVLLKNLKNEIVKKTVLPIATDAIFYAGTGNLICRSEDRVFLFDLQQRIVLGELQTPFIKYIVWSDDMEHVALLSKHAIIIASKKLVHQCTLHETIRVKSGAWDENGVFIYTTLNHIKYCLPNGDNGIIKTLDIPIYITKVSGNTIFCLDRDGXIAYLQQKGFPEVALHFVKDEKIRFNLALESGNIQI

SEQ ID NO: 247328 - protein, 50 aa, Glycine max
  Clone ID: PAT_MRT3847_65367C.1.pep
PLYLTYKWKRMYLDGSFSYTFLPLTINNNHYILIMVPVKVSLPLHFFKTA

SEQ ID NO: 247329 - protein, 749 aa, Glycine max
  Clone ID: PAT_MRT3847_65368C.1.pep
EALVFIFDLQQRIVLGELQTPFIKYIDWSDDMERVAFLSKHAIIIASKKLVPMSTLHETIRVKSGAWDENGVFIYTTLNHIKYCLPNGDNGIIKTLDIPIYITKVSGNTIFCLDRDGKNRSIIIDATEYIFKLSLLKKRYDHVMNMIRNSQLCGQAMIAYLQQKGFPEVALHFVKDEKIRFNLALESGNIQIAVASATAIDEKDHWYRLGVEALRQGNAGIVEYAYQRTKNFERLSFLYLVTGNMEKLSKMLKIAEVKNDVMGQFHNALYMGDVRERVKILENVGHLPLAYITASVHGLHDVAERLAAELGDNVPSLPAGKVPSLLMPPSPVICGSDWPLLRVMRGMFDGVLDNTGRGVADEEEYEAADGDWGEELDIVDADGLQNGDVAAILEDGEVAEENDEEGGWEMEDLGLGPEADTPKASISTQSSVFVTPTPGMPVSHIWTQKSSLAADHAAAGNFDTAMRLLNRQLGITNFAPLKTMFLDLHTGSHSYLRAFSSAPIISLAVERGWTESSSANVRGPPALPFKLSQLDEKLKAGYKFTTAGKFTEALKTFVNILHTIPLIVVESRREVDDVKELIIIVKEYVLGLQMELKRREVKDNIVRQQELAAYFTHCNLQTPHLRLALQNAMTVCFRAKNLATAANFARRLLETNPTNENQARAARQVVAAAEKNMTDATQLNYDFRNPFVICGATYVPIYRGQKDVSCPYCSSRFVPSQEGQLCNVCDLAVIGADASGLVCSPSQIR

SEQ ID NO: 247330 - protein, 180 aa, Glycine max
  unsure (1)..(180): unsure at all Xaa locations
  Clone ID: PAT_MRT3847_65369C.1.pep
MLFVRFRSVFGTYRAFSEFPSANRTCLYDFHVKNGAKMVEFAGFSMPIQYDLSVSASVLHTRSNVSLFDVSHMLQTEITGAHRVQFIESLTPTDVTNLPENSGALSVFTNSEGGIIDDLIISKTAHESLYLVTNAGRIGIDLPYLEQKAXEWRGNGKEIQVNVLQKKALVAIQGPETIKL

SEQ ID NO: 247331 - protein, 85 aa, Glycine max
  Clone ID: PAT_MRT3847_6536C.1.pep
IDRISSRSCLVRRSLPPTACSVAGPSATITRLPRAPPTILCGGSFLVSESRSLCMIAYAGFCLSVLRCGAYRSSSSFVVVVALRD

SEQ ID NO: 247332 - protein, 39 aa, Glycine max
  Clone ID: PAT_MRT3847_65370C.1.pep
SHHGLFSKIRVIEKIPLFKLREYLRWIPDITFSSVCSLT

SEQ ID NO: 247333 - protein, 122 aa, Glycine max
  Clone ID: PAT_MRT3847_65371C.1.pep
FRGEVRRRGGALPHHRRRKRRRQRSAVELRTRRLVVEMLLLLLLLVLVLLLLLLRIIVHHCHWIAERVGEKGRNWILQRREENPKPQNVVGDWGRTKRRVCGAGKRGGNETRNDGVLLKSSV

SEQ ID NO: 247334 - protein, 84 aa, Glycine max
  unsure (1)..(84): unsure at all Xaa locations
  Clone ID: PAT_MRT3847_65372C.1.pep
YEFELCTRGSSRVDLQVSLYLDXFSGVCQSVLHECKLTFLQIICDHDLFVEMPGRDPSDRYFIVFLSSAQILTYKYCNVCSSIF

SEQ ID NO: 247335 - protein, 132 aa, Glycine max
  unsure (1)..(132): unsure at all Xaa locations
  Clone ID: PAT_MRT3847_65373C.1.pep
GVFKNLVAFDQFHYPDKPNFCNYVSFIDSLIHIQLDVELLVKKXVIVHELGSDKEVATLVNGLCKHVVTNSTCYHHIINKLNDHYMNDWNHTIAALRLVYFRDLWRASGTVVGIAVLVFAVFQFLRVCRYLF

SEQ ID NO: 247336 - protein, 227 aa, Glycine max
  Clone ID: PAT_MRT3847_65374C.1.pep
MVQPWNKPRSSPFSCSSFKDIQTLFLDEPTTTKPKPSIFHRVTLANSLLRAWSTNPKISSRAHDEAPRADQPHPPPSILRSEQRVVVYFTSLRVVRATFEDCKTVRSILRGFAGALDRSRQKGDSGFLSELRRVTGRKSGLTLPRVFIDGRYIGGAEELRWLHESGELKKLLEGLPAVDSHLRVCHVCDDHRFVLCGECSGARKVYAEKGGFKTCAACNESGLIRYC

SEQ ID NO: 247337 - protein, 99 aa, Glycine max
  unsure (1)..(99): unsure at all Xaa locations
  Clone ID: PAT_MRT3847_65375C.1.pep
TLPEDLMYFTILYLLDLSDNVFSCHLPSSLGNLKLLAPLDLSSILFDGEIPTQLANLNFLSYLHLSSNRLVGXIPVGIQLQTFYASSFVGNAYLCGSPL

SEQ ID NO: 247338 - protein, 184 aa, Glycine max
  Clone ID: PAT_MRT3847_65376C.1.pep
VKDSANTAFQQATVEGVLSSETMRGIRFDLMDVVLHADSIHRGAGQIMPPMKRAIYGCQLKSEPALLEPMYLCDITVPQNAVAGVYNTLNSRRGQVENKEDRAGTPLSKITAFLPVLESFGFAGLLRQNTGGQAFPQMIFSHWSLMNGDPLDPNSQAQEIIMKIRERKGMKQEMPDFADYYDKL

SEQ ID NO: 247339 - protein, 74 aa, Glycine max
  Clone ID: PAT_MRT3847_65377C.1.pep
EKKRYPPPPRPKDESCLRRRLWHSERVASEPWADCPREGFGWHDIISSTAHPGCVKKKKRKRAAALRQQAYVRV

SEQ ID NO: 247340 - protein, 57 aa, Glycine max
  Clone ID: PAT_MRT3847_65378C.1.pep
NVSQSLSIGQYSQDSDFSELDRFLYKSKVLSISNIRDAAGGTNFNTIGNSSKLIMKM

SEQ ID NO: 247341 - protein, 42 aa, Glycine max
  unsure (1)..(42): unsure at all Xaa locations
  Clone ID: PAT_MRT3847_65379C.1.pep
MGLACFLDXXEAPKIKNXNCYPINPTLFLFNLFLGXLEHYFF

SEQ ID NO: 247342 - protein, 414 aa, Glycine max
  unsure (1)..(414): unsure at all Xaa locations
  Clone ID: PAT_MRT3847_6537C.1.pep
MAELEEERMGDFKPFSEGSSCSRSISETVNGSHQFTIKGYSLAKGMGAGKYIMSDTFTVGGYDWAIYFYPDGKNPEDNSMYXSVFIALASDGTDVRALFKLTLVDQSEKGNDKVHSHFDRPLESGPYTLKYKGSMWGYKRFFRRTQLETSEYLKNDCLVMHCTVGVVKTRFEGSKQGVIVPQSDMGRDFKDLLESEVGCDILFKVKSESFKAHKLILAARSPVFRAQFFGLVGDPTLEEVVVEDIEPFIFKAMLLFVYSDKLPGIYEVMDSMPLCSYTVMVQHLLAAADLYNLDRLKLLCESKLCEEINTDNVATTLALAEQHHCPQLKAICLKYIANPANLGAVMQSEAFVHLKESCPSMLLELLETFASVDDNSGQTLSRKRSGSSIYGQDLADGAAAESVNPNGRRVRRRT

SEQ ID NO: 247343 - protein, 56 aa, Glycine max
  Clone ID: PAT_MRT3847_65380C.1.pep
QFDIGLLSVIESDRYTKAVETIVLEYSMLLACSDRLCSYQKFTIDPTNLARDIKSS

SEQ ID NO: 247344 - protein, 67 aa, Glycine max
  Clone ID: PAT_MRT3847_65381C.1.pep
TVAFSIHPFSLALPMWRCIASLTQTIDLSYCFYHLLNYSSQWNLHKQKQLFCIKPPPRAHHLEKIDS

SEQ ID NO: 247345 - protein, 145 aa, Glycine max
  unsure (1)..(145): unsure at all Xaa locations
  Clone ID: PAT_MRT3847_65382C.1.pep
AIHQQRVLGRELGLVIDLTNTTRYYPVSDWTKEGIGHVKIRCTGRDAVPDDESVKFFCDKIFILGSGFLLXRTNTKKYILVHCTHGHNRTGYMIVHFLVRTESLSVTEAINKFACARHPGIYKQDYIDGLYMVYNEKKPEDLGWP

SEQ ID NO: 247346 - protein, 102 aa, Glycine max
  Clone ID: PAT_MRT3847_65383C.1.pep
MVANDIDVNIENNMESKDTVCAFQEGFSEWDISAELVSPQKSIDTEEDIYGHVFKPGSVLVEYGRAEACCSAAHSLHGRFFDGRIVTVGYVALSLYRSRFTK

SEQ ID NO: 247347 - protein, 36 aa, Glycine max
  Clone ID: PAT_MRT3847_65384C.1.pep
KFVQPRDFIWSKICHSELLWLPLIKICKNNQRTTIS

SEQ ID NO: 247348 - protein, 65 aa, Glycine max
  Clone ID: PAT_MRT3847_65385C.1.pep
FKPLGGFNHFQIINLTINTGHVHKSNEPLATFRTYRRLKVVQLVFNNISLIYLIYFNAIKYSNIN

SEQ ID NO: 247349 - protein, 51 aa, Glycine max
  Clone ID: PAT_MRT3847_65386C.1.pep
KISSFVTYLPPLPTYYLLFKKKTIYCFQSLSYVVVHLTKILSIYYAYINTV

SEQ ID NO: 247350 - protein, 47 aa, Glycine max
  Clone ID: PAT_MRT3847_65387C.1.pep
HRCKCLSKIQLWLQVSRKVSKLFMHLLMAAHMLYEKSQESYAHLVLA

SEQ ID NO: 247351 - protein, 43 aa, Glycine max
  Clone ID: PAT_MRT3847_65388C.1.pep
AHANVLIIQHNGVHFYVPNLHQELGYNTNIAFSKQTRANSTTP

SEQ ID NO: 247352 - protein, 58 aa, Glycine max
  unsure (1)..(58): unsure at all Xaa locations
  Clone ID: PAT_MRT3847_65389C.1.pep
MMIARLTLLLLVXVFLASGSVSFGIAYWEKQNPSHIKCLRSCNIEKDSYRNQACYARC

SEQ ID NO: 247353 - protein, 195 aa, Glycine max
  unsure (1)..(195): unsure at all Xaa locations
  Clone ID: PAT_MRT3847_6538C.1.pep
CCRSGVVCDLKLSHPPPIATVPLGTGNNLPFAFGWGKKNPGTDEQAVKSVLDQVMKAKEMKIDNWHILMRMRAPKHGPCDPIPPLELPHSLHAFHHISEADELNVGLLLFLIAPQEGCHTFRGGFWNYFSMGMDAQVSYAFHSERKMNPEKFKNQLVNLSTYAKLGCTQGWXFAPXVLPPSSNIAHLAKVKVMKH

SEQ ID NO: 247354 - protein, 782 aa, Glycine max
  unsure (1)..(782): unsure at all Xaa locations
  Clone ID: PAT_MRT3847_65390C.1.pep
MAHFEKDEVPMMSETHAQLSDEVVDSNFRRLVSRTRSASISIPMASLESYEKETSLVGHTGPLHSVRKTPSVQISGPLYATNGTGNLSRQNIVATGTKVVESKTEKFSTFDGTNENRWDNDYDRKNEHLMRSGQLGMCNDPYCTTCPTYFNASQQRNPKPSTRWDPKFHNALYGDAKSFVRKLLSFCYSYVPGVMNPHAKVVQKWNKFLAIFCLVAIFVDPLFFFLLYVEKNEKCIAINWPLTTTLVLFRSITDLIYFFNILLQFRLAYVSRESRVVGAGDLVDHPKKIALHYLKGYFLIDLFVVFPLPQXKYVQIMILFVLPKYLGLSGANYAKNLLRAAILVQYFPRLFRFLPLLIGQSPTGFIFESAWANFIINLLIFMLSGHVVGSGWYLFGLQRVNQCLRNACRDSNITGCSAFIDCGRGHGNNQPGLRSDQWINNTQAVACLDPSPDGFSYGIYENAVPLTIETXVVQKYVFALFWGXQQISTLXGNQTPSYFCVGWKYFFTMAIIXGLGLLLFALLIGNIQNFLQALGRRRLEMQLRGRDVEQWMSHRRLPEDLRRRVRHAERYSWAATRGVNEEILLENMQEDLQTDIRRHLFKFVKKVRIFALMDEPILDAICERLKQKTYIKGSKVLSQGSLVEKMVFVVRGTLESFGDDGTMVPLSEGDACGEELLTWYLEHSSVSTDGKKVRVQGQRLLSNRTVRCLTNVEAFSLRAADLEELTILFTRFLRNPHVQGALRYVSPYWRSLAANRIQVAWRYRKKRLSRANTSQSDQTLIA

SEQ ID NO: 247355 - protein, 32 aa, Glycine max
  Clone ID: PAT_MRT3847_65391C.1.pep
MCCCKQRSIFTKTKVTPYVHITSHNPNHKINY

SEQ ID NO: 247356 - protein, 84 aa, Glycine max
  Clone ID: PAT_MRT3847_65392C.1.pep
VTSPRHSGLSDKNTMFIPRAASGLNIVIVSDSPNALPSGTQFLFTVVVCGSSPNPCVSGTLEVIERSVVYVQSKRHICWGVRGI

SEQ ID NO: 247357 - protein, 243 aa, Glycine max
  Clone ID: PAT_MRT3847_65393C.1.pep
VSSNFVKGKKTIRASVEALFLGEADELVKLLGQEFPLLGLKKELCHEMRWIDSVVWWANYNDGSSVNALLDRNHYSVHSNKRKSDYVQTPISKDGFTWIWKKMIELGKVSIVFNPYGGKMNEVPSDATPFPHRAGNLYKIQYTVSWQEPGAAVEKSFLSQIRVLHNYMTPFVSKNPRSAYFNYRDLDIGINSHASDNFEDGKVYGIKYFNKNFERLVKVKSAIDPENFFWNEQSIPTYPRSNA

SEQ ID NO: 247358 - protein, 127 aa, Glycine max
  Clone ID: PAT_MRT3847_65394C.1.pep
MAEVAVSTVVTKLTGLLVEQAVVAAVSVSQLAGVREQVENLKNELGWMQSFLRDADAKQEGNDRVRMWVSEIRDVAFEAEELIETYVYKTTMQGSLDKVFRPCHLYKVRTRIDKILSKIKSISDRRE

SEQ ID NO: 247359 - protein, 98 aa, Glycine max
  Clone ID: PAT_MRT3847_65395C.1.pep
GICSSRSLHYPLFCIPAAITWSSCRSSHSLGFWRRVAKFPYFCILKNKSQNLFTGTVQYSIESQNAMQNILKCSIKSNPIEFVFCWIKIFLFTKSIHT

SEQ ID NO: 247360 - protein, 74 aa, Glycine max
  Clone ID: PAT_MRT3847_65396C.1.pep
LQCCKKESTNPNSQAKYKTKFSNYPVSQEFPKIIVSLSQYQTLNYQRGNIKERILEKRTYGNERNNLNKRKENT

SEQ ID NO: 247361 - protein, 57 aa, Glycine max
  Clone ID: PAT_MRT3847_65397C.1.pep
GSLLGGKVSALVDKCKGLERVSCLQSQLHHARASFSNCLLNMWPQERVVLVVVPRRK

SEQ ID NO: 247362 - protein, 104 aa, Glycine max
  unsure (1)..(104): unsure at all Xaa locations
  Clone ID: PAT_MRT3847_65398C.1.pep
KKINPNTAACLGQHCRRQGRALDRWHAIATPNAXDPAFXRSFYIKPSVWLPDTKTNFADDHHRKFPCLDLYLVIWGKADNLHYFPECIAYIGRIDLFPTNPIHR

SEQ ID NO: 247363 - protein, 333 aa, Glycine max
  Clone ID: PAT_MRT3847_65399C.1.pep
MKLTALNSTVRRALLNGRNQNGNRLGSAALMPYAAAETRLLCAGGANGWFFYWKRTMVSPAEAKLPEKEKEKEKAKAEKSVVESSYWGISRPKVVREDGTEWPWNCFMPWESYRSNVSIDLTKHHVPKNVLDKVAYRTVKLLRIPTDLFFKRRYGCRAMMLETVAAVPGMVGGMLLHLRSLRKFQQSGGWIKALLEEAENERMHLMTMVELVKPKWYERLLVLAVQGVFFNAFFVLYILSPKVAHRIVGYLEEEAIHSYTEYLKDLESGAIENVPAPAIAIDYWRLPKDARLKDVITVIRADEAHHRDVNHFASDIHFQGKELREAPAPIGYH

SEQ ID NO: 247364 - protein, 137 aa, Glycine max
  unsure (1)..(137): unsure at all Xaa locations
  Clone ID: PAT_MRT3847_6539C.1.pep
AIRVPKFLPKGVSFYXMLRKSGFCLCPSGAGGASPRVVGAIYPGGGPGFISDQXVPPFKDVLNGKPFSLEGSVKDIPRLRGILLGISPGPYIRIPRGVGLVGGPFGVPSPPQRDGVFPRVPPFGGLRGLDFRAPQGQ

SEQ ID NO: 247365 - protein, 362 aa, Glycine max
  unsure (1)..(362): unsure at all Xaa locations
  Clone ID: PAT_MRT3847_653C.1.pep
FKEALVSFKRACELQPVDVRPHFRTGNCLYVLGRYKEAKEEFLLALESAEAGGNQWAYLLPQIYVNLGIALEGEGLVLSACEYYREAAILCPTHFRALKLLGSALFGVGEYRAAVKALEEAIFMKPDYADAHCDLASALPAMGEDERAIEVFQKAIDLKPGHVDALYNLGGLRLREDDRRGASEMYTRVLAVWPNHWRAQLNKAVSLLGAGETEEAKRALKEALKMTNRVELHDAISHLKQLQKKKTKPSNGGASGEASFVIVEPSKFKVVGDKTTGRQELATALQIRALQRVARLSRCSVELLKKEMSERDVPVSYSGSGVPEKSIRKPSLEEILHRLLXFLKPETFQGAXKAIXERILSV

SEQ ID NO: 247366 - protein, 34 aa, Glycine max
  Clone ID: PAT_MRT3847_65400C.1.pep
LRLAAHCCFYQLSMHLDTVVPTIMIHQLSTVTMI

SEQ ID NO: 247367 - protein, 455 aa, Glycine max
  unsure (1)..(455): unsure at all Xaa locations
  Clone ID: PAT_MRT3847_65401C.1.pep
LSLTPANSKREMEAASATILLLILILALICSWKVLNWLWLRPKRLEKLLREQGFRGNPYTLFFGDSKEFLKMRKEAVSKPMTLSDDIVPRVSAYVQHSVNKHGKNSFIWFGPMPRVTILDPEQIKDVFNKNYDSAKPNLILHKMXLATKPNMNPLVKLLATGRAGYEGEKWSKHRRIINPAFNLEKLKIMLPLFFKSCNDLVSKWEGMLSSEGSCEMDAWPFLQNLASDVIARSAFGSSYEEGRRIFQLQREQAELLIKVLLKIQIPGWRFLPTNTHRRMKEIDRDIKASLKDMINKREKALKAGEATKNDLLGILLESNHKEIQEHGNRNNKNVGMSLEDVIEECKLFYFAGQETTSVLLVWTMVLLSRYPDWQARAREEAFQVFGYQKPDFDGLSRLKIVTMILYEVLRLYPPLIGMNRLVEKDVKLGNLTLPAGVQVFLPTVLIHHDSELWG

SEQ ID NO: 247368 - protein, 54 aa, Glycine max
  Clone ID: PAT_MRT3847_65402C.1.pep
IHTIRLPRHSTVSDVINDLKSKVDLSHPDAELRLLEVFYHKIYKIFRVNEKIEN

SEQ ID NO: 247369 - protein, 65 aa, Glycine max
  Clone ID: PAT_MRT3847_65403C.1.pep
ACDYLMPSPAITLSRVFDRRELYRNTDAQSDRIDAFGLHLKNSVTSCAPARQFPLVHSAPSHAAG

SEQ ID NO: 247370 - protein, 49 aa, Glycine max
  unsure (1)..(49): unsure at all Xaa locations
  Clone ID: PAT_MRT3847_65404C.1.pep
FAKIFELLLKEKACLRCRHEGQTSGXAKRREETVNSFQNRHLDSGLFIT

SEQ ID NO: 247371 - protein, 49 aa, Glycine max
  Clone ID: PAT_MRT3847_65405C.1.pep
TKFLALITSPSWTYVYEMCRPMSLEWDFTQAYRWGGVSCMFFGELVWHA

SEQ ID NO: 247372 - protein, 81 aa, Glycine max
  Clone ID: PAT_MRT3847_65406C.1.pep
ISKTLESTDLGATFLFRTENEKARIYARPISIGRVQIQRDRLISSNNHPTRKGARCEETPSENWKRSSKNRWIQRFRPWVS

SEQ ID NO: 247373 - protein, 124 aa, Glycine max
  Clone ID: PAT_MRT3847_65407C.1.pep
MASCKSFITAFFLLATFSSSMSLSLASSRHLLQTTTTPNLPGITPTLPNPTGLPPLPSNPTLPQGNVPPLPTMPTLPSLPSIFPTLPSLTLPPFPASSFPKMPSIPNSIPSFPFFSPPPSTSSP

SEQ ID NO: 247374 - protein, 36 aa, Glycine max
  Clone ID: PAT_MRT3847_65408C.1.pep
KDSSKHSRCWEQSTRISLAYLTICMHVTIIQGDEEG

SEQ ID NO: 247375 - protein, 56 aa, Glycine max
  Clone ID: PAT_MRT3847_65409C.1.pep
DNSTVDITVTIVHQNAYQREYDSNAAWAGNGASHGRAIEHCMDHKRDVQRLIHAVI

SEQ ID NO: 247376 - protein, 119 aa, Glycine max
  unsure (1)..(119): unsure at all Xaa locations
  Clone ID: PAT_MRT3847_6540C.1.pep
CGTSRIEDEMHYLNXRLRLKNPDEDTKQKFNSKLDKLKLERERVRLSHQEAQRKLHQKFHEPWGQLMKTGYQNSRFAHQVERFACLYTSQVSNLALFSSDKYCRPSEDFMQHEFSIFES

SEQ ID NO: 247377 - protein, 94 aa, Glycine max
  Clone ID: PAT_MRT3847_65410C.1.pep
LYMLALFYTAARAFKFHSLSLGFISIYIFESGTTLLLRNRIIDAPFHDELWFAVANQPCLLHVRIDAMYTKPSNQSNFICRHQIKKVMPEPRTK

SEQ ID NO: 247378 - protein, 87 aa, Glycine max
  Clone ID: PAT_MRT3847_65411C.1.pep
FARSPQSTLLRPFLDVRSNLDSESRDNLGLCFGLTCNSTSSTPALLGLALYRFLGVLCYPYNLNLVDNLGLCFGLTCNSTVLHPAPP

SEQ ID NO: 247379 - protein, 89 aa, Glycine max
  unsure (1)..(89): unsure at all Xaa locations
  Clone ID: PAT_MRT3847_65412C.1.pep
AVHGDGDFIRAIXVDLMAGLGLGLRXESXELLXXLXPXSXXFVXXXXRVXVXETTDVVXSAATRRHXIHXHSWXNYTMGGKRRRXWXXC

SEQ ID NO: 247380 - protein, 77 aa, Glycine max
  Clone ID: PAT_MRT3847_65413C.1.pep
FFFLFLFFFFFLGTNWIHINFFHLGETYLERAIDNIKFPKQITRGRIGTLTGHTLSSISIHPKETAFATQIGLPKHF

SEQ ID NO: 247381 - protein, 161 aa, Glycine max
  Clone ID: PAT_MRT3847_65414C.1.pep
MSNWISSKLKAAESILHQIDQQAAESLRKNEGFRSEEPSIDAPAKSGSGVSLKDQLKKKPLESNEYRGKLRSDLNFNGLKATASAPKLSPKSGPTLTDDDWTELLSAPTPTQSVASASGGNHGNGLPAPRGLSRNSSRKQKGFVFRVCWRWMKESKKWQWS

SEQ ID NO: 247382 - protein, 134 aa, Glycine max
  Clone ID: PAT_MRT3847_65415C.1.pep
EDTVEVIAIAPFHAISFSVGAGGRIKASLGSVQRDSLCKSLAWRACSFSYPKEAPASSRWFLYYFRMLPSLRKMHSISSRGSPLMEVAILSKIHVPGIALPREGWQRASALVHLSVSMSRCQGVQRVCIRSPVC

SEQ ID NO: 247383 - protein, 688 aa, Glycine max
  unsure (1)..(688): unsure at all Xaa locations
  Clone ID: PAT_MRT3847_65416C.1.pep
MSNWISSKLKAAENILHQIDQQAAESLRKNEDFRLEEPSIDAPFKSGSGVSLKDQLKKKPLESNEYRGKLRSDPNFDGLKATASAPKLSPKSGPTLTDDDWTGLLSAPSPTQSIASASGGNHGNGKPAPRGLGRSSSRKQKGLSSGFLMTDVKRNPRTGNSGQRSLQKSDLVIRVILSLQVSDDGYETSPLTSTGRNSVVESKIDGKWGKGLEYADKDSSAKLVVEEKGNEENQHRFNYRDISPPELLQEDGKTLAAETLPAWGVDEDQEAKIVEDVDGNQLRSVVLGRHELNSISDDLKRGSPVASDGSSDSDTDSGSTSDSESEHEREERRKRRERILAEKVAAKAINAIKERENIVAKLEGEKESLEKILEERAKQQALQASQLQSTMMETMEAVELEKQKHNNTRMEVLARLAKLETVNADLARSLAAVQWSLEVEVKQVSELRQQISSKELFHEELRRRMKNPRQTGASQNQLVSKSVELEREIHEAEHSLINNKVAQLQEKARKLEADIEMTRKEIEEPTEVEVELKRRLQQMTDHLIQTSXVESLSSEKASLVFRIEAVSRLLDENMSASGAANMNPASSSSDLESGLWELSNSKLKPMLKARIHSGKIQLGSLLQQLDYIFVTGALFLKRNSTAKLWALIYLVCLHFWVFYILLSHSSPSNEGRSGAQISLENINNTGGV

SEQ ID NO: 247384 - protein, 115 aa, Glycine max
  Clone ID: PAT_MRT3847_65417C.1.pep
KGEMAGPPGAVGIFPGNPRVGFYFPPQSFLLSGRGPLIKHNFLQCPKKEMLLFQIQLFFIWRPPLGDFLPPGPEKKNIFFPPLKQKNTKVFKDQPQKKDRFFEEQKFVKNKLNKR

SEQ ID NO: 247385 - protein, 185 aa, Glycine max
  Clone ID: PAT_MRT3847_65418C.1.pep
MSNTSLLDFQYSLSRKKYLRKPSRLFSWDRQNSGSKNVFPQPKADEMKQVFDKFDSNKDGKISQQEYKATMKALGMGDSVHEVPNIFRVVDLNGDGFINFKEFMEAQSKGGGVRMMDIQSAFRTFDKNGDGRISAEEVKEMLGKLGERCSIEDSRRMVRAVDTDGDGMVDMDEFTTMMTQSLRHV

SEQ ID NO: 247386 - protein, 49 aa, Glycine max
  Clone ID: PAT_MRT3847_65419C.1.pep
LVLMVSVSLSFTGRPLLLTELECMLRVVGTEVVPITNHKHAHVNNVFYS

SEQ ID NO: 247387 - protein, 93 aa, Glycine max
  unsure (1)..(93): unsure at all Xaa locations
  Clone ID: PAT_MRT3847_6541C.1.pep
DVSLDEATILSYPTLLYSKAKLKKSDSTATYCSIYLTDYKDTDMLRMLPDYKHQFHLRCMXAWLXLHPTYPXYRTCPIPTPLSTALTXVVPLA

SEQ ID NO: 247388 - protein, 77 aa, Glycine max
  Clone ID: PAT_MRT3847_65420C.1.pep
VEELRRLKKRRATKKRILKENEPKPDPYWLRTFFSFAPEEAAKLPDYGHFGILSPLLANVCLNELDHWMEEKIVEFF

SEQ ID NO: 247389 - protein, 66 aa, Glycine max
  Clone ID: PAT_MRT3847_65421C.1.pep
GLQINRLKNQLHNNICLSTPNFLNGDRFHIIAAFNGQQKLHSCRLNSSLAHYSVYLRKNLCKCIFN

SEQ ID NO: 247390 - protein, 59 aa, Glycine max
  Clone ID: PAT_MRT3847_65422C.1.pep
FFIYYFGEISGSSYCTALISLLKCVGKGRTKKQMSFFTPVKYYYYFLFILITSPPITSC

SEQ ID NO: 247391 - protein, 27 aa, Glycine max
  Clone ID: PAT_MRT3847_65423C.1.pep
LVLRFKTKTPNDGEESSLAILMKISPN

SEQ ID NO: 247392 - protein, 102 aa, Glycine max
  unsure (1)..(102): unsure at all Xaa locations
  Clone ID: PAT_MRT3847_65424C.1.pep
DGTGGWGLNAINKQNFVSPPPGAILSAGTGNEPSKGLSLGGGFGPREKPGGPNSFFPHIKHAXVPVFTRWKVPFIIHQGRHKLHPQKVWTNIFGMGGMPKVV

SEQ ID NO: 247393 - protein, 151 aa, Glycine max
  Clone ID: PAT_MRT3847_65425C.1.pep
MAPKVDKKNDPKAQALKTAKAVKSGATFKKKAKKIRTSVTFHRPRTLKKDRNPKYPRISAPPRNKLDHYQILKYPLTTESAMKKIEDNNTLVFIVDLRADKKKIKDAVKKMYDIQAKKVNTLIRPDGTKKAYVRLTPDYDALDVANKIGII

SEQ ID NO: 247394 - protein, 72 aa, Glycine max
  Clone ID: PAT_MRT3847_65426C.1.pep
MESLRKMMRYGVLCSGNPRRLYATKVDLKKLRPMILKRIEKRAHTYPVRGMVPVANEVLQVRNDLIHGVSTF

SEQ ID NO: 247395 - protein, 47 aa, Glycine max
  unsure (1)..(47): unsure at all Xaa locations
  Clone ID: PAT_MRT3847_65427C.1.pep
RFSSEPSPVLYGSTRMHIRXSWPYAQQGWIGRYCXGLKHKINLVPIN

SEQ ID NO: 247396 - protein, 64 aa, Glycine max
  Clone ID: PAT_MRT3847_65428C.1.pep
GAIVGYSPASGFQSVQIQNPSNNKQHAGIPRQRTVREHKFFPITNDKPKNKEKKKKKQRKKPKG

SEQ ID NO: 247397 - protein, 51 aa, Glycine max
  Clone ID: PAT_MRT3847_65429C.1.pep
VSLGELLSYTSANVSYRGESSCYYNRRSYTRKPLPYSMLRHKTRYLFHDRC

SEQ ID NO: 247398 - protein, 111 aa, Glycine max
  Clone ID: PAT_MRT3847_6542C.1.pep
GWGAAKNGKGWFFFFLTLCPPGERICPKTLESPPPMKNFFVGLFPLRLPKGKHPPTPPYGMGKEVLFPNLNIHFFSAPHAKKFFQRGAITNGGLKVFFFFLNVKPPGPLFF

SEQ ID NO: 247399 - protein, 75 aa, Glycine max
  unsure (1)..(75): unsure at all Xaa locations
  Clone ID: PAT_MRT3847_65430C.1.pep
QAYRDKHRLXCDIAGLHLTHSAIIGQHGGVRSQSTXDFADXEPEGMAAFMPDLFEPRALAPTGQDLAGPPCVNIQ

SEQ ID NO: 247400 - protein, 420 aa, Glycine max
  unsure (1)..(420): unsure at all Xaa locations
  Clone ID: PAT_MRT3847_65431C.1.pep
MLALLQNCSMPLARAVRSPPRTHVRPCFTAVAYASISSRANSQSQVLLGLSEKELQQLALDLNQETYRGKQLHHFLYQRKLREIQDFTQLPQGFRNTLEETGWKVGRSPIFQTVTAADGTVKLLXLKLEDNRLVETVGIPVMVDKGLTRLTACVSSQLVSXDCPLLCSFCATGXEGFLRDLKSFERFEQVLSIEKVFXNRVTNVVFMGMGEPMLNLKAVLEAHHCLNKDVQIGQRMITISTVGVPNTIKKLASHKLQSTLAVSLHAPNQKLREXLVPSARSYPLDALMSDCREYFQQTSRRVSFEYALLAGVNDSVNHALELAELLHRSGSGYHVNLIPFNPIEGSEYQRPSKRAVLAFSGALESSKITVSVRQTRGLDANAACGQLRNKFQKTPLVTDPFDLAVTDTSMPYNNNFAVSS

SEQ ID NO: 247401 - protein, 107 aa, Glycine max
  Clone ID: PAT_MRT3847_65432C.1.pep
MQNPTNTTRKRPTGQKAANHAPKPRGTGTLAEYTAMSGNTNSRDCQSPEKPPATNNKMRDKGEAHTMNYRRDNGHTHGVVAEDTIARQQPMANLERVKHETGAKKGG

SEQ ID NO: 247402 - protein, 64 aa, Glycine max
  Clone ID: PAT_MRT3847_65433C.1.pep
KLKGYWSFKGDSWEFTNGSFLHTRRIFNFFLRGKGLGNTPNQVFPGGPGLFLDLLPKVGGGLPK

SEQ ID NO: 247403 - protein, 78 aa, Glycine max
  Clone ID: PAT_MRT3847_65434C.1.pep
VTFLRNNELVRSIFFSLYFQQSMYQQMNPNQTLKLKLTNKTDSCCNIFASRPDVDLLDLIPDTRCQNNAKKLLILVIY

SEQ ID NO: 247404 - protein, 66 aa, Glycine max
  unsure (1)..(66): unsure at all Xaa locations
  Clone ID: PAT_MRT3847_65435C.1.pep
FTLPLYPLHLPFXLQSLKHNTMLCYLPNNLLTIHTLTTSTTNSPILTSTLSSTITXTTNSPSKHSP

SEQ ID NO: 247405 - protein, 77 aa, Glycine max
  unsure (1)..(77): unsure at all Xaa locations
  Clone ID: PAT_MRT3847_65436C.1.pep
MQNEEGRFPGLSIPRKCSPPNRLIPAKAHAWVQVNIGHVDEKGVYNGHFSPFALXGFTRAQGYSNSPLNRLWQKKKV

SEQ ID NO: 247406 - protein, 72 aa, Glycine max
  Clone ID: PAT_MRT3847_65437C.1.pep
RAKRRQDGTRQLQIKKQVLCAMYIEMRFQEDRTVKYNDHRSRRNRTTITILTRRLLILTTQVEKGSPVDFLM

SEQ ID NO: 247407 - protein, 93 aa, Glycine max
  unsure (1)..(93): unsure at all Xaa locations
  Clone ID: PAT_MRT3847_65438C.1.pep
RNPRRRSSXSXWITLXXXDXVRXERFHRRRVLRPMVXSXLRSLLREYEKLLTILSSHDPXIXXAXVDXNEEKNKRPCXTIWMSRDXNNXNWEW

SEQ ID NO: 247408 - protein, 115 aa, Glycine max
  unsure (1)..(115): unsure at all Xaa locations
  Clone ID: PAT_MRT3847_65439C.1.pep
AAPIPTTSRVLAVIRLSKGNHSNYHATFKRLRKTKGYVEFHESPPDNFDPGQPYNDPVATQQITEPIVLDKLIQIEIARIIREKLQXCYRIYGVTHLHXCRHLVNHYHKSSLVIR

SEQ ID NO: 247409 - protein, 94 aa, Glycine max
  Clone ID: PAT_MRT3847_6543C.1.pep
MARFGSHLVLFLVLFASLCSCLEARKLHLGAQKHNKNKVDPSLFFSSLPKGTVPTSTPSRKGHSTVVDEKLIARHLISTEQILLRSVPSPGAGH

SEQ ID NO: 247410 - protein, 133 aa, Glycine max
  unsure (1)..(133): unsure at all Xaa locations
  Clone ID: PAT_MRT3847_65440C.1.pep
RRVLPGLHHVILIGDDKQLPAVVKIQVSQEAEYGRSLFERLVSLGHKKHLLNVQYRMHPSISLFPNKEFYEKQLSDSPFVREVSYNRHFLEGKMYDSYSFINIANDDREDAXGGHGWKNMVVAEAVCNFISRL

SEQ ID NO: 247411 - protein, 67 aa, Glycine max
  Clone ID: PAT_MRT3847_65441C.1.pep
FKRIQKKIFRKKNTKEIILMHHITGMFFLVMSPPLCTFYGFLPHHLKLKKASVKVCIYCFNIQPQPF

SEQ ID NO: 247412 - protein, 178 aa, Glycine max
  Clone ID: PAT_MRT3847_65442C.1.pep
MASIIGVSSIYQTPSLELYQRPNTAASTSSVRLQCLDSKSHFNNVLRAHQRHSTGPGLKPTPTTFVPSAVATPNSSLLSEEAFKGLGRDFDEFDHASDSDSAAESVHPDELDISKLDLPSRLVESLQSRGITQLFPIQRAVLVPALEGRDIIARAKTGTGKTLAFGIPIIKGLTEDEH

SEQ ID NO: 247413 - protein, 397 aa, Glycine max
  Clone ID: PAT_MRT3847_65443C.1.pep
MAGESDVPENTLSCANCGKPANLQCPKCMELKLPREGAAFCSQDCFKSSWSSHKSVHLKAKLSPPGTQNSDSLDEGWLYCLKRGQARTPKLPHFDWTGPLQPYPISSKRIVPDQIDKPDWADDGTPKIEPNSSLQHTIEVKTPDQIERMRETCRIAREVLDAAARIIQPGVTTDEIDRVVHEATIAAGGYPSPLNYLFFPKSCCTSVNEVICHGIPDARKLEDGDIVNVDVTVYYKGVHGDLNETYFVGNVDEESRQLVKCTYECLEKAISIVKPGVRFREIGEVINRHASMSGFSVVKSYCGHGIGELFHCAPNIPHYSRNKAVGVMKAGQTFTIEPMINAGVWRDRMWPDGWTAVTADGKRSAQFEQTLLVTETGVEVLTGRLQTSPNVFPWLNS

SEQ ID NO: 247414 - protein, 96 aa, Glycine max
  Clone ID: PAT_MRT3847_65444C.1.pep
KVISDKLIIELIRINNVFQVSTHAPASFRVSEDPNHWKAEIKCTFQLYLNQIVVITTEWHYNRQQKLLFIPISNLQLSVLPYSKTSCRPLPNSARG

SEQ ID NO: 247415 - protein, 34 aa, Glycine max
  Clone ID: PAT_MRT3847_65445C.1.pep
YIHLLVEATDSLNNHAIRIQLDLKLGVHVFLQMR

SEQ ID NO: 247416 - protein, 67 aa, Glycine max
  unsure (1)..(67): unsure at all Xaa locations
  Clone ID: PAT_MRT3847_65446C.1.pep
XRXPXXXXNXXXXXPSCXXLXVRXFXSHXITLRSKSXTXSXXSXAXLXXSPXTXSSLIPSXRXRSFS

SEQ ID NO: 247417 - protein, 197 aa, Glycine max
  Clone ID: PAT_MRT3847_65447C.1.pep
FGRVYQDYCDAMSNLSLGIMELLGMSLGVGKACFREFFEENNSIMRLNYYPPCQKPDLTLGTGPHCDPTSLTILHQDQVGGLQVFVDNEWHSISPNFNAFVVNIGDTFMALSNGRYKSCLHRAVVNSKTTRKSLAFFLCPKGDKVVSPPSELVDDLTPRIYPDFTWPMLLEFTQKHYRADMKTLEAFTNWLLQRKMS

SEQ ID NO: 247418 - protein, 67 aa, Glycine max
  Clone ID: PAT_MRT3847_65448C.1.pep
WNFRHSYFTFLPHLLILQQVPNFLISPLQKFFYGYPFGFSLCNRVSDLCIPVPMAGRYANNPFVEEK

SEQ ID NO: 247419 - protein, 86 aa, Glycine max
  Clone ID: PAT_MRT3847_65449C.1.pep
VSKGRIRYSVPKSSLFTLLILRPSSSFIFDRRLRSSSESSIVHRQCSPPRWTFTFLLQSSIVVVVVTCRQETSSSFVVTCRLLSSS

SEQ ID NO: 247420 - protein, 65 aa, Glycine max
  Clone ID: PAT_MRT3847_6544C.1.pep
IIQNLHRIANFTSFLIRNTSGKIFRLFVAINFGSSNPKCKIFILNYMCGDLQALLLILSIETMIE

SEQ ID NO: 247421 - protein, 59 aa, Glycine max
  Clone ID: PAT_MRT3847_65450C.1.pep
MLYKTNKNILKKCKQENSNRRLIEKKTNCVARPVRILYMPLKRDIQLQDKSPNSGERVG

SEQ ID NO: 247422 - protein, 76 aa, Glycine max
  Clone ID: PAT_MRT3847_65451C.1.pep
HPHTPRTRRRTNHLSNKSSNLSRWRVKDHHLSSSSYSCLRSENALHASDLKMHSHLRSRNSHLMFRIHGLAHTDLL

SEQ ID NO: 247423 - protein, 127 aa, Glycine max
  Clone ID: PAT_MRT3847_65452C.1.pep
NLSGCSEFKYLPEFGESMEQLSLLILEETPITKLPSSLGCLVGLAHLNLKNCKNLVCLPDTFHKLKSLKFLDVRGCSKLCSLPDGLEEMKCLEEICLSADDSVELPSSSFNLENLQISFEVRSSFCI

SEQ ID NO: 247424 - protein, 199 aa, Glycine max
  unsure (1)..(199): unsure at all Xaa locations
  Clone ID: PAT_MRT3847_65453C.1.pep
MGRSLSPMLRREIQNLDKDTDSRKSAMRALKSYVKDLDMKTIPIFLAQVSETKETGSLSGEFTISLYEVLARVHGVKIVPMIDSIMQSIVQTLASSAGSFPLQQACSXKVVPAIARYGIDPATPEEKKRQIIHSLCKPLSDSLLSSXESLTCGTALCLKALVDSDNWRFAVVEMVNRVCQNVAAALEGKVHTNQLHMGL

SEQ ID NO: 247425 - protein, 68 aa, Glycine max
  Clone ID: PAT_MRT3847_65454C.1.pep
DPAKEAAYFTAQFIIMNHPGHIGNGYAPVLDSHTVHIASLSAKLMTYIDLRSGEYLDKDPNFLKNCDA

SEQ ID NO: 247426 - protein, 103 aa, Glycine max
  unsure (1)..(103): unsure at all Xaa locations
  Clone ID: PAT_MRT3847_65455C.1.pep
RGRGGFPPPAXISFPVTNRSTEITKKIPPALGKGKKIVFFTRVDPFPEALRAVFFGVKKEILSFNAPNPMWTGFFXNCKSFKNLVEEGPFAFVNKYVKFYSLK

SEQ ID NO: 247427 - protein, 85 aa, Glycine max
  Clone ID: PAT_MRT3847_65456C.1.pep
GEPNVSGYITMEQLIQRKNNATQFLAFQYICRIHDARGLLGGALITLDLILINNHATHILPRRLRVAACVTLSPNLEGTALAGGP

SEQ ID NO: 247428 - protein, 112 aa, Glycine max
  unsure (1)..(112): unsure at all Xaa locations
  Clone ID: PAT_MRT3847_65457C.1.pep
LFFDFISTFTTYKLLPYNTFCFVTFLTTIFSLNKVSLNQKLLNPPKXXTXIFKIPYLSQFLNSLYDFQYKSFFSAFACLTEQIKFDRYLHPHFRYYMREVTTLFYSQFFESY

SEQ ID NO: 247429 - protein, 108 aa, Glycine max
  unsure (1)..(108): unsure at all Xaa locations
  Clone ID: PAT_MRT3847_65458C.1.pep
XXXXXXXXQXXPFXXXXXXNLXXSXXIXXXKXXXCXXXXXXXXXXAXXXXXXXXXXXXXXTXCXXXXXXXVNXXXXXXXXXXXXXXXXXXXXXYXXXXXXXXXKXHST

SEQ ID NO: 247430 - protein, 112 aa, Glycine max
  Clone ID: PAT_MRT3847_65459C.1.pep
CLQRLAWKLKFWPKLKGTTNPLKRFFKTKYFGQKQNQGPDVWGLLTKNPAGVFFSFNLGGAIPSYKKWGHKQWFEFMPFLPRRGFNLPKRGGGVWNSLAQVLGRTLGQCLWP

SEQ ID NO: 247431 - protein, 70 aa, Glycine max
  Clone ID: PAT_MRT3847_6545C.1.pep
SPQAAGTVSYSTKVSGSTLKRLIGTCHIIAVVPSKLQYSFGEGTSGNLSHGIHMLPAVWQRTKQALSVSC

SEQ ID NO: 247432 - protein, 349 aa, Glycine max
  Clone ID: PAT_MRT3847_65460C.1.pep
MRKKKQGFRRPVVIKKPKQPQEQPSVDPITGKKIPKSFVFSRGKLPAPLKQLQMDLRKKLMLPYTALSLREKKRNNLRDFLNVAGPMGVTHFFILSKTATSSYLRVATTPQGPTLTFKIHEYSLAADIARSQLHPRCPKDLFKNSALIVLSGFVSGDPPLQLTTNMFQNIFPTIDVKTVKLSTCQRIVLLNYNKDTKLIDFRHYSIRLQPVGVSRRIRKLVQSHQVPDLRNLQDVSDFVTKAGYGSESEADEEAATVTLSSDIGRVNRASTKSAVKLQEVGPRMTLQLVKIEKGLCSGEVLFSEYGKAGGKGKSDDEMQGEEDSDGDEDEEDQDGDHPEDSEDKDQDLD

SEQ ID NO: 247433 - protein, 274 aa, Glycine max
  Clone ID: PAT_MRT3847_65461C.1.pep
LRFLITVGKDHFVALGRTAWDFMRTEGGSDFGANIFLNLPPVLNMSVLTVERQPWRGHNQFAIPYPSYFHPKTLAQTLTWQSHLRRRARPHLFSFVGGTRPGLQKAKVRDHIVSQCQASKRCVLVRCASGDSKCHNPMSVLEVMEKSTFCLQAPGDSFTRRSTFDSVLAGCIPVFFSEHTAYTQYKWYFPRERDTYSVFIDEREVIEGKEKMMIEEVLLGFGEKEVERMREVLIGLIPTLTYAHPNATAAFPDVVDVMLRRLSRRVTHHFNPII

SEQ ID NO: 247434 - protein, 50 aa, Glycine max
  Clone ID: PAT_MRT3847_65462C.1.pep
YYISFNTWWQSYRFLTVFMRLILPSEWSSRLVIDAICILKEDHTFVSSQG

SEQ ID NO: 247435 - protein, 96 aa, Glycine max
  Clone ID: PAT_MRT3847_65463C.1.pep
PVPFGHPSVVAKSYSFLRITSMDTLRVLDYEYGFSHECIVIIAIEQIQIVLVYCIYLIFRAFEDFHGQFYMLTLLYFKLCSIAFAYFYCNNEVILY

SEQ ID NO: 247436 - protein, 55 aa, Glycine max
  Clone ID: PAT_MRT3847_65464C.1.pep
EVATATGVGLGLVAPSFRCLLAGEPCKRQRVGLFAHTRNFSRPLLPRQTMCMHTV

SEQ ID NO: 247437 - protein, 116 aa, Glycine max
  unsure (1)..(116): unsure at all Xaa locations
  Clone ID: PAT_MRT3847_65465C.1.pep
MRNSEAPTHGGMMEIEATTRPSGNGSTTTLPGLSPLSETLWREKANTAEIIGDVSARLTWKDLTVMVTLSNGETQNVLEGLTGYAEPGTFTALMGPSGSGKSTLLDAXSSXLAANA

SEQ ID NO: 247438 - protein, 178 aa, Glycine max
  unsure (1)..(178): unsure at all Xaa locations
  Clone ID: PAT_MRT3847_65466C.1.pep
LNPACTKAMTMLFNXNPCSDAWSLXEFLNCSGFHCDIICGTGWTATPMQEVQXTIDWVICSXECVARTYCVXYHITTFEXNGRRGKLSMIXCTFRSVKRMPISIGGGAEAKNAIVMNMPYAVLLMWIHLDGDLRFAVSMMTCAYIKCAASVLIAHVNSADDTINSEAYAHSWCSWRDS

SEQ ID NO: 247439 - protein, 63 aa, Glycine max
  Clone ID: PAT_MRT3847_65467C.1.pep
TGNRRPSTNEGLQQTDHSAPEGMSCRKYTTMNGEMRPRRIKLRLKIISTSLEGRGCIMQLNYT

SEQ ID NO: 247440 - protein, 120 aa, Glycine max
  Clone ID: PAT_MRT3847_65468C.1.pep
MAATSTNQIKDQSLSLTKRLFPWTLYALIPIALLHFYLNPLSFPPSPESELPHSLTSHFSPPSEDEKAHDTPCDYFNGKWVSDKRGPLYNGTTCGTIKENQNCIKHGKLDHGYLYWRWKP

SEQ ID NO: 247441 - protein, 35 aa, Glycine max
  Clone ID: PAT_MRT3847_65469C.1.pep
EPRGSNRSMSATRTPPRTDPSSGSGCPQPQSPHSS

SEQ ID NO: 247442 - protein, 79 aa, Glycine max
  Clone ID: PAT_MRT3847_6546C.1.pep
QTFNTLTISMLLFKVGIQSRKGKGNIVLSPSILKKQYSVLFVSLGLAWFALFSVTILRFFYGELHIELVPLIEIHSSLV

SEQ ID NO: 247443 - protein, 65 aa, Glycine max
  Clone ID: PAT_MRT3847_65470C.1.pep
AVQYYGHKTIYECFCYHRLHILREAALYTAGLTYLPKRVSISCVLCILLVLVRGIDLYSSLRSHG

SEQ ID NO: 247444 - protein, 33 aa, Glycine max
  Clone ID: PAT_MRT3847_65471C.1.pep
LSSVVIVLYLIVQVTMPCNIYIYRSLKAKLRMF

SEQ ID NO: 247445 - protein, 77 aa, Glycine max
  Clone ID: PAT_MRT3847_65472C.1.pep
MATPSDPSNQEAVVRRRNNGPPIKFLLPLIYAPVLPLIRLSLRHKPVLRDRLFTAVLAGAFAHGFYLVTDLYDIESK

SEQ ID NO: 247446 - protein, 89 aa, Glycine max
  Clone ID: PAT_MRT3847_65473C.1.pep
VPPFPFLYPINCYSQLRPLLHREAVVRRRNNGPPIKFLLPLIYAPVLPLIRLSLRHKPVLRDRLFTAVLAGAFAHGFYLVTDLYDIESK

SEQ ID NO: 247447 - protein, 156 aa, Glycine max
  Clone ID: PAT_MRT3847_65474C.1.pep
MAYMCADSGNLMAIAQQVIKQKQQQEQQKQQQQQQTNPIPWNSTPPLPPTDFPDPFQSDPPFHFQPFRFSDFDSDDWMDSLIATPSSYTTDFPFPSSDLNRLIFPPQSPDSDSPQQPLLKALSECAFLSETEPDQAAESLSRLRKSVSQHGNPTER

SEQ ID NO: 247448 - protein, 59 aa, Glycine max
  unsure (1)..(59): unsure at all Xaa locations
  Clone ID: PAT_MRT3847_65475C.1.pep
XXXLXXLXLSLXVFSVFRLEXXTXTXGXXAAXVXLXXTPXFXSSQCXXSFXVTXWXWRT

SEQ ID NO: 247449 - protein, 47 aa, Glycine max
  Clone ID: PAT_MRT3847_65476C.1.pep
MEKDFPQKECPKKCLHQFWNLSQEGPGIPAVKFQCSQAQLNPTASHR

SEQ ID NO: 247450 - protein, 111 aa, Glycine max
  Clone ID: PAT_MRT3847_65477C.1.pep
SLSAYATHSCSLGSPSLYPSSSSIPPLFNVKDHDALSPPDANTVTAAKDIPWCSTTQQGPWSTELTNIRVKNIESDRGRSLRSCLTLQPARASISHGSQPHVRKPPTRTHL

SEQ ID NO: 247451 - protein, 81 aa, Glycine max
  Clone ID: PAT_MRT3847_65478C.1.pep
KMILTCPLQCHPSLESRRCKSSPCSSLAAPLVVVVDAANMPVLVSPLVHQNQQHSFPLVGQISQIVFLRFSGSCTDGVSFS

SEQ ID NO: 247452 - protein, 46 aa, Glycine max
  Clone ID: PAT_MRT3847_65479C.1.pep
DKYCRKYTFLIHFYLKGKCFPFYHLATYIYKKKNLNQTHVGMEWTT

SEQ ID NO: 247453 - protein, 58 aa, Glycine max
  Clone ID: PAT_MRT3847_6547C.1.pep
DAVGGGLIGIYIAREVYLARPCASDLKTEFVPGANDAVPDIDPVPEYLYMYRLESARW

SEQ ID NO: 247454 - protein, 191 aa, Glycine max
  Clone ID: PAT_MRT3847_65480C.1.pep
PTRPIFVIRNSEFPFKKCFLCSPFCQLFSPRSLRLLQMPAFSTPSVTLSLNPKEIELLMDTAQNCKNLSDDQQVAAFQVLAEEQGGDLKANIDNVLMKVNVSDDQFKQNIEEAKQKLSSSKAKETADQLEDLFLDGSLPFIDKVKKSVELVQELPEEIRTECEPVLMVINSITRCPFKEQCTPSEEIVAET

SEQ ID NO: 247455 - protein, 42 aa, Glycine max
  Clone ID: PAT_MRT3847_65481C.1.pep
YSSTFIHVHTILTIFFSATAKTTYLLHLLKCNLSYFIYSLIE

SEQ ID NO: 247456 - protein, 171 aa, Glycine max
  unsure (1)..(171): unsure at all Xaa locations
  Clone ID: PAT_MRT3847_65482C.1.pep
LEKFRRKLQTPQLQQLLSVVCRSHHVSIIKLLGASVSGDHIYLVYDFVNNGATLSDCLRNKNNVHFTVLSTWMSRMQVATDLAHGLDYIHNKTGLNINFVHNHIKSSSIIVTEPSFNARVCHFGAAQLCCEIELDNQKLGEPSGIDEKLTSSPARSKQFXGVRRYMAPEFQ

SEQ ID NO: 247457 - protein, 82 aa, Glycine max
  Clone ID: PAT_MRT3847_65483C.1.pep
VCQARICLPPWIDGTRAGTGPEFTAGSGSQFFLARTGWSFKVTLLNINFGASLGCRSHFVVGSPFLSFVTGSFCLMILHEPG

SEQ ID NO: 247458 - protein, 86 aa, Glycine max
  unsure (1)..(86): unsure at all Xaa locations
  Clone ID: PAT_MRT3847_65484C.1.pep
FSVVRCMKEDLLRLKNIIITLLVFDICRKYISYCHWAEKMLEVYLFKYILVLLNYFNNFYYRYIQKKIFNFFCLRLPXEKIVYETN

SEQ ID NO: 247459 - protein, 84 aa, Glycine max
  Clone ID: PAT_MRT3847_65485C.1.pep
FETSAATTTTSAPSTTTTISMMMMMTTSNRRCCSSTTNTTMSLPWLLAMLLSLLSSPFFNSYLGSKNIPCLRYCCSLTKSHISR

SEQ ID NO: 247460 - protein, 70 aa, Glycine max
  Clone ID: PAT_MRT3847_65486C.1.pep
RVTVGSHWQLLGCQMERHWNEKFTHKPKWEPIAARPVFDLYAYQMLTTLAEPCLPKKGSIGRCLSISLTE

SEQ ID NO: 247461 - protein, 113 aa, Glycine max
  Clone ID: PAT_MRT3847_65487C.1.pep
TDVNVEDQIQSTNGAVTVAFVKAGHKEAIQQRDDKFLIIAAAEAYNGVDCEDCGHFGAMKHCNDEIDARCHNMVLRNTDITAHAELTVVRKACAKLNQIELSDCEIYPACEPC

SEQ ID NO: 247462 - protein, 75 aa, Glycine max
  unsure (1)..(75): unsure at all Xaa locations
  Clone ID: PAT_MRT3847_65488C.1.pep
TNRRKPSWRERENNRRXREKEERPVTAKIYSDLXALGDYSVRQHCDNNEILKALCSEAGWAVEEDSTTYGEGCRA

SEQ ID NO: 247463 - protein, 79 aa, Glycine max
  Clone ID: PAT_MRT3847_65489C.1.pep
MQQQARAMMQQQPQMMYHRSPFVPPNTGYYYNHSSSYSPAHYSYSSYGLPGYPAAGGDDHHSAAHMFSDVNTSSSCSIM

SEQ ID NO: 247464 - protein, 96 aa, Glycine max
  unsure (1)..(96): unsure at all Xaa locations
  Clone ID: PAT_MRT3847_6548C.1.pep
KDKNYCAKNVGGPQKIKGWKSGDHNIKVDRKKNKGLENXSSLKVKNNSIYKLQKKPNPKKETGFVWNKKIMSPSRPSDQTKLKEFIQKKKKSLRKM

SEQ ID NO: 247465 - protein, 94 aa, Glycine max
  Clone ID: PAT_MRT3847_65490C.1.pep
MADTGGGDAVRPVVICDNKCGCTLPCTGGSTCRSLKFMISTKCTSAGTATGGGDHVTCSCGEHCGCNPCSCPKIAAAGSGCRCGTDCACAYCRT

SEQ ID NO: 247466 - protein, 204 aa, Glycine max
  Clone ID: PAT_MRT3847_65491C.1.pep
PRVRWSSVVDRPRQPEEIGRGGQCSNLCVSALSESEELLCCSEVHGTSGGSHKLWFCVSIQATEIAKDIHSDAIQDWCLVVKSPLIISNFLPLAAEYSVLEMQSSGHFLACSRGVFLSGKTVHIYSADIRNPLFLSLLPQRGWLPIHEAVLISHPHENPSKTISLRSSISGRVIQIILEQNYNKEHTLLAKTIRVYAPYWVEVA

SEQ ID NO: 247467 - protein, 84 aa, Glycine max
  unsure (1)..(84): unsure at all Xaa locations
  Clone ID: PAT_MRT3847_65492C.1.pep
RLLVDAQCPGRDQERPLGRRLQLGLIDAEHGQITDSDYYVANNLIASXXASPSSGCPSNXNWNQRAPXRCDGVLRPXAYPXKAF

SEQ ID NO: 247468 - protein, 60 aa, Glycine max
  Clone ID: PAT_MRT3847_65493C.1.pep
FILQLACRCTSAGTATGGGDHVTCSCGEHCGCNPCSCPKIAAAGSGCRCGTDCACASCRT

SEQ ID NO: 247469 - protein, 170 aa, Glycine max
  Clone ID: PAT_MRT3847_65494C.1.pep
RPEDNFREHCFALLQLSALPRISPSAIDYMQSQSTLLEDFLGQSLMLEYGNGSAENSGIGDVSSQEELKLYYQAQKLISLCGWKLRPLPYVVDWKDMSDQSLNNTTNLVVHSAGTNEHLKTDESSKDSIGEQMDPNSAVLDCSLCGATIGLWAFCTVPRPVESIRLRGIC

SEQ ID NO: 247470 - protein, 76 aa, Glycine max
  Clone ID: PAT_MRT3847_65495C.1.pep
ANPFSPPAGLFFSFFKGGRPKYFSPEWSVGQFPLQKGFPFVVAFGPPKKPVVIFGLGGRFFRGPFFFPPGGEMAPL

SEQ ID NO: 247471 - protein, 99 aa, Glycine max
  Clone ID: PAT_MRT3847_65496C.1.pep
FICFFGSHNKHVWLTEAIHRENWLLISFGTPMGRTTVLMKRPPLKPERRHEFIYNPIVTQDILNKLERPFHFAVLMTSTAQAPLYIAPIQKDLPAVTAE

SEQ ID NO: 247472 - protein, 154 aa, Glycine max
  unsure (1)..(154): unsure at all Xaa locations
  Clone ID: PAT_MRT3847_65497C.1.pep
QPRGSVLFVSFGSGGTLSSAQINELALGLEKSEQRFLWVVKSPNEEIANATYFSAESQADPXIAWPLFAEQRTNAFMLTHDVKVALRPNVAESGLVERQEIASLVKCLMEGEQGKKLRYRIKDIKEAAAKALAQHGSSTTNISNLALKWTHKFN

SEQ ID NO: 247473 - protein, 82 aa, Glycine max
  Clone ID: PAT_MRT3847_65498C.1.pep
NHATVCYVTYPHAYSKRGPLLIHIFCSKLLSFISISLNVPTLYLFISVALNCVSTTNEFKKPQCYQPATYTIQAIIHFHTIT

SEQ ID NO: 247474 - protein, 476 aa, Glycine max
  Clone ID: PAT_MRT3847_65499C.1.pep
MEVSKEEARVAPAPALVAMLPSPGMGHLIPMIEFAKRVVCYHNLAVSFVIPTDGPPSKAQKAVLEALPDSISHTFLPPVNLSDFPPDTKIETLISHTVLRSLPSLRQAFHSLSATNTLSAVVVDLFSTDAFDVAAEFNASPYVFYPSTATVLSLFFHLPTLDQQVQCEFRDLPEPVSIPGCIPLPGKDLLDPVQDRKNEAYKWILHHCKRYKEAEGIIGNSFEELEPGAWNELQKEEQGRPPVYAVGPLVRMEAGQADSECLRWLDEQPRGSVLFVSFGSGGTLSSAQINELALGLEKSEQRFLWVVKSPNEEIANATYFSAESQADPLQFLPEGFVERTKGRGFLVQSWAPQPQVLGHPSTGGFLTHCGWNSILESVVNGVPFIAWPLFAEQRTNAFMLTHDVKVALRPNVAESGLVERQEIASLVKCLMEGEQGKKLRYRIKDIKEAAAKALAQHGSSTTNISNLALKWTHKFN

SEQ ID NO: 247475 - protein, 145 aa, Glycine max
  Clone ID: PAT_MRT3847_6549C.1.pep
MRALRRQRFALFISGLGCRSCWTVSRFSGYAAPSLLCVGGGGAVRTQCLGGLGGSGGGVTAFMVGPFGSPSPSLFVFSSWCGTEKYSDRDRAVVGITVSGSCSAVAVADKGLWSKSFLEGCSPLCFSRGMSVSDEMRACWFRSLS

SEQ ID NO: 247476 - protein, 54 aa, Glycine max
  Clone ID: PAT_MRT3847_654C.1.pep
NIFFKKFDTPLNPFRNKNFPSGKWQVKETQLISTGPPFKTPRLYFLIYLAGKKF

SEQ ID NO: 247477 - protein, 90 aa, Glycine max
  Clone ID: PAT_MRT3847_65500C.1.pep
IKIFLIETSNRIRQGQQITTKPHIPSSNKKEVSQTQKKKKKKTMLQCLELFSAVILTFLFQTKRKKKRKEKRKTENDRHKMQQQEAGADS

SEQ ID NO: 247478 - protein, 102 aa, Glycine max
  Clone ID: PAT_MRT3847_65501C.1.pep
ELKKEKGIQTKISGSGGQYGIRVTTISGENKCACMQITKSHNKPYPKMTSLYANNNVQCLNNSMVLHSNLTHHDPRVYLVIPKKPLCQGFHLKEPDGTAQRN

SEQ ID NO: 247479 - protein, 139 aa, Glycine max
  Clone ID: PAT_MRT3847_65502C.1.pep
ALQGPVPSFEKGVKFTLDGINSFCLKDVGPCDSRISTLLDIAAGFGYPLQLARSWTGNDPCDDWSFVVCAGGKIITVNLAKQNLTGTISPAFANLTDLRNLFLNDNNLGGSIPGSLTNLAQLEVLNVSNNNLSGDVPKF

SEQ ID NO: 247480 - protein, 186 aa, Glycine max
  Clone ID: PAT_MRT3847_65503C.1.pep
EKKWQFPLIMISIVFLFFLATCFNMGLVSTIHSFNSILFFLPSRLAENQSAPVFVETKISATAPAPAAPAIPRFAYLISGSKNDLEKLWRTLLALYHPLNHYIVHLDLESPLEMRLELASRIEKQPVFSEVGNVFMIPKANMVTYRGPTMIAHTLHACAILLKRTKDWDWFINLIASNYPLVTHDG

SEQ ID NO: 247481 - protein, 71 aa, Glycine max
  Clone ID: PAT_MRT3847_65504C.1.pep
KRRSILDNKLHPMATNFIDMMRMSIPQHHSRNNQTICARSGCHSKEHQTEVAQRDPTPKAICTFSRDLLEY

SEQ ID NO: 247482 - protein, 70 aa, Glycine max
  unsure (1)..(70): unsure at all Xaa locations
  Clone ID: PAT_MRT3847_65505C.1.pep
LLNPPPPPXXXFXLXIPIWFIGPPFTMVQGNPFLEKQDSLICLKPYPWGAFQHPSKPKMGVFDFLEGLLP

SEQ ID NO: 247483 - protein, 44 aa, Glycine max
  Clone ID: PAT_MRT3847_65506C.1.pep
KKKKKKKKKKKKKKKKKKKKKKKKKKKKKKKKKKKKKKKRGGPF

SEQ ID NO: 247484 - protein, 60 aa, Glycine max
  Clone ID: PAT_MRT3847_65507C.1.pep
NERVNPNPNSGPEPENLPPFPKKIPIKPRRKQRHICFTQGNCFPITITHRTPPGKIKSKA

SEQ ID NO: 247485 - protein, 75 aa, Glycine max
  Clone ID: PAT_MRT3847_65508C.1.pep
KSRLLLGRVNHDIGQANGTYQPLSCGPTLHTSQQCNYTTTKFCEAKVLPIYKLTIKNPIVLSTIKSCLALILTCL

SEQ ID NO: 247486 - protein, 43 aa, Glycine max
  Clone ID: PAT_MRT3847_65509C.1.pep
ADYVLPEITGALGTDEPMFNMHSGRLQASLDRVEAILTHTDAP

SEQ ID NO: 247487 - protein, 50 aa, Glycine max
  Clone ID: PAT_MRT3847_6550C.1.pep
CWFGEKGCEKNEGGGLYIVRKKENFIGFFVMRICWHWRGWEESEWSQKEK

SEQ ID NO: 247488 - protein, 92 aa, Glycine max
  unsure (1)..(92): unsure at all Xaa locations
  Clone ID: PAT_MRT3847_65510C.1.pep
NYRARLGAPVLFYHSSKNLVPWGGNGEDTXLGVHDYARPTLRGFKWKGFQPGHIITIPGGIGQTWCTLPFKKVGEWGFLKRNLKPMANGLGG

SEQ ID NO: 247489 - protein, 52 aa, Glycine max
  Clone ID: PAT_MRT3847_65511C.1.pep
HFGGSIYILNYIMSASFGGVTLVLGMTCKIAVANWVLVLLLLCISNLIPSIL

SEQ ID NO: 247490 - protein, 78 aa, Glycine max
  Clone ID: PAT_MRT3847_65512C.1.pep
IAMLNWESLSSPSQLFADYQLSYFVIRPETETYVISNTKGIASQILEPRINTTLEAFTSIEHEATTCKPKSFAINSSK

SEQ ID NO: 247491 - protein, 121 aa, Glycine max
  unsure (1)..(121): unsure at all Xaa locations
  Clone ID: PAT_MRT3847_65513C.1.pep
ARASPLLVDNAHKFFEASKKGNXNSFFRWIIFENLIPGLATGCLFKEDERDAPSFLFESVDPGQIYSIDTGNSGVGTHTLYCEKLWKGEHGGXIXDHVKGRKSEEIEEDPVVIPRMIMEKW

SEQ ID NO: 247492 - protein, 242 aa, Glycine max
  Clone ID: PAT_MRT3847_65514C.1.pep
MDLDFDSTFFLNQNLSFFPENSSIFGDTFSWDYNFVLDDIFNNLSDNSSQSQTKETSSASNVSSCIGSVELQEVSSNTTYKEVKKVRPPPPSPPLPSQQVAKEPRMYRGVRKRPWGKFAAEIRDSTRNGVRVWIGTFDTAEAAALAYDQAAFSTRGSLAVLNFPEEVVRESLKDMPSKPWEEGSSPVLALKRKHTMRTKSNSKKKTKVDQREQLDFSRTSQNVLVFKNLGAEYLKQLLTLTS

SEQ ID NO: 247493 - protein, 108 aa, Glycine max
  Clone ID: PAT_MRT3847_65515C.1.pep
FSPAASFSPSYHLLSWCFIVEDILVNNIVVRGGWGTHPSFLYKGRARFAAPLILAPSLNNVSYNFHTKCVRFLLLLCPKKKRCGPLFFRGPIFPVAYWTGGYILIICF

SEQ ID NO: 247494 - protein, 53 aa, Glycine max
  Clone ID: PAT_MRT3847_65516C.1.pep
NCCNCCNGCRSYPNFTYSDYTESTTFDTLVIPVKPDYAEAEVAEPAENDDNNC

SEQ ID NO: 247495 - protein, 589 aa, Glycine max
  Clone ID: PAT_MRT3847_65517C.1.pep
MVWVNEKLKGFVGHRWVVFVCAMWDMSFAGTSYMFGSISPVIKSSMGFNQKQVAFLSVAKDLGDNVGLLAGKICQSSPIWALILVGVVQNVVGYGLVWLIVTHQFPALPLWLLCILIFVGQNGSTYYNTAALVSCVQSFPESRGPVVGILKGFVGLSGAIWTQLIAMAQLPDQASLIFIIAVGPAMVSLAFMFIIRPVESYRQSRASDGTGFTFIYSICLLLAAYLMGVLLLENMFDLDQSTITLFAVILIILILLPIIVPILLVFFSGPQKSADQEALLEPPMLEATKPNKHFVGESSSSTTKVIKHVENEKSPSKLEVLPLSSEGPRDVFQCQARLWQAVTKAVKKIKRRNGPHRGEDFTLSQAMAKADFWVMFFSLVMGCGSGLTIINNMGQICQSLGDNNVNVYVSVISISNFLGRVGGGYFSEVIVRSFGYPRLAALAVIQAGMSLGLCYYVFGLAGQVYAVAISNGFGYGAHWSIALAAASELFGLKNFGTLYNFLTMASPAGSLFLSGFVASTIYDYYAEQQVKHRMLTGNNNDLLLCEGNICFSITFGILAVVCLCAASLSLIVAHRTRKFYAQLYEESQT

SEQ ID NO: 247496 - protein, 84 aa, Glycine max
  Clone ID: PAT_MRT3847_65518C.1.pep
YIVTVETFLSFVSSTPFVAFVNSHPLVFLLNQDPLVFFVQPYPLVVFLNPISFSLSYDIQYPSSVLSHQYPSVVLSHPYPSFVL

SEQ ID NO: 247497 - protein, 50 aa, Glycine max
  Clone ID: PAT_MRT3847_65519C.1.pep
RFAMPEEWCFNITFTIIFFLTTFLAIVITTHFSFTITVLNLVQIQRLYTL

SEQ ID NO: 247498 - protein, 175 aa, Glycine max
  unsure (1)..(175): unsure at all Xaa locations
  Clone ID: PAT_MRT3847_6551C.1.pep
FLSPCLVESKYKGQVQLMLKYIENGDLRRWSLPGIRVFNIGLSEWRSXLLELSAEGLIAKGNSCVSARQNAANKLLEKVFRVRXLGVRADGNSNLSDEIGKLLSVKSAATGLSDRPIGAVIFMQRNNLIMCLRSTDSSTDTSEVAKAYGGGGSPSSSSFIIRLDEYNQWISGRDR

SEQ ID NO: 247499 - protein, 134 aa, Glycine max
  Clone ID: PAT_MRT3847_65520C.1.pep
RADTNFQKIDHFQESDSILPADQNHHIPTTSNRCAEEIGEEITKVRDLLSEYDCKIGKLTLARLLSALDSLSFQYDGRKSNTEEVLQLYTDLMKLDPTHYLYYKDEHSLISLKRITSTRDSLLPYCHYYKDATE

SEQ ID NO: 247500 - protein, 81 aa, Glycine max
  Clone ID: PAT_MRT3847_65521C.1.pep
LKTVTKAKTGTTRIRLIPQTIGQKLNPKEGVLAIRHDRNTWMWRGETQPNEEKLSLGKTWIHIHKKKGLPKGTQNFDGKTR

SEQ ID NO: 247501 - protein, 61 aa, Glycine max
  Clone ID: PAT_MRT3847_65522C.1.pep
SAVGLLLLFYIDIIILEILLPHYIGVVIDTVTLVDCLIIGCCLEIDPHSAKCNAGHMPIHT

SEQ ID NO: 247502 - protein, 134 aa, Glycine max
  unsure (1)..(134): unsure at all Xaa locations
  Clone ID: PAT_MRT3847_65523C.1.pep
MVLICACITTNGLETVMGRLGHRPSVEQGPDLTNEVAADGNRTIDFPKLLNLMLRXKRTTSPSDEELTEAIHVLYKDQRXCTSAVDLRQXMTNLGERLSVDHVDYNILEADDVGDGQINCQEVDIIQMVKRGPF

SEQ ID NO: 247503 - protein, 53 aa, Glycine max
  Clone ID: PAT_MRT3847_65524C.1.pep
KTWRWISSTVNQNLKGAPTTRGRLLTQLISNARICVNTPAWAQTPKAILLSSI

SEQ ID NO: 247504 - protein, 104 aa, Glycine max
  Clone ID: PAT_MRT3847_65525C.1.pep
YIYFLLITLHCIIKSLLFLFLWLGAATTVSTSALSQFSRVQTVVTLRKMIQNFQYTSEVPTFGTHVCTYSSAVIGRSYTQKGDAERCAVSLKSIRLCPCYHCPA

SEQ ID NO: 247505 - protein, 522 aa, Glycine max
  Clone ID: PAT_MRT3847_65526C.1.pep
MGQSPSTSAAPPSDLNRLQIAQLHPNTDSDSTDYTLRLSDDCLAAIFHFLNTADRKRCSLVCLRWRLVDGQRRHRLSLNAQPELLDFVPSLFNRFDSVTKLALRCDRKCASINDEALVLISLRCRNLTRLKLRGCRDITELGMAGVGDNCKALKKLSCASCMFGAKGIAAVLDRCFTLEDLTLKRLRGVHHIGDMAVGAAASLKSICLKELVNGQSFAPLLIGSKKLQTLKVIGCTGDWDETLVRVGCSNNGLVEVHLEKLQVTDVGLVAVSKCLGLDTLHVVKTAECSDVGLCAVAERCKLLRKVHIDGWRTNRIGDDGLVAIAKHCLNLQELVLIGVYPTFSSLAAIASNCGNLERLTLCGIGTVGDAEIECIADKCVALRKLCIKGCPVSNAGIGALASGCPNLVKLKVKKCKRITGKGVEWVREQRVSLAFNYDDSEFEALDGGASDGVGGAQHNTVEFLPNIINQTTVAEAEASSSNNNNRMTMLRSRFGFSAGRNLVPGAFRRWSNSDNVSSSSFG

SEQ ID NO: 247506 - protein, 70 aa, Glycine max
  Clone ID: PAT_MRT3847_65527C.1.pep
FNTVLSKLNVAIPTESIKIVFFFWEYPTRDYLFSRELPGSGDSTIYPGNLTQEFFILGISNTNSYLHIFI

SEQ ID NO: 247507 - protein, 30 aa, Glycine max
  Clone ID: PAT_MRT3847_65528C.1.pep
TKVCGVVRESILGMQPFGNPSKSIVSTHSP

SEQ ID NO: 247508 - protein, 85 aa, Glycine max
  unsure (1)..(85): unsure at all Xaa locations
  Clone ID: PAT_MRT3847_65529C.1.pep
VLQRKTEEAAMATKKLKELLEARKTSTQXNLSSLNGRGTNGPSNDKSFQRGLGHELEVTGKKHEIGFEDDKQSPVPAALAEELAL

SEQ ID NO: 247509 - protein, 68 aa, Glycine max
  Clone ID: PAT_MRT3847_6552C.1.pep
IWVWIELLAMQYFFSSSLPCAHIWKHIKLKHAVVRETNLDHIVIETWLRLAPLMLLFDMLPTDIMNGH

SEQ ID NO: 247510 - protein, 526 aa, Glycine max
  Clone ID: PAT_MRT3847_65530C.1.pep
MGQSPSTTAAPPPDLNRHQIPQIHPNTDSDFTDYTLRLSDDCLAAIFHFLSTADRKRCSLVCRRWLRVDGQRRHRLSLNAQPELLDFVPSLFNRFDSVTKLALRCDRKCASINDDALVLISLRCRNLTRLKLRGCRDITELGMAGVGENCKALKKLSCASCMFGAKGIAAVLDRCVTLEDLTLKRLRGVHHITDVEVGAAASLKSICLKELVNGQSFAPLVIDSKKLRTLKIIGCTGDWDETLVRVGCFNNGLVEVHLEKLQVTDVGLVAVSKCFGLDTLHVVKTAECSDVGLCAVADRCRLLRKVHIDGWRTNRIGDDGLHAIAKHCLNLQELVLIGVYPTFSSLAAIASNCRNLERLALCGIGTVGDAEIECIADKCVALRKLCIKGCPVSNAGIGALASGCPNLVKVKVKKCKRITGKGVEWVREQRVSLAFNYDDSEVEALDGSASDGIGGARDNTVEFLPTINQTTVAVAEADAEASSSNNNNRLTMLRSRFGFLAGRNLVPGAFRRWSNGDNVSSSSSFG

SEQ ID NO: 247511 - protein, 62 aa, Glycine max
  Clone ID: PAT_MRT3847_65531C.1.pep
EARGIVLNGLTHSFLGKLRLEYGGDICQTSVSKQLEETYPDSSMTSHSFQRHVVELTSLSSL

SEQ ID NO: 247512 - protein, 68 aa, Glycine max
  unsure (1)..(68): unsure at all Xaa locations
  Clone ID: PAT_MRT3847_65532C.1.pep
MTSRSPXLXXXIDXGNPXLXLXVXGFLKIXSVAATRSXAEXTXHIIRNXNISXHXFEXTLXKMCKXVY

SEQ ID NO: 247513 - protein, 59 aa, Glycine max
  Clone ID: PAT_MRT3847_65533C.1.pep
EEDVRTHKHFHCFITNVLSYEAHGYRMRISGYEYVDICQIHQTQFGHERRYHDIVSDTG

SEQ ID NO: 247514 - protein, 66 aa, Glycine max
  unsure (1)..(66): unsure at all Xaa locations
  Clone ID: PAT_MRT3847_65534C.1.pep
AVVNLCQHHLFLWPCFYPPPLLLVPMFCPLDFWFKTKKTCTGLCEFRCLFSSFAFHFVSSMLLXXX

SEQ ID NO: 247515 - protein, 274 aa, Glycine max
  Clone ID: PAT_MRT3847_65535C.1.pep
MSATASLCATSRTTFSSSKPVARRSCFVAVPKIAFPKLRFKPVAMATLGARMVAAAPTVTPPASLDFETSVFKKEKINLAGHDEYIVKGGRDLFPLLQGAFKGIKQIGVIGWGSQGPAQAQNLRDSLADAKSDIVVKVGLRKGSRSFNEARAAGFSEENGTLGDIWETISGSDLVLLLISDAAQADNYEKIFSHMKPNSILGLSHGFLLGHLQSIGLDFPKHFSVIAVCPKGMGPSVRRLYVQGKEINGAGIISSFAVHQDVDGRATDVALAWS

SEQ ID NO: 247516 - protein, 158 aa, Glycine max
  unsure (1)..(158): unsure at all Xaa locations
  Clone ID: PAT_MRT3847_65536C.1.pep
DVSTSVQPSTVLVRPENIHSMCTRAKAGIVKPRXNLHSLLMLTKSTKSALACPIWHAAMRAEYDALLNNQTWTLVDLPLSXSPIGCKWVLRVKKNPDGTVSKYKARLVAKGFHQRLGYDYNETFTPVIKLVTVKIRLTLAITHKWKLQQLDALLSSSR

SEQ ID NO: 247517 - protein, 809 aa, Glycine max
  unsure (1)..(809): unsure at all Xaa locations
  Clone ID: PAT_MRT3847_65537C.1.pep
VTTDIESLMSANIGSSHVFERDSHTSPGRIVDRPGGMSRMDRRGDVVMEDDRWSRVSGAFRSGRGLDGIGGNVGFRSGQGGNFGFXRNPRVQRPTQDDGXTLSGQGNSGGDHGGRNNPDGERWQRSASFQQRGLIPSPTQTPLQMMHKAENKYEVGKASHVEEVKQRQLKAILNKLTPQNFDRLFEQVKAVNIDNAVTLTGVISQIFEKALMEPTFCEMYANFCLHLASVLPDFSEDNEKITFKRLLLNKCQEEFERGEREEEEANKADEGEVKQSAEEREERRIKARRRMLGNIRLIGELYKKKMLTERIMHECIKKLLGQYQDPDEEDIEALCKLMSTIGEMIDHPKAKEHMDAYFEMMRSLSNNMNLSSRLRFMLKDVIDLRKNKWQQRRKVEGPKKIEEVHRDAAQERQAQAGRPGRGLGNNQSARRNPMDFGPRGSSMLSSPNSQMGGLRGLPTQVRGYGAFQDARFEERQSYEARTLAVPLPQRPSGDDSINLGPQGGLARGMSTRGSTAISNLPISDVLPVHGDSHRMNTGLNGHSNLSERTPYSSREDHVSRYGTDRSSGPSAYDQSSAPEHNVNHGNRGLRSEDRNLEPLAHLQGSIVSQNASSEKIWPEERLRDMSLSAIREYYSARDENELALCVKDLNSPSFHPSMVSLWVTDSFERKDAERDLLAKLLVNLVKSQHGTLNQVQLIKGFESALSTLEDAVNDAPRAAEFLGRIFAKAITENVVSLKEIGQLIHDGGEEPGSLLEVGLAADVLGSTLEVIQSEKGDAVLNEMRSGSNLRLETFRPPNAKTSRKLEKFI

SEQ ID NO: 247518 - protein, 61 aa, Glycine max
  unsure (1)..(61): unsure at all Xaa locations
  Clone ID: PAT_MRT3847_65538C.1.pep
KKENFFAXMKGCKLPQRPKKRAKIIQRSLLLVSPGAWLADMCQDRYEVREKKSNKKRPRGL

SEQ ID NO: 247519 - protein, 71 aa, Glycine max
  Clone ID: PAT_MRT3847_65539C.1.pep
EIGQLIHDGGEEPGSLLEVGLAADVLGSTLEVIQSEKGDAVLNEMRSDFNLRLETFRQPNAKTSRKLEKFI

SEQ ID NO: 247520 - protein, 40 aa, Glycine max
  Clone ID: PAT_MRT3847_6553C.1.pep
FDLATLNEGVLYPSGSFSDFYQTKLIRDRHFSFAIICFIF

SEQ ID NO: 247521 - protein, 107 aa, Glycine max
  Clone ID: PAT_MRT3847_65540C.1.pep
LKGPPKKGKSPFKSAKLVEPFFVILSTGGPPKNQPGVELSKCVLKFTRFSHYIQKNFRKCLYLCWELISQKPRLKIFYLLHSNCYKFAFGFLIIYVSNSNSPFGPAS

SEQ ID NO: 247522 - protein, 73 aa, Glycine max
  Clone ID: PAT_MRT3847_65541C.1.pep
IVPRWWQGFLQRQNWEILVQNMDIIMLMPHHHHCRTLTHHHMPQNFYTFSTSLRYLLVLELACSIIFLSIWKV

SEQ ID NO: 247523 - protein, 78 aa, Glycine max
  unsure (1)..(78): unsure at all Xaa locations
  Clone ID: PAT_MRT3847_65542C.1.pep
KHVYEMAGMKGYSGHFDDETIEAIRNHPDVDYIERDSEVHTLGHDEPEIEKNSPWGLARXSHRDSLSFGTWNKYLYAA

SEQ ID NO: 247524 - protein, 47 aa, Glycine max
  unsure (1)..(47): unsure at all Xaa locations
  Clone ID: PAT_MRT3847_65543C.1.pep
AKELHSVXRRLGEKCSLSDCRRMIGNVDADGDGNVNFEEFKKMMTRS

SEQ ID NO: 247525 - protein, 58 aa, Glycine max
  Clone ID: PAT_MRT3847_65544C.1.pep
RIKMLSNIPNTSLSNTLHLLSPLKLSLKIGLSTYQLSNLKIGSLTTKAHFQPNKTGDD

SEQ ID NO: 247526 - protein, 85 aa, Glycine max
  Clone ID: PAT_MRT3847_65545C.1.pep
NQHLELGLLCITGAGARKHLCCFSYEMDTKQSSVTVTLNYCAFTFTTEFLATILAYAVIKASLLAPDLYLLLLINTPTAKGYSKI

SEQ ID NO: 247527 - protein, 41 aa, Glycine max
  Clone ID: PAT_MRT3847_65546C.1.pep
RKIVREQLITCMEILVNQHVHRAFLGSLQSTRYSCGETGER

SEQ ID NO: 247528 - protein, 72 aa, Glycine max
  Clone ID: PAT_MRT3847_65547C.1.pep
VLLNTLYNLGGLRVSSINLERTFFFVPSYKRYMFCKNTYKFPKERGTFIKKCRKKKNRLVYEGRKHRENSPN

SEQ ID NO: 247529 - protein, 133 aa, Glycine max
  Clone ID: PAT_MRT3847_65548C.1.pep
APTSWLSRRTIITRTIQTVITHSSCQSRALLCRALTLVAPVSAVVLTPTRITNTTLLHVLLTNPRTFSISSCSRAMRTFYLSSPLECTLSRIHLPPSFLPLPTPPAFSAAVRASLPPPSNCPPPPPKKEDVIQ

SEQ ID NO: 247530 - protein, 40 aa, Glycine max
  Clone ID: PAT_MRT3847_65549C.1.pep
LTGPYSPFKNGETCCSIYFKKPANTRIENCSPLSAMFFFF

SEQ ID NO: 247531 - protein, 79 aa, Glycine max
  Clone ID: PAT_MRT3847_6554C.1.pep
KIILLFVLFGKWQLIKTFPSIRYFISILSPSAFTDNSVGFVVSYVLFFFFFFFFFFFFFFFFFYFFFFFFFFFLILQSV

SEQ ID NO: 247532 - protein, 42 aa, Glycine max
  Clone ID: PAT_MRT3847_65550C.1.pep
PFFMLEPLDTPQSPAMMLRSDFFNLNHRSLHYFHIKQMLRVK

SEQ ID NO: 247533 - protein, 40 aa, Glycine max
  Clone ID: PAT_MRT3847_65551C.1.pep
REKNSLCFIEVIVHKDDTSKELLQLGCIFAAFNSRPPKDH

SEQ ID NO: 247534 - protein, 74 aa, Glycine max
  unsure (1)..(74): unsure at all Xaa locations
  Clone ID: PAT_MRT3847_65552C.1.pep
SAGYDHSTFICRYVRTXLPGSNIPEETIPNEAAYQIINKETMLDVNPLTNLASLETPWMEPECAQLIMAATYQN

SEQ ID NO: 247535 - protein, 54 aa, Glycine max
  Clone ID: PAT_MRT3847_65553C.1.pep
IYMGMTPLGETLPRYYHCLNANKSHHHMQYQKFRSEILALLSCHCLFQLYRKFS

SEQ ID NO: 247536 - protein, 79 aa, Glycine max
  Clone ID: PAT_MRT3847_65554C.1.pep
NKAFLLISLHTQKHCLPIQTRSKNRMYHTLTHGSAIMREPQVLQELNSVAQTWGVYPLLEVPPMTVTTECTETKFVAYD

SEQ ID NO: 247537 - protein, 56 aa, Glycine max
  Clone ID: PAT_MRT3847_65555C.1.pep
FVFNWLNLISPKLCKFGLWSLGRCFILIYPPPVVYIYSSKNIPPNHGKVKKLLFFF

SEQ ID NO: 247538 - protein, 526 aa, Glycine max
  Clone ID: PAT_MRT3847_65556C.1.pep
MEDPYVLGWILCSVLSLLALYSLAFGGAGRRRASPEKRNELSETVTTSAGECRSEKRNGDADVIIVGAGVAGAALAHTLGKDGRRVHVIERDLSEPDRIVGELLQPGGYLKLIELGLEDCVDKIDAQQVFGYALFKDGKHTRLSYPLEKFHSDVSGRSFHNGRFIQRMREKAASLSNVRLEQGTVTSLLEEKGVIKGVQYKTKDSQELSAYAPLTIVCDGCFSNLRRSLCNPKVDVPSHFVGLVLENCELPCANHGHVILGDPSPILFYRISSTEIRCLVDVPGQKVPSISNGEMGKYLKTMVAPQIPPQLYDAFIAAVDKGNIRTMPNRSMPADPHPTPGALLMGDAFNMRHPLTGGGMTVALSDIVVLRNLLRPLSDLNDAPTLCKYLESFYTLRKPVASTINTLAGALYKVFCASPDLARKEMRQACFDYLSLGGLFSEGPVSLLSGLNPRPLSLVLHFFAVAIYGVGRLLLPFPSPKRVWIGARLISGASAIILPIIKAEGIRQMFFPATVPAYYRTPPVAQ

SEQ ID NO: 247539 - protein, 526 aa, Glycine max
  unsure (1)..(526): unsure at all Xaa locations
  Clone ID: PAT_MRT3847_65557C.1.pep
MADLSVLGWILCSALSLFALYSLAFGGASRNRASPEKRNELSETVTTSAGECRSEKHHGDADVIIVGAGVAGASLAHTLGKDGRRVHVIERDLSEPDRIVGELLQPGGYLKLIELGLEDCVDKIDAQQVFGYALFKDGKHTRLSYPLEKFHSDVSGRSFHNGRFIQRLREKAASLANVRLEQGTVTSLVEREGTIKGVQYKNKDXQELTTYAPLTIVCDGCFSNLRRSLCNPKVDIPSCFVGLVLENCELPCANHGHVILGDPSPILFYPISSTEIRCLVDVPGQKVPSISNGEMEKYLKTMVAPQIPPQLYDAFIAAVDKGNIRTMPNRSMPADPHPTPGALLMGDAFNMRHPLTGGGMTVALSDIVVLRNLLSPLSDLNDAPTLCKYLESFYTLRKPVASTINTLAGALYKVFCASPDLARKEMRQACFDYLSLGGLFSEGPVSLLSGLNPRPLSLVLHFFAVAIYGVGRLLLPFPSPKRVWIGARLISGASAIILPIIKAEGIRQMFFPATVPAYYRTPPVAQ

SEQ ID NO: 247540 - protein, 198 aa, Glycine max
  unsure (1)..(198): unsure at all Xaa locations
  Clone ID: PAT_MRT3847_65558C.1.pep
NRSMPADPHPTPGAFXMGDAFNMRHPLTGGGMTVALSDIVVLRNLLRPLSDLNDAPTLCKYLESFYTLRKPVASTINTLAGALYKVFCASPDQARKEMRQACFDYLSLGGLFSEGPVSLLSGLNPRPLSLVLHFFAVAIYGVGRLLLPFPSPKRVWIGARLISGASAIILPIIKAEGIRQMFFPATVPAYYRTPPVAQ

SEQ ID NO: 247541 - protein, 125 aa, Glycine max
  Clone ID: PAT_MRT3847_65559C.1.pep
MNCFFLKNKSKSDAELPKRRKKKNQVGNNGASKSSTSSPLPSPRSIKELYKENEHNFRIFTLQELVDATHGFNRMLKIGEGGFGKVYRGTIKPHPEDGADPIVVAIKKLNTRGLQGHKEWLAEVQ

SEQ ID NO: 247542 - protein, 129 aa, Glycine max
  unsure (1)..(129): unsure at all Xaa locations
  Clone ID: PAT_MRT3847_6555C.1.pep
RVAGVEKLMLERTHLLLARXSRMALSXTEVRIVECVTLSGFPLTVICNSIFNEMLIRYTYKKLLRQAKAPSMFLQSFKNNVSLCVYGDDYXICVHEYGKTNFSGSKLKSFIAGHNSTITDGVDKTRASL

SEQ ID NO: 247543 - protein, 147 aa, Glycine max
  Clone ID: PAT_MRT3847_65560C.1.pep
LNDAPTLCKYLESFYTLRKPVASTINTLAGALYKVFCASPDLARKEMRQACFDYLSLGGLFSEGPVSLLSGLNPRPLSLVLHFFAVAIYGVGRLLLPFPSPKRVWIGARLISGASAIILPIIKAEGIRQMFFPATVPAYYRTPPVAQ

SEQ ID NO: 247544 - protein, 235 aa, Glycine max
  Clone ID: PAT_MRT3847_65561C.1.pep
MGRSPCCEKAHTNKGAWTKEEDHRLISYIRAHGEGCWRSLPKAAGLLRCGKSCRLRWINYLRPDLKRGNFSLEEDQLIIKLHSLLGNKWSLIAGRLPGRTDNEIKNYWNTHIRRKLLSRGIDPATHRPLNDSSHQEPAAVSAPPKHQESFHHERCPDLNLELTISPPHHPQPDHPHLKTLVTNSNLCFPCSLGLHNSKDCSCALHTSTANATATGYDFLALKTTVVLDYRTLHMK

SEQ ID NO: 247545 - protein, 76 aa, Glycine max
  Clone ID: PAT_MRT3847_65562C.1.pep
ESSKSMTAVKGGYYMVFVAVQLCRNNIGPGVFRNGILAYEDMLEFFFYKYQQQNISYLYTKVQGVAVPDAWVDGES

SEQ ID NO: 247546 - protein, 95 aa, Glycine max
  Clone ID: PAT_MRT3847_65563C.1.pep
SGNFLVLVFPREGERHFHSPHVGALGGQAKHWLFVRKRNFFGPGLMECKRNKVFFFFGDGEFGVRPTLVFNFHYKLFFKGRRPPINNESKKINHM

SEQ ID NO: 247547 - protein, 262 aa, Glycine max
  unsure (1)..(262): unsure at all Xaa locations
  Clone ID: PAT_MRT3847_65564C.1.pep
PSELDCHFAFFDPSHPLISNQLRRYLIFAILLWRWLEKVVLVPPSIKHLLFDXYLKKGFLLLIPGMTVLCLVTLAASLAARQGPTSMAAFHACLQIWLAVSLLSDGLAVAGQAILMGAWLKKDFNRATATASRVLQMGLVVGLALAFILGTGLHFGAKIFTQDANVLHLIQIGIPFIAVTQPLNSLAFVFDGVNFGASDFAYSAFSMVVVAILSIISLLILSSAGGFIGIWVALTIYMGLRAFAGFLRIGTGSGPWEFLRSS

SEQ ID NO: 247548 - protein, 135 aa, Glycine max
  Clone ID: PAT_MRT3847_65565C.1.pep
YSLISSFVCQSKLEMFRITESDMGCLPSSFMNLRRQRYLRVLDPRELRMIESGSVDVIDCKSLKHALVLAEQFKYISSGVGIQNYQGLVEESVVVALDAISSTVETVFDHSELIDDKRYISIDERKLKPLKRIDE

SEQ ID NO: 247549 - protein, 67 aa, Glycine max
  Clone ID: PAT_MRT3847_65566C.1.pep
VGSSHFSEMVLKEDMMCDSSASLGLVNFFNKNAHERQFSFEQRKFGSMLNGMTLIKKLLKQQRVQPI

SEQ ID NO: 247550 - protein, 144 aa, Glycine max
  unsure (1)..(144): unsure at all Xaa locations
  Clone ID: PAT_MRT3847_65567C.1.pep
FGSSDPRVLDQFDLKAWVYVSQDFDVVALTKAILKALRSLAAEEKDLNLLQLELKQRLMGKKFLLVLDDVWNENYWSWEALQIPFIYGSSGSRILITTRSEKVASVMNSSQILHLKPLEKEDWWKLXVNLAFHDKDAKYPNLVS

SEQ ID NO: 247551 - protein, 99 aa, Glycine max
  Clone ID: PAT_MRT3847_65568C.1.pep
SLLGMFDHFDEDSNGSIEPNELTKVVDHLVLALKEQEIEHGLQYWDLNASKGIHFNEYTLIICQIHLLLEAKFSVISSIDEISLYGDIFNTINEVMFSL

SEQ ID NO: 247552 - protein, 61 aa, Glycine max
  Clone ID: PAT_MRT3847_65569C.1.pep
INCLKPFAHKKKFPKRVCQNIYWEDDEHLIHLLWVIFFTILHERVFFSPGYTNGSFWVVFI

SEQ ID NO: 247553 - protein, 88 aa, Glycine max
  unsure (1)..(88): unsure at all Xaa locations
  Clone ID: PAT_MRT3847_6556C.1.pep
MIMNSLKNSSIKGASPNQMFWKKLFNPKKIGKLMQKQKYKGRVPLRDLFSKVGKKKGGTKGKKESSXVLGIKVVRNRIIMGEIQTEKD

SEQ ID NO: 247554 - protein, 56 aa, Glycine max
  Clone ID: PAT_MRT3847_65570C.1.pep
RPITFLYDHEPLTTLMECEVVCPLTYLIKTESYMPDVHPKNPRFFTTIILSTHSAI

SEQ ID NO: 247555 - protein, 63 aa, Glycine max
  unsure (1)..(63): unsure at all Xaa locations
  Clone ID: PAT_MRT3847_65571C.1.pep
MTPGMQRDGDPERAQARKGGKGXQKNHGWTLEQRRERKGKVLQXKPSKKAAQDAGGFYAGGPP

SEQ ID NO: 247556 - protein, 85 aa, Glycine max
  Clone ID: PAT_MRT3847_65572C.1.pep
LRKKKILRRDSKVKPFHSANFNKLPQIPMNRVSTNWADQVESFEEERREYHQDDRRESGHSHRSWDRHVAPSDRPRRNYEDREPR

SEQ ID NO: 247557 - protein, 332 aa, Glycine max
  Clone ID: PAT_MRT3847_65573C.1.pep
ICELIPEGTSRLIALFPAIGILLLLPLRLISVHLGGPSAFFLGWLSTFKLILFAFGKGPLSSNPPLSLPHFVPIACLPIKFEHDPKHQIPQKKHKSPFSYASTSMVIILAALIPLYGKKEYFHPKFVFFLYGLHMYIGLEFIFATVSAATRKLIGVQLEPQFKEPYLCTSLQDFWGRRWNIMVNRVLHPTVYDPVKNLSARVLGRKWAPLPAILASFAVSGMMHELVFYYIKREKRTWEVWEPSWDATCFFLIHGVCVAMEVGIKKSLRGKKQWQVPRVLSWMLTLLFVLYTAMAFFLPALARCRVYEKATRELTALTQFLKHLYALPSLVR

SEQ ID NO: 247558 - protein, 175 aa, Glycine max
  unsure (1)..(175): unsure at all Xaa locations
  Clone ID: PAT_MRT3847_65574C.1.pep
PPPPTPPPPQTPPTPPFSTPPPAPPHTSPPPQVAPLLPVTPPRRXPLTTAPHRLLGLPTNLKKRFLPEPRSPRLPQKKNDSFGLVPQGILVPIKVGFFSGLRGLLFKGACFSAKILSFPPPFATVVPKTGFFIPGGKIPFIYLGFKVLGLSEPPITFLLSPTNFRPFLRWGALVY

SEQ ID NO: 247559 - protein, 84 aa, Glycine max
  Clone ID: PAT_MRT3847_65575C.1.pep
EHTTRYISKRAIDYWSAKTPSGSPTLRRRFVSLRTLSLMCTEVRFSWKRGRNMRRIVAQRFGSTRLVSRMPSSSAAISSSVHST

SEQ ID NO: 247560 - protein, 126 aa, Glycine max
  Clone ID: PAT_MRT3847_65576C.1.pep
ELYEDSPGSSEYSTGSTLLPHSAGEDLEHSLHQDIGTELNIQIEDSEGVRGCDQGVLSSATLDQDLFPSCEEQINNDAIVSALSSSAEFSSPLQVTPLFRSLAAGIPSPQFSESERSFLMKTLGME

SEQ ID NO: 247561 - protein, 43 aa, Glycine max
  Clone ID: PAT_MRT3847_65577C.1.pep
EGLFFVVARCLIIVVSETHESTSADVVSIHELINHSDRAGGTQ

SEQ ID NO: 247562 - protein, 57 aa, Glycine max
  Clone ID: PAT_MRT3847_65578C.1.pep
SYRDSEHTFLRQTVSPNRLSKTSLLVVMVFVVVMFLETVTKARSSVSERELSSQQRI

SEQ ID NO: 247563 - protein, 89 aa, Glycine max
  Clone ID: PAT_MRT3847_65579C.1.pep
WERWYQTIAFWGGNRDSISFIVLIMSLLVTMTRMANPLFFFFCRLGKPCSTGTVSFIIQSMASWSSMYRILSLASMLYSISISDKCVCF

SEQ ID NO: 247564 - protein, 68 aa, Glycine max
  unsure (1)..(68): unsure at all Xaa locations
  Clone ID: PAT_MRT3847_6557C.1.pep
RXXXXXXXXRGCQXEXAQHRYGXHSLXXTNYPTIFLXLQLQTXXXMXNTXCWXLSLFLDPXKGYWAXX

SEQ ID NO: 247565 - protein, 51 aa, Glycine max
  Clone ID: PAT_MRT3847_65580C.1.pep
PKNLYFQSSAIVVTMSALSDKWSYGESGKNSWNYAQTINNSLFLSEVELVL

SEQ ID NO: 247566 - protein, 66 aa, Glycine max
  Clone ID: PAT_MRT3847_65581C.1.pep
RPEAVTLLHCWRFAEKGYPRDHSWSKTPAIYVKGGMTFLNSTKRNIAMLTKKNSLLALNFILRRSL

SEQ ID NO: 247567 - protein, 163 aa, Glycine max
  unsure (1)..(163): unsure at all Xaa locations
  Clone ID: PAT_MRT3847_65582C.1.pep
KFQNSSLMDQRISVFKKPPFFEHLLEIKGSPSXXKPFLAKGFXXAXKNYYFPXEKKXXXNPKXXXXXXXXXXXNPPQSFFFFFCPHGKEDLDFFPPPFTKGQKSSLQWVRFLKGGGQPNFLKYKGKRGFFKKKGNNWKFHFPNLKXKKKKKKKKKERGGGGGG

SEQ ID NO: 247568 - protein, 71 aa, Glycine max
  Clone ID: PAT_MRT3847_65583C.1.pep
MKNNRASGILKLIAALRSMAKSKSLALKSKTNAIKARLVIFSLVMNKRYVMSTISDKFQSLLGHHHSHLKE

SEQ ID NO: 247569 - protein, 84 aa, Glycine max
  Clone ID: PAT_MRT3847_65584C.1.pep
FRLCSISNEGMSCATDAASLAVKAVVAVRKISICLRPALVSAVKGLSARGLHGEGVALRPTSRRAERVETGDIVIAQTIVATSL

SEQ ID NO: 247570 - protein, 88 aa, Glycine max
  Clone ID: PAT_MRT3847_65585C.1.pep
FQPLKEAMAWNNLVPQGLSSSIFTQRPGIIFKWVGPRGRDWGKGNANIPPKGAEMGGALGGKKATGGGREAGSDSWKQYMGGFTGPLN

SEQ ID NO: 247571 - protein, 34 aa, Glycine max
  unsure (1)..(34): unsure at all Xaa locations
  Clone ID: PAT_MRT3847_65586C.1.pep
GHSNQIVSLGSSFMSSENLRNRACSXPKNSAXXX

SEQ ID NO: 247572 - protein, 61 aa, Glycine max
  unsure (1)..(61): unsure at all Xaa locations
  Clone ID: PAT_MRT3847_65587C.1.pep
LMNHIEELKFASKSLQRQSRKCEEEEKSDKQKMKKAVTKGCMAGTHIYAAKAIRERXEQMN

SEQ ID NO: 247573 - protein, 69 aa, Glycine max
  Clone ID: PAT_MRT3847_65588C.1.pep
LGAQAHIGAFSQCFFCNTHINKSYVVDLQQHHDLQNSIFLSTIREKVSFRQESFFIKVSRCMVEYQGNA

SEQ ID NO: 247574 - protein, 100 aa, Glycine max
  Clone ID: PAT_MRT3847_65589C.1.pep
HACGLQSYLIPSYEDPYHTHTLGTWGHLHGTPTFIHLFKSTVDMECYDPQNGGKHFVLPVINSSYGGIRLAVSVIEKIPLTVLQSVHPFVNEISSIFSTP

SEQ ID NO: 247575 - protein, 57 aa, Glycine max
  unsure (1)..(57): unsure at all Xaa locations
  Clone ID: PAT_MRT3847_6558C.1.pep
FIXFFYEEKIKAGFFPNSSRPKRAQTARARIALNNTRKVELNSKELGPIKFLALQTL

SEQ ID NO: 247576 - protein, 92 aa, Glycine max
  Clone ID: PAT_MRT3847_65590C.1.pep
LSGKVACTADGVVEASGMLKSRRSKNEAATGTERGGNNSEKWNVFDVLRVFSQNNDDVEENHDHLSLLDVAKAHGVTFPRPRWWPDDDKFEP

SEQ ID NO: 247577 - protein, 218 aa, Glycine max
  Clone ID: PAT_MRT3847_65591C.1.pep
MVKLTMIARVTDGLPLAEGLDDGRDLKDAEFYKLQVKALFKNLSRGHYEASRMSVETGPYVFHYIIEGRVCYLTMCDRAYPKKLAFQYLEELRNEFERVNGSQIETAARPYAFIKFDTFMQKTRKLYQDTHTQRNIAKLNDELYEVHQIMTRNVQEVLGVGEQLDQVSQMSSRLSSESRIYADKARDLNRQALIRKWAPVAIVFGVVFVLFWIKNKLW

SEQ ID NO: 247578 - protein, 218 aa, Glycine max
  unsure (1)..(218): unsure at all Xaa locations
  Clone ID: PAT_MRT3847_65592C.1.pep
MSHQAESSDSKSWKKDFSTAILERKKSPNRLVVDEAVNDDNSVVAMHPQTLEKLQLFRGDTILIKGKKRKDTVCIALADDNCEESKIRMNKVVRSNLRVRLGDVVSVHACPDVKYGKRVHILPIDDTIEGVTGNLFDAYLKPYFLEAYRPVRXGDLFLVRGGMRGVEFKVIETDPGEYXVVAPDTEIFCEGEXPVKREDEERXLDEVGYDDVXXCQEA

SEQ ID NO: 247579 - protein, 58 aa, Glycine max
  Clone ID: PAT_MRT3847_65593C.1.pep
NVLQNRERGYFQKLHCVTQPSSIFTCENQTMRYAQHMANTDIRWIWNCSPNTTQIITS

SEQ ID NO: 247580 - protein, 95 aa, Glycine max
  Clone ID: PAT_MRT3847_65594C.1.pep
SEWHKNDGRHRDREKRDRESRRPERERSTDSEDRYDRDREKRKDKDKDVDRERSRDKKRERDRTDRVREKERERERKEDKERIRERERERERRDH

SEQ ID NO: 247581 - protein, 319 aa, Glycine max
  unsure (1)..(319): unsure at all Xaa locations
  Clone ID: PAT_MRT3847_65595C.1.pep
SCTPLHFSSAGKTTSHPQPPPSSNSXPPFSVSNSFGTEIGSPEFSLLQSRREAKDSPVLLDVTGMMCGACVSRVKNILSADDRVDSVVVNMLTETAAVKLRRIEEEPASVAESLALRLSDCGFPTKRRASSSGVTENVRKWKELVKKKEELVVKSRSRVAFAWTLVALCCGSHASHIFHSLGIHIAHGPLMEILHSSYLKGGLALGSLLGPGRELLFDGLNAFKKGSPNMNSLVGFGSVAAFIISSISLLNPGLAWDASFFDEPVMLLGFVLLGRSLEEKARIQASSDMNELLSLISTQSRLVITSTEGSPSTDTVLCS

SEQ ID NO: 247582 - protein, 223 aa, Glycine max
  Clone ID: PAT_MRT3847_65596C.1.pep
QDAPGRLLRLQPGAAEQGSWKRRPPWRGSRRRRWVSGRPDSWAQPGCNSTRSLEVQQRHLSAPPGSVFSSCHCASDRTCLSVRVSPGSRTTLPPPSWRGPRAPFSLCNACGIRQRKARRAMAAAAASASGNGTVIVEAKKSVKGRNKLQKKKEKKTRTEGAAQMKKKRKLGVGSAKASQSRNKFGFEDLTLRLRKNLAMHQVFPQDEKEAAILLMALSYGLVH

SEQ ID NO: 247583 - protein, 58 aa, Glycine max
  unsure (1)..(58): unsure at all Xaa locations
  Clone ID: PAT_MRT3847_65597C.1.pep
IHSYKSTKSHSPHSFHTTYEHXIRGCAVTRSSNVLHYRVKKPRYISKRDAFHLNAVMD

SEQ ID NO: 247584 - protein, 60 aa, Glycine max
  Clone ID: PAT_MRT3847_65598C.1.pep
EISDDANLLADCGSNNPVVVKILRTPICFASGNHLMGPSVIPLCTIILNALIGMDIPIYD

SEQ ID NO: 247585 - protein, 206 aa, Glycine max
  Clone ID: PAT_MRT3847_65599C.1.pep
QILFILLDSPFFLSMLDDDETVNRDSRAHRVEEVSQSDSAAILFSSGTTGRVKGVLLTHRNFITLIGGFYHLRNVADGDPHPVSLFTLPLFHVFGFFMLVRAIAVGETLVFMQRFDFEGMLKAVERYGITYMPVSPPLVVALAKSELVKKYDLSSLRYLGCGGAPLGKEVADDFRGKFPNGEIGQGYGLTEGGGRAARVLGPGESK

SEQ ID NO: 247586 - protein, 89 aa, Glycine max
  Clone ID: PAT_MRT3847_6559C.1.pep
FPFPPWVGLFFRAPFFGQWGGHKLGFLLFFFRGVNVTPPPPEGGVFKFFTPPPFKEPFRKPFPGGEGFKLSPWFHLFGGHFLFQRGGPF

SEQ ID NO: 247587 - protein, 47 aa, Glycine max
  Clone ID: PAT_MRT3847_655C.1.pep
YGSSPNGKRHSFNTQGSTLRESQVSPSSYLTQTNFGILSTIESWRTP

SEQ ID NO: 247588 - protein, 103 aa, Glycine max
  unsure (1)..(103): unsure at all Xaa locations
  Clone ID: PAT_MRT3847_65600C.1.pep
WGFVVALCAVVQFVFLWAPFSPSVWVAVFGGCAPLCPFLFSFMLCWCCFVVLCLGAGVCPVLSSCLVVSXFWVXFXPFVXGVNPQIFLIAXFFFFGRPPLCAS

SEQ ID NO: 247589 - protein, 62 aa, Glycine max
  Clone ID: PAT_MRT3847_65601C.1.pep
DQRSLASPLLLLHFCQHLKRRYNSQPLNLEPQTTQNFPPTLIIPITPPGPFLFHFLILKNPT

SEQ ID NO: 247590 - protein, 127 aa, Glycine max
  unsure (1)..(127): unsure at all Xaa locations
  Clone ID: PAT_MRT3847_65602C.1.pep
VWCVVCGFLSFRRASRXXLALPLVVCVFFLCXLXFCVWLLSXFXSLXGCCVCFXXSXCAPFVFSRXXFAGLXVWCSALXLSVLVSLCLXLXFVSRLCVLSCCTPCLCKGSPXFLEGGRRLIAVVTGN

SEQ ID NO: 247591 - protein, 44 aa, Glycine max
  Clone ID: PAT_MRT3847_65603C.1.pep
SKLLQCMFNKCLSYNLNRFFINCRFWVIVVSYFLTCNPAPVNGN

SEQ ID NO: 247592 - protein, 92 aa, Glycine max
  Clone ID: PAT_MRT3847_65604C.1.pep
MPHEPKKKSKCIHRPILRCWYAARNQTKKTRHLLYARNQYKTEHARLLKIGDYRAINRKRKATLLPALCFGAVMLLLYRCTIHQPYAPNTSP

SEQ ID NO: 247593 - protein, 97 aa, Glycine max
  Clone ID: PAT_MRT3847_65605C.1.pep
TSTRLTFFSSHPVSVCTSTNYTQPSSPPRSTLFSTPVPLLTQSPVVAFVFCTLLFAFSSCVVFRSACINSLSHPLHSHTRAGSTLLSEKRVVYWPFG

SEQ ID NO: 247594 - protein, 62 aa, Glycine max
  Clone ID: PAT_MRT3847_65606C.1.pep
TSTNDNENTNLSSRIVIMKPGQIGFQNFETGNNLASSQDTHDSVKYNGSPGRGSSHFSLTEI

SEQ ID NO: 247595 - protein, 81 aa, Glycine max
  Clone ID: PAT_MRT3847_65607C.1.pep
DRWMMHINDGEELQTISSTISIKMESSTIAVQTALTCLLAQGSKWWRLHKKKREGIRYNGLMKKKVKLVKEGLMMFIATLD

SEQ ID NO: 247596 - protein, 156 aa, Glycine max
  unsure (1)..(156): unsure at all Xaa locations
  Clone ID: PAT_MRT3847_65608C.1.pep
VCELRKKRKKYKHIGLQAIKSWTCQILQGLVYLHEHDHLVIHXDLKCGNIFVNGHLGQVKIGDLGLAAILHGSEPAHSVIGTLLSSSRSRYEEEYNELVDVYSFGMCVLEMLTSDYPYSECANPAQIYKKVTSGKLPASFFRIEDTEAPRFIGKCL

SEQ ID NO: 247597 - protein, 111 aa, Glycine max
  unsure (1)..(111): unsure at all Xaa locations
  Clone ID: PAT_MRT3847_65609C.1.pep
KRFHLPXLYRHHVFACNTQRPPNHPHGSCGASGAQALWDRMGKAIEAQGLDDIGFATAGCLGFCNSGPLLVVYPDGVWYRATTPEDVDEIVISHLKHGQRVDRLVIVLKRS

SEQ ID NO: 247598 - protein, 55 aa, Glycine max
  Clone ID: PAT_MRT3847_6560C.1.pep
TSDSNMLLNYVTVNEKLPLGAINVDNAFDDPYGLIEQLQQLLAVGVDGEKDNVWW

SEQ ID NO: 247599 - protein, 161 aa, Glycine max
  unsure (1)..(161): unsure at all Xaa locations
  Clone ID: PAT_MRT3847_65610C.1.pep
MTVWVKREFWTFGQVHPYQTGEIAFHKVRLLLRLFAMFRHPTVVISFTMEVVALMYIYTRNKLYVVLSMVVKIGDVAIQQSICMGKSTEAGRAALLYFEAMLGTLTRTKESIGRATRIAIDCAKFGIADKVMEILPHCLEMESSVHRRXKLVFLGDSIAQF

SEQ ID NO: 247600 - protein, 58 aa, Glycine max
  Clone ID: PAT_MRT3847_65611C.1.pep
SPPLSNVEAKIPAKEGIPPDQQRVFFFGKQLKDGRTPPVFNIQKESTLPLVLRLRGGF

SEQ ID NO: 247601 - protein, 83 aa, Glycine max
  unsure (1)..(83): unsure at all Xaa locations
  Clone ID: PAT_MRT3847_65612C.1.pep
VTVSPDGSICASGGKDGTANLWDLNDGKRLYALVADDVIHALVFSPNRYWLCAATXSGIKIWDLESKIMVHDLQPDIEEPKGQ

SEQ ID NO: 247602 - protein, 147 aa, Glycine max
  Clone ID: PAT_MRT3847_65613C.1.pep
FIRFEVGALISDLIMWKDVSKSTLWFGLGCLCFLSSCFTKGVNFSIFSAISRLAILLLGVSFFSNSVCQRNQVEKRSFAKLKEDDILHLAKLILPALNFAISKTRELFSGEPCMTLKVAPFLLLGAEYGHLITIWRLCAIGFFVNFN

SEQ ID NO: 247603 - protein, 81 aa, Glycine max
  Clone ID: PAT_MRT3847_65614C.1.pep
LIIIENHDYISVTNSNDLSSYYSHNNSVVTHTMAQYSVFAEERDTKGCFFFISKRSMHPQEKCRILWSISWSHGSFSVHIC

SEQ ID NO: 247604 - protein, 75 aa, Glycine max
  unsure (1)..(75): unsure at all Xaa locations
  Clone ID: PAT_MRT3847_65616C.1.pep
CLRHNHSSVASGXCSIPHXXFATEIXADEADEPFFSXSLIXFXPATADLKKRXKSSRLXXWXHCRVXRXRSRKEV

SEQ ID NO: 247605 - protein, 94 aa, Glycine max
  Clone ID: PAT_MRT3847_65617C.1.pep
LTFGAEISHPAFRHVKTVHKKVFYSLILGQIRGPFFSVFQSTNSGKKLRNCCFVLINGSKKVCLLTVLSKGYVWSALMISLSLFFLGPGPFGVS

SEQ ID NO: 247606 - protein, 80 aa, Glycine max
  Clone ID: PAT_MRT3847_65618C.1.pep
KSEIQPVWYVVEKIQSLHQVSRILCNPSSGPILSNNHIMLGSLWANVEPTCFCQGRILFPRFNNMYDFSNPLPQLVRLLK

SEQ ID NO: 247607 - protein, 160 aa, Glycine max
  Clone ID: PAT_MRT3847_65619C.1.pep
NMVQRKVPSKLGIEAEHVKSEKRLANSKLSSSQHQDGKTRGADMKKKMKKSRSIKLSDLEALQSSSPSRRRLSQPGKPLPLHTPTTTASPQKQQPLFRTTDGSPNYMKPTSSSHAKKELFPVSHRNTQPGSDFRSLPRKFSSDSKAACAKKPAKVLTRTS

SEQ ID NO: 247608 - protein, 58 aa, Glycine max
  Clone ID: PAT_MRT3847_6561C.1.pep
IRLGSVIASEAQPASQGYGTGHQPSPNAANYAPQAQPHYGVMSTSLTDTNVSQPIGEC

SEQ ID NO: 247609 - protein, 66 aa, Glycine max
  Clone ID: PAT_MRT3847_65620C.1.pep
HKCHLEDHTNAEGEIPFSLMHSRPTTFTGHVGAKKIVGAHGCKIKGAGTQQYKWKNAVCPRLKCID

SEQ ID NO: 247610 - protein, 95 aa, Glycine max
  unsure (1)..(95): unsure at all Xaa locations
  Clone ID: PAT_MRT3847_65621C.1.pep
PAFPPLKPHRTGGSLNKLRGGQKPTIAFLIQEPQGQTANASDPMIARGAMLSPCQPVILHKLDIPPAXTSLNGAKKELEGAASSLIKGVAATIDK

SEQ ID NO: 247611 - protein, 166 aa, Glycine max
  Clone ID: PAT_MRT3847_65622C.1.pep
FDQIHPDQSTDGWTYRPWEPASSTLATKLCRDEEDKGKFKENILFFTFSQTPKVTNIIERLFEHCGYHVPEFISDEDAIKRLEILLRKIEGSPLLLVLDDDRPGSEALIERFQLQMSDYKIEETYRGAFPKVGTPYVLKPLAHEDAMTLFRHHALFEKSRLHIPDK

SEQ ID NO: 247612 - protein, 169 aa, Glycine max
  Clone ID: PAT_MRT3847_65623C.1.pep
MSDSKNKIDEDETNPISAGRFCETMQGETSVENIVLRRHTNPDAAARNGKSLPPVYFYALESDQPILDILKPSIVIVYHPDMTFVREIEVYKAENPSKRLKVYFIFYEDSSEVQKFEASIRRENGAFESLIRQKSLMMIPVDQVCLTVVSFPSYFYFYRSPPNARTRKS

SEQ ID NO: 247613 - protein, 127 aa, Glycine max
  Clone ID: PAT_MRT3847_65624C.1.pep
SVPPPLVEGLLDPPFLPPFWLSGGGIPHFCLLSGCLKGFKRLVFRAAVPLLWGSPPGFAHNCFGILSVLDERYFLGGNRGGFIKGCALCFFLAILFLCYKTNDVSLLVVPRVDFKNPKKIKKSPKKV

SEQ ID NO: 247614 - protein, 106 aa, Glycine max
  Clone ID: PAT_MRT3847_65625C.1.pep
TVIAFAIGDPYSEICTCIHENESIRPIEVESVLKNGVEVSVHKSSDKHHNNIKDDFRVASIVNNVVHVVVHVSGMIACSEACSTGSRAQVVAHIVGVVGRVGERVV

SEQ ID NO: 247615 - protein, 529 aa, Glycine max
  Clone ID: PAT_MRT3847_65626C.1.pep
AQAIDPAGDAYNDEIDATVREQALAQRGQCYEIIIGALRSLKGDTLQREFGTPIRSTASQSALDPASRKKYICQIVQLGVQSPDRIFHEYLYQAMIDLGLENELLEYGGPDLLPFLQSAGRNSLHEVRAVTATISPVGQSGAPMSSNQVKYYELLARYYVLKRQHMLAAHALLRLAERRSTDGVPTLELRCQYLSNAVLQAKNATNSDGLVGSGRSSIDSGFLDLLEGKLAVLRFQIKIKEELESVASRSDVLPATPDSAENGVVPEGSSTADANFANATREKAKELASDVKSITQLYNEYAVPFGLWEICLEMLYFANFSSDTDSSIVRETWARLIDQAISRGGIAEACSVLKRVGPRIYPGDGAVLPLDIICLHLEKAGLERLNSGVEAVGDEDVARALVSACKGAAEPVLNAYDQLLSNGAILPSASVRLRMLRSVLVVLREWAMSVYSQRMGSSAAGHSLILGGGFSSERTIASQGIRDKITSAANRYMTELRRLALPQNQTEHVYRGFRELEESFISQHSFDRF

SEQ ID NO: 247616 - protein, 59 aa, Glycine max
  Clone ID: PAT_MRT3847_65627C.1.pep
LDRLAPSSSMLLRLSMQLRQLSLWLPQFKLLRAIIRWNLMPPPQSTQLLWGLGQSRLLQ

SEQ ID NO: 247617 - protein, 53 aa, Glycine max
  Clone ID: PAT_MRT3847_65628C.1.pep
ISLIVLPLRGECSATNLTVSKRNDSRSLWPPQRVTFCPQRNRAPRSSKKLQDS

SEQ ID NO: 247618 - protein, 85 aa, Glycine max
  unsure (1)..(85): unsure at all Xaa locations
  Clone ID: PAT_MRT3847_65629C.1.pep
MAGQPRGGLILVGTIXIHPFTCTKNYSYKYITXGKFYLNIFQLQLNYLATASDMGKVFGWSSSLAIIYFPNCLILFIQYYIVFIN

SEQ ID NO: 247619 - protein, 186 aa, Glycine max
  Clone ID: PAT_MRT3847_6562C.1.pep
STLLHIAPSLSGPSPSPSPSPSPFIKSSCSSTQYPALCVSSLSVYASSIQQDPHQLVQTALSLSLNRTQATKTFVANCNKFRGLKPREHAALKDCAEEISDSVDRLSRSLKELKLCKVKGEDFTWHISNVETWVSSALTDESTCGDGFSGKALNGKIKDSIRARMLNVAQVTSNALSLINHYAAQH

SEQ ID NO: 247620 - protein, 47 aa, Glycine max
  Clone ID: PAT_MRT3847_65630C.1.pep
SSEISNTSFSGADEIRVKYFTACCYGISSLSSFRTSIGVAIVSLRCT

SEQ ID NO: 247621 - protein, 72 aa, Glycine max
  Clone ID: PAT_MRT3847_65631C.1.pep
QKQRERLPGPHISGIMPDITMQMKRSRAGTGKDLLDSNVPCKDASITNSVMQIFLGDLDKSISSRHYIYVCK

SEQ ID NO: 247622 - protein, 178 aa, Glycine max
  Clone ID: PAT_MRT3847_65632C.1.pep
PVDPRVRKNSLSKLLSYYYPVAGRLRLSKSGRMELDCNAKGVTLLEAETTNTFVDYGDDFSPSEFTDELIPKLDDTQQPIEEIPLLLVQLTRFHSGGDCEGLAIGVLLSHPLTDATGIIDFMNRWAKLSRGEELDPNEIPFLDRTLLKFPDILEKPREVNTREISLDTSTLQHIPTSK

SEQ ID NO: 247623 - protein, 47 aa, Glycine max
  Clone ID: PAT_MRT3847_65633C.1.pep
ELEHIELQQFIFNLPWIQFLVEQNSYVRERVTKQYTCIPLYQYDLYS

SEQ ID NO: 247624 - protein, 106 aa, Glycine max
  Clone ID: PAT_MRT3847_65634C.1.pep
QYSTLLPQAFDLKMRLRAYWKIVLRRLIDGTALHLQLSIFNLVDKDLGDEIVKDMMSPYAGGIEKLLEEAPSVSMKRDKLNRSIKVLRESKEVVANIMDKISSYDD

SEQ ID NO: 247625 - protein, 36 aa, Glycine max
  Clone ID: PAT_MRT3847_65635C.1.pep
THALYPAVSNDALDGNVTTASIRRHTDGESPHHDPS

SEQ ID NO: 247626 - protein, 101 aa, Glycine max
  unsure (1)..(101): unsure at all Xaa locations
  Clone ID: PAT_MRT3847_65636C.1.pep
LCIIACFFADDIILVEEIRNAVNIQLEFWTQTFETNDFHLTRNKAEYMHCNYCKRQEESDVKVKMGEDVIPQLSKFKYSGINTMKXWGEINEDVTNRIQAG

SEQ ID NO: 247627 - protein, 82 aa, Glycine max
  unsure (1)..(82): unsure at all Xaa locations
  Clone ID: PAT_MRT3847_65637C.1.pep
TSVWSLAFSCEGSLLASGSADCXVKFWDVTTGIKVPRNEEKSGNTXRLRSLKSLPTKSASVYSXQFCRRNLLFAAGAIAKTG

SEQ ID NO: 247628 - protein, 67 aa, Glycine max
  Clone ID: PAT_MRT3847_65638C.1.pep
LESKRVISTRLSLVHSFVLISRASLLTLLAHFLSPSSKWPAAGFLSLLNPLKMAPVARIGYSPFIAC

SEQ ID NO: 247629 - protein, 43 aa, Glycine max
  Clone ID: PAT_MRT3847_65639C.1.pep
SYLMKFLSQSQIGSLASWVEMNRLAYLRKIRLYMHQSIHECER

SEQ ID NO: 247630 - protein, 155 aa, Glycine max
  Clone ID: PAT_MRT3847_6563C.1.pep
MAVQAFYHLGSPLTSQSHFPSPPLRLTLTASAPFKPRPLASIGISPLPERRRMPVAGAVEESQESSEPEAEADLASELKKAMAERKEKEEENMLSGVAREIDEIEWPAFGKVLGTTGVVLSVIFGSSVVLLSVNAVLAEISDRVFAGKGIQDFFT

SEQ ID NO: 247631 - protein, 54 aa, Glycine max
  Clone ID: PAT_MRT3847_65640C.1.pep
LCSFFFFFLKKKNKSSSKNIGSCFYFYHHVKSNFLKFSMFEIGTSNFFIVKKTK

SEQ ID NO: 247632 - protein, 213 aa, Glycine max
  Clone ID: PAT_MRT3847_65641C.1.pep
MKKARALSVAVNVLCLAIVCSAIESPQHTVVHSESDFEIRLYRTSVWMSAPALDISFEKATWNGFHRLFQFTEGANLNFSRIPMTIPVLTTAVPGAGPLQSQGYYVSLYLPVKFQGDPPVPLPELNIKPYEFSSHCVAVRKFSGFAKDERIVKEAEKLATSLSRSPWAESKTGRGYSIAQYNTPIRIVKRKNEVWVDIDAPELGCKSVGVAAH

SEQ ID NO: 247633 - protein, 161 aa, Glycine max
  Clone ID: PAT_MRT3847_65642C.1.pep
MAQKTEKEETDFKVPETITLCVNNCGVTGNPATNNMCQKCFTASTATTSGAGGAGIASPATRSGVSARPQKRSFPEEPSPVADPPSSDQTTPSEAKRVVNRCSGCRRKVGLTGFRCRCGELFCAEHRYSDRHDCSYDYKAAGREAIARENPVIRAAKIVKV

SEQ ID NO: 247634 - protein, 72 aa, Glycine max
  Clone ID: PAT_MRT3847_65643C.1.pep
IYFILATHQLYIHKIWRFCTPIIYIRISYYIDSSSIFFFLPFFNSISRCYKTCYQILVAPLPFLAVLLFPSS

SEQ ID NO: 247635 - protein, 161 aa, Glycine max; identical to SEQ ID NO: 247633
  Clone ID: PAT_MRT3847_65644C.1.pep

SEQ ID NO: 247636 - protein, 63 aa, Glycine max
  Clone ID: PAT_MRT3847_65645C.1.pep
VFFLSLGNINRADIFQNGCGQYMCTNSFVGRFQFTMPSSSEYSQFSFHKPARSSEEIKLLLDL

SEQ ID NO: 247637 - protein, 56 aa, Glycine max
  Clone ID: PAT_MRT3847_65646C.1.pep
FETFVSPFPNSAFLPKFFLLGGGSPPACFRAPASGGIFPIKKGPQLPPKFGPLGKI

SEQ ID NO: 247638 - protein, 78 aa, Glycine max
  Clone ID: PAT_MRT3847_65647C.1.pep
MTMEEGRVENEDYTQDGTVNIKGKPILRSKSGGWKACSFVVGKLSLFSHMSSFSLLTIKLFSQTCSNAVNKPLLLVRS

SEQ ID NO: 247639 - protein, 47 aa, Glycine max
  Clone ID: PAT_MRT3847_65648C.1.pep
IDLAPHDTWRTTKRCVVLVLCVAEAIVEVDVVMVITIKDHNKKSISS

SEQ ID NO: 247640 - protein, 76 aa, Glycine max
  Clone ID: PAT_MRT3847_65649C.1.pep
IQCCQQLVDLFRSHMQCSTNSTPKEGCLPICYARHVFRVAKVDLLLSYMSIKSCLVTSCVTHVHLLFLIPSRKKFV

SEQ ID NO: 247641 - protein, 132 aa, Glycine max
  unsure (1)..(132): unsure at all Xaa locations
  Clone ID: PAT_MRT3847_6564C.1.pep
YGCEKTTEGEGRIDMCLLRRASDDEEHSYMTXRILFMLKEXLSVGADYMRIDGIKAYAATYVTANMMLYARDMYLHXTPYATDAFXYTLIFERFFAQNSPMLTDTGXARVACSTYKAGEWDAACSTPLIPVA

SEQ ID NO: 247642 - protein, 54 aa, Glycine max
  unsure (1)..(54): unsure at all Xaa locations
  Clone ID: PAT_MRT3847_65650C.1.pep
GAGNWSAFWGEGDSNTPCPGELMVMSNGEGVACKTACXAIHDPQYLCDGAYTTP

SEQ ID NO: 247643 - protein, 47 aa, Glycine max
  unsure (1)..(47): unsure at all Xaa locations
  Clone ID: PAT_MRT3847_65651C.1.pep
QSQEALNILKSIRHMLNHIFYQPMSKDRTKVNVHILXRLLRLRRAQE

SEQ ID NO: 247644 - protein, 72 aa, Glycine max
  unsure (1)..(72): unsure at all Xaa locations
  Clone ID: PAT_MRT3847_65652C.1.pep
XVSRXVMLYKRYDYVCSVSWFGIMIASFYTYDRLMQWYYYLRTIEYSTKVHMTLVLFHFLLTCLCLLFSDLC

SEQ ID NO: 247645 - protein, 77 aa, Glycine max
  Clone ID: PAT_MRT3847_65653C.1.pep
RGENKGRVLSNDYVVRKLEKLCPVKNIFAKKPVSGMVTFPLWEGFKTTKCGLAVFVQSKFPQIFGSQSFQPPDEKRF

SEQ ID NO: 247646 - protein, 451 aa, Glycine max
  Clone ID: PAT_MRT3847_65654C.1.pep
MGSLEVESTNGHTSSPHKKTEKSERERRIDEWLPITSKRNGKWWYSAFHNVTAMVGAGVLGLPYAMSELGWGPGVTILILSWIITLYTLWQMVEMHEMVPGKRFDRYHELGQYAFGEKLGLYIVVPQQLVVEIGVNIVYMVTGGTSLKKFHDTVCSNCKNIKLTFFIMIFASVHFVLSHLPDFNSITGVSLAAAVMSLSYSTIAWVASVHKGVQENVQYGYKAKSTSGTVFNFFNALGTVAFAYAGHNVVLEIQATIPSTPEKPSKVPMWRGVVVAYIVVAICYFPVALIGYWMFGNEVDSDILISLEKPTWLIAMANLFVVIHVIGSYQIYAMPVFDMIETVMVKKLNFEPSRMLRFVVRNVYVAFTMFIAITFPFFDGLLGFFGGFAFAPTTYFLPCIMWLAIHKPKRYSLSWFINWICIVLGLCLMILSPIGGLRTIIIKAKTYEFYS

SEQ ID NO: 247647 - protein, 108 aa, Glycine max
  Clone ID: PAT_MRT3847_65655C.1.pep
AHRSRPLPWAPSSCGPVGLVFCGRPRVSSSLLEPARLALRVVQYILVSFPPGSSFPHRGVGGPPPRGFSSFWGPGLRGSSFVACLVLAFAPQCLLPGVGALVFIPKKS

SEQ ID NO: 247648 - protein, 83 aa, Glycine max
  Clone ID: PAT_MRT3847_65656C.1.pep
PGLAFCVFSLGPVLSLDDSIHVRFLPFCWIGFFKHESSVLFVKACAFLFHFIPLRVGPWARSGVCLFPPGAPCVFKKNQKLNY

SEQ ID NO: 247649 - protein, 48 aa, Glycine max
  Clone ID: PAT_MRT3847_65657C.1.pep
MNTTTLFAIFLLCAFTSYLPSATVQYVLYVDVNPIRNGFIYYLLPAII

SEQ ID NO: 247650 - protein, 54 aa, Glycine max
  Clone ID: PAT_MRT3847_65658C.1.pep
HSSINLTDYSVIFIRCLHPFLPGSDSVSLHLFLCAFGFFSLVSFYFFDFFELVL

SEQ ID NO: 247651 - protein, 90 aa, Glycine max
  Clone ID: PAT_MRT3847_65659C.1.pep
QLEDSDASLSLMISCNDKGQIGAREKIETKIKLKNGRKKRVTYAIKIQSLEENLKIFKLQGTSSAPRSPSTNILHSERHTFSSIHWITIC

SEQ ID NO: 247652 - protein, 68 aa, Glycine max
  Clone ID: PAT_MRT3847_6565C.1.pep
VPVVSVLLNARVKVQKGLVVYPSVEMSAMTRSCCETRLISHQTGVGLGTRTAVMSPKIRSFAHGKGAI

SEQ ID NO: 247653 - protein, 85 aa, Glycine max
  Clone ID: PAT_MRT3847_65660C.1.pep
HPILFPYLYILFSIITLKSSLLLPPIFINIPLFPIFFPLLNILKKFITFHYIFFTCLPLSQPPNIIPIESLSPTPLNHTFPLLQL

SEQ ID NO: 247654 - protein, 347 aa, Glycine max
  Clone ID: PAT_MRT3847_65661C.1.pep
MNSLRLSFFCVVVVLGALPYFSYAQLDPSFYASTCSNLSSIVREVLTNVSLSDPRMPASLIRLHFHDCFVQGCDASILLNQTDEIDSEQTAFPNDNSIRGLDVVNEIKTRLENACPGIVSCADILALAAEISSELAGGPVWEVPLGRRDGFSANQTLANENLPAPSLSIDQLISAFANQGLNITDLVALSGAHTIGRAQCKFGVDRSYDYNGTGNPDPTLNTTYLQSLQVICPDGGPGSDLTNLDLTTPETLDSSYYSNLQLQNALLPGVLALLSAFVTDLALFFESFTASLTFFGDIGAPSGSQGASRALRTAADGDSPALCNFVNGNSSALTTEGSSQDGMVSSM

SEQ ID NO: 247655 - protein, 54 aa, Glycine max
  Clone ID: PAT_MRT3847_65662C.1.pep
LPLPSPRGSLLCPGRVKVFPVKVFQKFGILKAATPLVFSFPHPPSVVVGRLGSA

SEQ ID NO: 247656 - protein, 75 aa, Glycine max
  Clone ID: PAT_MRT3847_65663C.1.pep
CLFKKFGTNILNSLIYIYYILILFKYSCLANGLMDNNEWIIMKHNYTWWICKTLHSYCPFHVEIKSVTTQARLSR

SEQ ID NO: 247657 - protein, 158 aa, Glycine max
  Clone ID: PAT_MRT3847_65664C.1.pep
KDGEYILIIETTTCRVLRYWLETPKTGTLEVFADLPGFPDNIKRSPRGGFWVGIYSRREKIIQWILSYPWIGKVLLRLPLDIPKAYSYLAKLKRSNGMAIRLSEQGDILEIVNEKNGSIGRSISEVEERDGILWVGSIDAPFVGKYNIHVVEGQVKRI

SEQ ID NO: 247658 - protein, 101 aa, Glycine max
  unsure (1)..(101): unsure at all Xaa locations
  Clone ID: PAT_MRT3847_65665C.1.pep
RSEQVLRRGMRWXTYVCTKLILGTSLLFLRCYKXRPESHRAXQLLDDDGAYYVRVLDRVLRDILREDTEESELXHVDEMLAANPRRAXVLSDSALADEDAY

SEQ ID NO: 247659 - protein, 92 aa, Glycine max
  unsure (1)..(92): unsure at all Xaa locations
  Clone ID: PAT_MRT3847_65666C.1.pep
MGKLDKPNPFYYDPNIDHWKIXKFYPSSNDRGMLKVSSFFTLFPQYRQKYLQXAYPMVKSSLKKFPVACELNLLEHSITVSTTIKTTHPYFI

SEQ ID NO: 247660 - protein, 62 aa, Glycine max
  unsure (1)..(62): unsure at all Xaa locations
  Clone ID: PAT_MRT3847_65667C.1.pep
LMVCAYVLDVVNVLVGSRVSSKCCGMLEGLAHSRDACCLCGANXTIVSGISLNVRCTLSVLV

SEQ ID NO: 247661 - protein, 217 aa, Glycine max
  Clone ID: PAT_MRT3847_65668C.1.pep
MKNTTSFALFLLCAFFTSYLPSATGAFVLDSDGNPLENGGTYYVPAPNNCGGIEYTTSGNETCPITVVQHHDPTCKGFPITISSPARIRYISEGLNVNIGFTFRPPPCAPSSLWTVLKDQSEHPDPYEGVILPVKLNNEDNSNNTVPGWFKIQKLPLDFITTYYIVFCPLDQSPCWSVGSNFDQYGNRRLVVAQFARRQDIEFQKLSYASRSTHSSA

SEQ ID NO: 247662 - protein, 113 aa, Glycine max
  Clone ID: PAT_MRT3847_65669C.1.pep
LLLTVQINQNLQPSGGPALDFLPSFKAFLISAAFHTAYFCFCSSLRCRHRRGSAAKKEILRPFLERFTFVHQSHLLHQPRRPGERKRHRFLGAGNRDIDGGEACRGRWAQARG

SEQ ID NO: 247663 - protein, 47 aa, Glycine max
  Clone ID: PAT_MRT3847_6566C.1.pep
LPTRNTDPIHTDAPGSTRPWLLDQALGAAFTTGTLFKTVTEIALNAK

SEQ ID NO: 247664 - protein, 343 aa, Glycine max
  Clone ID: PAT_MRT3847_65670C.1.pep
MVVFGGDDTSSLQNVGKTLVALNHSGVRWYVFGDDDTIFFPQNLVKTLSKYDHRLWYYVGSYSEIYEGSQVFGFGMAFGGGGFAISSSLAQVLAKVFDSCIQRYSHLYGSDARVYSCITELGVGLTHEPGFHQVDLRGDIFGLLAAHPLTPLVSLHHPDHTDPIFPNMTTTKSLQHLFEAVNVDSERILQQTVCYERRFSWTISVSWGYGVQVFQNNMLLPDVLRVEKTFKQWKEGNVLAGIYTFNTRELHPDQCKRPTIFYLDKVSSGKDGIISSYRKYSQNCSYKEPMKKLEVIKVFTNKLYLDNKQIPRRHCCDVLPSNAGDSMEIAIRECKYEEMIYMH

SEQ ID NO: 247665 - protein, 219 aa, Glycine max
  unsure (1)..(219): unsure at all Xaa locations
  Clone ID: PAT_MRT3847_65671C.1.pep
MMDETEELEPLFDYSRVQPLNPIDLDDDLDDYEDVICVDSKKRKNSQAVGNEKTNGKRVTVVDIEDDDWLPPPPKIASNAQKTIDEDSTLKKLRLKKQELASFAESAKELLKDVEESSKLEIDNSLQSSVVGVDEKSTEHSERAKIGAKIVISVGDKDGTKXLDDKFXRIVKTYXEKIKCNLKQIVLIXFDGDKISSSETPASLGMEDDDDIEVHVKSS

SEQ ID NO: 247666 - protein, 75 aa, Glycine max
  Clone ID: PAT_MRT3847_65672C.1.pep
EEQEQEHQEKGCEDDVVVVVVERNKNNNIERVQRAVREMDNITVNAGFDAEKVWKELYQIGHMDFGRVSSSSHDD

SEQ ID NO: 247667 - protein, 119 aa, Glycine max
  unsure (1)..(119): unsure at all Xaa locations
  Clone ID: PAT_MRT3847_65673C.1.pep
MNGGDLVLATIVVAWQFQAYDMLPLRMNTVYDARTPQVKCADXRYATHTHNILSXETMTHXCCEFPQVYANCREHISDSQTGNLQAYFYATDLEVHALXTYVFNIYGPLLCNISYFMIH

SEQ ID NO: 247668 - protein, 57 aa, Glycine max
  Clone ID: PAT_MRT3847_65674C.1.pep
VYFHVLGLRRVKKSEFVLRYNIALFAGHAIGANPAIPRMFPNMFPLVISQRKSHTEG

SEQ ID NO: 247669 - protein, 51 aa, Glycine max
  unsure (1)..(51): unsure at all Xaa locations
  Clone ID: PAT_MRT3847_65675C.1.pep
NSRETLECENLSHDTCAFAVSSEGKRCVLEKRVKRXGKEAYTCXTSEIEVE

SEQ ID NO: 247670 - protein, 400 aa, Glycine max
  Clone ID: PAT_MRT3847_65676C.1.pep
MIKFAVMDSTTGSLSTKTGISSLSNISGETENSHVIEDRNIAISIQDLRKVTNNFASENELGHGGFGTVYKGELENGKKIAVKRMECGAVSSRALEEFQAEIAVLSKVRHRHLVSLLGYSIEGNERILVYEYMPMGALSRHLFHWKNLKLEPLSLSQRLTIALDVARAMEYLHGLARQTFIHRDLKSSNILLGDDFHAKVSDFGLVKLAPDGQKSVATKLAGTFGYLAPEYAVMGKITTKVDVFSYGVVLMELLTGLMALDESRSEESRYLAEWFWQIKSSKETLMAAIDPALEASEEAFESISIVAELAGHCTSRDASHRPDMSHAVSVLSALVEKWRPVDEEFDYGSGIDFSQPLPQLLKDWKESEGKESSYTSAHSEGSIPARPTGFADSFTSADAR

SEQ ID NO: 247671 - protein, 59 aa, Glycine max
  Clone ID: PAT_MRT3847_65677C.1.pep
ILSNNVYLVSDKTYKRVPHSVVRHIRIDGACSYKSSRENGASFNLPGYILVVVSCLWTL

SEQ ID NO: 247672 - protein, 50 aa, Glycine max
  Clone ID: PAT_MRT3847_65678C.1.pep
PSGARIHTCNSSVLRCSRVHSILLTPEYRLRSRPLATMKSSHQELMRQPI

SEQ ID NO: 247673 - protein, 143 aa, Glycine max
  unsure (1)..(143): unsure at all Xaa locations
  Clone ID: PAT_MRT3847_65679C.1.pep
MAGGVIQQILRRKLHPRFTNSPLLSPIVAKKDDAGSTGSQSLRALALIGAGLSGLFSFSTMAAADEAEHGLACPSYPWPHKGILSSYDHASIRRGHQVYTEVCASCHSMSLISYRDLDGVAYTEEEVKAMAAEXEVVDGPTMR

SEQ ID NO: 247674 - protein, 54 aa, Glycine max
  Clone ID: PAT_MRT3847_6567C.1.pep
SNLCWICIQSVGYTGRFPWKCVLFEILEIILIYCNCLHENIKKHSAEFDCCKSC

SEQ ID NO: 247675 - protein, 57 aa, Glycine max
  Clone ID: PAT_MRT3847_65680C.1.pep
LTVLLSLVSPIPPSLCMWIPPLHRGSALSCGGSQCLDCISLPALWLFFVLQKKKKGY

SEQ ID NO: 247676 - protein, 308 aa, Glycine max
  unsure (1)..(308): unsure at all Xaa locations
  Clone ID: PAT_MRT3847_65681C.1.pep
MAGGVIQQILRRKLHPRFTNSPLLSPIVAKKDDAGSTGSQSLRALALIGAGLSGLFSFSTMAAADEAEHGLACPSYPWPHKGILSSYDHASIRRGHQVYTEVCASCHSMSLISYRDLVGVAYTEEEVKAMAAEIEVVDGPNDEGEMFTRPGKLSDRFPQPYANEAAARFANGGAYPPDLSLITKARHNGQNYVFALLTGYRDXPPAGVSIREGLHYNPYFPGGAIAMPKMLNDGAVEYEDGTPATEAQMGKDVVSFLTWAAEPEMEERKLMGFKWIFVLSLALLQAAYYRRLRWSVLKSRKLVLDVVN

SEQ ID NO: 247677 - protein, 231 aa, Glycine max
  Clone ID: PAT_MRT3847_65682C.1.pep
HKGAAGGIIHRDVKSTNILLDENRIGSIADFGLSRSGPLDTQSYVSTGVKGTFGYLDPEYFRSQQLTEKSDVYSFGVVLLEVLCARAVIDPSLPRDQINLAEWGMLCKNKEILQEIIDPSIKDQIDQNSLRKFSDTVEKCLQEDGSDRPSMGDVLWDLEYALQLQRGANAIQREPYEDSSSSVSASLQLPNVRRLPSLSTLSEADDSIVMGDESDSAVDSVFSQLKIDDAR

SEQ ID NO: 247678 - protein, 75 aa, Glycine max
  unsure (1)..(75): unsure at all Xaa locations
  Clone ID: PAT_MRT3847_65683C.1.pep
SKEQKGRFPQNMDRVQPIFVYDKGHPGGMGPTPPGGAVDHIGKKVLQNLPMIKEAIVVXRTKPPGVSVPRGGHWA

SEQ ID NO: 247679 - protein, 103 aa, Glycine max
  Clone ID: PAT_MRT3847_65684C.1.pep
EFELGTRGSSRVDLQNCSSFTTWRASFLHSYPYIFFYCCLVPVNILLTSTPLFIVSVTPNSSVLIFKVPSIFLITRTPITFTLCMVSFHISENILTSHNGLCP

SEQ ID NO: 247680 - protein, 73 aa, Glycine max
  Clone ID: PAT_MRT3847_65685C.1.pep
LISHRFFNSPPNYPLTRSFYLKGEIFGSFLPFFFDPLKEPPVDSFIYFSCVFNLLFNMLISSYFPLYPRLFHT

SEQ ID NO: 247681 - protein, 66 aa, Glycine max
  Clone ID: PAT_MRT3847_65686C.1.pep
ADRCHVCKRACYDKQSAWSRGRSAPDRHCRSACWTGCRASASATVSMYSRPMNHTIVGLENGHKEE

SEQ ID NO: 247682 - protein, 45 aa, Glycine max
  Clone ID: PAT_MRT3847_65687C.1.pep
RITATSDVAISIILALLVDMTQSSTAIDHNMIRITRQIAIRHYFP

SEQ ID NO: 247683 - protein, 129 aa, Glycine max
  unsure (1)..(129): unsure at all Xaa locations
  Clone ID: PAT_MRT3847_65688C.1.pep
XFLGSTFFMYQFGFFPTENVARERPAVVFRKTYTQEEFRDLCCRSANRARLKKLPIMRGGENPPLPLKNIFDVCHKNPRKIIVATDTGDLLCLPGLAGALRIFWDPHESPSYRPHNVCNHSIHKMRGNP

SEQ ID NO: 247684 - protein, 65 aa, Glycine max
  Clone ID: PAT_MRT3847_65689C.1.pep
DGPCPSSVHSWMPGPLFLSFLPVFGCRHIQIALQPPIWSGLLCFTIVHAEIIHLQRRLNLVAIAG

SEQ ID NO: 247685 - protein, 62 aa, Glycine max
  Clone ID: PAT_MRT3847_6568C.1.pep
GPLQLLYPEAEWAFLYPHIPTFPPLPLRAWNTKSPLVTYHHIIRSIFMSPPLPSAFFLSNTF

SEQ ID NO: 247686 - protein, 45 aa, Glycine max
  Clone ID: PAT_MRT3847_65690C.1.pep
LLWSFCNRTPLSSSQHLIHLIVFTMQSISSYESVKLPFGGLLEPE

SEQ ID NO: 247687 - protein, 113 aa, Glycine max
  unsure (1)..(113): unsure at all Xaa locations
  Clone ID: PAT_MRT3847_65691C.1.pep
MASSMIWSAAVTTVNRAGAGMVAPFTGXLKSLLGFPTGRPTIAFTSMVGTVGGVHCLQVWPPIARKKFGTLSYLPDLDDAQLAKEVEYLLRKGWIPRLEFELEHGFVYREHNR

SEQ ID NO: 247688 - protein, 83 aa, Glycine max
  Clone ID: PAT_MRT3847_65692C.1.pep
MDLLYLFCTGALLARRPYWFEGGIGPIQPKGQPPNHLFGGFIFGQKSQDHFQQDRSFFRRPKEIQTADKIPDFFDTFYKLVTD

SEQ ID NO: 247689 - protein, 438 aa, Glycine max
  Clone ID: PAT_MRT3847_65693C.1.pep
MAAATNLLATLGDLERDSFVALLSKLIAESKYVQNNPPELIPQEDRVVKHVLDVLLPFSTTTGGGPLLVNHVTYHAGRGNLIVEYPGTVPGKILSFVGCHMDVVTANPNDWDFDPFSLSVDGDKLRGRGTTDCLGHVALVTELMRKLGETKPNLKSSVVAVFIANEENSAITGVGVDALVKDGLLNKLKDGPLYWIDTADKQPCVGTGGMIPWKLHVTGRLFHSGLAHKAINALELAMDALKEIQLRFYSDFPPHPQEQVYGFATPSTLKPTQWSYPGGGINQIPGECTISGDVRLTPFYNVKDVMKKLQEYVDDINESAQKLESRGPVSKYVLPDENIRGRLTLSFDEALSGVACDLNSRGFHVLCKATEEVVGYVKPYSITGSLPLIRELQEEGFDVQTSGYGLMATYHAQNEYCLFTDMSQGYRVFARIISQLEE

SEQ ID NO: 247690 - protein, 46 aa, Glycine max
  Clone ID: PAT_MRT3847_65694C.1.pep
SVAPKGSLRVQEFLEKAADGLVEGGKKEIFTPMYFFLARKPESSDY

SEQ ID NO: 247691 - protein, 130 aa, Glycine max
  Clone ID: PAT_MRT3847_65695C.1.pep
SPLDQALRSLLQRKRRLDSRSLGQEDQIHPRPVGSRSSAEPKHGCAPERASSFHGNVCGTRGPSFLPGTATKNRSETRLLNTESRTAGKTLDGRNLDAQNSPATPQARSLQVTLHRSQLQEDSAAINLTV

SEQ ID NO: 247692 - protein, 35 aa, Glycine max
  Clone ID: PAT_MRT3847_65696C.1.pep
WDSTHIDAQSTTLKRYRSLTTDQIDAYWQSMQKIA

SEQ ID NO: 247693 - protein, 67 aa, Glycine max
  Clone ID: PAT_MRT3847_65697C.1.pep
ALQKNYWLTHHALMVFCSPKLGKGIFLLGQIDHFFPLGVFKQFFFYPLFRGLFFSQVKSPFGFWNLK

SEQ ID NO: 247694 - protein, 46 aa, Glycine max
  Clone ID: PAT_MRT3847_65698C.1.pep
GGAGSLWWLKGLQYTYRKLRYCQSTCLGTHFLIQFGGHRCSKFILT

SEQ ID NO: 247695 - protein, 163 aa, Glycine max
  Clone ID: PAT_MRT3847_65699C.1.pep
HDRQHTVDDSFRAHLEFLKSHSIAGVSHHSLLFSKTAPVRTDPEDDEVTRNHGAKYVGTSRSPSNEHAAYGPEFAFNPKDVRLSKKGSSPSSAGKLTESEIKDKIKSISQTLSNMASKLPDKGEKLQKRLAELNLELAELKREERNVVDLDDFTTEFQRVLNV

SEQ ID NO: 247696 - protein, 140 aa, Glycine max
  Clone ID: PAT_MRT3847_6569C.1.pep
VVTPKGEGKITPFSPIFIEREDADPPAPQGSLSLKTGGVSAIQHRGGEMHSLTNSIKKGVSAQHTKHDILLLNKTPIVGGGKKAGPVQPKWGDDKNGPQKNRGPHKRPLLPENGTQGWVPDPPPEGDKTSLGPAHQIWGG

SEQ ID NO: 247697 - protein, 137 aa, Glycine max
  Clone ID: PAT_MRT3847_656C.1.pep
MADLFAWLISFFILIALIVLVIYQLMCLADLEFDYINPYDSSSRINKVILPEYIIVGVLFGFYLVTGHWIMSLICAPYLYYNVRLYRQGKHLVDVTEIFNLLPKEKKQRLFKLFYIVFILFLSLFWMIYTSLDDHDD

SEQ ID NO: 247698 - protein, 101 aa, Glycine max
  Clone ID: PAT_MRT3847_65700C.1.pep
ARTRNYPRESAARKAQMGSKALSAVGGFTLTLSPINVKLLLMPSNRLFNRTSCKFYIFFCLRFNDEQQPLSLDIPALKSSFAMLIDGNHIMVRGVYKTLVR

SEQ ID NO: 247699 - protein, 68 aa, Glycine max
  Clone ID: PAT_MRT3847_65701C.1.pep
SSYQAVTRVLTYTKRILGLGLFFPSNFEVQLKGYSDRDWAVILKTHHKFLNLPCFLFDVFEVKKAIDN

SEQ ID NO: 247700 - protein, 64 aa, Glycine max
  Clone ID: PAT_MRT3847_65702C.1.pep
AKFVFVPCKKKSFVISLFQRNKHKIINLSGTKKMLRTKNKILLYQGAKTKKKFLRDQMQNSSIY

SEQ ID NO: 247701 - protein, 158 aa, Glycine max
  Clone ID: PAT_MRT3847_65703C.1.pep
MGHFVDNRWEWKMHWRRNFFDHEINMVAAFMDDIDDVQIHLSSLDSLIWRADPSGAYSTKSAYNLLKGEGSFDNEDSASKIIWNLKIPPRTIAFSWRIFKNRLPTKANLRRRQVELPSYRCPLCDLEEENVGHIMFSCTRTRSLWWEALSWVNRVGPF

SEQ ID NO: 247702 - protein, 87 aa, Glycine max
  unsure (1)..(87): unsure at all Xaa locations
  Clone ID: PAT_MRT3847_65704C.1.pep
LLLRLAFQSLGVVYGDLGTSPLYVFYNTFPIGVKDEEDVIGALSLIXYSLTLVPLLKYVFVVLRANDNGQGGTFALXSLLCRHAKMK

SEQ ID NO: 247703 - protein, 53 aa, Glycine max
  unsure (1)..(53): unsure at all Xaa locations
  Clone ID: PAT_MRT3847_65705C.1.pep
QKGVYENSEYFFTDXKKXYSRITEFIPTSHGIVTQDNSEIQNVDPIPIQNLNP

SEQ ID NO: 247704 - protein, 213 aa, Glycine max
  unsure (1)..(213): unsure at all Xaa locations
  Clone ID: PAT_MRT3847_65706C.1.pep
MPSLRILNKICYSINQNCKCQYRTISSTAQLQGSWMEKVKNVITGQNSTPQSQGDASPXDSFSLLRFADEMKNAKRIGAFKEFMVGRSSEATFSSAFDKYEAIIRFLGALDPTGENLPTAQKQEAAKHCNCTIADVENALAKFTWAKEAQKKLEKLKEEGKPMPKSFAEVQKLVGSTPLDLARSNLAQAGQISRNALCPCGSKKRYKRCCGKD

SEQ ID NO: 247705 - protein, 155 aa, Glycine max
  unsure (1)..(155): unsure at all Xaa locations
  Clone ID: PAT_MRT3847_65707C.1.pep
RAQKSTPQSQGDASQVTSDSFTLLRFADEMKNAKRIGAFKEFMVGLSSXATFSSAFDKYEAIIRFLGALDPTGENLPTAQKQEAAKHCNCTIADVEDALAKFTWAKEAQKKIQKLKEEGKPMPKSFAEVMLLIVTLIPNYLVGFNLSSCEDILVC

SEQ ID NO: 247706 - protein, 96 aa, Glycine max
  Clone ID: PAT_MRT3847_65708C.1.pep
KIDSDTRAFMVKKNQSLFMGAPTHYKFIKSNTLGSFPFFQNLYPYPNEGGAYPKGGKKDDPFLKKGSNPAFRDKNGAPLKFKKPVSVPNEKGVSNK

SEQ ID NO: 247707 - protein, 84 aa, Glycine max
  Clone ID: PAT_MRT3847_65709C.1.pep
SFFFFFFFLGKMDTLFYLGILPFSCLNLGRTFFFGSLFKKFLVWKNPFFFPKKRGEFLKKFRKKKKPDWVRGEGTLKKFLPFKY

SEQ ID NO: 247708 - protein, 58 aa, Glycine max
  Clone ID: PAT_MRT3847_6570C.1.pep
QLVRVYWPTKWDTDGHRRGLSDFEIIVSFSAFLGMETGDTMVQIEGCAHMALSGPSRQ

SEQ ID NO: 247709 - protein, 77 aa, Glycine max
  Clone ID: PAT_MRT3847_65710C.1.pep
FQEFLNLFLLLCVRSPKGKKITLCAGHRLRESFSLPLLVYSLNTLLFDIGLRVRFKLPPSLSQVFCQLHSQAGEILE

SEQ ID NO: 247710 - protein, 206 aa, Glycine max
  Clone ID: PAT_MRT3847_65711C.1.pep
ATQTIAMASAQCEKPNTTVEVSQPKSHHKPNTAIEVCQPKTQHSSFGQKLSEITSKAFKGRHGSNQNQLQYYSQTQVESQGHNGTKTEAHYYGQTQTQNDKKHGVSKTQITVTVVQAQITHTEKKDPYPYDTTTTCFGAHAKRNGELNNNKKDMNLFRRIKNGLSRHNNNEGGNSSSSDSESDDEKCPKTKKGGNCKQDATKTKPV

SEQ ID NO: 247711 - protein, 117 aa, Glycine max
  Clone ID: PAT_MRT3847_65712C.1.pep
KPPKTKLTNPHNVQATYQGSPLPQDQTKHTNQQHNTTSYMLNNIQRRERQVLPIKPNTPKCTNTQECESAHPPLPKNIPKKDNEKLPPYLEVPPPSKEKTRPTKRHIDTTTKRKKTP

SEQ ID NO: 247712 - protein, 60 aa, Glycine max
  Clone ID: PAT_MRT3847_65713C.1.pep
HTCPSIKRSFSNSNLTSKMFFMTLQTEEDNTPCLAKVAPSKTIFRLELKIFGKPNFWPSC

SEQ ID NO: 247713 - protein, 474 aa, Glycine max
  unsure (1)..(474): unsure at all Xaa locations
  Clone ID: PAT_MRT3847_65714C.1.pep
QDLASAEKTIRETIHQVSVKRGCLVLLNLFFATDVXFPWSFKQERGIIYESEKHTYLVEDAIVGRMKAIIDLRFRELTGAVDVLNSISAIGDFCTKLEDVQGYLNRPSTAGGVWFLESNARKTGVASGFKVQPEESEFQYCLNAYFGPEVSRIRDAVDVSFQSIFEDLLSFLESSKAFRRFKDLAPYLQSKCYECVSSILMTLKKELDSLYAPTENGEVPTAVTVEKSLFIGRLLFAFQNHSKHIPLILGSPRFWVNGNASAVGKLPALVKQSRFGSDSAICDSPGRQTSLGSKRQNSSVVSALLGMREGASHELEELNKTIGDLCIRAYNLWILRISNELSAIVSQDLKQDDALSLSSPWRGWEDIIVKQDQSDENPPEMKISLPSMPSLYIISFLFRACEELHRGGGHVLDKKILHKLASRLLEKVTGIFEDFLSTAESGVHQVSEKGVLQVLLDVKFATDVLSGGDSNMGG

SEQ ID NO: 247714 - protein, 75 aa, Glycine max
  unsure (1)..(75): unsure at all Xaa locations
  Clone ID: PAT_MRT3847_65715C.1.pep
PLIYHAENMMLFVFFVAAVVLVTWSCHGAGYHQFAHRLTTGYGERSSGVXARCFMRAVDAHKIRAFSSIPEAYVE

SEQ ID NO: 247715 - protein, 48 aa, Glycine max
  Clone ID: PAT_MRT3847_65716C.1.pep
LRVPTYRMHFTLILGATPDKMSAKLIYFITNGCRRDVGLHNIFLASIL

SEQ ID NO: 247716 - protein, 55 aa, Glycine max
  Clone ID: PAT_MRT3847_65717C.1.pep
SEISVPNHRVGGQKHEEPCVPPPSKERNNLKIIFNNSPFKKMLGTPVLVGRSPLF

SEQ ID NO: 247717 - protein, 105 aa, Glycine max
  Clone ID: PAT_MRT3847_65718C.1.pep
IGELSAQARDGKLKPADMQGATFTISSLGGIGGTAFTPIVNAPEVAILGLSKSGIKPVWDGKQFAPRLMLPLSLSYDHRVVDGAMGARFAAYLAEVLADMRKTLL

SEQ ID NO: 247718 - protein, 420 aa, Glycine max
  unsure (1)..(420): unsure at all Xaa locations
  Clone ID: PAT_MRT3847_65719C.1.pep
MGFLNVEKKWLYPFIVCFAICMLLLVSSFNMGLVSKIHSINSLFFFLPSHLRSNQTAPVIVERKASPAPAPARPALPRFAYLISGSKGDLEKLWRTLHALYGSLNHYVVHMDLESPLEERMEIAHRIDRQHVYAEVGNVFVITKANMVTYRGPTMVANTLHAXAILLKRSKDWDWFINLSASDYPLVTQDDLLYTFSDLDRGLNFIEHTSRXGWKFDKRAMPLIVDPGLYMSTKSDVFWVNPKRPLPTAFKLFTGSAWTVLSHDFVEYIVWGWDNLPRTLLMYYTNFLSSPEGYFQTVACNAPEWAKTLVNSDLHYIAWDVPPKQHPHVLNINDTDKMVESGAAFARKFKQDDPSLDWIDKMILRKRNGLFPLGGWCTGKPKCSEIGNIYKLKPGPGSQRLHRLVAGLTLKAKSGEDQCK

SEQ ID NO: 247719 - protein, 75 aa, Glycine max
  Clone ID: PAT_MRT3847_6571C.1.pep
CSLKNGALFIFKKKLFKISFSSLIEEVPVDSSIFVYNVAISLIDPAYLQHLHCAQICYPLLSSSRSRTDAWAHAP

SEQ ID NO: 247720 - protein, 45 aa, Glycine max
  Clone ID: PAT_MRT3847_65720C.1.pep
AKIGVGSVASHSRRGAPPEGQMVLVHPWILPTREAVKKLLENFAF

SEQ ID NO: 247721 - protein, 75 aa, Glycine max
  Clone ID: PAT_MRT3847_65721C.1.pep
RHAKWVEFLEQFPYVIRHKKGLPRPKGGKDSIFVVVERLSKMAYFIAYKKISLGRLKQNMSRSCMRKPRPKLRRK

SEQ ID NO: 247722 - protein, 49 aa, Glycine max
  Clone ID: PAT_MRT3847_65722C.1.pep
QWARLSVKSLNLLAYKAFRCFRALCVFIPKDQGIPIKPLQQRKFMTRTI

SEQ ID NO: 247723 - protein, 112 aa, Glycine max
  Clone ID: PAT_MRT3847_65723C.1.pep
TRDDEIERFIKVWISAILCLCYCYYIASRIPKGFLRLLSLLPILYLFITLPLKLSSPTLVGYTSFFISWLGTFKLFLFSFNQGPLALSPPNIVQFISIASLPITPKQNPSTN

SEQ ID NO: 247724 - protein, 123 aa, Glycine max
  Clone ID: PAT_MRT3847_65724C.1.pep
MEPENGKFSFSEVIEQRSYKGDVYYVEGGENSAEVSDETALKCNDGCAVCGNPSSKVCSRCKAIKYCSQTCQHFDWRSGHKFQCLVEKANTTEKAIVNQGRPANGNVVNLTNSDEVEDNAHSS

SEQ ID NO: 247725 - protein, 108 aa, Glycine max
  Clone ID: PAT_MRT3847_65725C.1.pep
MGKKKVEIKRIENKSTRQITFSKRRNGLMKKARELSILCDAKVALLIFSSTGKLYELCNGDRLKNSVHPDSVGVWTSIKNLHINCMVRVQVPPFHTLYHIQGSGRRVN

SEQ ID NO: 247726 - protein, 38 aa, Glycine max
  Clone ID: PAT_MRT3847_65726C.1.pep
SGARHFKRTALETSNYLYRRPPDCQTQGGDPEGTRGPT

SEQ ID NO: 247727 - protein, 112 aa, Glycine max
  Clone ID: PAT_MRT3847_65727C.1.pep
TYGKHPGIIPRNAHSPELHEPFYITSPSMEWVNYYAPNLNLPTVKDVLITGHTLMVIFWDTCLLYITPTAYHRYICNNSVQKLDHHCHRVSQRFRSLNYPFVILFISSSTFV

SEQ ID NO: 247728 - protein, 48 aa, Glycine max
  Clone ID: PAT_MRT3847_65728C.1.pep
KGFPCSHRSQGEGIGPGWGKRNPCPVCRYEFPPDDADYKRRKAQRFVM

SEQ ID NO: 247729 - protein, 89 aa, Glycine max
  unsure (1)..(89): unsure at all Xaa locations
  Clone ID: PAT_MRT3847_65729C.1.pep
VTNLSSLIVSPDDVXVGILGQKHLWKARRKIANQQSVFAVQVFELHRLIKVQQLIAASPDVLFEDGAFMGKYSLMGSPPKNKNISLEVV

SEQ ID NO: 247730 - protein, 111 aa, Glycine max
  Clone ID: PAT_MRT3847_6572C.1.pep
FPAPINNNDLHEHFGTVTVNLLGINKVNDMPPLMGAEDFSFHQEVMPGYFAFIGIQNPSHEKLEQVHSPYFKINEDVLPYGAALHASLAVSYLLKHPQDVPSAEGKHHDEL

SEQ ID NO: 247731 - protein, 65 aa, Glycine max
  unsure (1)..(65): unsure at all Xaa locations
  Clone ID: PAT_MRT3847_65730C.1.pep
KFKNLDQXLYFXPLFLLGEKRSFRLKLKLRIQLIFLLGEKRTKLDQTYILSFIQKLKLRIQLIFS

SEQ ID NO: 247732 - protein, 168 aa, Glycine max
  unsure (1)..(168): unsure at all Xaa locations
  Clone ID: PAT_MRT3847_65731C.1.pep
RLGGLVANDILQRTNARLESLHSEGVHRLSEMCCFAVSQLLXLGKSIISRANNXEDEADDDKANVEWPEDVSAKANIIRINAQTMIGYVKAVSHSFITGISDVTEAYQAAIKAVTSESLSVVTQKSVQEKASAFSEHLRADQTTAACKIQDGMQFLAHVLISTSMNAA

SEQ ID NO: 247733 - protein, 68 aa, Glycine max
  unsure (1)..(68): unsure at all Xaa locations
  Clone ID: PAT_MRT3847_65732C.1.pep
VPKIGIRLICKKQSSIVPVCXKITKGGPALINNMCMCMCCVTVLCVCVRSYAEQRXRCVLCVVCGWIL

SEQ ID NO: 247734 - protein, 509 aa, Glycine max
  Clone ID: PAT_MRT3847_65733C.1.pep
MDNKTQQSESKQNDNDEEVAPKRQDPNPSSGGWGFSPLSFLSDLQKAAAVAAEEISRNAAVVAETASKSIAELQNEDEDSEKEYEGDEGSAAEKESDDEGSKLRKSALERLEKASEESLLSQGLKVFDNSVETFASGAWSALGNAWRGGTDFVQRLENSATNLSGSPKHDGPGAAGANASSLLETGKAFTAKGMQVLEYVGKETMDLLISETGIEVEKDKKEGEEENDEDQLSEEVTFDRCFYIYGGPEQLEELEALSSHYALLFNRRKAKLSAEQKSVYDGKLKEVQQVFNLSTDIGRSNADSNKGKTIKKGNEGSSDEMKNLHDSSVGKAAEMAAGFTNALAGLAANDIHQRTTARLESLHSEGVHRLSEMCCFVVSQLLVLGKSIISRANNTEDEADDDKANIEWPEDVSAKANIIRINAQKMIGYVEAVSNSFITGISDVTEAYQAAIKAVTAESHSVVTQKSVQEKATAFSEHLRAEQTTAVCKIQDGMQFLAHVLISTSMNAA

SEQ ID NO: 247735 - protein, 100 aa, Glycine max
  Clone ID: PAT_MRT3847_65734C.1.pep
NPPITMPPQAIPSPAIGLAQPPPLASSKLCRPQLWPLTPGLVSLRQPVSNTGPLAFITCGSLSGGTIALTFSRAAAATSTVVSSSHAGVGTTTTTCFTSP

SEQ ID NO: 247736 - protein, 228 aa, Glycine max
  Clone ID: PAT_MRT3847_65735C.1.pep
MSKSVTATKDSGDNTATHLNFFEKFKRFNPLESSLGVLAFFFVASLFIASFFYLDYKGFRSRGTATVLHLDFSSPSSSAPVQFLSQDGDKCDVFDGKWVWDETYPLYHSANCSFPDQGFRCSQNGRPDTFYTKWRWQPKDCNLPRFDARKMLEKLRDKRLVFVGDSIGRNQWESLICMLSSAIANKARVYEVRPFGAPDGSRITRHMGFLAFKFEDFNCTIEYYRSRF

SEQ ID NO: 247737 - protein, 141 aa, Glycine max
  unsure (1)..(141): unsure at all Xaa locations
  Clone ID: PAT_MRT3847_65736C.1.pep
ICLKPRXPXXXPPPXPPPPPPPLRPPLFLARPPPPPSPLPYTPPPPLSPPPPPLPPPRPPPPPSPPPSPLPPPPPPPSPVPSPLPPPPPLLPPAPPPAPLSPPPSPPPPSPXPPPPPGPSPXPPPPPPPPPPPPFPPPPPP

SEQ ID NO: 247738 - protein, 67 aa, Glycine max
  Clone ID: PAT_MRT3847_65737C.1.pep
FGNCSFFSGTMNEKMGSKLSALFLKSIYSIKITNIPDAWAHAWAQTWANAWGSPGKSRAGPRGRPRS

SEQ ID NO: 247739 - protein, 59 aa, Glycine max
  Clone ID: PAT_MRT3847_65738C.1.pep
LCLRKIHGTPVCGQSLYASRMSCNISRPITMKFGKYYMNLMESRSYAMVSLGRKNRLDI

SEQ ID NO: 247740 - protein, 126 aa, Glycine max
  Clone ID: PAT_MRT3847_65739C.1.pep
NKTIVVVKKKKKKKKKKKKKKKKKKKKKKNKKKKKKKNPRPPPTPFSPPTPFKFTPPFLPPSSKRQHPPAGPQTHPTPSLAPENSPQEKRFINPSRQHTGGPRNPKRGTSPPKPGHGKKQNPAKKP

SEQ ID NO: 247741 - protein, 88 aa, Glycine max
  unsure (1)..(88): unsure at all Xaa locations
  Clone ID: PAT_MRT3847_6573C.1.pep
CVTFSAVATRHRLGPRLLQSPFGLSRKASFLVKAAATLSAKHGSDRPLWFASKQSFSYLDGRXLPVDYGFDPVGLSYPVGNRRVSLCL

SEQ ID NO: 247742 - protein, 812 aa, Glycine max
  unsure (1)..(812): unsure at all Xaa locations
  Clone ID: PAT_MRT3847_65740C.1.pep
IYRLLSANNFTGIIPDTYGNLKNLTQFRIDGSSLSGKIPSFIGNWTKLDRLDLQGTSLDGPIPSVISYLTNLTELRISDLKGPTMTFPNLKNLKILLRLELKNCLVAXPLLHHXSFPIFSFRDLSSNMLTGSIPDSFQDLGNLNYFFLTNNSLSGPIPDWILSIKQQIDLSLNNFTKTSANNCQRPDLNLASSLSRTASTSISCLKMGQPCSGKPQFHSLFINCGGPETKFEGNEYEADLSPLGISNYVPGNSGKWAYSSTGVYLGNAKADYIATNQLSLDINGPDYYHTARIAPLYLNYYGLCMLNGNYKVKLHFAEIAFSDDQSYCNLGKRVFDVSIQGFKYLKDFNIAKEAGGVGKGITREFNVNVTESTLEIHLSWAGKGTNAIPIRGVYGPLISAITVTPNFKVYAHGFSTGTIVGIVAGACVIVILMLFALWKMGFLCQKDQTDQELLGLKTGYFSLRQIKAATNNFDPANKIGEGGFGPVFKGVLSDGAVIAVKQLSSKSKQGNREFINEIGMISALQHPNLVKLYGCCIEGNQLLLVYEYMENNSLARALFGKEHERMQLDWPRRMQICLGIAKGLAYLHEESRLKIVHRDIKATNVLLDKHLHAKISDFGLAKLDEEENTHISTRIAGTIGYMAPEYAMRGYLTDKADVYSFGIVALEIVSGKSNTNYRPKEEFVYLLDWAYVLQEQGNLLELVDPSLGSKYSSEEAMRMLLLALLCTNPSPTLRPCMSSVVSMLEGKTPIQAPIIKRGDSAEDVRFKAFEMLSQDSQTHVSSAFSQDSIEQRSKSMGGPWLDSSISLPSRID

SEQ ID NO: 247743 - protein, 145 aa, Glycine max
  Clone ID: PAT_MRT3847_65741C.1.pep
KMRKNCNLELRLFPPSLCDLRPMMEAEVSERPQQQVAHHQQQQQPQPQHPLTIFYDGKISVSDVTELQARSILMLANKEMEKRVMTPTGSEPSSPILLLSPHNMYSPGTGLYMKRSLQRFLQKRKNRVQETCPYHHELINVKLSK

SEQ ID NO: 247744 - protein, 81 aa, Glycine max
  Clone ID: PAT_MRT3847_65742C.1.pep
QLGLEMFCEMIVATTRKNMAKSLIFNMIPKEPHLTNHQFIEIDLNTHLSKYNSTNIQRITIHFNRLSKFQCGKKKKKKKPK

SEQ ID NO: 247745 - protein, 110 aa, Glycine max
  unsure (1)..(110): unsure at all Xaa locations
  Clone ID: PAT_MRT3847_65743C.1.pep
FTENTGRLTLKAGTNAFSTGWTESVNRLLLMGNDILRXRNALSDGLTTMQDLSTMAYMIISLSLCYERXEREGTHHLLGCCSRIAINXKDVRREECIIASTFLFTVILHA

SEQ ID NO: 247746 - protein, 98 aa, Glycine max
  Clone ID: PAT_MRT3847_65744C.1.pep
MEDSLENWISQLEMEEYDDVLNESHHGSFDEQEFLREILEEQPENLSPQRENICSTSPTNSTVSFDEAISFNYASGSTLHKSNSSNSIKSLKRSSSSS

SEQ ID NO: 247747 - protein, 50 aa, Glycine max
  Clone ID: PAT_MRT3847_65745C.1.pep
FSYIGRSMIHIISIRLAPLPQRLSLRLGNDATYYTNKKRNFRFISLSSVF

SEQ ID NO: 247748 - protein, 51 aa, Glycine max
  Clone ID: PAT_MRT3847_65746C.1.pep
SEIQCLADVCGALHCDHEMNSGSNTSTCNPAAAAKHTHLCEVCFVLSIHLL

SEQ ID NO: 247749 - protein, 506 aa, Glycine max
  Clone ID: PAT_MRT3847_65747C.1.pep
GLTVSAGTINWDGPLRIEASSTGSNTMISKIVRMVEDAQSREAPVQRLADSIAGPFVYSVMTLSAATFAFWYFVGSHIFPDVLLNDIAGPEGDPLLLSLKLSVDVLVVSCPCALGLATPTAILVGTSLGARKGLLIRGGDVLERLAGINYIALDKTGTLTKGKPVVSAISSILYGESEILRLAAAVEKTASHPIAKAIVNKAESFELVLSGTKGQLVVPGFGTLAEVDGHLIAVGSLEWVHERFQTRANPSDLTNLENSLMNHSLNTTSSKYSKTVVYVGREGEGIIGAIAISDTVREDAESTITRLKQKGIKTVLLSGDREEAVATVADTVGIENDFVKASLSPQQKSGFISSLKAAGHHVAMVGDGINDAPSLAVADVGIALQNEAQENAASDAASIILLGNKISQVVDALDLAQATMGKVYQNLCWAVAYNVVAIPIAAGVLLPHFDFAMTPSLSGGLMALSSIFVVGNSLLLQLHGSQISRKVGSTIEIISSHSNTDMLNLK

SEQ ID NO: 247750 - protein, 134 aa, Glycine max
  Clone ID: PAT_MRT3847_65748C.1.pep
GGATPEAFFGVGGPQEKPGGYFFWPRGRLSQWAPRGVFSMLQATPFCGSLEQNRPVFSPWKERNRYAFFKREMGPPPFLPFRWEKGGGPVGGGHKRARGCPRFFLFPSPCFRLCPSQKFKGVYPLLTKKSGLWG

SEQ ID NO: 247751 - protein, 218 aa, Glycine max
  Clone ID: PAT_MRT3847_65749C.1.pep
APPTITTDAPSAAATAAASIAALRTNRRPPRLSGTIVPTSVTGAVGDANPLQLTPQLSSSSALHDEKYGGGVGAGGDVKERPPGSLPEAEPEDVSGGDGSPPFATVALDVGRSATSATAAAVLAGGNAGGLRVEPGSDGRLYAAPVTSRTHRLVLNPRGKQRAYKRLPNDPHPPPPPATGPVAEPKGAAALKIGSGTLVGGTGPDSARGRTPRSGAAN

SEQ ID NO: 247752 - protein, 39 aa, Glycine max
  Clone ID: PAT_MRT3847_6574C.1.pep
PTLRDSAQIRNDGDGSQIFILCAGRNRQQSYWKWVNYSA

SEQ ID NO: 247753 - protein, 58 aa, Glycine max
  unsure (1)..(58): unsure at all Xaa locations
  Clone ID: PAT_MRT3847_65750C.1.pep
HFSISQSRFSDPASSSFSSPWPPFSPSSSSSSSPRGSLRRXSDLQAWKAXXFPLQCHS

SEQ ID NO: 247754 - protein, 53 aa, Glycine max
  Clone ID: PAT_MRT3847_65751C.1.pep
HWDLPRTREGFYRFKGSETASGVRGCAFSAHADVIWMETAPPNVDECTSYARG

SEQ ID NO: 247755 - protein, 128 aa, Glycine max
  unsure (1)..(128): unsure at all Xaa locations
  Clone ID: PAT_MRT3847_65752C.1.pep
SAAVVSAKDGAVATRVEAESGTLADRLRVGSLTVAGLSYKEKFLVRSYEVGIIXTATVETIATLLLEVGCSXAQSVGSSPXGFXSTPSLXNLRLLWVSARLPVVIXKSPACCAVAXVXSWCXGVGRVG

SEQ ID NO: 247756 - protein, 29 aa, Glycine max
  unsure (1)..(29): unsure at all Xaa locations
  Clone ID: PAT_MRT3847_65753C.1.pep
KPKSVVCLTIFLHCXDSDCERNTVXYLID

SEQ ID NO: 247757 - protein, 88 aa, Glycine max
  Clone ID: PAT_MRT3847_65754C.1.pep
MALSWVLTVLSLLPLLEAQIPLCANLVPVPITNATLDRITGKWFYIASAFRNEEYNKSVQEIQATFFYFTPNKTEDTIFLREYQTRQD

SEQ ID NO: 247758 - protein, 50 aa, Glycine max
  Clone ID: PAT_MRT3847_65755C.1.pep
AQERCAFRDAVTPMYSLSHKLPYLLNPMSCKTSMMTGCVTKVHVLLLIPT

SEQ ID NO: 247759 - protein, 58 aa, Glycine max
  Clone ID: PAT_MRT3847_65756C.1.pep
IKINSTGYHKILIQDENFTFVFLHYILFWYWAKTFTFVVCISFKILKINFKVNIIDFE

SEQ ID NO: 247760 - protein, 91 aa, Glycine max
  Clone ID: PAT_MRT3847_65757C.1.pep
YGCKKTTKGGAVIVVLLAYQQAYIILITSYDYLCLVGSTHANTIMKSPQKLLFSITECPSGCICYAIVRAYIPKKCRGVTSTISHLNSDIV

SEQ ID NO: 247761 - protein, 76 aa, Glycine max
  Clone ID: PAT_MRT3847_65758C.1.pep
MQEGNWPLLCAIEPSKGKRNKAVLLKKCRQKFAHIKMKSYFGDDFTKSSVCRVPANCYQLTPSSNTRRHLEGIEFL

SEQ ID NO: 247762 - protein, 703 aa, Glycine max
  unsure (1)..(703): unsure at all Xaa locations
  Clone ID: PAT_MRT3847_65759C.1.pep
MGSKNANGKNHKDKRKKFKDNLNSNHSSTGDAKVIIISDPRYSKAHTDPRFREAPKRETKVAIDSRFNRMFSPKSFLPSSALIDKRGKPKNNPTSQLGSLRHYYKVDEKEVEQSSDEEEDNEEELVKANRMKPESDKGTELEETSESESEETSESESDVDTDTDEGADEEVYEEEASDVHEDIATIDKETHRVAVVNMDWRYVKAVDLYVLLSSFVPPNGLIKSVRVYPSEFGLQRMKEEEVRGPIGLFDDEDSSNDDLDNEKLRAYEKSRMRYYFAVVECDSSATANYIYKECDGLELKQSSNALDLRFIPDNMEFKHPPRDVATEVPANYECKDFYSRALQHSEVNLTWDDDEPLRAKTLNRKLTDEQLAEFEVKEFLTSDESESDDSKDNNETDDQPDKXQKKRAKYRALLQSGDDSDGGNEHDNAQNMEVTFNTGLEDLSKYIMEKKDKKSETVWDAYLSKKSEKKKAGKNKRKYSSDDDDSDDTDQEATEEADDFFIEEPAAKKRKKPQNKEDEEQRHEEIDGLDKASKEELELLLADDKGTDTGVKGYNLKFKKGKGKKRRENDIDEEKIPSNAYNDPRFSALFSPNYAIDPTDPQFKRSATYARQLAQKQQKDNADPPVEREPTKLKGTQLSSEDSGRMKDEEEGLDALKSKKDKYELSSLVKSIKMKSKQVQLPSDNKTRKDGKSYIKGMKKKRH

SEQ ID NO: 247763 - protein, 116 aa, Glycine max
  Clone ID: PAT_MRT3847_6575C.1.pep
MGIPSELRDMLLPNKKGVLVASPAEDRKTLRSKQCTREGVRAGFKAASIAGVASAVPTLAAVRMIPWAKANLNYTAQALIISAASIASYFITADKTILECARKNAKLEDALRHNQQ

SEQ ID NO: 247764 - protein, 60 aa, Glycine max
  Clone ID: PAT_MRT3847_65760C.1.pep
LTDSLSIPIPSLMGARSVIIDLSAFVYWTGVRQLCFFSRPGIIPFRTVIHLPLIKPICLP

SEQ ID NO: 247765 - protein, 203 aa, Glycine max
  Clone ID: PAT_MRT3847_65761C.1.pep
MASLFLRQALLLRVCFHNYQRFTAGGVAARHRLWCSAAANLPSDEAEKKTNSGGISNSSFARKAQYPPSSEARWEDGPDYRKWKDKEKEILSDIEPIVVLAKDILHSRRYMDGARLNEEDEKAIVEKLLAYHPHSEDKIGCGLESIMVDRHPQYRQSRCLFVVRTDGGWIDFSYQKCLREYIRDKYPTHAERFIREHFKRGSG

SEQ ID NO: 247766 - protein, 171 aa, Glycine max
  Clone ID: PAT_MRT3847_65762C.1.pep
LFLRQALLLRVCFHNYQRFTAGGVAARHRMWCSAAANLPSDEAEKKTNSGGISNSSFARKAQYPPSSEARWEDDPDYRKWKDKEKEILSDIEPIVVLAKDILHSRRYMDGARLNEEDEKAIVEKLLAYHPHSEDKIGCGLESIMVDRHPPYRQSRCLFGVRTDGGWIDFSY

SEQ ID NO: 247767 - protein, 85 aa, Glycine max
  unsure (1)..(85): unsure at all Xaa locations
  Clone ID: PAT_MRT3847_65763C.1.pep
MHAYVSSEFGSRDKADVQSIIGLQRFFETRMNDAFGDTKFSAVLVEPPPLNLPSAGLSSQELSGPGXGPESGSPPEFPHTCVADY

SEQ ID NO: 247768 - protein, 53 aa, Glycine max
  Clone ID: PAT_MRT3847_65764C.1.pep
KPISKNKGFFPDGIFGRIFFFFVPWGKILLGNELPISIIIQTPHKGPNSPSLF

SEQ ID NO: 247769 - protein, 102 aa, Glycine max
  Clone ID: PAT_MRT3847_65765C.1.pep
MEMMNVHKTQGGPLRVHRSHSNIKSKTNQRSLEEHRTRNDVGFDHGRDSVAPQLHFLFFLLLLSQFSQYPSMLNLGTLPSASFTPIYSQKWYLVDLQLAQAS

SEQ ID NO: 247770 - protein, 91 aa, Glycine max
  Clone ID: PAT_MRT3847_65766C.1.pep
DGDSFGFLAWLDLHSSCRRCSPIPRPIQLSCACNTRSISTSCPVLYVTCSLMTYTLSVSTTKLHSLYIRTQLFSCFLSSTPPALLLLIHTV

SEQ ID NO: 247771 - protein, 201 aa, Glycine max
  unsure (1)..(201): unsure at all Xaa locations
  Clone ID: PAT_MRT3847_65767C.1.pep
MVQIARRKKGRPSKADLARRSGESQSDPRRSLRRRSVRYNIIDYDGDYLDDDEEDERRREKKKLKLMAKLNQDGGEEEEEEEREEEEENETATNHTRAESREEHAPVEEYDDEKEQEEENENEQEEENEXRQKHSAFLEGEKKKLNQDGGEEEEEEEREEEEENETATNHTRAESREEHAPVEEYDDEKEQEEENENEHPT

SEQ ID NO: 247772 - protein, 62 aa, Glycine max
  Clone ID: PAT_MRT3847_65768C.1.pep
FGSSLIFDLLILSHPSTMLYLFCFLFALQERLALKGGGAELGPSVLFFGCKNRQMVSYLSSM

SEQ ID NO: 247773 - protein, 63 aa, Glycine max
  Clone ID: PAT_MRT3847_65769C.1.pep
LNTGERQAYQAIELCRILNCDIDSHYSLASSIPVMEDSHHMTNTLKHMLVQADQAERPGFMER

SEQ ID NO: 247774 - protein, 110 aa, Glycine max
  unsure (1)..(110): unsure at all Xaa locations
  Clone ID: PAT_MRT3847_6576C.1.pep
HLWVAIAGRSRSVSRSPFNSRKRRYSASPDSHRHSRTSRRRSPCHKRRLKHRTSSYPSLSRNPTPKPKKDQNISKRQHXGRIETIXEETARRLEEAIPKNADENLNTEES

SEQ ID NO: 247775 - protein, 223 aa, Glycine max
  Clone ID: PAT_MRT3847_65770C.1.pep
LGLNPSLQTYTLLLSCCTEAQSPYDMGFCCELMAVSGHPAHAFLHPMPAAGPDGQNVRDHVSKFLDMMHTEDREGKRGLVDSVVNFLNKSGLKEEAGSVWEAAAQRNVYPDAVKEKSSRYWLINLHVMSDGTAVTALSRTLAWFRQRMLVSGIRPSRVDIITGWGRRSKVTGSSLVRQAVQDLLHTFSFPFLAEKGNSGCFVGCGEPLCQWLNHSYVERMHLL

SEQ ID NO: 247776 - protein, 44 aa, Glycine max
  unsure (1)..(44): unsure at all Xaa locations
  Clone ID: PAT_MRT3847_65771C.1.pep
YRLQIIPLWAIDTNVLNKSFSLQGFQHKRRKHGFFIVLGRXGVC

SEQ ID NO: 247777 - protein, 246 aa, Glycine max
  unsure (1)..(246): unsure at all Xaa locations
  Clone ID: PAT_MRT3847_65772C.1.pep
RSGIPVDPRVRGFISRDPKLQVLICDLEVVMRPSNKSPGKKKTRKSRASGRGKWMIVGNIARYLSVCVTDLVLKTPKFTVEIKELNVDISKDGGSKSNLLVRLQILPIFVHIGEPRASCDFLSNLSGGGCSSSGQASITALERSSAPFICETFSVSCEFGHNREVGIVIKNMDISSGEVTVNLNEELLLKSKSPSKSSSGSDSKVGSHADSTSTKRPSKKQQTLAAXSXYSSLFPEXVSFNLPNWM

SEQ ID NO: 247778 - protein, 63 aa, Glycine max
  Clone ID: PAT_MRT3847_65773C.1.pep
NGKVFRGGRRGCPGMNSGIASIEYVLASLLYWPDWKLPDTLDVDISEVFVLVVLKKVPLLLKP

SEQ ID NO: 247779 - protein, 41 aa, Glycine max
  Clone ID: PAT_MRT3847_65774C.1.pep
QSLQADMLSQQNQVDNRSQHQHWYVRRSLPNYLSIAQESIG

SEQ ID NO: 247780 - protein, 126 aa, Glycine max
  unsure (1)..(126): unsure at all Xaa locations
  Clone ID: PAT_MRT3847_65775C.1.pep
MSIFWGRQGPTGDRLWMRMGLTFTLTGYWPRNTGAKNLYMISWKAIKGHMNHVRWARGGDMVIATGQNGKPHLKKKGLPADIVRQRKPWCQKDGVYMYIEXNARVVVXPKGDMTGPAITGPTGKEC

SEQ ID NO: 247781 - protein, 72 aa, Glycine max
  Clone ID: PAT_MRT3847_65776C.1.pep
TAGIDMMQQFDRQVPDRVIAPGGHLGNMNAVLVRVIMRKYLPLDINIPRSVWAHAGNAERLHDALSITMERV

SEQ ID NO: 247782 - protein, 67 aa, Glycine max
  unsure (1)..(67): unsure at all Xaa locations
  Clone ID: PAT_MRT3847_65777C.1.pep
APHSRNPAVEAXKSMMQSPGCKXQEPXLXKGFFPGXPKITVLAAQKSQPKAGTLRLSTEFRNPTCYP

SEQ ID NO: 247783 - protein, 55 aa, Glycine max
  Clone ID: PAT_MRT3847_65778C.1.pep
PLERPLLGFFFFFFFLLKQTVKIETLGPTNEPKSIHGDRVSLFSLALNFPINQRE

SEQ ID NO: 247784 - protein, 144 aa, Glycine max
  unsure (1)..(144): unsure at all Xaa locations
  Clone ID: PAT_MRT3847_65779C.1.pep
DDAAIRLGVERRRIYDIVNVLESIGLLSRKAKNQYIWRGFVAIPHTLQELKEEGLKDNSNFLRGSGNDNDKVSDDEDDEETLSNPATGSQSDKLNPNSSTLTKSLKNAEPTXHFENRREKSLALLTXNFVKLFVCSNVELISLD

SEQ ID NO: 247785 - protein, 66 aa, Glycine max
  Clone ID: PAT_MRT3847_6577C.1.pep
FGLNIKPFFNDTFLTFIHGNIGNMAWPKPIKTTGSLNILTLKPILDLKGRSPFWGPWMGQTYYYQL

SEQ ID NO: 247786 - protein, 66 aa, Glycine max
  unsure (1)..(66): unsure at all Xaa locations
  Clone ID: PAT_MRT3847_65780C.1.pep
GKPALIFDETALPWFRAGVYPPVGTYNYXAYSYTLFASDKALXGFAEHRRFQDWAKPCSIVKQYFL

SEQ ID NO: 247787 - protein, 223 aa, Glycine max
  unsure (1)..(223): unsure at all Xaa locations
  Clone ID: PAT_MRT3847_65781C.1.pep
LEYAWSHAVISDQQYDKAKQLCDFKQFEWSNECNKAMNEVFQDYLEIDIYNIYAPACLLNSTSSIADDGDSNGPESLTKERNDYRLKRMRIFGGYDPCYSNYAEEYFNRKDVQSSFHADTKRDTNVAWKVCXGLKIWIYSGDADGRIPVIGTRYCVEALGLPLKSRWRTWYHDNQVGGRIVEYEGLTYVTVRGAGHLVPLNKPSEALSLIHSFLTEEHLPTRG

SEQ ID NO: 247788 - protein, 125 aa, Glycine max
  Clone ID: PAT_MRT3847_65782C.1.pep
GKKWEKGFIWFLVFPNQNFRGSFLIFWNPETPLNLGFPIFAPPGGKKIWGKIFPNPASGGGGGLFPPPQNWQSQKENFLTNFPWPPTSLPILKTPGKKKTALPFTPQGGGALLFKQKREFFPFFF

SEQ ID NO: 247789 - protein, 482 aa, Glycine max
  Clone ID: PAT_MRT3847_65783C.1.pep
MNTNMNVILCLQFLCFFLLSTLFIKASAINVETYESDRIIDLPGQPSSPSVSHFSGYITVNENHGRALFYWFFEAQSEPSKKPLLLWLNGGPGCSSIGYGGVVEIGPLIVNKNGEGLHFNTHSWNQEANLLFVESPVGVGFSYTNTSSDLTKLEDNFVAEDAYIFLVNWLQRFPQFKSRDFFISGESYGGHYIPQLAELILEPIRLESKYPFINLKGFIVGNPETDDYYDYKGLLEYAWSHAVISDQQYDKAKQVCDFKQFDWSNECNKAMNEVFQDYSEIDIYNIYAPSCLLNSTSSIADDSNGNGPESFTKERNDYRLKRMRIFGGYDPCYSNYVEEYFNRKDVQSSFHADTKRDTNVAWKVCNNSILRTYNFSVFSVLPVYTKLIKGGLKIWIYSGDADGRVPVIGTRYCVEALGLPLKSRWRTWYHDNQVGGRIVEYEGLTYVTVRGAGHLVPLNKPSEALSLIHSFLTGQHLPTTHG

SEQ ID NO: 247790 - protein, 67 aa, Glycine max
  Clone ID: PAT_MRT3847_65784C.1.pep
LALCHEDCWSSNQCTQTTAISGFKDRGHGFYVHYHWLWRGQENFTSPCTERCEHTSSSWKVPRILAD

SEQ ID NO: 247791 - protein, 52 aa, Glycine max
  Clone ID: PAT_MRT3847_65786C.1.pep
KEICTCHPSISTMHCISLNIYTKNNASFLHYSTFQFLCSFIFLSIPILYLPT

SEQ ID NO: 247792 - protein, 195 aa, Glycine max
  Clone ID: PAT_MRT3847_65787C.1.pep
MAAKPAEEAPQGETLKYQTWVLKVLIHCDGCKRRVKKILQGIDGVYTTEVNSLLHKVTVTGNVDAETLIKRLSRSGRVVELWPEKPPEKKDNKKSGKSNKGGAGDANKEKEDQKNSEPDSDGGGSNEGSKDAPGEDSDKEGHSYECEEGGGGGEGGKKKKKKKKRRTKGKTVVLHLLLLIWRRRRRISKVDALVP

SEQ ID NO: 247793 - protein, 57 aa, Glycine max
  Clone ID: PAT_MRT3847_65788C.1.pep
QRQGRQILHRQGGALCLCARIFESKTCYYTKETITRTKHKINELKSRLRNKIKSTNQ

SEQ ID NO: 247794 - protein, 146 aa, Glycine max
  Clone ID: PAT_MRT3847_65789C.1.pep
LPITPFILQSWVLKVLIHCDGCKRRVKKILQGIDGVYTTEVDSLQHKVTVTGNVDAETLIKRLSRSGRVVELWPEKPPEKKDNQKSGKSNRGVVMVIKRRKTKRIVNQMLMVVVQMRVLKTLPGKILTKKGIVMNGKREMVGGGRA

SEQ ID NO: 247795 - protein, 187 aa, Glycine max
  Clone ID: PAT_MRT3847_6578C.1.pep
MEGLLNSLHNQSCLKPFGFTPRLGYTFPVITRTGHLNRKPESCTLRSNCAQLGRDTSTSSRGAIVAALYSNDKGEGSNTDWESEFLGELDPFGYRAPKKREKEKRSMLLEATDGMDWCVRARKEALKSIEARGMAHLMENMVTVKKKKKKDKKKLESKKKVVKKIEKIEDLDFSLEEDLPQPMETEI

SEQ ID NO: 247796 - protein, 86 aa, Glycine max
  unsure (1)..(86): unsure at all Xaa locations
  Clone ID: PAT_MRT3847_65790C.1.pep
SVITNKYSYCVPGARYYWGKVFMDVAXETLFQKRALXAFKLDPAKWRMNVQPLVXSSAIFHVYTALIXPHEIIMVLDLPHRGHISY

SEQ ID NO: 247797 - protein, 161 aa, Glycine max
  Clone ID: PAT_MRT3847_65791C.1.pep
MKAFVAVALFALLLVFVDARFVVEKSSITVLSPHKLRAKRDGAIGNFGLPDYGGFIVGSVLYPTKGSHGCQVFEGDKPFKIHSYRPTIVLLDRGECYFALKVWHAEQAGAAAVLVTDSIEESLITMDSPEESSDADGYIEKITIPSALIEKSFGDSLKDAL

SEQ ID NO: 247798 - protein, 52 aa, Glycine max
  Clone ID: PAT_MRT3847_65792C.1.pep
RKIHLIQQEKFSRTLPNPFNLIVITFYSFKYSVYVQIDFVVQNSTFTLFQPL

SEQ ID NO: 247799 - protein, 75 aa, Glycine max
  Clone ID: PAT_MRT3847_65793C.1.pep
SLTCFHIFKPFGFSPTFSFFSQHSPLMGRNPPRLVSLNLFFVYFFFFCRLTSFFSVRFPLPIPLVEFSVPYIFFL

SEQ ID NO: 247800 - protein, 425 aa, Glycine max
  Clone ID: PAT_MRT3847_65794C.1.pep
QPRHTLLPPQYLGSLPLRISKVSHEPHIPGQCTFGQAVLNGINALCGIGILSTPYAAKEGGWIGLSILLLYAVFSFYTGLLLRYCLDSAPGLETYPDIGQAAFGTTGRVIISIILYMELYACCIEYIIVESDNLSTLFPNAHISLGGVELNAHILFAILTAVALLPTVWLRDLRILSYISACGVIATILVVLCLFWVGLLDNADIHTQGTTKTFNLATFPVAIGLYGYCYAGHAVFPNIYTAMANRNQFPGVLLVCFAICTSMYCAVAIMGYTAFGKATLSQYTLNMPQHLVATKIAVWTTVVNPFTKYALSLSPVAMCLEELIPANSPNFFIYSKLIRTALVVSTLLVGLSVPFFGLVMSLTGSLLTMFVSLILPAACFLSIRGGRITRFQVSICVTIIVVGIVSSCLGSYSALSEIIQELFKS

SEQ ID NO: 247801 - protein, 382 aa, Glycine max
  unsure (1)..(382): unsure at all Xaa locations
  Clone ID: PAT_MRT3847_65795C.1.pep
MLPRVRTDARRRQKGVQNINLFAIMASSLNNGRKASEIFQGQALLYKHLLGFIDSKCLKWMVELDIPDIIHSHSHGQPITFSELVSILQVPPTKTRQVQSLMRYLAHNGFFEIVRIHDNIEAYALTAASELLVKSSELSLAPLVEXLLEPNCQGAWXQLKSWVHEGAFTVFEVAFGTPFWDVIIKDPAYNKSFNEAMARDALMWNLSDSNCDWVFGGLESNVNVVGGTGITAKIICEAFLKLKCMVLERPNVVENLSGSNNLTFVGGDMFKCIPKADAVLLKLVLHNWNDNDCMKILENCKEAISGESKTGKVVVIDTVINENKDERQVTELKLLMDVHMACIINGKERKEEDWKKLFMEAGFQSYKISPFTGYLSLIEIYP

SEQ ID NO: 247802 - protein, 114 aa, Glycine max
  Clone ID: PAT_MRT3847_65796C.1.pep
MEWTRKKHDGSAAAARNGSDHFYHGIPRVTDSFSYKSRSIKSKHAVAKGSKVSLRLGTAGIDVFDTLGSIMTNLRAGGFASGAATKGNDNGILALEAANTIVDGSSLMESVSTK

SEQ ID NO: 247803 - protein, 65 aa, Glycine max
  Clone ID: PAT_MRT3847_65797C.1.pep
SSTRRHGGAAYKSIWETVQIQNIKGLRLSQVTSNYTRCNTSLLLVCIAVPLSLLPLYTRYLIGTY

SEQ ID NO: 247804 - protein, 69 aa, Glycine max
  Clone ID: PAT_MRT3847_65798C.1.pep
EPYFGELKGLGGIIWFSTTGPRIHAFIIKQGIIHSANSGHPFAYSNKINSLIANFRNFDTLCLVIYNHH

SEQ ID NO: 247805 - protein, 91 aa, Glycine max
  Clone ID: PAT_MRT3847_65799C.1.pep
MARSSTRMKWVSIFTLLFLSHSPLTISAEDGLVANGDFEATPRNGFPNEAIVEGPSEVPNWKSNGNVELVESGQKQGGMILIVPQRRHAVR

SEQ ID NO: 247806 - protein, 86 aa, Glycine max
  Clone ID: PAT_MRT3847_6579C.1.pep
NLRFFFSFICWPIPYLGVIYFALNQFFDPLHELGAWSKGTQKLLLFQHTCMRASSPYHQETHFQRYLGLYPLMLGNIDLMSYLTQA

SEQ ID NO: 247807 - protein, 95 aa, Glycine max
  Clone ID: PAT_MRT3847_657C.1.pep
DLSRKKLSTKLLKRWFVKRFLHSDIVAEYIYVFLWDEDLLVLVDNIDTKRQLGYCAQGDCMRNIGVAYSECIVHLGSLGDSIGDEVQSDSPGDNR

SEQ ID NO: 247808 - protein, 393 aa, Glycine max
  Clone ID: PAT_MRT3847_65800C.1.pep
MARSSTRMKWVSIFTLLFLSHSPLTTFAEDGLVANGDFEVSPSSGFPNEAIVEGPSEVPNWKSNGNVELVESGQKQGGMILIVPQGRHAVRLGNDAEISQELPVEKGSIYSLTFCAARTCAQLESINVSVAPASQTVDLQTLYNVQGWNPYAVSFNADEDTFRLVFKNPGMEDDPTCGPIIDNIAIKKLFTPDKPKDNAVINGDFEEGPWMFRNTSLGVLLPTNLDEEASSLPGWIVESNRAVRYIDSDHYSVPQGRRAIELLSGKEGIISQMVETKPDKLYSLTFSLGHADDKCKEPLAVMAFAGDQAQNIHYTPNSNSTFQTANVNFTAKAERTRIAFYSIYYNTRSDDMSSLCGPVVDDVRVWFSGSNGLRGLGLGRLVLVILGLVLVLM

SEQ ID NO: 247809 - protein, 84 aa, Glycine max
  unsure (1)..(84): unsure at all Xaa locations
  Clone ID: PAT_MRT3847_65801C.1.pep
GFNLEKAGGSSVVPETLEPSFXIAAAVVFQGXLPPSEIAATINEFRFRHLGELPKLCXTNGSFFGFGYNRTMNQPQFPSPDSLD

SEQ ID NO: 247810 - protein, 168 aa, Glycine max
  Clone ID: PAT_MRT3847_65802C.1.pep
AFVLPMLRHIKDQPPVVAGDGPIGLIMAPTRELVQQIHSDIKKFAKVLGLRCVPVYGGSGVAQQISELKRGAEIVVCTPGRMIDILCTSSGKITNLHRVTYLVMDEADRMFDMGFEPQITRIVQNIRPDRQTVLFSATFPRQVEILARKVLNKPVEIQVGGRSVVNKD

SEQ ID NO: 247811 - protein, 98 aa, Glycine max
  unsure (1)..(98): unsure at all Xaa locations
  Clone ID: PAT_MRT3847_65803C.1.pep
GHLIYKLGGIDKSEIERSEKEAAEMNKRSFKWGWVLDKLKAERERGVTIDIDXRKLETTKYYCTAIDAPGHRESGKNTMTGTSQPEGDGLIIDWTTGG

SEQ ID NO: 247812 - protein, 82 aa, Glycine max
  Clone ID: PAT_MRT3847_65804C.1.pep
TRIHKHFANTYTTTTPPTQTGTFKRQTAPPHINHYLRKTAHASKRRTNMHLTVNTTPHTTYYTPNPTKNLQPSSEHIPSYLT

SEQ ID NO: 247813 - protein, 530 aa, Glycine max
  Clone ID: PAT_MRT3847_65805C.1.pep
MPSDSSVISNGHSNGSVNPLPNLQRTYQVVVAATQDWGIGKDGKLPWRLPTDLKFFKEITMKTSEPGKKNAIVMGRKTWESIPLEYRPLSGRLNVVLTRSGSFDIATAENVVICGSMSSALELLAASPYSLSIEKVFVIGGGQIFREALNVPGCEAIHLTEIQSSIECDTFMPPVDFTIFRPWYSSFPKVENNIRYSFTTYVRVRSSAAESAGQNIDPLLDNNSESMKFEVKDFSFLPKMISERHEEYLYLKLVQDIIAEGTTKGDRTGTGTLSKFGCQMRFNLRGNFPLLTTKKVFWRGVVEELLWFISGSTNAKVLQEKGIHIWDGNASREYLDGVGLTEREEGDLGPVYGFQWRHFGARYTDMHHDYSGQGFDQLLDVINKIKRNPDDRRIILSAWNPVDLKLMALPPCHMFAQFYVAHGELSCQMYQRSADMGLGIPFNIASYALLTCMIAHVCDLIPGDFIHVIGDAHIYRNHVRPLQEQLHNQPKPFPTLKINPKKKDIDSFVAADFKLIGYDPHQKIDMKLSV

SEQ ID NO: 247814 - protein, 154 aa, Glycine max
  unsure (1)..(154): unsure at all Xaa locations
  Clone ID: PAT_MRT3847_65806C.1.pep
ARARAGSRRLREDDRRGIILSAXNPSDLKLMALPPCHMFAQFYVANGELSCQMYQRSADMGLGVPFNIASYALLTCMIAHVCDLVPGDFIHVIGDAHVYRNHVRPLQEQLQNQPKPFPILKINPKKKDIDSFVAADFKLIGYDPHQKIEMKMAV

SEQ ID NO: 247815 - protein, 71 aa, Glycine max
  unsure (1)..(71): unsure at all Xaa locations
  Clone ID: PAT_MRT3847_65807C.1.pep
VKRQXXEPAKXXXXWSLRXKRVFXXWXXGXEEXXALXGEFXEDKTLNWGKPQPYNSXNLTDXDVXSXRXFL

SEQ ID NO: 247816 - protein, 109 aa, Glycine max
  unsure (1)..(109): unsure at all Xaa locations
  Clone ID: PAT_MRT3847_65808C.1.pep
DMHADYSGQGFDQLLDVINKIKHNPNDRRIILSAWNPSDLKLMALPPCHMFAQFYVANGELSCQMYQRSADMGLGVPFNIASYALLTCMIAHVCDLVXGDFIHVMGDHM

SEQ ID NO: 247817 - protein, 530 aa, Glycine max
  Clone ID: PAT_MRT3847_65809C.1.pep
MPSDSSVISNGHSNGSVNPLPNLQRTYQVVVAATQDWGIGKDGKLPWRLPTDLKFFKEITMKTSDPGKKNAIVMGRKTWESIPLEYRPLSGRLNVVLTRSGSFDIATAENVVICGSMSSALELLAASPYSLSIEKVFVIGGGQIFREALNAPGCEAAHLTEIEASIECDTFMPRVNTSVFRTWYSSFPLVEDNLRYSFTTYVRVRSSPPESPDQNADPFFDNNSDSLKFEVKKFSFLPKMVYERHEEFKYLRLVQEIISEGTTKDDRTGTGTLSKFGCQMRFNLRRNFPLLTTKKVFWRGVVEELLWFISGSTSAKVLQEKGIHIWDGNASREYLDSIGLTEREKGDLGPVYGFQWRHFGAKYTDMHADYSGQGFDQLLDVINKIKHNPDDRRIILSAWNPSDLKLMALPPCHMFAQFYVANGELSCQMYQRSADMGLGIPFNIASYALLTCMIAHVCDLIPGDFIHVIGDAHVYRNHVRPLQEQLHNQPKPFPTLEINPKKKDIDSFVAADFKLIGYDPHQKIDMKLAV

SEQ ID NO: 247818 - protein, 105 aa, Glycine max
  Clone ID: PAT_MRT3847_6580C.1.pep
QTMTHSSSTVTSLTVTGGGDSNGTVNFQNLPTNAFGNLQGTDSGTDRTNYHLDSIPYAIPSKEYRCLQGLKSEGGEHCFFSEASGSNKVLQMESQLENTWPSMST

SEQ ID NO: 247819 - protein, 51 aa, Glycine max
  Clone ID: PAT_MRT3847_65810C.1.pep
PLFGCPNPSPVLKKLQKVKFATPPGFTRIIGFPPVPQVQWISFFPPQPPGF

SEQ ID NO: 247820 - protein, 64 aa, Glycine max
  Clone ID: PAT_MRT3847_65811C.1.pep
AEDRHLPYKVERITYAIMDRVLHELSGNEDKSQEITRTHGGSELDAPQWPETLHNAPGQTDGKY

SEQ ID NO: 247821 - protein, 129 aa, Glycine max
  unsure (1)..(129): unsure at all Xaa locations
  Clone ID: PAT_MRT3847_65812C.1.pep
PLPWHLWIIVSLRFTITLYYCPHPCGAACGNYFTDSPSLPILSCPACFPFHVRKCLMIVLDHRRILDSDITCELKHLMDFGLENAHVRITCRPRYVRIYLXSSYPDRALYYNEXSRMFNLTIGLCSYGV

SEQ ID NO: 247822 - protein, 57 aa, Glycine max
  Clone ID: PAT_MRT3847_65813C.1.pep
GRKFRIMLLGRAVTVLKILTDLIISMMWMVGSSVCMWVDNFKSHGSIVKCSLAIHTI

SEQ ID NO: 247823 - protein, 306 aa, Glycine max
  Clone ID: PAT_MRT3847_65814C.1.pep
MKTETEPNETESDWSELTRECLINILSRLSVEDRWRGTMLVCKSWFSVFKEPSLHFVFNLDPQFDSPTESTRWWTPEFEAKIDNMLRSVVEWAQSSLTHIRIRHCSDRSLALVAQSCPNLEVLFIRSCPRVTDDSISRIALSCPKLRELDISYCYEITHESLVLIGRNCPNLKVLKRNLMNWLDPSQHRGIVPDDYLNACPQDGDDEAAAIANSMPGLEQLEIRFSKLTAKGLNSICQGCPNLEFLDLSGCANLTSRDIANASSSLVHLKEIKKPNFYIPRSVFHTERYGHWSLYDERFQTDIFQI

SEQ ID NO: 247824 - protein, 62 aa, Glycine max
  Clone ID: PAT_MRT3847_65815C.1.pep
YWEKFVGFQISPIRGLIKDKTNSDVLFPIIWSYPIVLIIPSLGWWPLLTLVEKNWGHFLVAP

SEQ ID NO: 247825 - protein, 59 aa, Glycine max
  Clone ID: PAT_MRT3847_65816C.1.pep
HPTCLSQGMASFNQMCKIMTSIFVYFSLLCFIVFWGRQEHGSCSYVSSSAVRNSDPRSS

SEQ ID NO: 247826 - protein, 375 aa, Glycine max
  Clone ID: PAT_MRT3847_65817C.1.pep
MALPDSSSRRNSLIPSFIYSSSSKTLPLHHMLNTASAAAAAAPSPPPANLDAGSRGLMIPSPSESRKIELYSPAFYAACTAGGILSCGLTHMTVTPLDLVKCNMQIDPAKYKSISSGFGVLLKEQGFRGFFRGWVPTLLGYSAQGACKFGFYEFFKKYYSDIAGPEYASKYKTLIYLAGSASAEVIADIALCPFEAVKVRVQTQPGFARGLSDGLPKFVRSEGTLGLYKGLVPLWGRQIPYTMMKFASFETIVELIYKHAIPTPKNECTKSLQLGVSFAGGYVAGVLCAIVSHPADNLVSFLNNAKGATVGDAVKKLGLWGLFTRGLPLRIVMIGTLTGAQWGIYDAFKVFVGLPTTGGPAPAAAPAPGSELAKA

SEQ ID NO: 247827 - protein, 372 aa, Glycine max
  Clone ID: PAT_MRT3847_65818C.1.pep
MALPDSSSCRNSLIPSFIYSSSSKTLPLHHMLNSASAAAPSQPPENLHAGSRGLMIPSPSESRKIEMYSPAFYAACTAGGILSCGLTHMAVTPLDLVKCNMQIDPAKYKSISSGFGVLLKEQGFRGFFRGWVPTLLGYSAQGACKFGFYEFFKKYYSDIAGPEYASKYKTLIYLAGSASAEVIADIALCPFEAVKVRVQTQPGFARGLSDGLPKFVRSEGTLGLYKGLVPLWGRQIPYTMMKFASFETIVELIYKHAIPTPKNECTKGLQLGVSFAGGYIAGVLCAIVSHPADNLVSFLNNAKGATVGDAVKKLGLWGLFTRGLPLRIVMIGTLTGAQWGIYDAFKVSVGLPTTGGPAPAAALASDAELAKA

SEQ ID NO: 247828 - protein, 234 aa, Glycine max
  Clone ID: PAT_MRT3847_65819C.1.pep
MATPTLIGPPELYNPYPTQTPAPTPTPTPTQPQTVTRTTPIDPFIDQMVVKFNTMSSPPPPNMTLTENMSPTFFTTGNPCLDFFFHVVPDTPPETILQRLELAWALNPLTALKLVCNLRGVRGTGKSDRQSFYPAALWLHRRHPKTLAANVSSLAEFGYFKDLPEILYLLLEGSDARKVQKEAWQNRKRGAHNNKKKNPRTQKMQKVKTKSLAQRVNVEKEKESSEKEIAHVAR

SEQ ID NO: 247829 - protein, 69 aa, Glycine max
  Clone ID: PAT_MRT3847_6581C.1.pep
LGVRMWSTQPSRKITLTRSAYALGNDIEASPTARDRTDRAEPSMSTMVSKPMVSTPECGTQEDMMSTLH

SEQ ID NO: 247830 - protein, 553 aa, Glycine max
  unsure (1)..(553): unsure at all Xaa locations
  Clone ID: PAT_MRT3847_65820C.1.pep
PEARGRPTRPVTFDDFAVXCYIKNELQEIVRNLRNDESLQDXGIYCPKDVLLHGPPETGNILLEKPKAVETGMPFFAPLGTDSVEIFVGASAFRVKNLFTNARAFSPSIIFIDEIDAIGSKRGGPDTGGGGAEREQGLLQILTEMDGFKVSTAQVLVIGATNRLDILDPALLRKGRFDKIIRVGLPSEDGRFAILKVHARNKFFRSEEEKETLLKEIAELTEDFTGAELQNILNEAGILTARKDLDYIGRDELLEALKRQKGTFETGQEDSTEIPEELKLRLAYREAAVAVLACYFPEPHRPFLETDINSIRSQPNMRYAEISGQVFARKLDYINSIVRACAPRVIEEEMFGIDNLCWISAKATLEASKRAEFLILQTGMTAFGKAYYKNYSDLVPSLAMKLEALRDEYMRYATEKCSSVLKEYHLAVETITDILLEKGQIKAEEIWDIYRGAPRVAQPAVSPVDEFGALIYAGRWGIHGISLPGRVTFAPGNVGFATFGAPRPTETQIVSDETWKLVDDIWDKKVQNIKDEASKVIEEEKEKPQLLMASHFL

SEQ ID NO: 247831 - protein, 95 aa, Glycine max
  Clone ID: PAT_MRT3847_65821C.1.pep
PPVSPVDEFGALIYAGRWGIHGISLPGRVTFAPGNVGFATFGAPRPTETQIVSDETWKLVDDIWDKKVQNIKDEASMVIEEEKEKPQLLMASHFL

SEQ ID NO: 247832 - protein, 56 aa, Glycine max
  Clone ID: PAT_MRT3847_65822C.1.pep
FVQTFTNLWLLGAHPGWLTISTNIGPWEPTISNFIKEAFNFWLKRTILKLFFSFIT

SEQ ID NO: 247833 - protein, 139 aa, Glycine max
  unsure (1)..(139): unsure at all Xaa locations
  Clone ID: PAT_MRT3847_65823C.1.pep
LWRCLWSKSSSTLNLSDTTVKVIAXLIWIGGSGMDLKSXARTLPGPVSDLSHLXKWDYDGCRTGQAPGXDSESDCXPHSIFWDPFIRGNNILAICDAYTAGGEPIPTYMRHAGAKGMSHPDVGAEMPWYMIEQEYTLLL

SEQ ID NO: 247834 - protein, 151 aa, Glycine max
  unsure (1)..(151): unsure at all Xaa locations
  Clone ID: PAT_MRT3847_65824C.1.pep
FGALSPTVNNMSAYGLNPGVAGPRLKGTIPQTISQHTVWNLTATERTPLHIAPSKQSFCQLSIDLLGGGILEHQTGDWITLIQNNPIMDLQRAPARNTGCVMVXKIEMSGNAAVKKSEWASLAQVFLTDSISSXHHDACQWTQPEPHAWEL

SEQ ID NO: 247835 - protein, 46 aa, Glycine max
  Clone ID: PAT_MRT3847_65825C.1.pep
ALCHGHRSFVHDMREGIKSALMRCVIIHTSSNPSNCQAPAMYIVLM

SEQ ID NO: 247836 - protein, 246 aa, Glycine max
  Clone ID: PAT_MRT3847_65826C.1.pep
MPIVQKLYDTCKASLSPEGPISEEALEKVRTLLDELKPSNVGLEQEAQLVRGWKGSLNGTNGKKGRNGSYQYPPSIKYIHLHECDKFSMGIFCMSPGSVIPLHNHPGMTVLSKLLYGSLLVRSYDWLDLPGPDDPSQARPAKLVKDCQMSAPCNTTVLYPSKGGNIHCFKALTPCALFDVLSPPYSSEDGRHCSYFRKSTRKDLPGVELDQLSGVKPSEITWLEEIQAPENLVVRRGVYKGPTIRR

SEQ ID NO: 247837 - protein, 70 aa, Glycine max
  unsure (1)..(70): unsure at all Xaa locations
  Clone ID: PAT_MRT3847_65827C.1.pep
TDLSRDDVDTPKGSMLDRKISHSKIAVPKNAEXVPPTVFLGNAILPSDLLANFLTDGRFTASVDLQRNHR

SEQ ID NO: 247838 - protein, 66 aa, Glycine max
  Clone ID: PAT_MRT3847_65828C.1.pep
AVGPRWGQLDFTPSIFNTVAQWESSCAQSAEAFKYTPARFGSYVRAVSSTVCASISSLKEFICIIC

SEQ ID NO: 247839 - protein, 66 aa, Glycine max
  Clone ID: PAT_MRT3847_65829C.1.pep
PGLHGDLRSLPQAPSCLYSRPTMIASAFHLLLPAASVVQVIVLYHARGPLYLLQALNSWYPRGGGS

SEQ ID NO: 247840 - protein, 101 aa, Glycine max
  Clone ID: PAT_MRT3847_6582C.1.pep
PRFFWNPFLKHGLFMTYPCPLRLAPYRTQPSTTEEGRRLLLFDLEPMPGTVLALPYSRWIHTLQGIPMTAYPYSLEGPEQRVRHSIRPIAATQWLIYCPTL

SEQ ID NO: 247841 - protein, 48 aa, Glycine max
  Clone ID: PAT_MRT3847_65830C.1.pep
NNNLFFNQSLKKNEKYTLIFFRIKLYVHLNLSCSPPRKVDYVEVIFLC

SEQ ID NO: 247842 - protein, 380 aa, Glycine max
  unsure (1)..(380): unsure at all Xaa locations
  Clone ID: PAT_MRT3847_65832C.1.pep
MVAEAEIICQQNIPMLDVKYHICVAQEHNVKVEVSPKSPSPPVPIFGQAVSCSEIIKDSILEAPAMNFFPNVRSGSYAEIGPRVSMDDEHICIDDLGAHLGFVFKCPIPSAFYAVFDGHGGPDAAAFVKRNAMRLFFEDADMLQSYDADAFFLQKLEDSHRRAFLRADLALADEQTVGSSCGTTALTALVLGRXCLVANAGDCRAVLCRRGVAVEMSNDHRPSYLPEKRRVEELGGFIDDGYLNGYLSVTRALGDWDLKFPLGAASPLIAEPDVRLVTLTEGDEFLIIGCDGIWDVMSSQVAVSLVRRGLRRHDDPQQCAGELVKEALRLNTSDNLTVIVVCLSPIESIVESCPPQRRRFKACSLSEEARNRLKSLIEGN

SEQ ID NO: 247843 - protein, 66 aa, Glycine max
  Clone ID: PAT_MRT3847_65833C.1.pep
WGGGGGGANNLTGSVSKERVKDRGCVVNPNSHTNKEMRSIISAQRTRVDSHAVAEALVKWAQSGLV

SEQ ID NO: 247844 - protein, 73 aa, Glycine max
  Clone ID: PAT_MRT3847_65834C.1.pep
EYDKIGKSKNWALIDLCKHIQGNQFKVKNNLAWVMKRRWRKKRCRTCSAIYLFFFPSFYLFIFFLFFIFFFFP

SEQ ID NO: 247845 - protein, 43 aa, Glycine max
  Clone ID: PAT_MRT3847_65835C.1.pep
QGHPRVLKMAAASSMALSSRSLAGNAVKLGPSAADVGRVSYED

SEQ ID NO: 247846 - protein, 34 aa, Glycine max
  Clone ID: PAT_MRT3847_65836C.1.pep
SKEKEIKKINNNNIEFLKFGQIYLDLIGNINLEF

SEQ ID NO: 247847 - protein, 73 aa, Glycine max
  Clone ID: PAT_MRT3847_65837C.1.pep
TGSDLTLHCSLLEMLPCIESVVRNYSAVAYSEPSIGLHRHQPNLIIASLNVQRLLLMHSANELDKLCYYYATI

SEQ ID NO: 247848 - protein, 65 aa, Glycine max
  unsure (1)..(65): unsure at all Xaa locations
  Clone ID: PAT_MRT3847_65838C.1.pep
GGAIQVAHSKGDVVLKVCPGTQPGXKEVLKKKGVRTQNFCTCGDQNVFFNVKIPTNLTQGKGELI

SEQ ID NO: 247849 - protein, 44 aa, Glycine max
  Clone ID: PAT_MRT3847_65839C.1.pep
LCRMLWVSHNLYEPHTNYVNDGIFHSDIKCLLIYRIRYTTLRHI

SEQ ID NO: 247850 - protein, 125 aa, Glycine max
  unsure (1)..(125): unsure at all Xaa locations
  Clone ID: PAT_MRT3847_6583C.1.pep
PARHHTHLTYFESRLXLIWREILNTNTADPDSYIAGGGXQGLNLGATVPEXTTQRHVDEGYXPSEGEPVSDSEDEASHGESHAXSDDDGQEQPQEDSXKQNGXTCEELEMEASNADRNGETESNS

SEQ ID NO: 247851 - protein, 163 aa, Glycine max
  unsure (1)..(163): unsure at all Xaa locations
  Clone ID: PAT_MRT3847_65840C.1.pep
PRVRRKVHLTDISILGIDNTGLANIPYYEKHGYGAEECNEPLYEEWXNKGDAPGLTETLKNDNKLESLGLKIVFLPGQXLDSMAATESDLKKAGFHTWKQAILKDPHLVTSNALSYRSALKEKLXRQGYRMDGVTEDHGDGLVGDHRCESXTFKLTNAMYYIE

SEQ ID NO: 247852 - protein, 70 aa, Glycine max
  Clone ID: PAT_MRT3847_65841C.1.pep
HDRTDDWITRMIQIRTECVTNQSVVKIITTDDAVDSSHGNNDGATIFSGDTSHSTLMCALMSVYSRDIVV

SEQ ID NO: 247853 - protein, 75 aa, Glycine max
  Clone ID: PAT_MRT3847_65842C.1.pep
HFRNASVGDFAKIFNCSSSFIVRSSLFFGLQPVSTRNRTFQFILCTRGGPHLFRVLLFSFHLLSVPPFDALQSFT

SEQ ID NO: 247854 - protein, 138 aa, Glycine max
  Clone ID: PAT_MRT3847_65843C.1.pep
LMVPTMVSKMMFRGVIVTIMMTTISVLCATMVVTVHAFVSHASYLSTIPVHVHVHGSYAVAMPIMMFLHCEVRVHTSISTIAFCCCCCCCSCSCACLGMACGCGQSCYQGSETHLARQRCATDPDSPSTCSHQHSVAA

SEQ ID NO: 247855 - protein, 79 aa, Glycine max
  Clone ID: PAT_MRT3847_65844C.1.pep
PVPYLFIPFFNQLKPHLKMLSPLSGQQPLALLFNHLSIYYPTHLILTSNTISPFPPLTTITTTYMPPFPSLYYPQQKLS

SEQ ID NO: 247856 - protein, 72 aa, Glycine max
  Clone ID: PAT_MRT3847_65845C.1.pep
SSCSRSRQRRGLGSEPAPTTSATIGFPPSSAAPATRTMRIAEFRDRVLEGRRHRLLRCLCRHQVPHRRWREC

SEQ ID NO: 247857 - protein, 89 aa, Glycine max
  Clone ID: PAT_MRT3847_65846C.1.pep
ECKGADIVAMGNWDIWECKGPDSVAMVELGSVDEHAEKLWCNCNRLSGCKEPDPAAMGNLGKVAMWGTRFGTYKGAGACGHMRGQKQQL

SEQ ID NO: 247858 - protein, 102 aa, Glycine max
  Clone ID: PAT_MRT3847_65847C.1.pep
GLLLPCPAPVGAVCACPWLSSGVPWSFRPGPSRRWGWRPCSSGPLPWSGVWSLSVGVRRFGGWFVRGGVWSHPLLLLLPPCGFSWGADISRAAWVGPGFPVR

SEQ ID NO: 247859 - protein, 83 aa, Glycine max
  unsure (1)..(83): unsure at all Xaa locations
  Clone ID: PAT_MRT3847_65848C.1.pep
PLPFGFPVFMVHLAPIPFSGAGISPPRSLGAAVISXNGRGWDHHWILRVGPLVVAFTAGASLQYSLIAGAVKALGSFRSNPSN

SEQ ID NO: 247860 - protein, 115 aa, Glycine max
  Clone ID: PAT_MRT3847_65849C.1.pep
RPFLLPLRFSCLLEFHFSVQPSQHHQIRTTTTIQTPPLPHATTVDTTTTQTLSYLCVGPEIMPDLYPKPPLHVADLFPKPGVRSMSASLCEIEPRTFPNLVKSLFYMYSLLWTCS

SEQ ID NO: 247861 - protein, 176 aa, Glycine max
  Clone ID: PAT_MRT3847_6584C.1.pep
ARDFSYLEPPPLPNRVYYSERIPREQADLLNRSTKSDDAHGSHLLMSDLLSDFSQKNSITESSDILHTDGHTINDVPPQTYKQLPDTTSKVNSKLLQHVNSESKQVLEDNKVSRNEDQVLSSENRTKGAEHLAFHRVPSVEHNQNLTSKLPDLNLSEVSTRESDNDTKVQSQTFPL

SEQ ID NO: 247862 - protein, 44 aa, Glycine max
  unsure (1)..(44): unsure at all Xaa locations
  Clone ID: PAT_MRT3847_65850C.1.pep
IPNSGRDPRIRARVRLFIASFRYRRXRSQERDACDAIASPIERP

SEQ ID NO: 247863 - protein, 32 aa, Glycine max
  Clone ID: PAT_MRT3847_65851C.1.pep
LIKLLLQINLNLQILKNLITFNFCSNNIAGPV

SEQ ID NO: 247864 - protein, 104 aa, Glycine max
  Clone ID: PAT_MRT3847_65852C.1.pep
YWYNRRGLVEIGAPPPSPTGGGRNTPGAPDTMKASIQTFSADLCRRAGPGKIQILALRGSTQTLTTCPSPRCEANRGSNSEHHCPARGAKKEWNHTERLCRQRA

SEQ ID NO: 247865 - protein, 47 aa, Glycine max
  Clone ID: PAT_MRT3847_65853C.1.pep
FLFYVELFHFPNLLHEPNLNLQLSSIFSNLYYYFLPHHIQLLTMTPL

SEQ ID NO: 247866 - protein, 55 aa, Glycine max
  unsure (1)..(55): unsure at all Xaa locations
  Clone ID: PAT_MRT3847_65854C.1.pep
PPLSLPPYPPPFPLPLVPXPPPPSLPPYPAPPPPPPXPPPPXLSPPPAPPPPVAP

SEQ ID NO: 247867 - protein, 135 aa, Glycine max
  Clone ID: PAT_MRT3847_65855C.1.pep
RVSLVFRLENVKGSAGSLVTLVSWLCSWIISYSFNFLMSWSSAGMLSFNLGPEGKNKKKKLRIFKKLGKKNRNVRSPYFTYGIKFILCYVWAGTFLMFSSICGFTVLFVAKLVPETKGRTLEEIQASLNSFSSKR

SEQ ID NO: 247868 - protein, 142 aa, Glycine max
  Clone ID: PAT_MRT3847_65856C.1.pep
VGATVNHDPEIGDLLKVVFVPDYNVSVAEMLIPASELSQHISTAGMEASGTSNMKFAMNGCILIGTLDGANVEIREEVGADNFFLFGAKAHEIAGLRKERAEGKKWTRMSILNTAGSYKFSSDRTIHEYAREIWNIEPVQLP

SEQ ID NO: 247869 - protein, 39 aa, Glycine max
  Clone ID: PAT_MRT3847_65857C.1.pep
QHRDEYERSCLIMGYAEGGMEPLYEQAVPYMYAHLLSDL

SEQ ID NO: 247870 - protein, 722 aa, Glycine max
  Clone ID: PAT_MRT3847_65858C.1.pep
RVRIIRNDVSYPVKFYGKVVSGSDGKKHWIGGEDIKAVAHDVPIPGYKTKTTINLRLWSTKAASEEFDLSAFNAGRHTEASEALANAEKICYILYPGDESIEGKILRLKQQYTLCSASLQDIIARFERRSGTNVNWEEFPEKVAVQMNDTHPTLCIPELMRILIDVKGLSWKDAWNITQRTVAYTNHTVLPEALEKWSLDLMQKLLPRHIEIIEMIDEELIRTIIAEYGTENSDLLEKKLKEMRILENVELPAEFADIVVKSKEAIDIPSEELQSSEQAEAEDEKDDDEVEAVAKKNGTDESSIEDEKEELPEPVPEPPKLVRMANLCVVGGHAVNGVAEIHSEIVKDEVFNAFYKLWPEKFQNKTNGVTPRRWIRFCNPDLSKIITEWIGTEDWVLNTGKLAELRKFVDNEDLQVQWREAKRSNKVKVAAFIREKAGYSVSPDAMFDIQVKRIHEYKRQLLNIFGIVYRYKKMKEMSAAERKANFVPRVCIFGGKAFATYVQAKRIVKFITDVGATVNHDPEIGDLLKVVFVPDYNVSVAEMLIPASELSQHISTAGMEASGTSNMKFAMNGCILIGTLDGANVEIREEVGADNFFLFGAKAHEIAGLRKERAEGKFVPDPRFEEVKEFVRSGVFGSYNYDELMGSLEGNEGFGRADYFLVGKDFPSYIECQEKVDEAYRNQTKWTRMSILNTAGSYKFSSDRTIHEYAREIWNIEPVQLP

SEQ ID NO: 247871 - protein, 181 aa, Glycine max
  Clone ID: PAT_MRT3847_65859C.1.pep
PRVRGYLLGLARAEKLEELNRVANVVSRLGKKCSLPALQGFEHVYGDIVSGVIDVRELGFLVKHMEGMVRKMDRYVSATRSLHSEMGVLNDLEQAVKKFQHNLHEESRRAFEQKLTWQKQDVRHLKEISLWNQNFDKVVELLARTVCTIYARICMIFGDSTWRKSNSLGLSGRFSKSNIAE

SEQ ID NO: 247872 - protein, 62 aa, Glycine max
  Clone ID: PAT_MRT3847_6585C.1.pep
HTSCDLTLMGTKYANPPCAYSLLRETSKCRAYSRSSLTSTARMHKFLRRVDSNGTCNINPSR

SEQ ID NO: 247873 - protein, 133 aa, Glycine max
  Clone ID: PAT_MRT3847_65860C.1.pep
RHQNRKGPGRPKPSASQGARNDPGAGGKEKKPTPPTDRRHRKRGNRPEPEGEREKKPHPEGPQEEKPPKGATRKGRREHRPSRRGGARRRRTAKGTTKGRGGAGPKGKRNHGPGRRAPQRAEKQKGRKKQKET

SEQ ID NO: 247874 - protein, 72 aa, Glycine max
  Clone ID: PAT_MRT3847_65861C.1.pep
PLSLTLHHHHYYYPLIATNSNSFIINIIIIIHHPLIALDDHNHLHQHNKELPSHTKQGHKQAQGEVDDKVKR

SEQ ID NO: 247875 - protein, 58 aa, Glycine max
  Clone ID: PAT_MRT3847_65862C.1.pep
VVVMSESCDEISGDQPRSTLIKWDSHLERIREICYESYCALSQDFVYAVPLTRVLTAG

SEQ ID NO: 247876 - protein, 89 aa, Glycine max
  unsure (1)..(89): unsure at all Xaa locations
  Clone ID: PAT_MRT3847_65863C.1.pep
NPAREQKEEHEWHRKEEKHGGKGSDEXQDEREHPRPHQPHQKEEEKHEWQHKQEKHQGQESEEEEEDQDEDEEQDKESQESEGSESQRE

SEQ ID NO: 247877 - protein, 55 aa, Glycine max
  Clone ID: PAT_MRT3847_65864C.1.pep
ERIDVRRDIKWSNLLLRKTGNAKEPDFGLEKLLGSDSSQSTTRAMGTSGYDAPEY

SEQ ID NO: 247878 - protein, 46 aa, Glycine max
  Clone ID: PAT_MRT3847_65865C.1.pep
NRSNAHTMTLNHNNVLVLSAVLTLLFYLLLTLRELGEEHPLVLQYH

SEQ ID NO: 247879 - protein, 39 aa, Glycine max
  Clone ID: PAT_MRT3847_65866C.1.pep
GVLIDPCFPSPKKKKKKKKKKKKKKKKKKKKKKKKKKRA

SEQ ID NO: 247880 - protein, 46 aa, Glycine max
  Clone ID: PAT_MRT3847_65867C.1.pep
HTAEISLYASGLNCVWTCDFTAISLRNHATANFTYELIYTTRYRVN

SEQ ID NO: 247881 - protein, 202 aa, Glycine max
  Clone ID: PAT_MRT3847_65868C.1.pep
MPQSPQILKIEDLPASEAKWVSFQKISWQDQTGRERVWEAAARKTRGTSGVDAVAINAIIRHPSRPPSTIIILQYRPPVNAVCVELPAGLVDEKESPGDASVRELHEETGYKGKLACISPSMVSDPGLSAANMQLATVEVNLKEGDEEPEQALDDGEFIERVVVPLNELYERLVKYDREGKPVYARLWHWAAGWHAAKTMKL

SEQ ID NO: 247882 - protein, 39 aa, Glycine max
  unsure (1)..(39): unsure at all Xaa locations
  Clone ID: PAT_MRT3847_65869C.1.pep
TALKVIEWAEKSGIVKRKVNYKLRDXLFARQRDWGEPIR

SEQ ID NO: 247883 - protein, 24 aa, Glycine max
  Clone ID: PAT_MRT3847_6586C.1.pep
KFYTTNQLEITIYSNFINVYNNYL

SEQ ID NO: 247884 - protein, 140 aa, Glycine max
  unsure (1)..(140): unsure at all Xaa locations
  Clone ID: PAT_MRT3847_65870C.1.pep
SRPSRARPSSRPPTRTTSTPPRAISRPPPRRRSPRLXPTVTTAPLKKTKAPKTTTPVTTAPLKKXPRLPRRPPLSRRRRLPARSSRTKTRSSRTSCSRTRLTRISSVKGVKHLQGQNFLQQHTLTTYTAILGAQASRLFE

SEQ ID NO: 247885 - protein, 166 aa, Glycine max
  unsure (1)..(166): unsure at all Xaa locations
  Clone ID: PAT_MRT3847_65871C.1.pep
RHCVMKKEGFFFFFAYSLYSTSSLKNPTFTSPRCPMLITTPPHIPRAYLTECTTMPTPPPYWDQNANHCHISVSFGVWPSSPLSRTQPSTGPITRPPVLSYLWLLVGVPXRSGCLFVLGHYGHLSYCSRPIGYWCHYYSFNSLFSYCIIFGDRTLDSSIEIARRCS

SEQ ID NO: 247886 - protein, 68 aa, Glycine max
  Clone ID: PAT_MRT3847_65872C.1.pep
REITLQNGVNGYHHPQLVHDLGRHLDPLRQDKYAGSMDGLQLALDGRLLQIHLFGSKLLRHAVASSRV

SEQ ID NO: 247887 - protein, 111 aa, Glycine max
  Clone ID: PAT_MRT3847_65873C.1.pep
TLSTLFAPKQKPSSLHSSFSPLKCYYSRLLTKPLQFSQVSLPLISLIFSRISSSTPFSIFVLFINYFICRFSLFILFYYYSVMYLHSTIVHFLNYFSLALMFRPLFVLFIF

SEQ ID NO: 247888 - protein, 95 aa, Glycine max
  unsure (1)..(95): unsure at all Xaa locations
  Clone ID: PAT_MRT3847_65874C.1.pep
MVLKLAKDYCFDSKGIKMELKVLATDKVEKHESFIIRPRIKVWMARAITFVVLWTSLVQLIALGELLGPSLLKGMPYXFSSPPVEKSLAQAKVVL

SEQ ID NO: 247889 - protein, 81 aa, Glycine max
  Clone ID: PAT_MRT3847_65875C.1.pep
GRLPAQKSDHILAKSSEIGLLKAGGLPSSGLPNQFLDNVSRSAGTNGGLTRSNFLPTSYSFVSNTGKLIYYRVIFLFLLLY

SEQ ID NO: 247890 - protein, 148 aa, Glycine max
  Clone ID: PAT_MRT3847_65876C.1.pep
KQSDRDLTPPFVDDGLLEIVGFRNAWHGLVLLAPKGHGTRLAQAHRIQFEFRKGAADHTFMRIDGEPWKQPLPVDDDTVMVEISHHGQVNMLSTHNCKSKSVYDPSSPHHEDEEDDSDEEDSVAEEFRKFGAADTFRIPDEVDVSHLS

SEQ ID NO: 247891 - protein, 50 aa, Glycine max
  Clone ID: PAT_MRT3847_65877C.1.pep
LGIRISINALTSSNIFSPFQIHIFYYQGLLKFHISLYLLHNHSYTIQLRL

SEQ ID NO: 247892 - protein, 168 aa, Glycine max
  unsure (1)..(168): unsure at all Xaa locations
  Clone ID: PAT_MRT3847_65878C.1.pep
MVTTTKAGEARLRQLYQKEAHIQMMLAVENDSHHKTVYFQQDRSMFKRRNVGIDIIILGNTWEKLHITTLGIDAIENPQDIIVYCGRPYPQRSVLKFAQYTGANAIAGRHTPGAFTXIVRLSSVSTLLLILXDPKRAQPINDAALGNIPTIAFXDSDSTMTYVDIGNT

SEQ ID NO: 247893 - protein, 78 aa, Glycine max
  unsure (1)..(78): unsure at all Xaa locations
  Clone ID: PAT_MRT3847_65879C.1.pep
IQGRPGKMHXNVNNYKKEMIWRKIRRGSKCQSTQLLPNFSTLCSQSPQTIICVPSPGADPYXPPSPQAFQPHFSLITP

SEQ ID NO: 247894 - protein, 134 aa, Glycine max
  unsure (1)..(134): unsure at all Xaa locations
  Clone ID: PAT_MRT3847_6587C.1.pep
GLGDIVTPGIFVALAFAFDVXRGNPPPYFKGAFVGSPVGLVPPIGVMNWFPAAPPALLYIGPSVIGFLAAPCLWNGDVPPLLGFDESKTAHSPPESADAQSSQKVELVEACPIPILPGPGTNPAFFWENRFFLS

SEQ ID NO: 247895 - protein, 41 aa, Glycine max
  Clone ID: PAT_MRT3847_65880C.1.pep
HLALTYSYVSRSNKVLVYRDIMVCLQVSVWCSLLGARRALV

SEQ ID NO: 247896 - protein, 52 aa, Glycine max
  Clone ID: PAT_MRT3847_65881C.1.pep
INNTPFHKTHVGLNPLTINRIVLRRPHYTNRTVATYKQNGNAKLVHKISGLS

SEQ ID NO: 247897 - protein, 50 aa, Glycine max
  Clone ID: PAT_MRT3847_65882C.1.pep
LNTVSINDTFHIHSRVRSALCPLPSCQLFVTLSSLVKTPPGDSNSLSTEQ

SEQ ID NO: 247898 - protein, 192 aa, Glycine max
  unsure (1)..(192): unsure at all Xaa locations
  Clone ID: PAT_MRT3847_65883C.1.pep
ARARAESARAESQNSNSSSSDKDTLMSNEKNIATAGPKCDNEATEMDQTSIDDDGSDEESGSCNVNAKTAEQEVVEPSHNKHHSNVESKQPKTIRNIMMALKEGKVREATSPMRGNRIKPSGLSTHKISTETLSKLPKPTFIAPSMKPNLESHAALARASPDPAXRMMGSHYPKHQILMTEASPKVKLDMIY

SEQ ID NO: 247899 - protein, 36 aa, Glycine max
  Clone ID: PAT_MRT3847_65884C.1.pep
LTTNLNTFNTLLSNFISTFIYSITLSIFYISYNNLT

SEQ ID NO: 247900 - protein, 37 aa, Glycine max
  Clone ID: PAT_MRT3847_65885C.1.pep
IDPAWSFGPTVDRKNFGFYWLFMVGPLIKRSLACLIY

SEQ ID NO: 247901 - protein, 105 aa, Glycine max
  Clone ID: PAT_MRT3847_65886C.1.pep
LIANAVTVREHYEMLTQVSQSAGFADHMTPSSARGTYNNVYQMQQQQQDGALHQHNHPLHMRYCGSSTSSSEDVGNKHIMSHNLIYIGNLLKARSVRVLLHLVDF

SEQ ID NO: 247902 - protein, 63 aa, Glycine max
  Clone ID: PAT_MRT3847_65887C.1.pep
YIFKRVSKKKKDSSQVHIHQGITISTYAVSLNTFRMFTHAYSHILGNTRAYVDCCFEFFRIKN

SEQ ID NO: 247903 - protein, 53 aa, Glycine max
  Clone ID: PAT_MRT3847_65888C.1.pep
KRFPNPYMVSKGMDTERDVTIFIDHCFEIKAPSLATLDGGLLGLINHFTEPGC

SEQ ID NO: 247904 - protein, 78 aa, Glycine max
  unsure (1)..(78): unsure at all Xaa locations
  Clone ID: PAT_MRT3847_65889C.1.pep
MLKTHGSSPARILMSHLMRYWWAERSISISHLENDFQVPFAGXAHARGIVREGRGIETKQGNSAIRKCASVQLINNGN

SEQ ID NO: 247905 - protein, 61 aa, Glycine max
  Clone ID: PAT_MRT3847_6588C.1.pep
GPYWACLGSRYPASLQFSVIPTPRFPFVVLSFGGAKVPPPPPPPPPPPPPPPPPKKEDVIQ

SEQ ID NO: 247906 - protein, 56 aa, Glycine max
  Clone ID: PAT_MRT3847_65890C.1.pep
RPRVWNDVGVPTAIDTKQKDALKEEPVDNSPSKSTSSGPVCGTTFFKVFKGDEIIK

SEQ ID NO: 247907 - protein, 53 aa, Glycine max
  Clone ID: PAT_MRT3847_65891C.1.pep
MEFSLLLILKKKKKKKKKKKKKKKKKKKKKKKKKNKKTKKKKKKEANKKKVNI

SEQ ID NO: 247908 - protein, 58 aa, Glycine max
  Clone ID: PAT_MRT3847_65892C.1.pep
PRSGQSSSRQHASRPEATPLDFVVRPESKIDPEEIRARAKQAAQDQQRMKVGVLFFKF

SEQ ID NO: 247909 - protein, 76 aa, Glycine max
  Clone ID: PAT_MRT3847_65893C.1.pep
MFIHSLVTKYRWRPIKGGNILRTPGLQFPNGFHVQIMEKDQRKQQEPGYTITTKTPQERLIYGRNLGLTFSRNTRQ

SEQ ID NO: 247910 - protein, 98 aa, Glycine max
  Clone ID: PAT_MRT3847_65894C.1.pep
VQWPHGPHELPPYALGLVIHSEHFGFTRTPSHHEQRHLEEVLRPHGILEGRTSDVIIRFFMRGNHCFLVNANDHRIFSHRVMWRERLWTMENEREIIN

SEQ ID NO: 247911 - protein, 434 aa, Glycine max
  Clone ID: PAT_MRT3847_65895C.1.pep
MDGLGSPSQWLRELRWDSQGLNPISLLIDCAKCVASGSIKNADIGLEYISQISSPDGNAVQRMVTYFSEALGYRIIKNLPGVYKSLNPSKTSLSSEDILVQKYFYELCPFLKFSYLITNHAIAEAMECEKVVHIIDLHCCEPTQWIDLLLTFKNRQGGPPHLKITGIHEKKEVLDQMNFHLTTEAGKLDFPLQFYPVVSKLEDVDFEKLPVKIGDALAITSVLQLHSLLATDDDMAGRISPAAAASMNVQRALHMGQRTFAEWLERDMINAYTLSPDSALSPLSLGASPKMGIFLNAIRKLQPKLVVITEQESNLNGSNLMERVDRALYFYSALFDCLDSTVMKTSVERQKLESKLLGEQIKNIIACEGVDRKERHEKLEKWIRRLEMAGFEKVPLSYNGRLEAKNLLQRYSNKYKFREENDCLLVCWSDRPLF

SEQ ID NO: 247912 - protein, 123 aa, Glycine max
  unsure (1)..(123): unsure at all Xaa locations
  Clone ID: PAT_MRT3847_65896C.1.pep
PGLPFRGAVRGPLDFSTSICTSIHHFHLILTGFSQQFIIFLHLTNEDQTFRFPPPPLTRHFXFLPDLLLLFHRQFALFCFWDXXLPLLDLPACTFSPPFVCHTKDLLFVAFFIHNPQILVGFS

SEQ ID NO: 247913 - protein, 106 aa, Glycine max
  unsure (1)..(106): unsure at all Xaa locations
  Clone ID: PAT_MRT3847_65897C.1.pep
KRGSTARVRPRVLHNSGLCFQKERVEKMARLITVGWCTXTELLFSAAGASWVEEAANPIRMVFCLYADVVLLIGECRRALKLSRFVSRYCKSYQIFEYMNDRYYIF

SEQ ID NO: 247914 - protein, 424 aa, Glycine max
  Clone ID: PAT_MRT3847_65898C.1.pep
MELEADHQNGIRSRLNFPLQLLEKKDIDDVTEQPCSTTSVVTATTTAITTTTTSDNNDLHLAEQSKKPPPKRSSTKDRHTKVDGRGRRIRMPAACAARVFQLTRELGHKSDGETIEWLLQQAEPAVIAATGTGTIPANFTSLNISLRSSGSTMSAPSHYFRGNYFNPSTFSTSAAAAAAAQLRSRAEWDRSMSMVMEDSRRSMLENTSSISAILNFNPMGNVNVIQQAKQELREESGGGGGLESVASDSDGSLGRKRRPEQELSQMGSYLIQSSTGSLPASHASNTAAFWMVAGHGNQAMSGGGSGGGGNNGSSDNNPIWAIPSVGNSGVYRGAMSAPGGIHFMNFASPMNLMPGGQLGSGIVGGGGGGGGNGGAQLLSESNLGMLAALNAYRQIPANGVSEPPGSAGQHHGGDDGRDSTSQHS

SEQ ID NO: 247915 - protein, 60 aa, Glycine max
  unsure (1)..(60): unsure at all Xaa locations
  Clone ID: PAT_MRT3847_65899C.1.pep
RFFEXVADDLLTLNXNLXSIXXAENPVLISXXEQIFSXGGKRXRPALVXLVSRAXAXXTW

SEQ ID NO: 247916 - protein, 107 aa, Glycine max
  Clone ID: PAT_MRT3847_6589C.1.pep
GSLRARGFWPGFLVRSRRHRCSGVVGWGFAVRLSFVSSGLGPGAWPGLVRSLGFRGVFVVVSVFLVLGPPRFSGAGGPSFLALPAWARGDRPLFVPLAPLAPCGLPG

SEQ ID NO: 247917 - protein, 93 aa, Glycine max
  Clone ID: PAT_MRT3847_658C.1.pep
SSSLRLFPFLSYWTDSCRRLLRLRGQSPRDTCLSCWGLFQDLMPGYIHIANSTGHSHLLRRFIPMLVFNSSATLQDKKIIGPCIWNSGLHDHA

SEQ ID NO: 247918 - protein, 340 aa, Glycine max
  unsure (1)..(340): unsure at all Xaa locations
  Clone ID: PAT_MRT3847_65900C.1.pep
MELEADHQNGIRSRPNFPLQLLEKKDVDDVTEQPCSTTSVVTTAAATITSGNNDLHVAEQSKKPPPKRSSTKDRHTKVDGRGRRIRMPAACAARVFQLTRELGHKSDGETIEWLLQQAEPAVIAATGTGTIPANFTSLNISLRSSGSTMSAPSHYFRGNYFNPSTFSTSAAAASAAAVAQLRSRAEWDRNMSMVMEDSRRSMLENTSSISAILNFNPMGNVNVIQQAKQELREESAAAGGGGSLDSVASDSDGSLGRKRRPEQELSQMGSYLIQSSTGSLPSSHASNTAAFWMVAGHGNQAMSGGGGSDGSSDNPIWXFPLLGIAVCIEELCLPQVAFIS

SEQ ID NO: 247919 - protein, 522 aa, Glycine max
  Clone ID: PAT_MRT3847_65901C.1.pep
MAGSERSSSRVWHYEFDVFLSFRGEDTRLGFVGNLYKALTEKGFHTFFREKHVRGEEIAASPYVVEKAIQHSRVFVVVFSQNYASSTRCLEELLSILRFSQDNRRPVLPVFYYVDPSDVGLQTGMYGEALAMHEKRFNSESDKVMKWRKALCEAAALSGWPFKHGDGYEYELIEKIVEGVSKKINRPVGLQYRMLELNGLLDAASLSGVHLIGIYGVGGIGKTTLARALYDSVAVQFDALCFLDEVRENAMKHGLVHLQQTILAETVGEKDIRLPSVKQGITLLKQRLQEKRVLLVLDDINESEQLKALVGSPGWFGPGSRVIITTRDRQLLESHGVEKIYEVENLADGEALELLCWKAFKTDKVYPDFINKIYRALTYASGLPLALEVIGSNLFGREIVEWEYTLDLYEKIHDKDIQKILKISFDALDEHEKDLFLDIACFFKGCKLAQVESIVSGRYGDSLKATIDVLLEKTLIKIDEHGRVKMHDLIQQMGREIVRQESPKHPGNCSRLWSPEDVADVL

SEQ ID NO: 247920 - protein, 27 aa, Glycine max
  Clone ID: PAT_MRT3847_65902C.1.pep
TTTKRGRMGAWQNLKDRISTGLSRYLT

SEQ ID NO: 247921 - protein, 44 aa, Glycine max
  Clone ID: PAT_MRT3847_65903C.1.pep
IIFCKHFQALNDFRSKENPLFLVYNSINLKACLRLYHRLLWIHS

SEQ ID NO: 247922 - protein, 68 aa, Glycine max
  unsure (1)..(68): unsure at all Xaa locations
  Clone ID: PAT_MRT3847_65904C.1.pep
STEVDADDKNPWFDRTXSLVAVASNTTDRSKDRSYYKSVRRLAHNHEAARTSLLRNKAHVRQLVSSRI

SEQ ID NO: 247923 - protein, 172 aa, Glycine max
  unsure (1)..(172): unsure at all Xaa locations
  Clone ID: PAT_MRT3847_65905C.1.pep
CSRLSGTIPQGVSHKTVWNQMASVRTPLNFDSSKQSFCQFSIDLLRGXILVDKTAHRITLIQNSPISNLLRVAAWNKGCLMVKIVMSVNASIKMSDWASLVLVFLSNINSSEHCDACKWTKSEPHSCELILPIEVCGPNNGXETWTSEWTNQTSXNLIFLIDIPKQSTVFVF

SEQ ID NO: 247924 - protein, 53 aa, Glycine max
  unsure (1)..(53): unsure at all Xaa locations
  Clone ID: PAT_MRT3847_65906C.1.pep
RDSSGTPYAPVXQMLSEAVITITCDLADPDGLLQQLKGLPSPHADGAMVNCGW

SEQ ID NO: 247925 - protein, 114 aa, Glycine max
  Clone ID: PAT_MRT3847_65907C.1.pep
ITKLRGALALTPPEVFFEGGFSPPSKKTSPGVKKKKKWGLPWVYGPKTRRPRYKCKCYFLGPNLGPLVFGVLKIFFPPSPKLLGFFLINWNGVPFWPPKKKPKKCGVGQKNNNI

SEQ ID NO: 247926 - protein, 93 aa, Glycine max
  unsure (1)..(93): unsure at all Xaa locations
  Clone ID: PAT_MRT3847_65908C.1.pep
KKGDCFFAQPPQVQPCSAFHPVRALKTVKGKVSQIGWASPTQNFTPIFAPFGAQKFVLGKNVASVNLVAGVYYLWKKRGAWCXKKPTKKKPPH

SEQ ID NO: 247927 - protein, 105 aa, Glycine max
  unsure (1)..(105): unsure at all Xaa locations
  Clone ID: PAT_MRT3847_65909C.1.pep
ELGLGVLEELHSISAVGRNXSVQVWVMKEYKVXSSWTKTIVVSSENILLFPLCSTKGGDIVGTYGGTGLAKCNDKGQVQEHRSYSNHPYPSQVAVYIESLLSLPM

SEQ ID NO: 247928 - protein, 63 aa, Glycine max
  Clone ID: PAT_MRT3847_6590C.1.pep
VLQSKDGSPQILDYCVTATQHVESEDPFANTCSMLVTQSAAKTNDWAGDGTTTSVGLAHGLIP

SEQ ID NO: 247929 - protein, 261 aa, Glycine max
  Clone ID: PAT_MRT3847_65910C.1.pep
GTNTYRTATVAIQGDYFVAINMGLENSAGPQKHQAVSLRVQANKSIFYNCSMDGYQDTLYVHTMRQFYRDCTISGTIDFVFGNALAIFQNCTFVVRKPLENQQCIVTAQGRKEIQQPSGIVIQGGSIVSDPEFYSVRFENKAYLARPWKNYSRTIIMDTYIDDLIDADGYLPWQGLEGPSGMDTCFYAEYHNIGPGSDKSKRVKWAGIWNLNSKAARWFSPSKFFHGTDWIEVTGIPCFPGVPKHHRHKKTIPSSPMEELL

SEQ ID NO: 247930 - protein, 78 aa, Glycine max
  Clone ID: PAT_MRT3847_65911C.1.pep
FHQRYSRCPPNCNAVRNISKIKVANCINNQPRWSQILLQSKELLFSSEHCCPQRKIIESIIILHSTSLVVNHSVQRFE

SEQ ID NO: 247931 - protein, 95 aa, Glycine max
  unsure (1)..(95): unsure at all Xaa locations
  Clone ID: PAT_MRT3847_65912C.1.pep
XCXXXXXXXXCXXDCXXXGXSXGXXXLXVXXXXCXXXFXLXXXXXXXCXCXFFXCGXXCVXXXDXXGVFVCVVXVXVYMXCVFWCLXXXSXGXXX

SEQ ID NO: 247932 - protein, 55 aa, Glycine max
  Clone ID: PAT_MRT3847_65913C.1.pep
FTCSTVILLLHRLMRIVLYPQRVILILLSFQIDGRFNLKKNAYSLLLLVLIKLLF

SEQ ID NO: 247933 - protein, 95 aa, Glycine max
  Clone ID: PAT_MRT3847_65914C.1.pep
MGGVGKTTLAQHVYNDPRIEGKFDIKAWVCVSNEFDVFKVTRTILDTITKSVDDSRELEMVHGRLKEKLTGNKFLLVLDDVWNENRHKWETVQRP

SEQ ID NO: 247934 - protein, 67 aa, Glycine max
  Clone ID: PAT_MRT3847_65915C.1.pep
TFCTLNRLTPYCYHAICVTRLSPFTGTNFYSTAHFHTICSLLIIIPDIAHRLSHTIALRFIPIFLTV

SEQ ID NO: 247935 - protein, 62 aa, Glycine max
  Clone ID: PAT_MRT3847_65916C.1.pep
PRLPCRRRRLCIRGCDQSRIRSIIQIFPWCLRVSINLAFVEGETEQDLCYCYQDCYHNVGLG

SEQ ID NO: 247936 - protein, 64 aa, Glycine max
  Clone ID: PAT_MRT3847_65917C.1.pep
VTVSCEGNCLLKSSAGSISRVQMWWAFKSKGSCSIISPRSSNCGRKAGSLIWSPSMWLQRIVIS

SEQ ID NO: 247937 - protein, 42 aa, Glycine max
  Clone ID: PAT_MRT3847_65918C.1.pep
FLFECFGERIPVCIDTNRFPNTNICYYSQKIHQITVRYIKSQ

SEQ ID NO: 247938 - protein, 73 aa, Glycine max
  Clone ID: PAT_MRT3847_65919C.1.pep
QRVLPLPGVYGFWKHGFNLSPRESPPYFEMFFAFKYPQLGEFGPPPAELTGDKKLDKKKGGPAFFFSFGVFRP

SEQ ID NO: 247939 - protein, 107 aa, Glycine max
  Clone ID: PAT_MRT3847_6591C.1.pep
SFYFFFFCFFCFFSFLKKKRGRINEKVHFILLGIPHVVPGKSTTAGQLIYKLRGFEKGVQPRGAKEGKKKNSTFLKFELILYRLLDNRECKTTDNHCFGNICFAKEE

SEQ ID NO: 247940 - protein, 126 aa, Glycine max
  unsure (1)..(126): unsure at all Xaa locations
  Clone ID: PAT_MRT3847_65920C.1.pep
QACQYEKDPVYRSEHTRVVHLKKEIXPEDERVHIFENLAGTEEEGKEIPKAKPQKRLLLRSVLGGAAAVGLLFMIMHLRRNGGEKAPQPSMASSHKGKEKIQKKSTRKVKRSTTKGVYPAERIKLK

SEQ ID NO: 247941 - protein, 82 aa, Glycine max
  Clone ID: PAT_MRT3847_65921C.1.pep
LAACIDGIAVFDNGNRYCSLAKKAKRSTRDALRWRERSQCGTSWRCVTRCVRELHAPRHYDCFLSWLRVDDVLIFRKVIGAE

SEQ ID NO: 247942 - protein, 115 aa, Glycine max
  Clone ID: PAT_MRT3847_65922C.1.pep
IQGFVERIVLWNTSLGGVLSSSLSGLKRLRILALFGNRFSGGIPEGYGELHSLWKINLSSNALSGSIPEFIGDFPSIRFLDLSKNGFTGEIPSALFKYCYKTKFVSLSHNNLAGS

SEQ ID NO: 247943 - protein, 68 aa, Glycine max
  Clone ID: PAT_MRT3847_65923C.1.pep
DAWVKAASNIPISKASATATPVGAIEIFSDSLTWTNYMRTRAILKTYTIHIKTVLAYTHLQVEAFIEG

SEQ ID NO: 247944 - protein, 54 aa, Glycine max
  unsure (1)..(54): unsure at all Xaa locations
  Clone ID: PAT_MRT3847_65924C.1.pep
FLRLGDQGSFXDPLIDRDAAFADQSSVGGMANQPPFRETWADEYGLNRHFNGNP

SEQ ID NO: 247945 - protein, 215 aa, Glycine max
  unsure (1)..(215): unsure at all Xaa locations
  Clone ID: PAT_MRT3847_65925C.1.pep
QCRKCSRLXXXTTDIRNFAPAMDINXRGTGYGTYFAIPHLRKSKGKIIAIASCTGWLPVPRMSIYNASKAAVISLYETLRIELGRDIGITIVTPGLIESEMSQGKVLFKEGKMVSDQLIRDVQASLIPIRSVTEAAKSIVNSACRGDSYLTEPAWFTTTFYWKIFFPDVLEFCNRRTLISGSSERDTVSKKLLDLSGLKKYLCPKSVRNPNLKPS

SEQ ID NO: 247946 - protein, 74 aa, Glycine max
  unsure (1)..(74): unsure at all Xaa locations
  Clone ID: PAT_MRT3847_65926C.1.pep
LSVFTSSFISLHHHHHHHRLLKNIPFINISILRPEYATHPYTFNSRFAYFIFTFIFLFTLSXSGIFYNKLTYNF

SEQ ID NO: 247947 - protein, 62 aa, Glycine max
  unsure (1)..(62): unsure at all Xaa locations
  Clone ID: PAT_MRT3847_65927C.1.pep
MAASDSTVGALSRALLNLNGSRAGASAPSSAFSGTSLKKVITSSXPICKRSGGSLKIVAVEE

SEQ ID NO: 247948 - protein, 97 aa, Glycine max
  Clone ID: PAT_MRT3847_65928C.1.pep
ERRDLHFLSRNTAIMDISGNDVSLNDYSGKVLLIVNVASQCGLTQTNYKELNVLYEKYKNQGFEILAFPCNQFAGQEPGNNEEIHEVVCTRFKAEFP

SEQ ID NO: 247949 - protein, 73 aa, Glycine max
  Clone ID: PAT_MRT3847_65929C.1.pep
TTLLDYFDPISFTSEVPTAYSQPPRDHIIQFNTTLGRTRLKPALAMVLALGLTEITLPEPFNNIPTYPGTPSH

SEQ ID NO: 247950 - protein, 84 aa, Glycine max
  unsure (1)..(84): unsure at all Xaa locations
  Clone ID: PAT_MRT3847_6592C.1.pep
RPGSKMHXKDVVEAXTIIXTPPMVXVGSFGYVEXPXGLXXLTXVWXXHXSDEVXRXFXXXXYRSKXKVXTXYAKKHAEYGFSRP

SEQ ID NO: 247951 - protein, 168 aa, Glycine max
  Clone ID: PAT_MRT3847_65930C.1.pep
MAEQSSNSIYDFTVKDISGNDVSLNDYSGKVLLIVNVASQCGLTQTNYKELNVLYEKYKNQGFEILAFPCNQFAGQEPGNNEEIQEVVCTRFKAEFPIFDKVEVNGKNAAPLYKFLKEKKGGIFGDGIKWNFTKFLFLVNKEGKVVDRYAPTTSPLKIEKDIEKLLQS

SEQ ID NO: 247952 - protein, 79 aa, Glycine max
  unsure (1)..(79): unsure at all Xaa locations
  Clone ID: PAT_MRT3847_65931C.1.pep
LCVHSIQGELNCVYIFLSIFHTLELHKQNGERVQNLRSIGSEAGKLRNWEGRASHESILPMGKYGXAXEDGGASLWAPF

SEQ ID NO: 247953 - protein, 93 aa, Glycine max
  unsure (1)..(93): unsure at all Xaa locations
  Clone ID: PAT_MRT3847_65932C.1.pep
NYKDLTMIELTRTVLLPYHITNQSQFXSFXTNHLTQMTFLYNTYQPYKFLPIYLSTVILHHDPFXVLYQKCIRQLINIITYNFHTSTPNLNVI

SEQ ID NO: 247954 - protein, 85 aa, Glycine max
  Clone ID: PAT_MRT3847_65933C.1.pep
VMAYQLDLELHTKLFSHTMDITRIFWNASVHVMLISVVANQSLNEYSIYITIYISSLIDHGCYCYGTDIDIHIHNSHLLALYADD

SEQ ID NO: 247955 - protein, 79 aa, Glycine max
  Clone ID: PAT_MRT3847_65934C.1.pep
VKHLTQQKILYSHHRQYLQLIAWINTLLDPIRLSSLSTSICCKVRFKLADPQLEWHEGATCLSCTIVRLRKVDPPLSDG

SEQ ID NO: 247956 - protein, 56 aa, Glycine max
  Clone ID: PAT_MRT3847_65935C.1.pep
FYFSSSPFLAFASFYCYQLMDIPKSSLAHVSSSPPKLKSLRSVLEAPVPFSLPCFF

SEQ ID NO: 247957 - protein, 44 aa, Glycine max
  Clone ID: PAT_MRT3847_65936C.1.pep
RLKTDDRRGNNKSYITVEDISETDSNYLVLCRLLALLVPYCSVK

SEQ ID NO: 247958 - protein, 114 aa, Glycine max
  Clone ID: PAT_MRT3847_65937C.1.pep
GYYKNAGSTHQKTCNNREAGEIDIGISGVHQPQLNPSKCSLDHMTNKTIFNCLVYNHPKKVGGNGWIKLFSNFWIYNFFLTYTSQFKAATDSTTYLIGHKNPIHNRSFQVLFIN

SEQ ID NO: 247959 - protein, 180 aa, Glycine max
  Clone ID: PAT_MRT3847_65938C.1.pep
MEMYDVSETRNADAYLIEGTDLNLHLTSPNIQQFQAMFNDGAPEFVADQNLYYPAATNYGYYCTGFESPGEWEDHHRIFGVDGPDIQYTGAQNESFPYIYYTPSYGFAQSPYNPYNPYIPGAMIGVDGSFGGAEQYYSLPNYQNPISSHAYIPLVQPDNFPNSSVDSLFDTRASVSRPDG

SEQ ID NO: 247960 - protein, 84 aa, Glycine max
  unsure (1)..(84): unsure at all Xaa locations
  Clone ID: PAT_MRT3847_65939C.1.pep
NXSDALDKIRFESLTXKSXXRXSQXXXXHIIXXXXNKXXTXVDSXXGMTXADLVNNLGXIAXXGXKEFMEAXAXGGDVSXXGQF

SEQ ID NO: 247961 - protein, 75 aa, Glycine max
  unsure (1)..(75): unsure at all Xaa locations
  Clone ID: PAT_MRT3847_6593C.1.pep
FFFLFFFFYXSXXRQNQNPFFLILILKNHWGGLPTNKEAMFFVDPPKNSQRTFHLQNGGEGGKTPPVKNRERFGF

SEQ ID NO: 247962 - protein, 117 aa, Glycine max
  Clone ID: PAT_MRT3847_65940C.1.pep
MPPMKIQPIDVDSQKLAVIRNDAVKPVLKSRLKRLFVFDRQFSNVLKTSSTSSSEKPAAGEAPQSNTKDGAAEFEPSSVCLDKMVQSFMEESNEKPAPATAKCGRNRCNCFNGNTMT

SEQ ID NO: 247963 - protein, 63 aa, Glycine max
  Clone ID: PAT_MRT3847_65941C.1.pep
RMRSMITTLQRPGFTFLFFLPSVFFLWLFSSLGMFLSILCMAFYRKRAKRCRPICSIELNTPR

SEQ ID NO: 247964 - protein, 146 aa, Glycine max
  unsure (1)..(146): unsure at all Xaa locations
  Clone ID: PAT_MRT3847_65942C.1.pep
GGHKTCLESFEPDQFDNDXWEERKKKMSFFNWWSFTVCFAMLLGATVVVYVQDFVSWGVSSLIITILMALTTIALYAGRPFYRYKQPAGNPFRPILQVLVAAIRKRNLSCPSNPTLLYEIPKLEKSQGRLLSHTSGLRYHTWTLSD

SEQ ID NO: 247965 - protein, 58 aa, Glycine max
  Clone ID: PAT_MRT3847_65943C.1.pep
KIIYWSPRKGLVILKIPRIIMVKADNFEIFSNGGAKTKMVPMERRNSTFAQKRKELNF

SEQ ID NO: 247966 - protein, 84 aa, Glycine max
  unsure (1)..(84): unsure at all Xaa locations
  Clone ID: PAT_MRT3847_65944C.1.pep
GAIIGCYRCMXRTVLVQGYVCLIAPXYRRDPNILTFERMRALDRNHYYVCRFQIPMEMEAQIAEVCTEDGLENIPTTRNPSTTI

SEQ ID NO: 247967 - protein, 45 aa, Glycine max
  Clone ID: PAT_MRT3847_65945C.1.pep
QGLWLYVWYQGVRLYICLGMLKEVVAIIVPRFNSLLSRTGPPSWT

SEQ ID NO: 247968 - protein, 93 aa, Glycine max
  Clone ID: PAT_MRT3847_65946C.1.pep
PRFRSLGHITIVTTGKCIKCIENVKRTHTLSRQRGRPDLSNAARIDEHQARPHTSRSSRSITEKHKPSTPSIDSTTHAYTRERHKQTTVQQHA

SEQ ID NO: 247969 - protein, 75 aa, Glycine max
  Clone ID: PAT_MRT3847_65947C.1.pep
LSTFTGRDMQSPAAKSMSQCSILFNPYIIPMLVQKINTETMPMPIPQEPQSHEGCVTLLTQREDLALLELPLRTS

SEQ ID NO: 247970 - protein, 63 aa, Glycine max
  Clone ID: PAT_MRT3847_65948C.1.pep
TVIRTQQKGPQMRIFIYMAIYIVMKIKRHVFFHSTNYNSFNIFLSSICALFLLTITMVPVLSI

SEQ ID NO: 247971 - protein, 156 aa, Glycine max
  Clone ID: PAT_MRT3847_65949C.1.pep
KMFPPTVDWDNINWSTRRPQMDFPVQSAICTLEDVDVIKEGQARIAGYALSGGGRGIERVDVSADGGKTWVEARRYQKDNVAYVSDGPQSDKWAWVLFEATLDVPANPEIVVKAVDSAANVQPEKVEDIWNLRGILNTSWHRIKIQRSLCVERSKL

SEQ ID NO: 247972 - protein, 38 aa, Glycine max
  Clone ID: PAT_MRT3847_6594C.1.pep
WTHNNCFFVTCYETIRYKELLPKDENVLSVLKWEMTLR

SEQ ID NO: 247973 - protein, 164 aa, Glycine max
  Clone ID: PAT_MRT3847_65950C.1.pep
MVFRPMSGNWLALLRNSYGGKAAYATSTAPKMKAYAAAADYGHKQQHGKSAKRDFVAIYVAIGMIALSTGLGLHTAWQQLRNSPTVSVKKQRRETLPEVVEPDHVAEEAEKFMKKSFFRKVAHVQEQRSYPDHPQILSPIHGDAYTYTPRVETLKSVGVDPSHV

SEQ ID NO: 247974 - protein, 159 aa, Glycine max
  Clone ID: PAT_MRT3847_65951C.1.pep
MAEQTEKAFLKQPKVFLSTKKTGKGKRPGKGGNRFWKSIGLGFKTPREAIEGTYIDKKCPFTGNVSIRGRILAGTCHSAKMNRTIIVRRNYLHFIKKYQRYEKRHSNIPAHISPAFRVKEGDHVIIGQCRPLSKTVRFNVLKVIPAGSSSGAKKAFTGM

SEQ ID NO: 247975 - protein, 63 aa, Glycine max
  Clone ID: PAT_MRT3847_65952C.1.pep
EGKKFGRHKVAGTVFGFFWFLKNVLFPSMSTVSYFCPPGNTCPWSFLPFRVLKRKNGKKKKRR

SEQ ID NO: 247976 - protein, 66 aa, Glycine max
  Clone ID: PAT_MRT3847_65953C.1.pep
NTHLHLRGHRLLYTPLLTITTSHHTTKHRFIQKSPPTHSSISHTHSTYITLMLLTTKTHSTSSTTS

SEQ ID NO: 247977 - protein, 158 aa, Glycine max
  Clone ID: PAT_MRT3847_65954C.1.pep
ECFVDAESFVVFGHFRSSKKTGKGKRPGKGGNRFWKSIGLGFKTPREAIEGTYIDKKCPFTGNVSIRGRILAGTCHSAKMNRTIIVRRNYLHFIKKYQRYEKRHSNIPAHISPAFRVKEGDHVIIGQCRPLSKTVRFNMLKVIPAGSSSGAKKAFTGM

SEQ ID NO: 247978 - protein, 105 aa, Glycine max
  Clone ID: PAT_MRT3847_65955C.1.pep
FFLFFFFFFFFFFFFFLVFKKNHIFFYSLNMFLRGQITTGTGFLFFHELVPFLNNTKVIKNLWFFPNFFDQTLVFWGWFLFRKPAIFLKFWVITVGKKLSTSLVI

SEQ ID NO: 247979 - protein, 74 aa, Glycine max
  Clone ID: PAT_MRT3847_65956C.1.pep
ISGWRNGLVYGSGQGWGPLPLPKALMFFNGQSLGKLPNWWRNPAKSLARKKTFPIIQLITPFKKFPRWKILWDE

SEQ ID NO: 247980 - protein, 129 aa, Glycine max
  Clone ID: PAT_MRT3847_65957C.1.pep
NRSQSHKALILMQKMVKVPTIKTLLLFNTACYQGLHHTSHSISFTLKHLLSSGMLPQAQSLILRLISGRIPSCLMLQLTQAHFTSCSTYTPLYDALDNAYVHSHSTDQALTFLHHMIHEGHAPLSNTLQ

SEQ ID NO: 247981 - protein, 148 aa, Glycine max
  Clone ID: PAT_MRT3847_65958C.1.pep
FRLKNAIEDCNECKGSSSLSIFWQVPQYVFVGASEVFMYVGQLEFFNAQTPDGLKSFGSALCMTSISLGNYVSSLLVAIVMKISATDEMPGWIPGNLNKGHLDMFYFLLAALTAADLVIYVLMARWYKYVKFQGNNENDTNKEDPEVV

SEQ ID NO: 247982 - protein, 87 aa, Glycine max
  Clone ID: PAT_MRT3847_65959C.1.pep
VLSRHASAELCLGQRDGGNGWTSHAQMMQAFQRFVNKLAQIEQKLIHRVNDEPLRNRYGPVKMPYTLLYPSSEEGLTFRGNPNSISI

SEQ ID NO: 247983 - protein, 62 aa, Glycine max
  Clone ID: PAT_MRT3847_6595C.1.pep
HLLVRSNSILCKTNMLSTASIWANLRCVNGPISEISNQNPERGFRVDDSCAPSECDTDAGPS

SEQ ID NO: 247984 - protein, 52 aa, Glycine max
  unsure (1)..(52): unsure at all Xaa locations
  Clone ID: PAT_MRT3847_65960C.1.pep
REDGLVDXXCGSXNYVGXEVXGNKXYXGGXXDXWXCGVILYVXXKGNLXFED

SEQ ID NO: 247985 - protein, 57 aa, Glycine max
  Clone ID: PAT_MRT3847_65961C.1.pep
NATHTCFETNSYIHSLLSYNLSCSKKMGGNPLSLQRGEHYIIPGDFYELNELFVLGA

SEQ ID NO: 247986 - protein, 50 aa, Glycine max
  unsure (1)..(50): unsure at all Xaa locations
  Clone ID: PAT_MRT3847_65962C.1.pep
AXXXLXKXXNFXPVGIEGFIKXLTAEXXPGXNXQWPXAGGKTXTGKQNER

SEQ ID NO: 247987 - protein, 87 aa, Glycine max
  Clone ID: PAT_MRT3847_65963C.1.pep
IPPQQRRFTDRAHSKPFILPRVTALACASVLSAVSLQFSFTARACPPTSFESDHRLNVEECLCPLFDLLETNAEGLAALKSLLQQKL

SEQ ID NO: 247988 - protein, 121 aa, Glycine max
  Clone ID: PAT_MRT3847_65964C.1.pep
MPLKPSYSSENLMLPVSDPPNDEDREWLLKADNNKTFQTRRIYTAISYMSCAVLFRLFTSHLQVSSRFFRHWRIISFIAGESVIMADNSNGFVPLRTLKHTLSLAGAYLLYMLVTMESVRG

SEQ ID NO: 247989 - protein, 183 aa, Glycine max
  unsure (1)..(183): unsure at all Xaa locations
  Clone ID: PAT_MRT3847_65965C.1.pep
VYSLNWQICVVKLPIVFNALKDILASEHEEAIYAATDAFKNMINSCIDERLIKQGVDQISLSENKESRKSAPTIIEKMXATIESLLDYHYTALWDRVFEIVXAMIHRLGNHSPYFMRGILKNMEDVQKLPDEDFPFRKQLHECFGSALVAMGPETLVSLIPLNLEAEDSSDAXVWLFSILKHY

SEQ ID NO: 247990 - protein, 47 aa, Glycine max
  Clone ID: PAT_MRT3847_65966C.1.pep
HSHNHCLSVAHHGQAGALLILLYVMRDFLLRCNCKEGGFYLFTVPIL

SEQ ID NO: 247991 - protein, 62 aa, Glycine max
  unsure (1)..(62): unsure at all Xaa locations
  Clone ID: PAT_MRT3847_65967C.1.pep
AHSDYSPKFLSDIVKKADRQLKSFGIRGHWFQSPERCSPCHMGMGLATNSIKRPSPLIFSXM

SEQ ID NO: 247992 - protein, 37 aa, Glycine max
  Clone ID: PAT_MRT3847_65968C.1.pep
MSTCSLPGSGMPEAHADPFHPILWLSLTLSNPFTYSS

SEQ ID NO: 247993 - protein, 51 aa, Glycine max
  Clone ID: PAT_MRT3847_65969C.1.pep
NTCPKGEGSAIEIELKTTYICAQIKDNTHRHRKHRPLRNESQLLPATIRFT

SEQ ID NO: 247994 - protein, 69 aa, Glycine max
  Clone ID: PAT_MRT3847_6596C.1.pep
TIRENRSPPGTGYELISGQEKKKFGGRPIWYAYRNRSEIYFGVKRQTVCGRPYFLFFVIVFFFFYFFFS

SEQ ID NO: 247995 - protein, 44 aa, Glycine max
  Clone ID: PAT_MRT3847_65970C.1.pep
RLNLKMISRIGCAPDKNLHSENSMIVIDSIRIKKGFLQGNKCEM

SEQ ID NO: 247996 - protein, 212 aa, Glycine max
  Clone ID: PAT_MRT3847_65971C.1.pep
MPRKKKAHDPFFTNDSRKRQKPNKKLDEDEEDAEIESDFDEDGFFAGGGGGGSGEEQEEEETGAEVRKRLAQDLLQRVRKSAQKGEEEEDDKEEDEEGARDSLVAQKLLKEQNEESGRVRRSIASRVKVSGTGDEGFRVLVKHRHSVTAVALSEDDSKGFSASKDGTIMQWDVNSGQCEKYKWPSDTVLKSHGLKDPQGSATRQIKQYWLWL

SEQ ID NO: 247997 - protein, 56 aa, Glycine max
  Clone ID: PAT_MRT3847_65972C.1.pep
PTRPYGCEKTTEGDKAEFDTPSSHLISPLFHSLSPMFFQYISFTPVFMVKISCSSH

SEQ ID NO: 247998 - protein, 50 aa, Glycine max
  Clone ID: PAT_MRT3847_65973C.1.pep
LFPFPCWITTLLTSFPRFHSNLNNNNTPHSALTSTIKLYIIPQLHTNSSF

SEQ ID NO: 247999 - protein, 139 aa, Glycine max
  Clone ID: PAT_MRT3847_65974C.1.pep
MASRGKTQGSGTTKKGISRSNKAGLQFPVGRIARYLKIGKYADRIGSGAPVYLASVLEYLAAEVLELAGNAAMDNKKTRIMPRHIQLAVRNDEELSRLLGDVTIASGGVTPNIHNMLLPKKVGTSTSTFMGPSADDDDA

SEQ ID NO: 248000 - protein, 80 aa, Glycine max
  Clone ID: PAT_MRT3847_65975C.1.pep
LLNLIIGFVKTKNNGYYYGLPITRQAAPFSYKSFSRPLWLVGSCANTENHISSCTCLFEMTLIVKGKKILSTFIFLCNNI

SEQ ID NO: 248001 - protein, 115 aa, Glycine max
  Clone ID: PAT_MRT3847_65976C.1.pep
TRGVGAVAGLWCHCPGGPWADVVSILPRLGIEWGRPFAGSSHARGLGLDKIGVGASPPLSALRWCATGPLIISGPSIAALGPSDCRSTLCGDYDERPVGGSGRKGPALWDVLEAR

SEQ ID NO: 248002 - protein, 149 aa, Glycine max
  unsure (1)..(149): unsure at all Xaa locations
  Clone ID: PAT_MRT3847_65977C.1.pep
MASRGKTQGSGTTKKGISRSNKAGLQFPVGRIARYLKIGKYADRIGSGAPVYLASVLEYLAAEAIFLNRLXIFVLELAGNAAMDNKKTRIMPRHIQLAVRNDEELSRLLGDVTIASGGVTPNIHNMLLPKKVGTSTSTFMGPSADDDDA

SEQ ID NO: 248003 - protein, 83 aa, Glycine max
  unsure (1)..(83): unsure at all Xaa locations
  Clone ID: PAT_MRT3847_65978C.1.pep
VGMRVRERVSVPKAGLTEEVMEKIHKRWRKEELVRLKFHEVLAXDMRKVHEIVEVQFLPLFHNNHLTLSLTHIIGPRTTIDSL

SEQ ID NO: 248004 - protein, 73 aa, Glycine max
  unsure (1)..(73): unsure at all Xaa locations
  Clone ID: PAT_MRT3847_65979C.1.pep
PTXXXXXXAXNXRXXDXNKRXRTAXGKGKKXXXXXXRXXXPGXXXAXXXGXKXEXXXXNAXNXXXTRXXENXK

SEQ ID NO: 248005 - protein, 136 aa, Glycine max
  Clone ID: PAT_MRT3847_6597C.1.pep
DIVSWTSMITCCVHNGLPVEALELFYSLKQTNIQPDSIAIISALSATANLSSLKKGKEIHGFLIRKGFFLEGPIASSLVDMYACCGTVENSRKMFHSVKQRDLIVWTSMINANGMHGCGNKAIALFKKMTDQNGIP

SEQ ID NO: 248006 - protein, 176 aa, Glycine max
  unsure (1)..(176): unsure at all Xaa locations
  Clone ID: PAT_MRT3847_65980C.1.pep
IYFEIGKKLKALNDLEVEVVELKRENKELQHEKQELTVKLNAAESRITELSNVTENEMVAKTKEEVSSLRHVNEDLLKQVEGLQMNRFSEVEELVYLRWVNACLRYELKNYLAPPGKLSTHDLNTSLSPKSQEKAKQLMLEYAGSEHGQGDTDLDCYFSHSSSPGSEDXENASSFD

SEQ ID NO: 248007 - protein, 101 aa, Glycine max
  Clone ID: PAT_MRT3847_65981C.1.pep
FPNLANFTFSYNFFCEEKGICKNLTSKRIVFDDRRNCLPEKPLQRSEKECKAKLEHPVDCSELCCVVGSNNNNVSAAGSVAVPPAAAAMPVSAPLLAPSHP

SEQ ID NO: 248008 - protein, 62 aa, Glycine max
  Clone ID: PAT_MRT3847_65982C.1.pep
RVSLSVTVGKTMSVAATAREKLTSLVNAVKLGIDIPFKLESLVQLHHERPPEDPVLLTEILP

SEQ ID NO: 248009 - protein, 75 aa, Glycine max
  Clone ID: PAT_MRT3847_65983C.1.pep
PLIFKTEILFLYFLEISFMGLTGLKTNQGGVSPPYLLENPGPLDQNWFKDGVWATGLSGGLNFKLPGLSFGKGQY

SEQ ID NO: 248010 - protein, 492 aa, Glycine max
  unsure (1)..(492): unsure at all Xaa locations
  Clone ID: PAT_MRT3847_65984C.1.pep
MVVNERPSKRMKRRVTADLCDFLTFPEPGVSASTEPFRNCVQRFLSHHARITFPPSLFPSLMTWQILFRVGDLLDAPDLSPAIVTLDIVEEDVTRSRASVYCDQCRVVGWSGHPVCRKRYHAISKTLLKIFRCSKXSSFLFVDFDSFTISASDLEDILADQIEDNTHLLHGCRDSNGYGHLLTLNGREGGSKLLSGFDIMNFWDRLCAAISVRKVSVMDLSKKFGLEYRLLHAITNGHSWYGNWGYEFGTGSYALTQDAYKNAVNTLSSMPLSSFSFHGRGPRSHLECVISLYQSLAETELLTIGHLFSFMLTLIHECRKPVAMRTSKQTSNMLCAWTGNDVEEVQHALIKVLLASGACTEAKWVTRRALKGAVCRGVSSPELLDYCLKHFPGKLTANGMIVCSRCNPISSGIEFRLEPWCNGLSTKSSYPTEVQLISDLTFLFNSIIHPDKMVCYRPKIMRKSVADSARKLLDCKQFMKDYKPYEMAVELP

SEQ ID NO: 248011 - protein, 112 aa, Glycine max
  Clone ID: PAT_MRT3847_65985C.1.pep
LWTIIPEYAATRFAMVIVTTTIQITGTLLTKKPTKMTTNKRTITTNIRKTTKKNTEQFIMNRILVSTNITQTTQTAWRHPGLGPCALAIIDTWTYHPHAPTSLSLGLGLAQG

SEQ ID NO: 248012 - protein, 59 aa, Glycine max
  Clone ID: PAT_MRT3847_65986C.1.pep
HELDDLTLTLDLCKIVGGRSMLYMVIKSTGNSDRSPRLDQYHIFWNMWSLRNTVHPLSS

SEQ ID NO: 248013 - protein, 54 aa, Glycine max
  Clone ID: PAT_MRT3847_65987C.1.pep
PPQGVQTLVKKKGTFEVFDFEPLRVPNVKKEMGQLFQLPVDWRAQNPVKGPSMF

SEQ ID NO: 248014 - protein, 41 aa, Glycine max
  Clone ID: PAT_MRT3847_65988C.1.pep
ALPLLGSNRKLVAWKKLSKPLNASTETRTLLNYSRRRRTPN

SEQ ID NO: 248015 - protein, 88 aa, Glycine max
  Clone ID: PAT_MRT3847_65989C.1.pep
TRTQLKQPPLATKKRVPSLSAMTSCLHSLPHHHIQIRFFLKHHFHLPHSFKHNTTQSVTNTHSKTQISPHLSCSRSPTPLPHFPSSTP

SEQ ID NO: 248016 - protein, 68 aa, Glycine max
  Clone ID: PAT_MRT3847_6598C.1.pep
FAPQGNPFFPQKTQGLQQKKNLITKPLPGPPKIHFYKHRTPQLKPPPHKSFWPGEYPGAKKPHPGREG

SEQ ID NO: 248017 - protein, 165 aa, Glycine max
  Clone ID: PAT_MRT3847_65990C.1.pep
PAEVSEKEGINFLGVKGKCLWPIRIGCLNPKDQIPKWSMKTIQCITDEDYYFVCVEIFEGLKRIGKPSILLSIREGAEAVHIIMGMLQACYNRSALLMNNTRWEIIIEEMHESDSTMEDWFVIVEDAKKSAVRDTSNLIEQMVGKVLMAKNNLLSTQEQTRYSFI

SEQ ID NO: 248018 - protein, 69 aa, Glycine max
  Clone ID: PAT_MRT3847_65991C.1.pep
IFTFEDERTFIHFKVEKVYIHLSSTVTVFTESKECISSRFVQAKMYVIQILTIAVTIDAPLNVGHFILF

SEQ ID NO: 248019 - protein, 41 aa, Glycine max
  Clone ID: PAT_MRT3847_65992C.1.pep
FWASLFRVPTGINVLTLIKAALDSLAGALARMVSPVPGWPV

SEQ ID NO: 248020 - protein, 167 aa, Glycine max
  Clone ID: PAT_MRT3847_65993C.1.pep
AEASFLSCSFSCSSFIQIAPELNGAVNQMQNIFETETSEGNATSIGDTDINDRQNQDQCWEKSENDCNLEMLVEDIITPESAEICKDAKENRVTLNEEADENQSNFSNEENLFDNEHNIEESQISSSSDRKSSLFKEEEVESSHSNLRESNRASVIMEEKEANGNLH

SEQ ID NO: 248021 - protein, 126 aa, Glycine max
  unsure (1)..(126): unsure at all Xaa locations
  Clone ID: PAT_MRT3847_65994C.1.pep
CVLAPINLGMICSYYYISYTTIERFSSSVTRKTKLKGLSVILPAAYXYAQLTIRPVEVEVGPKLINHHRLSFENPKVSYPDVKANALLEAHFCRQNGGGNLALHQNEVLVSANRLHYAMVDVISSN

SEQ ID NO: 248022 - protein, 62 aa, Glycine max
  Clone ID: PAT_MRT3847_65995C.1.pep
INEKGRLYSAQEECFTGWSNYERTTTTEGGDGRPYLCAMGHDNAGTDTPGDGLIGEDGTTIN

SEQ ID NO: 248023 - protein, 159 aa, Glycine max
  Clone ID: PAT_MRT3847_65996C.1.pep
ASEEIATDLDQFTKDLKNLMNTLKGKAASGDSRLKYDVGSIPGPDNKHIYGLVQCTPDLSGSECDDCLGRSIQVIPTDCCESRTGGKVVRPSCNLRFRTSGPFNEAFVEGCSNAKIISFKCHLLISVVVVIVVPVVVVVAAVVLIYIYIYPKKETINRN

SEQ ID NO: 248024 - protein, 273 aa, Glycine max
  unsure (1)..(273): unsure at all Xaa locations
  Clone ID: PAT_MRT3847_65997C.1.pep
KKSLSSVCNDGGVNVQSDIDTSSGSMPLTVQVAKLSRCLFIISHVAMNQLVYIESCARKIQKQKLTKEKKDNENQNLDSNGTVSTGTQKDNDINAELGFAASEDAALDALFEKAEKEIVSGGSNEKNLIGICATFLSKLCKNLGLMQKYPELQASAMLALCRLMIIDADFCDANLQLLFTVVEGAHSEIVRSNCTIALGDLAVRFPNLLEPWTENMYARLKDPCASVRKNAVLVLSHLILNDMMKVKGYINEMAXRLEDEDERISNLAKLFFL

SEQ ID NO: 248025 - protein, 79 aa, Glycine max
  Clone ID: PAT_MRT3847_65998C.1.pep
IYSIPLIFNFSSEKRWENVDHKVSDATYVCGRNFLMSCYCIITPRCQSLQVKLFSSSCCPQRKLRATFAPRQVFFNKPL

SEQ ID NO: 248026 - protein, 53 aa, Glycine max
  Clone ID: PAT_MRT3847_65999C.1.pep
SVLIVKPHSGNCDLYNHQGGVHYLSTKSLLWRSMCFITSISHVMLHSIHTLTH

SEQ ID NO: 248027 - protein, 77 aa, Glycine max
  Clone ID: PAT_MRT3847_6599C.1.pep
SLYLKSNRKGSLTHTISFIITIYPLPLLLTISTTQIKYTLLPINTIIPILIPDQTLNLHILNITTTSYSLNSNYIKL

SEQ ID NO: 248028 - protein, 62 aa, Glycine max
  unsure (1)..(62): unsure at all Xaa locations
  Clone ID: PAT_MRT3847_659C.1.pep
KQVIVEKLGEPAQGYEDFTASLPADECRYAXYDFEYLTEGNVPKXRIFFFAXPPDTSRVRAK

SEQ ID NO: 248029 - protein, 72 aa, Glycine max
  Clone ID: PAT_MRT3847_65C.1.pep
MVCITKATVKDLMSMHACNLFCLPENYQTKYYLYHILSWPQLLYFCEDYNGRIDRYVLDEMEEETTDCHGHM

SEQ ID NO: 248030 - protein, 42 aa, Glycine max
  unsure (1)..(42): unsure at all Xaa locations
  Clone ID: PAT_MRT3847_66000C.1.pep
NILKEGRIAREFDGCATTLTAEDETHAIFHMKKTGPDPHNHX

SEQ ID NO: 248031 - protein, 52 aa, Glycine max
  unsure (1)..(52): unsure at all Xaa locations
  Clone ID: PAT_MRT3847_66001C.1.pep
MPPPIPPHRPLHHPXPPPRPLPPPSPPTPPPPAPPPYPPPKPQSPPAPPGRV

SEQ ID NO: 248032 - protein, 194 aa, Glycine max
  unsure (1)..(194): unsure at all Xaa locations
  Clone ID: PAT_MRT3847_66002C.1.pep
GADNKRILHLDLIEENARYWKGVDVLVFDSAXHWWTHSGQTRSWDYYMEGNSIITNMNPMVAYQKGLSTWARWVDLNLDSRRTRIIFRSMSPRHNRLNGWKCYKQRQPLQFFSHIHVPEPLVVLKGVLKRMRFPVYLQDITTMTAFRRDGHPSVYNKAMSEERQKAGTGLSSDCSHWCLPGVPDIWNEMLSSFI

SEQ ID NO: 248033 - protein, 322 aa, Glycine max
  Clone ID: PAT_MRT3847_66003C.1.pep
QEKEKSGLLTEDEALLLTPPTSSSPSLSPSCTTSITTSTATATSSNSENQNLRCPRCDSSNTKFCYYNNYNLTQPRHFCKTCRRYWTKGGALRNVPIGGGCRKSKSSGMSNSVAKQTATKMKAVASELGRSSSQGLLDQELPQTPAILWGSPQNSQLMALLRANQNHNPNPNPSPMSIVVKGEGNLMGSHHMVAEPLLANGLLNPRTSLGFDGVGEVLPSLGLCGSFWRNNQDQTQQQNNGFALGEHQSSGVQELYHKLRSSSSSINYCGSDNSPVFLSNMASSSSSLSNILESSSVSGSEFGCWNPTLSWSDLPTTNGAYP

SEQ ID NO: 248034 - protein, 84 aa, Glycine max
  Clone ID: PAT_MRT3847_66004C.1.pep
TCHLETSIAQCCNSDSVKFVQSLLSPLTSRSQLTVSRTTTHIGKFLKHPNQNLTVHIPPLLYNILHRILTLTRLILINIFPSLL

SEQ ID NO: 248035 - protein, 88 aa, Glycine max
  Clone ID: PAT_MRT3847_66005C.1.pep
MVSKGPNPPEGFYLDPSGGMALPGKPPFASVSAAAAAANSSEDAAKKIRKPYTITKSRENWTEPEHDKFLEAIQLIMVNILFVHDTTQ

SEQ ID NO: 248036 - protein, 474 aa, Glycine max
  unsure (1)..(474): unsure at all Xaa locations
  Clone ID: PAT_MRT3847_66006C.1.pep
MELSTMFCLCASFLFIVLFRALIKPYYVSKRRDLPLPPGSMGWPYIGETFQMYSQDPNVFFASKIKRFGSMFKSHILGCPCVMISSPEAAKFVLNKAQLFKPTFPASKERMLGKQAIFFHQGEYHANLRRLVLRTFMPEAIKNIVPDIESIAQDCLKSWEGRLITTFLEMKTFTFNVALLSIFGKEEILYRDALKRCYYTLEQGYNSMPINVPGTLFHKAMKARKELAQIVAQIISSRRQRKKIDHKXLLGSFMDEKSGLTDEQIADNVIGVIFAARDTTASVLTWIVKYLGENPSVLEAVTEEQECILKSKEESGVDKGLNWEDAKKMQIKFDHVATAIQENLSNSKRGVVXKLIVTETVEVGVYQVFFIPKRWKVLPLFRNIHHSPDNFKEPEKFDPSRFEAAPKPNTFMPFGSGIHMCPGNELAKLEILVLLHHLTTKYRWSVVGAKNGIQYGPFALPQNGLPITLFPKSK

SEQ ID NO: 248037 - protein, 208 aa, Glycine max
  unsure (1)..(208): unsure at all Xaa locations
  Clone ID: PAT_MRT3847_66007C.1.pep
MHISFFKVVWTLSLALHFLLFNFWTSQEEQECILKSKEESGEDKGLNWEDAKKMPITSRVIQETLRVASILSFTFREAVEDVEYQGYLIPKGWKVLPLFRNIHHSPDNFKEPEKFDPSRFEAAPKPNTFMPFGSGIHMCPGNELAKLEILVLLHHLTTKYRWSVVGAKNGIQYGPFXALPQNGLTHHIIQEQVDNQSHIQYNPGFIVS

SEQ ID NO: 248038 - protein, 190 aa, Glycine max
  unsure (1)..(190): unsure at all Xaa locations
  Clone ID: PAT_MRT3847_66008C.1.pep
MHCSGMHISFFKVVWSISLALHFFFFFLNFWTCQEEQECILKSKEERGEDKGFNWEDAKKMPITSRVIQETLRVASILSFTFREAVEDVEYQGXYFIPIGWKVLPFXLFMNIHHSPDIFKEPEKFDPSRFEAAPKPNTFMPFGSGIHMCPGNELAKLEILVLLHHLTTKYRLVNLITSNFNNPFLAIGFE

SEQ ID NO: 248039 - protein, 331 aa, Glycine max
  Clone ID: PAT_MRT3847_66009C.1.pep
MELSTMFFLCASLLFIVLFFRTLIKPYYVSKRRDLPLPPGSMGWPYIGETFQMYSQDPNVFFASKIKRFGSMFKSHILGCPCVMISSPEAAKFVLNKAQLFKPTFPASKERMLGKQAIFFHQGEYHANLRRLVLRTFMPEAIKNIVPDIESIAQDCLKSWEGRLITTFLEMKTFTFNVALLSIFGKEEILYRDALKRCYYTLEQGYNSMPINVPGTLFHKAMKARKELAQIVAQIISSRRQRKQDFHKDLLGSFMDEKSGLTDEQIADNVIGVIFAARDTTASVLTWIVKYLGENPSVLEAVTVSVFWVLPPPPPLFFSLSIFEAIKIVKK

SEQ ID NO: 248040 - protein, 111 aa, Glycine max
  Clone ID: PAT_MRT3847_6600C.1.pep
IARGRSRSRTSLVNHKVILFIVITGVRSRVISRPIKTMLSTLSTIFSVIISRCFPSRVCIQIQGRVLVRQRIGKTLKISPLIYILAGFLILEIKTMQGAKVTSDHIMNLGN

SEQ ID NO: 248041 - protein, 105 aa, Glycine max
  Clone ID: PAT_MRT3847_66010C.1.pep
NCWSKCKRRVADYILKQDLLLIWLPPPTHYISPEGYTTDNLHSLSSQYGCDRNLTALLRNMMHYTVIAVADIVINNMTGTTHRRGRMHHGSHGMPSQQHAHAMTS

SEQ ID NO: 248042 - protein, 75 aa, Glycine max
  Clone ID: PAT_MRT3847_66011C.1.pep
SRGSPFGFYPFSSPLKIFNFTRDYWVCLFKNSPKKFCSKVGPGVLEVPTLVFNAFAVEEVTEVSTGLKFCIGIEK

SEQ ID NO: 248043 - protein, 216 aa, Glycine max
  Clone ID: PAT_MRT3847_66012C.1.pep
SIMDEKSGLTDDQIADNVIGVIFAARDTTASVLTWIVKYLGENPSVLEAVNEEQECILKSKEERGEDKGLNWEDAKKMPITSRVIQETLRVASILSFTFREAVEDVEYQGYLIPKGWKVLPLFRNIHHSPDNFKEPEKFDPSRFEAAPKPNTFMPFGSGIHMCPGNELAKLEILVLLHHLTTKYRWSVVGAKNGIQYGPFALPQNGLPITLFPKSK

SEQ ID NO: 248044 - protein, 130 aa, Glycine max
  Clone ID: PAT_MRT3847_66013C.1.pep
FLSFGCEYIFLCRYGSVFKTSILGTGVIVSTDPEVNKVILQNQGNIFVPAYPKSVRELMGEHSILQMNGNMHRKIHSLLGGFLRSPQFKARITRDIEHSVKQCFATWTHQPIIYLQDQVKKAKERMMKIV

SEQ ID NO: 248045 - protein, 330 aa, Glycine max
  unsure (1)..(330): unsure at all Xaa locations
  Clone ID: PAT_MRT3847_66014C.1.pep
EIVRVHRPNAMIFGGCIFFSGGAINGAAENIATLILGRILLGLGVGFTNQATPVYLSEIAPPKWXKLFNTGFQFFVGVGMVELXINYGTVRHPWGWHVSLGLATVPPTIITVGAFLILNTSSSLVVRNQIPQARNTLRKVHGLTADVELKLQHVIQSSXISKAVKGEGFGMMFEEQYQPKLVMVFAIPMSQQLTGINIVAFYAPDLFQSMGVDNDLALLLAVILGLVNLGSILVSTAIVDHFGRRFLYIIGSIQMLICMIVVVVVLAVVNGVHGTEHISKLNARMKKKGSRAVTEVLIQWQHTNPEDAIWKELPSMQPQFPDFDWRANRP

SEQ ID NO: 248046 - protein, 68 aa, Glycine max
  Clone ID: PAT_MRT3847_66015C.1.pep
LGVKWYRFSYGLDLFCLVYTVVATIDPSLLKILLSTLCKILCQLIRNHHTWYLNLKKLNLQKKGRRSR

SEQ ID NO: 248047 - protein, 45 aa, Glycine max
  Clone ID: PAT_MRT3847_66016C.1.pep
LRRVTAGLWGGHADIGYGNSRCFLPIPFFLFIVSRKLGFYPKWKA

SEQ ID NO: 248048 - protein, 112 aa, Glycine max
  Clone ID: PAT_MRT3847_66017C.1.pep
HTTIDLPHMRQASGYKSRCISHNIGINSYPSSCPASGATTSSATISAYNDVLNHLYNNSMMQALLALLPTLTLSYRTIRLVNMQQNPKRSPNPAANPNPNPLINMHQNPNSN

SEQ ID NO: 248049 - protein, 115 aa, Glycine max
  unsure (1)..(115): unsure at all Xaa locations
  Clone ID: PAT_MRT3847_66018C.1.pep
KKEVLTFCHRLQAATTLMISTPHNQLFIKTYDFFTGLLLIAHWLPYSPWSGMIKIVTFKSSFSKGCTLFYLFMVMRWVILXRKDNELPLDWLRQTDGDFFLALFWVYFLGHSWRE

SEQ ID NO: 248050 - protein, 118 aa, Glycine max
  Clone ID: PAT_MRT3847_66019C.1.pep
IDNIESNAEEDSKWWDSESQNLLSSQQLVEALFLCDDLLQSQSPKRDEENEHKKRPSLSVYADLGPEHLKKDIEECQNLVLDPANVVPETPPSEFRLSQLDFSSQDSFVSWCANKAID

SEQ ID NO: 248051 - protein, 67 aa, Glycine max
  Clone ID: PAT_MRT3847_6601C.1.pep
PRVRQWFGDLTHNIALRMVGGKSYSGVGDDDHAEGEARRYRRVMRDWVCLFGVFGRLVVEAHTMVWF

SEQ ID NO: 248052 - protein, 41 aa, Glycine max
  Clone ID: PAT_MRT3847_66020C.1.pep
QKDQSHKFQFSVGSPFCSTSIILLFMLFLALLESLFWYVEC

SEQ ID NO: 248053 - protein, 34 aa, Glycine max
  Clone ID: PAT_MRT3847_66021C.1.pep
RLGKARLTAASTDISNQSVLQYVRRSMLEYIIYK

SEQ ID NO: 248054 - protein, 40 aa, Glycine max
  Clone ID: PAT_MRT3847_66022C.1.pep
QLLNDESFLNIALKICIISKTFKVSYNVCFSPIPQILLFV

SEQ ID NO: 248055 - protein, 77 aa, Glycine max
  Clone ID: PAT_MRT3847_66023C.1.pep
DPIPIWETINQLRKTLFLFLCQEPSFRNTLAKPTSLENYVPFQNQTFLKPFFPLRGCLNFYPFPGVSFPHFWVFSHA

SEQ ID NO: 248056 - protein, 214 aa, Glycine max
  Clone ID: PAT_MRT3847_66024C.1.pep
KQKKLAYGSAIRALDFAMTKYPPACERFVDVLGLKTAFAAFMGKIPLSKKNKKERYQEDLEERIVSLIASLFGGILRGSRRERLLSKFVENECEKIDRLMELYIRYSDRVKAETERLNQVELDDLEMDEDEKYNRKLESGLYTLQLIAVILGHLWCSEHPQMRGRIELLLKQNKLSKKHIKDILQEYHDNIGDLDGPEEKERAQTKIQKFITAL

SEQ ID NO: 248057 - protein, 68 aa, Glycine max
  Clone ID: PAT_MRT3847_66025C.1.pep
RKMTAYAPCLQQICRRMQPIYLGNGQQYLLLRGESLSWTGIVGAFYISPRHHLWQDQMADEWGGNGNQ

SEQ ID NO: 248058 - protein, 62 aa, Glycine max
  Clone ID: PAT_MRT3847_66026C.1.pep
FRPHIVLSKLSSNSGGKLHHKFSPVFAPFPKKFLASSMCNTCNSFYNIRHQWPSVNPTKAMG

SEQ ID NO: 248059 - protein, 90 aa, Glycine max
  Clone ID: PAT_MRT3847_66027C.1.pep
MASFGSLLVLLLVALILMPHGLATYYKPIKKSPGYKPAVYKPPVYKPPVYKPKPPVYKPKPPLYKPPYKKPPYKKPPYGKYPAVEDNTHA

SEQ ID NO: 248060 - protein, 118 aa, Glycine max
  Clone ID: PAT_MRT3847_66028C.1.pep
GTALARLPGTSPGSTHAVRTNPLRWTSSCTPLTSCLLSLQALYASCPQGLATYHKPIKKPPVYKPPVYKPPVYKPPVYKPKPPVYKPKPPVYKPPYKKPPYKKPPYGKYPPVEDNTHA

SEQ ID NO: 248061 - protein, 91 aa, Glycine max
  unsure (1)..(91): unsure at all Xaa locations
  Clone ID: PAT_MRT3847_66029C.1.pep
MACLGSFLVLLLAALILMPQGLATYYKPIKKPPVYKPPVYKPPVYKPPVYKPKPPVYKPKPPVYKPPYKKPPYKKPPYGKYPPVXEDNTHA

SEQ ID NO: 248062 - protein, 66 aa, Glycine max
  Clone ID: PAT_MRT3847_6602C.1.pep
TRWHLSDPPRFNSSNRCNHVNPRPGRILWCLMRSPRSSWRRVRARSKQHGRFDVGCECRLKYETVT

SEQ ID NO: 248063 - protein, 76 aa, Glycine max
  Clone ID: PAT_MRT3847_66030C.1.pep
STMVKLGNQDLIVAISFPLSFLLGLPFLTNNNLPFSRQNHDYHTFFEAPRHEDQIVGHTENIYPFPFCQIHDMTAA

SEQ ID NO: 248064 - protein, 90 aa, Glycine max
  unsure (1)..(90): unsure at all Xaa locations
  Clone ID: PAT_MRT3847_66031C.1.pep
MGSFGSFLRLVLATLILMPXRLATYYQTIKKPTMYQPSMXQPTMSKQPVNKPKPPVYKPKPPVYKPPYKKPPYKKPPYGKYPSVEDNTHA

SEQ ID NO: 248065 - protein, 90 aa, Glycine max
  unsure (1)..(90): unsure at all Xaa locations
  Clone ID: PAT_MRT3847_66032C.1.pep
MAYLGSFLVLLFAALILMPQGLATYYKPIKKPPLYKPXVYKPPVYKPPAYKPKPPVHKPKPPGYKPPYXKPPYKKPPYGKYPAVXDNTHA

SEQ ID NO: 248066 - protein, 91 aa, Glycine max
  unsure (1)..(91): unsure at all Xaa locations
  Clone ID: PAT_MRT3847_66033C.1.pep
RFFPFPISTATTPPPPYPFVESKLFPLPIPPPSPLPPRLAYLISGXSADASAILRTLSALYXHPRNRYVLHLDRDSSPEDRRLLTHHVDRH

SEQ ID NO: 248067 - protein, 101 aa, Glycine max
  unsure (1)..(101): unsure at all Xaa locations
  Clone ID: PAT_MRT3847_66034C.1.pep
MASFVSFLVMLLAALILMPQGLATYYKPIKKPPVYKPPVYKPPVYKPPVYKPKPPVYKPKPPVYKPPYKKPPYKKPPYGKYPPXXDNTHXQSKQRGPSSTQ

SEQ ID NO: 248068 - protein, 123 aa, Glycine max
  unsure (1)..(123): unsure at all Xaa locations
  Clone ID: PAT_MRT3847_66035C.1.pep
NEHGKGMXMCSINPNYLGKKYRYAYACGAQRPCNFPNTLTKLDFELKKAKNWHEEGAVPSEPFFVARPGATEEDDGVVISIVSEKNGEGFALVLDGSTFEEIARAKFPYGLPYGLHGCWVPKE

SEQ ID NO: 248069 - protein, 60 aa, Glycine max
  Clone ID: PAT_MRT3847_66036C.1.pep
DVLVVVSIYFSDSLRVLHISICYAICDLFLLGAVLSFSFSYFCLSVNPSSLACMINSPTD

SEQ ID NO: 248070 - protein, 39 aa, Glycine max
  Clone ID: PAT_MRT3847_66037C.1.pep
YEKKTMQQFYFYTSLNVLPTQYPYRKHANCLVNIIMHYS

SEQ ID NO: 248071 - protein, 95 aa, Glycine max
  unsure (1)..(95): unsure at all Xaa locations
  Clone ID: PAT_MRT3847_66038C.1.pep
MHRYDDKYGNTRLYVGRQSSTTRSRDLKRVLSRYGRDRGRHHKNDYRSDEYRDPRDXADDARYNSGWTPCXRSHVIVEIAKGGPRRYRDREYMGR

SEQ ID NO: 248072 - protein, 83 aa, Glycine max
  Clone ID: PAT_MRT3847_66039C.1.pep
SSSQNDDVQKVFGILRSTSTPEQLKQAHKGSGDVLRNDVSEQSTETAYDSATGAGAKPSGLYGPPAEEKGPPTPGGPKTPGWT

SEQ ID NO: 248073 - protein, 93 aa, Glycine max
  Clone ID: PAT_MRT3847_6603C.1.pep
EFAAFCRSDTAGGGGTELPDAFNLFDQAKNGLISPPELCQVLNPPGIKCSVEECPPMIKSVDSDGGGNVNFPGFKRMMSPHRENASHAEEKTP

SEQ ID NO: 248074 - protein, 78 aa, Glycine max
  Clone ID: PAT_MRT3847_66040C.1.pep
GAAMSELKLRNELCLERGALKREQIFYFLLKLPWHERNRSCILLVALFLYENMHGALRSYPGRSKLSMSSKGIYHLDI

SEQ ID NO: 248075 - protein, 64 aa, Glycine max
  unsure (1)..(64): unsure at all Xaa locations
  Clone ID: PAT_MRT3847_66041C.1.pep
ERWGLHNVLAANLLPFPSLDPLFSSINHLSAEXTHSFIATIHAPRDTEISTXXSXLPXTXXSPG

SEQ ID NO: 248076 - protein, 52 aa, Glycine max
  Clone ID: PAT_MRT3847_66042C.1.pep
FFFDYNIIIIIMIIITFLIEVYPDEESSRVTKKQVLIDLHRVGWKKLMWRLQ

SEQ ID NO: 248077 - protein, 92 aa, Glycine max
  Clone ID: PAT_MRT3847_66043C.1.pep
MANTASCVAGHHDCPVRLFELKTKKTHRLIVFKIEEQQKQVIVVKLGVPAQGYEYLTASPPADECRYAVYDFEYLTEGNGPKSKIFFIAWAP

SEQ ID NO: 248078 - protein, 69 aa, Glycine max
  Clone ID: PAT_MRT3847_66044C.1.pep
TSFSQLWEIKVPPRALSFAWRLLWDRLPTKENLIRRQVVIENDLCPFCQSQVESASHLFFTYKKVMPMW

SEQ ID NO: 248079 - protein, 170 aa, Glycine max
  unsure (1)..(170): unsure at all Xaa locations
  Clone ID: PAT_MRT3847_66045C.1.pep
MAMSGMRGLSVFISDIRNCQNKEQERLRVDKELGNIRTRFKNEKALTPYEKKKYVWKMLYIYMLGYDVDFGHMEAVSLISAPKYPEKQVGYIVTSSLLNENHDFLRLAINTVRNDIIGRNETFQCLALTMVGNIGGREXAESLAPDVQKLLISSSCRPLVRKKXALCLLR

SEQ ID NO: 248080 - protein, 71 aa, Glycine max
  Clone ID: PAT_MRT3847_66046C.1.pep
FSVIKHAFIEEPEELEEEEEWNDLLTHISIFVLHSVPLSIKLMHACVLFFTAYFMLRLLFCCCLYTRIYLL

SEQ ID NO: 248081 - protein, 184 aa, Glycine max
  Clone ID: PAT_MRT3847_66047C.1.pep
MLLSLPSPSPLVSTMSEKKKKKNSTRRSVVVVGESKKPQPLVEVEDIEDSLSFSKDETHKLRVALLDWYDLNRRDLPWRTTFKQEDEEVERRAYGVWVSEVMLQQTRVQTVIAYYNRWMQKWPTIHHLAQASLEEVNEMWAGLGYYRRARFLLEGAKKIVAEGGQIPKVASMLRNIPGIGEYTS

SEQ ID NO: 248082 - protein, 67 aa, Glycine max
  Clone ID: PAT_MRT3847_66048C.1.pep
IRRAKMDFEKYVLHNNSTEAHFTAETYQGISAIARKNELTTALHHHMLVDSVEVHREGNCNAVQKHN

SEQ ID NO: 248083 - protein, 174 aa, Glycine max
  Clone ID: PAT_MRT3847_66049C.1.pep
ENNRDAQQELSSSMVSQTFGVPDMAFNSIDSTIDDSNFLNSGPWAPPPAPPPLPPAQFQRMRTYTKVYKRGAVGRSIDITRYSGYEELKKDLARRFGIEGQLEDRQRIGWKLVYVDHESDVLLVGDDPWEEFVNCVRCIKILSPQEVQQMSLDGDFGNGGLQNQACSSSDGGNT

SEQ ID NO: 248084 - protein, 80 aa, Glycine max
  Clone ID: PAT_MRT3847_6604C.1.pep
APFFFFFFFFFFFFFFFFFFFFFFFFFFFFFPKTTPNFYLQKRQQGKRGTAMGGTEFNPPKLASNGFYRAQTKPKKNTSQ

SEQ ID NO: 248085 - protein, 253 aa, Glycine max
  Clone ID: PAT_MRT3847_66050C.1.pep
NTSISYNPQSLLFRDNNQDGEVQADARSNIPYANNIDSQMGMPLNPDSLSTKGTLRLGKDLSNNFSSEGMLGNYEINRDAQQEPSSSMVSQTFGVPDMAFNSIDSTIDDSNFLNSGPWAPPPAPPLPPLPPLPPAQFQRMRTYTKVYKRGAVGRSIDITRYSGYEELKQDLARRFGIEGQLEDRQRIGWKLVYVDHESDVLLLGDDPWEEFVNCVRCIKILSPQEVQQMSLDGDFGNGGLPNQACSSSDGGDT

SEQ ID NO: 248086 - protein, 103 aa, Glycine max
  Clone ID: PAT_MRT3847_66051C.1.pep
PQFPIQFGEPTSSKQRKPIIINFIQTEITFHPKGNKKKQKFHRLENCNFQNKQVQNREKLIKINSISKRELEKEKEKEKQKIALQRLENWNFQNRVGESTSSK

SEQ ID NO: 248087 - protein, 75 aa, Glycine max
  unsure (1)..(75): unsure at all Xaa locations
  Clone ID: PAT_MRT3847_66052C.1.pep
KRGSEHIPVRNVTFRDMSVRPTDKKQHIFQCAFVQCRVISTIYPACCENLDRFIXQVQLVKHFVSQNVTDIVHYF

SEQ ID NO: 248088 - protein, 106 aa, Glycine max
  unsure (1)..(106): unsure at all Xaa locations
  Clone ID: PAT_MRT3847_66053C.1.pep
SVDEPLQLEGPALVPIEWLEKADYPIIXEIDDDHLMQRIXMNAIVSKDNDNLPLIMDGTGXHGAQKTMPNKIFFDDKILLTNIHLLFVENLTGCSWVTTYGDSLYT

SEQ ID NO: 248089 - protein, 145 aa, Glycine max
  unsure (1)..(145): unsure at all Xaa locations
  Clone ID: PAT_MRT3847_66054C.1.pep
HRADTWVWKPDPSGQYSTKSAYDQLLGESLGGNLDGAFEELWKLRIPAKTTFFAWRLIRDQLPTKSNLRRRQXRVNDMMCPFCKNKEEDAAHLFFDCSKTLPLWWESLSWVNILGAFPQNPRHHFLQHDSGNVGGSNPIDGSAGG

SEQ ID NO: 248090 - protein, 65 aa, Glycine max
  Clone ID: PAT_MRT3847_66055C.1.pep
STRLPNMFNIVILCIRGYFGQAAVLGLPDTGGQVVYILDQVRALEEELLHKIELQGLDVKPQILV

SEQ ID NO: 248091 - protein, 595 aa, Glycine max
  unsure (1)..(595): unsure at all Xaa locations
  Clone ID: PAT_MRT3847_66056C.1.pep
MGIEILEPNTCIRGCCTSPSIPLHLPPSSYTLLSPIARXKLDHPGIATPIAAHAKPPNYMFFFKLFESPNLAQKLHVEEWIPTLNDALMIAMHLTKTFXPHLTDFGLAEYKNDLKRVSTENWKSSGKPTGGFHKKNMVGTLIYMAPEILRKELHTEKSDVYSFGISINELLTGVVPYTDLRTEAQAHTVLEMNYTEQQLTAAVVSDGLRPVLAAEDLGIPSRLLSMIKKCWDADPNNRPAFDDIVEELDLVMEHGKLKKAEDIHIRPYNLHVVQPAGKTDHFKAYQESFSWFTRGELLARSASSANDSGLITRCESSDKPSAYHPTMSWGSYATCGRRETMEDTHFILPHICDEKDAYAFGIFDGHRGAAAAAFSSRAVPAVLQTSDFMGSPANALAEAFIKTDAAFRKELDSYRKSNRCIQKDWHPGCTAIAILIVRNKLFVANIGDCRVILCRAGNPIALSKDHVASCLQERERVIRQGGQVHWQVDTWRVGLPALQVTRSIGDDDLKPAVTAEPEITESTLCPEDEFLVMASDGLWDAISSMEVINIIKDTVKEPGMCSKRLATEAVERGSKDNITVIVVFLRPVSTAERIY

SEQ ID NO: 248092 - protein, 57 aa, Glycine max
  Clone ID: PAT_MRT3847_66057C.1.pep
TRPHASIHGSITTLLLYYLGIIQLGPSVLLKPLEYPRESCVSAPLWGIKGAISSFWY

SEQ ID NO: 248093 - protein, 79 aa, Glycine max
  Clone ID: PAT_MRT3847_66058C.1.pep
PEEDSVGLQQRRSELRSQMHPLKQISADRVGAYGFQDTEEAAEKGLLRRLAIGDAVSAELRSVIALASPKRGSHYKPSS

SEQ ID NO: 248094 - protein, 191 aa, Glycine max
  unsure (1)..(191): unsure at all Xaa locations
  Clone ID: PAT_MRT3847_66059C.1.pep
MGIEILEPNTCIRGCCTSPSIPLHLPPSSYTLLSPIARGSESVVYEGTLDGTRVAVKKPILSTSEDINKFHKELQLLCKLDHPGIATPIAAHAKPPNYMFFFKLFESPNLAQKLHVEEWIPTLNDALMIAMQLAKALQYLHNLGIVHRDVKPANILLDKTFXPHLTDFGLAEYKNDLKRVSTENWKSSGKL

SEQ ID NO: 248095 - protein, 53 aa, Glycine max
  Clone ID: PAT_MRT3847_6605C.1.pep
PVLPYDEAQRELWAVIPSPTLVTVARFSGMVAVTVKPSAPAPLFIVLVPTYGG

SEQ ID NO: 248096 - protein, 86 aa, Glycine max
  Clone ID: PAT_MRT3847_66060C.1.pep
LINHNNKKSSVRFQGMGPSKPNKENNTSTSKQHNKIIATYTLFPTHTQCKQNLTTNILSHHPTKTNQWYLNHAPKELVSAHKNIGR

SEQ ID NO: 248097 - protein, 198 aa, Glycine max
  Clone ID: PAT_MRT3847_66061C.1.pep
MAPAIGSMGDTNGLMAQVITGRGFGGFAFFLIMAAAGATYMFSLYSGDIKSALAYHQTTLNLLSFFKDLGGNVGVLSGLINEITPPWVVLAMGSVLNFFGYFMIWLAVTKKIPKPHVWHMCLYICIGSNSQSFANTGSLVTCVKNFPESRGVVLGILKGYVGLSGAIITQLYFAFYYDDSRSLILLIGWLPAAISFLF

SEQ ID NO: 248098 - protein, 91 aa, Glycine max
  Clone ID: PAT_MRT3847_66062C.1.pep
PCIHWLHCYHEFQLAPPHHELEEDFSVFGVVFCALESSTLELFSSFDASIHMFEAWSRQSIYSRWRGSVRFTVVFYPSDNNKVVLVVSTLA

SEQ ID NO: 248099 - protein, 561 aa, Glycine max
  unsure (1)..(561): unsure at all Xaa locations
  Clone ID: PAT_MRT3847_66063C.1.pep
MAVGVELPEGRSGGGGGIVMEFPAGDEESFSSPTRLPKRLRRRLRDAECKSPSTVEEIEAKLHDADLRRQKYYEKLSSKARAKPRSPSRCSSQEEDLGQRLEAKLQAAEQKRLSILTKAQMRLARLDELRQAAKSGVEMRYENERVRLGTKVESRVQQAEANRMLILKALRQRRASHRERSSQTLMRRMARESKYKECVRAAIHQKRAAAETKRLGLLEAEKNRAHARVSQVIHVAKSVSHQREIERRKKKDXLEDRLQRARRQRAEYLRQRGRLRGYAQENRNWMPKQAEYLSRNLARCWRRFLRQKRTTFTLTKAXSARVGINEKSVKSMPFEQLALLIESASTLQTVKTLLDRFESRLKVSTAVAPAKNLSSLDNIDHLLKRVASPKKRATPRSSVRSRQAKKVDSVRESNNSLARLSRYPVRVVLCAYMILGHPDAVFSGMGECENTLAKSAQEFVQMFELLIKIILDGPIQSSDEESVSVSMKLCTFRSQLAAFDKAWCSYLNCFVVWKVKDARSLEEDLVRAACQLEASMIQTCKLTPEGAGGKLSHDMKAIQHQ

SEQ ID NO: 248100 - protein, 103 aa, Glycine max
  Clone ID: PAT_MRT3847_66064C.1.pep
IVSNFTFSFPFVVCIYIYHRSPITDHRLLIAVVFNIIVIILVVAILFCAVLYDVVGAISSPSRWYGEIVCCVVVSLKDGGWSGVAGGEKRRWRRNCDGISGRR

SEQ ID NO: 248101 - protein, 132 aa, Glycine max
  unsure (1)..(132): unsure at all Xaa locations
  Clone ID: PAT_MRT3847_66065C.1.pep
MGGXPATGHLIYKLGGIDMRGIERLQKEAAXINKMSFKYAWVLVKLRAERERRITIDMAXWKFETTKFYXTVIDAXGHXDFIKNIITGTSQADWASLIIDSTTAGYEAGVSKDGQTREHALVALTLRVKHMI

SEQ ID NO: 248102 - protein, 169 aa, Glycine max
  unsure (1)..(169): unsure at all Xaa locations
  Clone ID: PAT_MRT3847_66066C.1.pep
WYGMSGQITVGTTILDAVQATVGAEXKVIYEKYPSENTIERNEFSFAIVAIGEAPYAETLGDNSELTIPLNGADIISLVADRIPTLVILISGRPLVLEPLLLDKIDALVAVWLPGSEGEGIIDVIFGSHGFKGKLPVTWFRRVEQLDQPADAVNSCEPLFPLGFGLAYN

SEQ ID NO: 248103 - protein, 1874 aa, Glycine max
  Clone ID: PAT_MRT3847_66067C.1.pep
MSTLKEQMASMMEAMLGMRQLMEKNVATAAAVSLAAEVDPTLLATAHHPPPNAVGRERNTLGHTSNPHLGYNWVAYHLITRRQSCMMMRVMSLPPSLKGSLLDSPTKSMKIIEKGPPLTAEERRKLDLIEERLRAVEGFGDYPFADITDLCLVPDVVIPPKFKVPDFDKYKGTTCPKNHLKMYCRKMGAHSRDEKLLMHFFQDSLAGAAVIWYANLEASRIRTWKDLITAFLRQYQYNSDMALDRTQLQNMVKKESETFKEYAQRWRDLTTQVAPPMVEREMITMMVDTLPIFYYEKLVGYMPSNFADLVFIGERTKQLGQKGKKEIPMPSLRRPHGSSLCRPLMVPISMRNIIRAFQLAPETPPIQHPYSLEHPPPSRGRPPQAPAPTTTRPAGNAHYGVSSNAMKNFPPRPILEFTPIPMTYEDLLSSLIANQIAVITHGKIYQHPFPKWYDPDATCAYHGKTPGHPTEKCLALKYKSTDERSFGRPKPLVIYFTKDVASQKPRYPSVVKHVPFPYRNSHAVPWRYAPLSERKEEATDINSLLAKVTNITGLSDVTRSGRMFAPPDLPTQPANVKGKANVVEEQNDKMTLTPNEDIPVKGLLEKMDGCGKKESEFKVIEQLNKTPARVSLLELLMSSEPHRALLVKVLNEAHVAQDISVEGFGGLVNNITANNYLAFTEEEIPTEGRGHNRALHVSVKCMDHVVAKVLIDNDSSLNIMPKSTLEKLPFNASHLKPSSMVVHAFDGTCREVKGEIDLPVQIGPHTYQVTFQIMDINPTYSCLLGHLWIHSVGVIPSTLHQKLKFIVEGHLVIVSGEEDILVSCPSSMPYVEAAEESLETAFQSFEVVSIASVDSFSGQPCLSDTAVMVARVMLGNGYEPGMGLGKDNGSRTSMISARGNRGKFGLGYKPTQVDIRKSVAGRKSGGQGSRLRQEVEGSPPCHISRSFISAGLGHEGQVIAICEDDSPSGSDLVRLCPPGFRLGNWRVEERPDIYATSIISDDESLEGTNTWDPTIDFEQETNQTEDEEDEDVGLPLELEKIVAHENQEMGPHQEETELMDLGTGNGKKEVKIGTGMTAPVHEELIALLKDYQDIFAWSYQDMPSLSSDIIQHRLPLNLECSPVKQKLRRMKPETSLKIKEEVKKQFDVGFLAVARYPEWVANIVPVPKKDGKIKMVPENMEKTTFVTLWGTFYYKVMSFGLKNARATYQRAMVALSKTDYIIAKSKTEAEHLVNLRKLFERLRKYQLSFIVSQKGIEVHPEKVKAILEMPEPRTERQVRVPERPLILYMMILDESMGCMLGQHDESGKRERVVYYLSKKFTACEMNYSLLERTWCALVWASHHLRQYMLSHTTWLISKMDPVKYIFEKPALTGRITRWQVLLSEFDIVYVTQKAIKGSALADYLAQQPLNDYQLMHPEFPDEDIMALFEEKLDKDRDKWTVWFDGASNVLGHGTGAVLVSPDNQCIPFTARLGFDCTNNMAEYEACALAVHAAIDSNVKLLKVYGYSALVIHQLRGEWETRDPKLIPYQAYIKELRFIESKKYPPGASDNDKRTLRKLATGFFMSRSILYKRNHDMTLLRCVDTKEANHMIKEVHEGSFGTHANGHAMARKILRAGYYWLTMESDCCTHVEAASYTNVTRSVVVRFIKRELICRYGLPRKIITDNGTNLNNKMMQEMCVDFKIQHHNYMPYRPKMNGAVEATNKNIKKIIQKMTVSYKDWHEMLPFALHGYRTSVRTSTGPTPYSLVYRMEAVLLFEVEVPSQKILAESGLEESEWAQTRYDQLNLIEDKCLMAMSHGRLYQQRMKNAFDKKVRLRKFHEGDLVLKKMSHAVKDNRGKWAPNYEGPFVVKKAFFRRGPGAYQHGWRGATFTREL

SEQ ID NO: 248104 - protein, 185 aa, Glycine max
  unsure (1)..(185): unsure at all Xaa locations
  Clone ID: PAT_MRT3847_66068C.1.pep
YGRSDKSFTSLIQVVQDMLPEENTLPKSYYQAKILCLMGMEYQKIHVFLNDCILYRQEYEEMHKCLMCKVSRYKVKDDDKXMKRQQKAPQKVLWYLPIIPRFKRLFANADDTKDLTWHVDGRNYDGHPVDSSXWKKTDHLYPNFNKESRNLMFGLVIDGMNCYGSLSTQHSSWPILLVIYNLPPW

SEQ ID NO: 248105 - protein, 114 aa, Glycine max
  unsure (1)..(114): unsure at all Xaa locations
  Clone ID: PAT_MRT3847_66069C.1.pep
MVLLEKLWDDVVAGPQPERGLGKLXKLTTLKTXYSSKLQKTLSMPSTPTIPMTPTTPTTPGSTHKANNIWRNIFHPESNSTTKTINTQIFNKPLPNTPTVYNXLYXKKTRSKHH

SEQ ID NO: 248106 - protein, 118 aa, Glycine max
  Clone ID: PAT_MRT3847_6606C.1.pep
RPAEINWLLMILCLVVTICFRDTKHLGNASGLAVITVMLVTTCLMSLVIVLCWHQNVLLALGFVFIFGYIEVLFFSASLIKFLQGAWVPIALALVFLTCMCAWHYGTLKKYEYDVQNK

SEQ ID NO: 248107 - protein, 93 aa, Glycine max
  unsure (1)..(93): unsure at all Xaa locations
  Clone ID: PAT_MRT3847_66070C.1.pep
XLDPXMXDSXXXXXPGFPFRPXFKPILPXSPSPXXANLWKXAXDHRIPCFQXXDXHRESNCXTSXERSXXHRFWTSLPRXMLVXGXLSXICSS

SEQ ID NO: 248108 - protein, 58 aa, Glycine max
  Clone ID: PAT_MRT3847_66071C.1.pep
SVYKSWALQRLKRMCVSMQQDSLLCQTVVVAKVIACSKSFHPRKERLWLAKKNPEYAQ

SEQ ID NO: 248109 - protein, 202 aa, Glycine max
  unsure (1)..(202): unsure at all Xaa locations
  Clone ID: PAT_MRT3847_66072C.1.pep
GSRACIRVQQGTVSSSNDTKESPWILCSVAQVEQAKILLSVIPIFASTIVFNTILAQLQTFSVQQGSSMDTHLTKSFHVPPASLQSIPYILLIVVVPLYDSFFVPFARKITGHESGISPLQRIGFGLFLATFSMISAALVEKKRRDAAVNLNETISIFWITPQFLIFGLSEMFTAAGLIEFXYKQSLIGMQTFFTAITYXSY

SEQ ID NO: 248110 - protein, 36 aa, Glycine max
  Clone ID: PAT_MRT3847_66073C.1.pep
DFYFTSLPRTEKSECTVLFGTRRAHARLLHCLERTL

SEQ ID NO: 248111 - protein, 952 aa, Glycine max
  Clone ID: PAT_MRT3847_66074C.1.pep
PRVRDITNRHLLLGPLFKLLSKVFSGEWVNGAYSPVRRLSQPSSPSEANNYTIYHIQQTLLIILEDIIISLKSMAPLNEKIISEINIKLLIECARKSPVAVTRNHVFSVLSAVTRVFPGEVLEHMLDILEVIGQAAVTQIDSHSKHVFEDLISAIVPCWLAKTDDVEKLLMIFMDILPEIVEHRRLSFVLYLLRTLGEGKSLASLLILLLRSLISRKAACFLNVKTRDDLTFYTGEWEYKFAVQICEQYTSTIWLPSLVMLLEQRGNSDVDQALFLELFIVMQFSLQKLQDPEFVFKLKSGEDTAVIQRALGELMEHVVLLLQLVDAWKKQLNFPVILRRELKETMRAVVRNLTTVMIPAGYFKSIIKLLHHADKRLGKKALGLLCEAARNHKNVSLKLKGNKGSRSTPSFLLLHMNETSQESLNKLCLEIIRVLDDSSNTSLKVAAVSALEVLAERFPSNNSIFSLCLGSVTRHIVSHNLAVTSSCLRTTAALINVLGPKSLAELPKIMDNVMKSSRRVLASLDKKPETTDVLSASNESHFYVLITLEAVVDKLGGFLNPYLTNIMELLVLYPEYVSGVDAKVESRAHGVRKLLAEKIPVRLALPPLLKLYPAAIEAGDKSLTIVFDMLGTIIGTMDRSSIVAFHGKVFDLCLVALDLRRQSPPSVQNIDVVEKAVLNTMTVLTLKLTESMFKPLLIKSIEWAESEVDETASSGSIDRVISFYGMVNKLTESHRSLFVPYFKHLLGSCVHHLSEGGDVKVSRVNQKKKARILDDGNIKEIGSVSINAWHLRALVLSSLHKCFLYDTGTLKFLDSSNFQMLLRPIVSQLVVDPPALLDDSINIPSVKEVDDLLVVCIGQMAVTAGSDLLWKPLNHEVLMQTRSEKLRAKILGLRIVKYFVENLKEEYLVFIAETIPFLGELLEDVELSVKSLAQEILQEMESLSGESLRQYL

SEQ ID NO: 248112 - protein, 160 aa, Glycine max
  Clone ID: PAT_MRT3847_66075C.1.pep
VVLAAFASTLLEQRRHFVHPLVACSRRLAPVVMIVAGGRQELAGLLHALEERQVEHVHVYRASTGPGRGRHRAGVCRRVGRVGPRKEQLGELAWIVGPDSVGGECRGASYRGPSAAVFGGGASEHVGEGLLNLEQRGVVRVVLLEEAVRVRLLFQEPDAW

SEQ ID NO: 248113 - protein, 92 aa, Glycine max
  unsure (1)..(92): unsure at all Xaa locations
  Clone ID: PAT_MRT3847_66076C.1.pep
LLVRTRGVADDAWIARDSAMTWSERGRAXTDVYTIGSQDWKSWNADSVKATTMTYNPNASSDAWSKECLKRARVHCAITXVTGGTATPMIDV

SEQ ID NO: 248114 - protein, 80 aa, Glycine max
  Clone ID: PAT_MRT3847_66077C.1.pep
NKPAGGEPETTTLPAEAEAKPKPPPFGPKRGAKGKILRKDSYWSKGPGSGVAVDQDPNIGYPVGVRFTKVNFAICSTNNF

SEQ ID NO: 248115 - protein, 41 aa, Glycine max
  Clone ID: PAT_MRT3847_66078C.1.pep
AHGFLGKLNSMMRPRHCAYSALARFKRSSNVKSVWVCDTVG

SEQ ID NO: 248116 - protein, 165 aa, Glycine max
  unsure (1)..(165): unsure at all Xaa locations
  Clone ID: PAT_MRT3847_66079C.1.pep
QDVQTSSSTIRTNVNGKGEGTTREVKKKRSEESSDAMLKKPKQDTSTASSSKVQAPKVKLGDKITALQQIVSPFGXDTASVLFEAIGYIKFLQEQVQLLSNPFLKANSHKDPWGSLDRKDHKEDTKLDLRSRGLCLVPTSCTPLVYRESSGPDYWTPAYRGCLYR

SEQ ID NO: 248117 - protein, 59 aa, Glycine max
  Clone ID: PAT_MRT3847_6607C.1.pep
PNENPRSNTLQNSREKLWFFTEVSELTQEGERKKELSSQVSLKRNQSINQKQNLKTRGK

SEQ ID NO: 248118 - protein, 49 aa, Glycine max
  Clone ID: PAT_MRT3847_66080C.1.pep
NSYHQDQGSTPDRNITAPRGIFSSARTQTILICHRRTRWDTIPPNREQI

SEQ ID NO: 248119 - protein, 75 aa, Glycine max
  Clone ID: PAT_MRT3847_66081C.1.pep
QVFSCKRPVKLLDSGAVRATRFLWQYPTARVILFFYLVFVHLFLMYLLHRLQVQADTLAAREVAESMGLSNQNLP

SEQ ID NO: 248120 - protein, 62 aa, Glycine max
  Clone ID: PAT_MRT3847_66082C.1.pep
NLLSLYKEQWYNTYFKNSHIIGKAWGITVTKLILCLKAHTLRGATKIPFLSFVLHNGRSSSF

SEQ ID NO: 248121 - protein, 59 aa, Glycine max
  Clone ID: PAT_MRT3847_66083C.1.pep
CYKKNMIKFEALSLKNNRTIRPTTFYGKKGLIYVKWTNQPLYFRKKKKNVNTEYGTCPE

SEQ ID NO: 248122 - protein, 694 aa, Glycine max
  unsure (1)..(694): unsure at all Xaa locations
  Clone ID: PAT_MRT3847_66084C.1.pep
MDSWLKAAEGLFEVVDRRAKAVASDLSEEQGDSKSPASNGQGSQGKRTKSKPKAQKALSDSPTIISDTTHEKSGSPSAPVDIAAFXDKVDPEIEVSGSTSYKRTIXPQPSDATSPLGDDVGKHVTDDAEALENDADAGVATIAGNGDPVQESASDICEMDPPPAPKGIEGSSDEPTSTGQIIKSRDLDASKNVDIEKSDSVASDTAPKNDPILKDSDVKVESVVDEKSQEDHKADISPEKVQDQLDEAQGLLKTTKSTGQSKEARLARVCAGLSSRLQEYKSENAQLEELLTSERELSKSYEASIKQLQKDLSESKREVTRVESNMVEALAAKNAEIEALXEMQKMRVEMAAMKRDAEHSXTSGAYGVRETLSGTDRPFVLQTNSIRNHXSEKAATEFQLEKEIKRLQEAKAEAERSRVSRRASSSWEDETEIKSLEPLPMHHRHLVGASIQLQKAVKLLDSGAVRAXDFSGSIQQLELFYFSTWKQAWQEELERARQGQRELTHWPLEKLQNLWDFRTRIYRDSSKIFHLGHVSGVNNIFLTTYIFKCTYYKQTQLETMVSEKAATEFQLEKEIKRLQEAKAEAERSRVSRRASSSWEDETEIKSLEPLPMHHRHLVGASIQLQKAVKLLDSGAVRATRFLWRYPTARVILFFYLVFVHLFLMYLLHRLQAQADTLAAREVAESMGLSNQNLP

SEQ ID NO: 248123 - protein, 199 aa, Glycine max
  Clone ID: PAT_MRT3847_66085C.1.pep
MDSWLKAAEGLFEVVDRRAKAVASDLSEEQGDSKSPASNGQGSQGKRTKSKPKAQKALSDSPTIISDTTHEKSGSPSAPVDIATSIDKVDPEIDVSASTSTNQPKEPQPSDATSPLLGSSLSKILGDDVGKHDTDDAEALVNDADIGVATIAGNGDPVQESASDICEMDPPPAPKGIEGSSDEPTSTGQIIKSRDLDAS

SEQ ID NO: 248124 - protein, 184 aa, Glycine max
  unsure (1)..(184): unsure at all Xaa locations
  Clone ID: PAT_MRT3847_66086C.1.pep
NENILTIISLKLILNLQRELSKSYEASIKQLQKDLSESKREVTRVESNMVEALAAKNAEIEALLSSMDAVKRQAALSEGNLASLQASMESMMRNRELSETRMMQALREELASAERRAEEXERVAHNATKMAAMEREVELEHRAVESSTALARIQRVADERTAKATELEQKVALLEXECASLNQE

SEQ ID NO: 248125 - protein, 138 aa, Glycine max
  Clone ID: PAT_MRT3847_66087C.1.pep
MLTHRKYRLLQFASVSGRALTISPEFRQLSSVSSIPSNSHKTSKSDGKAPKSSTLWLNLPSNAEEDVRTRVRSSFFGTYVALLFPAATFALGCWQWKRHKWKTELIEKLKIATKTAPVEFPVDNLSAIDDMEFRKVHV

SEQ ID NO: 248126 - protein, 229 aa, Glycine max
  Clone ID: PAT_MRT3847_66088C.1.pep
WTEIICKSFSYYFTSQAHTAFHFAEPCFSGLLAAPFVPQSNIHHAQLLGMTPARIPLPLDLSEEPMYVNAKQYHAILRRRQYRAKLEAQNKLIKERKPYLHESRHLHALKRARGSGGRFLNAKKLQELKLTSANRGLDVSGCTQLNLSGNMSESKVQAVENLNYRNGASTTTCSDVISTSNSDDVFQQHESDFRLCGYPSHIGRNMQGYSADIGGGGGGGNQHRLSVLM

SEQ ID NO: 248127 - protein, 78 aa, Glycine max
  Clone ID: PAT_MRT3847_66089C.1.pep
SRSVPLVSTIFVLLLLLVPTVIMGPSMVADARTCVSHTHRFLGPCLCDTFCGSVCLTARFTVGLCRVFPRRCFCTTRC

SEQ ID NO: 248128 - protein, 114 aa, Glycine max
  Clone ID: PAT_MRT3847_6608C.1.pep
GHDRGYNLNPQKEQTMVHTKEKSCHTWKTKNKTPHPRKGTSNPHPCKRQRQRAQLKIAYESQHGCASCTNKKLTTGWGPVQKTFIDSWTKRNHIPMKRISNKAAQRGDITFTTL

SEQ ID NO: 248129 - protein, 241 aa, Glycine max
  unsure (1)..(241): unsure at all Xaa locations
  Clone ID: PAT_MRT3847_66090C.1.pep
MRECISIHIGQAGIQVGNACWELYCLEHGIQADGQMPSDKTIGGGDDAFNTFFSETGAGKHVPRAVFVDLEPTVIDEVRTGTYRQLFHPEQLISGKEDAANNFARGHYTIGKEIVDLCLDRIRKLADNCTGLQGFLVFNAVGGGTGSGLGSLLLERLSVDYGKKSKLGFTVYPSPQVSTSVVEPYNSVLSTHSLLEHTDVAVLLDXEAIYDICRRXSLDIDRPTYTNLNRLVSQVISSLTA

SEQ ID NO: 248130 - protein, 451 aa, Glycine max
  Clone ID: PAT_MRT3847_66091C.1.pep
MRECISIHIGQAGIQVGNACWELYCLEHAIQADGQMPSDKTIGGGDDAFNTFFSETGAGKHVPRAVFVDLEPTVIDEIRTGTYRQLFHPEQLISGKEDAANNFARGHYTIGKEIVDLCLDRIRKLADNCTGLQGFLVFNAVGGGTGSGLGSLLLERLSVDYGKKSKLGFTVYPSPQVSTSVVEPYNSVLSTHSLLEHTDVAVLLDNEAIYDICRRSLDIERPTYTNLNRLVSQVISSLTASLRFDGALNVDVTEFQTNLVPYPRIHFMLSSYAPVISAEKAYHEQLSVAEITNSAFEPSSMMAKCDPRHGKYMACCLMYRGDVVPKDVNAAVAIIKTKRTIQFVDWCPTGFKCGINYQPPTVVPGGDLAKVQRAVCMISNSTSVAEVFSRIDHKFDLMYAKRAFVHWYVGEGMEEGEFSEAREDLAALEKDYEEVGAEANEGDEGEDGDEY

SEQ ID NO: 248131 - protein, 50 aa, Glycine max
  Clone ID: PAT_MRT3847_66092C.1.pep
EPCIFFSYHNSIKIPFYVHVILLVSSKINYTQHFQFIVHNPLLKSMLVLI

SEQ ID NO: 248132 - protein, 108 aa, Glycine max
  Clone ID: PAT_MRT3847_66093C.1.pep
MVGFRNRYMVMEVFLNPNRDKGGDDSVIVTQFNVSKAVRDSILVNFGECGLASSLGSFQGSIRACKNAALKCEESKFEQYKLMLGDRFSSDHTHRMNTYLDRIKVLEH

SEQ ID NO: 248133 - protein, 241 aa, Glycine max
  unsure (1)..(241): unsure at all Xaa locations
  Clone ID: PAT_MRT3847_66094C.1.pep
PRVRFPLVVHSFDLIVSSAGIFSIRGTRETGIIVPMEDPMTILQKGYSFTIVLAVLAFGLSTRWLLYTEQAPSAWFNFALCGLIGIITAYIFVWIAKYYTDYKHEPVRILALSSSTGHGTNIIAGVSLGLESTALPVLVISVSIISAFWLGHTCGLVDETGNPTGGLFGTAVATMGMLSTAAYILTMDMFGPIADNAGGIVEMSQQETXATTKGFAIGSAALASFLLXAYMDEVSAFAHEP

SEQ ID NO: 248134 - protein, 82 aa, Glycine max
  Clone ID: PAT_MRT3847_66095C.1.pep
EFFKGPNYFEIDLDIHRFSYISRKALHSLRDRTKNVVLNLGLTIQAQKQEELPEQVLCCLQLNKIDFANDGQIPTIVALDDN

SEQ ID NO: 248135 - protein, 83 aa, Glycine max
  Clone ID: PAT_MRT3847_66096C.1.pep
VISVMAHKRHVNLGFQFGLVRCPLLIDIYSTDLPGSLLCQTELVTLMPDCWALPPFTLFNIHIITHFKLKLECQITGRLLPRE

SEQ ID NO: 248136 - protein, 47 aa, Glycine max
  Clone ID: PAT_MRT3847_66097C.1.pep
EKSKFKASSTKKKDNTPSKPSCGLSPGGGAFKLNFINEKLYGLTSML

SEQ ID NO: 248137 - protein, 48 aa, Glycine max
  Clone ID: PAT_MRT3847_66098C.1.pep
NVTSHESFKASCVDSASQCPTVALMSSTCSLVKHVAYVCKSSDESVHM

SEQ ID NO: 248138 - protein, 103 aa, Glycine max
  unsure (1)..(103): unsure at all Xaa locations
  Clone ID: PAT_MRT3847_66099C.1.pep
EWAPSSPHMSFPFHPKAPPPDKFGEPIPPQTDCSPPWGAPLENAVPKAGGKLGXPQVFSPPPDSRFFRGRGFPPIGFSPLATPPVFFHGPHGFLPQDESLKGV

SEQ ID NO: 248139 - protein, 54 aa, Glycine max
  Clone ID: PAT_MRT3847_6609C.1.pep
LYPLHCLKGTQESYLYFSQRRATNHPVELTMSTYRRMNAIDNDILMNCYLLVIG

SEQ ID NO: 248140 - protein, 68 aa, Glycine max
  unsure (1)..(68): unsure at all Xaa locations
  Clone ID: PAT_MRT3847_660C.1.pep
SVTLRLXXXVHXXSSLRXXHSXSLHDISFLFSSXTSIXXSLLSLNFLLFSAAXXXSXXLXWEQLAHGC

SEQ ID NO: 248141 - protein, 62 aa, Glycine max
  Clone ID: PAT_MRT3847_66100C.1.pep
VLPTSLKEGQTVGPFTCFRGHHSDLMTNRASIQVGGVSGVSWESQLAAVALRVRTQFPQQDI

SEQ ID NO: 248142 - protein, 139 aa, Glycine max
  unsure (1)..(139): unsure at all Xaa locations
  Clone ID: PAT_MRT3847_66101C.1.pep
HDIYKVIRGIIPESGINVDDNADDITLEELESLEKLPHYCPIGGHLEWNLDGALEKTWEYRDLTSIYTKPKGMIPGYEDPAKSSGKKRTDEDFCDRIHKDMLKQFXYALVWSSRAKTSLKEWQGAELEDEERVLISERI

SEQ ID NO: 248143 - protein, 151 aa, Glycine max
  unsure (1)..(151): unsure at all Xaa locations
  Clone ID: PAT_MRT3847_66102C.1.pep
GNREPEKQALNKDGSAINKYRVHPFVTESYRKIMESGDFEQLIMEQGWLDSADQWNSTILAHWADQSLAELLDKSFSRLQTPKLRWESMKLRGSKWRNTKNMDGGQLLCEQPFNKDGSAINKYRVHPFVTESYRKIMEIRDFEQXIMEQGW

SEQ ID NO: 248144 - protein, 89 aa, Glycine max
  Clone ID: PAT_MRT3847_66103C.1.pep
LTFLPKSMTKLTSLCKLVISECKNLGSLPKGLEMLKSLYTLTITDCPLLLPRCQPETGDDCPQIGHVRNILLKQNFQAFRDLWSQGRTG

SEQ ID NO: 248145 - protein, 69 aa, Glycine max
  Clone ID: PAT_MRT3847_66104C.1.pep
IPSLNTHDRTSNSLLLTFTHGLDKDLGATEFVMVRTLIKEISFITSETRHCHLCCSGISKAAPSYLFSL

SEQ ID NO: 248146 - protein, 39 aa, Glycine max
  Clone ID: PAT_MRT3847_66105C.1.pep
NTYNESGVTEKTIYALHSGAFPIYYGATNRYGFWPLPFK

SEQ ID NO: 248147 - protein, 67 aa, Glycine max
  unsure (1)..(67): unsure at all Xaa locations
  Clone ID: PAT_MRT3847_66106C.1.pep
HPINKLRHPYYRNTIDLTGLAGYSLFIANGIIEKLFLPXKYSIEMPSSMYMNWIFTDQALPLDLIKT

SEQ ID NO: 248148 - protein, 93 aa, Glycine max
  Clone ID: PAT_MRT3847_66107C.1.pep
DRDRDKLLLLLLLLLGLLLALRFLGLLLRWQRTQLIGEGIRLTQCTKTVQKNFKICFLTHYTIPTLHSNTKISLKPQEFTMLKSPHVLPLYMA

SEQ ID NO: 248149 - protein, 77 aa, Glycine max
  unsure (1)..(77): unsure at all Xaa locations
  Clone ID: PAT_MRT3847_66108C.1.pep
IXXTIXSHFTVSGCNGGISLRHSTAMLMVSKILRMRSNINVKGEFYGGILGLKGLKLVENPFKVHNYHASLFSSHTW

SEQ ID NO: 248150 - protein, 42 aa, Glycine max
  Clone ID: PAT_MRT3847_66109C.1.pep
CVRILQVEECSKVNKDCKLSVHRRQKVIHLSLSLFCVEPNSE

SEQ ID NO: 248151 - protein, 81 aa, Glycine max
  unsure (1)..(81): unsure at all Xaa locations
  Clone ID: PAT_MRT3847_6610C.1.pep
NMFHQIMAAYKTSRHVILLTNKFVLCLNWDARLLSLSVTIRNELIVKMEPLPFSYSHPSLPPRAXNAHPLLSSSRAVRTRG

SEQ ID NO: 248152 - protein, 145 aa, Glycine max
  Clone ID: PAT_MRT3847_66110C.1.pep
MASIVASLPPPLLLPARKYHPGNFPSSPFSLLSGRRNHVSFVVKASGESSESSTTLTVFKSVQNVWDQPEDRLGLIGLGFAAIAAFWASTNLIAAIDKLPVFPTVLELIGIFYSVWFTYRYLIFKPDREELFQILNKSASDILGQ

SEQ ID NO: 248153 - protein, 93 aa, Glycine max
  unsure (1)..(93): unsure at all Xaa locations
  Clone ID: PAT_MRT3847_66111C.1.pep
MASSVMASVGXPNLAXFTVEKSSVRGPSPPLSKELPPSFRXVGXGGXEDSRLTSPMXINGGHGLXXXGVDASGRXGKGNGVYQFVDKYVLCRW

SEQ ID NO: 248154 - protein, 145 aa, Glycine max
  Clone ID: PAT_MRT3847_66112C.1.pep
MASVVASLPPPLLLPARKSHMGNFPSSPVSLLSGRWNRVSFVVKASGESSESSTTLTVFKSVQNIWDQPEDRLGLIGLGFAAVAAFWASTNLIAAIDKLPLFPTVLELVGIFYSVWFTYRYLIFKPDREELFQILNKSASDILGQ

SEQ ID NO: 248155 - protein, 129 aa, Glycine max
  Clone ID: PAT_MRT3847_66113C.1.pep
KVKDSYTRYTAALTLLASSKFKVGKRIHPALPASSSAQATLHAFATGRGMSLYCVLALLSKPRSLLSSLRCSCWWRHVLQSRSMAGFYQGLLKTHTTPPHLCFLFSLLMPLKRGVIFTKYFTRLSRIRW

SEQ ID NO: 248156 - protein, 76 aa, Glycine max
  Clone ID: PAT_MRT3847_66114C.1.pep
FCLTAPYQRLFWPQRGVFPLKASWGAHPGRFSPFLCKQPGAGPLCKKDSPVVSARGSLFLVLKNPSEILLGLNSLD

SEQ ID NO: 248157 - protein, 90 aa, Glycine max
  Clone ID: PAT_MRT3847_66115C.1.pep
FYEFALDQSERFPTLNRSIQMQTNLHRVSEFAVTANQTVDDGNVEARTSVKRVREHDTETESDADDIVSSSTIPVALTDLNSHGIDTTDF

SEQ ID NO: 248158 - protein, 56 aa, Glycine max
  Clone ID: PAT_MRT3847_66116C.1.pep
AAPSPVDSPNQFPPSSVGVICYMDKLILLLLITFGSERISNRSIFIIYRLGHQRYP

SEQ ID NO: 248159 - protein, 643 aa, Glycine max
  unsure (1)..(643): unsure at all Xaa locations
  Clone ID: PAT_MRT3847_66117C.1.pep
IDKVSWGKKALLIGGKTDPGSDRISVWAFDTETECWSLMEAKGDIPVARSGHSVVRASSVLILFGGEDAKRRKLNDLHMFDLKSLTWLPLHYTGTAPSPRFNHVAALYDDKILYIFGGSSKSRTLNDLYSLDFETMAWSRVKMRGFHPSPKAGCCGVLCGTKWYITSGGSRKKRHGETVIFDIVKNEWSVAITSPPSSISTNKACLLLICYNILASLLSIMEEGLFICLIFILHNNHFFLINXKLRLNLLLDNHVPESGNLQHSENNNLYAFGGIQKRSNNSCLSESMKVIFVGHTXILFLPLPAYQAYGDAEWKKNESALRESNQLPVNVQHLCYLKKHSSSTRLAPQLNDCSQRLVDSVARQNLASAIEHGSGMRSLSESLVVDPNFPPTNTSLRKQFDHDEEYNTDLKMDKNSDENSFPRAVDHRTNENDHGKQMNSSGAKNITEEQQALLSGIPIQQNLVFENDMLESDNVSFTENIKSGSLTTSNVYHCYESKLASLIRKNGILEGQLAASLASKEAAEKSLASVLKSRQEMERKLAESHKEMELMREKLTSLELAQEEANNLSNIVHSDNVRLEHDVAFLKAVLDDTQKELHSTRGVIAGERARAFQLQYEVFHLKQRLQSMENRASTTPRKPFHVQ

SEQ ID NO: 248160 - protein, 56 aa, Glycine max
  Clone ID: PAT_MRT3847_66118C.1.pep
GTALNNIKGLDYIERIPLTTSKDFPHILSHKNGEKGKRRFISRDGEEMTLITRNQY

SEQ ID NO: 248161 - protein, 77 aa, Glycine max
  Clone ID: PAT_MRT3847_66119C.1.pep
VFPDQISRVLLARPIVTRPPPGGPPITFIERIKNPRANFWTRGFIKWAPKIEKLFESGPRSCGGPNPGEKSRVSGGV

SEQ ID NO: 248162 - protein, 62 aa, Glycine max
  Clone ID: PAT_MRT3847_6611C.1.pep
LGYQELIRMISINGVHLVISSHHACENAPGIHRSFCQEGLREYMSSTHGKNSRCLPSRQMCQ

SEQ ID NO: 248163 - protein, 745 aa, Glycine max
  unsure (1)..(745): unsure at all Xaa locations
  Clone ID: PAT_MRT3847_66120C.1.pep
MKPHTPASSFVTRLPHVPYFRGATAARAAPPDPPHDAPGGLEFRRVSTAKRRRVSLSVCHASRVTAASNPGGSDGDGDTRARSSRRGVLMAPFLVAGASILLSAATARAEEKAAESPLASAPKPEEPPKKKEEEEVITSRIYDATVIGEPLAIGKEKGKVWEKLMNARVVYLGEAEQVPVRDDRELELEIVKNLHRRCLEKEKLLSLALEVFPANLQEPLNQYMDKNSFVLVRLLFHNSALLVLKLDFHGRIDGDTLKSYTLHWPPQRWQEYEPILSYCRENGIHLVACGTPLKILRTVQAEGIRGLTKDERKLYAPPAGSGFISGFTSISRRSSVDSTQNLSIPFGPSSYLSAQARVVDEYSMSQIILQNVLDGGVTXGTGVPARISGKIQKKNHAVILLDPERQFIRREGEXPVADFLWYSAARPCSRNCFDRAEIARVMNAAGRRRDALPQDLQKGIDLGLVSPEVLQNFFDLEQYPLISELTHRFQGFXRERLLADPKFLHRLAIEEAISITTTLLAQXDYVITDTVRGSVVDFFTVWLPAPTLSFLSYADEMKAPDNIGSLMGLLGSIPDNAFQKNPAGINWNLNHRIASVVFGGLKLASVGFISSIGAVASSNSLYAIRKVLNPAVVTEQRIMRSPILKTAFIYACFLGISANLRYQIIAGIVEHRISEQFASQTFFVNMLSFVARTVNSYWGTQQWIDLARFTGLQVRKTEPSASDPPNPSAILCNETEEASIDEREK

SEQ ID NO: 248164 - protein, 130 aa, Glycine max
  Clone ID: PAT_MRT3847_66121C.1.pep
MLLLLLLYLCISALASHSLQTQQAFISFHSLTLRFVSLSHSRSVFLSPTFVSPHFHHLSSVEMAPPIETPTKVSSYQHSPNPRLNERILSSISRKHVAAHPWHDLEIGPEAPKIFNCVVEIGKGSKVKYE

SEQ ID NO: 248165 - protein, 77 aa, Glycine max
  Clone ID: PAT_MRT3847_66122C.1.pep
SSRSRTRCGGGRSHVVVLYKAAVKVCVIFWDYYYYYYYFCHKFQGVCFCFSSLLLSKLKTTTSHYCYYYYYFQMSLV

SEQ ID NO: 248166 - protein, 771 aa, Glycine max
  Clone ID: PAT_MRT3847_66123C.1.pep
MKPHTPASSFVTRLPHVPYFRGATAARAAPSDPPHDAPGGLEFRRVSTAKRRRVSLSVCHASRVTAASNPGGSDGDGDTRARSSRRGVLMAPFLVAGASILLSAATARAEEKAAESPLASAPKPEEPPKKKEEEEVITSRIYDATVIGEPLAIGKEKGKVWEKLMNARVVYLGEAEQVPVRDDRELELEIVKNLHRRCLEKEKLLSLALEVFPANLQEPLNQYMDKNSFVLVRLLFHNSALLVLKLDFHGRIDGDTLKSYTLHWPPQRWQEYEPILSYCRENGIHLVACGTPLKILRTVQAEGIRGLTKDERKLYAPPAGSGFISGFTSISRRSSVDSTQNLSIPFGPSSYLSAQARVVDEYSMSQIILQNVLDGGVTGMLIVVTGASHVTYGSRGTGVPARISGKIQKKNHAVILLDPERQFIRREGEVPVADFLWYSAARPCSRNCFDRAEIARVMNAAGRRRDALPQDLQKGIDLGLVSPEVLQNFFDLEQYPLISELTHRFQGFRERLLADPKFLHRLAIEEAISITTTLLAQYEKRKENFFQEIDYVITDTVRGSVVDFFTVWLPAPTLSFLSYADEMKAPDNIGSLMGLLGSIPDNAFQKNPAGINWNLNHRIASVVFGGLKLASVGFISSIGAVASSNSLYAIRKVLNPAVVTEQRIMRSPILKTAFIYACFLGISANLRYQIIAGIVEHRISEQFASQTFFVNMLSFVARTVNSYWGTQQWIDLARFTGLQVRKTEPSASDPPNPAAILCNETEEASIDEREK

SEQ ID NO: 248167 - protein, 747 aa, Glycine max
  Clone ID: PAT_MRT3847_66124C.1.pep
MKPHTPASSFVTRLPHVPYFRGATAARAAPSDPPHDAPGGLEFRRVSTAKRRRVSLSVCHASRVTAASNPGGSDGDGDTRARSSRRGVLMAPFLVAGASILLSAATARAEEKAAESPPAPAPTPEEPPKKKEEEEVITSRIYDATVIGEPLAIGKEKGKVWEKLMNARVVYLGEAEQVPVRDDRELELEIVKNLHRRCLEKEKLLSLALEVFPANLQEPLNQYMDKKIDGDTLKSYTLHWPPQRWQEYEPILSYCRENGIHLVACGTPLKILRTVQAEGIRGLTKDERKLYAPPAGSGFISGFTSISRRSSVDSTQNLSIPFGPSSYLSAQARVVDEYSMSQIILQNVLDGGVTGMLIVVTGASHVTYGSRGTGVPARISGKIQKKNHAVILLDPERQFIRREGEVPVADFLWYSAARPCSRNCFDRAEIARVMNAAGRRRDALPQDLQKGIDLGLVSPEVLQNFFDLEQYPLISELTHRFQGFRERLLADPKFLHRLAIEEAISITTTLLAQYEKRKENFFQEIDYVITDTVRGSVVDFFTVWLPAPTLSFLSYADEMKAPDNIGSLMGLLGSIPDNAFQKNPAGINWNLNHRIASVVFGGLKLASVGFISSIGAVASSNSLYAIRKVLNPAVVTEQRIMRSPILKTAFIYACFLGISANLRYQIIAGIVEHRISEQFASQTFFVNMLSFVARTVNSYWGTQQWIDLARFTGLQVRKTEPSASDPPNPAAILCNETEEASIDEREK

SEQ ID NO: 248168 - protein, 36 aa, Glycine max
  Clone ID: PAT_MRT3847_66125C.1.pep
KKAKLIIISMHHVRVKVLTVQEFFMTWCAMSLQIKL

SEQ ID NO: 248169 - protein, 278 aa, Glycine max
  Clone ID: PAT_MRT3847_66126C.1.pep
MAPCAAAAEFPVGLRVLVVDDDATTLKIIEQMSIRCRYRVTTCTEATVALNLLRERKGCFDVVLSDVHMPDMDGYKLLEHVGLEMDLPVIMMSGDSTTSAVMKGIRHGACDYLIKPVREEELRNIWQHVVRKFWNDSKEQDNSGSMEDSDQNKRGNDDAEYTSVADAAVVKAPKKRSSLKEEDIELESDDPAASKKPRVVWSVELHQQFVSAVNQLGLDKAVPKRILELMNVPGLTRENVASHLQKFRLYLKRLTGVAQHQNGMLYTVPGPIRIQSGN

SEQ ID NO: 248170 - protein, 86 aa, Glycine max
  Clone ID: PAT_MRT3847_66127C.1.pep
SSRIGSSGCEKTTEGGGQRLNCTAGYQWMWSNNSPWNNFIFSMVNGPPHCNGTGPSCHRNQAHHLVAALPYNSNSLITGRIDNSHA

SEQ ID NO: 248171 - protein, 40 aa, Glycine max
  Clone ID: PAT_MRT3847_66128C.1.pep
IIYCSILAQSHLTKTAHSWYIEQGNKYVPNPDSITSVLID

SEQ ID NO: 248172 - protein, 75 aa, Glycine max
  Clone ID: PAT_MRT3847_66129C.1.pep
EHCVNLARITCTLGIPPSQLSRNHITYSNSCLWFVLGPHIYIPYTHQMNSLNFYYSGKSNKVHTVLKESGLVSIA

SEQ ID NO: 248173 - protein, 577 aa, Glycine max
  unsure (1)..(577): unsure at all Xaa locations
  Clone ID: PAT_MRT3847_6612C.1.pep
YAPPGIYERRGSRGEEEEGARQQESHVDVSLFETKEARFRGVYKVFASTIFAAICLIWVYRVANIPTVASGRWTWISVMVSELCFGIYWIITQSVRWKIVYQTPFKHRLLQRYDEESLPAVDIFVCTADPTLEPPCMVMNTVLSAMAYNYPANKLSVYLSDDGGSELTFYALLKASIFSKHWLPFCRRFNVEPRSPEAFFAAHNCSNSSTEYSQAWLFIKNLYKDMKSEIESAVARGEVPDNAMNQHRGFSEWNPKITKQNHQPIVQIIIDGRDTNAVDEDGFQLPRVVYMAREKRHNYPHHFKAGAVNALIRVSSEISNAPXILNLDCDMYSNNANTIQEVLCFFLDETKGHDIAYVQFPQSYNNIAKNDHYANSYLVSNKFELAGICGYGAALFCGTGCLHRRESLSGAYLKDYKAKWDSKPKRNDNRTIDELNEASKVLATCTYEESTQWGKEKGLVYGIPVEDIATGLVISCRGWKSIYYNPERKAFMGIAPTTLDVACLQHMRWSEGMFQVFFSRYCPFIYGHGKIHYGVQMGYCNYLLWAPMSLPTLCYVIASPICLLHGIPLFTQXSSIW

SEQ ID NO: 248174 - protein, 167 aa, Glycine max
  unsure (1)..(167): unsure at all Xaa locations
  Clone ID: PAT_MRT3847_66130C.1.pep
VIHSRWAMLGALGCRFPELLSRNGVKXDKPXWFMARSHIFSEGGLYYLGIPSLIHAHSILAIWATQVILMAAADXYRIAGGPLGEVTDPIYPXASFYPLSLADDPEAIADLKVKELKNGRLTMFSMYDFSAXAIVTXNGPSENLAYHSADPCYYNSWACAHYFVPSK

SEQ ID NO: 248175 - protein, 564 aa, Glycine max
  Clone ID: PAT_MRT3847_66131C.1.pep
MYMSILKKNVKRQLQNWMLRRHRELLYQKDYQHFIWKIMDKRPMSTGDRPKMHDQTGCFDPNTTGESVPSLKDNFPQTLPPSSPMVVVGNTTTNSINNSLEENLRLSVEELSCNHHNPQHQQDHVSTYASGVTATSIEIPLPQHLGLNMGNSYINNNNNMDNHLVQEVIDAFPYQQSTWDPTIVQELQDMAYANHTEQTQQQQQNEQQFQQFETQNCSQSYNNPSSILDPPYPSPDLLNLLHMPRCSASSLLTNPSICLTNPTQNTPNFQNPMAFLGDLPIGSENTSASSVLYDPLFHLNLPPQPPALRELFQSLPRGYSLPTNSRNGSLFGGGDEMEGDGSQLDMGVLEFNRVTLTPSVGKGRRGKATKHFATEKQRREQLNGKYKILRNLIPSPTKTDRASVVGDAIDYIRELIRTVNELKLLVEKKRYAKDRCKRPKTEEDAAESCNIKPFGDPDGGIRTSWLQRKSKDSEVDVRIIDDDVTIKLFQRKKINCLLFVSKVLDELQLELHHVAGGHVGEYCSFLFNSKIMEGSSVYASAIANRVIDVLDSQYAAAVPHTNSY

SEQ ID NO: 248176 - protein, 461 aa, Glycine max
  Clone ID: PAT_MRT3847_66132C.1.pep
MKWFGKIFNIGSSRGRGGGRHLQQPVEENMVWPAPARSLDDRARSRKEEEDLDHAIALSLGENFKRPTGYRWRTGTDEDYAKALQDRRFSSAHPPYAPVPFYPRGYGVPLHNRTCGGCNQEILYGNCLGVGHSYFHPDCFRCHSCRYPITEREFSLSGKHPYHKSCFKELTHPKCEVCHQYIPINAAGLIEYRCHPYWNQKYCPSHEYDNTARCCSCERLESRGERYYRLEDGRILCFECMESAITDTGECQPLYHSIRDYYEGMNMKIDQQVPMLLVGREALNEAIVGEKNGFHHSPETRGLCLSEEQTVTSVYRWPRIGGHRLISMRSQAQRLPRKCEVTAILVLYGLPRLLTGAILAHELMHAWLRLKGYQNLSLEVEEGICQVLSYMWLDAEVMSCARTTPSTSSSASSSSYSNSSKKGVKSLVENKLGGVGWWHLGAAMVLGGGFGERQLRLLLGR

SEQ ID NO: 248177 - protein, 59 aa, Glycine max
  Clone ID: PAT_MRT3847_66133C.1.pep
RPPSPGKANWLFLRFFKLGPPGFGMGFLPRGSLKIQGGGRKKLKVSRLEKNPGGIFGLV

SEQ ID NO: 248178 - protein, 81 aa, Glycine max
  Clone ID: PAT_MRT3847_66134C.1.pep
VKRHTPLVYYNVKMNYIKINRNLLMLAVFVETILVCLGNIAPWSIHPEKFESASSLSLLMLTLCALISVSKYMVSSSCISD

SEQ ID NO: 248179 - protein, 424 aa, Glycine max
  unsure (1)..(424): unsure at all Xaa locations
  Clone ID: PAT_MRT3847_66135C.1.pep
HSAFSCYKDFLSVDFPFDSYTQVFIEPEMAVSSLSLGASMSIFSSQVLFDEKVIDQTIDTRVKLAYALARQWFGVYITPEAPNDEWLLDGLAGFLTDFFIKKHLGNNEARYRRYKANCAVCKVDNGGATALSCSASCKDLYGTQXIRLEGKIRSWKSVAALQMLEKQMGPESFRRILQTIVSRAQDKTRSIKTLSTKEFRHFANKVGNLERPFLKDFFPRWVGSCGCPVLRMGFSYNKRKNMVELAVLRGCTALQTSNTSILDINPDTETRDGDTGWPGMMSIRVYELDGMYDHPILPMAGDAWQLLEIQCHSKLAARRFQKPKKGLKLDGSDDNGDVPSMDMRLNTESPLLWIRADPDMEYLAEVHFNQPVQMWINQLEKDKDVIAQAQAIAALEASPQLSFSIVNALNNFLSDSKAFWRVRI

SEQ ID NO: 248180 - protein, 74 aa, Glycine max
  unsure (1)..(74): unsure at all Xaa locations
  Clone ID: PAT_MRT3847_66136C.1.pep
FNNCSPXPLSFIVXANILLGGXFXGAAMNPAVTFGXAXVSXTXTNXWIXWXGPXIGGGXAGXXXEVVSPTPRPT

SEQ ID NO: 248181 - protein, 32 aa, Glycine max
  Clone ID: PAT_MRT3847_66137C.1.pep
INISCASSLSLFHSMVSGCKIWTKKCSPWSRL

SEQ ID NO: 248182 - protein, 209 aa, Glycine max
  Clone ID: PAT_MRT3847_66138C.1.pep
MVHCVVLAYPAQGHINPMHNFCKLLQQQGVKVTLVTTLSYSKNLQNIPASIALETISDGFDNRGFAESGNWKAYLERFWQVGPKTLAELLEKLGRSGDPVDCVVYNSFFPWALEVAKRFGIVGAVFLTQNMSVNSIYHHVQQGNLCVPLTKSEISLPLLPKLQHEDMPTFFFPTCVDNSLLLDLVVGQFSNIDKADWILCNSFSEMEKE

SEQ ID NO: 248183 - protein, 173 aa, Glycine max
  Clone ID: PAT_MRT3847_66139C.1.pep
AEEMHIDASNVTREYSVDHQSSNMVSNVSAAYNDTVHITRESSVATECPPVVESVETYRDRTPVATDSSHPRRTSSTVREYSVDNRFSNMVSNVSVVHNDTVHITRESSATTECPPVVENVETYRDRTPAATDSSHPRRASSSVLNTSDVEMGDASDHPLILSGDQEVPFTYM

SEQ ID NO: 248184 - protein, 541 aa, Glycine max
  Clone ID: PAT_MRT3847_6613C.1.pep
MASSEIEVVSSSSSVSKPNNDQPPILDVFTASAHGDFNKLRTFVEQDGASVSLPDFSGYYALQWASLNNFHDIAHYLIQHGADVNAKDNMQQTALHWAAVHGSTLAADVLVENGARVEAADVNGYRAVHVAAQFGQTAFLNHIVVKYHADFDVPDNDGWSPLHWAAYKGFADTIRLLLFRDASQGRQDKDGCTPLHWAALRGNAEACTVLVHAGTKEELMVKDNSGNTPVQLAYDKGHRHVAPFLSNQQRASRNYWKGKLCSGIVTDIGYAPILFCTIIFLSILFINSVVAAPNLKKITAVVGLWAWTALSSAVGSLIMFYKCSSKDPGYIKRPGDLGTQSDTEDPLLNIDLNSSSVWMGNWSQLCPTCKIIRPVRSKHCPTCKRCVEQFDHHCPWISNCVGKRNKRDFFIFICLGTLTSSLSGAVAVQRIWTSKPALLAGETWIHYALVRHLGLVVFLVMDAVVFVATTTLTITQASMIARNVTTNELANSSRYDYLRGPDGRFRNPYNHGCWKNCADFFFLGYTNDDEIAWPPLQQVAT

SEQ ID NO: 248185 - protein, 49 aa, Glycine max
  unsure (1)..(49): unsure at all Xaa locations
  Clone ID: PAT_MRT3847_66140C.1.pep
ATPSATSSRLASKFLPSPXXSAXGAYLAAMCITLHKFTCLPKSPLKIRD

SEQ ID NO: 248186 - protein, 81 aa, Glycine max
  unsure (1)..(81): unsure at all Xaa locations
  Clone ID: PAT_MRT3847_66141C.1.pep
VGLHCHLPSVSXVGAVNXTXLSLNSSGVELQFPSSAFFGTSLKKVIASRVPNXQISSXXFKIVAXXXEXDEKHRPTXQMAR

SEQ ID NO: 248187 - protein, 80 aa, Glycine max
  Clone ID: PAT_MRT3847_66142C.1.pep
KGLIFISQTPMYTGSFSCFLNQNLNFFLFLSLLDSPFSFFYLKKLHYILQLLLLIYSSSLTFLYTDSTFAILFFFVLDCS

SEQ ID NO: 248188 - protein, 62 aa, Glycine max
  Clone ID: PAT_MRT3847_66143C.1.pep
TRPLSIIADSLVLFVVSSSCVFGLVVVLVCWVHLQHLVSVLTLFHSFHLFSVFFGVVQHSPK

SEQ ID NO: 248189 - protein, 52 aa, Glycine max
  Clone ID: PAT_MRT3847_66144C.1.pep
NLQKPDEISLGHGYLHSMDTMPPLPIPVLSKGCRPRRIHFSPEGPLKQRTHL

SEQ ID NO: 248190 - protein, 87 aa, Glycine max
  Clone ID: PAT_MRT3847_66145C.1.pep
INFCLINKGVFRAYGKQPKKYYLQLTTYIDITYIFKGQQTSANFNIAKRVDWTQGEKKPNKKKEALSTNTGYLFWGLKKIGMSQTSP

SEQ ID NO: 248191 - protein, 47 aa, Glycine max
  Clone ID: PAT_MRT3847_66146C.1.pep
GNLVGTPLHLQQPVRNSTCLCISAIGDVILKERKKFHFQSVGPAHGE

SEQ ID NO: 248192 - protein, 389 aa, Glycine max
  Clone ID: PAT_MRT3847_66147C.1.pep
MQYGIMPSSDPYDGVSLENSSSFVQTSENFRLSAHQCSPRISPMFDEKSKRIASLPSVVPIGAPWQEIFLLARTQKKIYIEMLELSPIKLTLSFSSAPWMLRNRILTSKEFLIHRGLMALADVEGAHIYLKDLIIAHHMASWESIQEILIRHYNRQLLHETYKLFGSAGVIGNPLGFARSMGLGIRDFLSVPAKSIVRSPTGLIMGMAQGTTSLLSNTVYAISDAASQFSKAARKRLVAFTYDDQAVSRMEKHQAIVASDSKGVINEVLEGLTGLLQFPVTGAERHGLPGVLSGVALGMTGLVASPAARAPVGTASTARCLRNRSKPSQLRLQHFRVRLQRPLCREFPLKPYSWEEAVGTSVLVEADDGLKFKDEKLVACKALKEAGKF

SEQ ID NO: 248193 - protein, 229 aa, Glycine max
  unsure (1)..(229): unsure at all Xaa locations
  Clone ID: PAT_MRT3847_66148C.1.pep
MSCCFLRRFGRFGAVGTAAFGSTLLCSNDSARFRASVALRVPEPLQNSLWLTCPVLRDLSPQPSPFPDQFGMRLLYSYRVSPVPSSGVSKEASAAAGDESKPHDCFGKDTIANAAAKVGPAVVNIAIPQDFFGITSGKSIGSGTIINKDGTILTAAHVVVDFLGTRGSSXKGRIEVTLQDGRTFEGKVINADLHSDVAILKINSETPLPEAKFGSSSRLRPGDWVIAMG

SEQ ID NO: 248194 - protein, 153 aa, Glycine max
  unsure (1)..(153): unsure at all Xaa locations
  Clone ID: PAT_MRT3847_66149C.1.pep
MVTDMVELVECTTXKTHEPLVNQSRAPANQPYHLPEKHAASTAQTVPQNMPWKPSGPALSPKPVVSVRQDTILGKQFEDVKQFYTLGKELGRGQFGVTYLCTENSTGLQYACKSISKRKLVKKSDKEDIXREIQIMQHFEXGNPTLVEFKGAY

SEQ ID NO: 248195 - protein, 431 aa, Glycine max
  unsure (1)..(431): unsure at all Xaa locations
  Clone ID: PAT_MRT3847_6614C.1.pep
TRPDISLHVDPEGLLHEPSCLNPEDSWALFKKKAFPRQDNPESTVSDEFIRLGREMVAKCAGLPLTIIVLGGLLATKERVSDWATIGGEVREKRKEXEVLDLSYQDLPCQLKPCFLYLSQFPEDSEIPRTKLIQLWVAEGVVSSQYETERDEPRKNVAERYLGNLISRCMVQVGQMGSTGRIKTCRLHDLMRDLCLSKARKENFLYXYXMDHNKIVHLMVASSSNLSDAGRTHASGRLAVFLDQRVDQLIPQDKQVNEHLRSLVFFHDKKCRMENWDLVKGVFVEFKLLRVLDLEGIKGLKGQSLPKEVGNLLWLKFLSLKRTRIQILPSSLGNLENLQFLNLQTVNKVSWDSTVEIPNVICKLKRLRHLYLPNWCGNVTNNLQLENLTNLQTLVNFPASKCDVKDLLKLKKLRKVVLNDPRHFQFSESSV

SEQ ID NO: 248196 - protein, 538 aa, Glycine max
  unsure (1)..(538): unsure at all Xaa locations
  Clone ID: PAT_MRT3847_66150C.1.pep
MVTDMLGLVVCTTXKTHEPLVNQSRAPANQPYHLHEKHAASTAQTVPQNMPWKPPGPALSPKPVVGVRQDTILGKQFEDVKQFYTLGKELGRGQFGVTYLCTENSTGLQYACKSISKRKLASKSAKEDIKRESQNMQHLSGQPNIVEFKGAYEDWSSVNDVMEMYEDGVLMDRNINTKHNGSYSDVSMLRVILTILGACFRVGLLKMDMKLEHVKLVFGVXYAFLMASDLEFSLFSLEGRVXKFIVGSAYYVAPEVLRRRCGKEIDIWSAGVILYILLSGVPPFWAETEKGIFDAILEGHIDFESQPWPNISDSAKDLVRKMLIQDPKKRITSAQVLEHPWIKDGNASDKPIDSAVLSRMKQFRAMNKLKKLALKVIAENMSAEEIQGLKAMFTNMDTDKSGTITYEELKSGLHRLGSKLTEAEVKQLMEAADVDGNGSIDYIEFITATMHRHKLERDDQLFKAFQYFDKDNSGFITRDELESAMKEYGMGDDATIKEIISEVDTIISEVDTDHDGRINYEEFSAMMKSGNQQQGKLF

SEQ ID NO: 248197 - protein, 60 aa, Glycine max
  unsure (1)..(60): unsure at all Xaa locations
  Clone ID: PAT_MRT3847_66151C.1.pep
WCSKLAMHYPYLLSLLCFTNSPHGNLSHRLTSRLGQXHIFKMDIAIPISPVFCSWLTCSS

SEQ ID NO: 248198 - protein, 43 aa, Glycine max
  Clone ID: PAT_MRT3847_66152C.1.pep
TRYHLALSVNCHTLSLGPCYLRHRSLPLSIRAELPQLATLGRR

SEQ ID NO: 248199 - protein, 200 aa, Glycine max
  unsure (1)..(200): unsure at all Xaa locations
  Clone ID: PAT_MRT3847_66153C.1.pep
SHSFLIIHDIVSASSSNWFDFCFVKSVRAFINHSQFVERKFEHIHFLRNSFVELCCLDVQKSSNKAMTCILHLGKILQNGWQTKKKEVVKTICSWQYINCIDLWVTFISANIHDYDLQPLLYMIVQIINGVALLFPGPRYLPLRLRCIQWLNKLSGSSGVFIPVTSLVLDVLEYKITKDSGKFXQSLEPMSTTIKASKHW

SEQ ID NO: 248200 - protein, 77 aa, Glycine max
  Clone ID: PAT_MRT3847_66154C.1.pep
IVVWFFCVRRNPFKQNAALPPFFKGETDSGNLSQRLPFLKGSLNKKNPQTRGAFNKINFAFLGGLPQPPNGAKKGAL

SEQ ID NO: 248201 - protein, 109 aa, Glycine max
  Clone ID: PAT_MRT3847_66155C.1.pep
MAESLLFSVAESLLGKLASRAVEKASLAMGVYHDLQQMRVTMALVKALLLDAEQKKQQNNALSEWLRQIKRVFSDAEDIVDNFECEALRKHVVNTHGSVSRKGPRLVLN

SEQ ID NO: 248202 - protein, 57 aa, Glycine max
  Clone ID: PAT_MRT3847_66156C.1.pep
RLFFFFFFFFFFFFFFFKGKGPKFNLRGHWNSKFLRKTAQYEKYCKILSNLASSFCT

SEQ ID NO: 248203 - protein, 113 aa, Glycine max
  Clone ID: PAT_MRT3847_66157C.1.pep
KPIANRLKKEAGYHPKFRNFIISIAQANHRLTTRVQRRIYGHATDVAIHPLNEDFFVQAAADLLGELFVFSTNVADAILIAVADILKTLMLQPKTRLQELPSSLRCKEVQDQK

SEQ ID NO: 248204 - protein, 38 aa, Glycine max
  Clone ID: PAT_MRT3847_66158C.1.pep
CMIKPQAPTVAAAGLDHSKLSERACSGSIMASCCSCRG

SEQ ID NO: 248205 - protein, 27 aa, Glycine max
  Clone ID: PAT_MRT3847_66159C.1.pep
IDTGGGGQYCNLLHQDDIFINYSYANI

SEQ ID NO: 248206 - protein, 236 aa, Glycine max
  unsure (1)..(236): unsure at all Xaa locations
  Clone ID: PAT_MRT3847_6615C.1.pep
RFLLGKLASVSMKDLTHQEKLAFWINTYNSCMLNAYLEHGIPESPEMIVALMQKATIEVGGQLLNAITIEHFILRLPYHLMFITIHPLIFIFPYCDXTCPKAAKHGEMKLRSIFGLEWSEPLVTFALSCGSWSSPAVRIYTASQVDNELEAAKRDYLQATVGITKTNKLIIPKLLDWYLLDFAKDLETLLDWVCLQLPIELRKEAIECLERRERQPLSQLVQMMPYDFSFRLLLHQ

SEQ ID NO: 248207 - protein, 71 aa, Glycine max
  Clone ID: PAT_MRT3847_66160C.1.pep
NVVWVLCPCWPLTRTWVDHRTRQWAGVSVLHRLLDHQIIDLISDNFGSYFYLTGPCITFIYVTSSIKLPLP

SEQ ID NO: 248208 - protein, 131 aa, Glycine max
  Clone ID: PAT_MRT3847_66161C.1.pep
PPPPVEVFSPPPPVGCLLPPPPFPKKPPPGFCPPPPFWEFLFMRGPPGTLFPVYGNFRGGGSPPPPSFGVFFPLFVGLLGIRAFWCSAFPKIISGLGDFLVSPLGFPLRKRPGDFCPQGIFLFEINVPFFV

SEQ ID NO: 248209 - protein, 83 aa, Glycine max
  Clone ID: PAT_MRT3847_66162C.1.pep
TAAFFFFFFFFCWPKITGPFSLLSFYFVLSSLFPTLCLFSPRHLWGALSLLPIASSGGGTAFSVPSCPHPPPSLGGAGRLFFP

SEQ ID NO: 248210 - protein, 114 aa, Glycine max
  Clone ID: PAT_MRT3847_66163C.1.pep
LISPYSFSCIEYDLVLGMLVTLFAILRLPFHVLSHSIAREVQLGLLVTWYSFNTLALCVLSLADYGQSPHPLCQRGALAIVAHCNHQCNEIQMGKIASALHSVMSPFLGGKDMA

SEQ ID NO: 248211 - protein, 85 aa, Glycine max
  Clone ID: PAT_MRT3847_66164C.1.pep
KKKKKIFIKKKKKKKKKKKKGGRKHKKDRGPGNYIKNRNLKKKPNFKYWGGAPILGFFAPINFSWAESLGRSLFHLWGGFKAWGK

SEQ ID NO: 248212 - protein, 66 aa, Glycine max
  unsure (1)..(66): unsure at all Xaa locations
  Clone ID: PAT_MRT3847_66165C.1.pep
HNRQVIVRQGCDPNSIYNFQSHDFNVPPFVSPAPNPHXETRFPSHLLLSFVVSTSLREPVYALLQS

SEQ ID NO: 248213 - protein, 59 aa, Glycine max
  Clone ID: PAT_MRT3847_66166C.1.pep
MLDGPEIDIIIWVLFTLIMNMLNINTLGTYKVLFITLNHNSKYPAFVAVPLQTNSLPHR

SEQ ID NO: 248214 - protein, 221 aa, Glycine max
  Clone ID: PAT_MRT3847_66167C.1.pep
MACSVHLLLLLLTSLLALFFNPTCVYGNDELRALLDLKSSLDPEGHFLSSWTMGGNPCDGSFEGVACNEKGQVANVSLQGKGLSGKLSPAIAGLKHLTGLYLHYNSLYGEIPREVANLTELSDLYLNVNHLSGEIPPEIGKMENLQVLQLCYNQLTGSIPTQLGDLKKLSVLALQSNLLGGAIPASLGDLGMLMRLDLSSNNLFGSIPIKLADLPSLQVLD

SEQ ID NO: 248215 - protein, 88 aa, Glycine max
  Clone ID: PAT_MRT3847_66168C.1.pep
VYGAFSFSAPSLAHVKLCHHRAVPSSVVSPLLRVAKKIVVMVVFNWFRLSISVHNTLSVIRVTAWCIKSPQYLSSPHSSHHIGCIRSL

SEQ ID NO: 248216 - protein, 82 aa, Glycine max
  Clone ID: PAT_MRT3847_66169C.1.pep
YGVHTRVLDTVAVSTNVNVDMVNVDVVVVHAVAVHHVPEQMFFAIVPILALAIQSRPFQFFEKSTVRLALSPRYVLSIGCAK

SEQ ID NO: 248217 - protein, 394 aa, Glycine max
  unsure (1)..(394): unsure at all Xaa locations
  Clone ID: PAT_MRT3847_6616C.1.pep
MEAAKVLSHCKTAPFGFSIVSNKVSLRPFNKHFHADVLANRPKNISFQLNCTFGNPSKSVSKPARKRADLLHFPRCSISSNASTESPNSNIDFFSNLSFDSIKATLLQLTPIDVXKWSGILCIIAAATKWTMNMLFSPFFWMYFSWTWLFWPWMVAIGLAVYGLYCFRKHLHSEANIFEQLAIVTSVFTWLTLVPPGHFNGYLEGWPYVFFFVYHYFFFFNVSVRKRLYGDYFAQPHDPKWDVNLPMWSXXLFSTGVMVXHWLAAFEGXELHLIPGGWSNLGIWALIITTLLMQYNATLYLAKYSENVVEPTSVVQFGPYRWVRHPIYSSTMLLFVTYCIALRAPLSLLFIVAVCLLYYKQKAEKEEDLMVETFGQSYTEYASKVKYKLIPFIY

SEQ ID NO: 248218 - protein, 333 aa, Glycine max
  Clone ID: PAT_MRT3847_66170C.1.pep
TAARRRQKGGYIDRILGQPSLIRESSRGKYPWSGMFSRTMSSLSRHTNPGSALKNGNGFGDVILHPSLQKRIQQLSSATANTKAHQAPFRNMLFYGPPGTGKTMAARELARKSGLDYALMTGGDVAPLGPQAVTKIHQLFDWAKKSNKGLLLFIDEADAFLCERNKTYMSEAQRSALNALLYRTGDQSKDIVLALATNRPGDLDSAVADRIDEVLEFPLPGEEERFKLLKLYLDKYIAQAGSGKSSFVKDLFKGKPQQIEIKGLTDDIIKEAAAKTEGFSGREIAKLMASVQAAVYGSENCVLDPSLFREVVDYKVAEHQQRIKLAAGDKPIA

SEQ ID NO: 248219 - protein, 83 aa, Glycine max
  Clone ID: PAT_MRT3847_66171C.1.pep
IGCEKTPEGANTCSAKSKPIEICDSFSITLVKFHINQVLHMEEELSFFSKEGSKRLGEAMASMTIWRKYTLRLCWKEGWTTHA

SEQ ID NO: 248220 - protein, 48 aa, Glycine max
  Clone ID: PAT_MRT3847_66172C.1.pep
KKKNKKKKKKKKKKRKRKKKKRKKKKKKKKKKKKKKKKKKKKKKRAPL

SEQ ID NO: 248221 - protein, 121 aa, Glycine max
  Clone ID: PAT_MRT3847_66173C.1.pep
TCTKTKIVAVEFDSFSGNPWDPPSAHVGIDVNSIASVTTRKWETGNSFEVAYATVNYEPIGKSLNVLVTYPGSSLNTTSLSFVIDLRTVLPEWIRVGFSGATGQLVETHKIYSWTFASSFY

SEQ ID NO: 248222 - protein, 365 aa, Glycine max
  Clone ID: PAT_MRT3847_66174C.1.pep
MPPVPISPIKVGHIDDVQELRKTKPRTIPQRFVRDLTERPTLTTPLPPPHSDMPVIDFSKLSKGNKEEVLTELFNLATACEEWGFFQVINHEIDLNLLESIENLSREFFMLPLEEKQKYPMAPGTVQGYGQAFVFSEDQKLDWCNMFALGIEPQYVRNPNLWPKKPEKFSETVEEYSGEIRKLCYNLLTYIALGLGLKGDEFEEMFGVSVQAVRMNYYPPCSRPDLVLGLSPHSDGSALTVLQQAKGGPVGLQILKDNTWVPIQPIPNALVINIGDTIEVLTNGKYRSVEHRAVAHEEKARLSIVTFFAPSYEVELGPMPEFVDENHPCKYKIYNHGEYSKHYVTNKLQGKKTLEFAKIQTKNTN

SEQ ID NO: 248223 - protein, 129 aa, Glycine max
  unsure (1)..(129): unsure at all Xaa locations
  Clone ID: PAT_MRT3847_66175C.1.pep
MANFVLQFPNTLRSFAVSASSNSNGAPPGGSGSSSGGGGGPVILELPLDKIRRPLMRTRANDQXNKVLELMDSIKEIGLQVPIDVLEVDGVYYGFSGCHRYEAHQRLGLPTIRCKIRRGTKETLRHHLR

SEQ ID NO: 248224 - protein, 127 aa, Glycine max
  unsure (1)..(127): unsure at all Xaa locations
  Clone ID: PAT_MRT3847_66176C.1.pep
VWGALLGASRXYGNLEIAKQIMXQLLELGRFNSGLYVLLSNMYSESQRWDDMKKIRKIMDDSGIKKCRAISFIEIDGCCYQFMVDDKRHCASTGIYSILDQLMDHLKSVGYPCKSSEVEEIYYSSNI

SEQ ID NO: 248225 - protein, 81 aa, Glycine max
  unsure (1)..(81): unsure at all Xaa locations
  Clone ID: PAT_MRT3847_66177C.1.pep
RKDXTYIVSTRHYXAPKVILKLXXNYPYNIXNSDYILIELYTNEXLLETDENLKHLALNNKVSFPITTEILKRFDHIQEKF

SEQ ID NO: 248226 - protein, 87 aa, Glycine max
  Clone ID: PAT_MRT3847_66178C.1.pep
SLYFIHLYKPLVMFEPRDMWTKLKEKGETIFSNAGWIHREPSQGIQGKEKSSPGLAVVAGQQHVQVHTPRMMYSEASVSMLVECFSA

SEQ ID NO: 248227 - protein, 48 aa, Glycine max
  Clone ID: PAT_MRT3847_66179C.1.pep
RNKYFYAFKSLTERKGDECCYTAISGGFRIILSDFLQQDPEPTHGRDP

SEQ ID NO: 248228 - protein, 84 aa, Glycine max
  Clone ID: PAT_MRT3847_6617C.1.pep
TPISKEEGWNKKKTLFLVSVGIDFITFQNSFPIPPKEPNGIPNGRVRGSLSMRLCPLQIGIHFLKNPGFRAWGGFQNPFNRTRG

SEQ ID NO: 248229 - protein, 80 aa, Glycine max
  Clone ID: PAT_MRT3847_66180C.1.pep
PQRRALFFFIFTFTQLIITPPQNVYTRFSCHYRKTTKAKSFIHSLTLEAMHLSSKPTMKIQLHFVSLINSTTFKKITTFL

SEQ ID NO: 248230 - protein, 178 aa, Glycine max
  Clone ID: PAT_MRT3847_66181C.1.pep
MELRPTRPPTRPRTLLAMAIRINSLTLSSALPMELRGGISGLWVGSQMMPQMRKEARGRRVWRRRKLIKKDEYMHPKMERIPFMEEQVRMVREQGKLLTMDIERLMLSEDNRFDFVNEIAAEANSYVENNRDEYGGEKKAILHVLSNRMNDTGIYRPEAYYEPDPFKPGPHYLREEFT

SEQ ID NO: 248231 - protein, 64 aa, Glycine max
  unsure (1)..(64): unsure at all Xaa locations
  Clone ID: PAT_MRT3847_66182C.1.pep
LRFFRGKXYLLLLGTTALSLVTTPLLFKLIPAVMNLGVLMHWFPSESSSQIEGKASVIEGNRML

SEQ ID NO: 248232 - protein, 98 aa, Glycine max
  Clone ID: PAT_MRT3847_66183C.1.pep
WKKTPPNKGLFLWCPTLIFIGSQKTGRGVYPENIGRGLGGPPIFLNGGQIKIWENKGNSFFWGKIFILKKFHKKTSPKKKKLKRGGLKGGPHPLYWGG

SEQ ID NO: 248233 - protein, 205 aa, Glycine max
  unsure (1)..(205): unsure at all Xaa locations
  Clone ID: PAT_MRT3847_66184C.1.pep
KLKDNTQVPVPVYSKAGSSDSSEKKAVPSRSSGWAAAVRKVVTGGSMRRFQERVLGSSRTDISSSDGDIWLLGVCHKISQQESTGGVDTSNGLASFEQDFSSKILVTYRKGFDAIGDTKYTSDVNWGCMLRSSQMLVAQALLFHKLGRSWRKPIDKPLDKEYIDVLQLFGDSEASAFSIHNLLQAGKGYGLAVGSWXGPYAMCRT

SEQ ID NO: 248234 - protein, 61 aa, Glycine max
  Clone ID: PAT_MRT3847_66185C.1.pep
ALSWKRLDHTFWALHRAHINCSSFGTSLPPPKQILILVSILIYLRNKSETEGSIDCKALFN

SEQ ID NO: 248235 - protein, 83 aa, Glycine max
  unsure (1)..(83): unsure at all Xaa locations
  Clone ID: PAT_MRT3847_66186C.1.pep
VFYGWVDAPIGYVSITSCYTHEWDKWWKNPENVELYQFMGXDNVPFHTAMMTSTVLGTSENRSFLKTISXIVEYLNYESRKSS

SEQ ID NO: 248236 - protein, 42 aa, Glycine max
  unsure (1)..(42): unsure at all Xaa locations
  Clone ID: PAT_MRT3847_66187C.1.pep
IXXTVNXIEDCIEIINFLKYENQNCEFSKIKESNVFILKYKN

SEQ ID NO: 248237 - protein, 141 aa, Glycine max
  unsure (1)..(141): unsure at all Xaa locations
  Clone ID: PAT_MRT3847_66188C.1.pep
MVLKGLCERIVSSKCSSKSSTETVDNTQVPVYSKAGSSNSKFPKASLWSNIFTSGFSVVETYSESSASEKKAVHSRSSGWAAAVRKVVTGGSMRRFQERVLGSSRTDISSSDGDIWLLGVCHXISQQESSGGVYSNGLASF

SEQ ID NO: 248238 - protein, 48 aa, Glycine max
  Clone ID: PAT_MRT3847_66189C.1.pep
CSCPIRCRGTKNASGSVSRPLDGLWVLELLIAQKTIHGCARLMDIRVR

SEQ ID NO: 248239 - protein, 112 aa, Glycine max
  Clone ID: PAT_MRT3847_6618C.1.pep
GLHPYSVLFTPGPGAPPPPDNPPLSKTSPPKAPTQNTPPTSSTFTRMEGYDYRRVFCPCSFVKSIHYRYNSTVALFHSLTVLVIFLFPPPGTFPIAMSINSKLSYFEYCPLF

SEQ ID NO: 248240 - protein, 46 aa, Glycine max
  Clone ID: PAT_MRT3847_66190C.1.pep
GEDIRIKVKGGGHTSQMYAVRQSISKGLEADYHKDGNEQSTKEIKE

SEQ ID NO: 248241 - protein, 113 aa, Glycine max
  Clone ID: PAT_MRT3847_66191C.1.pep
KVVYYPHINTRSRGQPYAIGRSYVYPNFTQLPGFVKHILFETHGVTKVTRFARNPLLVRGLNTKWPPPFPPSLNLCGLNGKGTPPCTVPLGPTPCFGNSPPLPFPFLNPLIPP

SEQ ID NO: 248242 - protein, 69 aa, Glycine max
  Clone ID: PAT_MRT3847_66192C.1.pep
LLFFCFFFFSDVENTNKKGGAKLTTTIGTLAIHAAFNGQKHQTGNQDNYNNLNLKEHNKEIKCEEAKII

SEQ ID NO: 248243 - protein, 39 aa, Glycine max
  Clone ID: PAT_MRT3847_66193C.1.pep
MHNYDEFGFYVQGIRFKSKARICTISLCLKLEQQFNDRC

SEQ ID NO: 248244 - protein, 307 aa, Glycine max
  unsure (1)..(307): unsure at all Xaa locations
  Clone ID: PAT_MRT3847_66194C.1.pep
MKTHQQPKLKTQLFSCGFFRHCAQTVLSPTGTTPTLPQTPPGFQCESSTYSFSSSTTSQSFTQWRFSPPTPTTTTNSNLIQTNTNPPSPPPPPQIHNLQELFHILELQLTTDPTSVLNLLERSLVPNPPQNQPPCPPNLMRALTANLATAKPATKTLXALCLSDANRRVAVETGAVSAVVEAAPDLDGAPAERALAALELMCTLPEGAEELRAHALAVPVMVTMMAKTAARGKEYAIGVLAVVYGSVGGGEEHHTAPPEEVARAVELALQGECSARGRRKGAQLLKTLQQLSQAELEAAESHLHEAN

SEQ ID NO: 248245 - protein, 60 aa, Glycine max
  Clone ID: PAT_MRT3847_66195C.1.pep
NPYIPISPTSAPNNLLGNRMWRYATTESISHLYNVLMTQPPKGCIHIHEAIHRIWNFALS

SEQ ID NO: 248246 - protein, 162 aa, Glycine max
  Clone ID: PAT_MRT3847_66196C.1.pep
IQAFENFPPPHAGAKLRRTTKVKGWGSTGKVFENLIRRVRPRTVVEVGTFLGASAIHMAELTRRLGLETQILCVDDFRGWAGFRDRFSKIPMQNGDVWLFYQFLQNVVTFNQTGSVMPVPFSSGSTLMLFCEWGVFADLIEIDAGHDFLSAWADINRGFRIL

SEQ ID NO: 248247 - protein, 56 aa, Glycine max
  Clone ID: PAT_MRT3847_66197C.1.pep
PRHYMYVHGLIYMIPQRYMVCLNLRSLASTHEYRSRCIISQSNYSLFEYSGTLALW

SEQ ID NO: 248248 - protein, 89 aa, Glycine max
  Clone ID: PAT_MRT3847_66198C.1.pep
RVEARTDSKFPAQWVIDPPLDITVPSKRTPWPDAPPQLPTNEKELLGTQDQTTKHSTKTRTSRSRRTRSKRKHDAKVIGVQVSTHSEKN

SEQ ID NO: 248249 - protein, 59 aa, Glycine max
  Clone ID: PAT_MRT3847_66199C.1.pep
RVLLFKWDGYHQQNAYLLEWSLLLPYLAYHEDKGHVIGVTRGIPISHFEEIQEAKMFIY

SEQ ID NO: 248250 - protein, 57 aa, Glycine max
  Clone ID: PAT_MRT3847_6619C.1.pep
TRTKKFESDNSLIAQIKKHKKKKRSTKKKKKKNEKGRPPSSEPGIKHRPRTADEVRI

SEQ ID NO: 248251 - protein, 87 aa, Glycine max
  Clone ID: PAT_MRT3847_661C.1.pep
LPQALIPPPFLKISTPPYTVPKFLFFPNFPPTPPLFPCILNPNFSFFPFIPFCFFPPTFFSPQTFFPQHNNKKKKKKKKKKKTKIPK

SEQ ID NO: 248252 - protein, 140 aa, Glycine max
  unsure (1)..(140): unsure at all Xaa locations
  Clone ID: PAT_MRT3847_66200C.1.pep
MLSFYAALKTSHEDNNNISCYHQSSCLVQSMDNCKCMSTDKNYPYQGSDGDXKAKVRNHAVAICGYENLPAHNENMLKAAVAHQPASVATDAGGYAFQLYSKGTFSGSCGKDLXHRMTIVGYGEENXEKYWLVKNXWAND

SEQ ID NO: 248253 - protein, 53 aa, Glycine max
  Clone ID: PAT_MRT3847_66201C.1.pep
LGSVLDIAQAGALPLDKAMPNSVGPATLCIFCLWIGRVLFLSLTDPLRRFLGS

SEQ ID NO: 248254 - protein, 36 aa, Glycine max
  Clone ID: PAT_MRT3847_66202C.1.pep
SLSLTLFGHSSIILSHSSFLTRQTSVTCNHMIHLLL

SEQ ID NO: 248255 - protein, 82 aa, Glycine max
  Clone ID: PAT_MRT3847_66203C.1.pep
KFLKHKMLVSVELCFNKLSLLVNGKNPSNASLSRIQGLGLASCNLKEFPHFLQVVPDLSYLYMPNNNVNAFPSWMWGKTSLR

SEQ ID NO: 248256 - protein, 52 aa, Glycine max
  Clone ID: PAT_MRT3847_66204C.1.pep
VGLNITLQPGSIHDFNTKRCLFLDADVCKTVMVSTVDLMKDLKLRPSFIQNK

SEQ ID NO: 248257 - protein, 98 aa, Glycine max
  unsure (1)..(98): unsure at all Xaa locations
  Clone ID: PAT_MRT3847_66205C.1.pep
XXPCXSIXSCAMXRXXXPXSXIXLXTXXTAXLXPLILXTXFQEXXNXRTXPXRLXXXXSXXLLHXXXQXDSGVXXXXPXPSWDXXXXSSRIPSLRTRA

SEQ ID NO: 248258 - protein, 197 aa, Glycine max
  Clone ID: PAT_MRT3847_66206C.1.pep
MAAPRHSQPICDAVHHLVPEYREMQMHMPESTCSFNSFPVPPPDNFRHTDGVTIHNKGYSIRPPQHVPSNQFSFVNGEQHVKHQREVPPPPPYSSSQHFVQNMERENFYNNHERLRPPPYVYEDRWNGPASYPGPRYQEKGVPPPYVCHPCESSRIPDHGWRFPPRSMNQRNSMPFRPPFEDAIPVANRGPGFWRPR

SEQ ID NO: 248259 - protein, 78 aa, Glycine max
  unsure (1)..(78): unsure at all Xaa locations
  Clone ID: PAT_MRT3847_66207C.1.pep
GGEQRPTQREATASLKKDERLEPRGDTCSDGESECEQXRPITRVRDGQPHRTAPPPKAMSSAHPTQHSLAKPRRAAPF

SEQ ID NO: 248260 - protein, 159 aa, Glycine max
  Clone ID: PAT_MRT3847_66208C.1.pep
MSNPNHIHILRVLLLAPALMASIVNSMQFELKSGQSKCISEDLKSNVITVGNYYVLNPNNDGFPIPDSHKITVRVRSPYGNDFHYGDSVHSGNFAFTAAEAGDYTACFSVPSNLNLAVTVLVDFVWKNGFAAKDWSKVVKKGHIEVMELELQKLNDIAS

SEQ ID NO: 248261 - protein, 105 aa, Glycine max
  Clone ID: PAT_MRT3847_66209C.1.pep
MKKDIRSCCYSEGSTSTLNKQNDTCKVSSLALQDLMMQFELEAKLSDDFSGMRGRMSCVNDSNILRPTRKALNQYPRLSLDGGRDAMNHSFVNIQGRRSVCCDRR

SEQ ID NO: 248262 - protein, 73 aa, Glycine max
  Clone ID: PAT_MRT3847_6620C.1.pep
GEKRLAAHGFLYNSYHSEAIHQIPLISAQHQTPVFMCQNNGILLQAPLLLRLRFCFCSHCKAALGSHIQLRQV

SEQ ID NO: 248263 - protein, 99 aa, Glycine max
  unsure (1)..(99): unsure at all Xaa locations
  Clone ID: PAT_MRT3847_66210C.1.pep
GDXGFGXXXXKXYVXKLSQXXLEFXAXLGAANDXIXXIQXTXXATXKGKVSSSXSSXTRXQXLGSIHXTFPQRXINSKAPXIVWDARXFCGFHLXLKHR

SEQ ID NO: 248264 - protein, 167 aa, Glycine max
  Clone ID: PAT_MRT3847_66211C.1.pep
MGVQRHEAFSEDNEPAENACASSSLNQGALASESANSDPSVNTESREVNEPGDNSYKKSSTPHIYRQDVVKNNISGMIGIVTEVAGDSDSDSDSSITDDENDSEDEDGDDEEGDGINNASRNSESNGAAGHGKTDALLADQLHVLWMDKSEFTLNFSDVEVVIADFT

SEQ ID NO: 248265 - protein, 62 aa, Glycine max
  Clone ID: PAT_MRT3847_66212C.1.pep
LLHLLLSTTLLTFILYALVAYFLNYYYSNGNHILSLDILIDLYVSCYCLDTNYVTLTASTAQ

SEQ ID NO: 248266 - protein, 74 aa, Glycine max
  Clone ID: PAT_MRT3847_66213C.1.pep
HASAQLAETFVVAKCPTKVVGVPVTLNGDLKNQFVETNVGFDTICKVNSQLISNVCTDALSAEKVMSLMYLAFL

SEQ ID NO: 248267 - protein, 43 aa, Glycine max
  Clone ID: PAT_MRT3847_66214C.1.pep
KDYFGCFTENGVLITISIMSSQLLFHSTDCLWGSYCKAIYYPT

SEQ ID NO: 248268 - protein, 232 aa, Glycine max
  Clone ID: PAT_MRT3847_66215C.1.pep
MKFMKLGSKPDTFQTDGNNVRYVASELAADIVATRGDIKFYLHKFPLLSKSSHIQTLISLNNEENVDEVQISDIPGGANTFEICAKFCYGMTVTLNAYNVIATRCAAEYLGMHEAIEKGNLIYKIDVFLSSSIFRSWKDSIILLQTSKSMLPLVEDLKVVSHCIESIANKACVDVSKVDWSYTYNRKKLPKENGIESNQNGLRTRLVPKELWVEDLCELEVDLYKSVITNIK

SEQ ID NO: 248269 - protein, 59 aa, Glycine max
  Clone ID: PAT_MRT3847_66216C.1.pep
RAIKMIYFAIVFSHDRNQERRFLNKKKKIYDAIYGLFFFFEKMLCMGVTSNGPPWFLNQ

SEQ ID NO: 248270 - protein, 110 aa, Glycine max
  unsure (1)..(110): unsure at all Xaa locations
  Clone ID: PAT_MRT3847_66217C.1.pep
LGYIKSLEADENIAPLKFHGWGLPVEWGGPFLISTLLFKKGVKKGVAPFALGSLLCRGSFNKGFVFXGIVKAALGFVFPCPSEAPFLGTVSEIMGPPPFGVPGSLFLFLS

SEQ ID NO: 248271 - protein, 120 aa, Glycine max
  unsure (1)..(120): unsure at all Xaa locations
  Clone ID: PAT_MRT3847_66218C.1.pep
LREPPRRAAGGGYETPAGTRTPANARANGRDPKHXENXPETRPERPAENGKSQPDXRGQPHHLLPFGSGRRACPGTPLAPQVVHENQADLIQRPQRKEDRDNGKANTEEKAGITLPRAHP

SEQ ID NO: 248272 - protein, 115 aa, Glycine max
  unsure (1)..(115): unsure at all Xaa locations
  Clone ID: PAT_MRT3847_66219C.1.pep
FLPALLXLLPLXMPPVQXXFVPLXPPGSCCXAPASXPCALPPRFXVGLGPSVXGXSLLFVAXXPXXAPXXGXPASPAVGCSPVXLFWPSPWSWVRFSSPGSVXXSCFAPPSLVAG

SEQ ID NO: 248273 - protein, 83 aa, Glycine max
  Clone ID: PAT_MRT3847_6621C.1.pep
SILCCTPSFVTSKWQRNELFILETDFVEFFKKGMARLNSMEKIMLKPCLNLVSHCLASFYRLTALSVKKRQLASCCCEKCSFV

SEQ ID NO: 248274 - protein, 95 aa, Glycine max
  unsure (1)..(95): unsure at all Xaa locations
  Clone ID: PAT_MRT3847_66220C.1.pep
IRXKTVLQMTRHKCDSEVIEGCAEVEFQGSSESVSSTDDIPADADKQMHTEVVPVNRNAKTTYKLVCGLSCVLLAVATPLLWINSQDEGHYLVPT

SEQ ID NO: 248275 - protein, 63 aa, Glycine max
  Clone ID: PAT_MRT3847_66221C.1.pep
RTGDNDTVNYVNPGSCDTLNTGNAVNIQHSLSHCHRVPLNRVTPAFLGMMPTMDVDPSRLARA

SEQ ID NO: 248276 - protein, 63 aa, Glycine max
  Clone ID: PAT_MRT3847_66222C.1.pep
FIQVKMMFPPPWKGGIEARILCLFPLLKKWGFFFEVNKISSMFWGIFFKKKKKTKKKKKKNFQ

SEQ ID NO: 248277 - protein, 33 aa, Glycine max
  Clone ID: PAT_MRT3847_66223C.1.pep
ILIRTHHSHRERERQREREMGLLYIDISDVDSS

SEQ ID NO: 248278 - protein, 63 aa, Glycine max
  unsure (1)..(63): unsure at all Xaa locations
  Clone ID: PAT_MRT3847_66224C.1.pep
PLETGKPKNAGKGILIFVLSGKAQVDVIMVRLHKLFXMSTVIWKVKMWVPSFMPNAFQKTHFF

SEQ ID NO: 248279 - protein, 47 aa, Glycine max
  Clone ID: PAT_MRT3847_66225C.1.pep
LICFRRFMVSSLPFHVFRILTWNKIIEAPRCLDCTSGWRKLCVFLKN

SEQ ID NO: 248280 - protein, 63 aa, Glycine max
  Clone ID: PAT_MRT3847_66226C.1.pep
SMLINVCIIKVEICKFRWMYGGNLEAKKIHRFMASGNRPSKMLSFVVEGKRLSKKRFKVVNVN

SEQ ID NO: 248281 - protein, 68 aa, Glycine max
  Clone ID: PAT_MRT3847_66227C.1.pep
DKHSFDFAACFNLECSYQTLEGTGHPPLPPLPHPSLYHLPFITYTSPVPYLPYSVKSPPQASTPSPNP

SEQ ID NO: 248282 - protein, 72 aa, Glycine max
  Clone ID: PAT_MRT3847_66228C.1.pep
LPTNSKTGSCIREQNVMIGTGTWTSFLQESSYLSCSLMINLLFQCLFFFLLLNTILLVSNLGMVLGGPYFYL

SEQ ID NO: 248283 - protein, 157 aa, Glycine max
  Clone ID: PAT_MRT3847_66229C.1.pep
NAIGGEIRFQTEVEMISLAVHRNLLRLYGFCMTATERLLVYPYMSNGSVASRLKAKPALDWATRKRIALGAGRGLLYLHEQCDPKIIHRDVKAANILLDDYCEAVVGDFGLAKLLDHRDSHVTTAVRGTVGHIAPEYLSTGQSSEKTDVFGFGILLL

SEQ ID NO: 248284 - protein, 78 aa, Glycine max
  Clone ID: PAT_MRT3847_6622C.1.pep
AYLFDGCGVFFDGSRYKEPPQLLLRQWGLFKHYFYQLDQSCRPNVECTGWERQIYFVMTTLVCMRAQNKATKDSRQIS

SEQ ID NO: 248285 - protein, 50 aa, Glycine max
  Clone ID: PAT_MRT3847_66230C.1.pep
TIKTPAGKTRINTQYSLCAKKEKDIYMQNQTKNGFILIKIHKFRTLKNNS

SEQ ID NO: 248286 - protein, 35 aa, Glycine max
  Clone ID: PAT_MRT3847_66231C.1.pep
SGVFSEITPRLVNKDKSSMNEIIPRVKPLKCCGHL

SEQ ID NO: 248287 - protein, 37 aa, Glycine max
  unsure (1)..(37): unsure at all Xaa locations
  Clone ID: PAT_MRT3847_66232C.1.pep
SHTEEELWPVLSWVRIKNTRHARSPSVSXASTDRIRA

SEQ ID NO: 248288 - protein, 66 aa, Glycine max
  Clone ID: PAT_MRT3847_66233C.1.pep
GPKGGQKKGYFFWENKEKTKKNLFGGFFLTNFYYGARFILAQWENKSFETKFNYKGCVKKKLKKPG

SEQ ID NO: 248289 - protein, 39 aa, Glycine max
  Clone ID: PAT_MRT3847_66234C.1.pep
LEGAFQSVFSFSLSSPDALGPPPPPPPPPPPLPPPPPPP

SEQ ID NO: 248290 - protein, 75 aa, Glycine max
  Clone ID: PAT_MRT3847_66235C.1.pep
PPQTNKWGVFNGQTKTNWGTLNRKIYFKDFPKTPPKKKGAPPGVFHLPGKMAKGRPRQNLKLPTGALNRIIKKKG

SEQ ID NO: 248291 - protein, 151 aa, Glycine max
  unsure (1)..(151): unsure at all Xaa locations
  Clone ID: PAT_MRT3847_66236C.1.pep
MHELTSSLGWRTPPFMVLIKIKEIAEAQLGYHHXKADDTVPAYFNDSQRXATMTPVEISGLNAMRINNXPTGDVIDTGLDKNATIYGEKNDFIFXLRGGTHDVSLITNEDGIFQANATDGETHGGGVDNDCRKMNHFVQGCTRKNEKDIKG

SEQ ID NO: 248292 - protein, 69 aa, Glycine max
  unsure (1)..(69): unsure at all Xaa locations
  Clone ID: PAT_MRT3847_66237C.1.pep
IGSTHCDLGFAMFDPLLRLCFISFSGFFKYCSFMCLFCLNFQAGFFLHLLEILNGXLXXKNIKICGPNF

SEQ ID NO: 248293 - protein, 74 aa, Glycine max
  Clone ID: PAT_MRT3847_66238C.1.pep
PYLWRSEYLHSTVNLMPASQMVFVSRTHIATSVADCVCFILKAQCFLSIESCLSRGTMRGPVSLSFPDPIYGNI

SEQ ID NO: 248294 - protein, 195 aa, Glycine max
  Clone ID: PAT_MRT3847_66239C.1.pep
GSPGVTGTDCGNQIAAKPDLILGVGTRSQDFTTGSWAIFGNPMHKLVSVNLTGYDAAKHGAVPLVCDAKIALSRISDALGSHRFADPDFAARDAWFKASDDVTAAPVTPAPNFLPSDAQVIGAVQRVAGPQTVAMCAAGTMHGALQVLWRAAAGGYHMEYGYSCMGYEVAGAFGIKLAAPEKEVVCFVGDGSYMM

SEQ ID NO: 248295 - protein, 86 aa, Glycine max
  unsure (1)..(86): unsure at all Xaa locations
  Clone ID: PAT_MRT3847_6623C.1.pep
TFKMFSFKGVDTDARLEMSIDECLKIISDRSRREYYRGLSRKPIGLNTRLRIAIREAPPXEKPEPVRTHLRNTITVTDMSGINIAV

SEQ ID NO: 248296 - protein, 150 aa, Glycine max
  Clone ID: PAT_MRT3847_66240C.1.pep
MEMEMEMEMEENNGLLNLQAVAPEMSGEGFPYAPENWPEEGDIWGWRTGRRIVANRSRFQDRYLYLPNRLIRALKEEKEKENPGSGADSGPSSSSIRRQQHIFASKLAVERYIKTHFPDADIDAFFASFSWKIPALRSNGPFFSLSLFRC

SEQ ID NO: 248297 - protein, 66 aa, Glycine max
  Clone ID: PAT_MRT3847_66241C.1.pep
PFCKLFFFFFFFWRMFTQNKRVFYSLFSKLGFSKEISPVGVIKTMFFPGGNLPQTFISKQKKIKTV

SEQ ID NO: 248298 - protein, 140 aa, Glycine max
  unsure (1)..(140): unsure at all Xaa locations
  Clone ID: PAT_MRT3847_66242C.1.pep
MEMENNGFLNLQAVAPEMSGEGFPYAPENWPEDGDIWGWRTGRRIVANRSHFQDRYLYLPNRLIPXRRQQHIFASKLADERYIKTYFPDADIDAFFASFLWKRPALRSNGNALPIAAVPLRQIAQDAYDSDSGDVVTCQA

SEQ ID NO: 248299 - protein, 67 aa, Glycine max
  Clone ID: PAT_MRT3847_66243C.1.pep
CWGICNQGLAHLFLARKAVTTASLVLSPEFIILSRTILFYFLSDLLFVLFFYNYFSFLCFIYLFSFF

SEQ ID NO: 248300 - protein, 164 aa, Glycine max
  Clone ID: PAT_MRT3847_66244C.1.pep
MDKSSNFDENSDVGYHPSSPSNTPAFSPMSRDSFAYCPTWTSSESETVDESSYASEPSPSRWRAKQDVLSKLGMKLREHSKDDKLDGCVDSAELELMKERFAKLLLGEDMSGSGKGVCTAVTISNAITNLYATVFGQSLKLEPLKPEKKAMWKREKKVLLSWCD

SEQ ID NO: 248301 - protein, 78 aa, Glycine max
  Clone ID: PAT_MRT3847_66245C.1.pep
GEGKNGSLRGEGGLFQRGVEVTPPPKVINGFRALPFGPVFRPSNPPFFCFPPPRFRPPPPFLGPAPFSRSPGPQGGAG

SEQ ID NO: 248302 - protein, 57 aa, Glycine max
  Clone ID: PAT_MRT3847_66246C.1.pep
SSRLSAGIEELVQKLKANGIVVYLISGGFRQMINVQRIFVINGFSDSFWAREEINSY

SEQ ID NO: 248303 - protein, 57 aa, Glycine max
  Clone ID: PAT_MRT3847_66247C.1.pep
RSITIAALCIYPNIILTFFGLLLLNEELSIFSLFFTFVFFVKCVVTANILMRYITNV

SEQ ID NO: 248304 - protein, 51 aa, Glycine max
  Clone ID: PAT_MRT3847_66248C.1.pep
SLQHRMEDRNVSDKQSHGRSKEKPHLAILVPSLSLHQVCISSLLAAFKHGM

SEQ ID NO: 248305 - protein, 82 aa, Glycine max
  Clone ID: PAT_MRT3847_66249C.1.pep
IIPADELTIRAAFPVFYIPKREKKRGLCIKSKTTHEIGSWHTNLCQQIPPHTCLNGTQGLSPIDSQHQYENHQRMHNTLLLT

SEQ ID NO: 248306 - protein, 348 aa, Glycine max
  unsure (1)..(348): unsure at all Xaa locations
  Clone ID: PAT_MRT3847_6624C.1.pep
MSGASSLMFASSERWIDRLQYSSLFWPPPPDGQQRKDQIAAYVEYFIQFTSEQFADDIAELIRNRYPSKDILLFDDVLATFVLHHPEHGHAXVVLPIISCIIDGTLVYDKASPPFASFISSVCPKIENEYSEEWALACGXEILRILTXYNRLKYKTERQSGETERSTSGSHATTSEPGKSGHNSLTQQEKKPIRPLSPWITDILLASPVGIRSDYFRWCSGVMGKYAAGELKPPSTASSRGSGKHPQLVPSTPRWAVANGAGVILSVCDDEVARNETTTLTAAAVPALLLPPPTTALDEHLVAGLPALEPYARLFHRYYAIATPSATQRLLLGLLEAPPSWASDALDA

SEQ ID NO: 248307 - protein, 227 aa, Glycine max
  unsure (1)..(227): unsure at all Xaa locations
  Clone ID: PAT_MRT3847_66250C.1.pep
KSFTRPARGQYSLECGTEVFNTYGLLGNAALLHRYGFTEQDNSYDIVNIDMELVLQWCTSVFSDRHSRARVSLWRKLGYSACGSQNSEYFEISFDGEPQIELLVLLHIMLLPDNAYHKLDLSVSVAGNCDESSGTTFLNGNIFPSKAFNMSKKSLLPKKACDVLLSLADMRESLYGLKSIEDDIXGIGKRCSLIRERKLXHSXLMLRINERKDPPEAQKMLLSHLKI

SEQ ID NO: 248308 - protein, 91 aa, Glycine max
  unsure (1)..(91): unsure at all Xaa locations
  Clone ID: PAT_MRT3847_66251C.1.pep
GFKRITNKIPNVQAHXFTHLDKDGIATLGSWVETGDLXAGQSTPQMAKESSYCPGDGLLRAILGIQGSTSKETWIILPTGGRGRVIDERWI

SEQ ID NO: 248309 - protein, 80 aa, Glycine max
  Clone ID: PAT_MRT3847_66252C.1.pep
SLYNGAQPLHKNRWTHNNIHASGHVKTTWRKLIRSAKYYLLGPSMGDLVPRASIPGNFRHDPCGCGGKHKTSLMLLKARG

SEQ ID NO: 248310 - protein, 41 aa, Glycine max
  Clone ID: PAT_MRT3847_66253C.1.pep
LFYSRVAIAVFYFNVVTFPPDGYFKCEGSSIENFLVTKVLS

SEQ ID NO: 248311 - protein, 69 aa, Glycine max
  unsure (1)..(69): unsure at all Xaa locations
  Clone ID: PAT_MRT3847_66254C.1.pep
PFSKLTFVNGICRTGRGGXPINACISFAPNNRSSXINSKIXAGLVTGKKTASLTRFAPLPKAGLADLCG

SEQ ID NO: 248312 - protein, 56 aa, Glycine max
  Clone ID: PAT_MRT3847_66255C.1.pep
IFNKSHFHSSLRLSISLALCAIFPLYAFSSYLTSATAQHVLDFYCHPILISFIDYV

SEQ ID NO: 248313 - protein, 40 aa, Glycine max
  Clone ID: PAT_MRT3847_66256C.1.pep
IPPVPLLRASNQPLRTPPPHFHYYIALNSKISQPIMIPHN

SEQ ID NO: 248314 - protein, 90 aa, Glycine max
  Clone ID: PAT_MRT3847_66257C.1.pep
VRPPFVMANNDPHVAPAERELRKTSQSWVAKYRREKAFFGRASFRARYSALPPVWGPHISFGPPAPISAKRRARILEEVDPFEKAVLRGR

SEQ ID NO: 248315 - protein, 119 aa, Glycine max
  unsure (1)..(119): unsure at all Xaa locations
  Clone ID: PAT_MRT3847_66258C.1.pep
DIICVTGWTATPMQDDQGTIDWTIHYKECAPRTYGVINAQKTKGINRGMGKQTAHQCTKQSAKKRLMDLRGGADTKNAXMMNMPDAVLTMSRYFXGDLKLRTDKMTTEYINVQTLSYSM

SEQ ID NO: 248316 - protein, 151 aa, Glycine max
  Clone ID: PAT_MRT3847_66259C.1.pep
ESNSLYPFQIEHEFFDHTNRDMAEAGSSMEICCFCFNCCWTCLLCSQLLLQLSIWRMDHVEDLHLPLESVSKDTTSYENLRVQDDSVVIDVNNARMMQQLMTCISALQRGNSNLTNILFEYLDDKSEVAGIDHNPFVKVIVRPDVKENPMT

SEQ ID NO: 248317 - protein, 132 aa, Glycine max
  Clone ID: PAT_MRT3847_6625C.1.pep
LEPIRLEEQCHYILSPNVTQFLFLLNFLINTEKDVNILVDKKIIVNWMGDANAVVKMFNSLCSNVIVSYMSEEYCTLYHDLIKFHENPRNKYKAIFYHEYFNTPWKKASTTAAVLLLLFTLIQAICSVISLF

SEQ ID NO: 248318 - protein, 42 aa, Glycine max
  Clone ID: PAT_MRT3847_66260C.1.pep
THVYTLQVLLLTRQMEHSTTQSTAAKAAISKSRQHAIMDAYL

SEQ ID NO: 248319 - protein, 109 aa, Glycine max
  Clone ID: PAT_MRT3847_66261C.1.pep
VLRDTICILRMCTSLYKSIIFCFYSMINLYKKKEVKSNLISYSQIKLKGFFKCLNPRRMMNTLSFAPALFNNFNNSEPFSLGSLPNPLATKQVVYKHPHLSASINNPEH

SEQ ID NO: 248320 - protein, 97 aa, Glycine max
  Clone ID: PAT_MRT3847_66262C.1.pep
IAVAVAVKHRPPYPLVFSDGLTHSLRRRPPGSITEYSEALVTTQQVLSISYPVQTHHHETLNPTSAPPSQLVRMHECSEAPSRLQLRRRRKSQHPEQ

SEQ ID NO: 248321 - protein, 76 aa, Glycine max
  Clone ID: PAT_MRT3847_66263C.1.pep
VFNIQQLELCYSFQLGWFFFFSRDDLSKKDGCSYYRISSDKEGGIAITRHKFYPLNRKGSNKPRLSNNFKNNLEQL

SEQ ID NO: 248322 - protein, 58 aa, Glycine max
  unsure (1)..(58): unsure at all Xaa locations
  Clone ID: PAT_MRT3847_66264C.1.pep
KVTNMPMPLASVCYVYCNRVIRDSVVYLAKVSVQNPVFHFAIPXCESKYSLIRCCRFL

SEQ ID NO: 248323 - protein, 316 aa, Glycine max
  Clone ID: PAT_MRT3847_66265C.1.pep
MTVGAGISVADGNLMVLGNKVLSHVHDKVLVTPACGGALLNGAFIGVQSHHKGSRTVFPIGKLQGLRFMCVFRFKMWWMTQRMGTCGQDIPIETQFLLVEAHNGSDIEGGGDQGAATYAVFLPLLEGDFRAVLQGNDQDEIEICVESGCPAVEEFDGTHLVYIGAGSDPFEVITNSVKTVEKHLQTFAHRERKKMPDMLNWFGWCTWDAFYTNVTSENVKQGLQSFEKGGIPAKFVIIDDGWQSVGMDPNGVEWKSDSSANFANRLTNIKENHKFQKDGKEGQRVEDPALGLRHMTNEIKLEHNIKHVYVWHAITG

SEQ ID NO: 248324 - protein, 127 aa, Glycine max
  unsure (1)..(127): unsure at all Xaa locations
  Clone ID: PAT_MRT3847_66266C.1.pep
VHFCAFLSNSFANRLLYIKENHKFQKDGKEGQRVEDPALGLRHMTNEIKLEHNIKYCHFHFIVSISPXDIQFTHSTHDLWKMFPRHVYVWHAITGYWGGXVKPGVPGMEHYQSKMAFPISSAGSLSQ

SEQ ID NO: 248325 - protein, 50 aa, Glycine max
  Clone ID: PAT_MRT3847_66267C.1.pep
NFGDITLSGQKKKRIVNLNNNEKANSSLSQFLYLSLSPTHTKNKHKTDII

SEQ ID NO: 248326 - protein, 51 aa, Glycine max
  Clone ID: PAT_MRT3847_66268C.1.pep
EAGHSCIFSSLEKIATSRADAFTLHTLTLGSALGRIIYLLSPMEGTQDTLS

SEQ ID NO: 248327 - protein, 86 aa, Glycine max
  Clone ID: PAT_MRT3847_66269C.1.pep
RRLPLTIWPATQRTRNTEITRLIETLSYPSVLSKRYGTMSPDEASTSARHIEDEAFSVVVSSSASDNDRIEILQAYSKDISKRMLD

SEQ ID NO: 248328 - protein, 113 aa, Glycine max
  unsure (1)..(113): unsure at all Xaa locations
  Clone ID: PAT_MRT3847_6626C.1.pep
ESVNDVTVLLCGHTIHKSCLKEMREHFHKCCDFCVXFCIRYACPLCLKSVCDMSKVWEKFDLEIAATPMPEPYQNKMVWILCNDCGKSSHVQFHLVAQKCLNCKSYNTRETRG

SEQ ID NO: 248329 - protein, 142 aa, Glycine max
  Clone ID: PAT_MRT3847_66270C.1.pep
SWIASGGSNPARLGELGDNLLPLFPINRLKGVVLRIPDAPGEVFQLFWVKKNCFHEENPSRGASVTLPRGFRKQIHESFPPLFTVLHSFFVLQRVSFQIELFNSFYVPVVVPICFYVLFILFTFCTPFWRALVIFSSNQKMK

SEQ ID NO: 248330 - protein, 91 aa, Glycine max
  Clone ID: PAT_MRT3847_66271C.1.pep
RSIDLAGHHLRRWEHRHLLRYRTSMDRCRDRMECRVLSHHTPRLLRCRHPAVGRLRIDAATRIGISNRHAERFGIFWNGPEDEFSIARDAK

SEQ ID NO: 248331 - protein, 38 aa, Glycine max
  Clone ID: PAT_MRT3847_66272C.1.pep
FTTYSSAIFLKDIKLSILPHLYFNLSIHTLHFFNLFNL

SEQ ID NO: 248332 - protein, 50 aa, Glycine max
  Clone ID: PAT_MRT3847_66273C.1.pep
EIQFSYLRRSEQEKTTGLPLILKRLQWLQDDAQPEGLLVPDWGASPTATG

SEQ ID NO: 248333 - protein, 77 aa, Glycine max
  Clone ID: PAT_MRT3847_66274C.1.pep
REECLLFISIRYRIWSCRENPPLLLFPVKHLSGVDNRLVEVNFIGFSNYPSCSVHKYLILPNSFRMNSDMLLCKKKK

SEQ ID NO: 248334 - protein, 74 aa, Glycine max
  Clone ID: PAT_MRT3847_66275C.1.pep
EKNTYLMCSIIWRAHATNIGCINAFSEQEAQFHIKDQEEQIFSYIVKHTSSRLPNITETLNVGLIDTPSSFLAL

SEQ ID NO: 248335 - protein, 380 aa, Glycine max
  Clone ID: PAT_MRT3847_66276C.1.pep
QSNISGETQNSHIIEDGNLVISIQVLRKVTNDFASENELGRGGFGTVYKGELEDGTKIAVKRMEHGVISSKALEEFQAEIAVLSKVRHRHLVSLLGYSIDGNERLLVYEYMSLGALSQHLFHWKSLKLEPLSWSQRLAIALDVARGMEYLHSLARQTFIHRDLKSSNILLGDDFRAKISDFGLVKHAPDSEKSVATKLAGTFGYLAPEYAVMGKITTKVDVFSYGVVLMELLTGLVALDESRPEESRYLAEWFWRIKSSKEKLMAAIDPVLEASEETFESITIVAELAGHCTAREAHHRPDMGHAVNVLAALVEKWKPVDDELDCYSGIDYTRPLPQMLKIWKEAESGEFSYASCLENSRSSIAARPSGFADSFTSADAR

SEQ ID NO: 248336 - protein, 81 aa, Glycine max
  unsure (1)..(81): unsure at all Xaa locations
  Clone ID: PAT_MRT3847_66277C.1.pep
MHFQAHRANVPKAELKEKLFKKNELKYCCTVCVLKFQTHSGGXNXTGDGMIYDAAYDGKIYHLRYRLKMNGXDTKVPKLWK

SEQ ID NO: 248337 - protein, 89 aa, Glycine max
  Clone ID: PAT_MRT3847_66278C.1.pep
RISGERHISLHRHCGSSLAAAKPCLSGTTTRLEPALVSIGVTTFITSSVHLTYTLKLEESVRFIYYSLIYEYIAISDLVLITHYEIDPM

SEQ ID NO: 248338 - protein, 186 aa, Glycine max
  Clone ID: PAT_MRT3847_66279C.1.pep
MWRDPGVSADSFYEIRPECTDVPVTRFKIKAGKTLSARKWHAAFTPEGYLDIGKTLSRIYRGGVHPSIKGEVWEFLLGCYDPKSTFEERDQIRQRRRMQYATWKEECHQLFPLVGSGRFVTAPVITEDGQPIQDPLVLKETSQAKGLAVHPQYNNSPSSMDAANNLEKVTDKTVVQWMLTLHQIGS

SEQ ID NO: 248339 - protein, 61 aa, Glycine max
  unsure (1)..(61): unsure at all Xaa locations
  Clone ID: PAT_MRT3847_6627C.1.pep
MAETFLFTSESVNEGHPDKLMDKIIDAVLEXCIEKDQNSKFACKHXTKTTLVMVSGEITTK

SEQ ID NO: 248340 - protein, 97 aa, Glycine max
  unsure (1)..(97): unsure at all Xaa locations
  Clone ID: PAT_MRT3847_66280C.1.pep
ILHIGLGGSNFNLKNVFKTSAAPTMIRGRGRSFYRQISTDAIVEQRHXHGCGAFGSFLFQRKCTLPXVKDQDLLYKKNEAYDTINTRVTSYWRITRP

SEQ ID NO: 248341 - protein, 106 aa, Glycine max
  unsure (1)..(106): unsure at all Xaa locations
  Clone ID: PAT_MRT3847_66281C.1.pep
MWRDPGVPADSFYEIRPECTDVPVTRFKIKAGKTLSARKWHAAFTPEGYLDIGKTLSRIYRGGVHPSIKGEVWEFLLGCYDPKSTFEERYQIRHRRXMQYATWKRK

SEQ ID NO: 248342 - protein, 71 aa, Glycine max
  Clone ID: PAT_MRT3847_66282C.1.pep
QPLGLKKNNLILNPLGGITHHINLKGKKRGFFTLRVHFLKLNLPLGGLLPLGLLKGRPLKGPPKGPPFFLF

SEQ ID NO: 248343 - protein, 168 aa, Glycine max
  unsure (1)..(168): unsure at all Xaa locations
  Clone ID: PAT_MRT3847_66283C.1.pep
YVWLFGALLDISGKFHLLTGPPRCYKLGGFDMRVIERFEKEAAEMNKRLFKFAWVLDKLNADRESXITIDIALRKFETTKYYCTVIDAPAHMDFIKNMITGTSQADCADLIIDSTTGGCEAGILHDXGQTRDHALLSFTLAVKHMICCLNKMDATTPYHYTATYDEIV

SEQ ID NO: 248344 - protein, 46 aa, Glycine max
  Clone ID: PAT_MRT3847_66284C.1.pep
FFFFFFFFFCLFFFFFFFFFFFFFLGPKKKNFLWAQRPNESIPIPI

SEQ ID NO: 248345 - protein, 52 aa, Glycine max
  Clone ID: PAT_MRT3847_66285C.1.pep
IRHSHEAYTLTFIFSFVCTWYLSMKSANIKLIRSTILHITHSCSSFSIELKF

SEQ ID NO: 248346 - protein, 73 aa, Glycine max
  Clone ID: PAT_MRT3847_66286C.1.pep
TAGSTVYYAYCSAAIAAPTPCRHHPCYCKALVDPYTACVFCFGSAPRLYSPSGYAPVGDRTWTVATHTSTASP

SEQ ID NO: 248347 - protein, 132 aa, Glycine max
  Clone ID: PAT_MRT3847_66287C.1.pep
QMHTITMSSLPEMCLKEPVTVLENGMVCCGKIQRRCTWWLRLRYISMYEIICAVKSSSKGNIILCILVILVLSTCKGKPGKKCFYFELLYKETAMEKAIWSYNWHTSHTFCFTFFPSLLEFLKKCIFLQGKF

SEQ ID NO: 248348 - protein, 51 aa, Glycine max
  Clone ID: PAT_MRT3847_66288C.1.pep
RSSVLDHTHSVFVLSSCQTGGVLTSNEKGFQSVFNALTGKKAKSARVKAVT

SEQ ID NO: 248349 - protein, 88 aa, Glycine max
  unsure (1)..(88): unsure at all Xaa locations
  Clone ID: PAT_MRT3847_66289C.1.pep
METNXFKLSLDDVEXPKGSILDLXXXQSKIALPKNTVXGTILRSDLXAXXLTEGNFRASVDLQXTXHRIXGMIXMVXQLVLPXNTGIA

SEQ ID NO: 248350 - protein, 88 aa, Glycine max
  Clone ID: PAT_MRT3847_6628C.1.pep
HRGTAAGAHHDPVSTADAAGRPRRDQRRTSGRDKDPKSHRVTAKESTIKEEPKAGPPHAGRTTAPREVTPTATKEKLAPRMAQPVRGA

SEQ ID NO: 248351 - protein, 111 aa, Glycine max
  unsure (1)..(111): unsure at all Xaa locations
  Clone ID: PAT_MRT3847_66290C.1.pep
STTNNTKHTPSLTSAVHKSSIPLPNLKTKKNAKQTASKDSHFSDALNNLIXQTIQAIKALESISPPTSDDLYKDTLIEYSIKQSDHLSLSQDMESIVXTMIHQLLSNDILH

SEQ ID NO: 248352 - protein, 97 aa, Glycine max
  unsure (1)..(97): unsure at all Xaa locations
  Clone ID: PAT_MRT3847_66291C.1.pep
VAXPRXSARXSAXAEXSXPXASSXKXXXKXXGXXLCFHCQXVLXYXXXXXXXAKLXWLTXXLXXXDAXXTXXXXAXXESEMTRFWRXWTXWXIFFLX

SEQ ID NO: 248353 - protein, 122 aa, Glycine max
  unsure (1)..(122): unsure at all Xaa locations
  Clone ID: PAT_MRT3847_66292C.1.pep
HASVKTWPSSXGASPITDMHFEDITMVDVMNPVIIDQEYCPWNQCSKQAPSKIKISKVTFKNIQGTSKTKEGVTLICSKGVPCEDVELNNVALTFNGAPIVAKCANVKPIVTGKAPACTCTA

SEQ ID NO: 248354 - protein, 73 aa, Glycine max
  unsure (1)..(73): unsure at all Xaa locations
  Clone ID: PAT_MRT3847_66293C.1.pep
KPCFRPPSRSSRLAQXLARXFYCHRSHVSQXXXSLXLDXRGKXVLXDPNNYNSTDGXXVKGETMGXAPNDKHK

SEQ ID NO: 248355 - protein, 148 aa, Glycine max
  unsure (1)..(148): unsure at all Xaa locations
  Clone ID: PAT_MRT3847_66294C.1.pep
MAANLLATLGDLERDSFVPLLSKLIGESKHPPELIPQEDRVVKHVLDILLPFSTTSSGGPLLVNHVTYHAGRGNLIIEYPGTVPGKILSFVGCHMDVVTVNPNDWDFDPFSLTVDGDKLRGRGTTDCLXHVALVTALVWKLGETKSNL

SEQ ID NO: 248356 - protein, 127 aa, Glycine max
  Clone ID: PAT_MRT3847_66295C.1.pep
MEQYEILEQIGKGAFGSALLVKHKHEKKKYVLKKIRLARQTERSRRSAHLEMELLSKLRNPFLGEDKDSWVEKGCYVFIIIGYCEGGDMAEAIKKARGGMVPEEKLCKWLGQLLMALDYLHVNHILH

SEQ ID NO: 248357 - protein, 108 aa, Glycine max
  unsure (1)..(108): unsure at all Xaa locations
  Clone ID: PAT_MRT3847_66296C.1.pep
ARNTARARFEEPLENYFQDAYXLEMKLFLYEAKQQXQMLSGERTFLNVXLTLSLTQLAXDMEGDEPTLRTILMTYKLKTHADDSEGXTTSTADLKYYIGDDSDHVMVP

SEQ ID NO: 248358 - protein, 54 aa, Glycine max
  Clone ID: PAT_MRT3847_66297C.1.pep
STCWSQRGLNWEIKRLYHGRGGTIVRSRHLRHRRRSQAWMTTSLCLESQGRRSL

SEQ ID NO: 248359 - protein, 46 aa, Glycine max
  unsure (1)..(46): unsure at all Xaa locations
  Clone ID: PAT_MRT3847_66298C.1.pep
ARGVSLMGSKPFSIYQXKNRIIRCAVQKLHTISTKRFFYFICRRLN

SEQ ID NO: 248360 - protein, 59 aa, Glycine max
  Clone ID: PAT_MRT3847_66299C.1.pep
FLKARAVHINGRPDPREAEALGLFHAIKCMEELQLENIIQEIDCKTVTDALSSKKKGID

SEQ ID NO: 248361 - protein, 61 aa, Glycine max
  unsure (1)..(61): unsure at all Xaa locations
  Clone ID: PAT_MRT3847_6629C.1.pep
GNGCRCVRESIHRNNQTKLTRFIFSNAGVSVSGATFTFVNKCDYTVWPGILGTXGTRKHRL

SEQ ID NO: 248362 - protein, 126 aa, Glycine max
  Clone ID: PAT_MRT3847_662C.1.pep
NDIFSIHVCLVIRMNPTLHPISAEEAIDVLQFIRVWRKIESVSGVGLGFVWIWNLEQSRARIVRNFPALEVDRKRSEHAKAIVYILYQVPLCAHSLLSISMSQERKTQWKGKYKYCPNLESLTKRK

SEQ ID NO: 248363 - protein, 87 aa, Glycine max
  Clone ID: PAT_MRT3847_66300C.1.pep
VPPQDLNKSPRGLVGVGPNEESPEGRKAYCPKGKKKGQKYSLSVEVLLGIETSGLSGFPAKVKKKKSRKKTEKNPHLVFPLLSLSFF

SEQ ID NO: 248364 - protein, 102 aa, Glycine max
  unsure (1)..(102): unsure at all Xaa locations
  Clone ID: PAT_MRT3847_66301C.1.pep
NDCSVDGHLMIARSCHGAGYPLVPHRMNTGYCKLSYMXDCNRDRTDGKSHISPPLERISEXCGEPSLDYIYGEQVRSDCLTVTQQAHFFASVRPDHHNRIFI

SEQ ID NO: 248365 - protein, 42 aa, Glycine max
  Clone ID: PAT_MRT3847_66302C.1.pep
ILLAVVFFFVVLFNLIVQHYLSFYFSNTLPNLWICTTSYSVQ

SEQ ID NO: 248366 - protein, 118 aa, Glycine max
  Clone ID: PAT_MRT3847_66303C.1.pep
SRILACVRIILYRTRKFVVRLMPHLYLLSRYHPYNYLVLLLTCSFIRWLAHVHPKLLHKPYLSCNFAWFVSIPLLVTLPGILYFPPPPVRIRKLPGEYPPPPPQRRRTSYSDDGKPSW

SEQ ID NO: 248367 - protein, 75 aa, Glycine max
  Clone ID: PAT_MRT3847_66304C.1.pep
LVYNKHFTFFPHMLIEILQSRSSSSIGKDSHRNPMTKTTLSSITLILNTMRIIIQWFFKHSLLQPTSLAQYPILV

SEQ ID NO: 248368 - protein, 88 aa, Glycine max
  Clone ID: PAT_MRT3847_66305C.1.pep
VDYGGKVQVPHAVGFGWIQIAIVRVYSCWPTAYRVVVESTVGSRKTQTSCVWYESIGPTSLLCMFHVSEGVHQETSCGFQQDRALETI

SEQ ID NO: 248369 - protein, 171 aa, Glycine max
  unsure (1)..(171): unsure at all Xaa locations
  Clone ID: PAT_MRT3847_66306C.1.pep
MDRENAVMGGVREGEERGVRVTRAMARAALGWVSASSRPSFKKECKNNSRTALADVSNISRKSQARGGYKKTNTKGSSNVSIQVLSTQEDVRAELAKDLSTISMVQTHDAIVERPEDTELVQPSMSVMAGPLLSMQNSMKSDEILSPSNXDIDMITEKLXLSERLGIVDID

SEQ ID NO: 248370 - protein, 401 aa, Glycine max
  Clone ID: PAT_MRT3847_66307C.1.pep
MLGTGLNFGRARGEDRFYSPAKARRSLLTMENDKLRRAQSDVAASRSVRDKSVDSGNRIPENRVGSDEAKKSGAVPSCEPVANRLSNLERFLQAITPSVPAQCLPKRTTGGLRACGAEFQPYFVLGDLWESFREWSAYGAGVPLVLNDKDSVVQYYVPYLSGIQIYSQNVKPTVKSRQLGEDSDSDFRDSSSDGSSDSEPVHGRGLRNLPHLLEEVPQWMGGLSLRDHHSLPQDGFSSDDGESVNSQGYLIFEYLERDPPYSREPLADKIMDLAFQFPELVTLRSCDILPSSWISVAWYPIYRIPTGPTLKDLDACFLTYHSLYMPMGGSQRVQAPMPHPTEMDNVHKMSLPVFGLASYKFKGSLWTPNGGHECQRSLLQGADDWLRLHQVSHPDFQFFSR

SEQ ID NO: 248371 - protein, 115 aa, Glycine max
  Clone ID: PAT_MRT3847_66308C.1.pep
MAASDPNKLMAKADKQTRLSLTRWSADWKSATVLYEQAANGFRVAKDYENAKIAYEKASKGQEMLSSPWDAAKHMESAAALAKDLRHWQEVVDFYRRASELYMECGRPQPASDAL

SEQ ID NO: 248372 - protein, 296 aa, Glycine max
  Clone ID: PAT_MRT3847_66309C.1.pep
MAASDPDKLMVKADKLTRLSLTRWSADWKSATVLYEQAANGFRVAKDYENAKIAYEKASKGQEMLSSPWDAAKHMESAAALAKDLRHWQEVVDFYRKASELYMECGRPQPASDALAKGARALEDSMSEEAIQLYTDACTILEDDGREQMAFDLYRAATNVYIKLEKYTDAASFMLRLGFAADKCNATNSQCKAYLNAIVIYLYAHDFNQAEKCYNDCSQIDAFLRSDQNRCASNLLAAYTDGDVEEIKRIAQSSVISHLDHVIIKLARKLPTGDVSSLKANKAEDEEEPLDENDLT

SEQ ID NO: 248373 - protein, 79 aa, Glycine max
  Clone ID: PAT_MRT3847_6630C.1.pep
LALARCKIVLVFLMQRFVTTPNEVTPTKKRKFRQTDGLLLKLVNANHKTLKCITPIISSLAVLICVKLKYESRSVRYSS

SEQ ID NO: 248374 - protein, 66 aa, Glycine max
  Clone ID: PAT_MRT3847_66310C.1.pep
LFPLVSLSQFKKIMEVSSFLAYKFFFFQNFGKAGFSIPQRYFPLSKTFMGLCNYNKNFKEKGLLYT

SEQ ID NO: 248375 - protein, 73 aa, Glycine max
  Clone ID: PAT_MRT3847_66311C.1.pep
DACVYTDEAVTRALLNLNGSAPEISATSSSFSGSSLKNVIGSRVPSTQTCSGSCKIAAREEKKEIEETQQTDK

SEQ ID NO: 248376 - protein, 61 aa, Glycine max
  Clone ID: PAT_MRT3847_66312C.1.pep
KLQSCVYAGICALYERKLKELNPAIRNLSYDIVDLYNFIDGLADMSALVSLSLSLSLSLKS

SEQ ID NO: 248377 - protein, 74 aa, Glycine max
  Clone ID: PAT_MRT3847_66313C.1.pep
PSSFFFFFFERNVFLKKPNGVVYINLRTWSKRHSLLKLRGPCIFFHWYTMKRCRPTPIPCCFLCHLLFKSCALR

SEQ ID NO: 248378 - protein, 68 aa, Glycine max
  Clone ID: PAT_MRT3847_66314C.1.pep
PEIKKAKVEMILSTRIHFQFLILLNNTHFSHSYLDGFHKVPYTLTCYRTRFNHTFVIQHHAQLINIHS

SEQ ID NO: 248379 - protein, 61 aa, Glycine max
  unsure (1)..(61): unsure at all Xaa locations
  Clone ID: PAT_MRT3847_66315C.1.pep
MDGNQDQAETKFRITDGSTXGPKIDPASSTIATFIETVHDQGPRDWANGPETVSEAKLIIA

SEQ ID NO: 248380 - protein, 76 aa, Glycine max
  Clone ID: PAT_MRT3847_66316C.1.pep
RIVNITNGVHKVLGPKISHTCLQVMIGALDIAIGCTYVVPETSPSMVQVVKGLLSLESRACFRNLHSPYEEPSIPV

SEQ ID NO: 248381 - protein, 62 aa, Glycine max
  Clone ID: PAT_MRT3847_66317C.1.pep
AHAPTTVCDTADHTRAAKEDTLMNMKSQQTQQALSGGETNLRNDMTQNGFSRQNKSIQATSI

SEQ ID NO: 248382 - protein, 154 aa, Glycine max
  Clone ID: PAT_MRT3847_66318C.1.pep
MVLAELGSRLQDALAKLNRTTVVDDEALNALLKEICGALLQSDVQVNLVRQLRDNVKLAVNLEDVSSGMYRRRLIQKSVVDQLVQILQPEAQPYKMKKGQSNVIMFVGLQGSGKTTSIAKFAHYYQRKGWKTCMVCADTFRAGAFDQLKQNSTK

SEQ ID NO: 248383 - protein, 52 aa, Glycine max
  Clone ID: PAT_MRT3847_66319C.1.pep
PNSLLVFKVSNISQSLQMCFQVGDVNVCIHDFDDVKEESNKAASNDKHLLQE

SEQ ID NO: 248384 - protein, 89 aa, Glycine max
  Clone ID: PAT_MRT3847_6631C.1.pep
NKTKTRKRKKQTKTNMRRIKRTTTKKITKRRRRRKNNKQYLIIIWFCLILPFYFLFFFFNFVLHIFPYSQPLVTCSNLLHLLHSHAAAL

SEQ ID NO: 248385 - protein, 72 aa, Glycine max
  Clone ID: PAT_MRT3847_66320C.1.pep
LMSSSQSSAITTWDPICTSHISDSMTSDIILPFRRYGYCAVYVRLNLCRFRCMRSDCVLKQWQSGRAPGTSL

SEQ ID NO: 248386 - protein, 34 aa, Glycine max
  Clone ID: PAT_MRT3847_66321C.1.pep
MTVSPVHDVQVTIEWLISSQECVPRTYCVLNPQN

SEQ ID NO: 248387 - protein, 121 aa, Glycine max
  Clone ID: PAT_MRT3847_66322C.1.pep
KKDESRQARNKLGEGGFGPVYKGILEDGQEIAVKRLSKTSRQGTEEFKNEVKLMATLQHRNLVKLLGCSIQQDEKLLIYEFMPNRSLDYFIFDTMQGKLLDWTRCFQIIEGIARGLLYLHQ

SEQ ID NO: 248388 - protein, 42 aa, Glycine max
  Clone ID: PAT_MRT3847_66323C.1.pep
LENLSTLNNTYSLLISTIFGKKRHAIHQSWNDHEANVLPRAE

SEQ ID NO: 248389 - protein, 55 aa, Glycine max
  Clone ID: PAT_MRT3847_66324C.1.pep
QYTLQQHLYPYAIRFTLPPFLTLKNFEGLDLGKMDNADDSGLASYVVGQIDRTLS

SEQ ID NO: 248390 - protein, 53 aa, Glycine max
  Clone ID: PAT_MRT3847_66325C.1.pep
TKNTHNYTRWVYYLHFTLTTKKGITMVCMEFYNTFRHLTSLQCAPTIKTITKI

SEQ ID NO: 248391 - protein, 100 aa, Glycine max
  unsure (1)..(100): unsure at all Xaa locations
  Clone ID: PAT_MRT3847_66326C.1.pep
IXAPRTNEATARLLAGLXELHPPSGSDRTPDPHLLDQAEQSAKRQKLKIWENLAEGEEASNGAAVENTQQEALKVTATEAQGGGHTYVQTAGEQKIAYSQ

SEQ ID NO: 248392 - protein, 78 aa, Glycine max
  Clone ID: PAT_MRT3847_66327C.1.pep
NMASSSFLCPAAFTFSQKPLQSTFLHSSSLLTLSILPKKLRKPHQLRSLIVAKSIPSYLTSSFDEFLCPIHLCSLMWH

SEQ ID NO: 248393 - protein, 41 aa, Glycine max
  unsure (1)..(41): unsure at all Xaa locations
  Clone ID: PAT_MRT3847_66328C.1.pep
NLAVSITRVVIXLFSNNEMIILISYLYSSVKTTIFNKLYLL

SEQ ID NO: 248394 - protein, 73 aa, Glycine max
  unsure (1)..(73): unsure at all Xaa locations
  Clone ID: PAT_MRT3847_66329C.1.pep
KQLSKLGHKHHHLPDVYLTTNYVQLCNLRNVSKIGDFSQRETFKARLSICXLWVCSLRTKAKFIGHTLHYCFV

SEQ ID NO: 248395 - protein, 94 aa, Glycine max
  unsure (1)..(94): unsure at all Xaa locations
  Clone ID: PAT_MRT3847_6632C.1.pep
GLAXEXPXRDHXMPFXQXLXIRXNXLXXXXXXEXXXXXXAXXHXTLXLXXXFXRHQXVCXHXXXPSXXXPQTYAXASLQMXXXRIPSXRTRXCX

SEQ ID NO: 248396 - protein, 79 aa, Glycine max
  Clone ID: PAT_MRT3847_66330C.1.pep
TTRPNKHTHIFKKHKKILQIRILLLKIYLQRRSSIQPPLQSNFSCLPLIPLKRVLTFSIATPTKIIIKKSRPSPCSITP

SEQ ID NO: 248397 - protein, 50 aa, Glycine max
  Clone ID: PAT_MRT3847_66331C.1.pep
EDSLGMLERELSTRVGRLCIKRKIEVAETEIKSVELRAVGDIQQKLKRAE

SEQ ID NO: 248398 - protein, 76 aa, Glycine max
  Clone ID: PAT_MRT3847_66332C.1.pep
KQKNNHSDRLLIRAQYLQPLTLKFFIKNTNHSSKISSAFKNSLLKHYFNTVFFTLFQLIHTIKKYHIFYLPLLQNS

SEQ ID NO: 248399 - protein, 266 aa, Glycine max
  unsure (1)..(266): unsure at all Xaa locations
  Clone ID: PAT_MRT3847_66333C.1.pep
LASGSSLLLSPKRHPLESPDGNSSNSTTDSANSHDLKPSSPNTPASDALHSSSHAPSLVVPPHALTKINDGTVDLDSSVTKLLAENIFSDADSMLQFKRGLEEASKFLPQGPQLFTGLESPTVSSEPKGRGVALKMENSFGVKNRKNHARQDDEEERSNKQSAVSAVCVEEESEISEIFDRVLLSVENVPLCAENNGSVAVGDSNTKLIEKSSLSDGGKGSIQEAREKEETVDLRTLLVLCAQAVSFSDNRTXYELLKQISSILLL

SEQ ID NO: 248400 - protein, 80 aa, Glycine max
  Clone ID: PAT_MRT3847_66334C.1.pep
NKFSNCLQENKMHIEDAQWNRTLLNTPAILNFPTLLELTTTFTLAYLKVLLIFRIYNLCWDKIMAFILIIDPKQWSSHCK

SEQ ID NO: 248401 - protein, 104 aa, Glycine max
  Clone ID: PAT_MRT3847_66335C.1.pep
CIYIYIYIYIYIYISTWGAPPLQHYKLGGRSASGSEELMLGRTSTDIKAESSIANPQAEGLKYSAYWPHPANMQDHRGYDETPKICEYIRRKNPPTRQHHRRQH

SEQ ID NO: 248402 - protein, 458 aa, Glycine max
  unsure (1)..(458): unsure at all Xaa locations
  Clone ID: PAT_MRT3847_66336C.1.pep
SLPESIVSLPHLKSLYFGCNKRMSEGGPANLNSSLINTDYGRCKGKEPRFGQVFVIGAITCGSLLIALAVGIIFVCRYRQKLIPWEGFGGKNYIMETNVIFSLPSKDDFLIKSVSIQTFTLEDIEVATERYKTLIGEGGFGSVYRGTLNNSQEVAVKVRSATSTQGTREFDNELNLLSAIQHENLVPLLGYCNENDQQILVYPFMSNGSLQDRPYGEPAKRKILDWPTRLSIALGAARGLAYLHTFPGRSVIHRDVKSSNILLDHSMCAKVADFGFSKYAPQEGDSNVSLEVRGTAGYLDPEYYKTQQLSEKSDVFSXFGVVLLEIVSGREPLDIRXRIECSLXEWAKPYVRASKMDEIVDPGIKGGYHAEAMWRVVEVALQCLEPFSAYRPNMVDIVRELEDALIIENNASEYMKSIDSLGGSNRYSIVIEKRVLPSTSSTAESTITTQALSHPQPR

SEQ ID NO: 248403 - protein, 126 aa, Glycine max
  Clone ID: PAT_MRT3847_66337C.1.pep
IFRVSFSHSLLSLFSHYRFDPIPLVSFLWIPIFFSRKQKKEKINNGRVPDAECDNGDVQCELPRGLATGAAGDRVEACAVAAKQQRREVPFGFFSTVHITNKGCSPRKRTTLVMLESYRKVPLLDS

SEQ ID NO: 248404 - protein, 52 aa, Glycine max
  Clone ID: PAT_MRT3847_66338C.1.pep
YLLLHLLLHHNGEDNALLKLIHSKTIPEAYFEKSDFLVLEEPLLQSKGHYLP

SEQ ID NO: 248405 - protein, 64 aa, Glycine max
  Clone ID: PAT_MRT3847_66339C.1.pep
HENNSFGLGGRKNTMIFLGFHPRSQEKKFPRHNGTTPAKRQAQRPGPHGGNTIMWHALTGLTDP

SEQ ID NO: 248406 - protein, 531 aa, Glycine max
  unsure (1)..(531): unsure at all Xaa locations
  Clone ID: PAT_MRT3847_6633C.1.pep
MDSACATLNGRHLAKVSEGIGRNRTSGFWGESTRGSVNTKRFLSVQSCKTSRTNRNLRNSKPGSGIARAVLTSDIDEDSMAFQGVPTFEKPEVDPKSVASIILGGGAGTRLFPLTGRRAKPAVPIGGCYRLIDIPMSNCINSGIRKIFILTQFNSFSLNRHLSRAYSFGNGMTFGDGFVEVLAATQTPGEAGKKWFQGTADAVRQFIWVFEDAKNKNVEHILILSGDHLYRMDYMDFVQRHVDTNADITVSCVPMDDSRASDYGLMKIDKTGRIIQFAEKPKGSDLKAMRVDTTLLGLLPQEAEKHPYIASMGVYVFRTETLLQLLRWKGSSCNDFGSEIIPSAVNEHNVQAYLFNDYWEDIGTIKSFFDANLALTEQPPKFEFYDPKTPFFTSPRFLPPTKVXKCKIVDAIISHGCFLRECSVQHSIVGVRSRLESGVELQDTMMMGADYYQTEYEIASLVAEGKVPIGVGANTKIRNCIIDKNAKIGRNVIIANTDGVQEADRAKEGFYIRSGITVTLKNATIKDGTVI

SEQ ID NO: 248407 - protein, 101 aa, Glycine max
  Clone ID: PAT_MRT3847_66340C.1.pep
VLQTSPFPSYPQSCTIQSIKLYINLFSQSVFSLSLQSKFIANANKKKRKPLKPNQKKSPWGQRDPNTTSTPHQKPNPYRVSHSGHPRHIPIRPRTFSSQHS

SEQ ID NO: 248408 - protein, 90 aa, Glycine max
  unsure (1)..(90): unsure at all Xaa locations
  Clone ID: PAT_MRT3847_66341C.1.pep
QVITLSITGALNAVLTEEHRKEICRYLYNHQXEGPNDGQGEMEKARDLILGHGGATYITSWGKMWXSVLGVYEWSGNNPLPPEIWLLPYM

SEQ ID NO: 248409 - protein, 55 aa, Glycine max
  Clone ID: PAT_MRT3847_66343C.1.pep
MGSRFPSHQLSNGLYVSGRPEQPKERTPTMSSVAMPYTGGDIKKSGELGKMFDIP

SEQ ID NO: 248410 - protein, 53 aa, Glycine max
  Clone ID: PAT_MRT3847_66344C.1.pep
PIHISRELITPYQHTSPQVHQVVTHFPIPFLSHNQKIPSTSPDRGIASCTFPR

SEQ ID NO: 248411 - protein, 88 aa, Glycine max
  Clone ID: PAT_MRT3847_66345C.1.pep
HIDHFYFFFVSLSYARTDPELLKDIVADVLQKLPPRYQNQRKGLVGIEEHCKHIESLLKIGPTEVRTLGIWGMGGIGKTALATTLYDK

SEQ ID NO: 248412 - protein, 64 aa, Glycine max
  Clone ID: PAT_MRT3847_66346C.1.pep
IRSNSTQTRDSAYTCSHYCFVWRVLLGAPSILKKWQNCPCLFFLLRINLIRKRKNNNLLIIQHI

SEQ ID NO: 248413 - protein, 76 aa, Glycine max
  Clone ID: PAT_MRT3847_66347C.1.pep
SRATRSSSHPRPLPRTSRRNFSWLHRACCFLPFLAIRFRVGQSLIQSQQVNSTAISAQYLQTNTLLYIIIIQHYNR

SEQ ID NO: 248414 - protein, 51 aa, Glycine max
  Clone ID: PAT_MRT3847_66348C.1.pep
SLYSPTELNSIFHHHILYLMIFCLSYKSYDLNDPIILTPASYVLTIIIGHL

SEQ ID NO: 248415 - protein, 75 aa, Glycine max
  Clone ID: PAT_MRT3847_66349C.1.pep
WFTILPSFSLSRGLPCRVYLLCLAEFLSSLEGGWLMFRSRRLPIVCHWVLLSVPLGSWQYHFWCEHGILCVNPVT

SEQ ID NO: 248416 - protein, 109 aa, Glycine max
  Clone ID: PAT_MRT3847_6634C.1.pep
TWACIIFQDAKNKNVEHILILSGDHLYRMDYMNFVQRHVDTNADITVSCVPMDDSRASDYGLMKIDKTGRIIQFAEKPKGSDLKAMRVDTTLLGLSPQEAEKNLILHHG

SEQ ID NO: 248417 - protein, 42 aa, Glycine max
  Clone ID: PAT_MRT3847_66350C.1.pep
PFTLCLCVLEWLALVSFKLHYWSLFLVQPGPEFLEVTPVGPG

SEQ ID NO: 248418 - protein, 40 aa, Glycine max
  Clone ID: PAT_MRT3847_66351C.1.pep
SHVVCGFALLWPSASLNEYWTTVFLCPSYLQHQSHVCLIQ

SEQ ID NO: 248419 - protein, 39 aa, Glycine max
  unsure (1)..(39): unsure at all Xaa locations
  Clone ID: PAT_MRT3847_66352C.1.pep
SGGNVIYCVFEKKCLVCWCKKKEXKKNKKAAGLEDXNLR

SEQ ID NO: 248420 - protein, 76 aa, Glycine max
  Clone ID: PAT_MRT3847_66353C.1.pep
AIWHCSFFPFVPSVLVRFLPAIRSSVRTSIPVSLNQTLQIFFPTIIFFHEAAFLLAQYHMSRFIAFLLSSSPVDVS

SEQ ID NO: 248421 - protein, 109 aa, Glycine max
  unsure (1)..(109): unsure at all Xaa locations
  Clone ID: PAT_MRT3847_66354C.1.pep
DVDVLASARLVRRNHVRQSVLDSTAHGDAKYSEAFCLSQEEAIHVVFREAWLIYFXRQRFISXEEEDIAEERFQFRIARSGQSPSSHHSVYVKLGLLEFSKLSIAPPLW

SEQ ID NO: 248422 - protein, 69 aa, Glycine max
  Clone ID: PAT_MRT3847_66355C.1.pep
SKMSNLPSRSLGENDVQKLSPKRSGGQVASSPPFFCGSPPSRASNPVIQDEQFGSNGHEKFWCIFLGTP

SEQ ID NO: 248423 - protein, 139 aa, Glycine max
  Clone ID: PAT_MRT3847_66356C.1.pep
MSNSRNTHWCYSCRRPVRLGRRDVVCPSCNLGFVHELNDIVHVNPFDLFGMDNNEERDQRLGLMETFSAFMRHQMADRGRSHDIRVRTDSNPEHSASFAPLLIFGGHIPFRLSRHGGFEALFNGAPRIGLTQGNTGDYF

SEQ ID NO: 248424 - protein, 309 aa, Glycine max
  Clone ID: PAT_MRT3847_66357C.1.pep
MSNSRNTHWCYSCRRPVWLGRRDAVCPSCNEGFVHELNDMVHVNPFDLFEMDNNEERDQRLGLMETFSAFMRHQMADRGRSHDIRARTDSNPEHSASFAPLLIFGGHIPFRLSRHGGFEALFNGAPGIGLTQGNTGDYFIGPGLEELFEQLSANNRQGPLPASRSSIDAMPTIKIVQRHLRSDSHCPVCKDKFELGSKARQMPCNHLYHSDCIVPWLVQHNSCPVCRQELPPQGLSSSNGGANGRSRSARVSSSGRESHGRRNPFSFLWPFRSSHSSSNDEATGSSTPTPTIPENSHHHHAGYSGWPFE

SEQ ID NO: 248425 - protein, 57 aa, Glycine max
  Clone ID: PAT_MRT3847_66358C.1.pep
TGAWDKNDKIQELSGNENELDEKTYGSMPCKAWATAILSSQGKPYGGYADKSIKDDL

SEQ ID NO: 248426 - protein, 59 aa, Glycine max
  Clone ID: PAT_MRT3847_66359C.1.pep
RLRRRQKGSIGSSKLFCVPLLLRRQKPTKIYRVLLNNARTPPETKYASKSTLTEETYTK

SEQ ID NO: 248427 - protein, 418 aa, Glycine max
  Clone ID: PAT_MRT3847_6635C.1.pep
MMKRRFLLVLLVLYVTVEFYVEADGSGGFVRTRGVQLMLNGSPYYANGFNAYWLMYLASDPSQRNKVSSVFQQASNHGLNIARTWAFSDGGYQPLQYSPGSYNYQMFQGLDFAIAEARKYGIKMVLSLVNNYENMGGKKQYVEWAKSQGQSINSEDDFFTNPVVKGYYKNHIKAVLTRRNSITGVAYKDDPTIMAWELMNEIRCPSDQSGRTVQAWITEMASYLKSIDGNHLLEAGLEGFYGQSKPQSNPNFNVGTDFIANNQIPGIDFATVHSYPDQWLSSSSYEDQISFLGRWLDEHIQDAQNTLHKPLLFAEFGISTKSYGGNSTPRDRLFNTVYSAIYSSASSGGAAVGGLFWQLMVQGMDSYRDGYEVVLDESPSTANLIAQESQKLNRIRKMYARLRNIEKWNEAKQIRGGN

SEQ ID NO: 248428 - protein, 159 aa, Glycine max
  Clone ID: PAT_MRT3847_66360C.1.pep
RGIANRAVGETQMNVASSRSHCIYIFTIQQEFLSRDKRTRFGKLILVDLAGSEKVEKTGAEGRVLEEAKTINKSLSALGNVINSLTCGLPGKASHIPYRDSKLTRILHDALGGNARTALLCCCSPSAFNASESLSTLRFGARAIHIKESLVSMSVKNVT

SEQ ID NO: 248429 - protein, 81 aa, Glycine max
  Clone ID: PAT_MRT3847_66361C.1.pep
FACPFHGRHRSRCVRNSRRSSRRRRRSRSRRRSSSGGRWRTHDLLYNHIKNRINEKRISVYVCVCVSVCVAVCGCVCVCVS

SEQ ID NO: 248430 - protein, 110 aa, Glycine max
  Clone ID: PAT_MRT3847_66362C.1.pep
PPFTNIGDNLFYRQPLFNHSLLYCCHSATPPPTSSPPYPYLSTTSYTILPTPLPHTLRNVPKYIYAYLISRPAPYLVPHLSHKLAFLLLFFTTRPPPPPKQALLLHMYHA

SEQ ID NO: 248431 - protein, 253 aa, Glycine max
  Clone ID: PAT_MRT3847_66363C.1.pep
MVGYGKKLRELQIQEWKGYYINYKLMKKKVKRYVEQMEVGAQNRHNVLRDFSMLLDNQIEKIVLFLLEQQGVLAHRLSDIGQEHHALFQQPNSIIISELQEAYRDAGRDLLRLLNFGEMNAIGLRKILKKFDKRFGYKFTDYYVKTRANHPYSQLRQVFRHVGIGAVVGVLSHGLADLQDLQQSLGSYICIYDQPSYTHQDPILDSIKEAVARLSNSTNFLQFLGRHAFIMKEELPFPSEDHIVDERYHFMSL

SEQ ID NO: 248432 - protein, 106 aa, Glycine max
  Clone ID: PAT_MRT3847_66364C.1.pep
MGGYCKKLRELQIQEWKGYYINYKLMKKKVKRYVEQMEVGAQNRHNVLRDFSMLLDNQIEKIVLFLLEQQGVLAHRLSNIGQDHHTLFQQSNSINISELQEHIETL

SEQ ID NO: 248433 - protein, 48 aa, Glycine max
  Clone ID: PAT_MRT3847_66365C.1.pep
SWPLLSRVVLSRPFVCWAVVLEYALSCLLRLSLLCIGRFVLACVWARA

SEQ ID NO: 248434 - protein, 147 aa, Glycine max
  Clone ID: PAT_MRT3847_66366C.1.pep
SVFEASKMTCAYIKWAVSLSIALGNVADDTINFAALAHKPVQFGEIQEKVVLKFSQEEFLTAWSTQVRPTTTLLADGCPYLHAMVHERTVCTIPGDSVIGGKGTTINNMCAYGLNPGISSSRLLGTIPQSISQQTVWNQMATARTPL

SEQ ID NO: 248435 - protein, 103 aa, Glycine max
  unsure (1)..(103): unsure at all Xaa locations
  Clone ID: PAT_MRT3847_66367C.1.pep
GGNHLMRPRHVFGYFVKRIRGPPLSGFWAPPPPPXXGFFFVSXWLFXXPPPFGGKFSLFLLAPWICVPGSGFKLFGIFVGLGACGCEKKKKKKKKKKFPKGLS

SEQ ID NO: 248436 - protein, 256 aa, Glycine max
  Clone ID: PAT_MRT3847_66368C.1.pep
TRSFDALVPCDHCNGQGYPLDAIPKVCPTCRGSGRVTIPPFTSTCITCKGSGRIIKDSCLTCGGSGAVEGVKEVKVTIPAGVDSGDTIHVPEGGNAAGSGGQPGSLYIKIKVAEDSIFVRDGADIYVDSNISFTQAILGGKVEVPTLSGKMQLKIPKGVQHGQLLVLRGKGLPKHGFFVHHGDQYVRFRVNLPVEINERQRAILEELAKKEIKEGSNSKFEGNWWQQILEHTTGPKFMLELSMLILFLIFINKMLS

SEQ ID NO: 248437 - protein, 54 aa, Glycine max
  Clone ID: PAT_MRT3847_66369C.1.pep
WNYAMGACLSKICLVDLRMQYNCLFYTREYLRWMCSVRLVIRIIILHEHGASMN

SEQ ID NO: 248438 - protein, 291 aa, Glycine max
  Clone ID: PAT_MRT3847_6636C.1.pep
ENFIPDVRFTGTSSDLRYDYGKFYASKSFFDYAKNRRILWGWVNESDSTQDDIEKGWAGLQSIPRQVWLDKSGKRLVQWPIEEVEKLRDKHISIMGEKLVYGSNLEVSGITASQADVEVLFELPELQSAEFLDPDGVDPQLLCSQEDASRSGIIGPFGLLALASKDLKEHTAIFFKIYRAPNRYVGLMCNDQRRSSFRHDLDKTAYGTIFDIDPNLKNISLRSLIDHSIIESFGDEGRVCITSRVYPSLAIDKDAHLYAFNNGSQSVVVSKLNAWSMKQAEIGREGNISYT

SEQ ID NO: 248439 - protein, 63 aa, Glycine max
  Clone ID: PAT_MRT3847_66370C.1.pep
FINCGYHQADIAYVSFLERFQIVFSEIFKHDITAGRPKLATWIQVRNKIDGYKQTQVDREEYL

SEQ ID NO: 248440 - protein, 133 aa, Glycine max
  Clone ID: PAT_MRT3847_66371C.1.pep
GLKEEAGSVWEVAAQKNVYPDAIKEKSTCYWLINLHVMSDGTAVTALFRTLAWFRRQMLAFGVGPNRIDIITGWGRRSRVTGFFLVRQAVQELLHVFSFPFFPENGNSGCFVGCGEPLSQWLVHSYVERMHLL

SEQ ID NO: 248441 - protein, 84 aa, Glycine max
  Clone ID: PAT_MRT3847_66372C.1.pep
FRGGLPPTQSGGRIDYKNLGLISRFFSGQGKIFSRRVNRLPLNPPRFIPIALNQARILSLFPFFNNENPFEKSGSPARTSPLRG

SEQ ID NO: 248442 - protein, 65 aa, Glycine max
  Clone ID: PAT_MRT3847_66373C.1.pep
QWIITYDKNRMYPIRESHQWSGHNVTVTRMPEQVSHQRRLPGSEAANLSTNARREGNRLTSDKFL

SEQ ID NO: 248443 - protein, 63 aa, Glycine max
  Clone ID: PAT_MRT3847_66374C.1.pep
MVYVKAQKSKAYFKRYQVKFKRRREGKTDYRARIRLINQDKNKYNTPKYRFVVRFVSFCLLIS

SEQ ID NO: 248444 - protein, 74 aa, Glycine max
  Clone ID: PAT_MRT3847_66375C.1.pep
MDHGKHFSGSGSGINKNESKDRKKLLMSRQIVLGNEKEDINKMADAFINNFRKQLKIERENSFKRFQDMIHGGA

SEQ ID NO: 248445 - protein, 171 aa, Glycine max
  Clone ID: PAT_MRT3847_66376C.1.pep
RDGCETTTEGGTPTFSILFSATGVIFLSWMSFQEIIEFLNFLYAVGMLLEFAAFITLRLKKPNLYRPYRVPLSTFWATMLCLPPALLLILVMCLASLTTFFVSGAVILVGFILYPFLVQAKNNNWILFEEATGWQQCHSELTDQENSGVELLVSSPLASVEKHFSLMQCDS

SEQ ID NO: 248446 - protein, 60 aa, Glycine max
  Clone ID: PAT_MRT3847_66377C.1.pep
ECNMCYLIFLLYTRYRERGAGASADLDPRTEVEAIESITFKFLQRVCRHFPFTYIESAHL

SEQ ID NO: 248447 - protein, 48 aa, Glycine max
  unsure (1)..(48): unsure at all Xaa locations
  Clone ID: PAT_MRT3847_66378C.1.pep
GXKXPHKLXXXXSSHYSXKNLNKKSTLKYHKIFXIKSYLYTNLIHQII

SEQ ID NO: 248448 - protein, 56 aa, Glycine max
  Clone ID: PAT_MRT3847_66379C.1.pep
SKQFKHLNSNDRREKIIAQPSFVSYFSYKKGEICKLTMSIKKLQNCQILTLSCYIK

SEQ ID NO: 248449 - protein, 187 aa, Glycine max
  unsure (1)..(187): unsure at all Xaa locations
  Clone ID: PAT_MRT3847_6637C.1.pep
ASRGSESEFFSGDRAVDADGGGASLASKLRSLSSDCFVHLLSAIFLIVQAHLVRAAEVKKAIEWILSNRDGHYAADSVVAAIAHGAAAAETSQESESHGTTFLPYSAQRSVAKGSSFQGKAIDSMSSSNMSKNFRADILRENAEAVFAACDAAHGRWAKLLGVRAILHPXLKLLEFLTIYNITQEFI

SEQ ID NO: 248450 - protein, 33 aa, Glycine max
  Clone ID: PAT_MRT3847_66380C.1.pep
NVQPPLDLKTINYSYCSLAMFWEGGINKNFTQA

SEQ ID NO: 248451 - protein, 61 aa, Glycine max
  unsure (1)..(61): unsure at all Xaa locations
  Clone ID: PAT_MRT3847_66381C.1.pep
XGKELGIHFSRIFSMVETLREKKNFMCRDIYGLNGSSWEIRQRTTSNNICRFETTNIGWDG

SEQ ID NO: 248452 - protein, 34 aa, Glycine max
  Clone ID: PAT_MRT3847_66382C.1.pep
MSLVANEDFQHILRVLNTNVDRKQMIMLAMTPNM

SEQ ID NO: 248453 - protein, 233 aa, Glycine max
  unsure (1)..(233): unsure at all Xaa locations
  Clone ID: PAT_MRT3847_66383C.1.pep
TRPEEAKKCNRRCLVFKVDYEKEYDSVRWDFVPNXIRWIDDCLKSTSISILVNGSPTTEFTPQRGLRQGDPLVPFLFNIVAESLTSLMREAXEKDLFEGFTVGRNVEISILQYADDMIFFGTTMMTNVRAIKVMXGLKLNFAKSSFGTTGMPEQWMNNAASYLNCRLLSVIFSYLGIPIRTDSWCSEISNPIVKXVRKLSKWKHNYLFFEGRETLIESVLNLISIYFXSFFRA

SEQ ID NO: 248454 - protein, 152 aa, Glycine max
  Clone ID: PAT_MRT3847_66384C.1.pep
MLENARVLKEGIERTGRFNIISKDIGVPLVAFSLKDSSQHTVFEIADHLRKFGWIVPAYTMPPDAQHIAVLRVVIREDFSRGLAERLAADIEKVVKLLDTLPSPLTTKVAHITAITSETSETSEKVKSAIETQKEIALYWKRLVDGKRLGAC

SEQ ID NO: 248455 - protein, 63 aa, Glycine max
  Clone ID: PAT_MRT3847_66385C.1.pep
WSRIILHCVVVMEFARQVCVAVIKKLLFYSQIVNLIKKVFRIYECCVSICYFSKLSPWLQCAF

SEQ ID NO: 248456 - protein, 499 aa, Glycine max
  Clone ID: PAT_MRT3847_66386C.1.pep
MVLTSTATHPDEQDQSLNYTFASRYVREPIPKFKMPEKSIPKDAAYQIINDELMLDGAPRLNLASFVTTWMEPECDKLIMASLNKNYVDMDEYPVTTELQNRCVNIIANLFHAPISDDETAVGVGTVGSSEAIMLAGLAFKRKWQTKRKAEGKPYDKPNIVTGANVQVCWEKFARYFEVELKEVKLKEGYYVMDPAKAVEMVDENTICVAAILGSTMTGEFEDVKLLDELLTKKNNETGWDTPIHVDAASGGFIAPFLYPDLEWDFRLPLVKSINVSGHKYGLVYPGVGWVVWRSKDDLPDELVFHINYLGSDQPTFTLNFSKGSSQIIAQYYQLIRLGFEGYKNIMENCWENARVLKEGIERTGRFNIISKDIGVPLVAFSLKDSSQHTVFEIAHHLRKFGWIVPAYTMPPDAQHIAVLRVVIREDFSRGLAERLAADIEKVVKLLDTLPSPLTTKAVHITAITSETGEKIKKAAIETQKEIAFYWKRLVDGKRLGAC

SEQ ID NO: 248457 - protein, 67 aa, Glycine max
  Clone ID: PAT_MRT3847_66387C.1.pep
ERWGVLAGRATVGVGAREPSGGLWGGTYNLRNTGPEEVYIKVHYWGVCASELHQSKNELGVCNYRMG

SEQ ID NO: 248458 - protein, 40 aa, Glycine max
  Clone ID: PAT_MRT3847_66388C.1.pep
PDTYRATCINPQVIVLLQAVCLWGDLLVHPQASLCAGSLR

SEQ ID NO: 248459 - protein, 317 aa, Glycine max
  Clone ID: PAT_MRT3847_66389C.1.pep
AHIVILYCLVFLAADMRQVRDAEARVPLPTNEVQTVGQAPNQFIQWPRRLVKSISVKTIVESSKDVRHKRLEPQLGPLERLLIIVSKIRKDHVQLPWDPDVLSKPSTMSFHIYRRDIFELCMGSEMLNISVIQLWLMYLHSLCTDKGNAHIYGFMDPQSIQSVGNNATEVQGYLQSRLHERKKQCYLAPYLHSDHWQLLIICPKQNVVVLLCSLHKKTINKEMKTIVNLAMDEYQRLVGSQSRSRRKKPTWILPRCQTQSKGYECGYYVMKQMFTVVTVDIVDSWKQLFNNSGPFPEEDIADIQQRWAAFLLQISNL

SEQ ID NO: 248460 - protein, 60 aa, Glycine max
  unsure (1)..(60): unsure at all Xaa locations
  Clone ID: PAT_MRT3847_6638C.1.pep
VSHAEVLELARNASKDMKSIRKTPRRXQQTICLKEELETLIKGSIAGVGQYLGIHKSMIY

SEQ ID NO: 248461 - protein, 111 aa, Glycine max
  unsure (1)..(111): unsure at all Xaa locations
  Clone ID: PAT_MRT3847_66390C.1.pep
LVLHTLTLATDPATAYTFGCIQEATGSSLPPQGLMCLGRRPLLLLAQTQKLYQSTLSNCLPTFKTLNFSXSLRLGPVAHATRIKYTSLIKNPRRSSLYYVTYLAMRAYHEN

SEQ ID NO: 248462 - protein, 114 aa, Glycine max
  Clone ID: PAT_MRT3847_66391C.1.pep
SKIFRVSLCSLPHNPIIREMKTPVDLAMDEYQRLVGSQSRSRRKKPTWILPRCQTQTEGYECGYYVMKQMLTVVTVDIVDSWKKIFNSSGPFPEEDIADIQQRWAAFLLQISNL

SEQ ID NO: 248463 - protein, 77 aa, Glycine max
  Clone ID: PAT_MRT3847_66392C.1.pep
WLLRKLYWNTKGGCYFSAQNYNIDPVYGKTFPLAVLNHHKIAAISHMTPQTCCLLQWFSGPGGMQKQSQLVLDNCPG

SEQ ID NO: 248464 - protein, 41 aa, Glycine max
  Clone ID: PAT_MRT3847_66393C.1.pep
KKPLRYTTLRALISLFFSHQIKNIHALCAALFINNPFTMST

SEQ ID NO: 248465 - protein, 226 aa, Glycine max
  unsure (1)..(226): unsure at all Xaa locations
  Clone ID: PAT_MRT3847_66394C.1.pep
MAMVKRSIGVCKRLSGSSSCLSTSTATSDNDIARRLQLPPFDYKPRPYKGPLADEVFAKRKKFLGPSLFHFYQKPLNIVEGKMQYLFDENGRRYLDAFAGIVTISCGHCHPEVLNAIMEQSKLLQHTTTIYLHHAIADFAEALASKVPGNLKVVYFVNSGSEANDLAMLMARLYTGNMGMISLRNAYHGGSSSTIGLTAMNTWEYPIPXGEVHHIMNPDPYRGIFG

SEQ ID NO: 248466 - protein, 424 aa, Glycine max
  Clone ID: PAT_MRT3847_66395C.1.pep
MALSILYLSLSLLTVTVQSSKPEAPFACDFSNPSSRSYPFCNPKLPIPQRTKDLLSRLTLDEKLSQLVNTAPPIPRLGIPAYQWWSEALHGVSGVGPGILFDNNSTISSATSFPQVILTAASFDSRLWYRIGHAIGIEARAIFNAGQANGLTFWAPNINIFRDPRWGRGQETAGEDPLLTSRYAVSFVRGLQGDSFKGAHLLASACCKHFTAYDLDNWKGVDRFVFDARVSLQDLADTYQPPFQSCVQQGRASGIMCAYNRVNGVPNCADYGLLTQTARNQWDFNGYITSDCGAVGFIHDRQRYAKSPEDVVADVLRAGMDLECGSYLTYHAKSAVLQKKLGMSEIDRALQNLFSIRMRLGLFDGNPTRLSFGLIGSNHVCSKEHQYLALEAARNGIVLLKNSPTLLPLPKTSPSIFLAVIGPH

SEQ ID NO: 248467 - protein, 49 aa, Glycine max
  Clone ID: PAT_MRT3847_66396C.1.pep
SFLRINEKSLQAKAAVEYTTQNCNKPKIEKSNSTHVEENKINTKSQQQY

SEQ ID NO: 248468 - protein, 101 aa, Glycine max
  unsure (1)..(101): unsure at all Xaa locations
  Clone ID: PAT_MRT3847_66397C.1.pep
QLCGYSPSTPCLSQAPSQGVIAPPLXCVLLFCLIRKRSTSKAGNGQATEGRAAXYEDRKRSPSSCWWXMLKQVGRLEGNXVHCDGPMAITADDLLCATAEI

SEQ ID NO: 248469 - protein, 196 aa, Glycine max
  unsure (1)..(196): unsure at all Xaa locations
  Clone ID: PAT_MRT3847_66398C.1.pep
MASSNGRKATEIFQGQAILYRCMFAFLDSMCLKSIIELGIPDIIHKHGQPITLSELVSILNVPPARVGHVQSLMRYLAHHGFFERLRIHHEKESYALTAASELLDKSSELCLTPMAEKVLDPTLSASFHQMKKWVYEEDLXAFDISLGCSLRDFLNKHPSYKXLFNEAMTRDSQVSNLALRDCXWKFEGLESIVDV

SEQ ID NO: 248470 - protein, 851 aa, Glycine max
  unsure (1)..(851): unsure at all Xaa locations
  Clone ID: PAT_MRT3847_66399C.1.pep
MVVAVEKTNLTSQSQCFNRVSDKKKERCKTHMNNVNPCCFLFLLCVWSLVVLPSCVRPVLCEDEGWDGVVVTASNLLALEAFKQELVDPEGFLRSWNDSGYGACSGGWVGIKCAQGQVIVIQLPWKGLRGRITDKIGQLQGLRKLSLHDNQIGGSIPSTLGLLPNLRGVQLFNNRLTGSIPLSLGFCPLLQSLDLSNNLLTGAIPYSLANSTKLYWLNLSFNSFSGPLPASLTHSFSLTFLSLQNNNLSGSLPNSWGGNSKNGFFRLQNLILDHNFFTGDVPASLGSLRELNEISLSHNKFSGAIPNEIGTLSRLKTLDISNNALNGNLPATLSNLSSLTLLNAENNLLDNQIPQSLGRLRNLSVLILSRNQFSGHIPSSIANISSLRQLDLSLNNFSGEIPVSFDSQRSLNLFNVSYNSLSGSVPPLLAKKFNSSSFVGNIQLCGYSPSTPCLSQAPSQGVIAPPPEVSKHHHHRKLSTKDIILIVAGVLLVVLIILCCVLLFCLIRKRSTSKAGNGQATEGRAAXYEDRKRSPSSCWWXMLKQVGRLEGNXVHFDGPMAFTADDLLCATAEIMGKSTYGTVYKAILEDGSQVAVKRLREKITKGHREFESEVSVLGKIRHPNVLALRAYYLGPKGEKLLVFDYMSKGSLASFLHGGGTETFIDWPTRMKIAQDLARGLFCLHSQENIIHGNLTSSNVLLDENTNAKIADFGLSRLMSTAANSNVIATAGALGYRAPELSKLKKANTKTDIYSLGVILLELLTRKSPGVSMNGLDLPQWVASVVKEEWTNEVFDADLMRDASTVGDELLNTLKLALHCVDPSPSARPEVHQVLQQLEEIRPERSVTASPG

SEQ ID NO: 248471 - protein, 102 aa, Glycine max
  unsure (1)..(102): unsure at all Xaa locations
  Clone ID: PAT_MRT3847_6639C.1.pep
MTWKSRGDLLPKSVMSQKWMIFLCVGSFCAGXWTIPEPKGLARTTAMEAEKLNVVSEGCNSRILQEKEVKRETKGIYSEVFKTQNAIQTXLDKTISKLEMEL

SEQ ID NO: 248472 - protein, 46 aa, Glycine max
  Clone ID: PAT_MRT3847_663C.1.pep
SLCNYSALINIMNEETLLDAFLPYLQVQHIHTTALHCSQEFVCFLN

SEQ ID NO: 248473 - protein, 48 aa, Glycine max
  Clone ID: PAT_MRT3847_66400C.1.pep
GLGHAVLASILWFHAKSVDLKSKASITSFYMFIWKLFYAEYLLIPFVR

SEQ ID NO: 248474 - protein, 81 aa, Glycine max
  unsure (1)..(81): unsure at all Xaa locations
  Clone ID: PAT_MRT3847_66401C.1.pep
LEPLKFSQEEFLTAWSTQVRAASTMMADGCPYLYAMVHDSSVSTIPGDFAIGVKXTTMNNMCAXYGFNPGISGSRLYGTIP

SEQ ID NO: 248475 - protein, 266 aa, Glycine max
  Clone ID: PAT_MRT3847_66402C.1.pep
MMALNSLSPLSINSLHVSSSSTSKISHSHSKSFPVVVCQINSNRDHRQESTKWGKVVSATLAAAVIAFSSDMSALADLNKFEAEMRGEFGIGSAAQFGSADLRKAVHVNENFRRANFTAADMRESDFSGSTFNGAYLEKAVAYKANFSGADLSDTLMDRMVLNEANLTNAILLRTVLTRSDLGGAIIEGADFSDAVLDLPQKQALCKYASGTNPVTGVSTRVSLGCGNKRRNAYGSPSSPLLSAPPQKLLDRDGFCDDATGLCDAK

SEQ ID NO: 248476 - protein, 51 aa, Glycine max
  unsure (1)..(51): unsure at all Xaa locations
  Clone ID: PAT_MRT3847_66403C.1.pep
LKIRNNTFILSARFAFVXLXXXXLIPTRFFXXFSXTPFPKSXXXFHQQLFR

SEQ ID NO: 248477 - protein, 150 aa, Glycine max
  unsure (1)..(150): unsure at all Xaa locations
  Clone ID: PAT_MRT3847_66404C.1.pep
MKALYRSSLLLLFFLSVCSASSSSVPTLQLLSFKNSLPNPTLLPNWLPNQSPCSFTGITCNDTQHLTSIDLSGVPLTTNLTVIATFLLTLDNLQSLSLKSTNLSGPAAMPPPLSHSKCASTLTSLDLSQNALSGSLNDMXVCLLLLQPAM

SEQ ID NO: 248478 - protein, 198 aa, Glycine max
  Clone ID: PAT_MRT3847_66405C.1.pep
MLAFPYGVEKLMTFSFFTAIRASHYRTLTQATASDKGLIITTPDSWFVKIVSTLFLCSNSLDDRFLGYFREHLTPSHVLEVVKRVNNPNLGFKFFRFTRERVSMSHSFWTYNMLLRALCQAGLHNSAKLLYDSMRADGQLPDSRLLGFLVSSFALADRFDVSKELLAEAHCKGGQVDVIGYNNLLNILVKHNRLDDAL

SEQ ID NO: 248479 - protein, 555 aa, Glycine max
  unsure (1)..(555): unsure at all Xaa locations
  Clone ID: PAT_MRT3847_66406C.1.pep
MAETEDKTLQASPMNETKKMKKNKNKKKSDKKRPREIATEERPEEEENENNTDSDGESSKKKKKKKVEGESEVKEKKVKNNGGSGIMSTESFESLGLSEPTYKAIMDMGFHHMTQIQARAIPPLLIGKDVLGAARTGSGKTLAFLAPALELLYNVKFTPRNGAGVIVICPTRELAIQTHAVAKELLKYHSQTLGLVIGGSARKIEAERIAKGINLLVGTPGRLLDHLQNTKGFIYKNLKCLMIDEADRILEANFEEEMKQIIKILPKNRQTALFSATQTKKVEDLARLSFQTTPIYIDVDDGRTKVTNEGLLQGYVVVPCAKRFIVLYSFLKRHQSKXVMVFFSSCNSVKFHADILNLIQLDCLNIHGKQKQHARTTTFFNFCKAEKGILLCTDVAARGLDIPDVDWIVQYDPPDEPKEYIHRVGRTARGEGGKGNALLFLIPEELQFLHYLKAAKVPVKEYAFDHKKLANVQSQLEKLVAGIYHLNVMAKDAYRSYILAYNSHSMKDIFNVHRLDLQAVAASFCFSNPPKVNLNIDSSASKHRKKIRKVEGKRR

SEQ ID NO: 248480 - protein, 64 aa, Glycine max
  Clone ID: PAT_MRT3847_66407C.1.pep
TKGNALIIYHPMLMELAFVMIACPRLDTVHAAVLTLFSAGTLSQKIIGREPNADLTSNAINKAP

SEQ ID NO: 248481 - protein, 170 aa, Glycine max
  Clone ID: PAT_MRT3847_66408C.1.pep
EERQKKTRDIATEERPEEEENENNTDSDGESSKKKKKKVEGESEVEEKKVKNNGGSGIMSTESFESLGLSEPTYKAIMDMGFHHMTQMQIQARAIPPLLIGKDVLGAARTGSGKTLAFLIPALELLYNVKFTPRNGAGVIVICPTRELAIQTHAVAKELLKYHSQTLGLV

SEQ ID NO: 248482 - protein, 112 aa, Glycine max
  Clone ID: PAT_MRT3847_66409C.1.pep
GGEPRDLRHLPGKKNAVFGENRALAPGGVRRGAPPMTYRGGGEKAFEPTGEVPPRAGTPPLEIPKEQGQLPKEFNQGPGHNKALEDLKAEGEKVSAPFDMPGFLGSGKKDQG

SEQ ID NO: 248483 - protein, 58 aa, Glycine max
  Clone ID: PAT_MRT3847_6640C.1.pep
LVFEKLHDSLQSSDFPRNAAAALASRYGIQAWQAFKSRPPKPRLRKFYEGGFNLHDRK

SEQ ID NO: 248484 - protein, 93 aa, Glycine max
  Clone ID: PAT_MRT3847_66410C.1.pep
ADSITPFVAISGLAHVGTYAGYKDRTLHIPMYDTSGECTAWPDLTYDKDVSAGVGAIDGAVQTSKDGVTICHNSIDLINETDVRPIYASPNLP

SEQ ID NO: 248485 - protein, 100 aa, Glycine max
  Clone ID: PAT_MRT3847_66411C.1.pep
MVKGCMKQEEGPKPFRVLDCWFEKALWQEMKIQGWEPYALKEKLKHFKNKLKEWNFSYFGNVHEAHKGIVDELNKLDKKEEVLPLNEKDFWLRLKLQEDF

SEQ ID NO: 248486 - protein, 171 aa, Glycine max
  Clone ID: PAT_MRT3847_66412C.1.pep
IITRMLGIQMAVMMGANLAGEVADGNFCETTIGCNDKAMAPILKELCQADFFRVVVVDDRNTVEICGALKNIVACAAGFTDGLGLGDNTKAAVIRLGLMEMIKFVDTFFPGSKLSTFFESCGVADLITTCYVGRNRRVSEAFVKTGKSIPDLEAEMLNGQKLQGPITAEEL

SEQ ID NO: 248487 - protein, 48 aa, Glycine max
  Clone ID: PAT_MRT3847_66413C.1.pep
ILKKKKKKRRSFLYLHMTYLLPLSSKIPLLYLLPYLIYSPSFLKNPTF

SEQ ID NO: 248488 - protein, 95 aa, Glycine max
  Clone ID: PAT_MRT3847_66414C.1.pep
GSGLFWVWWKKRETFFLGPKKGNSPPKAGAKRERTFWGLISLYGPRDQKPKGRGPKKKVFGFRKGCKWGPRSTGRGGCNGGGGTKGGPPQRGGGG

SEQ ID NO: 248489 - protein, 52 aa, Glycine max
  Clone ID: PAT_MRT3847_66415C.1.pep
KAWCHRFTNKGDPDFKICWFYFSLIFISHFQDLENGIIFYFSKIKTLKMCLI

SEQ ID NO: 248490 - protein, 153 aa, Glycine max
  Clone ID: PAT_MRT3847_66416C.1.pep
MNTKGAQYVCINAYPFLVFPVSYWIKRQIFRICIMVLLVGIALLLGLFLAVLLFNPRHRKSGHKGKAQASLNDNKASKSYSKTEISLHNKRTDCWIIIKNKVYDVTSYVEEHPGGDSILAHAGDDSTEGFFGPQHATRVFDMIEDFYIGDLEQ

SEQ ID NO: 248491 - protein, 119 aa, Glycine max
  Clone ID: PAT_MRT3847_66417C.1.pep
MVLLVGLTLLLGLFLAVLLFNPRHRKSGHKAKAQASLNVDKASKSYSKTEVSLHNKRTDCWIIIKNKVYDVTSYVEEHPGGDAILAHAGDDSTEGFFGPQHATRVFDMIEDFCIGDLEQ

SEQ ID NO: 248492 - protein, 80 aa, Glycine max
  Clone ID: PAT_MRT3847_66418C.1.pep
AFSKHNGAQIFFGANDSPEGKLYWGGKQIKGHLLRVKFFSKVRLIICFATRPTKSWFLCVTENASLFFCERGNGGWLTLS

SEQ ID NO: 248493 - protein, 45 aa, Glycine max
  Clone ID: PAT_MRT3847_66419C.1.pep
PALICMVCFMGPVAEEPSIVGCASEFVDDLACDWFVSFLNVGVYT

SEQ ID NO: 248494 - protein, 54 aa, Glycine max
  Clone ID: PAT_MRT3847_6641C.1.pep
ESCGENWVTRLIRRPTKGMAPLTTTLGFSRHGASTTNYPVHKRKHKISYALKEN

SEQ ID NO: 248495 - protein, 571 aa, Glycine max
  Clone ID: PAT_MRT3847_66420C.1.pep
MRLLSIITPSLTLFFIYIASQLAENHADVMQWSHHQKGLAVQRNYAVLIPKDNTQKKVNLSLRMDPYATNDKTKYSDAFLNGLEIFKISEAGSNNLAGPNPDPVQTPHNNIPAPKGNRKSGTTSIIGIVAGVVSGVVLISLIILFLIVFFRRKTITTPKDYNKSKSSATSKWGPLSFTTTKSTTTTKSSLPSDLCRHFSLPEIKSATNNFDDVFIVGVGGFGHVYKGYIDNGSTPVAIKRLKPGSQQGAHEFMNEIEMLSQLRHLHLVSLIGYCNENNEMILVYDFMARGTLRDHLYNTDNPPLTWKQRLQICIGAARGLHYLHTGAKHTIIHRDVKTTNILLDDKWVAKVSDFGLSRIGPTGNAKAHVSTVVKGSIGYLDPEYYKRQRLTEKSDVYSFGVVLFELLCARPPLIRTAEKKQVSLADWARHCCQNGTIGQIVDPTLKGRMAPECLRKFCEVAVSCLLDDGTLRPSMNDVVWMLEFALQLQESAEQRENTNIVDNEINERREEEASDDLFSTGTSVGQVSDFNKSSGVVSVSTDSEELSSSYKESDKLMSGTVFSEIVDPKPR

SEQ ID NO: 248496 - protein, 39 aa, Glycine max
  Clone ID: PAT_MRT3847_66421C.1.pep
VTLSNIPCNCSTYSVFHCHVVESLRRRIALINAYSDVVY

SEQ ID NO: 248497 - protein, 75 aa, Glycine max
  Clone ID: PAT_MRT3847_66422C.1.pep
TISPLSINIEFSSYYADCFAHIGLNSPKKVNILVISKYGASGDYPPCTDLAYEKTISDGGVFLTCLVKMSKMGYP

SEQ ID NO: 248498 - protein, 424 aa, Glycine max
  unsure (1)..(424): unsure at all Xaa locations
  Clone ID: PAT_MRT3847_66423C.1.pep
MSSRPLHRGRGRGFSGRPYSGDAHLRSVRDANLGLRRGVGGSFLNQTPHHQNPPYNPRPHPPPPPHHHRPQFRPYPPQFRPPPPQFRPHPMQFRPPPPSDHRPAFRPPQHLRPRPPDYRDWELAWTPPPPPHCERKEVLSYNILADALAFVCGNNLYFHIPRLFYFMSWRKXGIFFELGMGSADILCLQEVDRYHELEEELKPKGYSGIWKMRTGNPVDGCAIFWRNSRFKLLYEECIEFNKLGLRDNVAQLCVLEFINQNGSLPSSLTGSSKVVVCNIHVLYNPNRGEIKLGQVRVLLDKAKAVSKLWNDAPVAICGDFNCTPKSPLYNFISEQKLDLSGIDRNKVSGQASATIHASKLYYGPNSSEISANGSVQATSTEGDKEDIEQNNSRLDTRDLDTKCHSLDNQHTQTVSDMSVNSCTN

SEQ ID NO: 248499 - protein, 89 aa, Glycine max
  unsure (1)..(89): unsure at all Xaa locations
  Clone ID: PAT_MRT3847_66424C.1.pep
QKXRIDVKAFNSDGSYYKLSXALLNMTXDRTKVVHFQPHTLFINRFXXSLCLQQCDTQSAVWIHPTDSPKPFAWQLSAKVELLKLRIDG

SEQ ID NO: 248500 - protein, 115 aa, Glycine max
  unsure (1)..(115): unsure at all Xaa locations
  Clone ID: PAT_MRT3847_66425C.1.pep
QWEEGGEIHILITRGVSDMQRRHRLNSEPYLSILHLISIQIRQMMIXVHGLHXDGNLRXLSTTLLELETLEDTQDGCIAHLETDHTLLLTKIXELGREIINCCTYLSRTSSSTGN

SEQ ID NO: 248501 - protein, 58 aa, Glycine max
  unsure (1)..(58): unsure at all Xaa locations
  Clone ID: PAT_MRT3847_66426C.1.pep
MQDFTXTXIHSVGNNDYRDSYRLKSGDALRVPXRTTYYVVNPNDXNIRLITFAIPVNK

SEQ ID NO: 248502 - protein, 61 aa, Glycine max
  Clone ID: PAT_MRT3847_66427C.1.pep
LLMVFFLHEKSHSVEEFYLYKRKIASIGAYSTLLAKLNYLGQRTPKLFFAERLRIFFVKSP

SEQ ID NO: 248503 - protein, 87 aa, Glycine max
  Clone ID: PAT_MRT3847_66428C.1.pep
QGRERSSNESLLSGMRAGPSIHLVTTYAITDPRTEPYLCYQNLLADTGYRKGFSWWVEISSLLLKVKNTPCRCQTCMLKSRVILDQS

SEQ ID NO: 248504 - protein, 120 aa, Glycine max
  Clone ID: PAT_MRT3847_66429C.1.pep
FLQLYNFQCINFCSSAARAGSSVASSMIPPYPGSNARARDRVQALQAYYQPQQPPNSTTMRTPIASGTRRSSSHNGPAQLAPMATSPDQGGGFFLIPSSSSGRNFQEENHHLPNHFHAWE

SEQ ID NO: 248505 - protein, 89 aa, Glycine max
  Clone ID: PAT_MRT3847_6642C.1.pep
DYACPPFRFRRLLFCGGAGGGDSAPEYTFPRLLLHLPHLLLLLRCSVQNNVISLAFSGSVLLVVLSIRLLELPFLIASPLSRLSEKFPS

SEQ ID NO: 248506 - protein, 230 aa, Glycine max
  Clone ID: PAT_MRT3847_66430C.1.pep
MTEMLEEESLSVQCRVGSAFNIKGAMQCPNCRKIEKGQWLYANGCRSYPEFSMDEWTHDEDLYDLSYSEMSFGVHWCPFGNLARLPSSFEEGEFSSSAYHDVLGQHAIFAEHTAVSSASHPCPYIAYFGPIHPSSSNSGGTVSEASNFNHWNGSSVPSDMPTSYTFPAVDLHYRSWEHHSPPFSTATSRLLAVEKGGEWCSKIRIFYASLPCWSQSGELGCFLNDPSLSW

SEQ ID NO: 248507 - protein, 431 aa, Glycine max
  Clone ID: PAT_MRT3847_66431C.1.pep
MGLGNDEEEDNNNNDKVVDDGDVGGGKSFGSVSCSICLEVVADNGDRSWSKLQCGHQFHLDCIGSAFNIKGAMQCPNCRKIEKGQWLYANGCRSYPEFSMDEWTHDEDLYDLSYSEMSFGVHWCPFGNLARLPSSFEEGEFSSSAYHDVLGQHAIFAEHTAVSSASHPCPYIAYFGPIHPSSSNSGGTVSEASNFNHWNGSSVPSDMPTSYTFPAVDLHYRSWEHHSPPFSTASSRLVAADQPSVSPGSQRPARGGSDVPRSGSFMHPFLVGHSSAARAGSSVASSMIPPYPGSNARARDRVQALQAYYQPQQPPNSTTMRTPIASGTRRSSSHNGPAQLAPMATSPDQGGGFFLIPSSSSGRNFQEENHHLPNHFHAWERDHLPSLSLNHVDRDSGWRAYHQATSRSDPATRSSSFRLRHGSDRMPSQNR

SEQ ID NO: 248508 - protein, 459 aa, Glycine max
  Clone ID: PAT_MRT3847_66432C.1.pep
MALSSSEPPPPSVPAPVQSNPPPHLMYKNRLQEFTSKSGINFPVYQTINEGQDHSPKFRSTVWVADMGYTSQSTFSHKKAAEQEAARLALESILKRTRDEGLSLVNQISPFSKSIMNEYADKLHVEQPTYNTDQQQLGGVLPIFITSLVSNGTSYTGDPARTKKEAEQSAAKAAILSIMGDSSSGTVLVEIIKSKSIFYDAIKGKGRSLSQPSAVLSTTNAGQISITLDHKDTEVAACVADNNNNETKVEFPEFPKMLSTCQELQMIHQESSLEANNVSLQPGSEHSIDNDSTSKKRKKNKKKSNKKLRSQTPLSPITGVPLNQVPPRTGVLMNQVTPCSTFLMNQVPPCTAVPMNQVPPCTAVPMSQLYARTSPMDQVPPRTAPMNQVMPCTAAPMDQGPPRTAAPMNQVPPCSAFPMIQVAPCTSATAAPMNQVPPAAPMNQVPPCTAASMNKVPLL

SEQ ID NO: 248509 - protein, 435 aa, Glycine max
  Clone ID: PAT_MRT3847_66433C.1.pep
MGLGNDEEEDNNNNNNNNKNNNDKVVDDGDAGGGKSFGSVSCSICLEVVADNGDRSWSKLQCGHQFHLDCIGSAFNIKGAMQCPNCRKIEKGQWLYANGCRSYPEFSMDEWTHDEDLYDLSYSEMSFGVHWCPFGNLARLPSSFEEGEFSSSAYHDVLGQHAIFAEHTAVSSASHPCPYIAYFGPIHPSSSNSGGTVSEASNFNHWNGSSVPSDMPTSYTFPAVDLHYHSWEHHSPPFSTASSRLVAADQPSVSPGSQRPARGGSDVPRSGSFMHPFLVGHRVGSSVASSMIPPYPGSNARTRDRVQALQAYYQPQQPPNSTTMRTPIASGTRRSSSHNGSPQLAPITTSSDQSGGFFLIPSSSSGHNFQEENHHLPNHFHAWERDHLPSLSLSHVDRDSGWRAYHQATSRSDPGTRSSSFRLRHGSDRTPSQNR

SEQ ID NO: 248510 - protein, 86 aa, Glycine max
  Clone ID: PAT_MRT3847_66434C.1.pep
SFKKKKNFKKKKKKKKGEKNLKFRLPSLAPASPLLSAHKSFFVPVFLAALCIQHLSRITPLLPFIFPAYIILLPAVFIPNWTKPLA

SEQ ID NO: 248511 - protein, 81 aa, Glycine max
  Clone ID: PAT_MRT3847_66435C.1.pep
HAEAHLIYYRKSIRIDKIILSIKLLLTKNCSHLIDKRESFISGPLKDTFQSKSSCLLLSSFFMGKCGLGSVTHISDPHSRP

SEQ ID NO: 248512 - protein, 41 aa, Glycine max
  unsure (1)..(41): unsure at all Xaa locations
  Clone ID: PAT_MRT3847_66436C.1.pep
IRHMPRPLRIXLHDGLLLMSEGTPLPYYKDHSQSATVAYLH

SEQ ID NO: 248513 - protein, 325 aa, Glycine max
  Clone ID: PAT_MRT3847_66437C.1.pep
TLQDMMSNVCKIKDTHVREVMTPLVDVVAIDASSSLVDFHHLWVTHQYSRVPVFEQRVDNIMGIAYAMDLLDYVQKGELLESTTVGDMAHKPAYFVPDSMSVWNLLREFRIRKVHMAVVLNEYGGTVGIVTLEDVVEEIVGEIFDENDSKEEIQKKTGYIVMRAEGVFDVDANTSIDQLSEDLNIKMPEGHQYETVSGFVCEAFGYIPRTGECIKVVLEREDEDDNNESNADQQDQKEKNQSFKLEILAGNARKVSAVRFEPINNNDEMLETKVTRMIPKIMKRKWRSDANSDNDAEYDGDTFAKTPQDDISSEYLVDQENSNRG

SEQ ID NO: 248514 - protein, 129 aa, Glycine max
  unsure (1)..(129): unsure at all Xaa locations
  Clone ID: PAT_MRT3847_66438C.1.pep
NTRHMDLVQVLTAGISIPTLQSVNILAAVLAYSVVASLIIPGPYFLGAPLKDNRPRVNYRLNGLRVHILAMILYVVGSDYGLNLYRATIIHDNYGALLTTTXVWAFFVSAYLYVRATFMISKIDQNYHS

SEQ ID NO: 248515 - protein, 281 aa, Glycine max
  unsure (1)..(281): unsure at all Xaa locations
  Clone ID: PAT_MRT3847_66439C.1.pep
QDVGLKPNATSYTCLMHAHGRRRSMRDEAAGGANTQMTNVGGTAPCQSGTGLARASSDRSLHEKAYAAFENMXNEGIKPSIETYTTLLNAFRHAGDAQTLMEIWKLMISEKVEGTGATFNILVDGFAKQGLFMEAREVISEFGKVGLKPTVVTYNMLINAYARGGQHSKLPQLLKEMAVLKLKPDSVTYSTMIFAFVRVRDFRRAFFYHKQMIKSGQMMDGGSYQTLQALLETRPARKNKDWSSLLGIIKSKMGVKVRRQKDEFWKFKKRHVRKNSSDVSV

SEQ ID NO: 248516 - protein, 49 aa, Glycine max
  unsure (1)..(49): unsure at all Xaa locations
  Clone ID: PAT_MRT3847_6643C.1.pep
XXMXNHNKXXXXTTXVTDXICKLRXXTFSXRIIDXXIVHLLXXXGXLXX

SEQ ID NO: 248517 - protein, 57 aa, Glycine max
  Clone ID: PAT_MRT3847_66440C.1.pep
FCAAGIPFKTKGLTWFLELKRISTNNLLNVCNAKIKYSKIHHLSDLVWDGIIFMAFP

SEQ ID NO: 248518 - protein, 53 aa, Glycine max
  Clone ID: PAT_MRT3847_66441C.1.pep
SKQFFLFQYRLHEKIEPGGPPIKGFKRATFDINNCLGRFYRYSTGSGGNLTFG

SEQ ID NO: 248519 - protein, 71 aa, Glycine max
  Clone ID: PAT_MRT3847_66442C.1.pep
PRAKLSCSPSHQEGGIYSPGLFFDGGPVLGSQHLIFSPLGQGGQMNLGRVPRNWVVWGNHLLGASIIFPRY

SEQ ID NO: 248520 - protein, 47 aa, Glycine max
  unsure (1)..(47): unsure at all Xaa locations
  Clone ID: PAT_MRT3847_66443C.1.pep
PSTTKFTHSNNQLXNPNINYTHFSKIKHIYLXYYLYYNYQINQTIII

SEQ ID NO: 248521 - protein, 71 aa, Glycine max
  Clone ID: PAT_MRT3847_66444C.1.pep
HCCCTLYHRSYLTMNSPHLKLEQSLVKITTKCVPQNLHHLRMKDTTLHTKLLILQVTYTDGFKPNIDIDFR

SEQ ID NO: 248522 - protein, 105 aa, Glycine max
  Clone ID: PAT_MRT3847_66445C.1.pep
LGFLCLEASYTESQILKSCPKQVINSCYTIHLQMLHRVEAHFSKSNIKHHEIVCTRSSISIATVCFTLITSNRGMQYNSSKALNSSENLKNVFFFPIESQSPQLA

SEQ ID NO: 248523 - protein, 79 aa, Glycine max
  Clone ID: PAT_MRT3847_66446C.1.pep
RGKKILIKGVARRLVNHRASYIIYSMFYRDKRGAFFDIPQDNFPQFRGFKLCKNSPPPMMTGNEMKELIEQHFTFTPYH

SEQ ID NO: 248524 - protein, 130 aa, Glycine max
  Clone ID: PAT_MRT3847_66447C.1.pep
HLYYPLFLFSYLGVILKNFRVFNPQFFIFLNFILSITQKQREDQKKTPTKTPPHQKKKQTKFPPPSLIKKPAYKKTFPTKKRSPPPQKPRKPKFIKKRGGPHPPKFSKNPPDQSSPCKKDTFTAPRNHPF

SEQ ID NO: 248525 - protein, 128 aa, Glycine max
  unsure (1)..(128): unsure at all Xaa locations
  Clone ID: PAT_MRT3847_66448C.1.pep
GVITVISSMEAQNMKEQLPHLIRAVCKAGQIVTRVSDPMHXGPSKASCGRKTRPFDLYRDEVXAFYVVHERQGSHPGRVPLEISGQYQSERSGRSSSATLYTLCSRCHTLCDTRLDASQSLEPAFIIN

SEQ ID NO: 248526 - protein, 132 aa, Glycine max
  Clone ID: PAT_MRT3847_66449C.1.pep
SSNRASSHGYLLNRVTKYASAAAGATAPASAPSPGKKEGSGGGKITDEFTGNGSIGLVCHGICAVVNVRSYHGLTPIMTALEVLDHSSWLVVDVGHHSCEGVCRTMAMDATDWDAKRWRGLSTGSSMTDPVG

SEQ ID NO: 248527 - protein, 415 aa, Glycine max
  unsure (1)..(415): unsure at all Xaa locations
  Clone ID: PAT_MRT3847_6644C.1.pep
MSLKSIVRELKEMRDGIGSMSRRGVESRRWNGRTKSHVAPDVTLTSLEPIQQGHWANLPPELLLDIIRRVEDSETTWPARAVVVYCGSVCKSWRAVTKEIVKTPEQCGRLTFPISLKQPGPRDSPIQCFIRRNRETSTYLLYIGLVPSENETDKLLLAAKKVRRATGTDFVISLVADDFSRSSNTYVGKLRSNFLGTKFTIYDSQPPHGAAIQSNSQSSRRFHSKQVSPTVSACIYVDSTLPYQVNEQNARVTDIKHASLXELPVSTQCSAEQLAPNTWLXSLMKHLQCWPVKLRKGLYQRFHVKKFQLVADVDTAQAKVSXLARKNKAASWHERLKXWCLNFNGRVTVASVKNFQLVAAVDPSHNVSAAEQEKVILQFGKIGKDIFTMDYRYPLSAFQAFAICLSSFDTKPACE

SEQ ID NO: 248528 - protein, 76 aa, Glycine max
  Clone ID: PAT_MRT3847_66450C.1.pep
NKTDCVLYCHSLRFAACLNTIRNCPVLPWGGVFIFCLQSVGTFLPFVFACLAHDLLELTPRLPCSFYFSPCAAVVY

SEQ ID NO: 248529 - protein, 74 aa, Glycine max
  Clone ID: PAT_MRT3847_66451C.1.pep
SGIPGRTNASAKASANASEALGNLEFLGLNGADGLSYEDVFQAFIAGAPLLEFYSTKSKSFVPYQGGLHRLKRG

SEQ ID NO: 248530 - protein, 76 aa, Glycine max
  Clone ID: PAT_MRT3847_66452C.1.pep
PIQGFPKFWAAIMLTFSNAGMWNFRSEKAKNCYLGQQLYGRVFFPNRSLREEGNPPKTQLVLGIVKDMPKPPPYSS

SEQ ID NO: 248531 - protein, 86 aa, Glycine max
  Clone ID: PAT_MRT3847_66453C.1.pep
MSSGIRAWSVAASVGVVEALKDQGICRWNHALRSAQHHLKNHVGSFSQANKLSSSAMISTTLKHEKAKQSEESFRTVMYLSCWGPN

SEQ ID NO: 248532 - protein, 205 aa, Glycine max
  unsure (1)..(205): unsure at all Xaa locations
  Clone ID: PAT_MRT3847_66454C.1.pep
MIPPAYALVFQGLHNSNTSCHTPCSNIGVCHRDIKPQNLLVNPHTHQVKLCDFGSAKVLVRYICLHFSPFLLKLFLFIQPFCFPWLDCSFTFPYLVLTFDXVKGEPNISYICSRYYRAPELIFGATEYTTAIDVWSVGCVLAELLLGQPLFPGESGVDQLFEIIKILGTPTREEIKCMNPNYTDFKFPLNXAHTWHKILYKHMPS

SEQ ID NO: 248533 - protein, 86 aa, Glycine max
  Clone ID: PAT_MRT3847_66455C.1.pep
MSSGIRAWSVAASVGIVEALKDQGICRWNHALRSAQHHLKNHVGSFSQANKLSSSAMISTTLKHEKANQSEESLRTVMYLSCWGPN

SEQ ID NO: 248534 - protein, 121 aa, Glycine max
  Clone ID: PAT_MRT3847_66456C.1.pep
PRVRPRVRTAARRLQKGPTFLPRSEDEREMCSRTIYCTNIDKKLTQADVKHFFESICGEVHRLRLLGDYHHSTRIAFVEFALAESAIAALSCSGVILGSLPIRVSPSKTPVRPRAPRPPMH

SEQ ID NO: 248535 - protein, 238 aa, Glycine max
  unsure (1)..(238): unsure at all Xaa locations
  Clone ID: PAT_MRT3847_66457C.1.pep
MGRGRCFLDISIGEELEGRIVVELYDDVVPKTAENFRALCTGEKGIGSNTGVPLHFKGSCFHRVIKGFMIQGGDISAGDGTGGESIYGLKFEDENFELKHERKGMLSMANSGPDTNGSQFFISTTRTSHLDGKHVVFGKVVKGMGVVRSVEHVATGDNDRPTLDVKIVDCGEIPEGEDDGISNFFKDGDTYPDWPADLDESPNELEWWMKSVDSIKAFXHDYYRKQDYKMALRKYRKY

SEQ ID NO: 248536 - protein, 86 aa, Glycine max; identical to SEQ ID NO: 248533
  Clone ID: PAT_MRT3847_66458C.1.pep

SEQ ID NO: 248537 - protein, 115 aa, Glycine max
  Clone ID: PAT_MRT3847_66459C.1.pep
MTSAGVAPTSGLREASGHGAAGVDRLPEEMNDMKIRDDREMEATVVDGNGTETGHIIVTTIGGRNGQPKQTISYMAERVVGHGSFGVAFHAKCLVTGETVAIKKVLQDKRYKNRQ

SEQ ID NO: 248538 - protein, 58 aa, Glycine max
  Clone ID: PAT_MRT3847_6645C.1.pep
NHQVCVCVNVRFDTMEKQLGCCFGVCLEMCFFLQRGLNNLPNTAKYQLLTPTPRVKFI

SEQ ID NO: 248539 - protein, 61 aa, Glycine max
  Clone ID: PAT_MRT3847_66460C.1.pep
EAPGGKGNDFPGQTERRKVQWTDTCGSELVEIREFEPSEVDDESVDEFDNGNLKTCSCAIM

SEQ ID NO: 248540 - protein, 86 aa, Glycine max
  Clone ID: PAT_MRT3847_66461C.1.pep
MSSGIRAWSVATSVGVVEALKDQGICRWNHALRSAQHHLKNHVGSFSQANKLSSSAMISTTLKHEKAKQSEESFRTVMYLSCWGPN

SEQ ID NO: 248541 - protein, 426 aa, Glycine max
  unsure (1)..(426): unsure at all Xaa locations
  Clone ID: PAT_MRT3847_66462C.1.pep
MVFEQQQLKEKRDSAKMTSVGVAPTSGLREASGHGAAAADRLPEEMNDMKIRDDREMEATVVDGNGTETGHIIVTTIGGRNGQPKQTISYMAERVVGHGSFGVVFQAKCLETGETVAIKKVLQDKRYKNRELQTMRLLDHPNVGALKHCFFSTTEKDELYLFLVLEYAXTLNRVIKHYNKLNQRMPLIYVKLYTYQIFRALSYIHRAFGVXIRDFIPQTLFPDPNSVDQLVGVIERTFGIXTSGEPNISYICSRYYRAPELIFGATEYTSAIDIWSVGCVLAELLLGQPLFPGESGVDQLVEIIKVLGTPTREEIKCMNPNYTEFKFPQIKAHPWHKIFHKRMPPEAVDLVSRLLQYSPNLRCTAFDALTHPFFDELRDPNTRLPNGRFLPPLFNFKSHELKGVPSEILVKLVPEHARKQCPFLGS

SEQ ID NO: 248542 - protein, 361 aa, Glycine max
  Clone ID: PAT_MRT3847_66463C.1.pep
MVFEQQQLKEKRDSAKMTSVGVAPTSGLREASGHGAAAADRLPEEMNDMKIRDDREMEATVVDGNGTETGHIIVTTIGGRNGQPKQTISYMAERVVGHGSFGVVFQAKCLETGETVAIKKVLQDKRYKNRELQTMRLLDHPNVVALKHCFFSTTEKDELYLNLVLEYVPETVNRVIKHYNKLNQRMPLIYVKLYTYQIFRALSYIHRCIGVCHRDIKPQNLLVNPHTHQVKLCDFGSAKVLVKGEPNISYICSRYYRAPELIFGATEYTSAIDIWSVGCVLAELLLGQPLFPGESGVDQLVEIIKVLGTPTREEIKCMNPNYTEFKFPQIKAHPWHKIFHKRMPPLFAALGSRLLYLEEPF

SEQ ID NO: 248543 - protein, 67 aa, Glycine max
  Clone ID: PAT_MRT3847_66464C.1.pep
SLVDGRHRRCAVVRLWVYLGPLPIRFIARTVCFHRPSSLSERFLFGLLFSFYVTLSSVFHNNKIKNY

SEQ ID NO: 248544 - protein, 46 aa, Glycine max
  Clone ID: PAT_MRT3847_66465C.1.pep
GLLIETQQSLTGEMTNNTVMKINLHFLLCPTILVAWHQYTNKLFHI

SEQ ID NO: 248545 - protein, 51 aa, Glycine max
  unsure (1)..(51): unsure at all Xaa locations
  Clone ID: PAT_MRT3847_66466C.1.pep
MTECISIQIGQAAIQVRNACWELYCLEHGIQPDGQMPSDXTVGGGDDAFNT

SEQ ID NO: 248546 - protein, 56 aa, Glycine max
  Clone ID: PAT_MRT3847_66467C.1.pep
IVYKFHLVALFLGDKLNHLTLSNGSPRLNTLQQTRVYLTKCKLEFALLFSFVKIKV

SEQ ID NO: 248547 - protein, 79 aa, Glycine max
  Clone ID: PAT_MRT3847_66468C.1.pep
LISSTANSSYYSTMNNIVIKRNIRKFALDHTPEIILTLRNADLAVSRSLSSPRCCPELTRGFVTPSAGICLSDLRASSH

SEQ ID NO: 248548 - protein, 58 aa, Glycine max
  Clone ID: PAT_MRT3847_66469C.1.pep
MENSLVIMHLQMGKSRFCKESKHGFWALMYCCQCILYNWVCSVLYYSTVECNNIKKKH

SEQ ID NO: 248549 - protein, 132 aa, Glycine max
  unsure (1)..(132): unsure at all Xaa locations
  Clone ID: PAT_MRT3847_6646C.1.pep
FVRMFYVAHTVITPHTHIXMEGNFFLCIKSXSKGKKAPYTRALFVRGGTLKNDIIGAGSHSSEYFADPGXPEKPKKIDARLRPRIDPPSNEAQAQMETNLFKLSLDDGQTTKGSMLDLKISPPKKTLTKNTF

SEQ ID NO: 248550 - protein, 110 aa, Glycine max
  Clone ID: PAT_MRT3847_66470C.1.pep
RLEVGFKEQLAKYGEGEIPVKEVVHKLMKDKTKADNSHLPHICSLDWEFNLSSIFVEVETPLGLYGTRSSAALIVTSSEEVSFFEAYLDEGMWKEHLIDFHIQKMTKGHT

SEQ ID NO: 248551 - protein, 91 aa, Glycine max
  Clone ID: PAT_MRT3847_66471C.1.pep
FKSLLFKVGSLRMGGPCALNLCEIQGGRLKVFFELDFGGPWDEPGGAVIVKKPEGVGFDPAGANFDITFQGGAASNPFLKDALVETLRQRG

SEQ ID NO: 248552 - protein, 93 aa, Glycine max
  unsure (1)..(93): unsure at all Xaa locations
  Clone ID: PAT_MRT3847_66472C.1.pep
KAEKDLKTPFLRTAKKGMASLLAESAKTTKNPGPRKEALRTYEEELDPKVAKPHLEXLKKAPLEAMEPQKKREELKDEPDSLDLKPLHLRPSL

SEQ ID NO: 248553 - protein, 89 aa, Glycine max
  unsure (1)..(89): unsure at all Xaa locations
  Clone ID: PAT_MRT3847_66473C.1.pep
MLTKFVTIRNRVNGLSLHTXRPCILSSLHRDVRHLWDYRMGTVSDRVDEHDGAVRGVHAHNDQPLXVFGGDDYQINAWNYVTPRCLVTI

SEQ ID NO: 248554 - protein, 254 aa, Glycine max
  Clone ID: PAT_MRT3847_66474C.1.pep
MEKLIFSGLIVLVGLLTTEIKVASAIWLRAHATFYGGSDASGTMGGACGYGNLYTDGYGIKTAALSTALFNDGKSCGGCYQIVCDASQVPQWCLRGTSITITATNFCPPNYALPSDNGGWCNPPRPHFDMSQPAFETIAKYKAGIVPIIYRKVGCKRTGGIRFSINGRDYFELVLISNVGGAGDISRVWIKGSKMSNWEPMSRNWGSNWQSLSYLNGQSLSFRVQLSNGRIRTAYNVAPSSWRFGQSFISKVQF

SEQ ID NO: 248555 - protein, 161 aa, Glycine max
  Clone ID: PAT_MRT3847_66475C.1.pep
LQGQVPPSLGQLTSLHMLNLSYNHLNGLIPSTFSGSPLSSFLNNDHLCGPPLTLCLEATGKERMQLSNAQVAAIIVAIVLTSTLICLVMLYIMLRIWCNWIKVAVSSEDGGMVEQQKTRNGEYWNMNSPELFPSPDKQISPTICICSLKIDAEAQENTLVR

SEQ ID NO: 248556 - protein, 94 aa, Glycine max
  Clone ID: PAT_MRT3847_66476C.1.pep
FDLDKTGLGYIIHNTEKHFKCGICLNIYIHKHTHTHTSQKYGCSGIVFCLQRVSDSNVMRNILLVMMKHSPNILRVHSSYPVGLCCEIGNRKPW

SEQ ID NO: 248557 - protein, 48 aa, Glycine max
  Clone ID: PAT_MRT3847_66477C.1.pep
KLLVRCSILMCPPCDLSKPYSLIYLAKFTFVISSTILITEPLEVLYHF

SEQ ID NO: 248558 - protein, 99 aa, Glycine max
  Clone ID: PAT_MRT3847_66478C.1.pep
NQKWWFAPNPQIGFQSNGLVNVPFGSHCQTHKKGGKKKLPLCKSLAIILSSKSYLLEMTPSCERCQIKRTCVLSNKLLLTLGSPGKSQMSVSCSCLSFL

SEQ ID NO: 248559 - protein, 44 aa, Glycine max
  Clone ID: PAT_MRT3847_66479C.1.pep
LLLCIHINVIFLKFSSFITFYIIFSHFKDKWFMSVSLYDFMNAT

SEQ ID NO: 248560 - protein, 70 aa, Glycine max
  unsure (1)..(70): unsure at all Xaa locations
  Clone ID: PAT_MRT3847_6647C.1.pep
FKDIGEWFLFYYAKNQFHPIQEVXMSVCGIIRCPSMLCEQLILPQPLPPYFSPLLFSLMNVVSLRLRRNP

SEQ ID NO: 248561 - protein, 56 aa, Glycine max
  unsure (1)..(56): unsure at all Xaa locations
  Clone ID: PAT_MRT3847_66480C.1.pep
KKAVKIFPXIXTGXXRPXXHGQTEKYNMKVRAVRGLSLEELIALRIPKKLAPTIGI

SEQ ID NO: 248562 - protein, 61 aa, Glycine max
  Clone ID: PAT_MRT3847_66481C.1.pep
AARKRPLYGCENTTEGGCLAKVQIEEQNRSERSPCYTQSPMLKSDRFHSFPLRFKKKKNFH

SEQ ID NO: 248563 - protein, 215 aa, Glycine max
  Clone ID: PAT_MRT3847_66482C.1.pep
MSGPVATVDNLDGALSCAERTKSLDAISEIDHLSIFTNGEAGHSSEVAGFRVGELSLPNGESYSGSLLGNIPEGQGKYVWPDGCVYEGEWRRGMRNGYGKIQWPSGVMYDGEFSGGYIHGTGTYIGPDNLTYKGRWRLNVKHGLGYQVYPNGDIFEGSWIQGAPEGPGKYTWANGNVYLGNMKGGRMSGKGTLMALTWISGDSFEGSWLNGMMHG

SEQ ID NO: 248564 - protein, 184 aa, Glycine max
  Clone ID: PAT_MRT3847_66483C.1.pep
MERSEAGLVPEWLRSAGSVAGAGSSAQQFAFSYGHTDSLSVAHHSRNRSSKNGSDFDSARSVFLERTSSSNSRRSSINGSAKHAYSSFNRSHRDKDRDREKDRSSFGDHWDCDGSDPLANIFPGRMERDTLRRSHSMVSRKQNEVIPRRVVVDTKSGGSHQNNSNGILSGSNVSNSPFCRLLAP

SEQ ID NO: 248565 - protein, 95 aa, Glycine max
  unsure (1)..(95): unsure at all Xaa locations
  Clone ID: PAT_MRT3847_66484C.1.pep
MVESPRLYVEGLSGCRDLLFKDYQNDHKFTITTYTSTGVEITSTGVRKGEIYLADVSTKVKNKIITTDVEVDTKXHLRRIITVDEPAPGLKTVFS

SEQ ID NO: 248566 - protein, 59 aa, Glycine max
  unsure (1)..(59): unsure at all Xaa locations
  Clone ID: PAT_MRT3847_66485C.1.pep
WTNSEPHTWLSNFPGKVSGPNNVLXIWSYKWATLTXRRDHRLINNPKQSKNFDIMMGNP

SEQ ID NO: 248567 - protein, 68 aa, Glycine max
  Clone ID: PAT_MRT3847_66486C.1.pep
KIAHFRVMPMALSIASQALVGQICNIVGSQTAVRSDVMPMIGVVQSRVRAMEQSSTDGGVMNQLGHDT

SEQ ID NO: 248568 - protein, 70 aa, Glycine max
  Clone ID: PAT_MRT3847_66487C.1.pep
SRELLSLFLCHEKIFIEGNPSCPPLMAILIAYTISKHKKVAKNNPQQLSPLLGGYRECKKEKEKVIGILK

SEQ ID NO: 248569 - protein, 57 aa, Glycine max
  unsure (1)..(57): unsure at all Xaa locations
  Clone ID: PAT_MRT3847_66488C.1.pep
MKMKGGGGVVPTILATWQCHAYNMIPLPMNTGYRARTPXLKSASRTLTVEAHKISPF

SEQ ID NO: 248570 - protein, 93 aa, Glycine max
  Clone ID: PAT_MRT3847_66489C.1.pep
LESSDEILQIDFYDTIDESIIGKGFDDKILGLLKVACDCVKGSLKQRPKMVDMHKTIRAMWEGYKPWFDSERLKLSLGCSDHITCISEIECIC

SEQ ID NO: 248571 - protein, 100 aa, Glycine max
  unsure (1)..(100): unsure at all Xaa locations
  Clone ID: PAT_MRT3847_6648C.1.pep
XXXXXVXKXGIXXELFLVCXXKXXSXLXXCXXXXXXXWVXXXEFXXLXKDXXXXXXXXGXXXXXXWXXXXXXXXXXXXYLIXNXXXXXXXXXXXXXXXXX

SEQ ID NO: 248572 - protein, 249 aa, Glycine max
  Clone ID: PAT_MRT3847_66490C.1.pep
MACLSRYHHHHHPRGATWLSSPDEMLQHCPLSAHHRRLRDDDAEPIYLPSLSSAYRIFPVYAMGAPDPTPEPELDGPDPIWNAVRDEAKLEAEKEPILSSFLYASILAHDCLEQALAFVAANRLQNPTLLATQLMDIFCNVILHDKAIQRSIRLDVQAFKDRDPACLSYCSALLYMKGYHALQVHRVAHTLWHQGRKVLALALQSRVSDVFGVDIHPAAPVAAGLAFVHATGGGTGVTAMGESGFRKAN

SEQ ID NO: 248573 - protein, 56 aa, Glycine max
  Clone ID: PAT_MRT3847_66491C.1.pep
KRIKADEGDTDPSVQCSIVGLDSILSREVRTERISRSPQGRIIRSQINCNCQQARL

SEQ ID NO: 248574 - protein, 112 aa, Glycine max
  Clone ID: PAT_MRT3847_66492C.1.pep
MASFEEAPPGNSKNGEKIFKTKCAQCHTVDKGAGHKQGPNLNGLFGRQSGTTPGYSYSTANKNMAVIWEEKTLYDYLLNPKKYIPGTKMVFPGLKKPQERADLIAYLKESTA

SEQ ID NO: 248575 - protein, 68 aa, Glycine max
  Clone ID: PAT_MRT3847_66493C.1.pep
YHSHRPKRALRCYLNVSETDGRCQRKLESRPRCDTSGQGLKYGILITTYTRTHRPLYLNVDGHRISRC

SEQ ID NO: 248576 - protein, 95 aa, Glycine max
  Clone ID: PAT_MRT3847_66494C.1.pep
THASAHASEKKKKKNKKKKKKKKKKKKQKKKKKKQKGRPHKRCGGFTYTLHAYVTPLRKFHLLPIHGPSSYNVPSVKTLSLGNLLALPNFPLSQP

SEQ ID NO: 248577 - protein, 143 aa, Glycine max
  unsure (1)..(143): unsure at all Xaa locations
  Clone ID: PAT_MRT3847_66495C.1.pep
LEEDHHILVSLKPGRNAITDELNQKTHYFITXQLIQRYDADPAAKASAATXSIQLGAHSPYTVYVGDETYGESTGCTPDVEMVKFTEFRIQTQVIFIFTTSCTTTPEQYRQQWNGSGKEDHTQTPEHKKVWLVAPDSPKSFTM

SEQ ID NO: 248578 - protein, 80 aa, Glycine max
  Clone ID: PAT_MRT3847_66496C.1.pep
SAHQPPSRLRAPPLPRRRFRPDYRPDRCGLTRPLSFSEIEDRNEREEKKRRNQVFQRRAFIKTLLSVLSFSVLLRRVQCC

SEQ ID NO: 248579 - protein, 104 aa, Glycine max
  unsure (1)..(104): unsure at all Xaa locations
  Clone ID: PAT_MRT3847_66497C.1.pep
KGGYVIYGVAHQRXDGRVICSSIPRYGNGKEAGNEANYKXIVGMSTCYPPPGSVKIIYGKTFTMESNYSSSPGHTGVMGIFYLLVAEQLPRQHFKYSPRSSFFT

SEQ ID NO: 248580 - protein, 96 aa, Glycine max
  unsure (1)..(96): unsure at all Xaa locations
  Clone ID: PAT_MRT3847_66498C.1.pep
LSKWITMGRKLTFIXXXRRVSKCSVGDEIKVFPECVNDLVGKTLAVRFKFHVHMCQSSVLDVSQEEHHIHTLTSTLGLQDEASIGKSPAACAETSL

SEQ ID NO: 248581 - protein, 87 aa, Glycine max
  Clone ID: PAT_MRT3847_66499C.1.pep
KSHWRRSYYSFASKYSMSVLATTILLLPTWLIINPFRLFKIAAPFNCFPSFTHTLKLQITLFLESLGGCPFAHVHSPHRGKLIRVIK

SEQ ID NO: 248582 - protein, 71 aa, Glycine max
  unsure (1)..(71): unsure at all Xaa locations
  Clone ID: PAT_MRT3847_6649C.1.pep
TLKPNEDPTPPPTPPKNPGENLFQTKGFGPPPPPYKTRIPXPPYEIFKYHTPPNMRGPPPPLKSFRGPNPP

SEQ ID NO: 248583 - protein, 70 aa, Glycine max
  Clone ID: PAT_MRT3847_664C.1.pep
LHPYPSQLLKRLSLISHSYSYILTLRLIHSSTQNKTCLTHNPSNLPLQHNNLLLYTFRHIIQSTISSLSL

SEQ ID NO: 248584 - protein, 87 aa, Glycine max
  unsure (1)..(87): unsure at all Xaa locations
  Clone ID: PAT_MRT3847_66500C.1.pep
GRDPSHSPGVAVRICVNTLTGKTVALXVVSSDTIDXVVAKIQDQVGIPPVQQLLIFAGKQLEYGRTLAGYNIHEESTLHLVLRLRGG

SEQ ID NO: 248585 - protein, 49 aa, Glycine max
  Clone ID: PAT_MRT3847_66501C.1.pep
CSVFTVFLDDYIQFSVKVFSIKIHIIIMCCGYFSPNRAHLTIIIRAMNQ

SEQ ID NO: 248586 - protein, 65 aa, Glycine max
  unsure (1)..(65): unsure at all Xaa locations
  Clone ID: PAT_MRT3847_66502C.1.pep
MVVSFAPSGLTSDVTSVXMLHESLTEAHPCDNVGFCVNNVSVKDSARVCVASLSMDVPVRVSVIF

SEQ ID NO: 248587 - protein, 34 aa, Glycine max
  Clone ID: PAT_MRT3847_66503C.1.pep
EGVALRPSHGSHHPNTAQVTHRLAIVCPAQRSTI

SEQ ID NO: 248588 - protein, 274 aa, Glycine max
  unsure (1)..(274): unsure at all Xaa locations
  Clone ID: PAT_MRT3847_66504C.1.pep
LEVLDNTALNRIAVERLHLSNPSFAQTNSLVSTVNSARGTTTLRYPGYMNNDLVGLLASLIPTPRCHFLMTGYTPLTVERQANLIRKTTVLDVMRRLLQAKNIMVSSYARTKDASQAKYISILNIIQGEVDPTQVHESLQRIRERKLVNFIEWGPASIQVALSRKSPYVQTAHRVSGLMLAXDTSIRHLFSKTLSQYEKVRKKQAFIDAYRKFPMFADNDLSEFDESRDIIETLVDEYKACESPDYIKWGMEDPNNMLTGEGNATGSLDPNSVA

SEQ ID NO: 248589 - protein, 644 aa, Glycine max
  Clone ID: PAT_MRT3847_66505C.1.pep
MSENGEEKLLAVARHIAKTLGHNNTMSDDIFQILSNFDGRFSRENLSEKGADVDPRGCAALDHSLKSLDRRISPYVSSDRTIWADAADSAAFLDAVDELVAVVAEWNHLASDKSVAACLVRAEDMLQHAMFRLEDEFRSLMERGGEAFDLTRSHRKGDSAGNLPFESDEDVDEEEEEARNVGIGGGDEEEQIPVALPVTDFDIVIDALPSGTINDLHEITKRMVAGGFGKECSHVYSSCRREFLEESVSRLGLQKLSIEEVHKMTWQDLEDEIEKWIKASNVALKILFPSERRLCDRVFFGFASAADFSFMEVCRGSAIQLLNFADAVAIGSRSPERLFRILDVFETLRDLIPEFEALFSDQFSVSLRNEAITIWRRLGEAIRGIFMELENLIRRDPAKIAVPGGGLHPITRYVMNYLRAACRSRQSLEQVFEDYGLKEYPKLDDRVPSSSSLSVQMDWIMELLESNLEAKSKIYKDPALCYIFLMNNGRYIVQKTKDSELGTLLGEDWIRKHAAKVRQFHVHYQRSSWNKLLGILKLDSNGSMPHINLAKSMKEKLKSFNTVFEEICKEQSSWFVFDEQLREEIRISLEKILLPAYGNFVARFQSVPELGKHADKYIKYGTEEIQARLNGLFQGSSGSTGSRK

SEQ ID NO: 248590 - protein, 481 aa, Glycine max
  unsure (1)..(481): unsure at all Xaa locations
  Clone ID: PAT_MRT3847_66506C.1.pep
MPREIITLQVGQCGNQIGMEFWKQLCLEHGISKEGILEDFATQGGDRKDVFFYQADDQHYIPRALLIDLEPRVINGIQNSDYRNLYNHENIFVSDHGGGAGNNWASGYDQGQHVEEEIMDMIDREADGSDSLEGFVLCHSIAGGTGSGMGSYLLETLNDRYSKKLVQTYSVFPNQMETSDVVVQPYNSLLTLKRLTLXADCVVVLDNTALNRIAVERLHLSNPSFAQTNSLVSTVMSASTTTLRYPGYMNNDLVGLLASLIPTPRCHFLMTGYTPLTVERQANLIRKTTVLDVMRRLLQVDSRGSPKNIMVXSSYARTKDASQAKYISILNIIQGEADPTQVHESLQRIRERKLVNFIEWGPASIQGGLSRKSPYVQTAHRVSGLMLASHTSIRHLFSKTLSQYEKLRKKQAFIDAYRKFPMFADNDLSEFDESRDIIETLVDEYKACESPDYIKWGMEDPNNMLTGEGNATGSLDPNSVA

SEQ ID NO: 248591 - protein, 106 aa, Glycine max
  Clone ID: PAT_MRT3847_66507C.1.pep
GPPGLIGFFLKGPTKLVVGPPLLCVFIGLRPSPIKGGKFFFFWAGFVVGYALHKGGARNEDGPGAMRAFFWIIGRPQTNIFKPGPDFEISPPYLGCSAYLWGRFRI

SEQ ID NO: 248592 - protein, 175 aa, Glycine max
  unsure (1)..(175): unsure at all Xaa locations
  Clone ID: PAT_MRT3847_66508C.1.pep
HAVPPGVPFGPLLGTSWFFLAPPSSPFLLAYFGLAYISFRHQSIPVYAPKYDTAGKFWPIIHNSMIFSXLVLMHIIAVGIFALKKLFSSIYFDDAPTPPHTLTLLFNEYCRKRFLPIFVAYSAESLKKRDRQDQNDATMTQFYENLVNAYKDPALLPIQHSQNNDNLRSPLISQA

SEQ ID NO: 248593 - protein, 81 aa, Glycine max
  unsure (1)..(81): unsure at all Xaa locations
  Clone ID: PAT_MRT3847_66509C.1.pep
MAAASSMALSSPSLAGKAVKLGPTTPKIGKVNNKENVNKQGSSRNPRERPKRVKFLGPFSGEPPFXLTGEFPSEYGWDTAG

SEQ ID NO: 248594 - protein, 120 aa, Glycine max
  Clone ID: PAT_MRT3847_6650C.1.pep
GVPPFFVWNFPPQITKAPQNLLGVVFPPSGWGPSLFWPPFLAKFPKKTPGLFFPKALLIKLGPFLGNFSIGPSPPFLFFKNAKFLPQVFVFRKISLQPPIAKQAFVVGGPFFFLGQVPYF

SEQ ID NO: 248595 - protein, 55 aa, Glycine max
  Clone ID: PAT_MRT3847_66510C.1.pep
NITYFFHSHLKLQPQHTLHKPGFTTPTTRSYQVTRCRKLRQTSFIDPFAPKLFQF

SEQ ID NO: 248596 - protein, 50 aa, Glycine max
  Clone ID: PAT_MRT3847_66511C.1.pep
NFISIFSLEDCIIILSTSYLSSLILHELHCIQFLTHGSYKSLEKFVDDML

SEQ ID NO: 248597 - protein, 95 aa, Glycine max
  Clone ID: PAT_MRT3847_66512C.1.pep
YRTANATGMAHVFILPSPMETAMMDSCFIPESSVHITLSRLMSFTYLQEQDKVSSEKVDMYLVLGNKCEHSKRAYVFYLGDRSFSQKGKYHRPYI

SEQ ID NO: 248598 - protein, 215 aa, Glycine max
  Clone ID: PAT_MRT3847_66513C.1.pep
TDAAFLKTSSHEPSLSSGTTAITAGIFGRSLLVANAGDCRAVLSHHGRAIEMSKDHRPNCINERTRVESLGGFIDDGYLNGQLGVTRALGDWHIEGMKEMSERGGPLSAEPELKLMTLTKEDEFLIIASDGIWDVFSSQNAVDFARRRLQEHNDEKQCCKEIVQEASKRGSTDNLTVVMVCFNLDPPPPVVVERTRVRRSISAEGLQNLKCLLKQ

SEQ ID NO: 248599 - protein, 151 aa, Glycine max
  Clone ID: PAT_MRT3847_66514C.1.pep
MERGDQNQSASLQSPLIKHSHSSSSGRGIERREVIEEVKKQLWLAGPLISVTLLNFCLSIIAGTWAAPLGELSRAGASMATSFASVTGFSLLVGMASSLDTFCGQSYGAKQYHMLGIHLQRAMFTLMIVSIPLAIIWANTRSILTFLGQDP

SEQ ID NO: 248600 - protein, 100 aa, Glycine max
  Clone ID: PAT_MRT3847_66515C.1.pep
KVDIVPPKMLYHFPQYKWFHHRRHHSSSSRSLLELDKSQNPKTVSAKLTSSELRPATGIVENSLSMSVQTAKNVNASIYIIRERYVLRCGTRECEHFNSN

SEQ ID NO: 248601 - protein, 58 aa, Glycine max
  unsure (1)..(58): unsure at all Xaa locations
  Clone ID: PAT_MRT3847_66516C.1.pep
KKYKKKKKKKKKKKKKKKKXKKKKKKNKKKKQKKLKQKKIEKIMKIKKKNKIRRGWPF

SEQ ID NO: 248602 - protein, 67 aa, Glycine max
  Clone ID: PAT_MRT3847_66517C.1.pep
KDYNKKSMKGKVLGSAVSLIEMVGVVIGVDAEVQSQWGVKSIMNGGELKTCKRAVHTLCQGSDDQKL

SEQ ID NO: 248603 - protein, 82 aa, Glycine max
  unsure (1)..(82): unsure at all Xaa locations
  Clone ID: PAT_MRT3847_66518C.1.pep
RAAPPDLRRDSVTLSLFLFHNAAPTGGARGGAAPPRHSLRRPQHHNHPLKAPLSSHHQPRPYPDPPGPGNLRQNHQHRXRRG

SEQ ID NO: 248604 - protein, 79 aa, Glycine max
  Clone ID: PAT_MRT3847_66519C.1.pep
SSSLHKFQIHASMASTPSNFISQLFPNSIAEKLDDLNYLHWRQHVEPVIKLHKLQRFVINPIVLPRYLMEDPSVVFSQP

SEQ ID NO: 248605 - protein, 125 aa, Glycine max
  Clone ID: PAT_MRT3847_6651C.1.pep
LPLPWFVGGHPMTGGRFGFSPRSGTMKGEFLVPSGSEQVLSFVGLTSKDIWFPFLHHRRHFCACFVCCRFCFVLGRVFEAFANFLCMGMVINLPAVDEASSKNHSNPKKKKKKKKKKKKKKKKKT

SEQ ID NO: 248606 - protein, 37 aa, Glycine max
  Clone ID: PAT_MRT3847_66520C.1.pep
HKVVGALRHVKSSHELAKCVAFSAWWVPLLSSSRSRT

SEQ ID NO: 248607 - protein, 47 aa, Glycine max
  Clone ID: PAT_MRT3847_66521C.1.pep
SPLSLFLSTSARICVQLHLLCKIRWLEQHPVRFKRAGMVFPSPALTA

SEQ ID NO: 248608 - protein, 67 aa, Glycine max
  Clone ID: PAT_MRT3847_66522C.1.pep
NSVITSLIISSPTPYIITSGQDLMSNLACECSGITNSMLLVSTLLMLNARQCFPYWRYNTSPWLTSL

SEQ ID NO: 248609 - protein, 60 aa, Glycine max
  Clone ID: PAT_MRT3847_66523C.1.pep
GMLVLQISKENSEMSFVNELVFVGPAMYVHDTRYGRKDSLQLKIFHVFKQNLCGRGLVFR

SEQ ID NO: 248610 - protein, 50 aa, Glycine max
  Clone ID: PAT_MRT3847_66524C.1.pep
KLLLMHQKLDWRFLHETLTGCILPMMLAEPTSCMLDGWCMDAWKIRVSRQ

SEQ ID NO: 248611 - protein, 62 aa, Glycine max
  Clone ID: PAT_MRT3847_66525C.1.pep
TQLHLDLRHMGKDDVHISIVDTRNVNSGKSMTIGQLNYKLVCIDHSVIAMVVKDTAELKIRS

SEQ ID NO: 248612 - protein, 87 aa, Glycine max
  Clone ID: PAT_MRT3847_66526C.1.pep
NQTIGNCLKDQAEQKVGQLKGGKNLFFFRGSIVAGRKTLQYVYKIWEPSRNAGFPSNKQKDAGGRAENFSLWWEGGKRPCRSVEEGG

SEQ ID NO: 248613 - protein, 90 aa, Glycine max
  Clone ID: PAT_MRT3847_66527C.1.pep
YIGGGDHCHCTRVHGRDPHPSNYRAGSHANWRRTETGSTTYARGEEERPRLEIQLRLTAMAEGSLIDDLPGLHGLSRSEQHVFLCYQRKA

SEQ ID NO: 248614 - protein, 52 aa, Glycine max
  Clone ID: PAT_MRT3847_66528C.1.pep
STTSSPSPCDISMMTRFAINSDPVSIHGKSNYLTYFIQQKNLDDVVSYPNQN

SEQ ID NO: 248615 - protein, 114 aa, Glycine max
  Clone ID: PAT_MRT3847_66529C.1.pep
IFPPCLMHGLFYFFTLHFCTPFCFQTNLKKKFPCLKTNKFSFLLCPPPFKKEKKRKGKFFLFVANLFKRVHFLTLKSPLGSEERFLGDGDFPGKAFFGFTRDGLTLEKKSFDCF

SEQ ID NO: 248616 - protein, 86 aa, Glycine max
  Clone ID: PAT_MRT3847_6652C.1.pep
KPISVKFQCQSNFYLQKERIYPTKIGKESRFDKTHFFFLLWVGGKLSLLWLSTLETDSDQMLGSTSSIILELKSATLIFQVYRHQN

SEQ ID NO: 248617 - protein, 122 aa, Glycine max
  Clone ID: PAT_MRT3847_66530C.1.pep
WVMHQYHLGQYEEEREGELVVSKIFYQTQPRQCNWSDRSATTGEGSGEQQSNNNNNNNGRRDSGSGTCSSSKEINVTHRDEMSAVVGVPPITTFNTALDIQQLKSDHFGFIPFRKGFDEVGI

SEQ ID NO: 248618 - protein, 80 aa, Glycine max
  unsure (1)..(80): unsure at all Xaa locations
  Clone ID: PAT_MRT3847_66531C.1.pep
HNNPSXNKENGGGDFLPEGVQXRRREKGKGGRLXGXAPXLXSXQRWXIKGGMTHCAGNSTXESVCAXVPMSTWGSPPPAI

SEQ ID NO: 248619 - protein, 112 aa, Glycine max
  Clone ID: PAT_MRT3847_66532C.1.pep
MMIPLLLLSPRTHPPTNQVLNQCCLVMEESLNSVYRQGRVADNSIGPLEIRVVKNGTFEELMDYAISRGASINQHKVPRCVSFTPIMELLDSRVLSFHFSPAAPHWTPERRR

SEQ ID NO: 248620 - protein, 70 aa, Glycine max
  unsure (1)..(70): unsure at all Xaa locations
  Clone ID: PAT_MRT3847_66533C.1.pep
MDFISFGYTQLPLYRYLQQLCRMHADSTLGYEAGVITCYIDGHLVPPGAIVTFIXKGVQHFEMVSNLMCL

SEQ ID NO: 248621 - protein, 137 aa, Glycine max
  unsure (1)..(137): unsure at all Xaa locations
  Clone ID: PAT_MRT3847_66534C.1.pep
YIALEHLENVYGITPIVXDVWVYGNSFKSALVAVVVPNEETTKKWAFSNGHMAPFSKLCSLDQLKKHVLSELKMTAERNKLKGFEYIKGVILDPQPFDMERDLVTSTMKKRRNNMLKYYQVEIDELYRSLRGDKPKI

SEQ ID NO: 248622 - protein, 44 aa, Glycine max
  Clone ID: PAT_MRT3847_66535C.1.pep
LLMVICIQKLKYRSLHWFCFPFELGTLKESNYFQSIFSFNNFTH

SEQ ID NO: 248623 - protein, 115 aa, Glycine max
  unsure (1)..(115): unsure at all Xaa locations
  Clone ID: PAT_MRT3847_66536C.1.pep
MRQQSFAPVGSFWRICLXXAXGXKPKKRGEXAAXXSFRLPGQPKVSFKQFSGYVTVNRGPXXALFYWVPXAAQNPLTKPXGIXVNGGAGGASLXYGASXKSXPFXINKTAFGIQK

SEQ ID NO: 248624 - protein, 89 aa, Glycine max
  Clone ID: PAT_MRT3847_66537C.1.pep
RTIASTTQCSKNLIPFQKISLHQSSLLNPKFSNLLPKSGTKPQQSTAIKTQYPSFGSHGQFSSELSFSIEPKIHYPYTKINDQTLASTI

SEQ ID NO: 248625 - protein, 76 aa, Glycine max
  Clone ID: PAT_MRT3847_66538C.1.pep
EKACAHLSWKYLMSMNIRKSPGGLLTYAFHMFKIEPLQVKTINSVSNFYKNANFFNLKFLFNIFYFMYLLSSKLYL

SEQ ID NO: 248626 - protein, 71 aa, Glycine max
  Clone ID: PAT_MRT3847_66539C.1.pep
KWGIITERQSKNHTLKMLSNTKCKDGPLKKEKQACKQQNYYREPKNDNNHARKLMHRSPKKSPKKKKKVQI

SEQ ID NO: 248627 - protein, 33 aa, Glycine max
  Clone ID: PAT_MRT3847_6653C.1.pep
FSEDWNLELVAALKKVCMSDGERTCNSDHMILS

SEQ ID NO: 248628 - protein, 80 aa, Glycine max
  unsure (1)..(80): unsure at all Xaa locations
  Clone ID: PAT_MRT3847_66540C.1.pep
KKNLYXLYHLNQIIRGASVXKKEKSIMELVRVRXKNILXWQLECVPXNKAADNFVXFXGLTEPXTIILLSTSAASMXQKI

SEQ ID NO: 248629 - protein, 95 aa, Glycine max
  Clone ID: PAT_MRT3847_66541C.1.pep
KPTNHNTAVPNPNKMPPMDPCKTQPLAWNMLQGQVPLAAESPQGGKQPSQGLRIHTQHRLWDNSCRVLSPTNQQDSKNAIHACITLLLKAGPVTT

SEQ ID NO: 248630 - protein, 228 aa, Glycine max
  unsure (1)..(228): unsure at all Xaa locations
  Clone ID: PAT_MRT3847_66542C.1.pep
FNSDDSIKKEEKGNDNSGAANNGSNNKSLESANECEDKVQKSSKPFVWPDDAVPAVVALEKASHDTLSSDYQKYNQKLRQLVQKLRHKAIQARRQANGARGPPKILNMTPNELKEGLTAXETAKKEPDESQHMQMTGARCHRCTEGKVGLRDIIHAGHGDRYQLECTACGHSWFASRDEVFELTIDASDSKRSVGTAPWATAKFEDVEKKLVSPRESEKNDIFNIWQV

SEQ ID NO: 248631 - protein, 86 aa, Glycine max
  Clone ID: PAT_MRT3847_66543C.1.pep
VMSRVAHWAASTYMRRGIGPLPRDEPTRRPTIMKKDGGAAAMIPPTNIFGTTKLGGDVLGPFLPALFSRAVFFCGTAGALAGPVFA

SEQ ID NO: 248632 - protein, 57 aa, Glycine max
  Clone ID: PAT_MRT3847_66544C.1.pep
VLLLPLVYSPQLNKSIYLLFAAEKQMLSSSRVMQVSIVYLWLDGLCTRWKFVSSLLV

SEQ ID NO: 248633 - protein, 161 aa, Glycine max
  Clone ID: PAT_MRT3847_66545C.1.pep
MDATANHQIKPTATVKQPEKVDAEVVRKDDDSIQDLSSSFKSSLILSTSEKEEEVTKSCEAVLKFSPGCAIQKKDVHSISISERQCDVEQNDSARKSVQVKGKTSRVIANDDASTSNLDPANVEEKFQVEKAGGSLKTKPRSSLKSAGEKKLSRTVTWADE

SEQ ID NO: 248634 - protein, 75 aa, Glycine max
  Clone ID: PAT_MRT3847_66546C.1.pep
IILFKYKYQKIEHNKSIPISCGYNNNQSLILIDRFDFMKQIMSLGSIKYQIPDKSIDATLVPKLDWNWTYVWVGV

SEQ ID NO: 248635 - protein, 482 aa, Glycine max
  unsure (1)..(482): unsure at all Xaa locations
  Clone ID: PAT_MRT3847_66547C.1.pep
MGVPAFYRWLAEKYPMVIVDAIEEEAVVIDGVQIPVDTSNKNPNNIEYDNLYLDMNGIIHPCFHPEDRPSPTSFDEVFECMFDYIDRLFVMVRPXELLYMAIDGVAPRAKMNQQRSRRFRAAKDAADAAAEEARLREEFEKEGRKLPSKGESQTFDSNVITPGTEFMAVLSIALQYYVHLRLNNDPGWQNIKVILSDANVPGEGEHKIMSYIRLQRNLKGYDPNTRHCLYGLDADLIMLALATHEIHFSILREIVFTPGQDKCFLCGQMGHMAANCEGKAKRKAGEFDEKGEAIVTKKPFQFLNIWTLREYLEYEMRISNPPSEIDFDCIVDDFIFMCFFVGNDFLPHMPTLEIREGAINLLIAVYKKEFREFGGYLTNGSTINLSRVEHFIQAVGSYEDKIFQKRARLHQRQTERIKREKAQARRGDDAEPQFQPESLVAVSRFHGSRLASAPTPHHFNLLGIIILKRLHQLEKTIKNHLR

SEQ ID NO: 248636 - protein, 115 aa, Glycine max
  unsure (1)..(115): unsure at all Xaa locations
  Clone ID: PAT_MRT3847_66548C.1.pep
LRASYIEGGAGAAIAIEMNMPYAVLXMRGYDDGDVVSEVXDMTGGYITCTXVYYIEIGNVGLLTPSKCXALPDKLLQVEQIQVQGMLKFQHEEFLTAXTYEERPTTTMVTDVRPY

SEQ ID NO: 248637 - protein, 62 aa, Glycine max
  Clone ID: PAT_MRT3847_66549C.1.pep
KINSWNNTRYIHTFKHVILLTSTQFRPSDYISPISFSASTHCDSSRDMRDDYCETSILRPVG

SEQ ID NO: 248638 - protein, 57 aa, Glycine max
  unsure (1)..(57): unsure at all Xaa locations
  Clone ID: PAT_MRT3847_6654C.1.pep
EAWFTLCPEYRLLFLTKLDILIAGLIAPRTPVRVLVLVPTPRSIVPIXFLTPTRTRG

SEQ ID NO: 248639 - protein, 84 aa, Glycine max
  Clone ID: PAT_MRT3847_66550C.1.pep
IEQACVNTSFISAQHDYTMTEAQVKHALVNKFMGLPESRGQVAQLMRAMPGRSEPTHDEECERAPATRRKMTLLYCENRARKRP

SEQ ID NO: 248640 - protein, 91 aa, Glycine max
  Clone ID: PAT_MRT3847_66551C.1.pep
VKNQAKTARQVLAAAEKNMTDALQLNYDFRNPFVICGATYVPIYRGQKDVACPYCTSRFVPSQAGQLCAVCELSVVGADASGLLCSPSQIR

SEQ ID NO: 248641 - protein, 523 aa, Glycine max
  Clone ID: PAT_MRT3847_66552C.1.pep
MRMKALTLASLLASFSFTELTSYLACFILLLLLLEQISYIVKKGSIPGPSLVLPFLGNAIPLVRNPTKFWDLQSSFAKSTPLGFSANYIIGNFIVFIRDSQLSHKIFSNVRPDAFRLVGHPFGKKLFGEHNLIYMTGQDHKNLRRRIAPNFTPKALSTYTSLQQIIILNHLKSWVSQAQAQGSYSIPLRILARDMNLETSQTVFVGPYLGLKARERFERDYFLFNVGLMKLPFDFPGTAFRNARLAVDRLVVALGTCTEMSKTRMRTLGEEPSCLIDYWMQDTLREIEEAKLAGETPPPFSTDAEIGGYLFDFLFAAQDASTSSLLWAVALLESHPEVLAKVRAEVAGIWSPESDELITADMLREMKYTQAVAREVVRFRPPATLVPHVAAERFPLTESYTIPKGAIVFPSAFESSFQGFTEPDRFDPDRFSEERQEDQIFKRNFLAFGAGPHQCVGQRYALNHLVLFIALFTTLIDFKRDISDGCDEIAYVPTICPKDDCRVFLSKRCARYPSFPSVEDLVK

SEQ ID NO: 248642 - protein, 60 aa, Glycine max
  Clone ID: PAT_MRT3847_66553C.1.pep
FDQMSTGSYGRSRYMDWSFPSSSGTSPFSPHGKVQSMCSCPSDLELSSSVLAIFVYHIPP

SEQ ID NO: 248643 - protein, 322 aa, Glycine max
  unsure (1)..(322): unsure at all Xaa locations
  Clone ID: PAT_MRT3847_66554C.1.pep
VRERVKILENVGHLPLAYITASVHGLHDVAERLAAELGDNVPSLPAGKVPSLVMPPSPVMCGSDWPLLRVMRGMFDGELDIVDADGLQNGDVTAIWRXGEGLKKMMKGGWRWSLGLGPEADTPKASISTQSSVFVTPTPGMPVSHIWTQKSSLAADHAAAGNFDTAMRLLNRQLGITNFAPLKTMFLDLHTGSHSYLRAFSSAPIISLAVERGWTESQPSFARRLLETNPTVENPAKTARQVLAAAEKNMTDALQLNYDFRNPFVICGATYVPIYRGQKDISCPYCTSRFVPSQEGQLCAVCELSVVGADASGLLCSPAQIR

SEQ ID NO: 248644 - protein, 125 aa, Glycine max
  Clone ID: PAT_MRT3847_66555C.1.pep
KKFFIREGRGPTSQIGPHQKSNPQKNTLREKPKGGGKGRKEREKNGRVGGWQKKREQRGGGNNKPPQKKRVTKRGGSESSIHKRATGGKEGSMGAPFVQFQPAKKGGNARKINRGGTGVFQPSPS

SEQ ID NO: 248645 - protein, 159 aa, Glycine max
  Clone ID: PAT_MRT3847_66556C.1.pep
ANFYPNSLKTTEGVAQTIQSLLPVPEPKMHESVRKELEELEKEKATIDNKANTMVRRELWAGLGFLVVQTAAFMRLTFWELSWDVMEPICFYVTSMYFMAGYTFFLRTSKEPCFEGFYQSRFSSKQKSLMKLHNFDIQRYNELRAKAPPSSSIIGHKKL

SEQ ID NO: 248646 - protein, 88 aa, Glycine max
  Clone ID: PAT_MRT3847_66557C.1.pep
LLYISTCSLSCDRPLVVRTTGEALLPFHWRYLPLAPGCSRSHLTCPSLRHTPPTTLGCDLRLCCLGHRYHSQRRCGKYRRLPHRAIQP

SEQ ID NO: 248647 - protein, 82 aa, Glycine max
  Clone ID: PAT_MRT3847_66558C.1.pep
VFFNVGKFISCVDLVFGGKPSTTTTASKGRERPITGTAFRNAQSFQKELQSEGKKSALLFLVTTTPRQTNKAKHTHKKKRTR

SEQ ID NO: 248648 - protein, 80 aa, Glycine max
  Clone ID: PAT_MRT3847_66559C.1.pep
QLFIIPCACSHNSCQNTKHVSRCLGNTPHWLCSRDQNRRSNMLCPMLKWGQVIPNTRAMRYHQFVMCYPAAINYWISNIH

SEQ ID NO: 248649 - protein, 52 aa, Glycine max
  unsure (1)..(52): unsure at all Xaa locations
  Clone ID: PAT_MRT3847_6655C.1.pep
AKLMVFVPTTGVIGKSFQVPQKTLXSEKRGHYQLTLTNLFKPSSNIDPPLRY

SEQ ID NO: 248650 - protein, 56 aa, Glycine max
  Clone ID: PAT_MRT3847_66560C.1.pep
LKRKFHRPPSKPFIPLVPTLRKLSPECPPFKKCSVYLDSPFPLVLSYGSSPPRFCG

SEQ ID NO: 248651 - protein, 98 aa, Glycine max
  unsure (1)..(98): unsure at all Xaa locations
  Clone ID: PAT_MRT3847_66561C.1.pep
MGISRDNWXKRRXTGXKXKPXHXKRKYEXGRPAXXTKIXXXRIXTXRXRGGXXKYRALRLDVXNFXWGSEXXXRKTRIIXXVXXASNNELVRTKTLVX

SEQ ID NO: 248652 - protein, 55 aa, Glycine max
  Clone ID: PAT_MRT3847_66562C.1.pep
SRKSEYGCAHYNYEEEVKRSETPKNNPNHTRDTNVNRKLFYLYCPGPNKPVDTIF

SEQ ID NO: 248653 - protein, 300 aa, Glycine max
  unsure (1)..(300): unsure at all Xaa locations
  Clone ID: PAT_MRT3847_66563C.1.pep
TEREREKEKEIALNTSHSKRKSNRIVVRLQKKRLREGVTEAKILPTASKGRSSSSSSFSSSSRSHNPMLPPYLHKIIKCLHIDNEYTFGQMRQLSISLLIINQKPRFNGHVMILHLWDXPAFFVICCLLLSCAILAYCAAYTSCSAHTVLFIFSIDCCIFLLTGLVLDTFCWFLRGAKFRDGXTACYVVEQRVEWMYAFVALCNLFFVIYVLLYVILDVLSSLPVVXDLFQSWLSNLLFMVGASYYHYLNFLGYDVLPFLERTTFFLYPIGIVIVLSPILILSGFNPSRYFMNMYFSRQI

SEQ ID NO: 248654 - protein, 65 aa, Glycine max
  Clone ID: PAT_MRT3847_66564C.1.pep
LFLKVPPCLILQVLINLSAAMNLYSIGTTLIFLLINNCAFNSFQNNNTFEIFPFLLSLLFLYYQF

SEQ ID NO: 248655 - protein, 204 aa, Glycine max
  Clone ID: PAT_MRT3847_66565C.1.pep
TRVKLKKKRAVFLIVSYSEPTLTHGVVSLGSISIARKENQKPNPSFLFFRSNNQLSLSNMANGSNDKGSSTTNNNNSSIIPNPSSASASSSSFVPNNPRPTANHTVQLFSGTVESFNNYENGSQDFSHATIKSSRIGNSFNNLGSGLQTFRGAEIRCVDKSRSKRVAFSLPPCWKPDRVAHSGTVNSFNNNGSGSQTFDGFKFN

SEQ ID NO: 248656 - protein, 64 aa, Glycine max
  Clone ID: PAT_MRT3847_66566C.1.pep
FSAKKKATTLIMNSLQTLIVDVESALPHILTQIPFKRNSTLETSCGHKQQAEESSYKRDRIKLT

SEQ ID NO: 248657 - protein, 57 aa, Glycine max
  Clone ID: PAT_MRT3847_66567C.1.pep
PFSVSSLSAPEFNTTQLSYTARPFYWPPFPSSQCYYCLIQHQFPVFFLGFGINQCLV

SEQ ID NO: 248658 - protein, 57 aa, Glycine max
  Clone ID: PAT_MRT3847_66568C.1.pep
FYTRIIFPFWPTKDNIISQILIFFSLPPPIFNYKNGKPFFFFTLKPFFFLVWCLHLW

SEQ ID NO: 248659 - protein, 112 aa, Glycine max
  unsure (1)..(112): unsure at all Xaa locations
  Clone ID: PAT_MRT3847_66569C.1.pep
ARGSLNLKYNNLTGNIPWTVLGSRMSHVDLSRNALSGRIPNSFGEDSYFISLDLSYNNLRGSVPKSMGXVNYIGYLDLSHNNCLCGRMPRGVAFNHLQPLKPCSRASGRMHA

SEQ ID NO: 248660 - protein, 123 aa, Glycine max
  Clone ID: PAT_MRT3847_6656C.1.pep
PPPFFLWCPLIKKFLSPAPGLNPPFCPQTLGEISFYKTPSHFFPPLSTLVGFFPGAKDLPLAPPHRLRFPVGPLLPPPPFYFGGKIPPPFFGVGGPLFFFVFCPNPPPPNFPPPPPPRVVCPN

SEQ ID NO: 248661 - protein, 72 aa, Glycine max
  Clone ID: PAT_MRT3847_66570C.1.pep
IHHFPPTDSFPPPMIPNGRPSQPIKKTKLPNHTTTSKASVFIILTLKRESHLWSLCLGNPHRQTDRNRSTHF

SEQ ID NO: 248662 - protein, 232 aa, Glycine max
  Clone ID: PAT_MRT3847_66571C.1.pep
MIVPIASNILIIERKIRMAGVSSMLLFFLFVILISQVSAQLSVTCDYSKVGNYTANSTYNTNLNTLLSTLSSNTEINYGFYNFSHGQSPDRVNAIGLCRGDVEPDKCRSCLNYARSNLTQDCPNQKEAIIHFDNCMLRYSNRTIFGQVENFPGLYMWNLKNATDVDEFNQVLANLMRNLKGVAASGDSRRKYATDDQTSGNFETIYGLVQCTPDLSETQCNDCLDGTISEIP

SEQ ID NO: 248663 - protein, 46 aa, Glycine max
  Clone ID: PAT_MRT3847_66572C.1.pep
HDELPADFNPKKKNQIKKICCRSKVTKLTYACMLNHNSSIVSPKFN

SEQ ID NO: 248664 - protein, 84 aa, Glycine max
  Clone ID: PAT_MRT3847_66573C.1.pep
YVTKRVRHCKCHGLAIYLGDYFLKTFLVRRSLHRINKNVCSHFFHRKMLLELSHVSKMIEASLLWQRVLTKNVFFTFLFFIILA

SEQ ID NO: 248665 - protein, 581 aa, Glycine max
  unsure (1)..(581): unsure at all Xaa locations
  Clone ID: PAT_MRT3847_66574C.1.pep
MASSSSLLLLEFKFLAPQITPKRRRSLSSFCSRHSVSLNSRYNVALRTRIRAVMEEGAVIDRVNDVKWSGNGVAASEYGGNGSVNGYVNGVSGVMESEDANGRLVKYVNGNGVAAEVVEDFAESLKRKEDGRKKRLEEIGKEDAWFKKQTGEAPIEVAVAPGGRWSRFKTYSMIQRTLEIWGFVITFIFKSWLNNRKFSYKGGMTEEKKILRRKALAKWLKESILRLGPTFIKVGQQFSTRVDILPQEYVDQLSELQDQVPPFPSETAVAIVEEELGSPLASVFDHFEYEPIAAASLGQVHRARLRGQEVVVKVQRPGLKALFDIDLKNLRVIAEYLQKIDPKSDGAKRDWVAIYDECASVLYQIDYTKEAANAELFASNFENLDYVKVPTIIWDYTTPQILTMEYVPGIKINKIQALDRLGLDRKRLGRYAVESYLEQIXSHGFFHADPPTXHPEXIAVDDVNGGRLIFYDFGMMGSISQNIREGLLEAFYGIYEKNPDKVLQSMIQMGVLVPTGDMTAVKRTAQFFLNSFEERLAAQRREREMETAELGFKQPLSKEEQVMKKKERLAAIGNAPGLVCL

SEQ ID NO: 248666 - protein, 47 aa, Glycine max
  Clone ID: PAT_MRT3847_66575C.1.pep
RQREEDDFPFYIKKKLKPVLKPENRPCSIFSSPNPITEAYYKACMNS

SEQ ID NO: 248667 - protein, 81 aa, Glycine max
  Clone ID: PAT_MRT3847_66576C.1.pep
SHSTCPLCRASLLPDQFSATNACSPIVLVLESGSSESSREIVPERVGSSAAVGRTSSVMTTDSRLGCRGDSEFGSTRVDLM

SEQ ID NO: 248668 - protein, 356 aa, Glycine max
  Clone ID: PAT_MRT3847_66577C.1.pep
LTMEYVPGIKINKIQALDQLGVDRKRLGRYAVESYLEQILSHGFFHADPHPGNIAVDDVNGGRLIFYDFGMMGSISPNIREGLLETFYGVYEKDPDKVLQAMIQMGVLVPTGDMTAVRRTAQFFLNSFEERLAAQRREREEATTELGFKKPLSKEEKIKKKKQRLAAIAGEDLLSIAADQPFRFPATFTFVVRAFSVLDGIGKGLDPRFDITEIAKPYALELLRFREAGVEVVLKDFRKRWDRQSQAFYNLIRQADRVDKLANIIQRLEQGDLKLRVRTLESERAFQRVAAVQKTIGNAVAAGSLINLATVLYLNSIRVPAIAAYIFCAIFGFQVLLGIVKVKKLDERERLITGIA

SEQ ID NO: 248669 - protein, 194 aa, Glycine max
  Clone ID: PAT_MRT3847_66578C.1.pep
DSLSLLRNLKIINFSNNKFSGSIFPLTGSNSLTVLDLTNNSFSGSIPSILGNSRDLTRLRLGNNYLTGTIPSELGHLTELNFLDLSFNNLTGHVLPQLSNCKKIEHLLLNNNRLSGEMSPWLGSLQELGELDLSFNNFHGRVPPELGGCSKLLKLFLHHNNLSGEIPHEIGHLTSLNVFNLQKNGLSGLIPSTI

SEQ ID NO: 248670 - protein, 193 aa, Glycine max
  unsure (1)..(193): unsure at all Xaa locations
  Clone ID: PAT_MRT3847_66579C.1.pep
ARNSARAIGEDLLAIAADQPFRFPATFTFVVRAFSVLDGIGKGLVPGLVFPELAKPIALKWLKXREAGVEVILKDFRKRWDRQSQAFYNLIRQADRVDKLANIIQRLEQGDLKLRVRTLESERAFQRVAAVQKTIGNAXGSLINLATILYLNSIRVPATIAYVFCAIFGFQVLFGIVKIKKLDERERLITGTA

SEQ ID NO: 248671 - protein, 42 aa, Glycine max
  Clone ID: PAT_MRT3847_6657C.1.pep
GRKVFLSHGIIRRKYANIQAKHLFVYEISAHIPLLWGALIYL

SEQ ID NO: 248672 - protein, 428 aa, Glycine max
  Clone ID: PAT_MRT3847_66580C.1.pep
PQVIAEYLQKIDPKSDGAKRDWVAIYDECASVLYQEIDYTKEAANAELFASNFKNMDYVKVPTIYWDYTTPQILTMEYVPGIKINKIQALDQLGVDRKRLGRYAVESYLEQILSHGFFHADPHPGNIAVDDVNGGRLIFYDFGMMGSISPNIREGLLETFYGVYEKDPDKVLQAMIQMGVLVPTGDMTAVRRTAQFFLNSFEERLAAQRQEREEATTELGFKKPLSKEEKIKKKKQRLAAIGEDLLSIAADQPFRFPATFTFVVRAFSVLDGIGKGLDPRFDITEIAKPYALELLRFREAGVEVVLKDFRKRWDRQSQAFYNLFRQADRVDKLADIIQRLEQGDLKLRVRTLESERAFQRVAAVQKTIGSAVAAGSLINLATVLYLNSIRVPAIAAYIFCALFGFQVLLGIVKVKKLDERERLITGTA

SEQ ID NO: 248673 - protein, 62 aa, Glycine max
  Clone ID: PAT_MRT3847_66581C.1.pep
VSYNVRKNYYMDKYNSSNILIENNKHSQCLSSKRKQSCHLLYGLGKMYFLFFKNGHHCFQFN

SEQ ID NO: 248674 - protein, 194 aa, Glycine max
  Clone ID: PAT_MRT3847_66582C.1.pep
MWEQKLYEIIRIRGRKLFQLAPDNVVVSQRVVVNPDGSGNFTTINDAVVAAPNNTGVGNGFFVIHVVAGVYEEYVSIPKNKQYLMMIGDGINQTIITGNRSVVDGWTTFNSATFAVVAQGFVAINITFRNTAGAIKHQAVALRSGADLSAFYNRSFEGYQDTLYTHSLRQFYRNCDIYGTVDFIFGNAAVVLQD

SEQ ID NO: 248675 - protein, 770 aa, Glycine max
  unsure (1)..(770): unsure at all Xaa locations
  Clone ID: PAT_MRT3847_66583C.1.pep
VLSLILSMASSSSLLLLELKFLAPQITPKRRRSLSRFCSQNSRYNVALRTRIRAFKEEGAVIDRVNDVKWSGNGVAASEYGANGSVNGYANGVSGVRESENANGSLVKYVNDNGNGNGVAAEVVEDSAEASKRMEDGRKKRLEEIGKEEAWFKKQTGEAPIEVAVAPGGRWSRFKTYSMIQRTFEIWGFVATFIFKAWLNNQKFSYKGGMTEEKKTLRRKALAKWLKENILRLGPTFIKIGQQFSTRVDILPQEYVDQLSELQDQVPPFPSETXTSDSWQPIVEEELGAPLGDVFDQFEYEPIAAASLGQVHRARLNGQEVVIKVQRPGLKDLFDIDLKNLRVIAEYLQKIDPKSDGAKRDWVAIYDECASVLYQEIDYTKEAANAELFASNFKNMDYVKVPTIYWDYTTPQILTMEYVPGIKINKIQALDQLGVDRKRLGRYAVESYLEQILSHGFFHADPHPGNIAVDDVNGGRLIFYDFGMMGSISQNIREGLLEAFYGVYEKNPDKVLQSMIQMGVLVPTGDMTAVKRTAQFFLNSFEERLAAQRQEREGWKQLNLDSKNQLSKEEQIKKKKQRLAAIGEDLLSIAADQPFRFPATFTFVVRAFSVLDGIGKGLDPRFDITEITKPYALELLRFREAGVEVFLKDLRKRWDRQSQAFYNLFRQADSSGXLDDIMQRFEQGELKLGRVRTLESERAFQRVATVQKTIGNAVAAGSLINLATVLYLNSIRVPAIAAYIFCAIFGFQVLLGIVKVKKLDERERLITGTA

SEQ ID NO: 248676 - protein, 120 aa, Glycine max
  Clone ID: PAT_MRT3847_66584C.1.pep
QSSPRIIITILQRVSKSTIWTQIRAVNTRATAIQRGALRARDSASRCIRSISVQVSSHSMRTISAHHIHEHRPKVFHPDPTYITCEVHRDDLLHEVKEIQVVFLKRIVEKIMVLFRVKDT

SEQ ID NO: 248677 - protein, 80 aa, Glycine max
  unsure (1)..(80): unsure at all Xaa locations
  Clone ID: PAT_MRT3847_66585C.1.pep
YXFYLIIXNNTNXTIALYLIQTKYLXXXSYXXXXXXXXXXRAVSISLSXFXSXLXPSLRYLLNLXXLGQYSTXPRFVKXK

SEQ ID NO: 248678 - protein, 617 aa, Glycine max
  unsure (1)..(617): unsure at all Xaa locations
  Clone ID: PAT_MRT3847_66586C.1.pep
MSDSASSTSYSSEDNESSTVTGLDSPVTKVWDGKSNRNQAVSYVHHPLENFDNHSAKKRNKSHSRYPRLSRAQSGSKRSWPGGQKIQTWQEVERTSFLSGDGQDILNSSKSHINSEESSDDADMESLGRLYSGAAASSSAYSISISDSCSLSVDPLKSSSAVDSFYKLRCXGANIVKSGSKTFAVYSISVTDVNNNSWSIKRRFRHFEELHRRLKEFPEYNLHLPPKHFLSTGLDVPVIQERCELLDKYLKKLMQLPTVSESIEVWDFLSVDSQTYIFSNSFSIMETLSVGLNAKPFQKTKNTSNFSAPASDPVSFQRENCSAESKEAVLGARTNVEANGLRSKVNSTPLSLPKKSTHEPRKSFDNSSSNTDIQAQKSAPSPNNLQKTAKERDNSDQVSEVHHDASDAFPTEWVPPNLSVPILDLVDVIFQVHDGGWIRRKAFWVAKQILQLGMGDAFDDWLIEKIQLLRKGSVVASGVKRVEQILWPDGIFITKHPNRRPPSPSSPSQNSPHGNQPTQVSSPRLDDEQKQEADRRAKFVYELMIDHAPPAIVGLVGRKEYEQCARDLYFFLQSSVILKQLAFDILELLLTSAFPELDNVFKQLHEEKHKFGEFRTQ

SEQ ID NO: 248679 - protein, 87 aa, Glycine max
  Clone ID: PAT_MRT3847_66587C.1.pep
IQGPRPCLPWLKGKKPNLGLPLGMLNLLLVFQRECPPPPLIYDDYPAILIVWFSGAVFVFGVPFFWPGFTKKKRGLPPPSIFLSLAR

SEQ ID NO: 248680 - protein, 106 aa, Glycine max
  Clone ID: PAT_MRT3847_66588C.1.pep
ADSLLYSCSLSIPTLRETQAGLGDIEKRIALDRDCSFDHISVDEDMTKSKGKDPLEGLGGPMTRARERKSKEALQQVLSILFEYKPKFQGEKSKVVSCIMAQMEED

SEQ ID NO: 248681 - protein, 39 aa, Glycine max
  Clone ID: PAT_MRT3847_66589C.1.pep
IISADNYYECISCKYLSNSQTRWILKQIMALLFMDKCSP

SEQ ID NO: 248682 - protein, 81 aa, Glycine max
  unsure (1)..(81): unsure at all Xaa locations
  Clone ID: PAT_MRT3847_6658C.1.pep
ENAAAAKEAVTKNDALFETMDTCLRTNLTGRVNGGLHXPEDMHASATMLINTDTLGRDASTGKTLSLAAEMLPNLLVLPKL

SEQ ID NO: 248683 - protein, 51 aa, Glycine max
  Clone ID: PAT_MRT3847_66590C.1.pep
GRCMETHILDMGQHKVLKPHISCLKKRLYSHTTFITHLGKAKNARTISRAD

SEQ ID NO: 248684 - protein, 40 aa, Glycine max
  Clone ID: PAT_MRT3847_66591C.1.pep
SGNRFLRWSIRMNWSTQKVQTTLAIYLRCNHCELGYNMSK

SEQ ID NO: 248685 - protein, 174 aa, Glycine max
  Clone ID: PAT_MRT3847_66592C.1.pep
TRPERTTRSGHSRTLGSPPLRLSMVSASAPPPQAQSDAAGSGEEVSKKVRKPYTITKSRESWTEQEHDKFLEALQLFDRDWKKIEAFVGSKTVIQIRSHAQKYLLKVQKNGTSEHVPPPRPKRKAAHPYPQKASKNGHIFVISEEKMSQDKKAVAETKLTEEEKLLEEKIAGFG

SEQ ID NO: 248686 - protein, 86 aa, Glycine max
  Clone ID: PAT_MRT3847_66593C.1.pep
SPGTNSRSCCLKLRMHCHSKYIYRWDRERLWIKCYYPNYQSHVKYLCQSGLTSLLCCYPVGVLCALSYSAACPLHPPPPTQAGGSA

SEQ ID NO: 248687 - protein, 81 aa, Glycine max
  Clone ID: PAT_MRT3847_66594C.1.pep
QVWHFLWYSNKGDKSLGCLNLGLHIIISCSNVNNCPRTVPLRGPVNRIRRGVMFSSRMQHPFSNLGAFFSSPQRGGPGGLL

SEQ ID NO: 248688 - protein, 62 aa, Glycine max
  Clone ID: PAT_MRT3847_66595C.1.pep
NGTVAHLCHLFIQLGRQESVRARRDLTSQKSIGYGYVNFRSRLDTGRAPDVINVTILHNRTR

SEQ ID NO: 248689 - protein, 123 aa, Glycine max
  unsure (1)..(123): unsure at all Xaa locations
  Clone ID: PAT_MRT3847_66596C.1.pep
MQGGKKAGESIKETAANIGASAKGGMEKTNGNVQEKGKRMTARDSKQKGLGTQNKDAKMSHAELDKXQAARQHNTAAKHAATAWHMGQPMGNHQTSAMPGHGTGQPTGHVTDGMVGSHPIGTN

SEQ ID NO: 248690 - protein, 107 aa, Glycine max
  Clone ID: PAT_MRT3847_66597C.1.pep
VLKGLFWFFQHHKMTKMVVMKGLLLFFCLVRNYFSFIVNLEEFWAYTNCLCPCFYILEAKLVLVVWMVPPLLVSAARWFAGLMGSLCLGGGFVVFFFFFFRGRSISS

SEQ ID NO: 248691 - protein, 176 aa, Glycine max
  Clone ID: PAT_MRT3847_66598C.1.pep
MGSRLGRRVVQFANLPIKLLMPNSFTNIHEIALKTIPSATKIEIKRVLQSLYGFDVDKVRTLNMEGKKKKRGGLLIAKPDYKKAYVTLKTPLSISPDLYPIRIIDEDKKRINKQAKSSLVQDHEAHTEAHHHWLHDRKEAQPPFRPQKHGRLGRPEGASNAKFPWSSMRSASGSTR

SEQ ID NO: 248692 - protein, 42 aa, Glycine max
  Clone ID: PAT_MRT3847_66599C.1.pep
AWRLALPPCGRTWSFLEVEVLVRVRDGRRMLPHQHASRKHTP

SEQ ID NO: 248693 - protein, 88 aa, Glycine max
  Clone ID: PAT_MRT3847_6659C.1.pep
GYPTGKNFFSRGPKDPSPPKEVLHKTPGEKYSYKAGTHPCWDALKPNGAFPWGAPKGKTGPLGFLTPCEPSGCSFPPHQERWPPSLKM

SEQ ID NO: 248694 - protein, 78 aa, Glycine max
  unsure (1)..(78): unsure at all Xaa locations
  Clone ID: PAT_MRT3847_665C.1.pep
ARTRSRTFPXSTPRRLVPFSPRNGVMLPHRKCKISTSLFAKXLQCSQCGYVLSLPLLATRDLIYLVQVFQSERTTQFA

SEQ ID NO: 248695 - protein, 127 aa, Glycine max
  Clone ID: PAT_MRT3847_66600C.1.pep
GSSGWSFSENSFSRPRSNILARGFFELARSPIGCVPLNLSRVSWSDLAPPQTLAQIARHKTQHQSPNSCRLFGARIAVFIVRRFGRRACEFRCRFGFVWEIPAKLGKDTGDRNGKEGRQCREGKRFF

SEQ ID NO: 248696 - protein, 362 aa, Glycine max
  Clone ID: PAT_MRT3847_66601C.1.pep
MAPSTEQNPSLSKQKLHCRLLSPAKLFTRPKRFTYSEIKAATKDFSNLIGKGGFGDVYKGELPDHRVVAVKCLKNVTGGDAEFWAEVTIIARMHHLNLVRLWGFCAEKGQRILVYEHIPGGSLDKYLFRVNKSHNNNHLKQQSSSLNPNTPQQERHVLDWSMRYRIALGMARAIAYLHEECLEWVLHCDIKPENILLGDDFCPKISDFGLAKLRKKEDMVTMSRRRGTPGYMAPEWITADPITSKADVYSFGMVLLELVSGIRNFEIQGSVVRSEEWYFPGWAFDKMFKEMRVEEILDGQIRDAYDSRAHFEMVNRMVKTAMWCLQDRPELRPTMGKVAKMLEGTVEITEPKKPTVFFLGEE

SEQ ID NO: 248697 - protein, 67 aa, Glycine max
  Clone ID: PAT_MRT3847_66602C.1.pep
YNIQKDFTLHMQMKHRGRLQIYVNTLTRKTITLDDGSSGTVYNAIAEIQDNESNLQIPRSLLMLGCM

SEQ ID NO: 248698 - protein, 107 aa, Glycine max
  unsure (1)..(107): unsure at all Xaa locations
  Clone ID: PAT_MRT3847_66603C.1.pep
KSMASRGHLDPWTPSELYCDSVCCXESCHXPQKMQDNLSTSKKLLVLIGWKVLSASQQCCLTNRILVIHKIWSQYACSFNIQPQANFNIQAQRTAYYNEYITDHIRI

SEQ ID NO: 248699 - protein, 42 aa, Glycine max
  Clone ID: PAT_MRT3847_66604C.1.pep
GVWESTGTPKAKNITPQSPNLGRKLNLEGLFSSPRKLWMNLG

SEQ ID NO: 248700 - protein, 199 aa, Glycine max
  unsure (1)..(199): unsure at all Xaa locations
  Clone ID: PAT_MRT3847_66605C.1.pep
MINKVAVLLVVLLFIIAALASDPDPVMDFCIAKSPDNSFSCKNSSTATVEDFTYSGIKSPGNFKQTGFSSMAVNSNVFPGLNTLGVSFVRADFGVGGVNVPHFHPRATEVAFVLEGKIYSGFVDTNNKVFAKVLEKGEVMVFPRGLVHFQMNVGDRPATILGSFDSQNPGLMRIPNAVFGSDIXXELFXKAFGLSSRSF

SEQ ID NO: 248701 - protein, 90 aa, Glycine max
  Clone ID: PAT_MRT3847_66606C.1.pep
QDQTQQQNNGFVVGEHQSSGVQELYHKLRSSSSVNYWGSDNSPVFLSNMASSSSSLSNILESSSVSGSEFGCWNPTLSWSDLPTTNGAYP

SEQ ID NO: 248702 - protein, 92 aa, Glycine max
  Clone ID: PAT_MRT3847_66607C.1.pep
KAHLSMKNTKSYLRTPIKNFPTSRPLGIAIINIFNRTPKAGLTGPGTKRHYSIKASHGPFLEKEFFTLGVKKQGTLPPDISSHQKTKIFHRI

SEQ ID NO: 248703 - protein, 59 aa, Glycine max
  Clone ID: PAT_MRT3847_66608C.1.pep
DIKRNIDQRWHAFSFYGIAARVSQHHKRLSLTTNGLGIALEFHINPMWFPSDNNGYPYY

SEQ ID NO: 248704 - protein, 79 aa, Glycine max
  Clone ID: PAT_MRT3847_66609C.1.pep
NWGETNGTSLNWVVPCGIGLVLGRGQLASIPSVGYRESLSFQCMEKMGRGYFFSQERVVFFPLCWVGCHCANSVKANAF

SEQ ID NO: 248705 - protein, 61 aa, Glycine max
  Clone ID: PAT_MRT3847_6660C.1.pep
SLYHSFIHSFIHNNPLPITTNQTKPYFLNYGSLFILNKLKHPTILCYIYLLFFFQQSSITN

SEQ ID NO: 248706 - protein, 132 aa, Glycine max
  Clone ID: PAT_MRT3847_66610C.1.pep
CCTAARRRQKGRIIHVYTPEIIKTDAANFRELVQRLTGKPKEEGTGGSKSETALTKEPMDSHPKKAMIMQDEEEFLSLQNGTRLKNEHKEEEVQDDVWRSKSNEKFSGFLDGFSELDGFMEELSTLPAGNQN

SEQ ID NO: 248707 - protein, 71 aa, Glycine max
  unsure (1)..(71): unsure at all Xaa locations
  Clone ID: PAT_MRT3847_66611C.1.pep
RRTKTQSSKVKMKNMASAANEQVDIYKAKIDEKAEQATARTDEERAIAHEHAKSKEAXAKMELHDAKASHA

SEQ ID NO: 248708 - protein, 74 aa, Glycine max
  Clone ID: PAT_MRT3847_66612C.1.pep
KKKKKGWPHLVSVFARKFISGRNLHAYRFLLLRVQLALFPILVMPASWCEFAFLHNSHTIFRSDALSVFPWVPN

SEQ ID NO: 248709 - protein, 50 aa, Glycine max
  unsure (1)..(50): unsure at all Xaa locations
  Clone ID: PAT_MRT3847_66613C.1.pep
GRIWKIRSYYAIKGVLHALRGSNIYVILTVPNDLLHSLTSTXAGTDWINK

SEQ ID NO: 248710 - protein, 91 aa, Glycine max
  Clone ID: PAT_MRT3847_66614C.1.pep
IKMHKTLGKMSGGLFYRGLAPRNNFRGSVPSFVPLPSIPKSEKKRLPTRPFFFFSLQAIKKHFFVSGRDTISIHVFLRFNGRRISKESSVH

SEQ ID NO: 248711 - protein, 84 aa, Glycine max
  Clone ID: PAT_MRT3847_66615C.1.pep
VISLPSLWQQVRIYLRHCLKNWSTAMARSIPPVHTRYNLLVRSPFYPMSSSTRVALIRVRWWSMRECLTVAKLAACSTSVFGYR

SEQ ID NO: 248712 - protein, 68 aa, Glycine max
  Clone ID: PAT_MRT3847_66616C.1.pep
VSVNSLSFEINLKSMCLKKNPHDFIFFYSLFVRVEGVTHRSKPTNHNLPAVTGFLSLYEHCRRAICDF

SEQ ID NO: 248713 - protein, 46 aa, Glycine max
  unsure (1)..(46): unsure at all Xaa locations
  Clone ID: PAT_MRT3847_66617C.1.pep
LYYFKLIGGFVKVALVVYNGLVLILVKVTVSVWGAYRIKRAAMMXG

SEQ ID NO: 248714 - protein, 51 aa, Glycine max
  unsure (1)..(51): unsure at all Xaa locations
  Clone ID: PAT_MRT3847_66618C.1.pep
KKHSLCYLPHNPLTINTLTTSTTKIPILISXLTSIITHTTNSPLKHSPKPT

SEQ ID NO: 248715 - protein, 60 aa, Glycine max
  Clone ID: PAT_MRT3847_66619C.1.pep
LRSSSSSSYAIFTMCVRIIVISIRSHSSTSYQVYKPFHATLTTTAVRRHLCCIIGLRAPS

SEQ ID NO: 248716 - protein, 37 aa, Glycine max
  Clone ID: PAT_MRT3847_6661C.1.pep
LITPPHHTFSFNKTFINTTYPQIFKIYAHQTLFFFQL

SEQ ID NO: 248717 - protein, 28 aa, Glycine max
  Clone ID: PAT_MRT3847_66620C.1.pep
MLALVQANFLLIMHVFFFKALLCLLYTV

SEQ ID NO: 248718 - protein, 146 aa, Glycine max
  Clone ID: PAT_MRT3847_66621C.1.pep
MATPEASGSGEKVEGSEPSVTYYRLEEVAKRNSAEETWMVIHGRVYDITRFLSEHPGGEEVLLEQAGADATESFEDVGHSPDAREMLKQYYIGDVHPSDLKPKGDDKDPSKNNSCQSSWAYWFVPIVGAILIGFLYRHFWADSKSS

SEQ ID NO: 248719 - protein, 49 aa, Glycine max
  Clone ID: PAT_MRT3847_66622C.1.pep
DCDWCFCFLNSFFYSIDVVVRNGRFFVGFRMVLGVVKKLVRVLRRVFPL

SEQ ID NO: 248720 - protein, 78 aa, Glycine max
  Clone ID: PAT_MRT3847_66623C.1.pep
GRRRGGYGRMVGYGQLWGHGFLFNLTLCLIYLRAFTWTIFFFLFHHLLAWLALSMPKTILSIPAPFPTSQSVSPKLPT

SEQ ID NO: 248721 - protein, 153 aa, Glycine max
  unsure (1)..(153): unsure at all Xaa locations
  Clone ID: PAT_MRT3847_66624C.1.pep
GSSSTRICLSGSSGSRYNTVHGQWKHFDVKVKDSKTLLFGEKXVTRFGSRNPEEIPXGEVGACYVGESTGVFTDTDKAAAHSHAGAKKVVISGPSKDAPMHVDGVNESEYXPELDIASNASSTTKXLAALAKAMNDRYGIEEGLMTTCHAITA

SEQ ID NO: 248722 - protein, 157 aa, Glycine max
  Clone ID: PAT_MRT3847_66625C.1.pep
MAHLEDSSAWNSSIPHPKLNERILSSLSRRTVAAHPWHDLEIGPGAPAVFNCVVEIGKGSKVKYELDKTSGLIKVDRILYSSVVYPHNYGFIPRTICEDSDPMDVLVLMQEPVLPGSFLRARAIGLMPMIDQGERDDKIIAVCADDPEFRHYTDMNE

SEQ ID NO: 248723 - protein, 213 aa, Glycine max
  Clone ID: PAT_MRT3847_66626C.1.pep
MAHHEDSSAWNSSKPHPKLNERILSSLSRRTVAAHPWHDLEIGPGAPAVFNCVVEIGKGSKVKYELDKTSGLIKVDRILYSSVVYPHNYGFIPRTICEDSDPMDVLVLMQEPVLPGSFLRARAIGLMPMIDQGERDDKIIAVCADDPEFRHYTDIKELPPHRLAEIRRFFEDYKKNENKIVDVEDFLPAEAAIDAIKYSMDLYAAYIVESLRH

SEQ ID NO: 248724 - protein, 71 aa, Glycine max
  Clone ID: PAT_MRT3847_66627C.1.pep
DREANIKKKRNGKIEYFGEEQEISSFLVCLTTKQLQNEGSIHKGEYREANIKKKRNGKIEYLLKNRSFPHS

SEQ ID NO: 248725 - protein, 399 aa, Glycine max
  Clone ID: PAT_MRT3847_66628C.1.pep
MVKAYLRYEPAASFGVIASVVSNITYDSSGKHLLSPALEKVGVWHVRQGLCTKTLTPSSSSRGPSLAVNSIASSPSSLIASGYGDGSIRIWDSDKGTCETTLNGHKGAVTALRYNKTGSLLASGSRDNDVILWDVVGETGLFRLRGHRDQAAKQLTVSNVSTMKMNDDALVVAISPDAKYIAVALLDSTVKVHFADTFKFFLSLYGHKLPVLCMDISSDGDLIVTGSADKNIKIWGLDFGDCHKSIFAHADSVMAVQFVPKTHYVFSVGKDRLVKYWDADKFGLSKTLELHHADIWCLAVSNRADFIGSHDRSIRRWDRTEEQFFIEEEKEKRLEEMFEADIDNAFENKYALKEEIPEEGAVALAGKQTQETLSATDLIIERLDIAEAEEKCIAKHQEK

SEQ ID NO: 248726 - protein, 55 aa, Glycine max
  Clone ID: PAT_MRT3847_66629C.1.pep
IIKKMMKEDLHSSSNPNADSRNQSESQPNPSLIAPVEKININKISYLPLRPKQQS

SEQ ID NO: 248727 - protein, 115 aa, Glycine max
  Clone ID: PAT_MRT3847_6662C.1.pep
MPTLNLFTNVPVDTVVASDILRDATKAVAKIIGKPESYVMILLNGGVPIAFAGTEEPAAYGELISIGGLGPSVNGKLSSTIAEILETKLYIDSSRFYIKFYDVQRSFFGFNGSTF

SEQ ID NO: 248728 - protein, 255 aa, Glycine max
  Clone ID: PAT_MRT3847_66630C.1.pep
MNEKSSGQAIFILTNGDTRSNEEKKTNDSVMKLVLQISETKPSLESSSPSLGQKRRAEVLDLFTNVKSPRVEEKEEGKKVFSRHSSFNNLDLNMKADEEEDDDGSSPISSDLTRETVVDQLELIENRFEFNEGPEREREREVTQMFLSRIKESFEEVYDDDNGDGVVVNFTVEERVIEEIGVGFGNFTNSMFEKWLKDIFQSSLLQTVVNFGDGGKERGIGFTLCWGGKGDRKSDSDGFMGSCLPKNVQVNYFMD

SEQ ID NO: 248729 - protein, 185 aa, Glycine max
  Clone ID: PAT_MRT3847_66631C.1.pep
KVFLRHSSFNHLDLNMKADEEEDDDEGEEKTGGSSPISSDLTRETVVDPLSWNGALESIENRFELNEGPQREREVADMFLSRIKESFEEVYDDDDGVVVNFTVEERVIEEIGVGCGNFTNSMFEKWLKDIFQSSLLQTVNFGDKGKEGGIGFTLCWGGKGDRKSDSDGFMGSCLPKNVQVNYFMD

SEQ ID NO: 248730 - protein, 59 aa, Glycine max
  Clone ID: PAT_MRT3847_66632C.1.pep
EFVTPPGMSIKFKRGQKEKIESPLKDPMAQLEIEDASNDALKKKELALKGVVPKAMSPR

SEQ ID NO: 248731 - protein, 110 aa, Glycine max
  Clone ID: PAT_MRT3847_66633C.1.pep
EARVQRLLRRERKGEQQGLIPLTTVCGFRDCDARTHGHHLERCTYLRRVSSRRKWSHPDDVGRRIDCSSNDCNFHVACNIFERRIDGIETRKLGITWDNLHLSPRVTVAL

SEQ ID NO: 248732 - protein, 60 aa, Glycine max
  unsure (1)..(60): unsure at all Xaa locations
  Clone ID: PAT_MRT3847_66634C.1.pep
SRSTHASWWLCAGVQLVILDGGKDLWTVRGTRDVKEMLPYLIHKLKANXVEVXPPPMKDD

SEQ ID NO: 248733 - protein, 72 aa, Glycine max
  unsure (1)..(72): unsure at all Xaa locations
  Clone ID: PAT_MRT3847_66635C.1.pep
KXEGEKAQXRPPTHFFFXHLITLFLTISKNIGPPPSLPKTSQLIPVNFITLSHLSFHNDLFTLILPHQPHLI

SEQ ID NO: 248734 - protein, 58 aa, Glycine max
  unsure (1)..(58): unsure at all Xaa locations
  Clone ID: PAT_MRT3847_66636C.1.pep
RPTRXXTLTXSYFNQFILAHCIASLWLLPLLISVPLRLVQALCSVMINESSLINLIIS

SEQ ID NO: 248735 - protein, 54 aa, Glycine max
  Clone ID: PAT_MRT3847_66637C.1.pep
NCVDEQQQCVLQTTRNKIREYDAFYVGYTKKAYGKGRKFNKILISLEVSQIQRM

SEQ ID NO: 248736 - protein, 65 aa, Glycine max
  Clone ID: PAT_MRT3847_66638C.1.pep
FMINLSLVPININCNYSKLVSNRKSSETSISHSQIHFIQGRFTLRFYHTFSSLWKQGTIKIMFLL

SEQ ID NO: 248737 - protein, 72 aa, Glycine max
  Clone ID: PAT_MRT3847_66639C.1.pep
HWIASFLTRLFGIRSGLAWVGCLAFGVISQHLKTLLGVSQRDVYTRTVVSVEDVVLSYVITYYELYVGGGAS

SEQ ID NO: 248738 - protein, 124 aa, Glycine max
  unsure (1)..(124): unsure at all Xaa locations
  Clone ID: PAT_MRT3847_6663C.1.pep
MEEGTFEQPSLEKHYYGNCPGCKVDQAKELRKDVSIRNLSYIWMAVLCGXTALPVASLFPFVYFMVKDFNIAKTEADISTYAGYVGLSFMLGRALTSIFWGMLSDRYGRKPVLFQGYYLCIFNT

SEQ ID NO: 248739 - protein, 87 aa, Glycine max
  Clone ID: PAT_MRT3847_66640C.1.pep
GGPKFKFFFLFFTPKILGWGPSFPTLFTRWNGFKRSKGGFFPFLGQNLRGLVIFLSQGWVSFPVSFFLKGFFSCFLPFCNFLPGTPI

SEQ ID NO: 248740 - protein, 86 aa, Glycine max
  Clone ID: PAT_MRT3847_66641C.1.pep
GDITGGRSFMPETRGLVPRLKEQSHSSLHLGSRLLTAKIMRLCATRRRSEARSMTLLDCKLTHYAIRSGRSSQVQSASALLADGCS

SEQ ID NO: 248741 - protein, 45 aa, Glycine max
  Clone ID: PAT_MRT3847_66642C.1.pep
SKNKRNWKESQVSTPEKRSSEESMNCVFLGSRPVPLQGLNTQTWG

SEQ ID NO: 248742 - protein, 103 aa, Glycine max
  unsure (1)..(103): unsure at all Xaa locations
  Clone ID: PAT_MRT3847_66643C.1.pep
GDQLNQYTQGPIQPCPKTHPFDSLPRASLKVTFLAAVLCMVVVSAPMAHAPITCGQVTNILINCISYLHNGGTQPSGCCNXVNSLNAAAKNTTDRQTACNCLK

SEQ ID NO: 248743 - protein, 58 aa, Glycine max
  Clone ID: PAT_MRT3847_66644C.1.pep
TNCNPLLLNNILPQYLIVQLFANIQARHSVNTSKTTFNPNYADRVQYESHAYLTYTKV

SEQ ID NO: 248744 - protein, 334 aa, Glycine max
  unsure (1)..(334): unsure at all Xaa locations
  Clone ID: PAT_MRT3847_66645C.1.pep
IMLPRKKEIXIYANMTEHQKNLQDHLVNKTLGNYLKENMSSGLSVPAIMIRNLAIQLRKVCNHPDLLESAFDDSYLYPPLEEIVGQCGKFHLLDRLLQRLFSRNHKVLIFSQWTKVLDIMDYYFSEKGFAVCRIDGSVKLEERKQQIQDFNDVNSNCRVFLLSTRAGGLGINLTVADTCILYDSDWNPQMDLQAMDRCHRIGQTKPVHVYRLSTAQSIEGRMLKRAFSKLKLEHVVIEKGQFHQERTKPASMDEIEEDDVLALLRDEETAEDKKIHTDISDEDLEKLLDRSDLIVNDSNDDNFKAPVSAFPLKGPGWEVVIPTATGGMLSTLNC

SEQ ID NO: 248745 - protein, 57 aa, Glycine max
  Clone ID: PAT_MRT3847_66646C.1.pep
TLLVSSFDLVLLILAQSCSSFVLSSTTMTLYGLCVWGYHCLGCLCILCRFQTRFSLK

SEQ ID NO: 248746 - protein, 136 aa, Glycine max
  Clone ID: PAT_MRT3847_66647C.1.pep
MAEVLYWISTFVLILTLLCILGYQLILLVDLEFDYINPYDSTSQINQVVLPEFIIHGIFCFTNLIAGHWFIFLISLPFLYYNLRLYIKREHLADVTEIYNKLNWEKKKRLFKVAYLVLVFAFCIVSLVWTLTEDVH

SEQ ID NO: 248747 - protein, 61 aa, Glycine max
  Clone ID: PAT_MRT3847_66648C.1.pep
GGSMYRLPGSGGMPAGGGGYPDSGHYGLSASSGYQNQPPPPSGASPVPRVPPMYPNVPPYY

SEQ ID NO: 248748 - protein, 61 aa, Glycine max
  unsure (1)..(61): unsure at all Xaa locations
  Clone ID: PAT_MRT3847_66649C.1.pep
GRXEVGHXMKAXALKTLVGQGGXPTDNXSXLMXMSXLXXXXVXXVXNXXCEXLXPPXVXIX

SEQ ID NO: 248749 - protein, 107 aa, Glycine max
  unsure (1)..(107): unsure at all Xaa locations
  Clone ID: PAT_MRT3847_6664C.1.pep
MRRRIRMAHRKKGHPRHGSLGFLPRKSAVRHIGKVKAXNKDDRSKAPKLTAFSGYKAGMTHIARQVEKAGSKIYKMETWQPETIIETPAMVIGGVEDYVNTPLGLRT

SEQ ID NO: 248750 - protein, 449 aa, Glycine max
  unsure (1)..(449): unsure at all Xaa locations
  Clone ID: PAT_MRT3847_66650C.1.pep
MATIVLSNCSSTSRRLFPLTSQIHSSFTRSPLSPPVFTNDSTSSSSSSSSSSNPWFTRTKPHVNVGTIGHVDHGKTTLTAAITRVLADEGKAKAFTFDEIDKAREDKKRGITIATAHVEYETARGHYAHVDXFGSADHLKTRITCAAQEDGSTLVACGPTGPMRQCKDHVSLARQLGLPSLVCFXLNQVYSLDKPELVELVEMVHRVVLDFYEFPGDEIPIIRGSALSALQGTNDEMGRQAILKLMDAVDEYIPDPVRQLDKPFLMPIEDVFSIQGRGTVATGRVEQGIIKVGDEVEVLGLMQGGPLKTTVTGVEMFKKILDQGQAGDNVGLLLRGLKREDIQRGQVIAKPGSVKTSKKFEAEIYVLTKDEGGRHTAFFSNYKPQFYLRTADVTGKVELPENVKMVMPGDNVTAVFELISAVPLEAGQRFALREGGRTVGAGVVSKVLS

SEQ ID NO: 248751 - protein, 228 aa, Glycine max
  unsure (1)..(228): unsure at all Xaa locations
  Clone ID: PAT_MRT3847_66651C.1.pep
PSVSAFHSIVRAFHSSVFSSLQWLLSFSGISSSTSRRLFPLTSQIHSSFSRSPLSPLVFTNDSASSSSSSTPNPWWRSMATFTRTKPHVNVGTIGHVDHGKTTLTAAITKVLADEGKAKAVAFDEIDKAPEEKKRGITIATAHVEYETAKRHYAHVDCPGHADYVKNMITGAAQMDGGILVVSAPDGPMPQTKEHILLARQDGEPSLXVYLNKEADSDVPQLAISRHK

SEQ ID NO: 248752 - protein, 144 aa, Glycine max
  Clone ID: PAT_MRT3847_66652C.1.pep
PLKTTVTGVEMFKKILDQGQAGDNVGLLLRGLKREDIQRGQVIAKPGSVKTSKKFEAEIYVLTKDEGVRHTAFFSNYKPQFYLRTADVTGKVELPENVKMVMPGDNVTAVFELISAVPLEAGQRFALREGGRTVGAGVVSKVLS

SEQ ID NO: 248753 - protein, 73 aa, Glycine max
  Clone ID: PAT_MRT3847_66653C.1.pep
MTLFFFPHHTCFNCVNLNTPQKSQIVGRKKQALFLEGAQVDCSFVYPAALYVFVQCSSKICIVPKTKTIIQPF

SEQ ID NO: 248754 - protein, 84 aa, Glycine max
  unsure (1)..(84): unsure at all Xaa locations
  Clone ID: PAT_MRT3847_66654C.1.pep
TTIGIICAYGLSPGVEGIRQQTAIPQTVSQRTAWNQVATERTPWHFDIDQHSCXLLSIDPGGGGTLMHKTADRITLIQNASNKD

SEQ ID NO: 248755 - protein, 61 aa, Glycine max
  unsure (1)..(61): unsure at all Xaa locations
  Clone ID: PAT_MRT3847_66655C.1.pep
MASKIKLSNPIREIKLLKLVLNISICERXYRLTIATKVLEQLSGQTPMFSKSRLTLSFPFD

SEQ ID NO: 248756 - protein, 150 aa, Glycine max
  unsure (1)..(150): unsure at all Xaa locations
  Clone ID: PAT_MRT3847_66656C.1.pep
PTRPILMNMPNAVLXMWRYAVGDLVFDDSKMTSPYIKCTVSFFIACGNLGDHTINPEAFPHKLVQHGEIQEKPVSKFSQEEYLTAWSTQVRSATTLLADGXPYLHAMGHDRSVSTIPGEFVIGAKWATINNMSAYGLNPGILCTRILATI

SEQ ID NO: 248757 - protein, 36 aa, Glycine max
  Clone ID: PAT_MRT3847_66657C.1.pep
FFFFFFFFFFFFFFFFFFFFFFFFFFWRNKKLKFRY

SEQ ID NO: 248758 - protein, 80 aa, Glycine max
  Clone ID: PAT_MRT3847_66658C.1.pep
PPRGAQKNFGGAPKKKKGGLGAFFPRTQKTKGCFLFPPTCFYPFFFEKPPPVFLPLKFPPPGFLGKFLKSGPFGAKDFLN

SEQ ID NO: 248759 - protein, 193 aa, Glycine max
  Clone ID: PAT_MRT3847_66659C.1.pep
FCFCCELECSELQASEKKLSNPMREIKVQKLVLNISVGESGDRLTRAAKVLEQLSGQTPVFSKARYTVRSFGIRRNEKIACYVTVRGDKAMQLLESGLKVKEYELLRRNFSDTGCFGFGIQEHIDLGIKYDPSTGIYGMDFFVVLERPGYRVGRRRRCKSRVGIQHRVTKEDAMKCFQVKYEALILNKSQAIV

SEQ ID NO: 248760 - protein, 84 aa, Glycine max
  Clone ID: PAT_MRT3847_6665C.1.pep
ASEQQRQTTTKTERLIPRIGTGHYHCYGPKVNFGRTIQAVDIIICENSTVVGTSMKRSRMCPWTSLTTTRISEYNKMAKPSPIL

SEQ ID NO: 248761 - protein, 39 aa, Glycine max
  Clone ID: PAT_MRT3847_66660C.1.pep
ELVPLEFFFFFFTKESLGISMYLVLGFLGLQQLQNYYNS

SEQ ID NO: 248762 - protein, 212 aa, Glycine max
  Clone ID: PAT_MRT3847_66661C.1.pep
MLEREASLVSSKIWIEPKHQATEVKVPVIYYLSRNGQLEHPHLMEVPISSPQRVLCLKDVIDRLSFLRGQGMANMYSWSTKRSYKNGFVWQDLSENDFIYPSSGHEYVLKGTQMIEASLSFRSCETISTSSSKSSTEAINSSTGADSPATIKGRSQSLNSSDYKFYSAKTCEEFAGKATNASTQTEEKHRERIKREEQVEECEGNGDARELG

SEQ ID NO: 248763 - protein, 55 aa, Glycine max
  Clone ID: PAT_MRT3847_66662C.1.pep
RNEKIACYVTVRGDKAMQLLESGLKVKEYELLRRNFSDTGCFGFGIQEHIDLGIK

SEQ ID NO: 248764 - protein, 182 aa, Glycine max
  Clone ID: PAT_MRT3847_66663C.1.pep
FQASEKKLSNPMREIKVQKLVLNISVGESGDRLTRAAKVLEQLSGQTPVFSKARYTVRSFGIRRNEKIACYVTVRGDKAMQLLESGLKVKEYELLRRNFSDTGCFGFGIQEHIDLGIKYDPSTGIYGMDFFVVLERPGYRVGRRRRCKSRVGIQHRVTKEDAMKWFQVKYEGVILNKSQAIV

SEQ ID NO: 248765 - protein, 181 aa, Glycine max; identical to SEQ ID NO: 226971
  Clone ID: PAT_MRT3847_66664C.1.pep

SEQ ID NO: 248766 - protein, 181 aa, Glycine max
  Clone ID: PAT_MRT3847_66665C.1.pep
MASEKKLSNPMREIKVQKLVLNISVGESGDRLTRASKVLEQLSGQTPVFSKARYTVRSFGIRRNEKIACYVTVRGDKAMQLLESGLKVKEYELLRRNFSDTGCFGFGIQEHIDLGIKYDPSTGIYGMDFFVVLERPGYRVGRRRRCKSRVGIQHRVTKEDAMKWFQVKYEGVILNKSQAIL

SEQ ID NO: 248767 - protein, 73 aa, Glycine max
  unsure (1)..(73): unsure at all Xaa locations
  Clone ID: PAT_MRT3847_66666C.1.pep
MVNGHQNFLQWVWNFRNANSANPRKFLLGKSKGFENSTGSEKHQAIALKVQADKANLXKCRMEWLQDTLYAQN

SEQ ID NO: 248768 - protein, 181 aa, Glycine max; identical to SEQ ID NO: 226971
  Clone ID: PAT_MRT3847_66667C.1.pep

SEQ ID NO: 248769 - protein, 46 aa, Glycine max
  Clone ID: PAT_MRT3847_66668C.1.pep
YLFEPCFILLLITFYVPFFLIHFPTILFICSLNVSAWHEMKSTKII

SEQ ID NO: 248770 - protein, 107 aa, Glycine max
  Clone ID: PAT_MRT3847_66669C.1.pep
LFFSVNYLLRNVFLHLVLTARYTVRSFGIRRNEKIACYVTVRGDKAMQLLESGLKVKEYELLRRNFSDTGCFGFGIQEHIDLGIKYDPSTGIYGMDFFVVLERPGYR

SEQ ID NO: 248771 - protein, 141 aa, Glycine max
  unsure (1)..(141): unsure at all Xaa locations
  Clone ID: PAT_MRT3847_6666C.1.pep
HIQXXRXXXXGAXNRAXXNXEXXGAGAXAPXXPFFGTSXKRGGPLGPHXXVSGGSFXKGAGEEKKEIXETQQTDXDRWKGLAYDISDDXXDXTXGKGLVDSPFQAPPDAGTSYAGLSSYECPRPGLRPGLDPXXDGCYLAP

SEQ ID NO: 248772 - protein, 145 aa, Glycine max
  unsure (1)..(145): unsure at all Xaa locations
  Clone ID: PAT_MRT3847_66670C.1.pep
VLEQLSGQXPVFSKVTRYTVRSFGIRRNEKIACYVTVRGDKAMQLLESGLKVKEYELLRRNFSDTGCFGFGIQEHIDLGIKYDPSTGIYGMDFFVVLERPGYRVGRRRRCKSRVGIQPRVTKEDAMKWFQVKYEGVILNKSQAIV

SEQ ID NO: 248773 - protein, 43 aa, Glycine max
  Clone ID: PAT_MRT3847_66671C.1.pep
LSYIIDNNKQYPVFDIRKGNSQDFKNPGKNLIQAFFVPQVRAK

SEQ ID NO: 248774 - protein, 181 aa, Glycine max
  Clone ID: PAT_MRT3847_66672C.1.pep
MASEKKLSNPMREMKVQKLVLNISVGESGDRLTRAAKVLEQLSGQTPVFSKARYTVRSFGIRRNEKIACYVTVRGDKAMQLLESGLKVKEYELLRRNFSDTGCFGFGIQEHIDLGIKYDPSTGIYGMDFFVVLERPGYRVGRRRRCKSRVGIQHRVTKEDAMKWFQVKYEGVILNKSQAIV

SEQ ID NO: 248775 - protein, 83 aa, Glycine max
  Clone ID: PAT_MRT3847_66673C.1.pep
MATEEPTVAVEPAPEPASADPPPEEKEETKPEAKAKKTKEPKPKKVSRPSNPATHPSYEEVRSETIILILVLIITLILILLQL

SEQ ID NO: 248776 - protein, 302 aa, Glycine max
  Clone ID: PAT_MRT3847_66674C.1.pep
MASEEPTVAVEPAPEPATAEPPPEEKEEPKPEAKAKKTKEPKPKKVSRPRNPPTHPSYEEMIKDAITSLKEKTGSSQHAIAKFIEEKHKQLPPNFRKLLLYHLKKLVAAGKLVKVKGSFKLPPTRPSASSSSSPAKKKKPAPAKPQPKPKPKPKPKPAAKAKDTKATKSKAPAKPKAAAKPKAKVPAKPKPAPKPKAAAAAASKPKPAAAKPKGTKPAAKPKPKPAAKTKAAAAKPAAKPKAKPAKASRTSTRTSPGKKAAPAAKPAAKKVAPAKKAPVKSVKPKSVKSPAKKATAKRGGRK

SEQ ID NO: 248777 - protein, 164 aa, Glycine max
  Clone ID: PAT_MRT3847_66675C.1.pep
TTHASADAWADAWADAWAKPKPAAKAKDTKATKSKAPAKPKPAAKPKAKAPAKAKPAAKPKASAAAKPKPAAAKPKAAKPAAKSKPAAKTKAVPAKPAAKPKAKPVKASRTSTRTSPGKKAAPAAKPAAKKVAVAAKKAPVKSVKPKSVKSPAKKATAKRGGRK

SEQ ID NO: 248778 - protein, 236 aa, Glycine max
  Clone ID: PAT_MRT3847_66676C.1.pep
VRTATATEASFKYDSVTRIPSSLDWRKRGAVTPIKDQGTCRSCWAFSTVATIEGLHQITKGELVSLSEQELVDCVKGDSEGCYGGYVEDAFEFIAKKGGVASETHYPYKGVNKTCKVKKETHGVVQIKGYEQVPSNSEKALLKAVAHQPVSAYVEAGGYAFQFYSSGIFTGKCGTDIDHSVTVVGYGKARGGNKYWLVKNSWGTEWGEKGYIRMKRDIRAKEGLCGIATGALYPTA

SEQ ID NO: 248779 - protein, 297 aa, Glycine max
  Clone ID: PAT_MRT3847_66677C.1.pep
MATEEPTVAVEPAPEPASADPPPEEKEETKPEAKAKKTKEPKPKKVSRPRNPPTHPSYEEMVKDAITSLKEKTGSSQYAIAKFIEEKHKQLPPNFKKLLLYHLKKLVAAGKLVKVKGSFKLPPTRPAASSSSSSSPAKKKKPAAAKSKPKPKPKPAAKAKDTKATKSKAPAKPKPAAKPKAKAPAKAKPAAKPKAAAAAKPKPAAAKPKAAKPAAKPKPAAKTKAVPAKPAAKPKAKPVKASRTSTRTSPGKKAAPAAKPAAKKVAVAAKKTPVKSVKPKSVKSPAKKATAKRGGRK

SEQ ID NO: 248780 - protein, 106 aa, Glycine max
  Clone ID: PAT_MRT3847_66678C.1.pep
HRCTTTCLGGGGGGGICKEKRKKGRRTKVCWGSYLLQKLYRELWVKELTRRQRKYRTKNVWLETIGKALYGVISRRHKTIHIEGGGKQNEAGLGKARTTAYVSSIT

SEQ ID NO: 248781 - protein, 74 aa, Glycine max
  Clone ID: PAT_MRT3847_66679C.1.pep
KKIGNKSNLLLKLNCIKNIKSYLGVTSIMENLGQLKPMARGPHSLQYFAQNPFFLAKSFSNRARLHLNPNKKGP

SEQ ID NO: 248782 - protein, 136 aa, Glycine max; identical to SEQ ID NO: 143601
  Clone ID: PAT_MRT3847_6667C.1.pep

SEQ ID NO: 248783 - protein, 84 aa, Glycine max
  Clone ID: PAT_MRT3847_66680C.1.pep
DLVRVKTGQLYRLRNHSATNVASLSTYDSSNPTEHWDFPQLSPNRKIKRHSKSSESSASALDETPIEKALSALPSQLSASKKIK

SEQ ID NO: 248784 - protein, 58 aa, Glycine max
  Clone ID: PAT_MRT3847_66681C.1.pep
PTRSEKLRTAFYFMVAIIIYGFCHFSDEEYLTGLQAIDQQLLSVLTMKQNILFWCICA

SEQ ID NO: 248785 - protein, 49 aa, Glycine max
  unsure (1)..(49): unsure at all Xaa locations
  Clone ID: PAT_MRT3847_66682C.1.pep
SVNRVKNKINNVILMEFYKIIRSVLSXKMLENSEISLVIKHLYFSQTNL

SEQ ID NO: 248786 - protein, 130 aa, Glycine max
  unsure (1)..(130): unsure at all Xaa locations
  Clone ID: PAT_MRT3847_66683C.1.pep
DCDLWNPACSNAMTMSFNPDPCSDAWRKQFLKRXGCHRDIISLSGWTATPMQDVQVTIDXFICSHECVPRTYCVINPQNPLAXNKWMGKLTFPQGTFQSXKRMPLSIGGGXGAKNAIPMNMPNGWSFNVE

SEQ ID NO: 248787 - protein, 52 aa, Glycine max
  Clone ID: PAT_MRT3847_66684C.1.pep
RKVVREVGELLAAFNLWDVIEFMMPLDLQRFRTNNFPTLHKFDTMIEKVLSD

SEQ ID NO: 248788 - protein, 62 aa, Glycine max
  Clone ID: PAT_MRT3847_66685C.1.pep
IIHFCYAQAPLGGRFLFKLLVRFAIFFPMSKGKGNLLLYGLGPKKKKKKKKKKKKKKKKRLT

SEQ ID NO: 248789 - protein, 75 aa, Glycine max
  Clone ID: PAT_MRT3847_66686C.1.pep
ASYFSKILPYRQWWQLITAGDLHTLIIINWGINTRALDVTDLYGGIIRRREVPIVVYRRENLCCGRRGTDGGDGT

SEQ ID NO: 248790 - protein, 51 aa, Glycine max
  Clone ID: PAT_MRT3847_66687C.1.pep
EGTQHFTLYSSSRCGFGVESWIKKSISALRIPWDPLSSAILTTAVSISEPT

SEQ ID NO: 248791 - protein, 48 aa, Glycine max
  Clone ID: PAT_MRT3847_66688C.1.pep
GFSLTPGRHFLLMLKVYQGFAMGPAEWLSSGPISCYDDCVECPLSDWA

SEQ ID NO: 248792 - protein, 64 aa, Glycine max
  unsure (1)..(64): unsure at all Xaa locations
  Clone ID: PAT_MRT3847_66689C.1.pep
XFFFFCFFFFLFFFFFFLRFYPHIGGAFFSWGGETQKAPPFKGAMAPPGSICHTWGKKKLKGGP

SEQ ID NO: 248793 - protein, 262 aa, Glycine max
  unsure (1)..(262): unsure at all Xaa locations
  Clone ID: PAT_MRT3847_66690C.1.pep
MGCFASKNADTKASRAARWRSTGIVALRDSKLKTFPDEILELDRSVRTLDLTHNRIVDIPVEISXKLINVQRLILAENLIERLPVNLGKLQSLKLMNLDGNRITSLPDELGQLVRLERISISGNLLTSLPATIGSLRNLVLLNVSNNKLQSLPESVGSCFSLEELQANDNLIEDLPSSVCNLSHLKSLCLDNNNVKQIPLNLLKDCKALQNISLHANPISMDQFQLMEGFQEFEARRKKKFDKQIDSNVMIGSKGLDEGVDL

SEQ ID NO: 248794 - protein, 58 aa, Glycine max
  Clone ID: PAT_MRT3847_66691C.1.pep
HHSWFSSISHVGSQSVYTIPLQQLLKLPQIISVYERAIHLYSGPKAHTLHVFFCLPPQ

SEQ ID NO: 248795 - protein, 119 aa, Glycine max
  Clone ID: PAT_MRT3847_66692C.1.pep
SAVYPIYRSQLITYLTDIPSTYQGHKEINVRTTSVYGTNIPVAPFNLLRLSQYQSDCNVLKTIQAYRRIRGKDIACISGRYHFYGRWPAIISFGPRTNGFIMGENPKQAQIFQWCSAKW

SEQ ID NO: 248796 - protein, 61 aa, Glycine max
  Clone ID: PAT_MRT3847_66693C.1.pep
ATKPRCQSNMKNIQGGTVTPLTTESHSSIKEKIQPNHVQNSIIGSPPSKLGGLNHGRTMGC

SEQ ID NO: 248797 - protein, 96 aa, Glycine max
  Clone ID: PAT_MRT3847_66694C.1.pep
KAKGWESVRELRKAILKFGEAYEQAESSKLQQGSRMEKQRMKFAKDLELQRMQFFMKTQVEISQLKLGRKGGNPSNNHHGTTNNNNSNHNNNSGSE

SEQ ID NO: 248798 - protein, 79 aa, Glycine max
  Clone ID: PAT_MRT3847_66695C.1.pep
HHFICLAANQVIFYYPQWSSLPKLVFQEKRTEHVWLRSEVKVMRRFLVIICPLSSNFKHSYNLQRSIFDPFTYHENALL

SEQ ID NO: 248799 - protein, 107 aa, Glycine max
  Clone ID: PAT_MRT3847_66696C.1.pep
PHISKLLPSSPLSAYKPPFTRFPFALYSFKVSSVYCCVSNLLLPCWLLTTICMEAPSSFFVGSVLDFRGMHFARTASPSCSTICNREPLFNSNNIFYVFNLKMLSTS

SEQ ID NO: 248800 - protein, 371 aa, Glycine max
  Clone ID: PAT_MRT3847_66697C.1.pep
MDDDDEIQSHPSPASGSPPSSPRANGRITVTVAAPAPQAQPPPPNSLALALPIQQPAKGNGGGGGGGGGREDCWSEGATAVLIDAWGERYLELSRGNLKQKHWKEVADIVSVREDYTKAPKTDIQCKNRIDTVKKKYKSEKAKIAAGATSKWPFYDRLEQLIGPSAKIPGVGGASGTSAAGNSNLQPQKVPLGIPVGVRGGANQFNHPHKQPQPVPLKNQKIQFRRRGPPVESDSEERDASSPASSDSFPPESFERKRPRLMSSNTTKGSGERRKAKGWGSAVRELTQAILKFGEAYEQAESSKLQQVVEMEKQRMKFAKDLELQRMQFFLKTQLEISQLKLGRKGGNPSNNLNGTTNNNNNNHNNNSDSE

SEQ ID NO: 248801 - protein, 283 aa, Glycine max
  Clone ID: PAT_MRT3847_66698C.1.pep
DELGEISRYYKRIHHTKHFDDREADCRFSYNMSRNANQHCCRSSFANIGFNFDVAGDCGEIFNRLVDRPDFGDIHSSKRSDILNEEPDWLLSKSCIKSCKRPNKNKGKRDRFRNSTLEENLERSRRSFSAPPFHRSKRRFFSLNHPSEMIAKRQIGRVSNPAFNHQEASNFKYPQQSPVALHQSTEDFLLQEFKINVKQTTEVLGDMQDNDIADIDEFESFNIQKSAPFGELISRDVQDSIDYGTKWRNCSPKITKNDKLANIQSQNNILDISSGFLHLAGDS

SEQ ID NO: 248802 - protein, 101 aa, Glycine max
  Clone ID: PAT_MRT3847_66699C.1.pep
NSARDEILVRSASSFLLPLSLLITLLFLGSFLLKARGYTYSPSTTILKSHSSLVILDPQFSQLIHTTSLNQESLLPRVISFSRYCYKASQGKNFFKQILFG

SEQ ID NO: 248803 - protein, 49 aa, Glycine max
  unsure (1)..(49): unsure at all Xaa locations
  Clone ID: PAT_MRT3847_6669C.1.pep
XSEXTFRXHALLLTYKCRLREDSLLSVTFPPVLNEAIEVMKRAAPLVIF

SEQ ID NO: 248804 - protein, 88 aa, Glycine max
  Clone ID: PAT_MRT3847_666C.1.pep
YTSVQERALPSTFLGMAIVPPRSCSLSSILYYSHIIILCIKKIYCLDITPYYHYSIYGPSENPILSFILMADLTDGTGQISLECTIAI

SEQ ID NO: 248805 - protein, 51 aa, Glycine max
  Clone ID: PAT_MRT3847_66700C.1.pep
SYCELGSLSYLIEAVSVKGSRLPLQALLSLPSRSITGSTCLSLMTTLATSL

SEQ ID NO: 248806 - protein, 50 aa, Glycine max
  Clone ID: PAT_MRT3847_66701C.1.pep
FDVILRCNVVHLACHNKGQFNLHECVCSHVSNSPSCSGIEQLQVITGRVG

SEQ ID NO: 248807 - protein, 166 aa, Glycine max
  Clone ID: PAT_MRT3847_66702C.1.pep
MKTILSAETMNIPDGVSVKVNAKVIEVEGPRGKLVRDFKHLNLDFQLITDENGKRKLKVEAWFGSRKTSTAIRTALSHVENLITGVTKGYRYKMRFVYAHFPINASIGNDNKSIEIRNFLGQKKVRKVDLLNGVSVVRSEKVKDELILDGNHIELVSRSCALINQV

SEQ ID NO: 248808 - protein, 193 aa, Glycine max
  unsure (1)..(193): unsure at all Xaa locations
  Clone ID: PAT_MRT3847_66703C.1.pep
MKTILSTETMNIPDGVSIKVHAKVIEVEGPRGKLVRDFKHLNLDFQLITDENGKRKLKIDAWFGSRKTSAAIRTALSHVENLITGVTKGYRYKMRFVYARFPINASMGNSNKSIEIRNFLGKKKVRKVDMLDGVSVVRSEKVXKDELILDGNDIELVSRSCALINQKCHVKNKDIRKFLDGIYVSEKGTILEE

SEQ ID NO: 248809 - protein, 133 aa, Glycine max
  Clone ID: PAT_MRT3847_66704C.1.pep
IAPASSKKYRGKRKPAVTHQNRKCTPECSDSLKTWAKCICSVHIGFTLLPSASSGRDDMTFILYSQGSCWGSSEVQSIIIKAGSWQHLSIQAGKGLEELSSTSSSARGSQSLLCSLLHSCQSHQESFGKLRAA

SEQ ID NO: 248810 - protein, 637 aa, Glycine max
  unsure (1)..(637): unsure at all Xaa locations
  Clone ID: PAT_MRT3847_66705C.1.pep
QSFWDVSNNRNGSVSLHDALIQGFKSGSNWSARVAGFNYLLSWINQXIKGNSWELSGIFNSXVASFFTTFMDPFHNVAQAALXTLAYFIVVFRILLEGDLETFFPRLNCSQMKFVTLYAERFSPALXVTRLISFKDSLLPALLRSLDEQRSPKAKLAVIEFAINSFNKHAMNPEGAANIGILKLWLAKLTPLVNDKNTKLKEAAITCIISVYSHYDSTAVLNFILMLSVEEQNSLRRALKQYTPRIEVDLINYLQNKKEKQRSKSSYDPSDVVGTSSEDGYVGYSRKAHYLGKYSAGSLDGDGGRKWSSQDSTLIKASLGQASSGETREHLYHNFETDPNSGSLGSKTKDLAYAVNPMGQNFGSQTSQHGHMDSSVSLEGLSIPRLDVNGLMPSEHLNGTEGYVNDKEHPSELERNHHSAEDVKINSMTHTGPSIPQILHMICSGGDGSPISSKRTALQQLVEASITNDHSVWTKYFNQILTVVLEVLDDSDSSVREHALSLIVEMLKNQKDAMENSVEIVVEKLLNVTKDIVPKVSNEAEHCLTIVLSQNDPFRCLSVIVPLLVTEDEKTLVTCINCLTKLVGRLSQEEVMAQLPSFLPALFEAFGNQSADVRKVLKIFFIWSNLCSIVSFILRNV

SEQ ID NO: 248811 - protein, 130 aa, Glycine max
  unsure (1)..(130): unsure at all Xaa locations
  Clone ID: PAT_MRT3847_66706C.1.pep
DWFPPVRRKKAAKGFEEVYXFNGSLLDGVDGTIFMQGKKGLNFLVAETDGSNPRRDPRVPGKQQSVISFTKKNTPGIDVVGGDGFPSKVFFNGEECSLPSVVPSSGTRMEVSLATMMFLVLFLWILFMRQ

SEQ ID NO: 248812 - protein, 73 aa, Glycine max
  Clone ID: PAT_MRT3847_66707C.1.pep
VQVAVLMEDFFYNFSRGWDLEFFQMVYRNRHRERLKNFFVFGNGKCPHPKFFCLVQTIRKFVKGKNSGRPSTS

SEQ ID NO: 248813 - protein, 315 aa, Glycine max
  unsure (1)..(315): unsure at all Xaa locations
  Clone ID: PAT_MRT3847_66708C.1.pep
GLSTPRLDVNGLMFSEHLNGAEGYVNDKEHPSELELNHNSAEDVKINTMTHTGPSIPQILHMVSYATSIGXSWFFNFIIRKTKRSCRKRNFVRKNRMVKXILQGWKIAAENNRSSIITHALSLIVEMLKNQKDAIENSVEIVVEKLLNVTKDIVPKVSNEAEHCLTIVLSQNDPFRCLSVIVPLLVTEDEKTLVTCINCLTKLVGRLSHEEVMAQLPSFLPALFEAFGNQSADVRKGGGWLSFLTAXKDQPLGMATLFAHLQTVVFCLVDIYIMLGKAFLPYLEGLNSTQLKLVTIYANRISQARTRKSIDTTHD

SEQ ID NO: 248814 - protein, 129 aa, Glycine max
  unsure (1)..(129): unsure at all Xaa locations
  Clone ID: PAT_MRT3847_66709C.1.pep
GFPMAPMEIIKLPGGAPPNFLEVGGKAFENPVVWAFXILPPHXKVKALLVPLFGGIKKCDFIPSGKVNAPKEVALKVPLFVFLEGPHFFPGKRIFKESGLALIPAEDFDYPAPKPVKAVFKRRFFFGPI

SEQ ID NO: 248815 - protein, 75 aa, Glycine max
  Clone ID: PAT_MRT3847_6670C.1.pep
TARTCLLFLFVFIYFYFIYFCVFIFFIFFFFFFFFFFFFFFFLGKTTPPFIQTKKTLLGNWGGEKKGIFFLKQIP

SEQ ID NO: 248816 - protein, 183 aa, Glycine max
  Clone ID: PAT_MRT3847_66710C.1.pep
NRKGRRNRNGPKGKTLPYKPNLRNSKMGPPRGPKKNPPPQGGPNPPKSLQNPGQGFVWPQPPKNRGASNQGKPPGGGLLKKTPAPKKKNGTAPPLPPKGGSFGPHRSFSGGGGAPTETPPHGEDPPKNPLPPPNHGVRERGDPPPHKHNSPREHPPWATAFGEKNPPPTPRGPPPGNFRARGP

SEQ ID NO: 248817 - protein, 70 aa, Glycine max
  Clone ID: PAT_MRT3847_66711C.1.pep
ALKNLFWVPLSQWWKGLLKSPLVSGRLVGVLMTRRIRHPADPRVLGPMIAVLQGLIPGDTCMNFMSIFID

SEQ ID NO: 248818 - protein, 78 aa, Glycine max
  Clone ID: PAT_MRT3847_66712C.1.pep
DERHTMRILSSITMPKLTSPALICSSLILTTPQTLSIPSPNPLFALRPKLKITSNKQLHPLLLTMLTNFTTQISPPLT

SEQ ID NO: 248819 - protein, 159 aa, Glycine max
  Clone ID: PAT_MRT3847_66713C.1.pep
MNGKASISKELNAKHAKVEDGHRKTILMLPLSQLMLGHLSSQSISKSSSVQPIRTISQLSSLSQSCRLKILEGLLKLPENRECADCRNKAPRWASVNLGIFICMQCSGIHRSLGVHISKVRSTTLDTWLPDQVSFMQLMGNEKSNKHWEEKIPPNFDRS

SEQ ID NO: 248820 - protein, 38 aa, Glycine max
  unsure (1)..(38): unsure at all Xaa locations
  Clone ID: PAT_MRT3847_66714C.1.pep
YYFYKFFLFLHHKMXLIKGQAYSMLMRKQSHCENHHTK

SEQ ID NO: 248821 - protein, 72 aa, Glycine max
  Clone ID: PAT_MRT3847_66715C.1.pep
QKVAFASFYFSISRGREDLILHHNCHGFASLLTHHFLYIIGIAFLLPFQSHSKSRPKSLIHPIVSNTLLFSL

SEQ ID NO: 248822 - protein, 72 aa, Glycine max
  Clone ID: PAT_MRT3847_66716C.1.pep
RWPVSCVPSKLISSPFFFFSYNIQWYIKVQESILTEEITSEILFLGKVYIQTLFRTSVVIQIMIFIPEQEKI

SEQ ID NO: 248823 - protein, 71 aa, Glycine max
  Clone ID: PAT_MRT3847_66717C.1.pep
KGGGVGNFGRFRPQMLPPVGLPFFVPGFAWGLSPERPPVFLSGEETLRGFFGPPVVFGVLKKIPFCRLGLG

SEQ ID NO: 248824 - protein, 88 aa, Glycine max
  Clone ID: PAT_MRT3847_66718C.1.pep
DIEAQASPVDPQTHQLEICDFGSAALVAGREARISYICSKYYTAPELTSGAPDYTSVIDIWSPGCVHGALMRGQALFPGEIGVHQLVA

SEQ ID NO: 248825 - protein, 266 aa, Glycine max
  Clone ID: PAT_MRT3847_66719C.1.pep
MDPSSSLPPSLHLAMAALLGASFMALSAFFIHRRTVDHVLHRLVELRRKPLATSSDDSDDDDDDRTGFGDDNGDTETDADLRSYRGALSMSVDDSSNVLRSYRISSSMPNVVSATDWIREDAKNRASSLENLQFVPSGLPSLRTGSNNGESVQVLCSYKRIGSVGRIMTPRSPGRTTFESAEDSDEEEIQLADDNRIPFSNTYGLDSNVCNLPAVPFRVEDANNQMYGEASKEVKAGADMNGHGITDSTPVHVADDIFAIMSLQEI

SEQ ID NO: 248826 - protein, 82 aa, Glycine max
  Clone ID: PAT_MRT3847_6671C.1.pep
SLGNTGDVNVYAQMIDEAEGLEKIENLQSHDNNEIYEKVVKILETYWLEEEDETLPSGNGAQPGFNFGNNELPVPSGGFNFS

SEQ ID NO: 248827 - protein, 115 aa, Glycine max
  unsure (1)..(115): unsure at all Xaa locations
  Clone ID: PAT_MRT3847_66720C.1.pep
MAVNENLASRTSSAKLCRDRGRGPYSHGPPFTFVPYALSQYEAGTASDSDEILPTMDPTANATSKPKIFVRXSWKQLHHRVNAVYDPSLIRVDXAGTQLYNHADSASPVARDVDH

SEQ ID NO: 248828 - protein, 80 aa, Glycine max
  Clone ID: PAT_MRT3847_66721C.1.pep
FHLDPSSNSLNNEKPTRTNNRGRKRRKKQWRRKRKNNTATNFKRKKTPGAFSELKTIAGCTSNNAGAPSITLDAFGPDMV

SEQ ID NO: 248829 - protein, 103 aa, Glycine max
  Clone ID: PAT_MRT3847_66722C.1.pep
DTIDYRKIAVFVETSSAIKPGHLLSKLRAVTPDRVLEYQKKLKEVKRYFEYEEPDGTINEIWRQVSKKLPLIKLMINREKRLFGKEVECSCVCTNQTAVIRTL

SEQ ID NO: 248830 - protein, 49 aa, Glycine max
  Clone ID: PAT_MRT3847_66723C.1.pep
KNPAKFNFNNGHTGKNFPWGGYLTIKRTLAPERTDTGGGTLTKHKPFFS

SEQ ID NO: 248831 - protein, 497 aa, Glycine max
  Clone ID: PAT_MRT3847_66724C.1.pep
MHTFSKLKKVAMMPYPKNTNEEAKAKARKPKPPTFVSRFSTTFSAMARKPLLKQTLATLFLLFVLYAIFNAFFQPTDSSAFDAAATFSSASSVLLSGATTKSPAINVFLYDLPRRFTSDVIHHHALARGGASRVTPDDDAAAPKYPGHQHMAEWYLFADLSRAESERAGSGSPVVLVADPEEADLFFVPFFSSLSLIVNPVRPPGSNSGSEKPVYSDEENQEALVEWLEKQEYWKRNSGRDHVIVASDPNAMYRVIDRVRNAVLLVSDFGRLRPDQGSLVKDVVVPYSHRIRTYQGDAGVEDRNTLLFFMGNRYRKEGGKIRDILFKILENEKDVIIKHGAQSRESRRAASQGMHTSKFCLHPAGDTPSACRLFDAIVSLCIPVIVSDNIELPFEDTIDYRKLAVFIETSSAIKPGYLVSKLRALTPDRVLAYQKELKEVKRYFEYEEPDGTVNEIWRQVSKKLPLIKLMINREKRLFGKQVECSCVCTNQTAVRTL

SEQ ID NO: 248832 - protein, 193 aa, Glycine max
  unsure (1)..(193): unsure at all Xaa locations
  Clone ID: PAT_MRT3847_66725C.1.pep
SRSTHASESTNYRTLLHKKKKKTNELRFLHSFHPIPIPRFIQNGSTPLPPPPPLPSPRTPXSIHLPHTSIPPPPXNLPPPPPNPPPPXFLPPHTPTLHPSYTPTPTPTTAIPLYTPPTSPSRRRTPTPTPTPYPLRPSPSPHXTLPWNPNPRIPDDXRSRFPPPPPSPAATPDRIPPLRPRPAPPPPRRRRSI

SEQ ID NO: 248833 - protein, 55 aa, Glycine max
  Clone ID: PAT_MRT3847_66726C.1.pep
CNWARHAKRGFLVLDFCKHLVSGCPILQVFYRSLNFFVKNIKNSEIVWRCHLYYG

SEQ ID NO: 248834 - protein, 80 aa, Glycine max
  Clone ID: PAT_MRT3847_66727C.1.pep
LIPFFDYFVPTLANVLLIILYWLIFFLLIVLCLASILLIYAPVYMKVFLHWHCFYNVAMAGFYCMLGQYASTQSFALICT

SEQ ID NO: 248835 - protein, 98 aa, Glycine max
  unsure (1)..(98): unsure at all Xaa locations
  Clone ID: PAT_MRT3847_66728C.1.pep
GFGNSAATASSQEEGTLLGATXSPIVCRGYIGLKLKGGQYQYFEENLRNKSELLLKFNPIHKKGPVFIYNEKPITESIVVGGYIDETLKNHPKLAFES

SEQ ID NO: 248836 - protein, 84 aa, Glycine max
  Clone ID: PAT_MRT3847_66729C.1.pep
MASNISPSAFDKEQIFGMAEKEMEYRVELFNKMTQTCFNKCVDNRYKESELNMGENSCIDRCVSKYWHVTNLIGQLLGSGRPPM

SEQ ID NO: 248837 - protein, 201 aa, Glycine max
  Clone ID: PAT_MRT3847_6672C.1.pep
MGPTEVVYLSSDDESEKEVAFKAVKLEEDFVLDAKQYNETNKGQLAKHKRSQSHTTGQDSEENLSSNGPSTGHSNSSVLEQGPSPVDDTGISYASSIGVAPLCRQFWKAGNYDDGLGSKVTVQNAKNYLHVHPMFLHSNATSHKWAFGAMAVPPPSAVDEIQNGATFVIVDKTSNPRDGNPALLIQDDGGGMDPDAMRRCM

SEQ ID NO: 248838 - protein, 99 aa, Glycine max
  Clone ID: PAT_MRT3847_66730C.1.pep
ALVVFLSHQGPPPQTYSGLPLSPKSILLPWHISLLTPRSRLCLCPGPAALALTGSVPGCWAVALLPLTTACPSYLPNPTPINITARLAPRPALPLMLSI

SEQ ID NO: 248839 - protein, 115 aa, Glycine max
  Clone ID: PAT_MRT3847_66731C.1.pep
LGHVSSLRTEWLNALEPYWFLLPVAFSLPSPLLMLDSSKNAPINGDRQFFYVAYLTQLFVYIRSHSFGGQSKLKPSPRILDQAEMPSEPPFPPWPHQKLFFIRLQALSFGLIFTP

SEQ ID NO: 248840 - protein, 140 aa, Glycine max
  unsure (1)..(140): unsure at all Xaa locations
  Clone ID: PAT_MRT3847_66732C.1.pep
NLLIQGVDLFGKRIGYXLSFKADIVDXEPRHLVPGLXYANRPSVAELMLLISXEETYAXLTETEQXSSVMALIIMELPAGMLDDDERDTGDTACLEVEEDNGLKLSAGHMVHLTGLLDSTSECKGFRYCGGCDDDISMFL

SEQ ID NO: 248841 - protein, 466 aa, Glycine max
  Clone ID: PAT_MRT3847_66733C.1.pep
MREMATANRHSYELLLLHRLLLYFVVSCSLSLSWAVQDGERVMVRNTPQKNWWKPSLTNAEDDDPPPRPLKVTFAEPATHWTDAIPIGNGRLGAMVWGAVPSEALQLNEDTLWTGIPGDYTNKSAPQALAEVRKLVNDRKFAEATAAAVKLSGEPSDVYQLLGDIKLEFHDSHLNYSKESYYRELDLDTATAKIKYSVGDVEFTREHFASNPDQVIVTRLSTSKPGSLSFTVYFDSKMHHDSRVSGQNQIIMEGRCPGSRIPPRVNSIDNPQGIQFSAVLDMQISKDKGFIHVLDDKKLRVEGSDSAILLLTASSSFDGPFTKPEDSKKDPASESLSRMVSVKKFSYDDLYARHLADYQNLFHRVSLQLSKSSKTGSGKSVLEGRKLVSSQTNISQKRGDDTIPTSARVKSFQTDEDPSFVELLFQYGRYLLISCSRPGTQVANLQGIWNKDVEPAWDGAPHLNIN

SEQ ID NO: 248842 - protein, 70 aa, Glycine max
  unsure (1)..(70): unsure at all Xaa locations
  Clone ID: PAT_MRT3847_66734C.1.pep
MGDKHQQHQEDCSDFTFEDECTEDYRRCGYHAVRIGDTFNAGRYVVQSKLGXGHFSTVWLAWDTRHSRYV

SEQ ID NO: 248843 - protein, 121 aa, Glycine max
  Clone ID: PAT_MRT3847_66735C.1.pep
LSIFANMATANGNGTRDAGITDSEHFSPYRADGKLYGFVCVVTGATQPVGKAIVAELAAHGAACIYACSSLPSETYTELADSINAQYPNTKVIGYPYKINSEEDTLALIDDVLNSCGRLDV

SEQ ID NO: 248844 - protein, 62 aa, Glycine max
  Clone ID: PAT_MRT3847_66736C.1.pep
LSRLTPLPSTLKNSLSAQRPKPSLHRSINMAGAHFGFNRKTVECHESRPGNHPISVPFNVTH

SEQ ID NO: 248845 - protein, 108 aa, Glycine max
  Clone ID: PAT_MRT3847_66737C.1.pep
MLFFPRDNPPYSPNPSILTYSAPTSILVVFISFPFHSFCLFVSRERNINIYKLNMVLASPNSIRSEGILPSNELIPVVDLTAERSQVTKLIVKACEEYGFFKVINHGI

SEQ ID NO: 248846 - protein, 97 aa, Glycine max
  unsure (1)..(97): unsure at all Xaa locations
  Clone ID: PAT_MRT3847_66738C.1.pep
GPAGQTAERKARATRPRRDSPXXEREGXGQNGAARKAGADGRAEDQXXRAPEEAPDRTAILRAEEGARRAREPRRTRDKXEDAAEGPPEPXPSGRTR

SEQ ID NO: 248847 - protein, 282 aa, Glycine max
  Clone ID: PAT_MRT3847_66739C.1.pep
MHATMSMFHLICGIWGLLSVSFCTVVDCASCCHPYQFFQQSNRRFEQKTDTFWKFSEEADRWVEVQLPCGDLISGGDSECGKVKNRREESLDQEHGFDDKKKRLDRKDGKIGVLGPFDVVLMPLRKRISLTKMSETSVWVTGESGSIYERFWNGLEWVFAPHDLPISAGRAVAVFIINQMILALSESGNLYQMHLQLGETSQPVWVEFSATLNQIKDNDQEKNSLILMKSGVVSDDGQRGYFCTKNGTLVEIDVAESPRWTNHGQPAGANVAAIAAVASKRK

SEQ ID NO: 248848 - protein, 62 aa, Glycine max
  Clone ID: PAT_MRT3847_6673C.1.pep
GFVAHVKVPPQEYLGRAPFGARNFVKHPLPLFPNWAAIFGRILIKMVKNSSEGSEKKKKRGF

SEQ ID NO: 248849 - protein, 270 aa, Glycine max
  Clone ID: PAT_MRT3847_66740C.1.pep
TRPISRQDLIDWRAQLEYDFFSGVVDQISIKKAGYMDVKEIISSAVYVDMLAGDKSILRKVFGQSKRFQPNKPSTKAQAAVALTGGRMKEAISAELSRIEAENSARLAEAGEIWSELLSRGEIQRFWDEKLIEEKNRGFDVERLYHVEVKNLEEEEINQDKISAEYLKEKAAMDCQKQLLLNLKKEVDEISEKVALERVTYVDERHVVQKLLGDLELKHEELLNTKSTLEAEKEALQILRSWVEDEARRSQARAAVLEEVGRRWKWDDQA

SEQ ID NO: 248850 - protein, 89 aa, Glycine max
  unsure (1)..(89): unsure at all Xaa locations
  Clone ID: PAT_MRT3847_66741C.1.pep
SSRSPAFAAAFPITIXYPWPRPTPPPPVXAPLRGAEAEFFNLIYFFPDANWNVFCCCCYINLLLLLFPNICGNPFRVAPASPDFHVPVT

SEQ ID NO: 248851 - protein, 312 aa, Glycine max
  unsure (1)..(312): unsure at all Xaa locations
  Clone ID: PAT_MRT3847_66742C.1.pep
SFLALLSLLPLLLSLQFSSAQLPADTDNISSRTLDAILQDCAFKAFLRPKTGVPRPGKVPRSLNGIRVSAMRLRSGSLRTRGVESYKEFQIPIGVFEQPYVERLVFVYHNLGNWSEKFYPLPGYIYLAPVLGLXAYSGANLSDSELPELDIRASDKPILIKFPHVESAPLGSVPTCVYFDLHGSVQFDILLHGNVCSTFQQGHFSIVVESNAPSPAPAAVAVAADVGRSGSGRNKSKVWVIVASLVGGSLLLIMLSLLVAKVRRTKKGMKIQQLEWAAESNETLQIASIGGTKAPLAVGTRTRPTIENDYIP

SEQ ID NO: 248852 - protein, 152 aa, Glycine max
  unsure (1)..(152): unsure at all Xaa locations
  Clone ID: PAT_MRT3847_66743C.1.pep
PKGGPPPKPHPGKPRTRGAKDGNQPKSPGPRARPGXGPQGGNPPPPAGKRAPQGGGPSPSRGRENLQRGTAWAPSKVPPPGAKGTAPKVVKGGAPGVFPAPPGXKTGPRESNLGPPRKGRVPPGPGPVTRGPIKGPPPLNKGDPNALHCTCS

SEQ ID NO: 248853 - protein, 84 aa, Glycine max
  Clone ID: PAT_MRT3847_66744C.1.pep
SSSIFTRLKRWNGVNVSYHWLRWLWRVSSTQPDLDYQSVLDLYNKTGLRSHPVRGELVENLQQGLESAALHCRVRSRERIFPYL

SEQ ID NO: 248854 - protein, 111 aa, Glycine max
  unsure (1)..(111): unsure at all Xaa locations
  Clone ID: PAT_MRT3847_66745C.1.pep
XXLLHXLXPXHNQNXXSNPNAGIVRTNEQVQVPMEXXTXPDTCPXLXGPKXXGXXTSPXRXASVNXHXRXIXTCFDHXIKRXEKXXXXNXTVXXPKXXXAEXRXXVXVXAT

SEQ ID NO: 248855 - protein, 135 aa, Glycine max
  Clone ID: PAT_MRT3847_66746C.1.pep
ASALILSNATPPFLLLHHRDRQSVYSSPLCESVRFGVSHSLWLSLVIPFPAWSGGLRHVLGTFRDRVFVPLPRVDPMPGRLDPPPKYWSGFFVMPSHSRTSAWSSFSNIWFFVTVPRPPRLAPTSHVKMVLLLCV

SEQ ID NO: 248856 - protein, 111 aa, Glycine max
  unsure (1)..(111): unsure at all Xaa locations
  Clone ID: PAT_MRT3847_66747C.1.pep
MDNPEEIPLTPATPSTPGAPLYGGFTYGRNNNSXRSLLKKGRCSSVEEWSIIRLGATGRVXSLTLPSPPPGGPLARETAAEFIGTLILMXRCTADVIGNHKTHECETLIGC

SEQ ID NO: 248857 - protein, 95 aa, Glycine max
  Clone ID: PAT_MRT3847_66748C.1.pep
MDKFWWHAAWGLCLVPLSLAQIDLNITCRFAGVFHVEKNGRYSISRTEAADLCKAFNSTLPTMAQMEKALSIGFETCRYGFIEGHVVIPRIHPNS

SEQ ID NO: 248858 - protein, 106 aa, Glycine max
  unsure (1)..(106): unsure at all Xaa locations
  Clone ID: PAT_MRT3847_66749C.1.pep
MASETETWGFHAXINQLLSLIINNLYSNMDIFLSELIINASDAXYKTRFESFTXKSXLDAHPESFIPIFSDXTSSTLSIIDRSIAMTNAXWMNXLGTIARTGTKEF

SEQ ID NO: 248859 - protein, 63 aa, Glycine max
  Clone ID: PAT_MRT3847_6674C.1.pep
VLVNFLSFVIYPFDFFYSYFYLLFFFIPNCNGTIRGTNHWIAFALDIVLKIFVLFILMSLELG

SEQ ID NO: 248860 - protein, 73 aa, Glycine max
  Clone ID: PAT_MRT3847_66750C.1.pep
EHPSSFSRPLYCFCLFRHRASMLPSCTIYRCRYVLGPLFCFSLYLFCFSLYLSILSLSFSLIKNKHGSGNCLT

SEQ ID NO: 248861 - protein, 29 aa, Glycine max
  Clone ID: PAT_MRT3847_66751C.1.pep
VDCRVSRQRADLLGYHVLPVLLMRQLTKP

SEQ ID NO: 248862 - protein, 65 aa, Glycine max
  Clone ID: PAT_MRT3847_66752C.1.pep
GTSQNMSYNAGQAKGQAQEKAGNMMDKASSAAQSAQNSMQQAGQQMQAKAQGAADAVKNATGMNN

SEQ ID NO: 248863 - protein, 365 aa, Glycine max
  Clone ID: PAT_MRT3847_66753C.1.pep
MVFCGNSTEESELHHAQIHLYKHVYNFVSSMALKSAMELGIADVIHSHGKPMTISELSSALKLHPSKVSVLQRFLRLLTHNGFFAKTILPSKNGVEGGEEIAYALTPPSKLLIRHKSICLAPIVKGALHSSSLDMWHSSKKWFSEDKELTLYESATGESFWDFLNKTTESDTLGMFQDAMAADSKVFKLALEECKHVFEGLGSLVDVGGGTGVVTRLISETFPHLKCTVFDQPQVVANLTGNENLNFVGGDMFKSIPSADAVLLKWVLHDWNDELSVKILKNCKEAISGKGKEGKVIIIDIAIDEVGDDREMTELKLDYDLVMLTMFNGKEREKKEWEKLIYEAGFSNYKIIPICGFKSLIEVYP

SEQ ID NO: 248864 - protein, 88 aa, Glycine max
  unsure (1)..(88): unsure at all Xaa locations
  Clone ID: PAT_MRT3847_66754C.1.pep
RTRGLTFGLKMICFYXQXQXQXNVNFCKAHRTKTXXIISXRYLRRVFCYIFAPHLTSYSFMAVQIRNAFLPVSHDCYFVQSKLKMLPY

SEQ ID NO: 248865 - protein, 244 aa, Glycine max
  unsure (1)..(244): unsure at all Xaa locations
  Clone ID: PAT_MRT3847_66755C.1.pep
MAFPDPSMSVSPQRKMGRGKIEIKRIENTTNRQVTFCKRRNGLLKKAYELSVLCDAEVALIVFSSRGRLYEYANNSVKATIERYKKASSDSSGAGSASEANAQFYQQEADKLRQQISNLQNNNRQMMGDSLGSLTAKDLKNLETKLEKGISRDSXSKKNELLFAEIEYMQKREIDLHNNNQLLRAKIAESERNHHNMAVLPGGSNYDSMQSSQQQFDSRGYFQVTGLQPNNQYARQDQMSLQLV

SEQ ID NO: 248866 - protein, 129 aa, Glycine max
  Clone ID: PAT_MRT3847_66756C.1.pep
THSAKAPTRKSGTESCVRQTPTRPVSLATHHSKAMMLIYPQGVRVIVHTANLIYVDWNNKSQGLWMQDFPWKDQNSLSKGSGFENDLVEYLSVLKWPEFSVNLPFLGSVSICPSFFRKFDYSDARVFSH

SEQ ID NO: 248867 - protein, 87 aa, Glycine max
  Clone ID: PAT_MRT3847_66757C.1.pep
MANNTNMAAMQWQIFCLEHRSYKSHACLKSDHNSRKVVVCEACSMSIETTGHVGQDEEAILQKHLKSGNCDPTKKKKPICPVKRCRE

SEQ ID NO: 248868 - protein, 163 aa, Glycine max
  Clone ID: PAT_MRT3847_66758C.1.pep
LEESTNKHEFLSSKSFSSFLDEPCVCSEYFPLENDSVDESERNFEPESCERRCVDAAVELKTVPSVEQADEHLVENLNNNVLFEKFSADNNFLSEDDFICESTESNSMISSIGDEFLSDTDFGTTTNVHTLGNHDEENAVLTKEDLNSEGERRSESSDAEDRD

SEQ ID NO: 248869 - protein, 83 aa, Glycine max
  Clone ID: PAT_MRT3847_6675C.1.pep
PGLGIQLEKKLCFTIFLFFSLSQQKEGVRVGTALHSHFSRAGPTNPIKYTLTQQKQPQFLTPAPLTYSSSTGGGDFYREFMVE

SEQ ID NO: 248870 - protein, 44 aa, Glycine max
  Clone ID: PAT_MRT3847_66760C.1.pep
YDVLVLNSCYIMISAQVVVSLVMNWWHLSDIWFMWTEEKGRSAS

SEQ ID NO: 248871 - protein, 100 aa, Glycine max
  Clone ID: PAT_MRT3847_66761C.1.pep
AYQTNKHKKCDSSFYYTPLKTYIPEPLCDKLVRCSGHTEITLMWDITGGREYDCCIPDFRIARNTDLTESNDLYRYCPLTLTKKWTMDIALYYNIMQCCT

SEQ ID NO: 248872 - protein, 64 aa, Glycine max
  Clone ID: PAT_MRT3847_66762C.1.pep
LKVTDWKKGGQMMNIVMHLNALIKTHDWASWGQVFLTIHYHAKHSDACKWTQSEPHAREVIIPI

SEQ ID NO: 248873 - protein, 53 aa, Glycine max
  Clone ID: PAT_MRT3847_66763C.1.pep
LVLLSVLRELLIILLSNKALLKIENMLQNRSHFNSCSVIHNSLNLFFHLQDWT

SEQ ID NO: 248874 - protein, 210 aa, Glycine max
  Clone ID: PAT_MRT3847_66764C.1.pep
MGRSPCCEKAHTNKGAWTKEEDHRLISYIRAHGEGCWRSLPKAAGLLRCGKSCRLRWINYLRPDLKRGNFTLEEDQLIIKLHSLLGNKWSLIAGRLPGRTDNEIKNYWNTHIRRKLLSRGIDPATHRPLNDDKVLERCPDLNLELTISPPRQPQSDQHHLKPVGRNSNLCFACSLGLQNSKDHCSCALNTANAASGHDFLALKTSVLEMK

SEQ ID NO: 248875 - protein, 66 aa, Glycine max
  Clone ID: PAT_MRT3847_66765C.1.pep
EQIGSADRSERIRTYNFPQGRVTDHRVGITYHSVDDVMQGENLDVFIDALLLQEEMDAMATFSSSQ

SEQ ID NO: 248876 - protein, 42 aa, Glycine max
  unsure (1)..(42): unsure at all Xaa locations
  Clone ID: PAT_MRT3847_66766C.1.pep
SXTXLSTYHXCXXXSSXPXFGILSTXIXMXRPSSGSGPTSSP

SEQ ID NO: 248877 - protein, 144 aa, Glycine max
  Clone ID: PAT_MRT3847_66767C.1.pep
NLKNLKEVKVSGSKNLKELPNLSEATNLEVLDISACPQLASVIPSIFSLNKLKIMKLNYQSFTQMIIDNHTSSISFFTLQGSTKRKKLISVTSEELISCVCYKEKPSSFVCQSKLEMFRNNQSDMGRLPSSFMNLRRQRYLRVL

SEQ ID NO: 248878 - protein, 128 aa, Glycine max
  unsure (1)..(128): unsure at all Xaa locations
  Clone ID: PAT_MRT3847_66768C.1.pep
LXAMGHDSAGSTIPGEGDIGXQLDTNDNMWAYGLNPGMXGSRLWGTIPQAIAQETGGNQMATGRTPSNYDSSKQSFWQCSIDLLGGGIGGDKTGEWITLIQNAPISNLLRVAAWKKGWVMGKRGMAGN

SEQ ID NO: 248879 - protein, 142 aa, Glycine max
  unsure (1)..(142): unsure at all Xaa locations
  Clone ID: PAT_MRT3847_66769C.1.pep
RGGWFSSHPYKYIHHSDTHKQSYRQAIXKDTLLPHPPSPFSSPPXFTDNFILILYHTTYLTLLIHNFLYIHIYPITWSYPFXFNPHTFLTTHKYVHLYDHNFELIPFSYLITVFPLISLDLYIVHFTSANLFHSFYILISSP

SEQ ID NO: 248880 - protein, 122 aa, Glycine max
  Clone ID: PAT_MRT3847_6676C.1.pep
MELKKVGLVLFLLGFTATTVDATGFNPNSLITQLLPQIEGDSDDNYVKSNTEPCCDNCLCTNSIPPKCQCTDWAEDCHSACKGCICQRIWPPRCRCFDETDTCYDKCTSTSQETAKAHDRYN

SEQ ID NO: 248881 - protein, 99 aa, Glycine max
  Clone ID: PAT_MRT3847_66770C.1.pep
PGLRVITFGSVSNHENIFCPHPHVIERRYTIVFLARVSNELLNESSTPLLGLLLMMRHSTQSPLLSHTDKKAFDGKILAYNISEIRCLFPKKMVKLVVV

SEQ ID NO: 248882 - protein, 344 aa, Glycine max
  unsure (1)..(344): unsure at all Xaa locations
  Clone ID: PAT_MRT3847_66771C.1.pep
MRNETLRLILLLLLCSHLHSVLSWKKEEFRTCHQTPFCKRARSRAPGSSSLIATDVTISHGDLTAKLTPKHDSQSETXPLLLTLSVYQRGILRLKIDEDPSLSPPKKRFEVPDVIVSEFPSTKLWLPKISSVENGLSSSVYLSDGHSAVLRHDPFELFIRDDSSGDRVISLNSHDLFDFEQLKHKSEDDNWEEQFRSHTDRRPYGPQSISFDVSFYGADFVYGIPERAASLALKPTRGPNVDESEPYRLLTFDVFEYIHDSPFGLYGSIPFMVSHGKARGSSXGFFWLNAAEMQIDVLAPGWDAESGIALPSHRHSTPFWMXEAGXVDALPFIRYRTPKGCAHQ

SEQ ID NO: 248883 - protein, 64 aa, Glycine max
  Clone ID: PAT_MRT3847_66772C.1.pep
NEWDHNVPADHPITADFHVYIELNTMNLAAPWCYYYNAHIFNTFMLETAYQSISTCKLTLLIAL

SEQ ID NO: 248884 - protein, 93 aa, Glycine max
  Clone ID: PAT_MRT3847_66773C.1.pep
SVVILRFSSQYQLRELHKGSYSLLFIRLSRVVPSLYTRTTSGSVVLSPQILLSPPLSDVDHSPSSCSYLVGTSTITSSHCRNTECLCPISVLV

SEQ ID NO: 248885 - protein, 71 aa, Glycine max
  unsure (1)..(71): unsure at all Xaa locations
  Clone ID: PAT_MRT3847_66774C.1.pep
GIFAQNMVQSGGACTXCDPHXXPRCPXISPXSXKTXLXSSTXASMAASRQXXNXXRXYCXXVXXXXXAXXX

SEQ ID NO: 248886 - protein, 135 aa, Glycine max
  unsure (1)..(135): unsure at all Xaa locations
  Clone ID: PAT_MRT3847_66775C.1.pep
MSKMDEMIHSLRPGHESPMRDRTHLLCLXDAGCTICKKDVGSAGCQNPFXFPMTHVCNTIINETLIXICYQKLLAQAKAXGVLLQYYKTGAYMGVDTYYYLIRGHASRPPNFITYKFNSYLPCDDLTMTAGIDKT

SEQ ID NO: 248887 - protein, 133 aa, Glycine max
  Clone ID: PAT_MRT3847_66776C.1.pep
MPWLSNNHSADDALLLAIFPDSCRETLAHSAPARMKTRHLLNDLCLVVLVLALGCAAEEDSTSTASIIFTTLGRASYAFDIYSLPVPVQQQQQQPLSPSQELLLTDGHSVNFNGDFFPIVPLFNYPNTALLST

SEQ ID NO: 248888 - protein, 57 aa, Glycine max
  Clone ID: PAT_MRT3847_66777C.1.pep
LKIKEILKNYWMMNQLNKDPSHGRPYEIEGPLEPLLYEKNQCSPKNVISMIRKRTSQ

SEQ ID NO: 248889 - protein, 37 aa, Glycine max
  Clone ID: PAT_MRT3847_66778C.1.pep
DKNSIIDSIVNATDRSMLWHSRLGHTSNKVLQQLCSQ

SEQ ID NO: 248890 - protein, 195 aa, Glycine max
  Clone ID: PAT_MRT3847_66779C.1.pep
MVSISFLPALFLFFLIATSLTESRKELRNKQETALQMLERSIHFSNRINPSRVVQISWQPRVFLCKGFLSDKECDYLVSLAYAVKEKSSGNGGLSEGVETSLDMEDDILARIEERLSVWAFLPKEYSKPLQVMHYGPEQNGRNLDYFTNKTQLELTGPLMATIILYLSNDVTQGGQILFPESVPGSSSWSSCSYS

SEQ ID NO: 248891 - protein, 98 aa, Glycine max
  unsure (1)..(98): unsure at all Xaa locations
  Clone ID: PAT_MRT3847_6677C.1.pep
CLHHGLVDTDTSMVLAAYEYYRHDGVVRNVIDMYVGELXMIRFKHVLKVDQAXLDTVTPDIIGRVKIVISAYPXSFATLLRVDTFTFCANVQIDNRAY

SEQ ID NO: 248892 - protein, 106 aa, Glycine max
  Clone ID: PAT_MRT3847_66780C.1.pep
QEERAFFGIEGTKLYLVFRIIKDLTAVNEATLVDNVVVLWTDISETCSNFVASLNDAMGNFLAAVDGIDGEIFACTLNAIACVMEHDPFIDGISHITLGPWLIDLS

SEQ ID NO: 248893 - protein, 197 aa, Glycine max
  Clone ID: PAT_MRT3847_66781C.1.pep
IIFQETALNHVTSSGIGGEGFGATREMSLRKLIWVVTRIQVQVQRYNKWGDEIEVDTWVDAAGKNGMRRDWIIRDHYTKEIITRATSTWVIMNRQTRRLSKIPEEVKQELLPFYLNRLAVPTEETDCEKIDKLTDETAQIRILSGLAPRWNDMDANQHVNNVKYIGWILEVRIRNGKTNYLCGKDCNTLFLIDVTRF

SEQ ID NO: 248894 - protein, 118 aa, Glycine max
  unsure (1)..(118): unsure at all Xaa locations
  Clone ID: PAT_MRT3847_66782C.1.pep
RGHEYMLNEAXNPHLFEIRKHKXYSHDKVTHMLAYYDLDGFIYHAPQLCNVSLRQXEGTLYYIQKACTTLASKLEKIGYAGPADSENKTAXDGIKNANETIDIKEVKRGEHILTSLQR

SEQ ID NO: 248895 - protein, 74 aa, Glycine max
  Clone ID: PAT_MRT3847_66783C.1.pep
HLLTRIRSAYQLIILTQKQWKDLQALFLYCSTNFSAKDPLKHNPICAFSFQHPYKQSPLISFQNYILDDHKTYI

SEQ ID NO: 248896 - protein, 70 aa, Glycine max
  Clone ID: PAT_MRT3847_66784C.1.pep
EGILYWQPYFSTSQGFYQVLSGLWREIPYLQLRKRTQHRGMHHTRFAGTFITWSLRVYQITQYTSDTNRS

SEQ ID NO: 248897 - protein, 71 aa, Glycine max
  Clone ID: PAT_MRT3847_66785C.1.pep
LGLGFRGLCLVPSPLLFEPALPFMERPWQCSGPFPLSTFPMFQFPISLKKSFKDSPGANHCGSSKAEFANQ

SEQ ID NO: 248898 - protein, 186 aa, Glycine max
  Clone ID: PAT_MRT3847_66786C.1.pep
DPRVRGRVGVDGVQFKGDGYTTCEASGLGRCKINNGGCWHDAQNGHAFSACLDNGGVKCQCPTGFRGDGVKNCQDIDECKEKKACQCPDCSCKNTWGSYDCSCSGDLLYMRDHDTCISKTGSQGRSTWAAFWLILLGVVMIAGGAFLVYKYRIRQYMDSEIRAIMAQYMPLDSQAEVPNHVNDQRA

SEQ ID NO: 248899 - protein, 58 aa, Glycine max
  unsure (1)..(58): unsure at all Xaa locations
  Clone ID: PAT_MRT3847_66787C.1.pep
ARNSARATALDIFHITTDGLGIHCWFRHSRLMLPSPSSDLCSIPXSGFLSDNTLAACT

SEQ ID NO: 248900 - protein, 172 aa, Glycine max
  Clone ID: PAT_MRT3847_66788C.1.pep
MAMMQGVQKNTLYVGGLAEEVNESILHAAFIPFGDIKDVKTPLDQATQKHRSFGFVTFLEREDASAAMDNMDGAELYGRVLTVNYALPERIKGGEQGWAAQPVWADADTWFERQQQEEEMKRIEAENRAAMQAAEDLHRKQVAEQREGEKEEEIEIKDDPMAKAEAEVLQNQ

SEQ ID NO: 248901 - protein, 75 aa, Glycine max
  unsure (1)..(75): unsure at all Xaa locations
  Clone ID: PAT_MRT3847_66789C.1.pep
QHIFGREIITMGYLALHSVYTFVSSSSPSTSITTRNLYPSISDQNDVVLXIAADPSIYIMAIKAAHLGLNTTYFL

SEQ ID NO: 248902 - protein, 69 aa, Glycine max
  unsure (1)..(69): unsure at all Xaa locations
  Clone ID: PAT_MRT3847_6678C.1.pep
GFSQKFWSNHPNLLGGPPPPKGKGPKNFLATKGTQRGFGPGPVGLRPPPPQNPALREKKFRWEGGPGPX

SEQ ID NO: 248903 - protein, 65 aa, Glycine max
  unsure (1)..(65): unsure at all Xaa locations
  Clone ID: PAT_MRT3847_66790C.1.pep
MGRMHSRGKGISSSAMPYKRTPXPTWLKTAASDVEAMITKAAKKGQMPSQIGVLLRDEHGITLVK

SEQ ID NO: 248904 - protein, 92 aa, Glycine max
  unsure (1)..(92): unsure at all Xaa locations
  Clone ID: PAT_MRT3847_66791C.1.pep
CKWTEWEPHSWESILPIXVCGPNNGFEMXSPEGANQTSWHLRWHIDNVRQTTXVDILLGIDQDWDIAGDALMPCFSVADATAVSSENAESSA

SEQ ID NO: 248905 - protein, 37 aa, Glycine max
  Clone ID: PAT_MRT3847_66792C.1.pep
YYSCAQLATTQPIFIGINNGHGHLITQHSFSFRLFIF

SEQ ID NO: 248906 - protein, 71 aa, Glycine max
  unsure (1)..(71): unsure at all Xaa locations
  Clone ID: PAT_MRT3847_66793C.1.pep
XKLNLILMIVKWVKMDQRVRTQAQGPLQRAKGDQRKNQEGDHPPWKTWPYGYWIRDILSQAMQKSVSSEAI

SEQ ID NO: 248907 - protein, 155 aa, Glycine max
  Clone ID: PAT_MRT3847_66794C.1.pep
GDIVDLEITKEVVTENKEDYNGNASGKTPEKDVVVSKKDEKVIEGSSKATPKRSEKGVKKANSANYRTGKHRRHLGLKAIEERIAAGLDNPDLGPFLLKQTRDMISSGENPRKTLDFALRALKSFEICADGKPSLDMVMCLHVLATIYCNLGQYN

SEQ ID NO: 248908 - protein, 324 aa, Glycine max
  Clone ID: PAT_MRT3847_66795C.1.pep
MTDSSPLIPPSPVTVTEIDLEEGPSEQIQCRICLETDGRNFIVPCKCKGTSKYVHRECLDHWRAVKEGFAFAHCTTCKAPYHLRVHGAYRQWRTFKFRFFVTRDILLIFLAVQLVIASLAYLVYQIDGYEKYWLRLVWGFGSELSFYYICGALVFFVLLGLSGCFITCSDPRIRSDLGQPCREICLCCCQPGVCADRHLHGTPYMYGTPYMSTDCNACCENCGTECCGCTCMRGSEDEAGLPLLFIMVLFFLVLFAVLGIFYSVLVATMIGQRIWQRHYHILAKRMLTKEYVVENIDGEIAGPNWTPPPLPQEHVRQLKTLGLL

SEQ ID NO: 248909 - protein, 93 aa, Glycine max
  Clone ID: PAT_MRT3847_66796C.1.pep
HEKYREQKRLQEQHAVEQEALFGSRSATKKPLGQSTHANTILGTPTGRRMLSTPSGRHGNSGGKDRRESGRVNSIIPVNYVALPKDDSVSRGN

SEQ ID NO: 248910 - protein, 60 aa, Glycine max
  Clone ID: PAT_MRT3847_66797C.1.pep
GGFCSGVVGNTAQCDLSTLMIDSFEKTQGMSSSLEVHVLLSLTDVGLQDIHETSFSCMNG

SEQ ID NO: 248911 - protein, 101 aa, Glycine max
  Clone ID: PAT_MRT3847_66798C.1.pep
QKQNDTLLFLLTCRLVAYALQSLGLEKGSAIAIDMPMNVKSVVIYLAIGLASYVVVSIADSFAASEISTRLKISKAKVIFTQVDSLISFDDLSLFFFMFLM

SEQ ID NO: 248912 - protein, 76 aa, Glycine max
  Clone ID: PAT_MRT3847_66799C.1.pep
MADSGPADRGGAGRGFGRGRERGRGGRGGRGGDRGGRGRGGAGGGRGGRRGDKEEGGAWVPVTRLGRLVAAGHINK

SEQ ID NO: 248913 - protein, 35 aa, Glycine max
  Clone ID: PAT_MRT3847_6679C.1.pep
LSMSSTASATHDASAPVSTTCWWQGRCVGRVNINH

SEQ ID NO: 248914 - protein, 76 aa, Glycine max
  Clone ID: PAT_MRT3847_667C.1.pep
YYHLQTYSIIQNTLRRELGHALICGDPYIPRCSITSRCQNPSVFESNDASEWALTCPCTSSLYGWPPANRNEGILD

SEQ ID NO: 248915 - protein, 65 aa, Glycine max
  Clone ID: PAT_MRT3847_66800C.1.pep
LEYYQMTEVHDIATYKQFIHIARCLNPCLFLQRTSQKHETKKHDLHAKRFNTHMRSLYSTRIVES

SEQ ID NO: 248916 - protein, 116 aa, Glycine max
  Clone ID: PAT_MRT3847_66801C.1.pep
TKRVFLGAKTPAKRRNQKIWGKARSKKKDLKNPKVFFFSPQSNNPRHNEGGKNPLHTLGEALKKYIYIFRATWGGDFSAPLFWGGVQIMWGNFLGALGTALCGERGLKKNRGKEGL

SEQ ID NO: 248917 - protein, 71 aa, Glycine max
  Clone ID: PAT_MRT3847_66802C.1.pep
LIILLRSFSSNLIPFCPFNSSSSCILYFSSHILIKCGTLCDLVQLTLCINLHLICMVIDSVVVLPRFGHYF

SEQ ID NO: 248918 - protein, 54 aa, Glycine max
  Clone ID: PAT_MRT3847_66803C.1.pep
KERTRAPIKSKSLFYKGKRGKIPNGLLPLHTLAPSTLTAPWRLCCVDTSIYKRP

SEQ ID NO: 248919 - protein, 52 aa, Glycine max
  Clone ID: PAT_MRT3847_66804C.1.pep
RGNGLLVFNIKSLDEKKTESSPPKWGSPPWHKIKRPQNKKTFYFLLEKKIPK

SEQ ID NO: 248920 - protein, 55 aa, Glycine max
  Clone ID: PAT_MRT3847_66805C.1.pep
MNLLLYLNDTGDIAYTSKKDSPLRLPTQCAHPTCFSPDDKHSRHECSSDQALMYC

SEQ ID NO: 248921 - protein, 69 aa, Glycine max
  Clone ID: PAT_MRT3847_66806C.1.pep
EIMEIQKNQVSWAFVLFLSYTAFLLLLFIFHQSLLSICVDLNYIQVPTFPRIKNCNLMHNIMTKLVNIS

SEQ ID NO: 248922 - protein, 91 aa, Glycine max
  Clone ID: PAT_MRT3847_66807C.1.pep
ICCWALVCCICHLLSQVGPAMDIKIGQPHCISHVISRISKEGFGVPPPSRDLVAYSTMCSKSLRSALCVHVASIAHLGINFSASKMQSGFI

SEQ ID NO: 248923 - protein, 328 aa, Glycine max
  Clone ID: PAT_MRT3847_66808C.1.pep
MAVVHGSWVKLDQRGEGQGARSSHAIAIVAQKVYAFGGEFVPRVPVDNKLHVFDLETLTWSVADASGDAPPPRVGVTMAVVGETIYVFGGRDGEHKELNELYSFDTRANKWALISSGDIGPPHRSYHSMTADDQHVYVFGGCGVHGRLNDLWAFDVVENKWVEFPSPGENCKGRGGPGLVVARGKIWVVYGFAGMEMDDVHCFDPAQKTWAQVETSGQKPTARSVFCSFSDGKHIIVYGGEIDPSDQGHMGAGQFSGEVYALDMETLAWKRLEDKVDFGGHPGPRGWCAFARAWRGGHEGLLVYGGNSPSNDRLDDIFFLALSQGLVK

SEQ ID NO: 248924 - protein, 88 aa, Glycine max
  Clone ID: PAT_MRT3847_66809C.1.pep
RSPLVNLCGDVFMDGLVWVLFWEAAPVVLCISFSFSTTCTVLIISIIYYILCLPKKKKTKSNNNALCMIFFSLPYLNLLFYFNDPAKQ

SEQ ID NO: 248925 - protein, 77 aa, Glycine max
  unsure (1)..(77): unsure at all Xaa locations
  Clone ID: PAT_MRT3847_6680C.1.pep
KMEVIRSQGIPADDLAKRAHDFDKDLAHESLKDXIPAVDPLYSTRVNKFAEIMMLRPSVVGDLKLLTDGKLSEGKHI

SEQ ID NO: 248926 - protein, 76 aa, Glycine max
  Clone ID: PAT_MRT3847_66810C.1.pep
KSLSQCNTCVRSNWLHACAFRSESPQQLIAAGPQTCRRSRVQLASHGPRSIRGRVDNCTRVGSFILVTGSLAVNRP

SEQ ID NO: 248927 - protein, 83 aa, Glycine max
  Clone ID: PAT_MRT3847_66811C.1.pep
VPPTNQFSDQHVNGQKGVTVEAMVLDFLHHPANSSRNEGVHRDHIAQHLGISLDKLMLAVKNLIDEGAIYETIGDHYKSIING

SEQ ID NO: 248928 - protein, 49 aa, Glycine max
  unsure (1)..(49): unsure at all Xaa locations
  Clone ID: PAT_MRT3847_66812C.1.pep
LFLYPVEHPEKFEKFGMSPSKGVPFYGPPGXGKTLLAKAIANECQANLN

SEQ ID NO: 248929 - protein, 67 aa, Glycine max
  Clone ID: PAT_MRT3847_66813C.1.pep
GKSSFFFMGGIIISPLALFTNGPLILNHAMLKKEAVLLSKCKNSGAFWCYSRKLGACHSWPCSLIPF

SEQ ID NO: 248930 - protein, 74 aa, Glycine max
  unsure (1)..(74): unsure at all Xaa locations
  Clone ID: PAT_MRT3847_66814C.1.pep
MKGIDIFCASQASTAICLSMDQPSSSYSSSSSSISNTAQFGGRAIDRHXPIITDPKRPPQENFISPTPSSQSPN

SEQ ID NO: 248931 - protein, 67 aa, Glycine max
  Clone ID: PAT_MRT3847_66815C.1.pep
NCLNIFHSAKKPKDGKREERILTWRVTPLVGPLKMNSTVRTITSSSECLTLPKGDAGTGSGEASSSA

SEQ ID NO: 248932 - protein, 89 aa, Glycine max
  Clone ID: PAT_MRT3847_66816C.1.pep
REVYWRTLWRRRRCWILVLTCDSLLNMTNSKKKRTGMIAFSILFLMRILLTLTSRNLLVLKVLIRILTVPLVLLVSIPLASSLSSFSSN

SEQ ID NO: 248933 - protein, 94 aa, Glycine max
  Clone ID: PAT_MRT3847_66817C.1.pep
PVNDAPMFEPVKKVSLDLLGPKNFRVVPPMRGAEDFSFYSERVPPAFFSMGVRNEPLGFFHTGPFPYFMIDEAVLPIGAAAHASIAEGSPLGHG

SEQ ID NO: 248934 - protein, 253 aa, Glycine max
  unsure (1)..(253): unsure at all Xaa locations
  Clone ID: PAT_MRT3847_66818C.1.pep
GCEKTTEGGPVLAGLPQHEGKFSLEPELPVISSEDLPWLVGTDAARKARFKFWKRTLERSSALKWLLVNSFPDESKLELANNKKFTACRRVLPIGPICNCRNDELRKSVSFWEEDMSCLKWLEKQKAKSVVYISFGSWVSPIGEAKLKNLALALEASGRPFIWVLRSTWRHGLPLGFMERVVKQGRGMMVSWAPQNQILQHNSVAXYITHCGWNSILEALQFQKKLLCYPVAGDQSVNCAYXVQVWRVGLKTQ

SEQ ID NO: 248935 - protein, 52 aa, Glycine max
  Clone ID: PAT_MRT3847_66819C.1.pep
VIENDVTVVQNHWCPVVNAGFSSPKRVVVVGYALTTKKIKSFLQPKLEGLAR

SEQ ID NO: 248936 - protein, 349 aa, Glycine max
  Clone ID: PAT_MRT3847_6681C.1.pep
MATTFTLATLSLPSSSRVSIGGAPIRHHRSPNRIGLLPPLKCSSLEPETAPPPPFDWTHKLIAGVAGVGFLETSYLTYLKLTGADAFCPVGGGTCSKILDSDYALVFGIPLPLIGMAAYGLVAALGVQLASKNFRFGIEKPTAEAVLLGATTSMAAASAYFLYILTTRFSDSSCSYCLLSAFLSFTLFFVTLKDIGLQEVSKQLGLQLLVASLVILSLNASYSNSKSASSSLAENDLPYFATEITTPSSPFALSLARHLHSIGAKMYGAFWCSHCQEQKEMFGREAAKQLDYVECFPDGFRRGTKMIKACIDAKLEGFPTWIINGQVLSGEVELSELAQVSGYEESVQP

SEQ ID NO: 248937 - protein, 59 aa, Glycine max
  unsure (1)..(59): unsure at all Xaa locations
  Clone ID: PAT_MRT3847_66820C.1.pep
YVVDSMGGNSNLLWGNIMGVVRIKVEERIFYXLWXLGGGLEFLIRVLFRLLVVVGEISX

SEQ ID NO: 248938 - protein, 408 aa, Glycine max
  unsure (1)..(408): unsure at all Xaa locations
  Clone ID: PAT_MRT3847_66821C.1.pep
SKRIPKCATTTAPLSATPIHQVYVNDQFLNWDPEHRIKVRIVSARAYHSLFMHNMCIRPTPKELEEFGTPDFTIYNAGLFPCNRYTHYMTSSTSIDINIARKEMVILGTQYAGEMKKGLFGLMHYLMPKRYILSLHSGSNMGKDGDVALFFGLSGTGKTTLSTYQNRYLIGDDEHCWSENGVSNIEGGCYAKCVDLSKDKEPDIWNAIKFGTVLENVVFDEHTREXNTRAAYPIEYIPNAKIPCVAPHAKNVILLACDAFGVLPPVSKLNLAQTMYHFISGYTALVAGTEDGIKEPQATFSACFGAAFIMMPPTKYAAMLAEKMQKHGATGWLVNTGWSGGSHGLGNRIKLAYTRKIIDAIQSDKKTYQDTLLKLASLFKKNFDGFTTYKIGGDQKLTEEIVSAGPIF

SEQ ID NO: 248939 - protein, 39 aa, Glycine max
  unsure (1)..(39): unsure at all Xaa locations
  Clone ID: PAT_MRT3847_66822C.1.pep
HNHGGVSHPXCWXXXXFFHAXXLPSLAASXRNLDXIPFD

SEQ ID NO: 248940 - protein, 672 aa, Glycine max
  Clone ID: PAT_MRT3847_66823C.1.pep
METITENGSDGVSLARNTSNNARRGLPMIQTNMKPTDSEFQVCHDDSTPPVRAQTIHELHSLQKKKSTPSTPLSATQGPFATVSDEERQKQQLQSISASLASLTRESGPKVVKGDPATKAEKGTHVHHHPQPHYFASTAFDVSDSALKFTHVLYNLSPAELYEQAIKHEKGSFITATGALATLSGAKTGRSPRDKRVVRDDTTEHDLWWGKGSPNIEMDEHTFLINRERAVDYLNSLEKVYVNDQFLNWDPEHRIKVRIVSARAYHSLFMHNMCIRPTPEELEEFGTPDFTIYNAGQFPCNRYTHYMTSSTSIDINIARKEMVILGTQYAGEMKKGLFGLMHYLMPKRNILSLHSGCNMGKDGDVALFFGLSGTGKTTLSTDHNRYLIGDDEHCWSENGVANIEGGCYAKCVDLSKDKEPDIWNAIKFGTVLENVVFDEHTREVDFSDKSVTENTRAAYPIEYIPNAKIPCVAPHAKNVILLACDAFGVLPPVSKLSLAQTMYHFISGYTALVAGTEDGIKEPQATFSACFGAAFIMMHPTKYAAMLAEKMQKHGATGWLVNTGWSGGSYGLGNRIKLAYTRKIIDAIHSGSLLNAQYTKTEVFGLEIPTALEGVPSEILDPVNTWSDKKAYQDTRLKLASLFKKNFDGFTTYKIGGDQKLTEEIVSAGPIF

SEQ ID NO: 248941 - protein, 51 aa, Glycine max
  Clone ID: PAT_MRT3847_66824C.1.pep
AFKSDAQNKLLPAKTPMLKSLSVKLQSMNYKVCLVIENKRGREVISLNSSC

SEQ ID NO: 248942 - protein, 141 aa, Glycine max
  unsure (1)..(141): unsure at all Xaa locations
  Clone ID: PAT_MRT3847_66825C.1.pep
GSKKKTTPHRTNEKSEGAGMGAPKKERKCMGGSHTRKRNKEIIFIDRKREREQCMRVWAPEGKKKSERLSXLTENEEAQLAKEGENPKRKRGIARMEIERENGIKYRENKKPPENKKEHYRNTGKLPMRRGTDASHGWKEL

SEQ ID NO: 248943 - protein, 60 aa, Glycine max
  Clone ID: PAT_MRT3847_66826C.1.pep
VGNSYKDIGGSFLAIFFLHKNIDSYILTYIKCIILFFHYWYKISIYFVSSQLYYSQNSNL

SEQ ID NO: 248944 - protein, 167 aa, Glycine max
  Clone ID: PAT_MRT3847_66827C.1.pep
MIKRRFYKLDHGDREALDPSSSSSSDSEIEAEAEVDASEEESEEDVTAEVKPNDDEAGSTSSGYASEDGSASDVDVNSAGLLFSEDDAGAINERQVLINRELLIKCDTEKSNVLAEKKSLPTDTPSCVLKCKSVFKCKICPRIICLSEETLGDHLGWERHAGSGGLL

SEQ ID NO: 248945 - protein, 178 aa, Glycine max
  unsure (1)..(178): unsure at all Xaa locations
  Clone ID: PAT_MRT3847_66828C.1.pep
SETCXYPFFSRMASKISTFANAHWMPDAGPHRTQRRTGLPLAENYREQSRTGTPPAMLDGVESRTGMACPTILEEIAIWLPIASFFRMQCRIWLAIAPPTILEEIAIWLPNALFFPMQWGICLLVIKFHATIFTEVYQPIXXSFPPLPSTALLPLSLHCQIQLCLNQFPCHLCPCRED

SEQ ID NO: 248946 - protein, 101 aa, Glycine max
  Clone ID: PAT_MRT3847_66829C.1.pep
SVMDSFISAAFLQEEVYIGSLLGFVAPIAGLQNVIWGVVKSFFAIEPPSAPLSSVLHRWSVIVSMFVLFLRERTPSCQFILGVFYDSIYADYSKVVILCYY

SEQ ID NO: 248947 - protein, 71 aa, Glycine max
  Clone ID: PAT_MRT3847_6682C.1.pep
PQIRVLSLEHQIEHYSDQTLETPLERRARSHARGYEGWCSGGLFPMTATMVSKGPIKASLINGTPFTSSTT

SEQ ID NO: 248948 - protein, 63 aa, Glycine max
  Clone ID: PAT_MRT3847_66830C.1.pep
IGKLTMESFHKTSRGNVGKFDVVKTTRLNSATNEEISGYMISGVSLLKTNQEEMKHLDLSLKL

SEQ ID NO: 248949 - protein, 78 aa, Glycine max
  Clone ID: PAT_MRT3847_66831C.1.pep
MKGKRVFFWWGGKPPGGPWGKDPPSPPVKGFNPLFVKFNWFWPLFPQKKKKKKKKKKKKKKKKKKKKKKKKKKKKKKK

SEQ ID NO: 248950 - protein, 52 aa, Glycine max
  Clone ID: PAT_MRT3847_66832C.1.pep
VLIFDCGLWVFFILGCWANFLTLIYIAFRGLHNEPVLYEKYEDHVNSLGEKA

SEQ ID NO: 248951 - protein, 92 aa, Glycine max
  Clone ID: PAT_MRT3847_66833C.1.pep
YFYTSLLSNPHSFIYRLRSSLLQIFSLFPYIFVSFFFYTYSVYFFLSIPSLRDVLDLLFWVSAVLDPKLSKSREGSGVVQDTLGSLKREAPI

SEQ ID NO: 248952 - protein, 110 aa, Glycine max
  Clone ID: PAT_MRT3847_66834C.1.pep
FQPQPLQRPQCLHQHQDLFWKKLVQNLPNPPWCYQRGFPLDFIIQMGLLWSISFPRFCRRGLGKACAPLAQCTSGSSSQGSLFLWHCASPNRQREKKACKMCVVSGAPCL

SEQ ID NO: 248953 - protein, 181 aa, Glycine max
  Clone ID: PAT_MRT3847_66835C.1.pep
MATSLLKTPLNVFNRHHNHVAFFSNGTSARSSAPISQKRRSRPFPVVSMASTPVQTSLEKTELSSKSTGLPIMVNACTGKMGKAVINAAEAAGLNVVPVSFGCEEESGQTFQIGGKEFLVHGPSDRESALASVLDKYPNLIVVDYTIPDAVNGNAELYSKVGVPFVMGTTGGDRDLLHKTV

SEQ ID NO: 248954 - protein, 77 aa, Glycine max
  Clone ID: PAT_MRT3847_66836C.1.pep
TIADMPTGAHVIPSENQEKLCFKKVIWVISFVFTHYSIILKHVFIYILSVLIVFPQCSMRINMKITCFFSVKELLYI

SEQ ID NO: 248955 - protein, 87 aa, Glycine max
  Clone ID: PAT_MRT3847_66837C.1.pep
CFPSSLFLLSLKSLYCCTIQIKDCANCRVNCSRVLTNPQINEKKRSPFLIYRFFVSHSAVCQTCLSLFQSTLFPVPYPFSKDFQIRI

SEQ ID NO: 248956 - protein, 43 aa, Glycine max
  Clone ID: PAT_MRT3847_66838C.1.pep
LSISILLLYMKKVMHRNKKQFLPKIKESSQLMLSFGLANFFSK

SEQ ID NO: 248957 - protein, 77 aa, Glycine max
  Clone ID: PAT_MRT3847_66839C.1.pep
SLGASLALREKARHKKKSFSSRPGSYSGASTEEEIAMHLAQLARRSLEWECSVGKVRKVAAREEAGLLSAAKLICAG

SEQ ID NO: 248958 - protein, 66 aa, Glycine max
  Clone ID: PAT_MRT3847_6683C.1.pep
RLLMFSSTQVLPPPNCQVLSRGFLSVKNIIIFERACFVIIFLSWAPPSLHKVIHFQKASKLVGKGL

SEQ ID NO: 248959 - protein, 94 aa, Glycine max
  Clone ID: PAT_MRT3847_66840C.1.pep
HIKHLPMDPPLNDGRPKGIIHGCPNCSNCVKVCTFHFTFPHWNSHDYVSFLFVCLPKKTIREVIKKDLEINGLNRSMVLDRTLWRKLIHVADPT

SEQ ID NO: 248960 - protein, 53 aa, Glycine max
  unsure (1)..(53): unsure at all Xaa locations
  Clone ID: PAT_MRT3847_66841C.1.pep
MDSEIDKKTNLFSGLTDDMALNIYYKLADDPRYWARXACVYSRLYYLVRELCW

SEQ ID NO: 248961 - protein, 97 aa, Glycine max
  unsure (1)..(97): unsure at all Xaa locations
  Clone ID: PAT_MRT3847_66842C.1.pep
MEKKNFWFFTVWGMEGDLALFGFPPKNRFSSFFXPLFKDLKKKRNHFHFSPFGVLKVLGENWNWFLLFLLKKPKGFAKGFLEGFFKGFSKGFLALRK

SEQ ID NO: 248962 - protein, 70 aa, Glycine max
  Clone ID: PAT_MRT3847_66843C.1.pep
LTEDMADPDISRDIGYYQEAMVRQSTGVRNFKEMVEYLYERANVYRKLPIRSFNTTFSYTGTKHVDETTT

SEQ ID NO: 248963 - protein, 222 aa, Glycine max
  unsure (1)..(222): unsure at all Xaa locations
  Clone ID: PAT_MRT3847_66844C.1.pep
SGKAKVMIAGGFDDFSEEGSFEFANMKATSNTETEFATGREPNEFSRPMTSTRAGFMEAMGCGVHILMSAKTAIELGATVRGIVAFTSTHTDKAGRSVPAPGQGVLSGAREVSLKEPLLLLDIKYRARQLAFRRKQISQWLENEHDLLKAEFEAKQGSDSDEWFKARVSFIEDEASRQEKEALATFGMLEGSHPNIAPLRRALAVWGLDAEXVXVISCHGTS

SEQ ID NO: 248964 - protein, 37 aa, Glycine max
  Clone ID: PAT_MRT3847_66845C.1.pep
LQTPKGKLERLFNQQNEGSIFKISRERVRALAPTKKS

SEQ ID NO: 248965 - protein, 80 aa, Glycine max
  Clone ID: PAT_MRT3847_66846C.1.pep
KPGGPEPSGGMVSLESKGWFLTSGLKKKKKRAYRRARSINLVYPPLCENSISLISTADLSRGRPTHNSLYREAFYALSVR

SEQ ID NO: 248966 - protein, 284 aa, Glycine max
  Clone ID: PAT_MRT3847_66847C.1.pep
MGVFSENPNPDPVVIRQVWASNLESEFQLIRELIDHYPFISMDTEFPGVVFRPHLDPTKPYNHRNNNRNRHSDHYRLLKSNVDALNLIQVGLTLTDAAGNLPDLAGNRSIWEFNFRDFDVARDAYALDSIDLLRRQGIDFARNATDGVESTRFAELMMSSGLVCNDSVSWVTFHSAYDFGYLVKILTRRNLPTRLEEFLKTVKVFFGDNVYDVKHMMRFCDTLYGGLDRVARTLNVERAVGKCHQAGSDSLLTWHAFQKIVDIYFVKDEHRKHAGVLYGLEVFC

SEQ ID NO: 248967 - protein, 226 aa, Glycine max
  Clone ID: PAT_MRT3847_66848C.1.pep
VTARQDLHHRNRPSDHYRLLKSNVDALNLIQVGLTLTDAAGNLPDLAGNRSIWEFNFRDFDVARDAYAPDSIDLLRRQGIDFARNTADGVDSTCFAELMMSSGLVCNDAVSWVTFHSAYDFGYLVKILTRRNLPTRLEEFLKTVKVFFGDNVYDVKHMMRFCDTLYGGLDRVARTLNVDRAVGKCHQAGSDSLLTWHAFQKIVDIYFVKEEHRKHAGVLFGLEVFC

SEQ ID NO: 248968 - protein, 86 aa, Glycine max
  unsure (1)..(86): unsure at all Xaa locations
  Clone ID: PAT_MRT3847_66849C.1.pep
TVIFVNDKFVDFVKKKKKKKKKKKKKKKKKKKKKKKKKKKKKKKKKKKKKKKKKKKKKKKKKKXGGXXLKKKNLKGGGWKIIFFFF

SEQ ID NO: 248969 - protein, 258 aa, Glycine max
  unsure (1)..(258): unsure at all Xaa locations
  Clone ID: PAT_MRT3847_6684C.1.pep
MMLDLGPFSNENFDPKKWINSACQSRHPQDSLDKHLVDMEMKLQMVSEEIAASLEEQSAAALLRVPRATRDVIRLRDDAVSLRSAVSSILQKLKKAEGSSAESIAALAKVDVVKQRMEAAYETLQDAAGLTQLSATVEDVFASGDLPRAAETLANMRHCLSAVGEVAEFANIRKQLEVLEDRLDNMVQPRLMDALSNRKVDAAQDLRGILIRIGRFKSLESQYVKVHLKPIKQLXWEDFDSRERASKPANEKNEMDRT

SEQ ID NO: 248970 - protein, 80 aa, Glycine max
  Clone ID: PAT_MRT3847_66850C.1.pep
ELCSCLLCKTLSINLIYEPISNCKKCFLCYHKLRTYTTLHMIAVGKKPITQPTTVTTFSSLATVWFLILFPQYTTWLKQD

SEQ ID NO: 248971 - protein, 90 aa, Glycine max
  Clone ID: PAT_MRT3847_66851C.1.pep
RHVIHIRMRFIIIIRHFSSATSSPELHWPIASSQCHPYIQQLTSMSSKSVSLPIDPFTSTRITASYGFIVAFNPSYALANFQYGSCTNNY

SEQ ID NO: 248972 - protein, 51 aa, Glycine max
  Clone ID: PAT_MRT3847_66852C.1.pep
RVWSPSLVLYPKYSCPWVASSPFVPKALSSRMCHQNPLVKSVIGGISKVTA

SEQ ID NO: 248973 - protein, 106 aa, Glycine max
  unsure (1)..(106): unsure at all Xaa locations
  Clone ID: PAT_MRT3847_66853C.1.pep
ESSGIICYVNANLHDNDGIRPDQHCLIFAGKXLNEGRTLTDYSIXSASTLHLVLRLRGGMQIFVLTLIGMTISLDLXSSYTIDNIXAKIQDYEGISPYHQMLIFAG

SEQ ID NO: 248974 - protein, 124 aa, Glycine max
  Clone ID: PAT_MRT3847_66854C.1.pep
ARLLEDERRQWGENVTERLHNRAIPFMREKFHKVSLIGDVNLTNQNIEESFLVRWLKETSLENKLDICLVVIEEGCRNFQSNDYFKTEVEAVDCALQCIYLSTVTDRWSIMASILSKLPQLHGG

SEQ ID NO: 248975 - protein, 66 aa, Glycine max
  Clone ID: PAT_MRT3847_66855C.1.pep
RAKTPIYPPLSSEYHSPSERASYGPRDINHNYCLKTLIKNKKEQGKKQILVIFFPLGGAKEQSFFR

SEQ ID NO: 248976 - protein, 107 aa, Glycine max
  Clone ID: PAT_MRT3847_66856C.1.pep
VVADHVARWRFLSVFCLNDYRVPFYLSHFVLLAFFRISYNVPSRSRLVSPEGKMKVLLLLLTPARSGRMTLLNIGSDHYLVHWTMLVSKRSLINGYSRMEGRYISDI

SEQ ID NO: 248977 - protein, 148 aa, Glycine max
  Clone ID: PAT_MRT3847_66857C.1.pep
LYKYDPSTNQASLLLSNLAVAAGVAVSGNGSFVLVSECNAHRIRRFWLAGPKANTSEVFLQLPGRPENIKRNSKNEFWVAMNYPFGTPPPPRPPVLPLGLRVNEDGEVLEAVPLVDEFGTESVSEIQEFNGTLYASSLHVSYANIFKV

SEQ ID NO: 248978 - protein, 213 aa, Glycine max
  Clone ID: PAT_MRT3847_66858C.1.pep
MAAGASAPPPAPQAPRPKRPRPPSGRTNLASCVVATIFLIFIIIVILIVYYTVFKPQDPKIAVNAVQLPSFSVANGTVNFTFSQYASVRNPNRAAFTHYDSSLQLIYSGSQVGFMFIPAGEIDAGRTQYMAATFSVQSFPLSVPPRMGPTLANGDGVGFNYGLRVEPTMEIESKLEMAGRVKVLHFFTHHVYAKAGCRVAIAVTDGSVLGFHC

SEQ ID NO: 248979 - protein, 150 aa, Glycine max
  unsure (1)..(150): unsure at all Xaa locations
  Clone ID: PAT_MRT3847_66859C.1.pep
TRDHGATAVKHCNGSERLGEAGLSLHYANIINQINMIASRPTVLPPNIRDTLYHGLPNNIKSALPSRMXSIDAMKELSITQVKAEMDKTLQWLNPFATNTTKAHQGFGWVGEWANTCKNWSSSTMIRTYFPIRTWDAEDLKLTTTTGSVT

SEQ ID NO: 248980 - protein, 59 aa, Glycine max
  Clone ID: PAT_MRT3847_6685C.1.pep
SSIVTEENDHHLLCYHNPIYHPRMYSAKTFSCVLISPSWYASYGQAEKSDLLHTRKAFF

SEQ ID NO: 248981 - protein, 86 aa, Glycine max
  Clone ID: PAT_MRT3847_66860C.1.pep
GIPNYSGVGKKSMLKFVTKKTTNFSNKSQKKASRKKKVINREPEATGKINPKKVKTIPPNFHLNWTVIKQTPPHYSYWKPKVPTKA

SEQ ID NO: 248982 - protein, 77 aa, Glycine max
  unsure (1)..(77): unsure at all Xaa locations
  Clone ID: PAT_MRT3847_66861C.1.pep
VEVVPLEVHLGHVLGDLNCRKGQFDSLCSXPAVVKEGYDVGPRYNMLQXVRSLRGISKDRASHSMQLALSDLVHKRS

SEQ ID NO: 248983 - protein, 41 aa, Glycine max
  Clone ID: PAT_MRT3847_66862C.1.pep
KPNYNNNQSTRSKKVGQRVEEVRLMTPGQWCLMGTRAGTAD

SEQ ID NO: 248984 - protein, 89 aa, Glycine max
  Clone ID: PAT_MRT3847_66863C.1.pep
MCPLRFILIFLSATLAGFFVLRNLRSQPQIEEGDAVVPPNPKISDSSDASSNVTSKLRAVVESGFWTFVDMASGRYLWRHLVCNSSKRS

SEQ ID NO: 248985 - protein, 66 aa, Glycine max
  Clone ID: PAT_MRT3847_66864C.1.pep
RVIRVQQCHATLRLRHQGNQPCWLPHSSSMQQISPWLCLLSNLVVVMEGRERDLKSSSRSSRFGSK

SEQ ID NO: 248986 - protein, 62 aa, Glycine max
  unsure (1)..(62): unsure at all Xaa locations
  Clone ID: PAT_MRT3847_66865C.1.pep
SHFTSYLIIPILNHFYINSLYGHHGFIQQEYAPXTFKENLSDKIVKNEFIPIIFLITLFAVF

SEQ ID NO: 248987 - protein, 42 aa, Glycine max
  Clone ID: PAT_MRT3847_66866C.1.pep
MASPNQQTVDYPTFKLVIFCDGGTRMTTFVKRHLTGEFQKKY

SEQ ID NO: 248988 - protein, 43 aa, Glycine max
  Clone ID: PAT_MRT3847_66867C.1.pep
PYYLSPSLRLQFDLRGGNISLKCVVDIHIGMPYRISSGFRMDS

SEQ ID NO: 248989 - protein, 76 aa, Glycine max
  Clone ID: PAT_MRT3847_66868C.1.pep
RGNCTLGGYNIQAGTRFILNICELHRDPRIWSNPLEFQPERFLSTHKDMDVKGQDFELLSFGGGRRSCPGISFGLK

SEQ ID NO: 248990 - protein, 70 aa, Glycine max
  Clone ID: PAT_MRT3847_66869C.1.pep
ANQGSLKKNVKKGGKNKPYVIAGGKCYPLRMEHNIQTRKNKGEKKGGLKNELPHIKWGGLGGLFRGGKAI

SEQ ID NO: 248991 - protein, 141 aa, Glycine max
  Clone ID: PAT_MRT3847_6686C.1.pep
LPRALTSFLPLSLFRFGACHGRVAVFERFQYRPGPRGHTGAASSDSVWEAKLPRNYQDLLDLVPPERHRSLSKKDIFALLSRPLPFDHGHKEVWLDRVTGKVCMSISAKAMPITGIDDRRSWNWIPTEESRLDLIGFSCLL

SEQ ID NO: 248992 - protein, 151 aa, Glycine max
  unsure (1)..(151): unsure at all Xaa locations
  Clone ID: PAT_MRT3847_66870C.1.pep
MQIFVDRLXNFSNTGNQNXTLNTTLLQSLQGICPNGGPGTNLTNLDXPTPDTFDSNYYSNLQLQNGLLQSDQELLSANNTDIVAIVNNFISNQTLFFENFKASMIKMGNIGVLTGSQGEIRSQCNSVNGNSSGLTTTATKESSQDSMVSSL

SEQ ID NO: 248993 - protein, 82 aa, Glycine max
  Clone ID: PAT_MRT3847_66871C.1.pep
PAMSASKVGGSLRFIMAGFYSGALGGQAFPGGSRVRTLSFILVLLFPLLPYGIVFWAPLFSLSSFCFPGYSSFFLFLVSSVL

SEQ ID NO: 248994 - protein, 178 aa, Glycine max
  Clone ID: PAT_MRT3847_66872C.1.pep
TRPGGSNFSNLHASKVASHSNSKFPMQSPHGNANKKGSLMSSAGSVSQYQHLNGDSHDIDVSGWHTHTGGFTSSMLNNQLNPDGDYGNVLSNHGGSSYQGQPTETMYAQCLQANPDSPLGAAASMSPFQGRGFTGSGHLDSPGYQKAYLGSLFGQQKLQYGMPYLGNSGALNQNIYGN

SEQ ID NO: 248995 - protein, 50 aa, Glycine max
  Clone ID: PAT_MRT3847_66873C.1.pep
HECCDRSAYYRMRTNHATHYSTTLKQSGPTAAENNANLGGPCYITPSFEQ

SEQ ID NO: 248996 - protein, 447 aa, Glycine max
  Clone ID: PAT_MRT3847_66874C.1.pep
IDLVFGYKQRGKPAVEAANIFYYLTYEGAVDLETMEDDLQRAAIEDQIANFGQTPIQIFRKKHPRRGPPIPIAHPLYFAPDSISLTSIVCNTSQYSSAMLYVGLMDSNIVLVDEGLNLSVKMWLTTQLQSGGNFTFSGSQDPFFGVGSDILSPRKIGIPVPENVELGAQSFATMQSPSENFLISCGNWENSFQVISLSDGRMVQSIRQHKDVVSCVAVTSDGSILATGSYDTTVMVWEVFRGKTAEKRIRNSQSELPRKNYVIIETPCHILCGHDDIITCLYVSHELDIIISGSKDGTCVFHTLREGRYVRSLRHPSGSPITKLVVSQCGQIVIYADDDLSLHLYSINGKYVAASESNGRLNAVQLSRCGKFLVGAGDQGQIFVRSMNTLEVVKKYQGVGKVLTSLAVTPEECFLAGTKDGSLLVYSIENPQIRKTSHSKSTKSKLT

SEQ ID NO: 248997 - protein, 250 aa, Glycine max
  unsure (1)..(250): unsure at all Xaa locations
  Clone ID: PAT_MRT3847_66875C.1.pep
MTQKQRTRIPDSMETQYEESEKDESSSSYSSSEDEEEEIEKELADVTFEELQKARSNGAHAFFTKPKEDIKLKRTNKRKXIEKELADVTFEELQIARATXDTCRDPRFESLCNKLDPHASSKRNNFLYENDLPAERQALKKELKKYKDPKRVNEIEERISWIDKQVKSDSAKHIDAEILAKHKKKEREAAKQGKRPFYLKKSEIRKQRLIEKYNHLKSSGKLEAFVEKRRRRNAAKDHRYMPYRRSGDVE

SEQ ID NO: 248998 - protein, 54 aa, Glycine max
  Clone ID: PAT_MRT3847_66876C.1.pep
GYYRGYHEGETRLLTVPKQQWLICLNLGTRSPYIIINVGLMLLNGDTHIALHEF

SEQ ID NO: 248999 - protein, 137 aa, Glycine max
  Clone ID: PAT_MRT3847_66877C.1.pep
KSSDPSVTGVELVQLRNGQSKNAESSAENNGRDNITKDPLLSIDARPSRTWNSMPANSLTNDNLGLQRHRSGGEWGDILDVISHRKTQALAPEHFENMWTKGKNYKKKDGENQSNEHVSQHSQVGKLSMVDHMKEIS

SEQ ID NO: 249000 - protein, 62 aa, Glycine max
  Clone ID: PAT_MRT3847_66878C.1.pep
QASAPAECESQRSLFSSRDWRAHSRFRRCTILRYLRARSLFAEEITKSSIKPPVCFARTVLR

SEQ ID NO: 249001 - protein, 83 aa, Glycine max
  Clone ID: PAT_MRT3847_66879C.1.pep
ETKAVWPWRFIPPSPCSLSLTASPPPSDGIFFFHRRCLMEDYIPSFLWFVSRYSSFFFMFPSFFLILYSVIILLFYFYFFFLS

SEQ ID NO: 249002 - protein, 151 aa, Glycine max
  Clone ID: PAT_MRT3847_6687C.1.pep
MGASLSSNGSSIGPGLGDIPESCVACVFLHLTPPEICNLARLNRAFRGAASSDSVWEAKLPRNYQDLLDLVPPPERHHRSLSKKDIFALLSRPLPFDHGHKEVWLDRVTGKVCMSISAKAMTINGIDDRRYWNWIPTEESRLDLIGFSCLL

SEQ ID NO: 249003 - protein, 52 aa, Glycine max
  Clone ID: PAT_MRT3847_66880C.1.pep
LSPSTLLSLLLHISKGSIASSDSLLSSSETEPYPHTNLIPPPNAQPQINQIP

SEQ ID NO: 249004 - protein, 47 aa, Glycine max
  Clone ID: PAT_MRT3847_66881C.1.pep
HYKTKKLLLGVIQIEGPMINKIQPNLRRPPRGLRATYSKKFWFFIHI

SEQ ID NO: 249005 - protein, 124 aa, Glycine max
  Clone ID: PAT_MRT3847_66882C.1.pep
VVSKHSFSQKRKQRKEYQQLAKNPLSESNPQLKQISPNGYGPFMALPNRPNRRLHRLTLVKLRQLWLPHRQIAHHVVHEHRRHQNPKGYQESQSKTNFVLVFISLKNSKPEREKKWLGFFTLVG

SEQ ID NO: 249006 - protein, 36 aa, Glycine max
  unsure (1)..(36): unsure at all Xaa locations
  Clone ID: PAT_MRT3847_66883C.1.pep
KGITHQXIFSYPCLNTHLLSPILIFNTKTLHLYEHM

SEQ ID NO: 249007 - protein, 114 aa, Glycine max
  Clone ID: PAT_MRT3847_66884C.1.pep
KRWWGFQNKFLFFFCGPRQNTVFYKHIFFGSSTFCLFSPKNLRSMVLVFFFWPIKTLVRGVIIFYFFLSPPLFHRQINREVPSTTFCYGFFPPLSFIVLLLFYFSFFGVLKKIS

SEQ ID NO: 249008 - protein, 119 aa, Glycine max
  unsure (1)..(119): unsure at all Xaa locations
  Clone ID: PAT_MRT3847_66885C.1.pep
TSRERVATERGPGRPRKQNGGRRNHNPGERAPQQQPQPPPGTQGAHSRERHRRGGVKERHTRGQDAPAKAGGGEEGRNTTKPKAGIGPGRXPTGAARGPPREGQGHQXKEEEKKGGXPP

SEQ ID NO: 249009 - protein, 41 aa, Glycine max
  Clone ID: PAT_MRT3847_66886C.1.pep
APALKLGIGVKLEPIRLRARLIEHYIRGCPNGSTIDAEMEA

SEQ ID NO: 249010 - protein, 105 aa, Glycine max
  Clone ID: PAT_MRT3847_66887C.1.pep
MASRQNNKQELDERARQGETVVPGGTGGKSLEAQQHLAEGRSKGGQTRKEQLGTEGYQEMGRKGGLSTVDKSGEERAQEEGIGIDESKFRTGNNKNQNQNEDQDK

SEQ ID NO: 249011 - protein, 202 aa, Glycine max
  Clone ID: PAT_MRT3847_66888C.1.pep
ASRIHAAFREHSLKLRTKAVASSNPEAQARKIVAAMKIQHAFRNHETKKMMAAAARIQCTYRTWKIRKEFLNMRRQAVKIQAAFRCFQVRKHYRKILWSVGVVEKAVLRWRLKRRGFRGLQVKTVDAGTGDQDQQSDVEEEFFRTGRKQAEERVERSVVRVQAMFRSKKAQEEYRRMKLALNQAKLEREYEQLLSTEVDMQL

SEQ ID NO: 249012 - protein, 48 aa, Glycine max
  Clone ID: PAT_MRT3847_66889C.1.pep
NSENMFGLTSCFLLSRNKNTENAFSKGNVFLDLLKIKFLATAFLFYPK

SEQ ID NO: 249013 - protein, 73 aa, Glycine max
  Clone ID: PAT_MRT3847_6688C.1.pep
ETEIDDTYGNHKRGYWVDYKVGEFIVSGSEPTTQVRFSMKQIDCTHSKGGLCVDAVFIVPSDLRERKRRGILK

SEQ ID NO: 249014 - protein, 137 aa, Glycine max
  unsure (1)..(137): unsure at all Xaa locations
  Clone ID: PAT_MRT3847_66890C.1.pep
EFLNMRCQAVKIQAAFRCFQVRKHYCKILWSVGVVEKAVLRWRLKRRGFRGLQVKTVEAGTGDQDHAXSDVEEEVVRAGRKQAEERVERSVVRVQAMFRSKKAQEEYRRMKLALDQAKLEREFERLLSTEVDMQLKT

SEQ ID NO: 249015 - protein, 90 aa, Glycine max
  unsure (1)..(90): unsure at all Xaa locations
  Clone ID: PAT_MRT3847_66891C.1.pep
VNFVAFLYKLVQFGEVYETAVSPIPHDASLTTCSTQVRSASTLLADWSPYEYTXIHDRSKAKTPIAYATIVKLTTVNYICAYRLNRDILG

SEQ ID NO: 249016 - protein, 60 aa, Glycine max
  Clone ID: PAT_MRT3847_66892C.1.pep
PVHVVGATRAKVHNSDATYEHITKVCSIGKRSLGSSERVLNYTYLKRERLSTRKSTKRCN

SEQ ID NO: 249017 - protein, 76 aa, Glycine max
  unsure (1)..(76): unsure at all Xaa locations
  Clone ID: PAT_MRT3847_66893C.1.pep
RAMMHKLIALVKAYTNVXSKVDDCVLREGKALDVDPLTAMHETTXRTSITLQTKLIAVSANIGPLKECMYIDPKRA

SEQ ID NO: 249018 - protein, 38 aa, Glycine max
  Clone ID: PAT_MRT3847_66894C.1.pep
TAAIRRHMGTAARILLNGTVATICHPARPEEQPFILQL

SEQ ID NO: 249019 - protein, 77 aa, Glycine max
  unsure (1)..(77): unsure at all Xaa locations
  Clone ID: PAT_MRT3847_66895C.1.pep
KSLVNWFSQKMSLDKASECVDPAIDGXTALKMLLKWYAVDVLCVQYEGDLRLNISIVVKDLXLLLSARHVPAGEIPN

SEQ ID NO: 249020 - protein, 49 aa, Glycine max
  Clone ID: PAT_MRT3847_66896C.1.pep
GNCMDQLHSIAVAVWHLQRVLSKKRDPFTHVLLLDEVIQISTGPESRQV

SEQ ID NO: 249021 - protein, 592 aa, Glycine max
  unsure (1)..(592): unsure at all Xaa locations
  Clone ID: PAT_MRT3847_66897C.1.pep
LRKVSPARPLKTVSNADSPSQLAHRPNSSVISALVLNDAAFDSHVNDGSSELYKQVKHAREVGRSLWEHLESGKPLTRTVAENRPGSCPGSVSLSGSDVVDVSXVVPLPCGLTLGSHITVVGKPLAAKPDFEPKITVVTENEPVMVSQFVVELQGLKTVDGEEPPRVFHFNPPTKGDWSGKPVIELNTCYRMQWGSALRCDGWKSKADEDTVDRMVKCEKWIRDDEDHLEGSKATWWLSRLIGHTKKVTIDWPFPFSEGKLFVLSISAGLEGYHVSVDGRHVTSFPYRAGFTLEDATGLSLTGDIDVHSVFAASLPSSHPSFAPQRHLEFSTRWRTQPLPESGVELFIGVLSAGNHFAERMAVRKSWMQHRLVKSGVVVARFFVALHARQEINAELKKEAEFFGDIVIVPYLDNYDLVVLKTHAAICEXVHTVSAKYVMKGDDDTFVRVDAVIDEARKVPDGSSFYIGNINYYHKPLRYGKWAVTYAEWPEEDYPPYANGPGYILSSDIARYIVSEFDMHKLRLFKMEDVSMGMWVEQFNSSKPVHYSHSLKFCQFGCIEDYYTAHYQSPRQMMCLWDKLQRNSRPQCCNMR

SEQ ID NO: 249022 - protein, 124 aa, Glycine max
  unsure (1)..(124): unsure at all Xaa locations
  Clone ID: PAT_MRT3847_66898C.1.pep
STSTRFSIAYLPISEASSSASNEKLXHSVEGXXPMLSFGKSVSQILEPKKKNRIWLGTFATANIATRAHDIXSLSIKSNSSILNFPXLISYLPRPDSNSPIDIHSATAKSTPIEVNDSPTTPTS

SEQ ID NO: 249023 - protein, 64 aa, Glycine max
  unsure (1)..(64): unsure at all Xaa locations
  Clone ID: PAT_MRT3847_66899C.1.pep
ITLFFNTSHLPTLFMSTRTIPLCRKHLAILYWVTKGTSHCHKTXNPTIFRTLTRHIRNPIYRHM

SEQ ID NO: 249024 - protein, 298 aa, Glycine max
  Clone ID: PAT_MRT3847_6689C.1.pep
MGASLSSNGSSIGPGLGDIPESCVACVFLHLTPPEICNLARLNRAFRGAASSDSVWEAKLPRNYQDLLDLVPPERHRSLSKKDIFALLSRPLPFDHGHKVGAALQEVWLDRVTGKVCMSISAKAMTINGIDDRRYWNWIPTEESRFHTVAFLQQIWWFEVDGEVTFPFPADIYTLSFRLHLGRFSKRLGRRVCNYEHTHGWDIKPVKFEFSTSDGQQASCECCLDESEINDTYGNHKRGCWVDYKVGEFIVSGSEPTTQVRFSMKQIDCTHSKGGLCVDSVFIVPNDLRERKRRGILK

SEQ ID NO: 249025 - protein, 91 aa, Glycine max
  unsure (1)..(91): unsure at all Xaa locations
  Clone ID: PAT_MRT3847_668C.1.pep
WTACGHRSGIARPIHACVVSRAGAKNAILMNMPGAVLXMWRYVGGHLVFDGCKRTSTYNKCAGCFFIAIANWADDTINCESFSHKMVLTGK

SEQ ID NO: 249026 - protein, 50 aa, Glycine max
  Clone ID: PAT_MRT3847_66900C.1.pep
RLPFNPVQFPQYQTFLIKRLDCRARISSSFDNQSSKKHLILKPSFPEYDP

SEQ ID NO: 249027 - protein, 66 aa, Glycine max
  Clone ID: PAT_MRT3847_66901C.1.pep
PTCHQSQAHLTHNFFLPTTIITLLLQVEIQASFTPSPSPFRTISINWSSITPKYIPIMPFRLKAGH

SEQ ID NO: 249028 - protein, 108 aa, Glycine max
  Clone ID: PAT_MRT3847_66902C.1.pep
NETQMAGFNLPGLFILRSFFPGERNPIVFNAPFNGKLIFPGGGGFPPYFKPFPMGPISFWVLFFRGQKKFSLLPSFLQGRTPSFFPLFPPFFFRRCFLNQFGGVWGVF

SEQ ID NO: 249029 - protein, 46 aa, Glycine max
  Clone ID: PAT_MRT3847_66903C.1.pep
FYFSLWKSSAVSQQAYLERSYHLFCDLFRPGNDVHCHSLFVDFFFS

SEQ ID NO: 249030 - protein, 51 aa, Glycine max
  unsure (1)..(51): unsure at all Xaa locations
  Clone ID: PAT_MRT3847_66904C.1.pep
KVMXKXXQRRXLLNCIKGFXXXCXGNXPXXSCSFXEXETPIXVXFXFSNCE

SEQ ID NO: 249031 - protein, 114 aa, Glycine max
  Clone ID: PAT_MRT3847_66905C.1.pep
HIQTAASYHAIAIALSLIDAFSLSVQHEQTTLKILQAKLGSEDLRTQDAAAWLEYFESKALEQQEAAKNGTPKPDASIASKGHLSVSDLLDLLVPTQKEMMLEETEAYKDTLNK

SEQ ID NO: 249032 - protein, 94 aa, Glycine max
  Clone ID: PAT_MRT3847_66906C.1.pep
LVMYSKVSIVVSCEIVSLSCDDIVGNDSINGRVSNERFESQIRVRIYQIGKRWVVVRAQVALLQTDAGSADGGQGPADHGKDPHCARMKDLSAV

SEQ ID NO: 249033 - protein, 55 aa, Glycine max
  Clone ID: PAT_MRT3847_66907C.1.pep
KIFSISSKEGPPFILTEAIKDLGLAINQKETPSPRPNPNRPGTLKSPIPPPYYCS

SEQ ID NO: 249034 - protein, 64 aa, Glycine max
  Clone ID: PAT_MRT3847_66908C.1.pep
RCTTFPYWGIYRTWGITGQILFPGKNCIPLKIPKKIPPGTLKGKPGGPHGGSNPPLLGVGPLAL

SEQ ID NO: 249035 - protein, 86 aa, Glycine max
  unsure (1)..(86): unsure at all Xaa locations
  Clone ID: PAT_MRT3847_66909C.1.pep
REXMTSXHFQVLXXTXKGDXNRXIGGLRIXNDYWKXHRTLXGXHNSDANRICPVLEHVAYIASNNNVYRKNCQAKQARKTXTVLVD

SEQ ID NO: 249036 - protein, 82 aa, Glycine max
  Clone ID: PAT_MRT3847_6690C.1.pep
QLVGISAMLMASKYEEIWTLEVDELVRLTDYTHEQVLVMEKTILNKLEWNLTVPTTFVFLVRFIKASVPDQELENMAHFLSE

SEQ ID NO: 249037 - protein, 128 aa, Glycine max
  unsure (1)..(128): unsure at all Xaa locations
  Clone ID: PAT_MRT3847_66910C.1.pep
MLVRLSYIDNTPYLQFLLKETLMLHPSSLIFIRKAILTCQDASYHFTXNITIPISTCSIVRYPLYCSHSLXIQAILDLAVRPPGQEXIDIRRAHYQLLPLTSRRRFLLXVSLALLVMVLILINLIPLF

SEQ ID NO: 249038 - protein, 88 aa, Glycine max
  Clone ID: PAT_MRT3847_66911C.1.pep
IPDHISPGTPPPHLKTVITMSSAPNNTLAITEMAGAAHIVANHDGLRRQMIGTSCLSLHYHCCHCIGCWDELVLTCTRHEMNYPPMMS

SEQ ID NO: 249039 - protein, 63 aa, Glycine max
  Clone ID: PAT_MRT3847_66912C.1.pep
GGLNIFFIRDPGPKWAYKRNYMKPFRKNMDRSVVSLNVSGVFCFVRKKIIQLLILRSRSMGLL

SEQ ID NO: 249040 - protein, 66 aa, Glycine max
  unsure (1)..(66): unsure at all Xaa locations
  Clone ID: PAT_MRT3847_66913C.1.pep
GPEACAYPSAVPGFLGGGGPGHLMHPNGNVRVDGMVSVIGHXLTELSSNPLVNAWYSCEDPTAPTE

SEQ ID NO: 249041 - protein, 63 aa, Glycine max
  Clone ID: PAT_MRT3847_66914C.1.pep
SSSNFLLDPVINIIQGPGSFQQYPLEEGSKPHSKFQDLIFPWKKDPVGLPHIIGNSWTKIEKL

SEQ ID NO: 249042 - protein, 175 aa, Glycine max
  unsure (1)..(175): unsure at all Xaa locations
  Clone ID: PAT_MRT3847_66915C.1.pep
MLSSYNAGCFAHLGTNATKKDKTLVISKYGASGDYPACTDLAYNKAISDGVDVLDCPVQMSKDGTPFCLNSIDLIESTTVAQSSFSKFAMTIPEIKSGSGIFAFNLTWNDIKXLDPAASILNPFAKYRLFRNPRSKNAGTLLALSDFLSLTKNQTSLSGVAIIVEVCASMPIHSL

SEQ ID NO: 249043 - protein, 140 aa, Glycine max
  Clone ID: PAT_MRT3847_66916C.1.pep
MWNPRALSAPLALLLLHSLLALISAQRSTWNTLSGGAPLVVARGGFSGMLPDSSDASYNLAVITSGPDVYIWCDVQLTKDGLGICQPDINLANSTYIASAYPNKTTSYLVNGVPTRGYFPLDYTLKDLSSVGLTQGVYSR

SEQ ID NO: 249044 - protein, 626 aa, Glycine max
  Clone ID: PAT_MRT3847_66917C.1.pep
MSNSRALSAPLALLLLHSLLFLVSAQRSTWNTLGGGAPLVVARGGFSGILPDSSGAAYNLAVISTGPDVYIWCDVQLTKDGVGICQPDINLANSTYIATIYPNKTTSYSVNGVPTSGYFPLDYTLKDLSSVILTQGVYSRSTLFDGNDFGILTVDDLVKLDQKPKGIWLNIQHDAFYAQHNLSMRSFVLSVSRSVVFSYISSPEVGFLRSIASRFNPKTTKLVFRFMRQSDVDPSTNRTYGSLLQNLTFIKTFASGILVPKGYIWPVDATLYLQSHTSLVSDAHKAGLEVFASDFVNDVPFSFNYSYDPLAEYLQFVDNGDFSVDGVLSDFPITPFEAIGCFAHLATNATKKDKTLVISKYGASGDYPACTDLAYNKAISDGVDVLDCPVQMSKDGTPFCLNSIDLIESTTVAQSSFSKFAMTIPEIKSGSGIFAFNLTWNDIKILTPSILNPFAKYRLFRNPRSKNAGTLLALSDFLSLTKNQTSLSGVAIIVENAAYLADKQGLSVIDAVIGALSKAGYDKPGSQKVYIQSTNSSVLLKFKEKTSYELVYKIDETIGDAANAAVEDIKSFASSVVVNKDSIIPNNDQFLTYTIQQNANLSVVEHLGVCFHAYSFFIVFILPAAI

SEQ ID NO: 249045 - protein, 53 aa, Glycine max
  Clone ID: PAT_MRT3847_66918C.1.pep
FSLLPNAFCVWMHKMNSIKCYQVVTSIAPSFCVLNLFPKHQESRLKILSNLKT

SEQ ID NO: 249046 - protein, 118 aa, Glycine max
  Clone ID: PAT_MRT3847_66919C.1.pep
TGARHESAISHIIWGEKNPTNTHGQTCTSHGRSIDHFGTKNNATMPNGTEIISSHTKSSIIFPQIICRKSCKYNLPRTEREHSTPIFAPMYQDQTHLCIQWGGKQGGIKMHDRYDDIC

SEQ ID NO: 249047 - protein, 67 aa, Glycine max
  Clone ID: PAT_MRT3847_6691C.1.pep
SILSLIHNVLLLSQELFFLFSTALLMVWLGHAAAQGLMIVLTYLLLIKSCHVAEDIHVNWLHHYVLC

SEQ ID NO: 249048 - protein, 137 aa, Glycine max
  unsure (1)..(137): unsure at all Xaa locations
  Clone ID: PAT_MRT3847_66920C.1.pep
GXXXXFVFFFFSFFXGKEIMPPFINIKNILSLIKNTYSYKRGKKKNHFKFLPQKFVNLFLKKKKIDPPKSLGTVFSCFYYPPLTFPCQRVLFTFFPPTKTVFPLPPHWLKNKFFSPPFYNNREPLLGTPAIGITIIF

SEQ ID NO: 249049 - protein, 131 aa, Glycine max
  Clone ID: PAT_MRT3847_66921C.1.pep
PPPPPPVFWFFFPPPGGKKPPPPPPPPWFFFFEGKQKKGAGPPPPPPPPEENNQFLGGGGVLKKTPPPTFFFFRGRVGSGGIFPPPPGGAPIGFLLPAPCDPKMFPHGGDNFFLGEGGANFFSRGPQFIFF

SEQ ID NO: 249050 - protein, 101 aa, Glycine max
  unsure (1)..(101): unsure at all Xaa locations
  Clone ID: PAT_MRT3847_66922C.1.pep
GRTIPPICTKPAMITRVLFETVFTLIGDHPMYLRPDDIQMCKRRGDSPHFSRYXSSYNDIIMAPIFAHKDILDLSKYATVSVINGLTDYNHACQIMADALT

SEQ ID NO: 249051 - protein, 96 aa, Glycine max
  Clone ID: PAT_MRT3847_66923C.1.pep
LKPLTFFASSVDHSCSLSVCKTVDCACSSQWWFEALTHSFPVSVDVMRARHTILFDVEPMRRMVVDLLSPLQLCSFLLATCMTVSSILVCFPDYRG

SEQ ID NO: 249052 - protein, 59 aa, Glycine max
  Clone ID: PAT_MRT3847_66924C.1.pep
PKGTGQKLIPGGKGSIVGGRSGFKIGLKKKKKKKKKKTHQTKKKPPKKKKKKKKKKTAR

SEQ ID NO: 249053 - protein, 93 aa, Glycine max
  Clone ID: PAT_MRT3847_66925C.1.pep
YARGTSAHFRQGRHPRKHPSGRRSIPRKQVKRATTPQKRANQRAQKVSARTKRPGRGPARQRGGQRMGETHANARQNQRGAAASKQAQSKPSP

SEQ ID NO: 249054 - protein, 138 aa, Glycine max
  Clone ID: PAT_MRT3847_66926C.1.pep
DCVVQCVLTTQVTCIPTRKHSMVHLCWIIAPSRGIIGLLHSKNQFAKVNDLGWVIQSFRKKAFFLFDSLNCVVFVQPSTLLHCHSLTLFSGSSLTVDLFWFFPHSFSLPPISLVCFSSPTPLFEAECSLLCSPSLFGF

SEQ ID NO: 249055 - protein, 174 aa, Glycine max
  Clone ID: PAT_MRT3847_66927C.1.pep
EELAHWSLPEDDLVLLAIIGLKDPCRPGVKDAVQLCQKAGVEVKMVTGDNVKTARAIAVECGILGSISDATEPIIIEGKRFRALTDEGRADIVEKILVMGRSSPNDKLLLVQALRRKGHVVAVTGDGTNDAPALHEADIGLAMGIQGTEVAKESSDIIILDDNFASVVKVVKWG

SEQ ID NO: 249056 - protein, 122 aa, Glycine max
  Clone ID: PAT_MRT3847_66928C.1.pep
SLYHALASPISTPPRHIVHPHLFHYHRLHALLTSFDCRYRLFITTYCSLTPPFRHPPLLFFVIPSCCPHTRCLPLSYLWSLFTLVLAPALSSISYIIVFYPPPPPKEGGRHTVMTGNLPWNG

SEQ ID NO: 249057 - protein, 105 aa, Glycine max
  Clone ID: PAT_MRT3847_66929C.1.pep
SSPPPVPSSPPPSQSPPPASTPPPSPLSSPPPSSPPPSSPPPSSPPPASPPPSSPPPASPAPSSPPPSSPPPFSPPAATPPPATAAPAVPPPSLTPTVTPLSFSP

SEQ ID NO: 249058 - protein, 182 aa, Glycine max
  Clone ID: PAT_MRT3847_6692C.1.pep
MKFEIEDITVYFPYDNIYPEQYSYMVELKRALDAKGHCLLEMPTGTGKTIALSKPHSPLKLLYCTRTVHEMEKTLAELRLLHDYQLRHLGPAAKILALGLSSRKNLCVNPRVLAAENRDSVDAGCRKLTASWVRAVAAENPGVPTCEFFEQYERAGSSAVLPPRVYTLEDLRVYGKEKGWGP

SEQ ID NO: 249059 - protein, 86 aa, Glycine max
  Clone ID: PAT_MRT3847_66930C.1.pep
YVRRNLVLFNRFLTFLKWKTNFAPATLYQCIRYFQLKQKVIGNFSMQKVAMVFTNNSKGKTKSATQFTFTKRNQWNQSPFKRQSTT

SEQ ID NO: 249060 - protein, 211 aa, Glycine max
  unsure (1)..(211): unsure at all Xaa locations
  Clone ID: PAT_MRT3847_66931C.1.pep
REYEISLIRVAEPPEERMEQALFSPPLSKQRVEFAVQQILESHATTLIDFGCGSGSLLEALLNYPTSLKKMAGVDISQKGLSRAAKVLNSKLVTNSDAGGQLTSIKSVILYEGSITNFGSQLHGFDIGTCLEVIEHMDEDQACLFGDVALSSFRPRILIVSTPNFEYNVVLQKSNPSTQEQEESDEKTLLQSXXFRNHDHKFEWTREQFTQ

SEQ ID NO: 249061 - protein, 41 aa, Glycine max
  Clone ID: PAT_MRT3847_66932C.1.pep
LASIEEFFRTVIRSSCCFNSLCAIILIFLLRLFSINKLFSV

SEQ ID NO: 249062 - protein, 45 aa, Glycine max
  Clone ID: PAT_MRT3847_66933C.1.pep
WKNHRTLTRIKFLVSNVFQSILILTFSHIFICVESFLNLRISRNN

SEQ ID NO: 249063 - protein, 225 aa, Glycine max
  Clone ID: PAT_MRT3847_66934C.1.pep
MEESSSIEESVASVVEEAKEVQDAVSAHISKASSDEEPLRQRVRRVDSRIHSLRSSLDSLVSTKQIPPSLADKLDEDLQRARCIIVDGDSSSLLPGHAQGSFLRMFLGPINVRASRKDVQLKVKEEYNSYRDRTALLFLLFPATLLILRSWVWSGCLPTFPVQMYQACILSLYTFFVMLEFIFRDGKIYVSNLSLCIIYCHHQAWLLFLYTGLAFLREHIESQWK

SEQ ID NO: 249064 - protein, 74 aa, Glycine max
  Clone ID: PAT_MRT3847_66935C.1.pep
EPLVALRLESTMVLSSFVLHVMLAFELNAVFCHGAPRCIVQHGGHPRLLSLLVPSHMKGLPNHVNGPGHYALRI

SEQ ID NO: 249065 - protein, 146 aa, Glycine max
  Clone ID: PAT_MRT3847_66936C.1.pep
MALSSRLFSKSKLIYGSQILLQKEHAIPVRHFAKESAPPALKGDEMLKNIFVEVKNKFETAIGILKKEKITIDPEDPAAVSHYAKVMKTIREKASLLSESQDILFTIEIETQDIPDARTYLLTLKEIRIKRGLTDDLGAEALMIEA

SEQ ID NO: 249066 - protein, 95 aa, Glycine max
  Clone ID: PAT_MRT3847_66937C.1.pep
MHVSFANHSFVNPCTAALREQKIMKLGSILVTKDSRKHTSSISPLNHDTKFSPTFTLATCYAVQKGRANWPLNLMPCRADNQRTIPNYQLEKSVV

SEQ ID NO: 249067 - protein, 241 aa, Glycine max
  Clone ID: PAT_MRT3847_66938C.1.pep
MALSSRLFSKSKLIYGCQILLQKEHAIPVRHFAKESAPPALKGDQMLKNIFVEVKNKFETAIGILKKEKITIDPEDPAAVSHYAKVMKTVREKASLLSESQDILSTIEIETQDIPDARTYLLTLKEIRVKKGLTDDLGAEALMIDALDKIEKDLKKPLLRNDKKGMDLLLAEFDKINKKIGIRKEDLPKYEEELELKVAKAQLEELKKDALEAMETQKKREEFKDEPESVDVKTLDIRNFL

SEQ ID NO: 249068 - protein, 40 aa, Glycine max
  Clone ID: PAT_MRT3847_66939C.1.pep
IELKAYKKHTHPLFVSITNIILKLKHAFKRLVRNYKLLKN

SEQ ID NO: 249069 - protein, 57 aa, Glycine max
  Clone ID: PAT_MRT3847_6693C.1.pep
PINIYFSGINKRDASQQGLTRTQHHLHYNQQKLVLSTRTFQQRSLEFTSHKQKCDLV

SEQ ID NO: 249070 - protein, 107 aa, Glycine max
  Clone ID: PAT_MRT3847_66940C.1.pep
LFFFFFGFIRPISCIFILWANQIECFFEGFTFTGGGGHWFLSVLPVYKEKGPFVVYASRLCFLVGLFYFLFAQTSLASATCYFARVALILFCSLIMFSCLAALYFCF

SEQ ID NO: 249071 - protein, 58 aa, Glycine max
  Clone ID: PAT_MRT3847_66941C.1.pep
EQESETKDTNSRLGPPGRIIHSIVQSLIQYASSSTYYLHIELIPSGIKLKSAVESYIQ

SEQ ID NO: 249072 - protein, 125 aa, Glycine max
  unsure (1)..(125): unsure at all Xaa locations
  Clone ID: PAT_MRT3847_66942C.1.pep
MATTRSSSEDIVDSTPLLANSGGSSDELTSGRGFSRRQRLRQAXRFLRRASGRRMMREPSMLVREAAAEQLEERQSDWAYSXPVGVLDLVWNFXVVVAGAVLVLSASEAPGMPXRLWIVGYAMQC

SEQ ID NO: 249073 - protein, 314 aa, Glycine max
  unsure (1)..(314): unsure at all Xaa locations
  Clone ID: PAT_MRT3847_66943C.1.pep
MRTLYMSVIRENLKQCKISLFKRFRELTRKIWHTRKFKGQVSPHEFLQAVMKQYXKRFRIGAQSDPVEFMSWLLNTLHADLKTSKKNTSIIYECFQGELEVVKEIPNKVISDKKENSENQNNAEKLSDGVNERYAFVKETSKMPFLMLGLDLPPPPLFKDVMEKNIIPQVPLFNILKKFDGETVTEVVRPHIARMQYRVTRLPKYMILHMRRFTKNNFFVEKNPTLVNFPVKNLELKDYIPLPTPKENEKLRTKYDLIANVVHDGKPGEGFYRVFVQRKSEELWYEMQDLHVSETLPHLVALSETYMQIYEQQQ

SEQ ID NO: 249074 - protein, 50 aa, Glycine max
  unsure (1)..(50): unsure at all Xaa locations
  Clone ID: PAT_MRT3847_66944C.1.pep
XIPTXPHTTHSGFHCTMSTKLVXLVXCQRDVLXTGVVKHGXVVTLGSHWA

SEQ ID NO: 249075 - protein, 52 aa, Glycine max
  Clone ID: PAT_MRT3847_66945C.1.pep
SYIHINLLIHSFYFIQPNILNLILSYIHTLIISFIPMFNYTNTITLINSYLI

SEQ ID NO: 249076 - protein, 86 aa, Glycine max
  unsure (1)..(86): unsure at all Xaa locations
  Clone ID: PAT_MRT3847_66946C.1.pep
GFGGGRRHVFTWDLMRDFAPNGEGEGKDSYVELNSFDDEDDHERVEKEEEEDEEDEEEEEGEVGGVREKSGGXGKCXRIAEIVDDF

SEQ ID NO: 249077 - protein, 52 aa, Glycine max
  Clone ID: PAT_MRT3847_66947C.1.pep
NHVYCPSFCYKVSFDKDLPGRNQRGSVNHVYACHILVLAPWWSRALSCLLSR

SEQ ID NO: 249078 - protein, 298 aa, Glycine max
  Clone ID: PAT_MRT3847_66948C.1.pep
MERYKCKLCSRTFSNGRALGGHMKAHLATLPLPPQNQQPPLSPSAAASFSSNSSSEQEQATHDEKSLIYGLRENPKKCFRLADPEFDTGSVVQDRESETESKNPTRRRSKRTRRPVNLEQKKPKLSFMESPEPVSSVSDTSPEEDVAMCLMMLSRDRWSKNNNINVVNVNDEDVVEEEEEEEEEEEEGGRSVLEIKLRRVRGKHQCQSCGKTFRSSRALGSHRSICEGSGNDSKIFQCPFCSKVFGSGQALGGHKRSHLMPSSSTTANNDSVRLKESFIDLNLPAPPEDDDLSVVSDA

SEQ ID NO: 249079 - protein, 68 aa, Glycine max
  unsure (1)..(68): unsure at all Xaa locations
  Clone ID: PAT_MRT3847_66949C.1.pep
PPPPASASAPPAPGILHVCEQQRXQSNRPQTATILYSWXXTIXTGSAQYGLWDRYSGYNSDPRVRGRV

SEQ ID NO: 249080 - protein, 36 aa, Glycine max
  Clone ID: PAT_MRT3847_6694C.1.pep
FADEHDLSLQRRKRAFILKVEAFRVIVQKTQKKPDP

SEQ ID NO: 249081 - protein, 73 aa, Glycine max
  Clone ID: PAT_MRT3847_66950C.1.pep
RGPLNKLPPTKRNKEPIICHGRVDTGYCMGPQGLIHGASAPIWDGTTDWRFSGERARTKELLLGHLGGEKTGG

SEQ ID NO: 249082 - protein, 54 aa, Glycine max
  Clone ID: PAT_MRT3847_66951C.1.pep
ALQNTLTINQESKKQKTNLVTNNIIAAYLINPSRNHQSKDTFSLMGKNINSHAP

SEQ ID NO: 249083 - protein, 101 aa, Glycine max
  unsure (1)..(101): unsure at all Xaa locations
  Clone ID: PAT_MRT3847_66952C.1.pep
HAAHAGGRGRKEGGXXGAXGXAKKKXEEEEPPRSXQSGGPXXGXTGXXGNSXAENXXXADTPAXPRKXNGXARRPXPPXNADQXXENNQGDXXEPADAEAK

SEQ ID NO: 249084 - protein, 57 aa, Glycine max
  Clone ID: PAT_MRT3847_66953C.1.pep
RNKERLWSIGGTIVVVPSNQLATRIIMCLLILKRNICFLLQTHQNYSFRVQNPSPHF

SEQ ID NO: 249085 - protein, 33 aa, Glycine max
  Clone ID: PAT_MRT3847_66954C.1.pep
LSTRMSLIIHKIDETLHVGGHNNDDEYKGEHHH

SEQ ID NO: 249086 - protein, 42 aa, Glycine max
  Clone ID: PAT_MRT3847_66955C.1.pep
SQDMITKPKRWHRVQEVSMSPDRSKSARGSVGPDVTMKFPTY

SEQ ID NO: 249087 - protein, 85 aa, Glycine max
  Clone ID: PAT_MRT3847_66956C.1.pep
FGLAVAQNSLFLPVLLLVGSSLLGAIVKVNVLNDALKSMYHAQKPGKRPVMIRPSSKVIIKFLLVMQKHGYIGEVQYFDYHKAWK

SEQ ID NO: 249088 - protein, 55 aa, Glycine max
  Clone ID: PAT_MRT3847_66957C.1.pep
GLPQEFDSVIPLIESHSDEITIEEVEGLIVAQELRLQKYFKKTSSDSTFSGSLSI

SEQ ID NO: 249089 - protein, 53 aa, Glycine max
  Clone ID: PAT_MRT3847_66958C.1.pep
LFLFLLFKICSCAYYSHVDNVSYTDLYRIFWLIMGSFRLNHRLESHKPNCICV

SEQ ID NO: 249090 - protein, 99 aa, Glycine max
  Clone ID: PAT_MRT3847_66959C.1.pep
GFTHEEVANMVVRSPGLLTFSVKKNLGPKVEFFLREMNGDVAELKRFPQYFSFSLERRIKPRFGMLRRVGVSMNLEDMLKVSDGGFNARLVDSTSRFFR

SEQ ID NO: 249091 - protein, 393 aa, Glycine max
  Clone ID: PAT_MRT3847_6695C.1.pep
WLFYKTHSSLPLIFLPFYLPAANLHRVRFALSYGARRLKQILTLPGENMGAALEKFFFSTLDRNGKGERADVALPVSPFGIGRSEESVLRGDCESYCGGLQYVQLYRNYAMPIAVHSSSPSSPSQDDILAPSTQQNWSMFYQGGTDVYIPGQTLYHPTYNLEGRGKSRGTGTYIPDLNYNSYWDMRTKPPRPRRFASSKYNALPKSPPKKQQAEEVHSEIDINANSDSRLFEFSSEDSPLLLCNCKAIPPTQAQESTPLAKFHSETDMDVTSQLLEFSNEDFPLLPKVYSETHMEGNSRSFELSKKDFPLLQSTHKTALSESAAKLTKQAKSFPSSKESKLKNIEFGTFKKSQSLIEPSLSTKGEREDSGVPLSQETVLVVPKVAAERKDESP

SEQ ID NO: 249092 - protein, 115 aa, Glycine max
  Clone ID: PAT_MRT3847_66960C.1.pep
SSKNPTILKSVAATSPTFNIAMAPPQADLRKIGAEGFALIDKFYGPARRNSVNDAFHGRRGDRCWVVYNVSNDVMEDSAAIGMEATTGHFAAKSAMNYPKAGKPEIRYWGRPLKF

SEQ ID NO: 249093 - protein, 82 aa, Glycine max
  Clone ID: PAT_MRT3847_66961C.1.pep
MIIFGIGINTLQCGDYTSLLPSATPQVITDMEGNDLHIAGKETLMSFWAQRVPILETHPLGKNDSLTPNAHNVYHLPWGLHP

SEQ ID NO: 249094 - protein, 175 aa, Glycine max
  unsure (1)..(175): unsure at all Xaa locations
  Clone ID: PAT_MRT3847_66962C.1.pep
AAAKAAKDAGVVLSYDPXNLRLPLWPSADSAREGILSIWETADIIKISEEEISFLTKGENPYXDAVVHKLFHPSLKLLLVTEGAEGCRYYTKEFSGRVKGLKVDAVDTTGPGDAFVAGILSQLAVDLSILQNEDELRDSLKFANVCGALTVTERGAIPALPTKEAVLNAMLKPVS

SEQ ID NO: 249095 - protein, 195 aa, Glycine max
  unsure (1)..(195): unsure at all Xaa locations
  Clone ID: PAT_MRT3847_66963C.1.pep
RKAKIFHYGSISLITEPCQSAHIAAAKDAGVVLSYDPNLRLPLWPSADSAREGILSIWETADIIKISEDEISFLTKGEDPYDDAVVHKLFHPNLKLLLVTKGAEXGCRYYTKEFSGRVKGLKVDAVDTTGAGDAFVAGILSQLAVDLSILQNEDELRDSLKFANVCGALTVTERGAIPALPTKEAVLNAMLKPVS

SEQ ID NO: 249096 - protein, 117 aa, Glycine max
  unsure (1)..(117): unsure at all Xaa locations
  Clone ID: PAT_MRT3847_66964C.1.pep
MFLFADGYSSCFQRSGYEVYILEATYKDPVGCAARNVHGFTQEDIEXMSKQWEEASSLYLQLDVKSLFHGDDLKESRIQEVDMDMEDDLGDALPPFQGKEDEKVVDPPVGEDASRVL

SEQ ID NO: 249097 - protein, 254 aa, Glycine max
  Clone ID: PAT_MRT3847_66965C.1.pep
MEWEMRPGGMFVQRREAAADNGGGGNGNMTTTVLITVVHASSHYDLHLPTNSTFWDVKSLLVHRTGLQPEEQQLFFGGKEKDNEDNLHEEGVRDKSKLLLLEDASSEERKREEIRKHNEMLKASEAVAEVRAEVDKLAERVSVLEVAVDGGTRVSDKEFLMSTELLMRQLLKLDSIEAEGEVKLQRKAEVRRVQNFVDTLDSLKAKNSNPFTPIGKAVSVATQWETFDSGMGSLNAPTSMSSSRNVSQDWERLD

SEQ ID NO: 249098 - protein, 74 aa, Glycine max
  Clone ID: PAT_MRT3847_66966C.1.pep
RSVFFHGDPGLSSRTNMLSLRNQVLCSPMMRPPLNLSRHGCRYTYCAPSILQVGFLIINRSPSVLVNESPVTVL

SEQ ID NO: 249099 - protein, 68 aa, Glycine max
  Clone ID: PAT_MRT3847_66967C.1.pep
SFIKGDDGLDLSVLVLTQKPSFLSGRLGPNDSGHNSQFTRYATTVLFFKGGEYLFSRGDPLTSYKNKM

SEQ ID NO: 249100 - protein, 253 aa, Glycine max
  unsure (1)..(253): unsure at all Xaa locations
  Clone ID: PAT_MRT3847_66968C.1.pep
MTTVLRPPIGLRFLQPPQLSPSPTSCVSFSLSLKLPRINSNYSSFEVRDVTYQPPGTQLRLLNSVSFSLPEKSFGLIFGQSGSGKTTLLQLLAGISKPTSGSIYIQEYESDGNPSQPPEPLVPERVGIVFQFPERYFVADNVLDEVTFGWPRQKGWIXGISLNKNPHSLSGGYKRRLALAIQLVQTPDLLILDEPLAGLDWKARADVVKLLKHLKKELTVLVVSHDLREFASLVDRSWRMEMGGNLREEFLPL

SEQ ID NO: 249101 - protein, 272 aa, Glycine max
  Clone ID: PAT_MRT3847_66969C.1.pep
MTTVLRPPIGLRFLQPPQLSPSPTSCVSFSLSLKLPRINSNYSSFEVRDVTYQPPGTQLRLLNSVSFSLPEKSFGLIFGQSGSGKTTLLQLLAGISKPTSGSIYIQEYESDGNPSQPPEPLVPERVGIVFQFPERYFVADNVLDEVTFGWPRQKGNHHLRENLALGLQRAINWVGLSGISLNKNPHSLSGGYKRRLALAIQLVQTPDLLILDEPLAGLDWKARADVVKLLKHLKKELTVLVVSHDLREFASLVDRSWRMEMGGNLREEFLPL

SEQ ID NO: 249102 - protein, 97 aa, Glycine max
  Clone ID: PAT_MRT3847_6696C.1.pep
PEPLYRGQSSRSYERHQKIYYLREGDLIAVPTGVAWRMYNNEDTPVAAVCIIDTTSLENQLDQMPKRVYFCGQPRAEVSIYQQEHGGYYSHKGKHQH

SEQ ID NO: 249103 - protein, 71 aa, Glycine max
  Clone ID: PAT_MRT3847_66970C.1.pep
DPILPFVEPTVSFFLSHQLVQLPNTHHVNLYHFSSDQNPTPTSQPIQPLFHLSLSILFSRVRRVVGVVEAD

SEQ ID NO: 249104 - protein, 44 aa, Glycine max
  Clone ID: PAT_MRT3847_66971C.1.pep
AEINMMTMMQLMFSRGVGLLSQPVGNEFIRRMRMHVIWLMAFLT

SEQ ID NO: 249105 - protein, 57 aa, Glycine max
  unsure (1)..(57): unsure at all Xaa locations
  Clone ID: PAT_MRT3847_66972C.1.pep
TNFVVTFXXNAHGKLGCXXXLLFIVXXSQXLTXXCIXQSLRSNAXKXXCXVPXKVLP

SEQ ID NO: 249106 - protein, 123 aa, Glycine max
  Clone ID: PAT_MRT3847_66973C.1.pep
DSIEQKEESRGNEDHVSVIRDYRAKIECELSNICDGVLKLLDSRLIPSASSGDSKVFYLKMKGDYHRYLAEFKTGAERKEAAESTLSAYKGAQDIANAELAPTHPIRLGLALNFSVFYYEILN

SEQ ID NO: 249107 - protein, 34 aa, Glycine max
  unsure (1)..(34): unsure at all Xaa locations
  Clone ID: PAT_MRT3847_66974C.1.pep
LLHREELLRCPVGDYVHHVMXIAVTIVLDVSVGA

SEQ ID NO: 249108 - protein, 145 aa, Glycine max
  unsure (1)..(145): unsure at all Xaa locations
  Clone ID: PAT_MRT3847_66976C.1.pep
GRTITNSPTLAVTSHVSGSHSIRDRLTKLFLVKIGETHRGDGEQGXLFLPWGGGXNSKRTRHRDPPXAGRKGRPNQQHRXGAEEHGGGAPAGHRPRDNHSGRDPSTATKNRATNGKTANRKKEQKQAQTKRTNKTEHXAAPXAKP

SEQ ID NO: 249109 - protein, 265 aa, Glycine max
  unsure (1)..(265): unsure at all Xaa locations
  Clone ID: PAT_MRT3847_66977C.1.pep
MAAAPSPREENVYMAKLAEQAERYEEMVEFMEKVSAAADNEELTVEERNLLSVAYKNVIGARRASWRIISSIEQKEESRGNEDHVSVIRDYRSKIESELSNICDGILKLLDSRLIPSASSGDSKVFYLKMKGDYHRYLAEFKTGAERKEAAESTLSAYKAAQAIANAELPPTHPIRLGLALNFSVFYYEILNSPDRACTLAKQAFDEAIAELDPLGEESSKDSTLIMQLLRDTLTLWTSDMQDDGADEIKEAAPKPDDXKYFTVN

SEQ ID NO: 249110 - protein, 74 aa, Glycine max
  Clone ID: PAT_MRT3847_66978C.1.pep
SHEIFWLKRWFPTTLCLLFFFLFGEPIPYIFSALYQGKELLHLLLFTFFFPLHSPLPSFSLHCSHFQLCHVPNS

SEQ ID NO: 249111 - protein, 77 aa, Glycine max
  unsure (1)..(77): unsure at all Xaa locations
  Clone ID: PAT_MRT3847_66979C.1.pep
TTVNRAGAGMVAPFTGLKSMAGLLTKKTNXDITCIATNRGRVQCMHVWPRVXQEELETLSYLTTMDDTQYQTEAEYL

SEQ ID NO: 249112 - protein, 58 aa, Glycine max
  Clone ID: PAT_MRT3847_6697C.1.pep
KRGVLFATLSICKSNGNKLGLTPYWDLWLIFGGFLFRPLIRFFFHLALMGKGKQNPFL

SEQ ID NO: 249113 - protein, 89 aa, Glycine max
  Clone ID: PAT_MRT3847_66980C.1.pep
FCSPSNVGGARCLFYRSQVVHGENDMRLRKALFHKWLWTAYLPPRFFKSGRWVWRFSTSLVGWAFYVGEFVGFWGGNICGWRGFWIGGS

SEQ ID NO: 249114 - protein, 71 aa, Glycine max
  Clone ID: PAT_MRT3847_66981C.1.pep
FIWFSFYFLGLLSFWLYNKSKNFPGTSTCHGNNASRTIIIYQETRVLSIFNKWDAIKDGVGTWSISVFEQV

SEQ ID NO: 249115 - protein, 74 aa, Glycine max
  Clone ID: PAT_MRT3847_66982C.1.pep
MITPATDDVIMINENSSNHTVFLAVDAAKRAFFHNKSKDWSSAPGSVRARYLLAIHSKITDKKDELLKLETIYC

SEQ ID NO: 249116 - protein, 114 aa, Glycine max
  Clone ID: PAT_MRT3847_66983C.1.pep
KKSPFPQLGKNKKAPTDSPFQKFPHPNWKRDPPFNRPLNPGGGGVSPKGTLYFCQPLSPRSFRFFPFFFPQFRGFSPKSLKGGPPFGFPFKGLTAPPPKKFFLGEGFTKGPFPL

SEQ ID NO: 249117 - protein, 42 aa, Glycine max
  Clone ID: PAT_MRT3847_66984C.1.pep
FIIISSLNIKIPVDIITSLFLLLFTARFNIPREAGRVRSNPG

SEQ ID NO: 249118 - protein, 204 aa, Glycine max
  unsure (1)..(204): unsure at all Xaa locations
  Clone ID: PAT_MRT3847_66985C.1.pep
MTFKLLHLVKPFMPFLPEVTAPERKVPFKERVLWTAITLFIYLVCCQIPLYGIVSSDSADPFYWMRVILASNRGTLMELGISPIVTSGLVVQLLAGAKIIDVDQGNKEERNLYNGAQKLLGMLITLGQSTVYVMSGMYGDTASLGFSNSTLIVLHLFFAGIIVLVLDELLQKGHSLGSGISLFIATNICESIIXNAXSPITTNM

SEQ ID NO: 249119 - protein, 66 aa, Glycine max
  unsure (1)..(66): unsure at all Xaa locations
  Clone ID: PAT_MRT3847_66986C.1.pep
KQNHFSSIPINIHFELFIQMVVQKIXRILQGSLLFIIQIIILPRVEFCSTVNHLYSLITIQHHRHV

SEQ ID NO: 249120 - protein, 144 aa, Glycine max
  unsure (1)..(144): unsure at all Xaa locations
  Clone ID: PAT_MRT3847_66987C.1.pep
GSRAGFAVPGVGFQGPFSSPEPATPHGGAPCIQSASAPVYYSPATDQSAPAACAALPVKLRFAADDSPTTXAPPLRCPDPWCPCRVSRPPASPSRGYHGPGCASPDTPSTGLLTAFTPAPASASPGTPAPALTPTPLSFPPATF

SEQ ID NO: 249121 - protein, 107 aa, Glycine max
  Clone ID: PAT_MRT3847_66988C.1.pep
LLILLCFPFFFMIITKRVAVIKSYGRRIRLLAFSLFLSFGLGLGREYLLCSVLSVRRGYSLIVILSYFSLFSNTSDMFLFLGFHYNIQCSMHNSKEEIYNHQVSGFG

SEQ ID NO: 249122 - protein, 135 aa, Glycine max
  Clone ID: PAT_MRT3847_66989C.1.pep
MESSRTSTTLALFLTINLLFFVMASGCYTCTQPKPNPIPFPYPNPSPAAKSCPRDALKLGVCANVLNGPIGAIVGSPPDHPCCSVLEGLLDLEVAVCLCTAIKANILGINLNIPISLSLILNACEKSPPSDFLCN

SEQ ID NO: 249123 - protein, 74 aa, Glycine max
  Clone ID: PAT_MRT3847_6698C.1.pep
QTLERTHSHNHRLRNPRPPRPRYHHRSKFHLHRHGRCLLRRQRRSHRHHGLFAPSTPTGPSQHTARSPTLCPRG

SEQ ID NO: 249124 - protein, 45 aa, Glycine max
  Clone ID: PAT_MRT3847_66990C.1.pep
KKILFILQKVWMNPIAGYGDHFGEAEDLYMEWDKDAEEKNQGGGL

SEQ ID NO: 249125 - protein, 77 aa, Glycine max
  Clone ID: PAT_MRT3847_66991C.1.pep
WCPTDGYCGGGHSCEKDTTEAVTVKTMAQQLICRWRWQVTMSVAKSVVNGGGGDRGFSRSSAGGIKGCKNKGYNVVD

SEQ ID NO: 249126 - protein, 84 aa, Glycine max
  Clone ID: PAT_MRT3847_66992C.1.pep
GTGDPRVATRRKIYIFVANTYGGCLAAYVIHLLGNRRPPIRRYGKTRLAKTNFLVNLGKTANMTLMADMSTGDWGQIHGIRGLG

SEQ ID NO: 249127 - protein, 83 aa, Glycine max
  Clone ID: PAT_MRT3847_66993C.1.pep
PGDNFVGLIYGPEGDNQKQLEKETGAKIKIHGIKADTGEKGEIKPGTDIQCNYKEMHVNLSADSFEKVDAAMLIIELLITSVT

SEQ ID NO: 249128 - protein, 336 aa, Glycine max
  unsure (1)..(336): unsure at all Xaa locations
  Clone ID: PAT_MRT3847_66994C.1.pep
MVNHIIIRTRVTLQLFISVLQNQIPHSILFTDRHLYLLPPCIFGVFVLSITKSLDVKNCSSLRGVLEYLGNHQKEGINYTKTFAPIIKLGTVRTVLAVATRDLEEVVYIKPPLGFLPQQYGMMCKLNKSLYGLKQAPRCWFGDIYIVVLVYVDDLIISGDNHEAITKFKAYLHNWFHLKDLGILKYFLGVEVAQSSTGIFLYQRKYALDIWKTKKQQKVSRSSAEAEYQSMTVVTEELKWLKCFLHSLGISYSQPMRLHCDSQASLHIVKNPIFHELTKHIEVDCHFIRDEYLTNNIAPTYVSVNAQLTDIITKTLGPTQFXLLCKLEICNLHAPT

SEQ ID NO: 249129 - protein, 85 aa, Glycine max
  unsure (1)..(85): unsure at all Xaa locations
  Clone ID: PAT_MRT3847_66995C.1.pep
ARQYRTCLTFEPLIVHMIIRVVLESYGKTYLLGARLEPMFETFDVSKGPYSSRKHTNLSSSXCWSKVYLYLWCYNLLGSRSSRIS

SEQ ID NO: 249130 - protein, 482 aa, Glycine max
  unsure (1)..(482): unsure at all Xaa locations
  Clone ID: PAT_MRT3847_66996C.1.pep
YGCEKTTEGPLRKKALGCKWVYKIKHKVDGSVEGFKAWLVILGNHQNEGIDYTKTFAPIIKMGTVRTVLAVATKRAWELHXMDMHNAFLHGDLEEVVYIKPPLGFLPQQYGMMCKLNKSLYGLKQAPRCWFVKLSASLKHYGFRQSLSDYSLFXLAKTGDIYIVVLVYVDDLIISGDNHEAITKFKAYLHNWFHLKDLGILKYFLGVEVAQSSTGIFLYQRKYALDIIAETGLLGAKPSNVPIEXNHRLALAADLPFPHPDQYRWLVGRLIYLCFIIPXLSYCVHVLSQFMQTPKEAHWEVALRVVQYLKGNLGQGVLLRKDCDLQLSGXDSDWAGRPLTRRSLXRMICSTWIFSISWKTKKQQKVSRSSAEAEYQSMTVVTEELKWLKCFLHSLGISYSQPMRLHCDSQASLHIVKNPIFHELTKHIEVDCHFIRDEYLTNNIAPTYVSVNAQLTDIITKTLGPTQFTCCASWRYVIYMLQ

SEQ ID NO: 249131 - protein, 62 aa, Glycine max
  Clone ID: PAT_MRT3847_66997C.1.pep
KNITLGCTPWGKGQGFWVFQQSIQQICHQSFSGRFHVSPISKDHMVTLGRAAAKKKKKKAPA

SEQ ID NO: 249132 - protein, 133 aa, Glycine max
  Clone ID: PAT_MRT3847_66998C.1.pep
EGGPVLKFLEMFDSYRVEHCLRLCQEYGIIDASAFLLERVGDVGSALSLTLSDLNNKFVDLDASVEAVVLNHRRDGSSHMEIFNSVLKTKEVNDIHNLLRACIGLCQRNTPRLNPEESEAHWFKLLDSFCDPL

SEQ ID NO: 249133 - protein, 28 aa, Glycine max
  Clone ID: PAT_MRT3847_66999C.1.pep
LRREGWMGCPVTPIPSSYKINPRVRPRV

SEQ ID NO: 249134 - protein, 67 aa, Glycine max
  Clone ID: PAT_MRT3847_6699C.1.pep
EHLSVSELGSDHVNQHRHSHGPGSSSDPVPYLKPLAALAGQRSRAHDVKAGSDEQGAGRQETLDQEV

SEQ ID NO: 249135 - protein, 151 aa, Glycine max
  Clone ID: PAT_MRT3847_669C.1.pep
GRIRMSEENQALQHQLPQKHEKELEKLRAAVGEEWDDRSQLKEQIEAKLLHRQEAALRRERALAYSFSHQQTWKGSSKSLNPTFMDPNNPKWGWSWLERWMATRPRDGHSTVVDHNDHASVKSAASRAMSVGEITKLCSLQDKRPSPFGQK

SEQ ID NO: 249136 - protein, 47 aa, Glycine max
  Clone ID: PAT_MRT3847_66C.1.pep
MSVPNEENLSSHSQLSSHFFLDLLDSIIVDVASECHRVARLGLDSNL

SEQ ID NO: 249137 - protein, 47 aa, Glycine max
  Clone ID: PAT_MRT3847_67000C.1.pep
RRCSVPFSLLKFKRKLGNMRNYQNLLTNDQLLSHSFRYNEIYNVILY

SEQ ID NO: 249138 - protein, 54 aa, Glycine max
  Clone ID: PAT_MRT3847_67001C.1.pep
LRLFYGLWGKQMLLCLSYTCALACSNGFFFNASYSNSAALYSMTTSTTTACEEN

SEQ ID NO: 249139 - protein, 123 aa, Glycine max
  unsure (1)..(123): unsure at all Xaa locations
  Clone ID: PAT_MRT3847_67002C.1.pep
PRVRTLSEIEIVNLERVGLWQKHWVVIIYDCNLYLMVFSCIFSNLLDSLYYLFVFINIFFFLFLLFFXFVLIIFYYYFFFTLITYYFSLLLXFFLFFFVFFFYNLISYFYIFXMFFYFFLFAN

SEQ ID NO: 249140 - protein, 28 aa, Glycine max
  Clone ID: PAT_MRT3847_67003C.1.pep
SSLLIFSISLICRKAVRISYIMKLCNIS

SEQ ID NO: 249141 - protein, 523 aa, Glycine max
  Clone ID: PAT_MRT3847_67004C.1.pep
MAEPKVKYDRQLRIWGEQGQAALEKSSICLLNCGPTGSETLKNLVLGGVGSITVVDGSKVEAGDLGNNFLVDEASLGKSKAKCVCSFLQELNDAVKAKFVEESPETLIETNPSFFSQFTLVVATQLMENSMIKLDQICREVNVMLIFARSYGLTGFVRISVKEHAVIESKPEHFLDDLRLNNPWPKLKRFADDIDLNVQDPVAHKHIPYVVILVKMADEWAKSHGGRLPSTREEKKEFKELLKAGMVAQDEDNYKEAIDSAFKVFAPRGISLESQQILNDSSAEVDSNSSDFWVLVTALKDFIANEGGGDAPLEGSIPDMTSSTEQYVNLQNIYHAKAEADFLVIERLVRSTLKKIGRDSNSISKSTIKSFCKNARKLKVCRYRLIEDEFNSPNLPELQKYLTDEDYSIAVGIYILLRAVDRFAANYNSFPGQFDSAMDEDIPRLKSTAIALLNDLGCNGATLAEDLINEMCRFGAAELHAVAALVGGIASQEVIKLITKQFVPMSGTYIFNGIDHKSQLLSL

SEQ ID NO: 249142 - protein, 129 aa, Glycine max
  Clone ID: PAT_MRT3847_67005C.1.pep
LPELQKYLTDEDYSIAVGIYILLRAVDRFAANYNSFPGQFDSAMDEDIPRLKSTAIGLLNDLGCNGATLAEDLINEMCRFGAAELHAVAALVGGIASQEVIKLITRQFVPMSGTFIFNGIDHKSQLLSL

SEQ ID NO: 249143 - protein, 102 aa, Glycine max
  Clone ID: PAT_MRT3847_67006C.1.pep
TQQWQNPRVKYDRQLIIWGEQGQAALEKSSICLLNCGSTGSETLKNLVLGGVGSITVVDGSKVEAGDLGNNFLVDEASLGKSKAKCVCSFLQELNDAVKAKF

SEQ ID NO: 249144 - protein, 51 aa, Glycine max
  Clone ID: PAT_MRT3847_67007C.1.pep
PQSFCSNGVVTRRTFKSFGLVIILYDPFYERLCKLGTFRSPALFLIVFVFC

SEQ ID NO: 249145 - protein, 129 aa, Glycine max
  Clone ID: PAT_MRT3847_67008C.1.pep
KRFEKAPFGFSPFQKGLVGKVKILKALKFVFGKLRGVQGDFPGDVGAKGNNPVNEKGAGDPPEMVGGGFGEKGIPNGLGVSVFWGTLENLRSKPPVWPNVLGKKKSQFCLNTKKTFWGGKKNWGLVWPP

SEQ ID NO: 249146 - protein, 260 aa, Glycine max
  Clone ID: PAT_MRT3847_67009C.1.pep
RAGDVYLPIASVKGDIQIWGGKGKGQGGSGANGTITGKACPKGLFRPLRQECPAGTYKNVTGSDKSLCHSCPVNELPHRAVYISVRGGITETPCPYQCASDRYLMPDCYTALEELIYTFGGPWLFGLFLIGLLILLALVLSVARMKFVGVDELPGPAPTQHGSQIDHSFPFLESLNEVLETNRVEESQSHVHRMYFMGPNTFSEPWHLPHTPSEQIKDVVYESEFNTFVDEINAIAAYQWWEGAIPRVLPPPAYPLAWSW

SEQ ID NO: 249147 - protein, 65 aa, Glycine max
  unsure (1)..(65): unsure at all Xaa locations
  Clone ID: PAT_MRT3847_6700C.1.pep
MPIRNIAIXXPEXAXHPDTLKAGLXEFISTLIXVFAGSGSGIANNKFXDXXAXXXXGLXXVPSAM

SEQ ID NO: 249148 - protein, 34 aa, Glycine max
  Clone ID: PAT_MRT3847_67010C.1.pep
VERKLLQLLEPNFPFHAHFSTKIKAVIFHNLCTQ

SEQ ID NO: 249149 - protein, 70 aa, Glycine max
  Clone ID: PAT_MRT3847_67011C.1.pep
LSLLSTTGTYALLGSPPGSDFQKAQSPFKFFPPLPPFVVCVPEPHLRSSKFVWKGHFLGFPIKTNGTSML

SEQ ID NO: 249150 - protein, 86 aa, Glycine max
  Clone ID: PAT_MRT3847_67012C.1.pep
VQRCSQYVTVCVYTVKTCACPRASSWVGIIIRDCRKVPFSRASGFEPLVFLLGFIQISPRSICVKIFIKLLKIFSVCSLNSEKMPQ

SEQ ID NO: 249151 - protein, 153 aa, Glycine max
  unsure (1)..(153): unsure at all Xaa locations
  Clone ID: PAT_MRT3847_67013C.1.pep
MWRTIWIKGGSAFSSSCTADEVTHRNRMALGLTGLLLLTATSXGLAAETTRALAMRGVHVFFAVRNIIAAQDVKGAILKEIPAAKVDAMDLDLIPIASARKFAAEFISSSLPLDILITTAGVFETHFTLSTYSVDLQFATDHMGHFLLTNLGV

SEQ ID NO: 249152 - protein, 54 aa, Glycine max
  Clone ID: PAT_MRT3847_67014C.1.pep
RRYGQDCGWLLTLRHTITSLRLAQFQAHGGLKEVPPNFASAFGGFQNMSRSRSS

SEQ ID NO: 249153 - protein, 88 aa, Glycine max
  Clone ID: PAT_MRT3847_67015C.1.pep
PPKMGKFLLRGKPKVFLKKGTIKPKNIFKAPFKLKKKLWEPTPNFKFWLHAKQNVLSFYFIRPLGYPRNFQPVPGGLPVFHKRGGIKA

SEQ ID NO: 249154 - protein, 70 aa, Glycine max
  Clone ID: PAT_MRT3847_67016C.1.pep
GPNLGPKNFEPIFAELPIMPTIFCSLSDPVPLLEAKKGKSNPIIPALSREKIFLLYEWDPPSYPRLKVPM

SEQ ID NO: 249155 - protein, 61 aa, Glycine max
  Clone ID: PAT_MRT3847_67017C.1.pep
PRWCGSGNTTEGLFIPNCPSYRRIQRLTLHLNPTVMVAVKQPEMATCACEQLLDNTPSLSK

SEQ ID NO: 249156 - protein, 194 aa, Glycine max
  Clone ID: PAT_MRT3847_67018C.1.pep
MGTLEQIDAPQTRSSSSSSSSIDSNNHPSRTRTPPPSSPSSSACRNRTDLSTDLRLGLSISPSSQSELPFNSTPREESFDWPPIKSILRSTLVGKQSHLSQRPSLFVKVYMEGIPIGRKLNLMAHYSYDGLVKTLGHMFRTNILCPNSQPLNSRNFHVLTYEDQEGDWMMVGDVPWEMFLNSVKRLKITRADRC

SEQ ID NO: 249157 - protein, 255 aa, Glycine max
  Clone ID: PAT_MRT3847_67019C.1.pep
MANQNQRECAECLTWLCFLLITLSLSFFLFCFKVASVVCIYKEPKVAAFLFSLDQFHSLEDMGTLEQIDAPQTQSSSSSSSSIDSNNNPSRTRTPPSSSPSSSLCRNRTDLSTDLRLGLSISPSSQSESPFNSTRREESFDWPPIKSILRSTLVGKQSYLNQRPSLFVKVYMEGIPIGRKLNLMAHYGYDGLVKTLGHMFRTNILCPNSQPLNSGNFHVLTYEDQEGDWMMVGDVPWEMFLNSVRRLKITRADRC

SEQ ID NO: 249158 - protein, 49 aa, Glycine max
  Clone ID: PAT_MRT3847_6701C.1.pep
SNGRRTLSYVDMYYCILHDYNVLGALSILWEQLTSADSWEEVELTAWGE

SEQ ID NO: 249159 - protein, 70 aa, Glycine max
  Clone ID: PAT_MRT3847_67020C.1.pep
TMPSAIVIKQVDGKPGKVYYPLEKISIPEQQPQVNDTVISLTAVDSITASSSFANTSTPAQTSACPFSPT

SEQ ID NO: 249160 - protein, 439 aa, Glycine max
  Clone ID: PAT_MRT3847_67021C.1.pep
MASQMAILFRTRTLLSSKPTTTLIKTITTFPFLSQEPQLVDPTPPPSSSSTPLPPNPASGSPLYHENWRSPIPPPPSSAGTSHALSPVGFYNRATSDTYDPRALLDLFGDWMASQQWHDVKFLFESWVRSLDKTGKPNKPDVNLFNHYLRANLMLGASAAELLDLVAQMAEFDNVAPNTASFNLVLKAMCQAKETLAADKLLQRMLQSGNDALPDDESYDLVIGMLFSMGQIDTAFKYIDLILKSGNVLSMKVFMNCVGSCVNKGRLDTLVTIIERCRASDQNKALCPNWDLCNFIVEIATREDNSKLSFYGLEFMAKWIVKGERQRPPIYLSVDEGLVLSALLTAGRTYNSDLLVASWAVLDRSLRKKKVPNPESYLGKIYALASLGNLQKAFGTLNEYEAAYGDSGQEAEDLFCPFTSLHPLVVACSKKGFETLDNV

SEQ ID NO: 249161 - protein, 303 aa, Glycine max
  unsure (1)..(303): unsure at all Xaa locations
  Clone ID: PAT_MRT3847_67022C.1.pep
ISLLSAYERRLIGCPSGFTNAPVTRAFIIAQSLFTSYFGIQGRVCPLGLSFENIFGKIXFWKLIMSIFSFSSTPELMFGLYLLYYFRVFERQIGSNKYSVFIVFSILTSLLLEVLAVALLKDPTANLVTPGPYGLIFASFVPFFFDIPVSTRXRVFSFLFSDKSFIYLAGLQLLLSSWKRSILPGMCGILAGSLYRLNVFYIRKAKFPEMISSFFSRILLPSMGSPRAPSSARNVVGNLPSYPARQMERNYPAPMQAAVEPTEDSITTLVSMGFDRNSARQALVQARNDVNVATNILLEAQSH

SEQ ID NO: 249162 - protein, 147 aa, Glycine max
  unsure (1)..(147): unsure at all Xaa locations
  Clone ID: PAT_MRT3847_67023C.1.pep
MNGGPSGFTNAPVTRAFIITSALFTIFFGIQGRFSTLGLSYQDIFGKLRLWKLIISIFSFSSTPELMFGLYLLYYFRVFERQIGSNKYSVFIVFSILTSLLLEVLAVALLKDPTANLVTPGPYGLILAXFLPFFFDIAGVARVAGVN

SEQ ID NO: 249163 - protein, 81 aa, Glycine max
  Clone ID: PAT_MRT3847_67024C.1.pep
EKNLSPFTQKKLNIGRGLIKNIRGTTQRGGWGQNWPYPQNQKFWDSGPGKGNSPRNRTHQKGGNPPNFQPWSKKFPKTRVF

SEQ ID NO: 249164 - protein, 34 aa, Glycine max
  Clone ID: PAT_MRT3847_67025C.1.pep
FQDEHCLILCSSTPGGGRSLIHTSSFMVRGRMVI

SEQ ID NO: 249165 - protein, 85 aa, Glycine max
  Clone ID: PAT_MRT3847_67026C.1.pep
TTSSAKVKAWVTAINEASLRPLEGWCCPHRFGSFAPIRGLTEDGSQAQWFVDGQAAFEAIATSIQDAKSEIFITGWWLCPELYLR

SEQ ID NO: 249166 - protein, 82 aa, Glycine max
  Clone ID: PAT_MRT3847_67027C.1.pep
TLPKLNQKGFLHSTPPEHWPSPVPTEPSNETQLCLSIHGARHTTGNALKICLFPYIHHVLTTHSTFKSSFLPYCSTLCDRQS

SEQ ID NO: 249167 - protein, 75 aa, Glycine max
  Clone ID: PAT_MRT3847_67028C.1.pep
TISSHTDFPQVSTSLNQQQDELFKLTERGEAAVKVKHISKHLTLLQLQAKPCHIKPTNSSISKFHSLPCFTTVKD

SEQ ID NO: 249168 - protein, 83 aa, Glycine max
  unsure (1)..(83): unsure at all Xaa locations
  Clone ID: PAT_MRT3847_67029C.1.pep
MVGSLLRLMYACDMASKRLWNELTDQXTDPSTSCTARTVAAEDMIHWQATIMVPADSPYARRVLIVTIHSRADYTFKATNAAF

SEQ ID NO: 249169 - protein, 41 aa, Glycine max
  Clone ID: PAT_MRT3847_6702C.1.pep
KHQYLEPRHLPFSREGHRVLSLPPGLGVIESLTKEISVYTD

SEQ ID NO: 249170 - protein, 107 aa, Glycine max
  Clone ID: PAT_MRT3847_67030C.1.pep
KNFLLAPLKAPPPLRPPPPLSGTPNEASPSISSNLQYSSPPSNKANQVWSISPRQFPSPPPHSKGWGNKLSFTKEKKVFLHGASPKKRKQKNIRKQKKKKKKTKTSP

SEQ ID NO: 249171 - protein, 59 aa, Glycine max
  Clone ID: PAT_MRT3847_67031C.1.pep
SRAEAAAVRAGAAAKVYLIAQAMFVVCLYIIKRAPPPRSLRPYPPGDRTLDSSIEIARP

SEQ ID NO: 249172 - protein, 199 aa, Glycine max
  unsure (1)..(199): unsure at all Xaa locations
  Clone ID: PAT_MRT3847_67032C.1.pep
FLTTILIGTTVVNIGATALVTEAATAMFGEAGVSAATGVMTVAILLLTEITPKSIAVHNATEVARFVVRPVAWLSLVLYPVGRIVTYLSMGMLKLLGLKGRSEPYVTEDELKLMLRGAELSGAIEEEEQDMIENVLEIKDTHVREVMTPLVDVVAIDASSSLVDFHHLWVTHQYSRVPVFEQRVDNIMGIAYAMDLLXY

SEQ ID NO: 249173 - protein, 66 aa, Glycine max
  Clone ID: PAT_MRT3847_67033C.1.pep
LLWGDNTNGGVDNFIVRALLGPCHSFTNHPYTILLMTTIKTQHSSYEKFTLYPTFPISLNNTYPLY

SEQ ID NO: 249174 - protein, 60 aa, Glycine max
  Clone ID: PAT_MRT3847_67034C.1.pep
LLELAVVYFSSMVCSFTSSLSVSRVKKSSVSPAATSKAILYFKVLFCGLYPVSHRVQACA

SEQ ID NO: 249175 - protein, 75 aa, Glycine max
  Clone ID: PAT_MRT3847_67035C.1.pep
PRSSEFGSGPSFIIFFFFSLITTTAREINSSSWILPSNFISLSSFLEKKTKKPQLNIMYLALHCLLFNKGYALKF

SEQ ID NO: 249176 - protein, 78 aa, Glycine max
  Clone ID: PAT_MRT3847_67036C.1.pep
YVTKLSLLFKLSLEHPKQKNQTYSLSPIIHWSLRASIAWSLRGSSAKVRPPVFVYFLKTMENGWTKPCQTESIIVGLN

SEQ ID NO: 249177 - protein, 51 aa, Glycine max
  Clone ID: PAT_MRT3847_67037C.1.pep
IVLRYECRLSGQQCSIQERRSLIVRWAAWHVTWHPRCKRGRRSLYSCTPVC

SEQ ID NO: 249178 - protein, 203 aa, Glycine max
  Clone ID: PAT_MRT3847_67038C.1.pep
MEAPDNSEATVPYNSPKLAGTVNWGTATVVGVFAGMLYGGSKEAAASVSKDAEVMLKLGSTEDKREQYRLMRDAMEKRFIRVTRGSIVGGVRLGIFTAAFYCLQNLLAEKRGVHDVFNVVGAGSATASAFGLIMPGSLRWRARNMALGSVLGAAFCFPLGWIHLKLVEMANEGNPAAHPHSDQRQVKSGVSAAIERLEGNLSK

SEQ ID NO: 249179 - protein, 69 aa, Glycine max
  unsure (1)..(69): unsure at all Xaa locations
  Clone ID: PAT_MRT3847_67039C.1.pep
XYAYVSSGIRLEXXXRXXXYXXSXXISXXXXCLCDVXXDSXXEXHNXRDMXELXXRGEAXXXLSXDXVX

SEQ ID NO: 249180 - protein, 219 aa, Glycine max
  unsure (1)..(219): unsure at all Xaa locations
  Clone ID: PAT_MRT3847_6703C.1.pep
GFGPEFPGSTHASGTSCSCVIKTIEPQPFAVLDDLKNVVKKVNLLEEEGRISPWDDEHVPEEIVTTKPNMGHVVQELEYSNIGATELILSNGMRICYKRTDFLDDQVIFTGYSYGGLSELPENEYFSCSMGPTIAGEIGVFGYRPSVLMDMLAGKRAEVGTKIGAYMRTFYGDCSPSDLETALQLVYQLFTTNLTPGEEDVKXVMQMAEEAVSAQKRDP

SEQ ID NO: 249181 - protein, 44 aa, Glycine max
  Clone ID: PAT_MRT3847_67040C.1.pep
RHIEWICHSKVMVPHIKYAKDVVFQSIRLRYCRSFVSGHFIDIV

SEQ ID NO: 249182 - protein, 156 aa, Glycine max
  unsure (1)..(156): unsure at all Xaa locations
  Clone ID: PAT_MRT3847_67041C.1.pep
RGQRRFSLGGVGEQTWEKTRGFLRALWFKRGPTKGAPRIFSLENPSWGPYNIHLAPEGSLWIALIPVTFXGFEVVPHFQKTKPLGALFPRVINPVNGCKKXTTVGNVATNGRIIKKLYYSDGKVINFGASPVEFEGPPYPGSFNSHFGGKFPLYRA

SEQ ID NO: 249183 - protein, 83 aa, Glycine max
  Clone ID: PAT_MRT3847_67042C.1.pep
LCPISQIYMCSVREDRSISGSTLAWSTPQPEISGEVTRLYAKSLACRMELMMVSYLFLDRHRCFLFNTPSLLASNLAPPPRVC

SEQ ID NO: 249184 - protein, 61 aa, Glycine max
  Clone ID: PAT_MRT3847_67043C.1.pep
ENITSLGVLSLCGAPFTVIKALLKRYLLLHCSFGYKSYMLQRLMQKLANLLWIVDGILAGL

SEQ ID NO: 249185 - protein, 64 aa, Glycine max
  Clone ID: PAT_MRT3847_67044C.1.pep
PTHNIPLSILLSSFYTSEVDTTTKHTRRWVESPTIPFFLCAFFLFFPNLLLCLFCQSLFLSHIF

SEQ ID NO: 249186 - protein, 54 aa, Glycine max
  unsure (1)..(54): unsure at all Xaa locations
  Clone ID: PAT_MRT3847_67045C.1.pep
TTRFKMTGKKRGHVSAGHGRIXXHRKHPRGRGDAGGMHHHCILCYEYHPGFSGR

SEQ ID NO: 249187 - protein, 169 aa, Glycine max
  Clone ID: PAT_MRT3847_67046C.1.pep
ARNSARAPRRSLPSSTLHSSSSDSKNGNVEKEPVILQLPRVAPPPPPPPPMAASKAAPPPPPPPPKGSRQVSAKVRKIPEVVEFYHSLMRRESQSRRESLSGVVEVPPAAANPRDMIGEIENRSSHLLAIKTDVETQGDLIRCLIKEVEGAAFTDIEDRGLFVKWLGDQ

SEQ ID NO: 249188 - protein, 102 aa, Glycine max
  Clone ID: PAT_MRT3847_67047C.1.pep
TFLPPYFLKMWNWGFPEEFRSHFLWLQGRPNEMASDSDSCMDIFASLFLGNVVLEFPEEFRSRFLWLQDRPSKNANNSHSCVGIFAAMNLGGVKLEFPKESS

SEQ ID NO: 249189 - protein, 217 aa, Glycine max
  Clone ID: PAT_MRT3847_67048C.1.pep
MQESRGLIPRHTSFEAKAAALFSVNKVDEADKVIIEMQVRGFKPTHSIFEAKVAALCKVSKVYEAIKVIEEDMVKVNCLPTAKVYNILLKNLCNVGNSTAILESLNKMSSKVGCTGDRDTYSILLEMLCGERRYLEASQLLEKMSIKSYWPCTNSYNSLIRGLCSIGRQYEAVMWLEDMISQGKLPEISVWNSLASLFCNSEKIKVSSETFSRLRSL

SEQ ID NO: 249190 - protein, 73 aa, Glycine max
  unsure (1)..(73): unsure at all Xaa locations
  Clone ID: PAT_MRT3847_67049C.1.pep
MEMDSLPNGNNTAGTPISATATATANPAPPQSSNLPQLTESLKLEHQFLXRVPFEHYKKTLRANHRRRREGDV

SEQ ID NO: 249191 - protein, 90 aa, Glycine max
  unsure (1)..(90): unsure at all Xaa locations
  Clone ID: PAT_MRT3847_6704C.1.pep
LFFDFLKHYFPELLEPETQFPLFEFNSKSKIFNLETRNPKPLTLVEKEPQLNRKPKPHILSTYVLVATKKPRMSISGLRLXNLRASRCWL

SEQ ID NO: 249192 - protein, 128 aa, Glycine max
  Clone ID: PAT_MRT3847_67050C.1.pep
REFGTRRFAHRARHEAQPRHSPRLDSPRANYSRRRTLSKKENCKRRKDDFPRKSKDKKVSDPAVRSSHYTAQPNVSPYAPAMTMMDNDDGISHIAIGGPTGELLEQNAQALNKISTNLAALQVSSFHF

SEQ ID NO: 249193 - protein, 114 aa, Glycine max
  Clone ID: PAT_MRT3847_67051C.1.pep
SGNHEEEQTTHVASSFNGNLAPDASPTALAMKHNPGIALDWTLQEQTILEEGLSLFASEPNLTRYAKIAQNLNNKTVRDVALRVRWMNKKENCKRRKDDFPRKSKDKKVLLSFI

SEQ ID NO: 249194 - protein, 245 aa, Glycine max
  unsure (1)..(245): unsure at all Xaa locations
  Clone ID: PAT_MRT3847_67052C.1.pep
MANPSGNHEEEQTTHVASSFNGNLAPDTSPTALAMKHNPGIALDWTLQEQTILEEGLSLSKSNIVSSCIFXAFASEPNLTRYAKIAQNLNNKTVRDVALRVRWMNKKENCKRRKDDFPRKSKDKKVSDPVVRSSHFTAQPNVSPYALAMTMMDNDDGISHIAIGGPTGELLEQNAQALNIISTNLAALQFQGNVNLFSQTRDNIIKILNDMNDMQEAMKQMPPLPFKINETIFNSILSKTNQHMQ

SEQ ID NO: 249195 - protein, 76 aa, Glycine max
  unsure (1)..(76): unsure at all Xaa locations
  Clone ID: PAT_MRT3847_67053C.1.pep
SNVSILLNLVPNHAKWARIRPPQPAFGFDLVXQKGLCPHVFWNXNSLPSFKGAPDDISISAFWNSVRNKFGSRVPK

SEQ ID NO: 249196 - protein, 168 aa, Glycine max
  unsure (1)..(168): unsure at all Xaa locations
  Clone ID: PAT_MRT3847_67054C.1.pep
TRPDVTKNVVFELHPNYRNIHQKIYVRITNLPVYDQIRXIRQIHLNTMIRIGGVVTRRSGVFPQLQQVKYDCNKCGAILGPFFQNSYSEVKVGSCPECQSKGPFTVNIEQTIYRNFQKLTLQESPGIVPAGRLPRYKEVILLNDLIDCARPGEEIEVTGVYTNNFDLS

SEQ ID NO: 249197 - protein, 175 aa, Glycine max
  Clone ID: PAT_MRT3847_67055C.1.pep
NGFDESPKIVEIDTYKTRSRSRRFTSTMSECGEDMSCHAISSPLPCPVPGRISVPDCRYIQDFDWYYNVDECRFSTAHSTPRFTNYVRPNVPATPAKSVCGDTFFRPYSNFPNYMANTQSFNAKLRSHSAPKQRPEPKKRLSLNEMMAARNSISGVRMQRPSSNFFQTQEDSWNF

SEQ ID NO: 249198 - protein, 96 aa, Glycine max
  unsure (1)..(96): unsure at all Xaa locations
  Clone ID: PAT_MRT3847_67056C.1.pep
KKTERRETKKERKRGRWLKKRTLREREKKIFAVISSSFTIAFXGSSNLQICKRYFLILASNGKFKRAQSSFKNFMYPGKHPLLSXKSPFLVXPSIC

SEQ ID NO: 249199 - protein, 77 aa, Glycine max
  unsure (1)..(77): unsure at all Xaa locations
  Clone ID: PAT_MRT3847_67057C.1.pep
GLGNTFLRGNKSINCNLKRTGFHCDIICVTGWMRTPMKDVQVTIDWFXXFQECVISTYCNLNILHCDIICVTGWTAT

SEQ ID NO: 249200 - protein, 109 aa, Glycine max
  Clone ID: PAT_MRT3847_67058C.1.pep
IILPKNQFGNPIFFKLFFSNSLSTHPRAILLTLNTAPCRVFWLGPPPYLFPQIRPLAPSPSLKNHLLPKLVLKTNPLPPKNGSNGFLRVGLPLSIPNEAKFFKPQKKVF

SEQ ID NO: 249201 - protein, 60 aa, Glycine max
  Clone ID: PAT_MRT3847_67059C.1.pep
NSQSLHLSYSNTLTCISASHRCLSTHCLYIFTRPHVKMAQSHLCDRTLDSSIEIARRCSV

SEQ ID NO: 249202 - protein, 50 aa, Glycine max
  Clone ID: PAT_MRT3847_6705C.1.pep
LKMELFMPEQLTRKEWSQLKDSKTDIVQINHTALEFSDRNKSTWKDRSDY

SEQ ID NO: 249203 - protein, 79 aa, Glycine max
  Clone ID: PAT_MRT3847_67060C.1.pep
PTRPYLSYFKFLFFHNTSAFVLYFRWSSTFHYSKLSYLHALTLLFVTFHSYILLFFLFFLFEISISFSLATLQIYTFYI

SEQ ID NO: 249204 - protein, 69 aa, Glycine max
  Clone ID: PAT_MRT3847_67061C.1.pep
NLFKGPPGGFFGGPKKMVLLWKALCGAKGACPPPRFIKTPPPLVLGCHPGLSNEATFPPFFYPEKTCFP

SEQ ID NO: 249205 - protein, 57 aa, Glycine max
  unsure (1)..(57): unsure at all Xaa locations
  Clone ID: PAT_MRT3847_67062C.1.pep
NQXAANIFRLFENIGNKQFLYNLGDKKNIKMFSXXIFYYYLIFFLHWKSMYKNFLIL

SEQ ID NO: 249206 - protein, 40 aa, Glycine max
  Clone ID: PAT_MRT3847_67063C.1.pep
GTGLFILQLNHPPQKPSSVSLSSDSKTLLACFTFSFIKSS

SEQ ID NO: 249207 - protein, 27 aa, Glycine max
  Clone ID: PAT_MRT3847_67064C.1.pep
RERPTLGDTPVKTRERNIASPVTPSAL

SEQ ID NO: 249208 - protein, 50 aa, Glycine max
  Clone ID: PAT_MRT3847_67065C.1.pep
LNPGHLQIPGIICGLSKGSLIGTLEFHCCCNTFAFSYMQHHNLFSNGSLL

SEQ ID NO: 249209 - protein, 45 aa, Glycine max
  Clone ID: PAT_MRT3847_67066C.1.pep
VGFLLSAFGCVCLRFYGASSCVSGLRPFRYRGRPRGSPRVFRAGP

SEQ ID NO: 249210 - protein, 72 aa, Glycine max
  Clone ID: PAT_MRT3847_67067C.1.pep
TTLLAHTFTKPWFQLNHLLLKPTFPFLMFTSNTHTFPPLMITSNPYHFGFQTQITIILVSKPWIGQGLLSRI

SEQ ID NO: 249211 - protein, 48 aa, Glycine max
  Clone ID: PAT_MRT3847_67068C.1.pep
LGGGRSPDGVSIPHHRAPSFFLRRKKQTIPMPPLHYVGVTDRGHGIST

SEQ ID NO: 249212 - protein, 74 aa, Glycine max
  Clone ID: PAT_MRT3847_67069C.1.pep
AAKGNFSSVPWWNELSECGKKGLSIKPKRGDALLFWSMKPDASLDPSSLHGGCPVIKGNKWSSTKWMRVSEYNA

SEQ ID NO: 249213 - protein, 532 aa, Glycine max
  Clone ID: PAT_MRT3847_6706C.1.pep
MELNSQKRPFSIKLWPPSQNTRQTLVERMTNNLTTKSLFTQKYGTLDKEEAEENAKRIEDVAFATANLHYEKEPDGDGGSAVQLYAKECSKLLLDVLKRGPSKKDDEVVTSVNTTSSLEYVFDISKGQRAFIEADETEQLLSPLKEPGNSYTKICFSNRSFGLGAAQVAEPILTAIKDQLKEVDLSDFIAGRSEVEALDVMKIFSTALEGSVLRSLNLSDNALGEKGVRAFGALLKSQKCLEELYLMNDGISKEAARAVCELIPFTEKLKVLHFHNNMTGDEGALAIAEVVKRSPLLEDFRCSSTRIGSEGGVALSDALGNCAHLKKLDLRDNMLGVEGGVSLSKALSKHAELREVYLSYLNLEDDGAIAIVDALTEAAPHLEVLEMSGNDITADAAPAIAACLAAKQFLTKLNLSENELKDEGANLITKAIEGHVQLKEIDLSANQISRAGAQQLAVTVVQKADFKLLNINGNFISDEGIDELKDIFKKSPDMLGPLDENDPDGIDNDEESDEEGGADELESKMKNLVVDD

SEQ ID NO: 249214 - protein, 59 aa, Glycine max
  Clone ID: PAT_MRT3847_67070C.1.pep
LANKQDLPNALSVAEITDKLGLHSLRLRRWYIQPTCATSGQGLYEGLDWLSSHITNKTR

SEQ ID NO: 249215 - protein, 290 aa, Glycine max
  Clone ID: PAT_MRT3847_67071C.1.pep
MAKPRYSRLPPRKSSSSSTLILTLFLVFTFLVLILLALGILSIPSSSRGNLPKPNDLASIARNTIHTSDDDDVRGEQWVEVVSWEPRAFVYHNFLTKEECEYLIDIAKPNMHKSSVVDSETGKSKDSRVRTSSGTFLARGRDKIVRDIEKRIAHYSFIPVEHGEGLQVLHYEVGQKYEPHYDYFLDDFNTKNGGQRIATVLMYLTDVEEGGETVFPAAKGNFSSVPWWNELSECGKKGLSIKPKRGDALLFWSMKPDATLDPSSLHGGCPVIKGNKWSSTKWMRVSEYKA

SEQ ID NO: 249216 - protein, 77 aa, Glycine max
  Clone ID: PAT_MRT3847_67072C.1.pep
SVHHHSLVSLVNKENCFYCSHGSSLNCPSNHVNGHIILHGVFFFLPLLTIRVCFMYIILNMLLLINIHACPLIIALI

SEQ ID NO: 249217 - protein, 93 aa, Glycine max
  Clone ID: PAT_MRT3847_67073C.1.pep
MATCYTPSNVRNSAGVLAVVGGRTISENHGIRSCFLRIQESKTVFGSNRKCGFVSSESVPRIPTASVARILFWICTLEVSMLRGEGGECTEQP

SEQ ID NO: 249218 - protein, 78 aa, Glycine max
  Clone ID: PAT_MRT3847_67074C.1.pep
FWRFPSSRLSYPLPCVFEFVRIRNHAEIVFSLNIWYIPKTFDSAWRINYVIPESKSYIASTQISLKNQPICSVNGNCS

SEQ ID NO: 249219 - protein, 40 aa, Glycine max
  Clone ID: PAT_MRT3847_67075C.1.pep
GVLLCLVDIFILYWGVVHVCFRQCGFYKVLRIGCWVFFGG

SEQ ID NO: 249220 - protein, 218 aa, Glycine max
  unsure (1)..(218): unsure at all Xaa locations
  Clone ID: PAT_MRT3847_67076C.1.pep
MATSNFSIVLSVSLAFFLVLLTKAHSTDTVSFTFNKFNPVQPNIMLQKDASISSSGVLQLTKVGSNGVPTSGSLGRALYAAPIQIWDSETGKVASWATSFKFNIFAPNKSXTASWGLSNGQVAEILVTYNAATSLLVASLIHPSKKTSYILSDTVNLKSNLPEWVSVGFSATTGLHEGSVETHDVISWSFASKLSYGSSNYALDLPSFVLNPPIGKTS

SEQ ID NO: 249221 - protein, 64 aa, Glycine max
  unsure (1)..(64): unsure at all Xaa locations
  Clone ID: PAT_MRT3847_67077C.1.pep
FSFDEANXXKGQSGPELKQKIQHQTKNIRAPMDWVGSEKCXYKSKILGVGIGTALKRGLGGDCL

SEQ ID NO: 249222 - protein, 283 aa, Glycine max
  unsure (1)..(283): unsure at all Xaa locations
  Clone ID: PAT_MRT3847_67078C.1.pep
MATSNFSIVLSVSLAFFLVLLTKAHSTDTVSFTFNKFNPVQPNIMLQKDASISSSGVLQLTKVGSNGVPTSGSLGRALYAAPIQIWDSETGKVASWATSFKFNIFAPNKSNSADGLAFFLAPVGSQPQSDDGFLGLFNSPLKDKSLQTVAIEFDTFSNKKWDPANRHIGIDVNSIKSVKTASWGVXNGQVAEILXTYNAAXRAFLVAYMIXPSKKTSYILSDTVNLKSNLPEWVSVGFSATTGLXQGSVETHDVISWSFASKLSDGSSNDALDLPSFVLNEAI

SEQ ID NO: 249223 - protein, 71 aa, Glycine max
  Clone ID: PAT_MRT3847_67079C.1.pep
KGYRDIFMLGGSEVSYTRMEKHPPIAHRAIIKSLYERGNSAWGAQLSFCFVVKCTLLKKMTVGHVRHPLVF

SEQ ID NO: 249224 - protein, 128 aa, Glycine max
  unsure (1)..(128): unsure at all Xaa locations
  Clone ID: PAT_MRT3847_6707C.1.pep
LQYGRAKKELVIESHENAFVVKEGEMLFXXXPXATKDPKIFENAEEFVADRFVGEGEKLLKHVLWSNGPETEGPTLGNKQCAGKDFVVLFSRLLVVEFFLHYDSFDVQVGNSSLGSSLTFTSLKKASY

SEQ ID NO: 249225 - protein, 193 aa, Glycine max
  unsure (1)..(193): unsure at all Xaa locations
  Clone ID: PAT_MRT3847_67080C.1.pep
MSQTNWEADKMLDVYIHDYLVKRDLKASAQAFQAEGKVSSDPVAIDAPGGFLFEWWSVFWDIFIARTNEKHSEVAASYIETQLIKAREQQQQQNQQQPQPQQSQHQQQHMQMQQLLLQRAQQQQQQQQQQQQQPQSQQQQSQPQQQQQSREXPHLLNGSANGLVGNPGTANALATKMYEERLKLPLQRDSLDD

SEQ ID NO: 249226 - protein, 54 aa, Glycine max
  Clone ID: PAT_MRT3847_67081C.1.pep
TAARRQQKGELILEKLHLQTQTQPLLALLFNNGGDTTTHLCHIHLILALYYFSL

SEQ ID NO: 249227 - protein, 54 aa, Glycine max
  unsure (1)..(54): unsure at all Xaa locations
  Clone ID: PAT_MRT3847_67082C.1.pep
SYVVAVALTLQVNNLPLVLPSTQXCKLPTHSEHPQKQPHALPESAYLTGSCYET

SEQ ID NO: 249228 - protein, 229 aa, Glycine max
  unsure (1)..(229): unsure at all Xaa locations
  Clone ID: PAT_MRT3847_67083C.1.pep
IENGNLGQHLRKSGFNPLPWSTRVQIALDSARGLQYIHEHTVPVYIHRDIKSENILIDKNFGAKVADFGLTKLIDVGSSSLPTVNMKGTFGXYMPPEYAYGNVSPKIDVYAFGVVLYELISGKEALSRGGVSGAELKGLVSLFDEVFDQQDTTEGLKKLVDPRLGDNYPIDSVCKMAQLARACTESDPQQRPNMSSVVVTLTALTSTTEDWDIASIIENPTLANLMSGK

SEQ ID NO: 249229 - protein, 100 aa, Glycine max
  Clone ID: PAT_MRT3847_67084C.1.pep
SLGLAGVGGWVFWCFRLLGFVWLLCAGCFCRLVSLLCFSSVRSGAVVGSVSLVPCVGVLFPVFSVPCGLPLVFLFFFRSCPLLSSSGNQSGGVDRPGFFR

SEQ ID NO: 249230 - protein, 94 aa, Glycine max
  Clone ID: PAT_MRT3847_67085C.1.pep
MDSLIGNWPSYDPHNFSQLRPSDPSSSSKMMPATYHPTHNRTLPAPDQVISTEAKNILMRHIYQHSEQKLNPKRAASDNLLLPEHGCKQPRVSS

SEQ ID NO: 249231 - protein, 102 aa, Glycine max
  Clone ID: PAT_MRT3847_67086C.1.pep
PTRSIYLVIHLFLEKVVSHMGFDEHEDQQQEEEVEEEEMGFSVAAAASYNSLGNCRVRPKIIGCDGVADTENFGRKGTVRYRECHKNHAGCIGGHADDGCCK

SEQ ID NO: 249232 - protein, 59 aa, Glycine max
  Clone ID: PAT_MRT3847_67087C.1.pep
THASSFTYRQQSQPHRASEREQDSLKKRGVSVLLNARHRTYVNSARECLFVSRVRGILD

SEQ ID NO: 249233 - protein, 87 aa, Glycine max
  Clone ID: PAT_MRT3847_67088C.1.pep
YRAVSGYTLSEETPVTEHRSGRCGLGSGWCLVIVGISRAGIPWYVAAMIMLCSRVDNREKPGYIACGASAVMGTIAIIRGGTQGVDD

SEQ ID NO: 249234 - protein, 48 aa, Glycine max
  Clone ID: PAT_MRT3847_67089C.1.pep
SIDVSTDPVECSVVKVAGHNEFPNSLHTVSAREGMRHMDLATVRSCLH

SEQ ID NO: 249235 - protein, 55 aa, Glycine max
  unsure (1)..(55): unsure at all Xaa locations
  Clone ID: PAT_MRT3847_6708C.1.pep
FQRRPTHTTACFVSANDHTIPSTSXTGGEAINRNATSSPTSTFQSNTCGRTTSQI

SEQ ID NO: 249236 - protein, 103 aa, Glycine max
  unsure (1)..(103): unsure at all Xaa locations
  Clone ID: PAT_MRT3847_67090C.1.pep
PSSYIPAPAKESGLKKDRGLIGEYQGRMHYVAKNVNHPQEKDLMEGNXTFDMKSRYRLEKVPFTEAHFARGKTLIADLKGARSHTSQDVSEEEDQEKPQQIDA

SEQ ID NO: 249237 - protein, 70 aa, Glycine max
  Clone ID: PAT_MRT3847_67091C.1.pep
GRFLTCCSYFFSDSKYCGNKGVYKPRLIIHNLIVQRIACHIFAQHRALLILIRIQAKVHNHVPIRTPVLH

SEQ ID NO: 249238 - protein, 57 aa, Glycine max
  Clone ID: PAT_MRT3847_67092C.1.pep
SCSWLSKAQLLRQCKLVCRRESVDNMSDSLKDETNQMGLTSLRLPTIHNKLLHFWME

SEQ ID NO: 249239 - protein, 120 aa, Glycine max
  Clone ID: PAT_MRT3847_67093C.1.pep
MDLPQPARGSRGARPTTLVVSASTSLYQLKMMIWESFGVVKENQILHKGDRIIDGDDECATLADVNIFAGDQVIVRDSEIHENRDIADELCDDKMDLQHTEEGFRGTLLTANVSSQLQGY

SEQ ID NO: 249240 - protein, 72 aa, Glycine max
  Clone ID: PAT_MRT3847_67094C.1.pep
SLRSLFVVAIFFPKYQNPSFNRHRRHLFKQTLTLASSLTSFASHSNTSPSLLTNETTERAATRTTTISQQQT

SEQ ID NO: 249241 - protein, 72 aa, Glycine max
  Clone ID: PAT_MRT3847_67095C.1.pep
RSLLFTCSINKGLYSMHIVSSYSSRSYRIKILLLITSTYEVSNVINLTMGKNSSNFPNGRTTAMRCTDRDIG

SEQ ID NO: 249242 - protein, 67 aa, Glycine max
  Clone ID: PAT_MRT3847_67096C.1.pep
KSRHLSHLGATRVYIEVICMHSLARQSIENYEAKFRPHLRRRISCYKKDPLRSPSSSLTDKLRSMAT

SEQ ID NO: 249243 - protein, 92 aa, Glycine max
  Clone ID: PAT_MRT3847_67097C.1.pep
MHILVGKKGTGKIVTFRRLRSQGRHSHSSQNWLSLELLQGAWPVLIDDFVEHMYRMQGSYYDNSNFHCNCGDPESQSCVFDDPLPGLRSFLV

SEQ ID NO: 249244 - protein, 231 aa, Glycine max
  unsure (1)..(231): unsure at all Xaa locations
  Clone ID: PAT_MRT3847_67098C.1.pep
ALFRLEVPLSKLRIDLLKDGVSVLVLTGLGGSGKSTLAKKICWDPQVKGKFEGNIFFVTVSKTPNLKYIVETLFEHCGCPVPKFQSDEDAINRLGVLLRLVGKNPILLVLDDVWPSSEALVEKFKIDIPDYKILVTSRVSFPRFGTPCQLDKLDHDHAVALFCHFAQLNGKSSYMPDEKLVDEIVRCCKGSPLALXVTAXSLCQXPYXVWQNMKDRLQSQSFCWSLFLICF

SEQ ID NO: 249245 - protein, 187 aa, Glycine max
  Clone ID: PAT_MRT3847_67099C.1.pep
DSSEALGVSYPYADRVHGLPGQPPVKFKQYSGYITVNETHGRALFYWFFEATHKPEEKPLLLWLNGGPGCSSIGYGEAEELGPFFPQDSSQPKLKLNPYSWNNAANLLFLESPVGVGFSYTNTSSDISELGDTITAKDSHTFIIKWFRRFPQFRSHEFYISGESYAGHYVPQLSELIFDNNRNPVEK

SEQ ID NO: 249246 - protein, 48 aa, Glycine max
  Clone ID: PAT_MRT3847_6709C.1.pep
FMIQGLFLIIHESGKRITLKPTENVIEESREQALFQSNDVLAPYACSI

SEQ ID NO: 249247 - protein, 37 aa, Glycine max
  Clone ID: PAT_MRT3847_670C.1.pep
MIEVFLFGIVLGLIPITLAGLFVTAYLQYRRGDQLDL

SEQ ID NO: 249248 - protein, 396 aa, Glycine max
  unsure (1)..(396): unsure at all Xaa locations
  Clone ID: PAT_MRT3847_67100C.1.pep
SCPSRELVIGPSCSSIGYGEAEELGPLFPHDNSQPKLKLNPYSWNNAANLLSLESPVGVRFSYTNTSSDISELGDTITCNIIYCCYLNICTFFILLLQNVIYXVLLLLSMIXKVHKPLTSSWLXISTIHVSQILHDCLTGRKXSLVYKADHNWTLHFXLVSCCDFLRIKQTMKNDKLNHIINIKLYKLXELMMRKIKRPFSIXITRDNYYATXETKQSGKLIYQTRSCLKFFRKKFCWSSKYSYLVPVGYEDIGFYITKHHLLKSKNGRELIFPFSSPICNAIIXCWKCNXQSSLCFIKNLIASGIHIWINRGDTDARIPVTSTRYTLRKLGLGIVEDWTPWYTSKQVGGWTIAYDGLTFVTIRGAGHQVPTFTPKQALQLVRHFLANKKLPSQPI

SEQ ID NO: 249249 - protein, 88 aa, Glycine max
  Clone ID: PAT_MRT3847_67101C.1.pep
LLTNPLSLLATIATSFLPLFSHHHSTPTFLSPPCFNFLQHSLTFPLSLPSSIHIIFSSFFLPLFVVVVVVYLSIITMPLKQFNQSLQL

SEQ ID NO: 249250 - protein, 85 aa, Glycine max
  Clone ID: PAT_MRT3847_67102C.1.pep
VIARKVQGSWRRSRHSWPGGSEHLLIRHRGPARRPCWGKEKIGRPRERQDRHQIEAHWKVTNGSWGETDQNGHSILTSANVTVSV

SEQ ID NO: 249251 - protein, 66 aa, Glycine max
  Clone ID: PAT_MRT3847_67103C.1.pep
YESQKLYQVTHKIIYIPYKIERSQSPTISKQFIETIFFLIPGKKILRETIYFFLCSPQSIIVKSKK

SEQ ID NO: 249252 - protein, 146 aa, Glycine max
  Clone ID: PAT_MRT3847_67104C.1.pep
GFPPRGPPILALSPGWGPKKKLVKAPGSTFPSGPRGSQRFFLWEPKSLFFPPPRESPPKLFWFFMEKIALNFAPPLGERGPFFPPPPPFSLRGPRIFIPPFFFKKKIGAFPPLCPLKSPNCYSPPPFPKKDTPPFCPQKVGNPLFP

SEQ ID NO: 249253 - protein, 54 aa, Glycine max
  Clone ID: PAT_MRT3847_67105C.1.pep
DTNIKLTSNMLSIMAMINALKLNVVIKNDIRGVIKTIPLKEAVKRSCPPVEHER

SEQ ID NO: 249254 - protein, 156 aa, Glycine max
  unsure (1)..(156): unsure at all Xaa locations
  Clone ID: PAT_MRT3847_67106C.1.pep
YSMEWTGLANTLLCLGNDIMCCDYASSDGXITKQGTEHRXAEMINSLCGGDXKLMRXRTHLLLARRSLMAIRMKDVWXAQCGIPHRFPLTIICISIFNDMLIIYIYEKXLRHAKAPSMFLQPFKNCGALVMHGDNNXILVHEYVKPYYSGYKLKSF

SEQ ID NO: 249255 - protein, 86 aa, Glycine max
  Clone ID: PAT_MRT3847_67107C.1.pep
RCLIRNFYWGANLHAEWRRNSVVIPELGGKNMDGGTGGRKGQANIEQGKHWMVAAFCCFAESRCHIQSSSPSVVFSQPYSSRIGSS

SEQ ID NO: 249256 - protein, 41 aa, Glycine max
  Clone ID: PAT_MRT3847_67108C.1.pep
PPFNSQTPLVLKNRLFVPSITKNLMSVSQFCRNNSIFEFHS

SEQ ID NO: 249257 - protein, 207 aa, Glycine max
  unsure (1)..(207): unsure at all Xaa locations
  Clone ID: PAT_MRT3847_67109C.1.pep
MDLESVIHRNTIKEESWKTVLTLAYQSLGVVYGDLSTSPLYVYKSAFAEDIQHSDTNEEIYGVLSFVFWTLTLIPLLKYVFIVLRADDNGEGGTFALYSLLCRHARVSLLPNTQLADEDLTEYTMDNGTVPVDKKNVGLGLKNLLEKHRVLQRVLLVLALIGTCMVIGDGVLTPAISXYFVMIILXVIFVAEQHRYVEGPGACVILI

SEQ ID NO: 249258 - protein, 44 aa, Glycine max
  Clone ID: PAT_MRT3847_6710C.1.pep
EQDMEVVDLAEDYGANGVTCEHEGTVLLKYNYKEYTRYSLTSWW

SEQ ID NO: 249259 - protein, 60 aa, Glycine max
  Clone ID: PAT_MRT3847_67110C.1.pep
AQHAIQKRQRKINKQAFNQSRLLCKVMITEKISWWYDPVVCRKNFNQILRYNRPEFIAPL

SEQ ID NO: 249260 - protein, 57 aa, Glycine max
  Clone ID: PAT_MRT3847_67111C.1.pep
LQLITQPTPTKPTTIFKLHHTNLSTPLTLNGSLWPSLGINVNKRTRLNQTSSPYFPV

SEQ ID NO: 249261 - protein, 251 aa, Glycine max
  Clone ID: PAT_MRT3847_67112C.1.pep
LDLVENFSLPVPSYTIYEILGVPSEDLKFLTKQAAVRSNGSATAAEASNANQELLNYMASLVDKRIQKPQDDLISHLLLVAGNATMVNMINLGIIELLHHPTQLADLRANPTGLAPAFVEELCRYHTGSAMALRRVAKVDVRWGDKTIRAGDGVILANQSGNRDAAIFPDPDVFDMHRARGAEAALGYGFGAHRCVAEWLARCEMEEVFGALVTRVPGLRLATPVEELRWTPATKDVGVVELLVYLRSWGE

SEQ ID NO: 249262 - protein, 43 aa, Glycine max
  Clone ID: PAT_MRT3847_67113C.1.pep
NFIILKGEFKVNLILKVSLRDENFLVHVKLEFFLIHFRTSNLS

SEQ ID NO: 249263 - protein, 155 aa, Glycine max
  Clone ID: PAT_MRT3847_67114C.1.pep
GSRAVGTVICVLLWTDITAPEQNDERYNELSPKSSMSEAGIDDSEDLVNIDTKGAIIFVITASTFLVLLFFFMSSWFIWVLIILFCIGGIEGMHNCIVSLALRKRPKCGQKTLNLPMFGEDSIFSLVVILFCVIFAVVWVATRRESFSRFGQDAL

SEQ ID NO: 249264 - protein, 33 aa, Glycine max
  unsure (1)..(33): unsure at all Xaa locations
  Clone ID: PAT_MRT3847_67115C.1.pep
GKIFPCLPTFNCGALCFLSKXLDFVCQMCHKLS

SEQ ID NO: 249265 - protein, 44 aa, Glycine max
  Clone ID: PAT_MRT3847_67116C.1.pep
RLQKDTRWAQVKDQPNLPKKATPKAGLAFFFARTKGLENLLPLA

SEQ ID NO: 249266 - protein, 83 aa, Glycine max
  unsure (1)..(83): unsure at all Xaa locations
  Clone ID: PAT_MRT3847_67117C.1.pep
XXLXXCSXSSSLXXVAVXVVGXCXXRFWVXXGGXRWSXXLGCAXVXXGRWXXXFGVRXXCXXFLPSXXXLFPXXFSXXRFLLS

SEQ ID NO: 249267 - protein, 35 aa, Glycine max
  Clone ID: PAT_MRT3847_67118C.1.pep
GIMGSPPHFTGCLLPIFPKSSKLNIKVRKCELLFS

SEQ ID NO: 249268 - protein, 117 aa, Glycine max
  Clone ID: PAT_MRT3847_67119C.1.pep
KGGARSTQFDNRKTGHMVRSMHLQPNVKALETRDVDEMVLANWKSQGTMGSMSVLKDREMLFSMIQVGSYVSKWITVKNPSQHSVVMQLILNSGEIINECRGLDDLLHPSSSSNLVL

SEQ ID NO: 249269 - protein, 61 aa, Glycine max
  unsure (1)..(61): unsure at all Xaa locations
  Clone ID: PAT_MRT3847_6711C.1.pep
GSIPITITVISPAXILGAAIIFNKDLSWDDHWIFWVGPYIGAALAELYHQAGIRAIPFKTK

SEQ ID NO: 249270 - protein, 81 aa, Glycine max
  unsure (1)..(81): unsure at all Xaa locations
  Clone ID: PAT_MRT3847_67120C.1.pep
GLWEGEVLLSSILLGSWSFCYVTIVSYLSPRGPNCPGASFMLARRVWFFLYANFWLRGGILLPRLIXLLPANMLEGGTLPF

SEQ ID NO: 249271 - protein, 192 aa, Glycine max
  Clone ID: PAT_MRT3847_67121C.1.pep
SRSRTSFRSHQNATLRRRILRLRRSHPLAHRPRFLLRQGFYQNRPRKHLTLILLPLQEVRVVLLCRRLCLRKSRAVATRCGSRRRERVSSRSSRFGSSSSRIMKAPCHGCTGADEGDILNTTAGALESPNSLIMEQSKSRAADSPPSRQEHRRRNDEGLKAREHEPRPQPVLRPVAGVMEAAEALTVREEGF

SEQ ID NO: 249272 - protein, 61 aa, Glycine max
  Clone ID: PAT_MRT3847_67122C.1.pep
VLPNQITYVKYFERLLTYFNGENPPALMCMLKRFRLHTCPYWITPSITISNHNNILFSTKN

SEQ ID NO: 249273 - protein, 37 aa, Glycine max
  Clone ID: PAT_MRT3847_67123C.1.pep
KRIRFISYKITISSNRKWRFLISDVLSMDLQEPILRA

SEQ ID NO: 249274 - protein, 84 aa, Glycine max
  Clone ID: PAT_MRT3847_67124C.1.pep
SEIATPSLIFILNSTFLSCKLCLIFFFLHIPCSQFFVLTIGLLFCFLPECINNCICRCFILCDLISFPPSPFTCSVFFFPEHKC

SEQ ID NO: 249275 - protein, 71 aa, Glycine max
  Clone ID: PAT_MRT3847_67125C.1.pep
LIKCLYLVPSDTSCHVVLLIPLSKSFFSIFRTGVRYFVFYRDQNKACSLRVTGTSTPFIFGWLWMEPLSGV

SEQ ID NO: 249276 - protein, 62 aa, Glycine max
  Clone ID: PAT_MRT3847_67126C.1.pep
MSHSGSHAHFSGLWPCARGPKMLPHVFIQNAGSSYALHSSYMYPIHSHSNLDPCAPCICKHK

SEQ ID NO: 249277 - protein, 111 aa, Glycine max
  Clone ID: PAT_MRT3847_67127C.1.pep
PRRALLSLLSVVAVWPRGFRPLPCGSFEFNRPAPASGLGGPGAHRPPPGAVGAFFGAFFFFFFFFGGPLVFFALLGSPLFFLPPPPFFFCWVRSVFVFFSLPAPSCFFILT

SEQ ID NO: 249278 - protein, 49 aa, Glycine max
  Clone ID: PAT_MRT3847_67128C.1.pep
LSRSNCPRSCHRSFHRQEGAMTVYELALKVYGQLFHTLCNYMHRYICSL

SEQ ID NO: 249279 - protein, 65 aa, Glycine max
  Clone ID: PAT_MRT3847_67129C.1.pep
PSRSHLSVEQSSRQMPIMDCTLVSSFIPMSTATHSSFHEKLRNPHKKPQNEVPTTTTRTPTTTSF

SEQ ID NO: 249280 - protein, 68 aa, Glycine max
  Clone ID: PAT_MRT3847_6712C.1.pep
MKSGGGGGGGMGAVPSYGVPAKRRWRGLVIAVLGLVILSMLVPLVFLLGLHNGFHSSGTISPRSLSSL

SEQ ID NO: 249281 - protein, 79 aa, Glycine max
  unsure (1)..(79): unsure at all Xaa locations
  Clone ID: PAT_MRT3847_67130C.1.pep
IWNTIKFCVQEYMTFYYKLDAINXQDPELQAIFKELVQSCXGYSQDNPSRQKMHXRNSXIEASGTLIWNDSSLYAIVNF

SEQ ID NO: 249282 - protein, 61 aa, Glycine max
  unsure (1)..(61): unsure at all Xaa locations
  Clone ID: PAT_MRT3847_67131C.1.pep
LYIYIRYAIFVFKLIIPVNFVALMYIYIYIYXLIIPVNFVALIYIYIYIYIYVYIYIYIYI

SEQ ID NO: 249283 - protein, 59 aa, Glycine max
  Clone ID: PAT_MRT3847_67132C.1.pep
VRSAPIQRGLGPNQILFVAPQERPLGASIPILFRDNQNPGPSEVLKSWAKSSVHPLGPF

SEQ ID NO: 249284 - protein, 55 aa, Glycine max
  Clone ID: PAT_MRT3847_67133C.1.pep
SFIPTAYCMEHIQGRWIIGTSSLRRIFSAVRVQVIAPSVAYADRPMRSSSYYSSS

SEQ ID NO: 249285 - protein, 50 aa, Glycine max
  Clone ID: PAT_MRT3847_67134C.1.pep
YGCEKTTEGYYINQVPRFFKIAKWYAKFVASLIFIKRCCLYFFSYCVFFS

SEQ ID NO: 249286 - protein, 62 aa, Glycine max
  unsure (1)..(62): unsure at all Xaa locations
  Clone ID: PAT_MRT3847_67135C.1.pep
KFPLTXLSNLELPIKPTHHXQAKVLLCHGPRRKXXHIGNTCKVLLGIXDIIIFEXSVHXXRR

SEQ ID NO: 249287 - protein, 53 aa, Glycine max
  Clone ID: PAT_MRT3847_67136C.1.pep
TEWNRDLKHFKLYNTSLYNRWDISPFTGDLIVNLMLARTPLIFLSSLNRPLRT

SEQ ID NO: 249288 - protein, 50 aa, Glycine max
  Clone ID: PAT_MRT3847_67137C.1.pep
IFEVKREYSSDSFPIMHRLPSSNEPMNLDGSIVGESVRIRNSGRVCSICE

SEQ ID NO: 249289 - protein, 47 aa, Glycine max
  Clone ID: PAT_MRT3847_67138C.1.pep
AHLAASARCRWMCRSFCNASDHSIETLMSSDSGLLADAHHLELNNQY

SEQ ID NO: 249290 - protein, 122 aa, Glycine max
  unsure (1)..(122): unsure at all Xaa locations
  Clone ID: PAT_MRT3847_67139C.1.pep
QHPSVXQKLSEQSYLLSKLTPTHSKNYSTTDSYFNGSLQSCNLVPVIAHATTKKRISGFLLNFIIERVSTTIAKTTSTPIKQVKLLIQNQDEIIKSSALSEPYKRISDYFSXTMKDEEVITV

SEQ ID NO: 249291 - protein, 108 aa, Glycine max
  Clone ID: PAT_MRT3847_6713C.1.pep
RFFGEVGKVYAVRWNDVLDGVWHLVDKDENYHNVVYNKDLDQPAIVAGWTTLRDFYQLTGDHLVSLHFYGSSAFFLTIQDQLLAQIIPKMTLFIPSSVRFCHLQGLSH

SEQ ID NO: 249292 - protein, 110 aa, Glycine max
  Clone ID: PAT_MRT3847_67140C.1.pep
MGHLSSNSQMTLILLLALAIFTSLNLVTAQVITTPCTTSMINTITPCANFITGSINNGLTPSATCCDSFLSLITTSVDCACLLLSANFPFQIPSNKVLSLFLSQAFNVGQ

SEQ ID NO: 249293 - protein, 129 aa, Glycine max
  Clone ID: PAT_MRT3847_67141C.1.pep
VTLSLSCTELTHDPLPLLKDLPNLTHLCIDFAYEGEVLQFPNRGFPNLKQILLSHLYRLKSIVIEDGALPSLEKLKLVSTDVLTEVPRGIDKLPKLKVFHCVHMSDEFEENFHLNRGQRSQWIIQGWRE

SEQ ID NO: 249294 - protein, 135 aa, Glycine max
  Clone ID: PAT_MRT3847_67142C.1.pep
IYTKMQKLQEIAVSLAVDYLLPPFKKAVNSVIEVPKDSADMKDKLDGIQAMIHDVDKMAAAEESNSRDGLKAKVKQLVETSFCMEDLVDEYIIHEERQLADDPGCASLPCKAIDFIKTTDFYLNWYFGNSSVESS

SEQ ID NO: 249295 - protein, 62 aa, Glycine max
  Clone ID: PAT_MRT3847_67143C.1.pep
ASARSEALGGVLLALIEGAGIMLNKFISAQQPMPMIMDEPHPQPPQSSEHPWLGGWFGGGNR

SEQ ID NO: 249296 - protein, 90 aa, Glycine max
  Clone ID: PAT_MRT3847_67144C.1.pep
TTPGIFPALKLQCGCVMRVHLQTMHCMRLSTYNYGLKFTNPTNGPNFAIPRSLNCNPTQCGRLRHLGAGAWAGPGRNGCRTCGRSGWAYV

SEQ ID NO: 249297 - protein, 72 aa, Glycine max
  Clone ID: PAT_MRT3847_67145C.1.pep
SGEASSVADRAQVPWKGAPERVRAPACPDPVAPRGAVGESGCLGMQPQSGGKFRPRLNTGKCYRFKHFIVFF

SEQ ID NO: 249298 - protein, 66 aa, Glycine max
  Clone ID: PAT_MRT3847_67146C.1.pep
NIFFTELEAFFDFERPLKGGFFPKVFFIFCYGELSFAGIITTTGDRFFLLLFGNWTGSMVHIFGAY

SEQ ID NO: 249299 - protein, 64 aa, Glycine max
  unsure (1)..(64): unsure at all Xaa locations
  Clone ID: PAT_MRT3847_67147C.1.pep
ANYISVLSEDNSNMELGHYRRPLYKYYAPTCKHYQKLAPXYKNPGSNFHKANSIFISIADCHQH

SEQ ID NO: 249300 - protein, 66 aa, Glycine max
  unsure (1)..(66): unsure at all Xaa locations
  Clone ID: PAT_MRT3847_67148C.1.pep
VIVGNDKVDINIGVMGHVDSGKSSTTGHLIYKLGGIDKRVIERFENEAAEMNKRSFRXAWVLYKLK

SEQ ID NO: 249301 - protein, 139 aa, Glycine max
  Clone ID: PAT_MRT3847_67149C.1.pep
PRVRFFAAMAGAGAPAVPQAGRPAPNFDVIVVGAGIMGSCTAHAAASRGARVLLLERFDLLHPLGSSHGDSRIIRDAYAQPRYLRMVRLARCLWAAAEAEAGYRVLTPTPYLFMGPRSSASLAAAIANIGAEEVDVDDL

SEQ ID NO: 249302 - protein, 643 aa, Glycine max
  unsure (1)..(643): unsure at all Xaa locations
  Clone ID: PAT_MRT3847_6714C.1.pep
MKSGGGGGGGMGAVPSYGVPAKRRWKGLVVAVLGLVILSMLVPLVFLLGLHNGFHSSGYIYEQKSTPSNEKSLERYDRHDVGHNESEEGQSNHVEDLITKFEPTLPKDALKKYAREGKNDSNNKAGKDDKQRGSKAPPKGVLQSRPTSNNPRSGQVEQVNRPKTSTADEGGKSCELTFGSYCLWQQEHRQEMKDALVKKLKDQLFVARAYYPSLAKLPANDKLSRQLKQNIQEMEHMLSESTTDADLPPVAESYSKKMEKTITRVKSIPVVCDNVDKKLRQIFDLTEDEANFHMKQSAFLYKLNVQTMPKSHHCLSLKLTVEYFKSSHNDEKADEEKFIDSSLHHYVIFSNNVLAASVVINSTVFHAKESSNLVFHVLTDGENYYAIKLWFLRNHYKEAAVQVLNVELDIQKENPLLLSLPEEFRVSILSYDNPSTNQIRTEFLSIFSDSHYLLPDLFSNLNKVVVLDDDVVIQQDLSALWNTDLGDKVNGAVQFCSVKLGQLKSYLGEKGISQNSCAWMSGLNIIDLVRWKELGIPPTFIQMIEXELQCNNDLLRVLHDGIDCSFLENELYPLYESWVXSGLGNDYKIATLLSXPESVRHCNRNMKPWPDLGIPQYKSYWKKFLNKEDHLLCDRLVDAVVEY

SEQ ID NO: 249303 - protein, 64 aa, Glycine max
  Clone ID: PAT_MRT3847_67150C.1.pep
LIRKPNQLQKIGYEQLLNRIYVHISNAIMGSIQVYARSAIDRYASRTVIVNSTMRTLLLGPDVR

SEQ ID NO: 249304 - protein, 71 aa, Glycine max
  Clone ID: PAT_MRT3847_67151C.1.pep
QTKKKRFQSPLLISGGVFVKLLRQARFFKILQKNLVSYTNIFWRRAILVIKLTRNPLKSPLIFLQRIILCF

SEQ ID NO: 249305 - protein, 263 aa, Glycine max
  unsure (1)..(263): unsure at all Xaa locations
  Clone ID: PAT_MRT3847_67152C.1.pep
MDRHKCKLCSRSFSNGRALGGHMKAHLASLPLPLPPKLHSCFSSSDSEQEQSLRENPKKTLRILDPEDRESETESNKNPTRXRSKRNWKSTMPKLSLGHPEAEPLSSVSDTSPEEDLAMCLMMLSRDTWQEHKLANAGPPKTRCSSGSEIKLKSKVRSKHLCHACHKSFRSSRALGSHRTLCSPRLEAQNNSIISNNNIKVFECPFCYKLFGSGQALGGHKRSHLIPSSSSTVNHSVKLKQSFIDLNLPAPAEDDDLSVVSDA

SEQ ID NO: 249306 - protein, 61 aa, Glycine max
  unsure (1)..(61): unsure at all Xaa locations
  Clone ID: PAT_MRT3847_67153C.1.pep
SAGALXXLGFIFKINRVTIYLLILXIYIQIPNYKPRHSMIQQGFKKGDDSITVFFTLQSTY

SEQ ID NO: 249307 - protein, 40 aa, Glycine max
  unsure (1)..(40): unsure at all Xaa locations
  Clone ID: PAT_MRT3847_67154C.1.pep
YKPILYKXSYYYPKTSNYNPKLPLXQPSYNNPPYNIPPYP

SEQ ID NO: 249308 - protein, 58 aa, Glycine max
  Clone ID: PAT_MRT3847_67155C.1.pep
ILLSFLYVVSVCQHVFSFAIEKFPEALMLFPSFCVLSCWCLKYSNCRELCNDLLLKKN

SEQ ID NO: 249309 - protein, 279 aa, Glycine max
  Clone ID: PAT_MRT3847_67156C.1.pep
MLKIPEHQVAGHKAKDGILGPLVDDFGKFYKPLQTNKDDDTRGSTELSFYTSLAAAAHDYSIRSFFPAFHGTRLLDASDGSGPHPHLVLEDLLCGYSKPSVMDVKIGSRTWHLGDSEDYICKCLKKDRESSSLPLGFRISGVKDSISSWEPTRKSLQCLSAHGVALVLNKFVSSNNINHDDHHPDCAFATEVYGAVLERLQKLKDWFEVQTVYHFYSCSVLVVYEKDLGKGKATNPLVKLVDFAHVVDGNGVIDHNFLGGLCSFIKFLKDILAVACLHK

SEQ ID NO: 249310 - protein, 74 aa, Glycine max
  Clone ID: PAT_MRT3847_67157C.1.pep
PPHSGPFGGLPLLTHPPFLFPPFFNFFPRWENFWFKIVFPAPKKKKKKKKKKKKKKKKKKKKKKKKKKKKKKKK

SEQ ID NO: 249311 - protein, 276 aa, Glycine max
  Clone ID: PAT_MRT3847_67158C.1.pep
MLGCGAVPQQDVGVVGRANENVDASDSLSFALVLKKLIDRGKVDVKDVALEIGISPDTLTANTNEAYMAPDVQHKIVNWLKAHVYTNAFQKGLKVKFKPANASKNDSEAIDGSDTLPISDSGLLDPVAVKSVPPRRRTTSNIRILKDNKVICSSEGVIGENGMPVDMCRVGQSDCDNPTNYNEASIPNATEMNLTKSEDIFHEVQGNASGCVSAGNSTACLLNASVLSDHCLVHSASEPLDFGFIKKDAISSYIHPYINKKLLQIRDGVPLEDIIC

SEQ ID NO: 249312 - protein, 53 aa, Glycine max
  Clone ID: PAT_MRT3847_67159C.1.pep
KKGAGSSPSPNLRVWTWEGGVKAKGASFFFFLRDGEWPPQDKVWANWNLRPGF

SEQ ID NO: 249313 - protein, 51 aa, Glycine max
  Clone ID: PAT_MRT3847_6715C.1.pep
PVSEDPGRRTRARTRVPKTSKLTHEGQKWEHAAPWVCINDPCILRSLMCDH

SEQ ID NO: 249314 - protein, 59 aa, Glycine max
  Clone ID: PAT_MRT3847_67160C.1.pep
IKNLFSSIFILPHASHDLQSKIFTQPSILNNYATTPTPMTLFSSNDDEMLRFLVPLSNS

SEQ ID NO: 249315 - protein, 100 aa, Glycine max
  unsure (1)..(100): unsure at all Xaa locations
  Clone ID: PAT_MRT3847_67161C.1.pep
KRGKVGGIFKIFRPTPPVLVKDFNFXPNPFKSKKKGDPGPIFKIEGPPPPPNGVLSPQNPKGPNRGGPKALKKGKKGPPPLKTGEKIFCSQTWEKLKGGF

SEQ ID NO: 249316 - protein, 76 aa, Glycine max
  Clone ID: PAT_MRT3847_67162C.1.pep
IQFKCYFQIHSEIIRTLNTFIFKIFQIYKYHTYILLNSPYFCNQLSISTPTLFGVSYLINNTFKLHTNIYKKSLSI

SEQ ID NO: 249317 - protein, 94 aa, Glycine max
  unsure (1)..(94): unsure at all Xaa locations
  Clone ID: PAT_MRT3847_67163C.1.pep
FLTSGAFXLTALSSXSWIQXYXARXTQXASXNLAXAGKXASADXAEYVGXKTXXLVXXTKXCGQDIQSKAXDXRVGSCKDXXXSTARDARXAXA

SEQ ID NO: 249318 - protein, 94 aa, Glycine max
  unsure (1)..(94): unsure at all Xaa locations
  Clone ID: PAT_MRT3847_67164C.1.pep
MASSEADSRLKQVLVPALEKIIKNASWRKHAKLSHECKSVVEILTSPPKPQSPASDEAAEPEASVPGPIHDGGPVEYSLAESESIXRPLIAAAS

SEQ ID NO: 249319 - protein, 146 aa, Glycine max
  unsure (1)..(146): unsure at all Xaa locations
  Clone ID: PAT_MRT3847_67165C.1.pep
VGASPDPPVRSCFLLPLPPFPPAFRLFALSGGAGLFPFFQGPAVKRNQALPVSPFQWXNALAPWSPTAFPPVLAGSLIQLARRVSRFPSGQLAPPLFSVFVRSLAPSGFPPFPFGFSVFLFCDRVTVSHSNPVSPFLHQYFNTILY

SEQ ID NO: 249320 - protein, 60 aa, Glycine max
  Clone ID: PAT_MRT3847_67166C.1.pep
LLLLSYALYLSSSLFSSLPMSPFTEKLAIFTVGYFVLRHYAEKRDIRSFLTVASSLCAHL

SEQ ID NO: 249321 - protein, 147 aa, Glycine max
  Clone ID: PAT_MRT3847_67167C.1.pep
EPSNLGLSRDSGVGPSKIPNKGTPNQLENLPALSGTSLYKGTLGMNTVGDGTRLNVNVVPYTNNSPNDSRNLFADLNPFQIKGMGKAPVHNKPVENKPPELKSTKNNAVSGRPPVPLMWKNRPAYNEEPRTTNHNPNDYNLPYVFPM

SEQ ID NO: 249322 - protein, 135 aa, Glycine max
  Clone ID: PAT_MRT3847_67168C.1.pep
AHSHANQLRVPSLHSCAYTYDLVMRAYPAYYLLWRGPRPLAPLACMYHQGSSITTVPYKPLLIPSLVIFTPYWFAPPLPVFFKYLHTVPQQAAFYHTHPKLFNTKITNVSRSFLKQSFVNSIVRLISITRLIQSF

SEQ ID NO: 249323 - protein, 43 aa, Glycine max
  Clone ID: PAT_MRT3847_67169C.1.pep
TLRTMTNHRISTQHSGTNTTGKFLIYILNFMILIKLSLLSHAP

SEQ ID NO: 249324 - protein, 167 aa, Glycine max
  Clone ID: PAT_MRT3847_6716C.1.pep
TYAQRKYNPNDEIDVHDLRTIKSSKWGATEEFQDAYECEEWVDDRDMDMLYSSGNVEFNPKIYRKYKKEYDELENEEDFPSDEWVIPQGSMGHVQRHSFQFRKYSNQNIKHHPKSSSSNWYKPQHFSKRNAIQKQPKVWKKYHGYDENKHAANDESSEDWISAAGRL

SEQ ID NO: 249325 - protein, 150 aa, Glycine max
  Clone ID: PAT_MRT3847_67170C.1.pep
MVRKHGWQLPAHTFQVVAITVFCLLVIAFYAFLAPFIGGGHIWEYTFIAVYSPVALIVFILYVRCTAINPADPGIMSKFDPRVGNKFNSAHNLSGKHLGSEHEHVAAREQYSPSSAASKRSMTNISKKSSVEDLDRLDSSRKENNQNSCN

SEQ ID NO: 249326 - protein, 45 aa, Glycine max
  Clone ID: PAT_MRT3847_67171C.1.pep
QPHVISNANNHISCNSNHLRFGSIYLNLRLYHLPSITTTRYTTLS

SEQ ID NO: 249327 - protein, 47 aa, Glycine max
  Clone ID: PAT_MRT3847_67172C.1.pep
LNKWALVFQLILSALNSLYIYFWVLLTKRKDLNIRLQNGSTKGKFSA

SEQ ID NO: 249328 - protein, 30 aa, Glycine max
  Clone ID: PAT_MRT3847_67173C.1.pep
NSQPPPLVLPSFTITLLITSCNHHTHSSTL

SEQ ID NO: 249329 - protein, 66 aa, Glycine max
  Clone ID: PAT_MRT3847_67174C.1.pep
HLRTKATQDNGVFIGPDPLISMGVRKQEPKIQDDEISKSKSRWECILSTNKQSGVAATNALQILYT

SEQ ID NO: 249330 - protein, 107 aa, Glycine max
  unsure (1)..(107): unsure at all Xaa locations
  Clone ID: PAT_MRT3847_67175C.1.pep
PPKGLKIFAIPAHKGVYFFYKRKLCPFPPKKKKFFGPLNPFFYPKNPVPPISAIQKLEGLSPLXLKPPLGVGALNNPNPNPRGFNNKFPPPXPLVQQFFLPQTSTPK

SEQ ID NO: 249331 - protein, 128 aa, Glycine max
  Clone ID: PAT_MRT3847_67176C.1.pep
NPDIWPRKPFLPKFTLGKKTGHLIWPFTFKLPVLKALEENKKWVSRNFMGMSAFYFFNPNINGFFRVPINTAYPKLALKKWHGFPNILGAKILKGLLVQTSILGTQNGLGQTQTPGGFSGASFTPFTP

SEQ ID NO: 249332 - protein, 56 aa, Glycine max
  Clone ID: PAT_MRT3847_67177C.1.pep
PFNHHFSWTWIPTEIPALTLAHWLTLWAFLDHYRFQVIGLPFQKGKEGNFHSGKVE

SEQ ID NO: 249333 - protein, 161 aa, Glycine max
  Clone ID: PAT_MRT3847_67178C.1.pep
MDYHSQYSSASESGWTHYLDQSSLPENYYQRRGGVVECDEGKGARMEEYSEEDLSMVSDASSGPPYYDNECYCQNWYPCLSSTTKDSQKKNKKVKEYGRSQQPSPLDDTASSPFFNCAKESHKKQDSFSGNGAVESALNFSQCVSATRIKRKTKFQKALVS

SEQ ID NO: 249334 - protein, 59 aa, Glycine max
  Clone ID: PAT_MRT3847_67179C.1.pep
AATRGENDIDASSRQVDTAASSLHLRDQSALLIQLRGEGSTVSALQYKRAYAYNADAQH

SEQ ID NO: 249335 - protein, 105 aa, Glycine max
  unsure (1)..(105): unsure at all Xaa locations
  Clone ID: PAT_MRT3847_6717C.1.pep
EFGTRPCSITILLLHASSAKXXSCSRVSLEDVCEGRPETEEAETRTNQIESKNGNLKDSEPDGCCNIRSSGISRSTHVIGPRRREEAPTIKGGDYLLVGGRFFWE

SEQ ID NO: 249336 - protein, 43 aa, Glycine max
  Clone ID: PAT_MRT3847_67180C.1.pep
VHSFVHRVRFFFFLIFTKKRGCNTGIFKTGTGGGPNLTNKERN

SEQ ID NO: 249337 - protein, 185 aa, Glycine max
  Clone ID: PAT_MRT3847_67181C.1.pep
MDYHHISAASQYSSASESGWTHYLDQSSLSENYYQRRGGVVECEGKGARMEEYSEEDLSMVSDASSGPPHYDNECYCQNWYPCLSSKAKESQKKNKKVKEYGRSQQPSPLDDTASSPFFNSSKESHKKQDSFSGNGAVESALDFSQCVSATRIKRKTKFQKHFGFLESLGGKLASEEQGGFDEGK

SEQ ID NO: 249338 - protein, 80 aa, Glycine max
  Clone ID: PAT_MRT3847_67182C.1.pep
WFSHHKCVLFLLVSLYPLPCFSLFLGVIPTFPLVEYNISVNIVMFLMRMVCNSVACKIVLCFLFFLRKTDLDCYCVQVTN

SEQ ID NO: 249339 - protein, 46 aa, Glycine max
  Clone ID: PAT_MRT3847_67183C.1.pep
DQKKRVRKKRKSPCPLGLNPSTNKANIRVKTCSMSQIGVSAHHDEY

SEQ ID NO: 249340 - protein, 192 aa, Glycine max
  unsure (1)..(192): unsure at all Xaa locations
  Clone ID: PAT_MRT3847_67184C.1.pep
MRSNWKEGTAFLFPLLXIEKELLKQIKTHPSPQTIYKWIKDNISPKLHVDKGFANILMTSFLHDITSEVNPPSDETDSSSASFQRTXEQEKQLLLSFKPVMQKFLHDHVDLQVSALYALQVHCYNSNFPKGMLLRFFVHFYDMEIIEEEAFLAWKEDITQEFPGKGKALFQVNQWLTWLETAEEEESEEEAD

SEQ ID NO: 249341 - protein, 190 aa, Glycine max
  Clone ID: PAT_MRT3847_67185C.1.pep
MGMNCGGVVVRFGLWVVAMCIAGYIVAPPLYWHLIELLNHSSVSSSSSSCAPCVCDCSSQPIITIPQGLSNSSFEECAKHNPKVDGDTENNVAELLSEELTLRETEALKNQHRADMALLESKKIASQYQKEADKCNSGMETCEEAREKAEMALVAQKKLTALWELRACQKGWNEGLAKSKKQSKGKVQTA

SEQ ID NO: 249342 - protein, 56 aa, Glycine max
  Clone ID: PAT_MRT3847_67186C.1.pep
KKKREAEGHSSEDASHNEDDEEKEITLRPLNMEYMRQARTHVAASFASERSVLNEL

SEQ ID NO: 249343 - protein, 79 aa, Glycine max
  Clone ID: PAT_MRT3847_67187C.1.pep
IAMIANEDTVVVFLWSGLRNASIRWKTNHLVVESVTTVKHIEDALRVFTSRKDASLGLERQLLANVISVLVDGYNKPVP

SEQ ID NO: 249344 - protein, 64 aa, Glycine max
  Clone ID: PAT_MRT3847_67188C.1.pep
SQARNLSFGQEKNIVIWFGPALIWDVANTASGRQSQSNPPLSPSTKISVYVHIVNGAIRFGFWN

SEQ ID NO: 249345 - protein, 38 aa, Glycine max
  Clone ID: PAT_MRT3847_67189C.1.pep
ILPHSHIYNIAKRLDIVYSNYTTLTIDQCKYQWILTPE

SEQ ID NO: 249346 - protein, 607 aa, Glycine max
  Clone ID: PAT_MRT3847_6718C.1.pep
EKLDIYGDASYLSRASSGVSDDMEPSSTSHMPESDENAALESKKMNHNMLMALIKYLQKKRFSFIEKATAEGTEEVVFDAVGDNFASYNRLKKTNKGRGNVPVSSGAREMASMLDTALLEALLLTGQSSVALELLRGVNYCDLKICEEILRKGNHHVALLELYKHNSLHREALELLHKLVDELKSSQSEITQRFKPEDIVEYLKPLCGTDPILVLEFSMLVLESCPSQTIDLFLSGNIPADMVSSYLKKHSPNMQARYLELMLAMNENAVSGNLQNEMVHIYLSEVLDWHADLSAQQKWDEKDHSPTRKKLLTALESIAGYNPEALLKRLPPDALYEEHAILLGKMNRHELALSLYVLKLNAPELALSYCDRVYESMHQPSAKNSSNIYLVLLQIYLNPRRTTAGFENRITNLLSPQNKTIPKLTPTPSIKSRGRGSKKIAAIEGAEDTKVSLSSTDSGRSDGDADEYNDGSPTIMLDEILDLLSRRWDRINGAQALKLLPKETKLQDLLSFLGPLLRKSSEMYRNCSVIKSLRQSENLQVKDELYSQRKEVVKITGDSMCSLCHKKIGTSVFAVYPNGSTLVHFVCFRDSQNMKAVGKGSQLRKRL

SEQ ID NO: 249347 - protein, 86 aa, Glycine max
  Clone ID: PAT_MRT3847_67190C.1.pep
MAAGSFMALSSPSLAGKAVKLGPSTPEFCTITMTKTVTQQAPILSPTYRPNPRKFLALILGEPPSYLNCEFLAMNVVTTKHLILVM

SEQ ID NO: 249348 - protein, 462 aa, Glycine max
  unsure (1)..(462): unsure at all Xaa locations
  Clone ID: PAT_MRT3847_67191C.1.pep
MKNSQEKKHVAVFVFPFGSHPVPLLNLVLKLVHATPNNLKFSFLGTEHSNKPLLSKPHIPDTIKFYSISDGVPEGHVPGGHPVERVNFFLEAGPENLQKGIDMAVAETKESVTCIIADAFVTPSLLVAQHLNVPCVLVWPPLSCSLSAHFHTDLIRQKYDNNSDKNTPLDFIPGLSKMRVEDLPEDVINSTDSEEETLFSKTLASLGSVLPQAEAVVVNFFEELDPPLLVHDMRXKLKESENQRRENSSVPLPPLPPSDTDATGCLSWLDHKQKQNNGVGSVAYVSFGTVVTPPPHEIVAVAEALEASGVPFLWSLKEHLKGVLPRGFLERTSESGKVVAWAPQTQVLGHGSVGVFVTHCGCNSVFESMSNGVPMICRPFFGDHGLTGRMVEDVWEIGVRVEGGVFTKDGLVKCLRLVLVEEEGKKMKENAIKVKKTVVDAAGPQGKAAQDFNTLLEVVSRS

SEQ ID NO: 249349 - protein, 77 aa, Glycine max
  unsure (1)..(77): unsure at all Xaa locations
  Clone ID: PAT_MRT3847_67192C.1.pep
KLPLYRLVRQIAQDFKSLFSFQKQSCVXALQEAVKAYIVGLVKNTSLSTIHAKRVTIMAKDIQLASRVRVTSPYKQG

SEQ ID NO: 249350 - protein, 53 aa, Glycine max
  Clone ID: PAT_MRT3847_67193C.1.pep
IPFGLFTRKNVFFYPGGFKKKTPIRQKFYIKLSQFNHRGKTGALNISILKTIF

SEQ ID NO: 249351 - protein, 155 aa, Glycine max
  unsure (1)..(155): unsure at all Xaa locations
  Clone ID: PAT_MRT3847_67194C.1.pep
QHWLKIILYHVAEVLGSQQISPFSKSIMNEYADKLHVQPTYDTVQEQLGGVLRVFKTSLVFNGTSYTGDPARTKKEAEQSAAKAAILSIMGDSTSGTTLIEIIKSKSTFYDAIKGKGPPLLQPSAVLSTTNTGQISVTLXHRDQXVQLPCLINNI

SEQ ID NO: 249352 - protein, 127 aa, Glycine max
  Clone ID: PAT_MRT3847_67195C.1.pep
SYSSVTQVGSLARLTGCYHPTRYRGTLSSCRCRSAIRYRVRTLISIRRPAQMSSMLWAYIILDQSQWLSPPLLTICLMTLYQTPVWIYTQLQDTIFVSMLVPGYEHGSPGAYSYSELRRGSGITRPR

SEQ ID NO: 249353 - protein, 60 aa, Glycine max
  Clone ID: PAT_MRT3847_67196C.1.pep
FAETLVSSFICSPFYATFVSFPNAAVIYSLHCTYSMNNFDASKFCVIIANFWMKILFTYI

SEQ ID NO: 249354 - protein, 90 aa, Glycine max
  unsure (1)..(90): unsure at all Xaa locations
  Clone ID: PAT_MRT3847_67197C.1.pep
LPAASXSXAAGGXAGSAGACAVCASGSPGSGRAXRSXXAAXXSLXXXXXXXLTCPESGNCEKEREMQLKVWFFVLRCAFPSSCFVFFIIY

SEQ ID NO: 249355 - protein, 42 aa, Glycine max
  Clone ID: PAT_MRT3847_67198C.1.pep
QFLLDRCQNLKNELGEGVGLGGTHGMAEAMVAIAKVTVGAQG

SEQ ID NO: 249356 - protein, 57 aa, Glycine max
  Clone ID: PAT_MRT3847_67199C.1.pep
RYVILAHREGSTADFFPYQSLRCERNALPRDGMTDHYCFCYHGRPSFSWRRTVLLSS

SEQ ID NO: 249357 - protein, 60 aa, Glycine max
  Clone ID: PAT_MRT3847_6719C.1.pep
NDASGRTLHATITKTTSQGIPAHNERLFPYRLIPRVKQSLFKFIIIFFYTCDKNVTYVGC

SEQ ID NO: 249358 - protein, 116 aa, Glycine max
  Clone ID: PAT_MRT3847_671C.1.pep
SSRATNHHIDHIEISPGRNDFPNPEGLKYVGFLTVLTSHKTAYSNLHSPIDIKLAPHLQFQSWQSSNSDELLTIFQVTICCILTSIQISPGRNDFPDPKGLKYVGFYEVFFSVTRI

SEQ ID NO: 249359 - protein, 28 aa, Glycine max
  Clone ID: PAT_MRT3847_67200C.1.pep
LQLFPSIVSFLPLICSFCIHILPHCTIV

SEQ ID NO: 249360 - protein, 59 aa, Glycine max
  Clone ID: PAT_MRT3847_67201C.1.pep
KKKFEHHLNTFWLVIKKNPPPANKILKLAGRTKLFCFYKGDEQNGFFIFKKKYFLTLGS

SEQ ID NO: 249361 - protein, 82 aa, Glycine max
  Clone ID: PAT_MRT3847_67202C.1.pep
DASRGLSLRSMRPHTRSLRFKRWSVSISRDDLVLDGSLRRHERWCFLMPSDSSESVALAYSVRRGLCRSLQYVRVWLQLMRQ

SEQ ID NO: 249362 - protein, 480 aa, Glycine max
  Clone ID: PAT_MRT3847_67203C.1.pep
MEDETETMVEKREIINNVMCLLTDPDGTPLGAPMYLPQNAGPQHLIQIVNKLLNNEEKLPYSFYISDEELLVPLETYLLKNKASVEKALPIVCQPQAIFRIRPVNRCTATISGHAEAVLSVAFSPDGRQLASGSGDTAVRFWDLTTQTPLYTCTGHKNWVLCIAWSPDGKYLVSGSKTGELICWDPQTGKSLGNPLIGHKKWITGISWEPVHLNAPCRRFVSASKDGDARIWDVSLKKCVMCLSGHTLAITCVKWGGDGVIYTGSQDCTIKVWETTQGKLIRELRGHGHWVNSLALSTEYVLRTGAFDHTGKQYSSPEEMKKVALERYQAMRGNAPERLVSGSDDFTMFLWEPFINKHPKTRMTGHQQLVNHVYFSPDGQWVASASFDKSVKLWNGTTGKFVTAFRGHVGPVYQISWSADSRLLLSGSKDSTLKVWDIRTRKLKQDLPGHADEVFSVDWSPDGEKVASGGKDKVLKLWMG

SEQ ID NO: 249363 - protein, 80 aa, Glycine max
  Clone ID: PAT_MRT3847_67204C.1.pep
QLRWFLGSNLCIVLLLGVTEPCTYHHIGYTHKPMVCVQRSCRIPKTQFTKGALWLRTTTALQVHGHYLRMWSYVLLGVYR

SEQ ID NO: 249364 - protein, 90 aa, Glycine max
  Clone ID: PAT_MRT3847_67205C.1.pep
VKLWNGTTGKFVAAFRGHVGPVYQISWSADSRLLLSGSKDSTLKVWDIRTRKLKQDLPGHSDEVFSVDWSPDGEKVASGGKDKVLKLWMG

SEQ ID NO: 249365 - protein, 175 aa, Glycine max
  Clone ID: PAT_MRT3847_67206C.1.pep
FFFQYGIVYQLGIAGGNNSIAVYLLSWIVMVVLVAIYIIMAYARDKFATKEHLYYRLVQLLVIVVTVLVLFLLLEFAHLKFLDLLSSFLAFVPTGWGMISIALVLRPFLQTTKVWETVVSLARLYDLLFGVIVMAPMAMLSWLPGFQSMQTRILFNEAFSRGLQISRIVSGKKSV

SEQ ID NO: 249366 - protein, 42 aa, Glycine max
  Clone ID: PAT_MRT3847_67207C.1.pep
LPVLLPIFQSLVHCNQQMILYLALDVYLDRAFKLRRLIYQTI

SEQ ID NO: 249367 - protein, 210 aa, Glycine max
  unsure (1)..(210): unsure at all Xaa locations
  Clone ID: PAT_MRT3847_67208C.1.pep
MEAETETMVEKREIINNVMCLLTDPDGTPFGAPMYLPQNAGPQHLNQIVNKLLNNEEKLPYAFYISDEELLVPLETYLQKNKVSVEKALPIVCQPQAIFRIRPVNRCTATISGHAEAVLSVAFSPDGQQLASGSGDTTVRFWDLTTQTPLYTCTGHKNWVLCIAWSPDGKYLVSGSKTGELIXWDPXTGKVIRASTKSAQKWITGISWEP

SEQ ID NO: 249368 - protein, 153 aa, Glycine max
  Clone ID: PAT_MRT3847_67209C.1.pep
GNPKREWSLNDFEIGKPLGKGKFGRVYVAREVKSKFVVALKVIFKEQLEKYRIHHQLRREMEIQFSLQHQNVLRLYGWFHDSERVYLILEYAHNGELYKELSKKGHFNEKQAATYILSLTKALAYCHEKHVIHRDIKPENLLLDHEGRLKIAD

SEQ ID NO: 249369 - protein, 316 aa, Glycine max
  Clone ID: PAT_MRT3847_6720C.1.pep
EASEQQRYLRIATIVSMIIIPTEEIKLCNVIQDLLKLEKIQEDLAERFGSQPTFAQWAAVAGVDQKTLRKRLNYGIFCKDKMIKSNIRLVISIAKNYQGSGMNLQDLVQEGCRGLVKGAEKFDGTKGFKFSTYAHWWIKQAVRKSLSDQSRTIRLPFHMVEATYRVKEARKQLYSENGRQPDDEEVAEATGLSMKRLNAVLMTPKAPRSLEQKIGINQNLKPSEVISDPDAETAEEQLLKQFMKKDLEEALDSLNARERQVVRWRFGMDDGRTKTLQEIGEMLGVSRERIRQIESSAFKKLKNKKRTNHLQQYLVS

SEQ ID NO: 249370 - protein, 75 aa, Glycine max
  Clone ID: PAT_MRT3847_67210C.1.pep
MANGSKWFTRHFLHTPQPGTKWSTYIKRVKGYLILAHLKNIGKYLLFLSGNLETGKNVVCHGAHPINLGGLGLAQ

SEQ ID NO: 249371 - protein, 120 aa, Glycine max
  unsure (1)..(120): unsure at all Xaa locations
  Clone ID: PAT_MRT3847_67211C.1.pep
GAYGHPNAPAISLPSPNPPPKPLHYLVLQPSPLAGIPSAGLRVALVFKEEPGXCSLELMFKKHLSIVNEEPESQWVLGFFGVAMQLDRVAISLECSCYSHCNCVIVCLPLLLLFYRTRAR

SEQ ID NO: 249372 - protein, 42 aa, Glycine max
  Clone ID: PAT_MRT3847_67212C.1.pep
NKNGCIGNKRTMMSKFSVKRRWVGYDVRQRLFHTQHWVACGA

SEQ ID NO: 249373 - protein, 91 aa, Glycine max
  Clone ID: PAT_MRT3847_67213C.1.pep
FHSLDKGLLYSKSKQHIQMSNHNHQQQPSTAAPAPQESPTKDKDLDTRSACPPPGGAAQFVQPPLTPTEEIGCLEKCLIDLCCCCKLDFCC

SEQ ID NO: 249374 - protein, 83 aa, Glycine max
  unsure (1)..(83): unsure at all Xaa locations
  Clone ID: PAT_MRT3847_67214C.1.pep
TPSFQFTFLFPLCPYTLLLCNGYYKTHSYIFNIILQILKNLRLTHYXVITFNFKNTLLIITLNFSNNFIYKRFLQNVFYLHYY

SEQ ID NO: 249375 - protein, 88 aa, Glycine max
  Clone ID: PAT_MRT3847_67215C.1.pep
PAFSQPEIYCPLSILKTQTGCVTHTPKHILCINTPPPLSVSHSIYHMRDPYSHMGSPENSLKLLSSKDIYFLILHLQPYKPKNSEIYL

SEQ ID NO: 249376 - protein, 46 aa, Glycine max
  Clone ID: PAT_MRT3847_67216C.1.pep
PQRSDYSAQYVDAFYNAHHSSLTIPELTQLQLLQNDPQEKKLVYNG

SEQ ID NO: 249377 - protein, 47 aa, Glycine max
  Clone ID: PAT_MRT3847_67217C.1.pep
LVCDGSDALYVWGLGWLYSFDSFTNCYILKEETPCKRNTLCCLCLVQ

SEQ ID NO: 249378 - protein, 50 aa, Glycine max
  Clone ID: PAT_MRT3847_67218C.1.pep
NGTRDAMVAGFLSPLVKHKPTEQCIRVGCKADKVIIRRPDCSYPPRLNFH

SEQ ID NO: 249379 - protein, 52 aa, Glycine max
  Clone ID: PAT_MRT3847_67219C.1.pep
GMNVALPPNKRHRHSTVSSVTCLKMRPQPHYVNSMLNVDDSKQQRNHRVLSD

SEQ ID NO: 249380 - protein, 137 aa, Glycine max
  unsure (1)..(137): unsure at all Xaa locations
  Clone ID: PAT_MRT3847_6721C.1.pep
MTLKTTSSHAFKANIPQYNVGFYTSILEXKAPAEKDLTLISSXGEGPTNPKLTAHAEKLFDLARDSAGQLKASATGSTDAALGSVHAQKPVTDPHSEAVKKSLLKTIKAALGDKWNDKLTRAWEVPYDELAAPINKA

SEQ ID NO: 249381 - protein, 108 aa, Glycine max
  Clone ID: PAT_MRT3847_67220C.1.pep
NPFPNYESQVHIKKVASSTNLFPSKVAPENRIRFRSCQVDQVIANHQYCHLLFLLPSSCKNEYCMNSCFVLKGIAPLRFIQDIESHHKGWILLQWKKGGRSSHLHKDN

SEQ ID NO: 249382 - protein, 55 aa, Glycine max
  Clone ID: PAT_MRT3847_67221C.1.pep
DSPEIKEKQTFVEILFPFIFTFFVYQNLLNRVILKKINHLTLTRYRPQFFSKNNF

SEQ ID NO: 249383 - protein, 98 aa, Glycine max
  Clone ID: PAT_MRT3847_67222C.1.pep
TNLIKLSAMDDLKGAIFLGWERMRLSIDRIEAMHKANSIHHSTTRPPSHNTNSSIFLILALSGSNRVKDKDQDLEITYRAWLHVDIERQTLCKILIGL

SEQ ID NO: 249384 - protein, 44 aa, Glycine max
  Clone ID: PAT_MRT3847_67223C.1.pep
KVVIRYKRHVIWIGACSRLVIGFMIHGRVLYATYLLYTLRACES

SEQ ID NO: 249385 - protein, 64 aa, Glycine max
  unsure (1)..(64): unsure at all Xaa locations
  Clone ID: PAT_MRT3847_67224C.1.pep
XKXKIYHFHPRTSXLKTVXFWSNLFQXXSFHFNPLYXEMKVRLIWXRXRXXGXEYPLQXTXQTS

SEQ ID NO: 249386 - protein, 117 aa, Glycine max
  Clone ID: PAT_MRT3847_67225C.1.pep
KVDLHGDRTKQKAMKTASGLSGVESVSVDMKDMKMIVVGDIDPVSAVSKLRKCCRTEIVSVGPAKEEKETEKEEPAKVLVPLKHHESYPLYYRMTPQYSQSYYVTSYEENPSGCVIC

SEQ ID NO: 249387 - protein, 1078 aa, Glycine max
  Clone ID: PAT_MRT3847_67226C.1.pep
MERAALVRCLPCSSVLCRRYLHSHSHLCRPSSSISIIPSLSLPTIRPLCLPRRRSSSSSRLLPLYFRTTINRKHFSSLAPRAVLSPSPSSGFAEVNDEVALKLGFEKVSEEFIPECKSKAVLFRHIKTGAQVMSVSNDDDNKVFGIVFRTPPKDSTGIPHILEHSVLCGSRKYPLKEPFVELLKGSLHTFLNAFTYPDRTCYPVASTNAKDFYNLVDVYLDAVFFPRCVEDFQIFQQEGWHFELNDPSEDITYKGVVFNEMKGVYSQPDNILGRAAQQALFPDTTYGVDSGGDPRVIPKLTFEEFKEFHRKYYHPSNSRIWFYGDDDPNERLRILSEYLDLFDSSLASHESRVEPQTLFSKPVRIVETYPAGEGGDLKKKHMVCLNWLLSDKPLDLETELTLGFLNHLLLGTPASPLRKILLESRLGDAIVGGGVEDELLQPQFSIGMKGVSEDDIHKVEELVTSTLKKLAEEGFDTDAIEASMNTIEFSLRENNTGSFPRGLSLMLQSIGKWIYDMNPFEPLKYEKPLQDLKSRIAKEGSKSVFSPLIEKFILNNPHQVTVEMQPDPEKAARDEVAEKQILQKVKASMTTEDLAELARATHELRLKQETPDPPEALKTVPSLSLQDIPKEPIRVPTEVGDINGVKVLQHDLFTNDVLYTEIVFNMKSLKQELLPLVPLFCQSLLEMGTKDLTFVQLNQLIGRKTGGISVYPFTSSVRGKEDPCSHMVIRGKAMAGHIEDLYDLVNSVLQDVQFTDQQRFKQFVSQSRARMENRLRGSGHGIAAARMDAKLNAAGWMSEKMGGLSYLEFLRTLEERVDQDWADISSSLEEIRKSIFSKQGCLINVTADRKNLAKTEKVLSKFVDLLPTSSPIATTTWNVRLPLTNEAIVIPTQVNYIGKAANIYDTGYRLNGSAYVISKYISNTWLWDRVRVSGGAYGGFCDFDTHSGVFSFLSYRDPNLLKTLDVYDGTGDFLRELQIDDDTLTKAIIGTIGDVDAYQLPDAKGYSSMLRYLLGITEEERQRRREEILSTSLKDFKIFMDAMEAVKDKGVVVAVASPEDVDTANKDRPDFFQVKKAL

SEQ ID NO: 249388 - protein, 165 aa, Glycine max
  unsure (1)..(165): unsure at all Xaa locations
  Clone ID: PAT_MRT3847_67227C.1.pep
CLKMAPPALTMLKTSALMIWXLLASPQFLIAGGVCLTATIVMFGGYKIVKQLQQPSRALREEVFEEQSDPRQMDEMIEFNTDCLNSVEMWRRGVADAEAESVATVDGEFITPRAAAMSGIDITTARMFRDPRFKFDDDDSAASSRRSHRSRHSRSTHSHSHAPTK

SEQ ID NO: 249389 - protein, 333 aa, Glycine max
  Clone ID: PAT_MRT3847_67228C.1.pep
MADSSESTAEQQIMRSNSIEASLNNETSDRSKSPVDSTEPNKAHGRISSAHSNNTEKDHKKSTSQALYYKGVGYHMVNCGLILLKMLSEYIDMNNLLPTLSSEVVHRVVEILKFFNTRTCQLVLGAGAMQVSGLKSITSKHLALASQVISFVHAIIPESRKFLFLKVPETRKTLLLSEIDRVAQDYKVHRDEIHSKLVQIMRERLLVHLRGLPQIVESWNRPEDADPQPSQFARSLTKEVGYLQRVLSRTLNEDDVQAIFSQVVVIFHSQISEAFSRFDISTPQAQNRLYRDVKHILQCIRLLPLGDLSKSDTPNWGQLDEFLVKRFGNDAVQ

SEQ ID NO: 249390 - protein, 346 aa, Glycine max
  Clone ID: PAT_MRT3847_67229C.1.pep
MLGNQKQIKLEELPLFEFEMLATATNNFHLANMLGKGGFGPVYKGQLDNGQEIAVKRLSKASGQGLEEFMNEVVVISKLQHRNLVRLLGCCIERDEQMLVYEFMPNKSLDSFLFDPLQRKILDWKKRFNIIEGIARGVLYLHRDSRLRIIHRDLKASNILLDDEMNPKISDFGLARIVRGGDDDEANTKRVVGTYGYMPPEYAMEGIFSEKSDVYSFGVLLLEIVSGRRNTSFYNNEQSLSLVGYAWKLWNEDNIMSIIDPEIHDPMFEKSILRCIHIGLLCVQELTKERPTISTVVLMLISEITHLPPPRQVAFVQKQNCQSSESSQKSQFNSNNDVTISEIQGR

SEQ ID NO: 249391 - protein, 120 aa, Glycine max
  Clone ID: PAT_MRT3847_6722C.1.pep
RDPTVYKWGPPPLPRGFFFWVGAKMGDNGPPVGVKKGVNLFVGPLIFLGGILCLGAFGGGPPPVFSRPFKPLFDPLFYPLRPGLRGAPKFPGGFFLGLLFAAPPPLVIIFFFGEKFGPLK

SEQ ID NO: 249392 - protein, 54 aa, Glycine max
  Clone ID: PAT_MRT3847_67230C.1.pep
FTNKIFIYINTNKVPLLNIKTSILTLLFMMNWCTFQFITNNHLYIIFDLSFKFF

SEQ ID NO: 249393 - protein, 64 aa, Glycine max
  Clone ID: PAT_MRT3847_67231C.1.pep
ASKQSVFIRSRSCLTGPDHWVLQHTLPEALNPSGFRCILLHSRDISGARWALYMTKHEGVMDKR

SEQ ID NO: 249394 - protein, 43 aa, Glycine max
  Clone ID: PAT_MRT3847_67232C.1.pep
STHKPSRYRYQQDVAFRTPLAPYEKSNSMGPGGRMLASLNLKH

SEQ ID NO: 249395 - protein, 69 aa, Glycine max
  unsure (1)..(69): unsure at all Xaa locations
  Clone ID: PAT_MRT3847_67233C.1.pep
XIXSXVRHXPXGXFXXPGHXGIXTFXRCMXIGXHLXEPITFXRFQGTGXFXHIEXFCKXMNDRISXHSR

SEQ ID NO: 249396 - protein, 152 aa, Glycine max
  Clone ID: PAT_MRT3847_67234C.1.pep
MGEEGSTGRVTCSILSIDHTNMFYRVCAVCERTISDPTFVCHPSNPPSKRLFRILMSVATDTQVLTVVCFDRVARLLFGCSADEFFHFAKLHPFSGVTVNEILEGEIFTITLSKPVNANAQHLRVASAVPLSSAFRPAIHLLKQCYETPHHS

SEQ ID NO: 249397 - protein, 127 aa, Glycine max
  unsure (1)..(127): unsure at all Xaa locations
  Clone ID: PAT_MRT3847_67235C.1.pep
MSVATDTQVLTVVCFARVARLLFGCSADEFSHFAKLHPFSGIFCYLFLFEFAFSNNKNIFFXLVLYSPYQGVTVNEILEGEIFTITLSKPVNANAQHLRVASAVPLSSAFRPAIHLLKQCYETPHHS

SEQ ID NO: 249398 - protein, 71 aa, Glycine max
  unsure (1)..(71): unsure at all Xaa locations
  Clone ID: PAT_MRT3847_67236C.1.pep
FIRFTWKDLSKIFDEFSVKRNXMQAEIMKYTIRLCEQKAIEGKKKFCEGSLESMIDFVTTELYKKVKANFY

SEQ ID NO: 249399 - protein, 113 aa, Glycine max
  Clone ID: PAT_MRT3847_67237C.1.pep
ARASILFFFFHFFLHSSLKFRVLKPSPREPISTHNPQQREQQQPYTLSTSYSPPCLPPHFISFPFTKSMDFLVISTFTIDVAYSPTSYNTNLPYIVTFFYLPYSLYINSTSTS

SEQ ID NO: 249400 - protein, 148 aa, Glycine max
  unsure (1)..(148): unsure at all Xaa locations
  Clone ID: PAT_MRT3847_67238C.1.pep
MPMHHHLLLLPLLFSLVSPMTSLNSDGLSLLALKAAVDADPTGVLTSWSETDVTPCHWPGISCTGDKVTQLSLPRKNLTGYIPSELGFLTSLKRLSLPYNNFSNAIPPSLFNARSLIXLDLSHNSLSXSLPNQLRSLKFLRHLDLSDN

SEQ ID NO: 249401 - protein, 39 aa, Glycine max
  Clone ID: PAT_MRT3847_67239C.1.pep
ASFSFRMIEASSKFFFSSVTAFKESSNSFHLSLAACRVV

SEQ ID NO: 249402 - protein, 65 aa, Glycine max
  Clone ID: PAT_MRT3847_6723C.1.pep
LLKPNGYIGALKKEIFFRLTNSTIEISDDILFYPSQHHTTNVPLFHYQNNPMLPCRFDHLGQWKK

SEQ ID NO: 249403 - protein, 50 aa, Glycine max
  Clone ID: PAT_MRT3847_67240C.1.pep
HAYGSIQIITSRQYTTIALHGLHGLQDGSLLNVNDPPRKGRLQKNPHIST

SEQ ID NO: 249404 - protein, 69 aa, Glycine max
  Clone ID: PAT_MRT3847_67241C.1.pep
FNFIHFQICGFKYIYLFLYFLDVLVLLLLLVFLVFLFKSRCSFVLLLPLVLFKYLFINFLFWGCFEFRK

SEQ ID NO: 249405 - protein, 39 aa, Glycine max
  unsure (1)..(39): unsure at all Xaa locations
  Clone ID: PAT_MRT3847_67242C.1.pep
IXXMSSPCXIXLILXGXDXTCXEGARDXVSXQAXNXQGS

SEQ ID NO: 249406 - protein, 44 aa, Glycine max
  Clone ID: PAT_MRT3847_67243C.1.pep
RSLQNLYSKRCPLVSATAGTGTAPFRANDASESFVAGSQTGLDF

SEQ ID NO: 249407 - protein, 125 aa, Glycine max
  Clone ID: PAT_MRT3847_67244C.1.pep
DEGNSIAEDSTSKIIWRLKIPPRASAFSWRIFKNRLPTRDNLRRRHVELPSYNCPLCDQEEETAGHILFSCRKTRHLWWESLRWVNREGPFSIEPKSHFLQFSLWSGKSNVDKRWEVFWIALSMS

SEQ ID NO: 249408 - protein, 71 aa, Glycine max
  Clone ID: PAT_MRT3847_67245C.1.pep
AHGPELMTLKWVFFEWAQRVWWMNVSCKTLSCFGPSYLRGNDGVFSALVDVVGMCFQGASLYKCDRPDGRF

SEQ ID NO: 249409 - protein, 108 aa, Glycine max
  Clone ID: PAT_MRT3847_67246C.1.pep
MEDDDPIVREMDVYVCNEFMGSSTQLALLQHPLRPPWRPYDYHQVAAMRMKPQAKRIEVDLPLDTESKNYNDIIEDIKKIKHFTLRSTQTEERTHLAVGTIRGGKLLI

SEQ ID NO: 249410 - protein, 104 aa, Glycine max
  Clone ID: PAT_MRT3847_67247C.1.pep
HQSSLGTIYRQQAALYLLFMLLYVLATTLGVSWDAHVSRYYMYGDGSATSVARIVLEAAVVLMDAKYLLDEARQLQLHGVVQYMTGYNSAWNWLELLSGVMVIL

SEQ ID NO: 249411 - protein, 67 aa, Glycine max
  Clone ID: PAT_MRT3847_67248C.1.pep
NCWFVFVATFLEPKGCHGQTNKKFLLQMKHGFGGHYTIKVEFAIWRLGLEATNVFNWQTVPEPCGNY

SEQ ID NO: 249412 - protein, 67 aa, Glycine max
  Clone ID: PAT_MRT3847_67249C.1.pep
FFFFLFFFFFFFFWEEKNFTFTLITKKRSTGLHGCPETFITKYLKFKPPPTGDQSQIKRTRAFYYPL

SEQ ID NO: 249413 - protein, 43 aa, Glycine max
  Clone ID: PAT_MRT3847_6724C.1.pep
IVVRRNNDPRQHLHLINLKLPDHRLVFVKVKKPSILASRNLEP

SEQ ID NO: 249414 - protein, 108 aa, Glycine max
  Clone ID: PAT_MRT3847_67250C.1.pep
FTKLKLEHVVIEKGQFHQERTNPASMDEIEEDDVLALLRDEEPAEDKMIHPDISDEDLEKLLDRSDLIVNDFNDDNFKAPVSVFPLKGPGWEVVIPTATGGMLSTLNS

SEQ ID NO: 249415 - protein, 75 aa, Glycine max
  unsure (1)..(75): unsure at all Xaa locations
  Clone ID: PAT_MRT3847_67251C.1.pep
RVLFLLSSQAVAPIILHNSKTNTNSYQTLISFDYAPLQFYFSPNFDMGVYNKTPKFLKIYPIDXVPLLQTHDSPI

SEQ ID NO: 249416 - protein, 87 aa, Glycine max
  Clone ID: PAT_MRT3847_67252C.1.pep
SIPQKFIFLPPFPSPFKKIFLLSFPVYCTSDPYVALPYLNGKIGELTFFYFLNILGLLNKNPFWRQLWEAYLAFKKKKKKKKKKKKK

SEQ ID NO: 249417 - protein, 485 aa, Glycine max
  unsure (1)..(485): unsure at all Xaa locations
  Clone ID: PAT_MRT3847_67253C.1.pep
MALTTLSLLPPSTPPCFCGTLHLRSHNSFLSIHSPSSSSPFPSFSSISIPNHSPTRRRFHTVFAASSDYYSTLGIPKSATGKEIKAAYRRLARQYHPDVNKEPGATEKFKEISAAYEVLSDDKKRALYDQYGEAGVKSAVGGGSSAYTTNPFDLFETFFGPSMGGFGGMDPTGFGTRRRSTVTKGEDIRYXFGSRKEFELSHLETCEVCTGTGAKIGSKMRVCSTCGGRGQVMRTEQTPFGLFSQVSVCPNCGGDGEVISEYCRKCNGEGRIRVKKNIKVKVPPGVSSGSILRVTGEGDAGPRGGPPGDLYVYLDVQVIPGIQRDDINLVSIISISYLDAILGAVVKVKTVEGISELQVPAGTQPGDVLVLARKGVPKLNKPSIRGDHLFTVKVTIPKRISTKERELLEELASLGDTSRRSKSRPRTHSSTGGTESPKAQKDESTTSTVEEKTEKSEDENDVWNKLKDFAGSVANGALKWFKDNL

SEQ ID NO: 249418 - protein, 628 aa, Glycine max
  unsure (1)..(628): unsure at all Xaa locations
  Clone ID: PAT_MRT3847_67254C.1.pep
MIANSLCDPSPVKESQENEEITSAIPCDNIQSHGKPHTFSAQRSRRRRLDKNFTRFLNNMVNVYGQVNESLAISNVVELFKLVFLSTSTDPQAPKLLDDILRRYSQHDLFAACIDIXQKVGGTGNERFELSQQFLQSVSKSPFPFNTGKQAVKFSAWLEERGKDLTEVGTNLAEDLQCGDIFHLFALVSSGELSISPFLPDNGVGEAEDLRSAKRKSDTTESSYSDKAKKSKSFFGVEGEIISRREKGFPGIIISAHQTTISRADILNLLKDNDNYGQPFEGDFQLNIGQSSNYSLPDHILEITKSSDPVPLEENHSESPWEAMAGXARHLLSEYSNKKHAYAICAEVFRVVYAAIQKAGDQGLSMGEISQVINLPGAEIDVLIVDALQAFGQALKVNAYDTVRVVDVLYRHKYFLTPMSDFHLRVVQPSSSKTIEKSDHTCELYESEERDTTSVDTSRXRNAAIDSVQTLTILNLPHGDVDPENQACDRNEASEQNRLGLSRVNHKKETLEFSSSKSCVPILPWIHGRLDHMIYRVLRRRVLGIVMQNPGILEDGILHHMHVLNPQNCRTLLELMVLDKHLIVKKMHQNMLDGGPSLLPELIGSKSSQPKLICREHFFANPMSTSLL

SEQ ID NO: 249419 - protein, 226 aa, Glycine max
  unsure (1)..(226): unsure at all Xaa locations
  Clone ID: PAT_MRT3847_67255C.1.pep
ARGDIEFTDNSCWIRCRKFRVAVRVAPGTNQGGVRIREAISEAFAVKDHRGELYKKHYPPMLHDEVWRLEKIGKDGAFHRKLSSEGIKTVQDFLKLAVIDTLKLRNIXGIGMSDKMWEVTIKHAMTCDTGSKMHIYRGPDYTIFLDPVCKLIRADFNGHTFSNRDAMSPLNKAYIDKLVKEAYARWNNLEEIDGVLNDNIALLTQGDQTVEQFANNQPCSTISSHI

SEQ ID NO: 249420 - protein, 58 aa, Glycine max
  Clone ID: PAT_MRT3847_67256C.1.pep
INKCTFKKMLYIKSKENYRSGGPSLAFFSEASLIFCISLSFGFLSLMCLFSFYFFWLI

SEQ ID NO: 249421 - protein, 79 aa, Glycine max
  Clone ID: PAT_MRT3847_67257C.1.pep
KPGPEPLIMIWVFKGIQTQKYSGRTIRTMVLSPEIMRGANVASAQTLNFLPPKGSSGEVTFIFPLSPVQKCVVYKEHPI

SEQ ID NO: 249422 - protein, 193 aa, Glycine max
  Clone ID: PAT_MRT3847_67258C.1.pep
MAAVRLLLFHLLLLLLLFPFSSFSLSENEALLNLKKSFSNPVALSSWVPNQSPCSSRWLGVICFNNIVSSLHLADLSLSGTIDVDALTQIPTLRSISFINNSFSGPIPPFNKLGALKALYLARNHFSGQIPSDFFSQLASLKKIWISDNNFSGPIPSSLTNLRFLTELHLENNQFSCPVPGAQAGIKSFGHVE

SEQ ID NO: 249423 - protein, 69 aa, Glycine max
  Clone ID: PAT_MRT3847_67259C.1.pep
RMLRDMITGQAWMKELCTLIIYSLFCTESGTPDILSSWLTKNFSWISHATLTLILCDKAEAESKEGATP

SEQ ID NO: 249424 - protein, 130 aa, Glycine max
  unsure (1)..(130): unsure at all Xaa locations
  Clone ID: PAT_MRT3847_6725C.1.pep
PLQCRPYQCSQLVENAEECVGLGNEALYEICVRARKRTTPSFGGLSQGGQRTMGGVSMGVRFPGGLNSDLRELAVSLIPFPRVRFFMXGXAPLTSGGAQQDRALTVPEWSQQRWGAKSMRGAGDPGHGHT

SEQ ID NO: 249425 - protein, 88 aa, Glycine max
  Clone ID: PAT_MRT3847_67260C.1.pep
RTINLGNYTLSGPINFNRSRRSTFRSNSNSKHFGVRLIQHASLLARLAAAVPGIVVLLSPQGLVLAAAFVVVASTLVLAAVGAYAAHV

SEQ ID NO: 249426 - protein, 63 aa, Glycine max
  Clone ID: PAT_MRT3847_67261C.1.pep
NCQKHRGRKNHPPYIFRNRLVRHTRETTNLHQCNKANLSEYLTMVAGKNYEPQIHICTRNKKL

SEQ ID NO: 249427 - protein, 96 aa, Glycine max
  unsure (1)..(96): unsure at all Xaa locations
  Clone ID: PAT_MRT3847_67262C.1.pep
MASLSKTALYSNRRSPLYFYFXQNYFPTCSFFHIKYVNIESDIYLHLNKYTFTFFHSQISYLFSHYNNYIKYFNLYISTTHSLVIIYLPNSHCIYI

SEQ ID NO: 249428 - protein, 175 aa, Glycine max
  unsure (1)..(175): unsure at all Xaa locations
  Clone ID: PAT_MRT3847_67263C.1.pep
MEEIQSQSDNYRSSSSSASSPASRVPSSNFFYLRKPGSLRQPISFEDSPEWEDTDIDVRVEEGGDSINVATTPASPSLSKLNSGSLPSPRLPEGAVIPRKIAGASVAWKDLTITIKGKRKYSDKVIKSSTGYALPGTMTVIMGPAKSGKSTLITEPLPEECIXLARMYGEVFXER

SEQ ID NO: 249429 - protein, 88 aa, Glycine max
  Clone ID: PAT_MRT3847_67264C.1.pep
FSLLHLLLLLENFNCSYFLNTIRLLIEHEKPNLREQLTNLHTYRITCKDRPKVVSSACVVRKLVCVDKKVNTSAQLLEKLVILDKHVL

SEQ ID NO: 249430 - protein, 63 aa, Glycine max
  unsure (1)..(63): unsure at all Xaa locations
  Clone ID: PAT_MRT3847_67265C.1.pep
CWSANATAGAGVACTPDSDLEAFSHNPAHGSFAPLAFQPSAMTYCANQRFLSYXVQLLLRHCH

SEQ ID NO: 249431 - protein, 132 aa, Glycine max
  unsure (1)..(132): unsure at all Xaa locations
  Clone ID: PAT_MRT3847_67266C.1.pep
XXSXXXXXPXXHXXTSXHTXXXXXXXXXKXXXXXXXXHXTXXXXTXTXTXXXXXXXXXXXXLXTXXXXHXXXXXPXXXXTXXXQXNHXNNXXSXHXXXXPXQXXXXXXXXXXHTHXXXHXXNXQXTXXXYIX

SEQ ID NO: 249432 - protein, 59 aa, Glycine max
  Clone ID: PAT_MRT3847_67267C.1.pep
PTTLLSHQADRIEHPKPLHHPSATHTRQPPNSTTCIKHCLSDNRPLYKASEQTSRAASR

SEQ ID NO: 249433 - protein, 52 aa, Glycine max
  Clone ID: PAT_MRT3847_67268C.1.pep
LVCLGPPINVNLRLFTGSHGFQLQRKLSKCRYSLKLVNGIYAVPFRCLLAAV

SEQ ID NO: 249434 - protein, 295 aa, Glycine max
  Clone ID: PAT_MRT3847_67269C.1.pep
MFSQCHFLSHSPIPNTTFRLRAMAPHSTPLELNRFAEVGNKVADAAGEVIRKYFRKYFDVIHKHDLSPVTIADQSAEEAMVSIILDNFPSHAIYGEENGWRCEEKNADYVWVLDPIDGTKSFITGKPVFGTLVALLQNGTPILGIIDQPVLRERWIGIAGKRTSLNGQEISTRTCADLSQAYLYTTSPHLFSGDAEEAFIRVRSKVKIPLYGCDCYAYALLSSGFVDLVVESGLKPYDFLALIPVIEGAGGVITDWKGDKLFWEASPLSIATSFNVVAAGDKQIHQQALDSLQWK

SEQ ID NO: 249435 - protein, 85 aa, Glycine max
  Clone ID: PAT_MRT3847_6726C.1.pep
MDFMEVSILHHAGIVLIGLWILSAFNWCHTVAYFVALIYLFLVHERYVTRLRKKLQFEERKQANQRRVVLLVLVWLFDFEGKIVT

SEQ ID NO: 249436 - protein, 259 aa, Glycine max
  Clone ID: PAT_MRT3847_67270C.1.pep
AISSSYTTTSNSLLVFASSSLSSPAKTKFLPSLSRFSVKRLCFLSQTRPHISVNKPSMNLLNRLGFGSARAPENMDSSIPQGPDDDIPAPGQQFAEFGAGCFWGVELAFQRVPGVTKTEVGYTQGLVHNPTYEDVCTGTTNHSEVVRVQYDPKICSYETLLDVFWARHDPTTLNRQGNDVGTQYRSGIYYYTPEQEKAAKESLEQQQKQLNRKIVTEILPAKKFYRAEEYHQQYLEKGGRSGFKQSASKGCNDPIRCYG

SEQ ID NO: 249437 - protein, 265 aa, Glycine max
  Clone ID: PAT_MRT3847_67271C.1.pep
MRICGAAISSSYTTTSNSLLVFASSSLSSPAKTKFLPSLSRFSVKRPYFLSQTYPRIAVNKPSMNLLNRLGFGSARATENMDSSIPQGPDDDIPAPGQQFAEFGAGCFWGVELAFQRVPGVTKTEVGYTQGLVHNPTYEDVCTGTTNHSEVVRVQYDPKICSYETLLDVFWARHDPTTLNRQGNDVGTQYRSGIYYYTPEQEKAAKESLEQQQKQLNRKIVTEILPAKKFYRAEEYHQQYLEKGGRFGFKQSASKGCNDPIRCYG

SEQ ID NO: 249438 - protein, 98 aa, Glycine max
  unsure (1)..(98): unsure at all Xaa locations
  Clone ID: PAT_MRT3847_67272C.1.pep
IPYQLQITIHTLKSNLIKYKYISIKFYTTKHSLLLKSNPLHKKLPLXIHNHKPISXSLIITKYIKQTFNINPIKPSYPHQITYSINLSKFINYNLSNL

SEQ ID NO: 249439 - protein, 217 aa, Glycine max
  unsure (1)..(217): unsure at all Xaa locations
  Clone ID: PAT_MRT3847_67273C.1.pep
MLLKCLAAISSSYTTTSNSLLVFASSSLSSPAKTKFLPSLSRFSVKRLCFLSQTRPHISVNKPSMNLLNRLGFGSARAPENMDSSIPQGPDDDIPAPGQQFAEFGAGCFWGVELAFQRVPGVTKTEVGYTQGLVHNPTYEDVCTGTTNHSEVVRVQYDPKICSYETLLDVFWARHDPTTLNRXQGNDVGTQYRSGIYYYTPEQEKAAKESLEHSRSS

SEQ ID NO: 249440 - protein, 58 aa, Glycine max
  Clone ID: PAT_MRT3847_67274C.1.pep
KMKPFWKKFRDLFCFPFIFFLKGGFFYNFFKLKFWCKMGAKEGCVLPNFLENGTEIFL

SEQ ID NO: 249441 - protein, 55 aa, Glycine max
  unsure (1)..(55): unsure at all Xaa locations
  Clone ID: PAT_MRT3847_67275C.1.pep
QXFXXXXXGTQLXSXPIQNQRSPKXXXRXLXXVGXKQXLNLKKNVILSXSFSETN

SEQ ID NO: 249442 - protein, 44 aa, Glycine max
  Clone ID: PAT_MRT3847_67276C.1.pep
FWPGALGSGMVLIELLLAQTNVSTIVPSGGPALVVFLVSILFML

SEQ ID NO: 249443 - protein, 49 aa, Glycine max
  Clone ID: PAT_MRT3847_67277C.1.pep
HFFKFPQIGASFVKYPLYIARDIRFFSPPQMTFSTLHHIWKPICQNIWP

SEQ ID NO: 249444 - protein, 88 aa, Glycine max
  unsure (1)..(88): unsure at all Xaa locations
  Clone ID: PAT_MRT3847_67278C.1.pep
REPPAKNGEGSEAPQAETETEKERPAHKRGNQPGAQPQRTPPTTPDHDRDPPPGNTRKDARGGGRGPATATPEPGKPTTXGPTDDXGQ

SEQ ID NO: 249445 - protein, 45 aa, Glycine max
  Clone ID: PAT_MRT3847_67279C.1.pep
MSWSLHPRNLILNFYALLFLSSTCVAYVATRDNCCILDERFGSYC

SEQ ID NO: 249446 - protein, 65 aa, Glycine max
  Clone ID: PAT_MRT3847_6727C.1.pep
LGTPPNKKFWFKLTVGNVGKLSIFSLKLLTFDSGTRVSRYCRLCPCAIRSSSFMSHTPILEAAAA

SEQ ID NO: 249447 - protein, 54 aa, Glycine max
  unsure (1)..(54): unsure at all Xaa locations
  Clone ID: PAT_MRT3847_67280C.1.pep
LALLLRSHTTSTNPTXYSHPISSVDYERLRFMSSESKDILIMKMKQKKHTMRGY

SEQ ID NO: 249448 - protein, 60 aa, Glycine max
  Clone ID: PAT_MRT3847_67281C.1.pep
ITILLISSFNLLGKDLIILIPSTSVFHMICLIGSTELLSLWIQIREADIYRLSFAVELPE

SEQ ID NO: 249449 - protein, 62 aa, Glycine max
  Clone ID: PAT_MRT3847_67282C.1.pep
LEHSFSEAICRTMLQNQLPDNKLSSQRMTQHNSSVQYTKSANVFRGKLFCFSNLYPEEKVSH

SEQ ID NO: 249450 - protein, 224 aa, Glycine max
  Clone ID: PAT_MRT3847_67283C.1.pep
IRLEVLLERGIPDTALMVLRWAGRDGGPHLTSLRDGVTAVRVRVECGLLTEAFMHQRVLCTRVKEKNFNKTASGNTSEKQKGQCNKWVEWMEVLVTEICCLCIRRNLVDRMLELPWNSEEEKYIHKCLLDYAIEDPLRTTGNLLVVYYFQRHRYSEAYQVHIKLEKAEQDCISKGSVSQQNLPVLEKAIHFRANLINRCLELLPEVEQQQLKSGNLTERCVTSC

SEQ ID NO: 249451 - protein, 53 aa, Glycine max
  Clone ID: PAT_MRT3847_67284C.1.pep
VGEYCGIYFGFWLQFGLHEMASLVRKLRPTSVPTVTVETLGSLSSYEYSLAVV

SEQ ID NO: 249452 - protein, 48 aa, Glycine max
  Clone ID: PAT_MRT3847_67285C.1.pep
HGNPISMDQFQQMEGFQEFEARRKKKFDKQIDSNVMIGSKGLDEGVDL

SEQ ID NO: 249453 - protein, 69 aa, Glycine max
  Clone ID: PAT_MRT3847_67286C.1.pep
SERCSLMNLFLEMDRILRPEGWVILSDNMGAIEMARTLAAQVRWEARIIDLQNGSDQRLLVCQKPFLKK

SEQ ID NO: 249454 - protein, 45 aa, Glycine max
  Clone ID: PAT_MRT3847_67287C.1.pep
LKYLHFLNGIWGSGLISVFLYFNCLPLILHTLTLTSECLTCALLT

SEQ ID NO: 249455 - protein, 60 aa, Glycine max
  unsure (1)..(60): unsure at all Xaa locations
  Clone ID: PAT_MRT3847_67288C.1.pep
TSPSHPDGIADNIHEVSESELFIIYSQQMCTIEVHNSSHHMCAQCTLSLXCHNKPYPATA

SEQ ID NO: 249456 - protein, 102 aa, Glycine max
  unsure (1)..(102): unsure at all Xaa locations
  Clone ID: PAT_MRT3847_67289C.1.pep
YSCLVFRRLDLQDIASLMEDRSNSKEALSIASRSRLTLDWVPXLTAYDIVPFLDLVLTPGYETHATLAAYLANEDEHEMEVDTLTSAIQTPVKHFMPEQEIY

SEQ ID NO: 249457 - protein, 44 aa, Glycine max
  Clone ID: PAT_MRT3847_6728C.1.pep
EHLTHIDFPHGNVTNQYILVLLKHPTSVRLKQTSKHAHQLCYVK

SEQ ID NO: 249458 - protein, 124 aa, Glycine max
  Clone ID: PAT_MRT3847_67290C.1.pep
MDFRYFIFYCYGPTKFTFPPWERIMSCFSCCEEDDLHKAAESGGPYVVKNPAGNDGNYHASQTAKQGTQPVKPQPIEVPNISADELKEVTDNFGQDSLIGEGSYGRVYYGVLKSGQAAAIKNLD

SEQ ID NO: 249459 - protein, 119 aa, Glycine max
  unsure (1)..(119): unsure at all Xaa locations
  Clone ID: PAT_MRT3847_67291C.1.pep
KKRGGGKGPSGSSNPHKGGRAPKKGVFGGPKPDKGQKPPGGPPGKTGLGGGKXGGSPQPQGKKGGPGGKKNGHPGDGNGVGGAQKKKPPHHPGKRAGGPWPSKNRDPQGGKPKTGRGAG

SEQ ID NO: 249460 - protein, 361 aa, Glycine max
  Clone ID: PAT_MRT3847_67292C.1.pep
MSCFSCCEEDDLHKAAESGGPYVVKNPAGNDGNYLASETAKQGTQPVKPQPIEVPNISADELKEVTDNFGQDALIGEGSYGRVYYGVLKSELAAAIKKLDASKQPDEEFLAQVSMVSRLKHENFVQLLGYCIDGSSRILAYEFASNGSLHDILHGRKGVKGAQPGPVLTWAQRVKIAVGAARGLEYLHEKADPHIIHRDIKSSNVLIFDDDVAKIADFDLSNQAPDMAARLHSTRVLGTFGYHAPEYAMTGQLNAKSDVYSFGVVLLELLTGRKPVDHTLPRGQQSLVTWATPKLSEDKVRQCVDTRLGGEYPPKAVAKMAAVAALCVQYEADFRPNMSIVVKALQPLLTARPGPAGETPN

SEQ ID NO: 249461 - protein, 86 aa, Glycine max
  unsure (1)..(86): unsure at all Xaa locations
  Clone ID: PAT_MRT3847_67293C.1.pep
MKSTIFFALFLFXAFTTSYLPSSIADLALENEGNPLENGGTYYILXDITAYGGTRAAPTVKETYPLTVEHSRDQLNARIGTDHIVP

SEQ ID NO: 249462 - protein, 56 aa, Glycine max
  unsure (1)..(56): unsure at all Xaa locations
  Clone ID: PAT_MRT3847_67294C.1.pep
QMAVTLISPNPDPLGKMGPPFLEAKXRGYWHPSEHNFYKLRRLYSEVEAKIEGVDR

SEQ ID NO: 249463 - protein, 140 aa, Glycine max
  Clone ID: PAT_MRT3847_67295C.1.pep
KRKMNRVSKCIRTCLIAVSDLDMFGFFAVLCLFLFDTSSMPSRAANAGGLPLPKRLMVLILPVRIHGGMGLTFLPTSIYVRQFAAHVLPMSCGAPFLPSVFRKSFCLKFPNYILLIMVVKWASNHEPARLFFRTENRIVS

SEQ ID NO: 249464 - protein, 45 aa, Glycine max
  Clone ID: PAT_MRT3847_67296C.1.pep
SFIKQSFLYAWSVLYPSIKRLQKIYCWENYFSLDLIVQCSIYHTK

SEQ ID NO: 249465 - protein, 641 aa, Glycine max
  Clone ID: PAT_MRT3847_67297C.1.pep
NYSDYLLRNRLMFGFSLHSPFPSSEIYRTLPVRDELLRALLNSDLIGFHTFDYARHFLSCCSRMLGISYQSKRGYIGLEYYGRTVSIKILPVGIHIGQLQSVMSHPETESKVAELKKQFRDQTVLLGVDDMDIFKGISLKLLAMEQLLLQHPDKRGRVVLVQIANPARGRGKDVQEVQSETYATMKRINNAFGRPGYTPVVLIDTPLQSYERIAYYVIAECCLVTAVRDGMNLIPYEYIICRQGNEKIDEILGTDLLTQKKSMLVVSEFIGCSPSLSGAIRVNPWNIDSVAEAMDSALMVPEAEKQMRHEKHYRYVSTHDVAYWARSFLQDLERACRDHLRRRCWGIGFGLGFRVIALDPNFRKLSVEHIVSAYKRTKHRAILLDYDGTMVQPGSMSLTPNAEAVSILNILCRDTKNCVFIVSGRERKTLTEWFSSCERMGIAAEHGYFVRTNRNAEWDTCIPVPDFEWKQIAEPVMQLYMETTDGSNIEAKESALVWNYEYADRDFGSCQAKELFDHLESVLANEPVSVKSSPNIVEVKPQGVSKGIVAERLLLTMQQKGVFPDFVLCIGDDRSDEDMFGVIMNAKATLSPVAEVFPCTVGQKPSKAKYYLEDTSEILRMLQGLANASEHSARILQPASH

SEQ ID NO: 249466 - protein, 30 aa, Glycine max
  Clone ID: PAT_MRT3847_67298C.1.pep
WLSPCFEKEAMVLTFTHTFSLNNKTGICGW

SEQ ID NO: 249467 - protein, 175 aa, Glycine max
  Clone ID: PAT_MRT3847_67299C.1.pep
MKMGKGIVFIVALVAICLGGKWVEAQVHHVVGADRGWDQTSDLVSWSASRVFRVGDQIWLTYSVAQGLVAELKSREEYEACNVSNPINVYTEGLHTIPLESEGMRYFVSSEPENCKNGLKLHIEVLPKADERIIEFSTLTDEAVAPTTPFGSARYGHNTMLMLTVILFVVIGLAY

SEQ ID NO: 249468 - protein, 56 aa, Glycine max
  Clone ID: PAT_MRT3847_6729C.1.pep
SSICTTEGDDYTLDEKLPPCYDREDSNDPKGLEANFLRYINKIRPLAMTHSPVELL

SEQ ID NO: 249469 - protein, 51 aa, Glycine max
  Clone ID: PAT_MRT3847_672C.1.pep
LTTTAYSNQYSSIDIKLAFSSKVPELPIIILTILKSHQAEMIFQIQKGSSM

SEQ ID NO: 249470 - protein, 34 aa, Glycine max
  Clone ID: PAT_MRT3847_67300C.1.pep
NFNMIQAKLQIEVKDLSRYIYFEGLSNFYLLRVI

SEQ ID NO: 249471 - protein, 76 aa, Glycine max
  Clone ID: PAT_MRT3847_67301C.1.pep
MLLVREGERKREMRSMASSASSRGIAAIVGVGPNLGLSIARKFAHDGYTVAILARDLGRLSRFADEIAREEKAQVF

SEQ ID NO: 249472 - protein, 175 aa, Glycine max
  Clone ID: PAT_MRT3847_67302C.1.pep
MKMGKGMIFIVALVVICLGGKWVEAQVHHVVGADRGWDQTSDLVSWAAGRVFRVGDQIWLTYSVAQGLVAELKSKEEYEACDVSNPIKMYTEGLHTIPLESEGMRYFVSSEPENCKNGLKLHIEVLPKADERIIESSTLTDEAVAPTTPSGSARYGHNTMLMLTVILFVVIGLAY

SEQ ID NO: 249473 - protein, 370 aa, Glycine max
  unsure (1)..(370): unsure at all Xaa locations
  Clone ID: PAT_MRT3847_67303C.1.pep
VLWVDVFLICSNAMQYNSSDTIYHRQARAMQEIARKDFENLRQDSDDDSEPQPKIVQKGRPPGKHSRKSLGLGMPPSERVGPESSSDATLASGADIGSGSNGYKFRKVPSKFQPTDSSARAYNSTFNSGGYTGCSDWENEFPASVVKAVLRYGKKQFAVDETRRDTYKNPVTLGNEXRVLSTVEDEFKQLLAVGVHMKHSYARSLAHFAANLGPVVWKIAASKIRGVLPAGHEFGPGWVSEDDGSSQRRHFPVCDEGRTSDPPVPEDYRSRFSSPSGSLPLANRPFYQSGDMAIDNYQNELNPVINIPGGSESITPMRIQQESMVHSDDFGSHDRLGSNFPSQMKMVRLADLTGTSSAGVVPQMFDMDPP

SEQ ID NO: 249474 - protein, 197 aa, Glycine max
  unsure (1)..(197): unsure at all Xaa locations
  Clone ID: PAT_MRT3847_67304C.1.pep
CKQHLWPLFHYMLPLSPDLGGRFDRSLWQAYLSVNKIFADKVMEVISPDDDFVWVHDYHLMVLPTFLRKRFNRVRLGFFLHSPFPSSEIYRTLPVRDELLRALLNSDLIGFHTFDYARHFLSCCSRMLGISYQSKRGYIGLEYYGRTVSIKILPVGIHIGQLQSVMSHPETESKVAELKKQFXDXTVLLGVDDMDIF

SEQ ID NO: 249475 - protein, 96 aa, Glycine max
  unsure (1)..(96): unsure at all Xaa locations
  Clone ID: PAT_MRT3847_67305C.1.pep
SYDHKFKLPSYEQHPYASLDPAFVYDWRILTKAGAXPAALTYYWRMNMPETPRYTLLVAKTAKQAAADMSGVLHLELEAEDENVKISTENESFTYG

SEQ ID NO: 249476 - protein, 80 aa, Glycine max
  Clone ID: PAT_MRT3847_67306C.1.pep
RKLTKKSLMRSWLQRSSSRVLRSIGKALQHSQNLTCVFQIILCLARFLLESYFSILWGDIYLVLKFRIYFYFLAQTPSLD

SEQ ID NO: 249477 - protein, 89 aa, Glycine max
  Clone ID: PAT_MRT3847_67307C.1.pep
FMCLFMCLHGREKIEGDIDREKNNGGPYQGRPYLRIPNPRKYPRHLQSGGRRGTREAHHLRQRSNKVHLPRSRCKRRKRQSHQEPSRLD

SEQ ID NO: 249478 - protein, 98 aa, Glycine max
  Clone ID: PAT_MRT3847_67308C.1.pep
ACNVSNPLNVYTEGLHTIPLESEGMRYFVSSEPKNCKNGLQLPVEVLPKADERIPEPSPFTLTDEAVAPPTPFGSPRYAPHPMLKLPGILFLIIGLAY

SEQ ID NO: 249479 - protein, 146 aa, Glycine max
  Clone ID: PAT_MRT3847_67309C.1.pep
GLGASLAAKETGEERRTVLFVGDGSLQLTLQEIGTMLRRGVHPYLFVLNNDGYEIERQIHGEKAEYNDIQMYDHQALLPFLAGKKSKVPYESIEVHTPEELSKLLKDEAFNKPDKLRLIEVYMPRGDAPAGLVKQAKLTAEANAKV

SEQ ID NO: 249480 - protein, 124 aa, Glycine max
  Clone ID: PAT_MRT3847_6730C.1.pep
SILSSGKFLLEVQQHTSVHAEHVEADYLLIASGSSRQGYTLASQLGHSVVDPVPSLLTFKIEDLCLRELSGVTFPKVKARLKLDSVQRNIPQLTQVVPMLVTHWGLSGTVALPLSALGRSLPAP

SEQ ID NO: 249481 - protein, 88 aa, Glycine max
  unsure (1)..(88): unsure at all Xaa locations
  Clone ID: PAT_MRT3847_67310C.1.pep
GSSNQSGSFRNFGSGQSGAYGDRMSSXSSTFGNLHGGGFGXLGIIQMLTVTTEERLLTSSXWHLEMEKVIWXXEYTFYLXXXLFXWDX

SEQ ID NO: 249482 - protein, 79 aa, Glycine max
  Clone ID: PAT_MRT3847_67311C.1.pep
GISVHTGFIFLTFWKPWQGLFLYADCRNKNDAIEGKLPCGVKVEANSLCPHSFALLMQFFIGDVIVSMSVTVKLQQMYM

SEQ ID NO: 249483 - protein, 55 aa, Glycine max
  Clone ID: PAT_MRT3847_67312C.1.pep
MMTPLAVVILLRSSTLFRMLASIPLYLVTLVAPHDAKRRYSWLCTHQLVGEPSSR

SEQ ID NO: 249484 - protein, 102 aa, Glycine max
  unsure (1)..(102): unsure at all Xaa locations
  Clone ID: PAT_MRT3847_67313C.1.pep
ILTANATQHLLPQMLKKYKTQLCIFIWMRLCSQSLIEALNRTSSTTMXSIARATHSCCRPSCTLSAFRCTSTVHAPMFASLDDVHSDMLERTCSSMTTDLLP

SEQ ID NO: 249485 - protein, 87 aa, Glycine max
  unsure (1)..(87): unsure at all Xaa locations
  Clone ID: PAT_MRT3847_67314C.1.pep
AARNLVVILXLLXXXIPLLKXXRSRXXLDXRYAFSDRIXMDXKPDLHADXXFGLVFHRSDAWRLRSTVQRXAXMFXXLLESVXXKSS

SEQ ID NO: 249486 - protein, 124 aa, Glycine max
  unsure (1)..(124): unsure at all Xaa locations
  Clone ID: PAT_MRT3847_67315C.1.pep
PPPGGGGPPPPPPKGGANNPFSFSPSPKPLKIPPSPFPSSGSQEXPNPPPPGLKKRFPPPPLLKRKFEWGKPPPPENRGPPIPPGKRNFKCKSPVKGKRPAPPKGSPQINGPKKKKRGEEGFSI

SEQ ID NO: 249487 - protein, 91 aa, Glycine max
  Clone ID: PAT_MRT3847_67316C.1.pep
IKKKGGRFFPRVKLLNGKLGWGGAYFAGMGVRGFFLRGTFCKQQLFFVLARGIFPGGISFIFGGAPLKGTKYGNALGPSQPGFEISFFGPP

SEQ ID NO: 249488 - protein, 46 aa, Glycine max
  Clone ID: PAT_MRT3847_67317C.1.pep
RSQQNRPFFGLAQAPVILFCESHLQLQGLCLSDEWQPGPLYPDKAG

SEQ ID NO: 249489 - protein, 65 aa, Glycine max
  Clone ID: PAT_MRT3847_67318C.1.pep
QGRPTRGNTCKTKGLKTGGENKSPITFLTGKRPLNKNNNQTFILFWGLENGGGPFPPQGFNFNTF

SEQ ID NO: 249490 - protein, 46 aa, Glycine max
  Clone ID: PAT_MRT3847_67319C.1.pep
RFAKVVHDRGSDIIIVGRGIIKAVNPEEAAREYRLQGWNAYWAKCT

SEQ ID NO: 249491 - protein, 36 aa, Glycine max
  unsure (1)..(36): unsure at all Xaa locations
  Clone ID: PAT_MRT3847_6731C.1.pep
EVIXRVPSXXTMMXCEKTFVFRDXIRVXVXSKVEKR

SEQ ID NO: 249492 - protein, 58 aa, Glycine max
  unsure (1)..(58): unsure at all Xaa locations
  Clone ID: PAT_MRT3847_67320C.1.pep
MGRSSRCTKEGLYRGAXRAHEDNILRVYMTVHGECRWRHLPKRACVKICGNSYRPRWL

SEQ ID NO: 249493 - protein, 97 aa, Glycine max
  unsure (1)..(97): unsure at all Xaa locations
  Clone ID: PAT_MRT3847_67321C.1.pep
ASTSRXXXKLPRRKIFDKPKTRCFTILPMEFNLVVRQKFLNFVRFIMKKRDKLSCQVGINPYSMEWTGLAXRLLSKANDXSVCDNASLMFDNQPVQV

SEQ ID NO: 249494 - protein, 87 aa, Glycine max
  Clone ID: PAT_MRT3847_67322C.1.pep
ATISTIFVYWKITLNHKLNTLLECDELLQMTEHWIKEHGRGSTFCRRCCTTCLRHMSASGYLYVMNPTLPFNLHIILPSFTSTQYDL

SEQ ID NO: 249495 - protein, 77 aa, Glycine max
  Clone ID: PAT_MRT3847_67323C.1.pep
SLSSSSLILFFIHIISSQSCHIQKYIPALISQKWLGVDARCVMTSGKHLYIVLLCHFRAHHSLPPALSSIQLEALEP

SEQ ID NO: 249496 - protein, 221 aa, Glycine max
  unsure (1)..(221): unsure at all Xaa locations
  Clone ID: PAT_MRT3847_67324C.1.pep
SPATHPLLPPLLTFGIDLGNISDVSGIILXVSPCGYSMADAPIVQIWASSRLHSRERSLMGKWDLQSMIKASSELYGPEKSGTEHKVPRHVKFPFTNSVQCRIIWISLRLQRPGSSSINIGNDFNLLSLDENPFAQETQRASFGGSAESEPCLHAKRILVVGSPIRKEFDLKPQQSSDQLTLTGWLERAPQLSRFKVPIEAAERLMDNDLVLEQYLSPASP

SEQ ID NO: 249497 - protein, 106 aa, Glycine max
  unsure (1)..(106): unsure at all Xaa locations
  Clone ID: PAT_MRT3847_67325C.1.pep
VGLLXAFCCACGPCRRSCVAWVCSLCGLRAFWLSCCRLCRAXLGVGLVFLPLPSLASLFVFLPSGLLGALRFLTRPRPRGRPRGRERRRXRGSSRGFRSGAGLGFP

SEQ ID NO: 249498 - protein, 322 aa, Glycine max
  Clone ID: PAT_MRT3847_67326C.1.pep
LEPRRLEGKTLMGKWDLQSMDKASSELYGPEKSGTEHKAPRPSGPCRVGCPLCFAARCRIIWISLRLQRPGSSSINIGNDFNLLSLDENPFAQETRRASFGGSGDSEPCRYAKRILVVGSPIRKEVDLEPPLCSLLWAMSGWSVGAPLLFGGLVPFVAPCGFANDLVLEQYLSPASPLLAGFRLDAFSAIKPRVTHSPFSDAHSKNFPSLVDDRYITPAVLYIQVSVLQENHSMVTIGQYRLPEARAGTPMYFDFSSQIQTRRICFKLVGDVAAFTDDPSEQDDSGTRISPLAVGLSLSNRIKVYYYADPYDLGKWASLGAV

SEQ ID NO: 249499 - protein, 134 aa, Glycine max
  Clone ID: PAT_MRT3847_67327C.1.pep
VKPLYIRVSRRYGEKLSLNPAAKAPPPPPTAEPEGVSVGGGETNVKSSTQGQKLPAGLSVVCKHLGKSRSASSAEAAAAPPAVFVSSKRRDDSLLQQQDGIQGAILHCKRSFNASRLVETECESSQLPRSVSHQ

SEQ ID NO: 249500 - protein, 117 aa, Glycine max
  Clone ID: PAT_MRT3847_67328C.1.pep
MASRFLSAGIRRFVFGARTLCSSEASRASAFPMPFARKFKFSKQSPLPALQNWVDQGNDVSPFQLRSIARTLVKSKRYHHALEVFEWIKNQKNFHMIPADHAMKLELIIENHGLMES

SEQ ID NO: 249501 - protein, 67 aa, Glycine max
  Clone ID: PAT_MRT3847_67329C.1.pep
TQPYPEFCLLIDWFSLLGTTYYNKSHLYFEIFCGRIRALHLNINFLFPLSRTSTLMLTLKQIWLSIL

SEQ ID NO: 249502 - protein, 77 aa, Glycine max
  Clone ID: PAT_MRT3847_6732C.1.pep
MSKITVLFFTVLFLCCMITHSTRPQPAFHKESLVSTLHQDAEEVDESCEGIKEEECLIRRTLTAHIDYIYTQKHNNP

SEQ ID NO: 249503 - protein, 87 aa, Glycine max
  Clone ID: PAT_MRT3847_67330C.1.pep
ETHPAFVGVQKGGGKNPHKCLQSPPPRWGKLKRTFPPPTFLFFLGPRGCNIPPPRAKNGGCLPGGEFMGFKVPTLFYKKRGVLFFPP

SEQ ID NO: 249504 - protein, 47 aa, Glycine max
  Clone ID: PAT_MRT3847_67331C.1.pep
CGGSPPLVKNVLKCGVYLVFLARNPSLFFYLFFTLYFKQVYVPLDYW

SEQ ID NO: 249505 - protein, 135 aa, Glycine max
  Clone ID: PAT_MRT3847_67332C.1.pep
RLRETTEGVVANGISDLQAHTDNGDHVSFWNPLLSGLSKLTSDPRSAIRKSSLEMLFNILKDHGHLFSHTFWNSIFCSAIFPVYNSVSGKREMNLQEVHCPPSSVSVHTEGSTWDSETYSVAAECLIDLFVTFFD

SEQ ID NO: 249506 - protein, 64 aa, Glycine max
  Clone ID: PAT_MRT3847_67333C.1.pep
ECTGVDVIVRSIMGMSVLSTSPLSSILFPLHPRANRSCRRSGEVTTAGNSRNSDAWADAWADAG

SEQ ID NO: 249507 - protein, 47 aa, Glycine max
  Clone ID: PAT_MRT3847_67334C.1.pep
KKINKSIIPRGHPRVGHIQHKYLEHNYMSSIGLVFLVLKKMKKKTHN

SEQ ID NO: 249508 - protein, 85 aa, Glycine max
  Clone ID: PAT_MRT3847_67335C.1.pep
SQRTFAIMKGEFHTSHLLLVVFICWGWEGGYVSCFLRRHFSLNKQDLIVLACDRQSTLLQCRMSRVNVVVCLFFPHMAWFVLYST

SEQ ID NO: 249509 - protein, 85 aa, Glycine max
  Clone ID: PAT_MRT3847_67336C.1.pep
PKKDPPFSPRLTPPGGPFTPSPVVPPRGGVPPRGGGDQNPPPVGAPKGISKGVPKGGNPKGNLGGASIKRAFFFCEKGFQFFPGF

SEQ ID NO: 249510 - protein, 90 aa, Glycine max
  Clone ID: PAT_MRT3847_67337C.1.pep
FPERWAADAPIEFANDARSEFQPFAMGTRNCIGQNLAHAEMRLIMAKVLFDFDLELDAARMSGKDWFGTQKNFGIWFKDPLWVKWRARKD

SEQ ID NO: 249511 - protein, 63 aa, Glycine max
  unsure (1)..(63): unsure at all Xaa locations
  Clone ID: PAT_MRT3847_67338C.1.pep
KLRRAKDADQKPLTLKIGQGSVTKGXVEGVRGMLPGQGACRRCSPEYAYGAGGLLAWGRPAQV

SEQ ID NO: 249512 - protein, 164 aa, Glycine max
  unsure (1)..(164): unsure at all Xaa locations
  Clone ID: PAT_MRT3847_67339C.1.pep
MGNIDQTRMXKVGERVRSTRPAGDQGPLYPFTAGVFVALMMAQIEILRKKGHSYSEIINESVIEAVDSLNPFMHARGVSFMVDNCSTTARLGSRKWAPRFDYILTQQAMVAVDNGTPINRDLISNFLSDPVHGAIKVCAELRPTVDISVPPDADFVRPELRSSN

SEQ ID NO: 249513 - protein, 69 aa, Glycine max
  Clone ID: PAT_MRT3847_6733C.1.pep
IFFCAVINTLMILYNLSMLSSHIEGPRQRTNMIRWGKLDLLHCKYYVFPLFHKPKNIKWEQTKKSHASW

SEQ ID NO: 249514 - protein, 42 aa, Glycine max
  Clone ID: PAT_MRT3847_67340C.1.pep
KQKLNILYLANFLVLVWIVFSIQEQIRSKYIKGLRKVNQALE

SEQ ID NO: 249515 - protein, 37 aa, Glycine max
  Clone ID: PAT_MRT3847_67341C.1.pep
YENVDISLIIKIALNRHYTTQIEIRSISSVRLKSTKA

SEQ ID NO: 249516 - protein, 48 aa, Glycine max
  Clone ID: PAT_MRT3847_67342C.1.pep
LASELGLSPSVPVHVVLQDWIRHSDGKLSFLGFVRLLHGVSARAFQKA

SEQ ID NO: 249517 - protein, 55 aa, Glycine max
  Clone ID: PAT_MRT3847_67343C.1.pep
AIKIFVGRDIHALNNRVGSQFYIDPSVSSGMHTDTCRNPNFVLRFWIYDSAHDLV

SEQ ID NO: 249518 - protein, 88 aa, Glycine max
  unsure (1)..(88): unsure at all Xaa locations
  Clone ID: PAT_MRT3847_67344C.1.pep
PCSLLGVSLFWCAFLGPSRXGFCPFSLVPRVRCSVSCVSLCSGPPSARRVGRFGPLFFPCGRRCSLSGGSVSSALLSVPPLSRAPPLG

SEQ ID NO: 249519 - protein, 49 aa, Glycine max
  Clone ID: PAT_MRT3847_67345C.1.pep
LAFAKKKKKTLPLSDIWSRLAEVAKIQLLQNWLSWTVPTKLNICRKDMR

SEQ ID NO: 249520 - protein, 140 aa, Glycine max
  Clone ID: PAT_MRT3847_67346C.1.pep
KQPKRSFRDASKQKVMAEKLDTRKDSPMMDGGSPALTSSIVTVIVGSDQRLFAAHEDVLSHSPYFAELLRGQFFESANRRIDLPTEEPEIFSCILEYLYKGDYYPRLVQDKRRQTWMLEGAIASPDPNKPGDRAAAVEPT

SEQ ID NO: 249521 - protein, 149 aa, Glycine max
  unsure (1)..(149): unsure at all Xaa locations
  Clone ID: PAT_MRT3847_67347C.1.pep
EXXXKKEXXEGEEKXXXKXXGXXXXXXXXKXGKXXXXXXXXXXXKXEXXXXEGXXXXGEKXLLCXGXNFRIGVFYWYKXXEXTXXMVXLVXGDGXKXXGXXVXXLDNXGMNYXMVYEXMGVDXGXXXVXXFFGXKXILWVPNLFMENGY

SEQ ID NO: 249522 - protein, 63 aa, Glycine max
  Clone ID: PAT_MRT3847_67348C.1.pep
LVVTAIDNNQDATNTTPHTQQLNSLIILLFLFYYIVILCLCIVSVYFSLLKVSKTHLPRFSSH

SEQ ID NO: 249523 - protein, 72 aa, Glycine max
  Clone ID: PAT_MRT3847_67349C.1.pep
RGLLLFLLGFTATSVDATRFNPSSFITKGDSHHYVKVTYTWCDPECEVCRCDFEWPPNCKCMDNTGFSAYQE

SEQ ID NO: 249524 - protein, 78 aa, Glycine max
  Clone ID: PAT_MRT3847_6734C.1.pep
RMNVPIDVIMGRVVFSPDFPTNLGSGLFTMNSFSKVPGQVKIFNFIKTHVVVKKNCPPPFNISPPAIKNQSCKRKVNP

SEQ ID NO: 249525 - protein, 84 aa, Glycine max
  Clone ID: PAT_MRT3847_67350C.1.pep
SFNLTLSPISNSRVFSRLSNSGKENDSRSLWPTQRVTLIPLIIRSQNSRPKFRDSLNQASIAFVSAFEVRHPVIPADQNFRTNK

SEQ ID NO: 249526 - protein, 274 aa, Glycine max
  unsure (1)..(274): unsure at all Xaa locations
  Clone ID: PAT_MRT3847_67351C.1.pep
GELGTGPPATVSTVGAVXRALLNLNGSGAGASAPSSAFFGTXLNXXIAXRVPNSXVXGGSFKIVAXEXXKXIXXTHQTDKDRWXGXAYDXSHDXQDXTRGKGLVDSLFQAPQDAGTHYAXXXSYXYLNTGLRQYLDNKMDGFYIAPXFMDKLVVHISXNFMTLPXIKVPLILGIWGGXGXGKSFQCDLVFAXMGIXPIMMSAGELEXGNAXEPAKLIXXRYREXADMIXXGKMCALFINXDLMQELXXLXGTPXYPVNQDGMPLLMKHCLINPP

SEQ ID NO: 249527 - protein, 96 aa, Glycine max
  Clone ID: PAT_MRT3847_67352C.1.pep
LLADTMAPIDKRCLFSRAAAAQSCAYPRRGGCPLIHSLGDGQYSQNHCYKHPGPQRHISSQMKRKTKRLTMTTIPISEQAETGKLTLQDSYTDSVL

SEQ ID NO: 249528 - protein, 306 aa, Glycine max
  Clone ID: PAT_MRT3847_67353C.1.pep
MASNQDCSANIHGSSSVCIDNLDASETSTSFVVQLGRNEADNKDACMRYWDFEKWMRKECLNFSVLSAMKFGKKWCHQLQSICDLCLHAYFSGGAPCSSCCRTFSACKSNPSSSKHIVHSEGKVKIDIDCFHASSSLSLRIRLLKILLSIVEVTLPLEALQPLWRDSCRKSWSTKLDASSSSEDLLQILTALEGAIKREYLDSNYETTFELLGLFSASGCHTKDSIDGERMSVLPWVPYTSAAVALRLLQLDACIFYTSQQKLESEKDKKIGIVMKLPSKHASARKSYNAGAIETSHQAERAVELG

SEQ ID NO: 249529 - protein, 333 aa, Glycine max
  unsure (1)..(333): unsure at all Xaa locations
  Clone ID: PAT_MRT3847_67354C.1.pep
GSAFGNTQIPNSEHLQRPTSSDPLDDARQARKRSSDWKARKTYQDRRLIYIVKSFIMVAGEVLILDYSIMGFLPFPQLSPVHASKEPEKSMQEIAQGLIGSIMSVKVILADEDNKKLILSEKEAAWTKYSKQANVXGDIFEVRVGYVEDYGAFVHLRFPDGLYHLTGLIHVSEVSWDLIQDVRDILKVGDEVRAKVVGIDWGKSRINLSIRQLEEDPLLETLDKVIPQDGSADPDSMSGGDSGSIEPLPGLETILEELLQEDGIYDVRISRQGFEKRVVSQDLQLWLSNAPPTNQRFTLLARAGRQVQEIHLTTSLDQEGIRRALQRVLERVP

SEQ ID NO: 249530 - protein, 40 aa, Glycine max
  Clone ID: PAT_MRT3847_67355C.1.pep
FNYNINNYTLSPNLIKKKNKIVYHPLINFFTTQLIPNLYL

SEQ ID NO: 249531 - protein, 63 aa, Glycine max
  Clone ID: PAT_MRT3847_67356C.1.pep
RQGFEKRVVSQVLQLWLSNAPPTNQRFTLLARAGRQVQEIHLTTSLDQEGIRRALQRVLERVP

SEQ ID NO: 249532 - protein, 575 aa, Glycine max
  unsure (1)..(575): unsure at all Xaa locations
  Clone ID: PAT_MRT3847_67357C.1.pep
ELSESIRYASGDPIESWLNSLLCLDASNTIPNISRLPPPSECDLYYVNRDTLFSYHRDSELFLQRMMALYVASHYKNSPNDLQLMADAPAHHLFVLLGPVDESKNQLPDILCVIQVSLEGQISRKSAIQSLTDGHQPFGDQIPWKFCEQFRDTVFPSLSGARIVRIATHPSAMRLGYGSQAVELLIRYYEGQLIPISEIDVEDKVQAPRVRVTEAAKQVSLLEENIKPRTDLPHLLVHLRERQPEKLHYIGVSFGLTLDLFRFWRKHKFAPFYIGQIPALVDDLNSGTKQKPLNNDEIEADGSNQLGFFSPFYQDFRQRFAKLLASTFRVMEYKLALSIIDPKINFKNQDPSHKSDKKRSKDNHNHKSKQKENIVGLTMGRTTQDKTMIISGIVVNGQIERDRNPPTRSSVHILHKFQVQDSXYSYIEGQTNLERQTILSLFIKVMKKFYKYLDGLASKEIESTLPRLKEIVMEPHSVSLDEDLNNAAKQVEDDMKSKAEATFTPELLQQFAIEGESGFETVLQNNGGKIPIGGLISVKSSKVKHEKEKGSHKSDKKRSKDNHNHKSSKRKTLLD

SEQ ID NO: 249533 - protein, 103 aa, Glycine max
  unsure (1)..(103): unsure at all Xaa locations
  Clone ID: PAT_MRT3847_67358C.1.pep
MSGGFARGRLTVELKLWRQNHTHGFDALPESLPGGTVNLTVWHCTLPGKTGTDXEGGYCPITLHYKDDYXGTSFKCACPQGFFHPNVYPSGTDCXTILNEDSG

SEQ ID NO: 249534 - protein, 81 aa, Glycine max
  unsure (1)..(81): unsure at all Xaa locations
  Clone ID: PAT_MRT3847_67359C.1.pep
SCCFNSVSQVVRGRSSXTPGKGKSSQSSVKYGHSLVKGKANHPMXDYHVAKFVQFKGRELGLFAIYDGHLXDSVPAYLQKH

SEQ ID NO: 249535 - protein, 79 aa, Glycine max
  Clone ID: PAT_MRT3847_6735C.1.pep
LFFVAHFTQGAPRVVIGPVLEAALCSAICVASRSPSFLRGSGHASLIKWLPGFFFLLLLLGLPAMAPLVNLVPMLVLTL

SEQ ID NO: 249536 - protein, 129 aa, Glycine max
  Clone ID: PAT_MRT3847_67360C.1.pep
EVVNEDEYLRVFPRGIGPTLLGARTESSRQTAIVIMHHMKLVEMLMDVNQWSNMFCGIVSRAVTHEVLSTGETIRYDGACQVMSAEFQVPSPLVPTRDNYFIRFCKKHQGQSWAVVDFSMDHLRPGAIT

SEQ ID NO: 249537 - protein, 89 aa, Glycine max
  Clone ID: PAT_MRT3847_67361C.1.pep
KGRNLELCKRKTISCGEGKLEKISKKKKKPNPKGKRQKPRKKKKKLTQIHWLSGPVQNLKRRKPAMANLEKKEKGPTAKGKKKLFGAPR

SEQ ID NO: 249538 - protein, 58 aa, Glycine max
  Clone ID: PAT_MRT3847_67362C.1.pep
HCYLISHRRHERYSMTPYVTASSLYQATTRQTITQIHLHLAAQPSSSDRTLDSYDTMI

SEQ ID NO: 249539 - protein, 87 aa, Glycine max
  unsure (1)..(87): unsure at all Xaa locations
  Clone ID: PAT_MRT3847_67363C.1.pep
QRPQHCVTSTSSSMAATSTSLDSQLYIGMRTPCLKLYSFNSQSFSVLXPNLRLSLSPPRHSRAIVAMARTGKFFVRANWXCNATKDS

SEQ ID NO: 249540 - protein, 43 aa, Glycine max
  Clone ID: PAT_MRT3847_67364C.1.pep
GINITKSMYLYMERWRFMSYRDGDKQEWLGQSIYISIIFWIPI

SEQ ID NO: 249541 - protein, 95 aa, Glycine max
  Clone ID: PAT_MRT3847_67365C.1.pep
MKILVVLTSHDQLGDTGRKTGFWLEEFAAPYFVFKDAGVEMTLASPKGGQPPLDPKSDDPDSQTEATRRFKNDNEVQAALANTAKLSTVSAADYD

SEQ ID NO: 249542 - protein, 49 aa, Glycine max
  Clone ID: PAT_MRT3847_67366C.1.pep
GGLGGGHSDAYCKLGDANKWFHFNEGHVSPVFESSINSSNAKAFFSQKK

SEQ ID NO: 249543 - protein, 154 aa, Glycine max
  Clone ID: PAT_MRT3847_67367C.1.pep
MAFRKTLAQRLLNITKVSSQALTNCRISSSSVIGRVSPRADEPVDPGENGLFRAPQLAGNLLDRLRTMGVAHNRIRLDGLTPPPQIKMVDTVTVKDARKLLKVAQVDMVKAKLRETRKSCITFSEFIAICAEHCSDQDQAVEIAKMLDDSAAVI

SEQ ID NO: 249544 - protein, 44 aa, Glycine max
  Clone ID: PAT_MRT3847_67368C.1.pep
FISCGDLSTPAGPCPLAWLKPEAGATPTDVIGAESRVVLTDTAQ

SEQ ID NO: 249545 - protein, 108 aa, Glycine max
  unsure (1)..(108): unsure at all Xaa locations
  Clone ID: PAT_MRT3847_67369C.1.pep
TYVDKNLLKSKECDGTKGFQLPDMIRASFAENQPFSKAAEVPKGYFADYVGERMTRIGIPISYDTQYLFKDLLNQSDEELGYDHXMGGFTIPCCEHGFHNITYSLNGL

SEQ ID NO: 249546 - protein, 68 aa, Glycine max
  unsure (1)..(68): unsure at all Xaa locations
  Clone ID: PAT_MRT3847_6736C.1.pep
RILLSSDGEMLSSMNLLLYMAPITVVMPLPARLIMXEDAACITYALVXYDVKNIRYLLFTSALGYFVN

SEQ ID NO: 249547 - protein, 72 aa, Glycine max
  Clone ID: PAT_MRT3847_67370C.1.pep
YSSSSYLIALNDKVGPHYPSMYQDLIKDNRTTEIDYINGAVSKLGKENHIATPVNDFVTNLVHAKENQRGAQ

SEQ ID NO: 249548 - protein, 67 aa, Glycine max
  Clone ID: PAT_MRT3847_67371C.1.pep
TLTLKHQKTNTLKSLIEHIKYNFHFQIFFSTFLQKNLQTPKNIFHNFSTFYLCNFLTLIFFTNTLPF

SEQ ID NO: 249549 - protein, 48 aa, Glycine max
  Clone ID: PAT_MRT3847_67372C.1.pep
TLRTAHKRQKRRQINQTETPTATAEVADKQGSEPLQTTQQEETWTNNS

SEQ ID NO: 249550 - protein, 78 aa, Glycine max
  Clone ID: PAT_MRT3847_67373C.1.pep
PASGRGEIKLGEDMGMGGLGRNIHKQNMLFLPYTSHTTVFPLFLPLPLLSAAFPHLNLPSHLIIVMVMISLFFYFFFH

SEQ ID NO: 249551 - protein, 212 aa, Glycine max
  Clone ID: PAT_MRT3847_67374C.1.pep
DSVSNPGHPFSSGVTLAKLAAVTMDEEGNETFDTSGALDRLRKSVHLERLALYHDSNQLPWEIDKRWADINPQEWIEIFEDGINEPTGDHKLVPKWARNRTYLVYPINAVLQYHRLGNQERVNPDIPFEKVTLVLTDISLTLTEAQYHDWIKLLEAVSRYKTYMEVSHLRPVVPISKAPYLWWQYAAQAVLQKQQKWYLEFFILLNKSSTFL

SEQ ID NO: 249552 - protein, 113 aa, Glycine max
  unsure (1)..(113): unsure at all Xaa locations
  Clone ID: PAT_MRT3847_67375C.1.pep
CLSVRSKESWTSSSDAARTNLSKRACNRLQKELAERRDNPPTGLRHKVTYNRQRRGVEVTGPPXGALSAYETYHFQVDFTGNYPMEAPQAIFLFPVPGIPYLQFRRHLLRNMG

SEQ ID NO: 249553 - protein, 123 aa, Glycine max
  unsure (1)..(123): unsure at all Xaa locations
  Clone ID: PAT_MRT3847_67376C.1.pep
MMEFLSSCLFVSFDLILAYIGVELTMMHNMTDYAFPYLSHILPKYTVEFVXLMMDKIECXNEVKAXKEHEHNDVIALHNMYAQLLPLAWPAPPMPDMGGFTSSPPMCGLGMPLMPPYGMPPMG

SEQ ID NO: 249554 - protein, 50 aa, Glycine max
  Clone ID: PAT_MRT3847_67377C.1.pep
FLMLPRARLKRGHLTVVWVSSNPLLNNILKTTRCTSNNGPSIYCIYNTPS

SEQ ID NO: 249555 - protein, 91 aa, Glycine max
  Clone ID: PAT_MRT3847_67378C.1.pep
QKRTSKLMQSSKVRQVINGENATNSSNTAEAKSPRLQKKFGLERRSPPTSPSSDLSSNRRQQNRQSVELSSPSTTPRQKFSEISNQRRDFK

SEQ ID NO: 249556 - protein, 68 aa, Glycine max
  Clone ID: PAT_MRT3847_67379C.1.pep
VIREPIDNIIITIVYKCLLNLRTSALHKVQTRAYSPPPCSSAGSSSFGRGHVKIISTEFILLHYMSKE

SEQ ID NO: 249557 - protein, 77 aa, Glycine max
  Clone ID: PAT_MRT3847_6737C.1.pep
LRTSGNPSSTTVATGRTPSVTLDNHHHHHHGSIRSTHTMLHFLLTCLRSRSAVCTHIHDLTSYRRWYRFSLYSVLVY

SEQ ID NO: 249558 - protein, 114 aa, Glycine max
  unsure (1)..(114): unsure at all Xaa locations
  Clone ID: PAT_MRT3847_67380C.1.pep
VFIHLLLSIVFFLLLPFFSGFTAPAFXLSSALAVGNPSVLXISSITFCLLYTVYPTAIDPKNGNLRIISLIAIWLHCLALTFLLSGVFSSSVHQPLLTLVPAVDTWIYTNHWIY

SEQ ID NO: 249559 - protein, 67 aa, Glycine max
  Clone ID: PAT_MRT3847_67381C.1.pep
VHNLLPLPFNINIYIINSEYNPILLLINFYKKISPMIFDNFFSFYSHFLFIKLKLKDLILKIKFNIT

SEQ ID NO: 249560 - protein, 135 aa, Glycine max
  Clone ID: PAT_MRT3847_67382C.1.pep
MNPPPVGLQDNRNRNNTNSHRPGNFNPNVPLSGPATNYVHGNTDQLWSNNSNLQGNHQIPYSQPLRPNNFPLQPPFAPSNSYTPNSHTFPTSMVPPRTGGPNFTSGPHTNVPDIGNLNISGYPNSVHNHQLFHTG

SEQ ID NO: 249561 - protein, 106 aa, Glycine max
  unsure (1)..(106): unsure at all Xaa locations
  Clone ID: PAT_MRT3847_67383C.1.pep
SKLLTSLDIVGTFRLQNQIVFDKGPRVTFIPRFINNLAPKLHAELLXLLKKHFEGATXYPLFKIKDVPPLVCFCVGPYAXIGMCLPKHGEDDLSFLCFAYAFKQVK

SEQ ID NO: 249562 - protein, 33 aa, Glycine max
  Clone ID: PAT_MRT3847_67384C.1.pep
LVGVLSNGFWSPVSLIFKPNFRPQVNKILYPLL

SEQ ID NO: 249563 - protein, 267 aa, Glycine max
  Clone ID: PAT_MRT3847_67385C.1.pep
MADDSKHKRSSSCVSITCIKDADILETSKFLDQECYLNVKSNYKSHRMEKKSSSLDFITESIANDFLNMLAMESGSFGSSCDGDPKSPREKLLREFEEEALASGNFTFDFIANEEELGTGTVVDSYGDCTVDSDLSLFIQAAEEEHARENQLLMQRRKAKILEDLETDSLMQLWGLNEKDFENSQGTYSGGFGSPIELPNEESSVLPSIGQGLGSFVQTMGGGFLRSMSPSLFRNAKNCGNLITQASNPVVLPAKMGNDILRILQAC

SEQ ID NO: 249564 - protein, 352 aa, Glycine max
  Clone ID: PAT_MRT3847_67386C.1.pep
MRCFGFIVIGLVVVLGGLPFSSNAKLEPCFYKKTCPQVHFIVFKVVEKVSRTDPRMPASLVRLFFHDCFVQGCDASILLNNTATIVSEQQALPNNNSIRGLDVVNQIKTELEKACPGVVSCADILTLAAEVSSVLAHGPYLKFPLGRRDSLTANRTLANQNLPAPFFNLTQLKAAFAVQGLDTTDLVALSGAHSFGRAHCFFILDRLYNFSGTGRPDPTLDTTYLQQLRQICPNGGPNNLVNFDPVTPDKIDRVYFSNLQVKKGLLQSDQELFSTPGADTIPIVNRFSSDQNVFFDAFEASMIKMGNIGVLTGNKGEIRKHCNFVNKKSVELDIATVASEESSSEEGMVSSI

SEQ ID NO: 249565 - protein, 77 aa, Glycine max
  Clone ID: PAT_MRT3847_67387C.1.pep
CRLFKRYSAAKLDPAMMRTGYPSIDIRSKPFRYAWLSGPRGIRRASSLLVYPGAFFQEGLEHMYQLISVSYEDTIIQ

SEQ ID NO: 249566 - protein, 312 aa, Glycine max
  Clone ID: PAT_MRT3847_67388C.1.pep
IILLFLFSQHEPEGVVEYLFRPRKLEALIGFLENEENANVQIAAAGLLANLPKSERELTMKLIELGGLDAIISILKTGKMEAKENALTALFRFTDPTNIESQRDLVKRGIYPLLVDFLNTGSVTAKARAAAFIGDLSMSTPKLTVVPKPTGCWLFRSSRVPLCSAHGSVCSVNTTFCLLEAKALPGLIKLLHGEVHATACEAIQTLSTLVLEDFPQRGARVLHEYNAIRSIMDILNWGTDSLKAEALGLLEKVFVSKEMVEYYGTTARSRLIGLTGMNIYGDGHLRRKAAKVLSLLERYSKSSSSAISGVPE

SEQ ID NO: 249567 - protein, 66 aa, Glycine max
  Clone ID: PAT_MRT3847_67389C.1.pep
GHSKSSHMALVLALLLWILYLSDHVIFSSFQSSSPSFLNLLLEHRIQRLFIFFMLHTFIMSSANYT

SEQ ID NO: 249568 - protein, 56 aa, Glycine max
  Clone ID: PAT_MRT3847_6738C.1.pep
MADVDVEPEAAAGAPKKRTFRKYSYRGVDLDALLDMSTDDLVQLFPARARRRFQRG

SEQ ID NO: 249569 - protein, 77 aa, Glycine max
  Clone ID: PAT_MRT3847_67390C.1.pep
HRNPISPNVHQYCAYTAVRWTGGVEFPAHSQKKVSMALQFMKASTLVWLKKVTGIQRHFLKTKDAAITLYIPPRVMR

SEQ ID NO: 249570 - protein, 56 aa, Glycine max
  Clone ID: PAT_MRT3847_67391C.1.pep
TLEVITDLTIPKAPDTMRISNYMVKRGPEYTANNRIHLQPAAIKAGSYNHTLLKSP

SEQ ID NO: 249571 - protein, 53 aa, Glycine max
  Clone ID: PAT_MRT3847_67392C.1.pep
ISNQFEKVLFALRKYFLFSLYLLISKVSTVKDDFLLFSIFTFSCIYIRKQGTK

SEQ ID NO: 249572 - protein, 44 aa, Glycine max
  unsure (1)..(44): unsure at all Xaa locations
  Clone ID: PAT_MRT3847_67393C.1.pep
LLIVSFNQFYLISCVSQKCRXSLCIELGKYCKKRLFLFCYGFFM

SEQ ID NO: 249573 - protein, 294 aa, Glycine max
  unsure (1)..(294): unsure at all Xaa locations
  Clone ID: PAT_MRT3847_67394C.1.pep
MLKASSLSFLVAMPSATASFGFFFCRQRLSSSFPFPPRPRLLSTTPTPYPLQYELIINRPSYPDSPRPPPARPIDSPEPELNKAQRKYYNKRRKRMYGSDEDESRRPDETFVELKPEVVDFPTLHKREEELYFYDAFTYPWEKDKHYKMVYQLEKKYFPDQCLDKAFLQPGQSNANANANANGKGKGRKKVVGGGGGEEKLVFFEEGNVEEKAEESGSGSRQLKEKKVEDFFKGLKKDPSPSLNKDVQVGEPFLSSRRTGLPPVWDTPHGTVLLVNKPXGWTSFTVCGKLRRLV

SEQ ID NO: 249574 - protein, 65 aa, Glycine max
  unsure (1)..(65): unsure at all Xaa locations
  Clone ID: PAT_MRT3847_67395C.1.pep
XSIXKVMXSAAANFXXFCFRLXSXQFXXTCXXISXRXSXLRXXEFVXXXLESVXSSRIPSLRTRX

SEQ ID NO: 249575 - protein, 71 aa, Glycine max
  Clone ID: PAT_MRT3847_67396C.1.pep
GCGFCDTYSHPLVFLSFIFIHQKQYVNCIKLNGIYLFDCLVWNLILLFFWLVWIWYLCQRDICVIRRYIIR

SEQ ID NO: 249576 - protein, 122 aa, Glycine max
  unsure (1)..(122): unsure at all Xaa locations
  Clone ID: PAT_MRT3847_67397C.1.pep
LSFFLPSFFQIIDLYVIYAVFTALIQVXYMALVGSFPFNSFLSGVLSCVGTAVLAAQHGTYKPATYIGINLVLVFLIIXILLHFGPVCLKIQVNKDNKEFKDLAPERAFAEFVLCKLGLHLG

SEQ ID NO: 249577 - protein, 98 aa, Glycine max
  unsure (1)..(98): unsure at all Xaa locations
  Clone ID: PAT_MRT3847_67398C.1.pep
KQQMMGPRPPTVEEARKGASGVEAQKRGKSLFVRAVFERRGPPQRSPSGEACTKEQGRKRRQGLQGXQAHGQGQEKHRIFCFLVANPEYGGANQDSGS

SEQ ID NO: 249578 - protein, 78 aa, Glycine max
  unsure (1)..(78): unsure at all Xaa locations
  Clone ID: PAT_MRT3847_67399C.1.pep
XXXLXXLXLXXXSXXXSEXXXXXXXXXXXVXPXXSXAXXXXXXXXXVASXXXXXXAXXRXXLAGXCFXAXXXXXXXXX

SEQ ID NO: 249579 - protein, 70 aa, Glycine max
  Clone ID: PAT_MRT3847_6739C.1.pep
RTSFVNTISNGDIMKRYKAHHCSPTNLSHGRFIHRDAVIVSSHGPMSVLSPAVTIQERSPTLAETCRKCI

SEQ ID NO: 249580 - protein, 76 aa, Glycine max
  Clone ID: PAT_MRT3847_673C.1.pep
ILAAESISSSCIKYIHAVHSALQIATDMVVIRALSFLFPIFIQWFFLYMHQQGWTGADALVERPLRLRLLLEFRHL

SEQ ID NO: 249581 - protein, 135 aa, Glycine max
  Clone ID: PAT_MRT3847_67400C.1.pep
FVFFMFFFFFLFLFSFFLFFFYRHLSLYDYNQAVRFKNQTFGPLYDCYKYNLPTSPIFFLFLPPVPKGFRPQTPRPLLRSAVLAAVGSKWNPFSRNIVIEEPRDVSKESCYHGGGSERTVHLLHVPATMIGEGPL

SEQ ID NO: 249582 - protein, 76 aa, Glycine max
  unsure (1)..(76): unsure at all Xaa locations
  Clone ID: PAT_MRT3847_67401C.1.pep
LYCPRCMQLHLYTWKKSVFLYFICSTSCMFVLSAFCLXGVKKGDGFGEPRGRPNLREGRDRNCASTCHHYRQFHHF

SEQ ID NO: 249583 - protein, 100 aa, Glycine max
  Clone ID: PAT_MRT3847_67402C.1.pep
LESEFVALRFLEVIPKLSKLKRLNVSLGFKVLDESNVESVNVFVSKLKDTLAERKNHQLNCNVFYRKLKNVNVEDIDLPRSTRCMVQSCYTQYIRDLYYS

SEQ ID NO: 249584 - protein, 160 aa, Glycine max
  unsure (1)..(160): unsure at all Xaa locations
  Clone ID: PAT_MRT3847_67403C.1.pep
MDPEGKKFGGGPRELTGAVDLISHFKLLPHYEFFCKRPLPVSIADTHYLHNVVGDTEIRKGDGMQLDQLIQNXISFRDTNARIQPFDLDVLKEAFQLRETAPIDLPAAEKGIPTIAGKSKSENKDKEKKHKKHKDKDKDKDREHKKHKHRHKDRSKDKGQ

SEQ ID NO: 249585 - protein, 157 aa, Glycine max
  unsure (1)..(157): unsure at all Xaa locations
  Clone ID: PAT_MRT3847_67404C.1.pep
QYVYGKQTLNWKAFGIPVVDRLYSVTNGSDLRNLYLKWFYPFQNPIEEALENCLVSKETEEDAETEVTTPSLGSNVNELDTPSDGGMEFYVTDEKGTIKNSKILMNEPLAINGDLRLLHVLVCXSEEQLKIYDTQLCSSLPEVFKSGFLAKRLQESV

SEQ ID NO: 249586 - protein, 126 aa, Glycine max
  unsure (1)..(126): unsure at all Xaa locations
  Clone ID: PAT_MRT3847_67405C.1.pep
YDYAKMQDCEGVLPDQECLIFAXSXLEDGRTLSDYNMQNESTLLLVLRLRGGMQIFCKTLTGXTITIXVDSSDTIDNVKAKIHDNEGIRPDXLRLIXAGXQLHDGRTXLSDSTFQKEXTLQLVLRL

SEQ ID NO: 249587 - protein, 61 aa, Glycine max
  Clone ID: PAT_MRT3847_67406C.1.pep
DDRKGEHLRAAGSKLASVIVCRTSGLSEVLKCRPEKMRVHMQLSTFMKMVTMLLLTRIAPW

SEQ ID NO: 249588 - protein, 75 aa, Glycine max
  Clone ID: PAT_MRT3847_67407C.1.pep
LPPHQSGRFQSKIGTRGLNVVIMMTPPIIIKRIRKRIVLPMMEVRVNPLMMMKGAVIGLGQIPQIITTANFFPIN

SEQ ID NO: 249589 - protein, 80 aa, Glycine max
  Clone ID: PAT_MRT3847_67408C.1.pep
VETNVRYFSPCYSAAQVVFYSSRLIELYHPSFSAYHLESFIDAVSLYGSRVLFLLFLIRVFWVSSSFGFLCRVGLSLGLL

SEQ ID NO: 249590 - protein, 33 aa, Glycine max
  Clone ID: PAT_MRT3847_67409C.1.pep
YLLRDSGTTYQKCFQTGSRRERARRPSWLKPRM

SEQ ID NO: 249591 - protein, 59 aa, Glycine max
  Clone ID: PAT_MRT3847_6740C.1.pep
MILLKDIVPAAQNNIDTKFIILDKGKTTVEGQNKICLALVADATAAIHFQFWGDQCDAF

SEQ ID NO: 249592 - protein, 104 aa, Glycine max
  unsure (1)..(104): unsure at all Xaa locations
  Clone ID: PAT_MRT3847_67410C.1.pep
ISITHAKSFRMARDRFKDGFVHDLKLKLILDRVKDDRIYNMSQVYEVAALIEGDADRVXKRYIILESQNGQLQRLDDFHAXYSGLXYLLLFSYVKDGYRHDVPN

SEQ ID NO: 249593 - protein, 47 aa, Glycine max
  unsure (1)..(47): unsure at all Xaa locations
  Clone ID: PAT_MRT3847_67411C.1.pep
YSDIIATALFRGFAPYDPDCYYVTVASIARFIYMIRXLGIGTFQMIY

SEQ ID NO: 249594 - protein, 48 aa, Glycine max
  Clone ID: PAT_MRT3847_67412C.1.pep
LGVLLLFFPIGFPCHFHNEICLDSNSRRCLKFLFKGLCPASVPNGHIK

SEQ ID NO: 249595 - protein, 632 aa, Glycine max
  unsure (1)..(632): unsure at all Xaa locations
  Clone ID: PAT_MRT3847_67413C.1.pep
MGAPLSAWPLENFGTYKYLLYGPFVGKVLYEWFYGEEHSYYNLSWCLHLLILSGLRGLIHVLWGSYSHMFFLTRNRRIVQKGVDFKQIDKEWDWDNFLILQALVASMACYMFPFLQHLPLWNVKGLIVALVLHVGWGWKTFYXKHPNLRVRVVXSDHHSLHHSSPVPESFTAGNATLLEHLIMTVIIGIPILGASLMGYGSASMIYGYVLIFDFLRCLGHSNVEIVPHQLFEKLPFLRYVIYTPTYHHLHHSDKDTNFCLFMPLFDSLGNTLNKNSWQSHKLLSSGSGNGDMVPHFVFLAHIVDVSSSMHAQFVYRSFASLPYTTRFFLLPGLPITFLVLLAMWAWSKTFLVSFYYLRGRLHQTWVVPRCGFQYFLPFATEGINNQIEQAILRADKIGVKVISLAALNKNESLNGGGKLFVDKHPNLRVRVVHGNTLTAAVILNEIPQDVKEVFLTGATSKLGRAIALYLCQKKVKVLMLTLSTDRFQRIQKEAPPENQSYLVQVTKYQAAQNCKTWIVGKWITPREQYWAPRGTHFHQFVVPPILSFRKDCTYGDLAAMRLPEDVEGLGCCEYTMDRGVVHACHAGGVVHSLEGWSHHEVGAIDVNRIDLVWEAALKHGLRPVSSFTQKEN

SEQ ID NO: 249596 - protein, 95 aa, Glycine max
  Clone ID: PAT_MRT3847_67414C.1.pep
GFITVLLFNEGVIPKSFLLWGGIENSDTSNSRKVARCWQPQTRDRVIELNIILRKPSFFPGSLEPYKKFLTLHSHLQLFKAHVEVALLNICKHCL

SEQ ID NO: 249597 - protein, 127 aa, Glycine max
  Clone ID: PAT_MRT3847_67415C.1.pep
PTRPTRIPSYPQVSLVDQYFFFFCWLAVRIKFKWLWPQLSGLTLHRSFGGSPKKREHATRVNSFGGLKAINGGVSLGLPMSTEKCFAKVVSSAKAATSNGKGKGGGALSSTCNAAGEIFTIAAIING

SEQ ID NO: 249598 - protein, 168 aa, Glycine max
  Clone ID: PAT_MRT3847_67416C.1.pep
MGDAENALPPTKKRAAGRELTRDTPIDDEEDAPELETGTFKRASEEVLATRRMVTIRRKQTNSAPSANPFAGIRLVAPTESCDNPAEITTEVQSAGENAVSHDSKSDEGIAKDSKKAEDGKTKQSEFKSDEAEDKPTEGKDAAEERHANKEHTEEKESSDDKSEVDKE

SEQ ID NO: 249599 - protein, 105 aa, Glycine max
  unsure (1)..(105): unsure at all Xaa locations
  Clone ID: PAT_MRT3847_67417C.1.pep
VXXRRRXAQYRHXVSXXWKXXKLXTXXLXLXFXXVVGRQWDAVTXAKPLLVTVXFAFGYXAFLPXRXSXNRXRXESVXMXPLGQXHSXXNXWAGPPLXRHCPXXR

SEQ ID NO: 249600 - protein, 158 aa, Glycine max
  Clone ID: PAT_MRT3847_67418C.1.pep
FRYPGTRYTWEHFCDMTDAGVLAQQHVWAAVTPNAKNQAFNCTNGDVFAWKTVWKLLAELFDVEFVAFDESHKFDLAELMHDKGSVWEEIVEKYELHNTKLEEITCYEALQTVLHFKFQHVSAMNKSREHGFFGHVDTLKSIRFWVKKLRQMKIMPSY

SEQ ID NO: 249601 - protein, 77 aa, Glycine max
  unsure (1)..(77): unsure at all Xaa locations
  Clone ID: PAT_MRT3847_67419C.1.pep
LVRTYPWATFLCGTCNAKVHXRHSRVALCEVFEQASAHVTCKAVAAMLCLACRHQRIPVAPFFESVLPRWPSLLLRR

SEQ ID NO: 249602 - protein, 139 aa, Glycine max
  Clone ID: PAT_MRT3847_6741C.1.pep
MILLKDIVPAAQNNIDTKFIILDKGKTTVEGQNKICLALVADATAAIHFQFWGDECDAFDSGDIICLTNGIFSYQHGNLILRAGKRGKLVKVGGFTMAFVETPNMSEIHWIPDPNNSKNYIQQYVISPVSRIFPPPSDI

SEQ ID NO: 249603 - protein, 108 aa, Glycine max
  unsure (1)..(108): unsure at all Xaa locations
  Clone ID: PAT_MRT3847_67420C.1.pep
NLLHLHALTDNEGALLRYLIVISTFICTLVCYIEREGFSIENTVDDDSAKLNQSSKGTILSTFYYRYACSQTPGGWAAQKIGGRRVLILSFLXETLTWALLLLDPKRV

SEQ ID NO: 249604 - protein, 98 aa, Glycine max
  Clone ID: PAT_MRT3847_67421C.1.pep
LEPIVQIPEATLIFMIIIYENGHKRLNLSPIDKNIQPIIQMHIKKNVRKRICTLKYSTYNSNIMVPSLINKKEIKVLHFLGSLDYKFLSIVCMKKNIY

SEQ ID NO: 249605 - protein, 77 aa, Glycine max
  Clone ID: PAT_MRT3847_67422C.1.pep
EAKVFCWCIRLCNIFGKGRHSLWNVVRPKYIPVFSLNLIREYLCRLFQSNFCNSRIVCLDPWDGVSYSIKMEGSSYR

SEQ ID NO: 249606 - protein, 135 aa, Glycine max
  unsure (1)..(135): unsure at all Xaa locations
  Clone ID: PAT_MRT3847_67423C.1.pep
MLREDISQENQDGAFEELWKLKVPXKIAAFAWRLLKDRLPTRINLXKRQIEMVESSCPFCSLVEESAGHLFFQCSKIIQVWWESLSWVNLVGVFPHHPRRHFLQHIHEVTRGMRANRWKWWWLAIIGLPILVQDF

SEQ ID NO: 249607 - protein, 68 aa, Glycine max
  Clone ID: PAT_MRT3847_67424C.1.pep
TIELRKRTGPTWFADRPRNVSLTQSDNLYRIHFNEKLKSLRCTWTELGPSSKCILTLDNRTWGKTTLV

SEQ ID NO: 249608 - protein, 57 aa, Glycine max
  Clone ID: PAT_MRT3847_67425C.1.pep
EQLKLFGLGHAKINFYTILAAKFFSNNLSPSYSNFFFHYVGSFIFGYQQIIIHNLML

SEQ ID NO: 249609 - protein, 121 aa, Glycine max
  Clone ID: PAT_MRT3847_67426C.1.pep
EKIKKKKKKKKKGEKKKKRGKKKKKKKKKKKNKKKKKKKRGGPPLCGLVPPGFFSGPVLGGVPFFLFGGRFRAGGNQGLGCFLGEIVFRSHFPPPSGPGALGVNPGGPIGWPTSLYLGGAP

SEQ ID NO: 249610 - protein, 57 aa, Glycine max
  Clone ID: PAT_MRT3847_67427C.1.pep
KLNLFLNMWLFFMRPPTKGSEAALSGSRLYSFLTQPIPRKGQMLFRVQKIKQIMLNP

SEQ ID NO: 249611 - protein, 242 aa, Glycine max
  unsure (1)..(242): unsure at all Xaa locations
  Clone ID: PAT_MRT3847_67428C.1.pep
ELRDECSQLKVDLEEKIKSLEVIVSENSELKAQLEQMTXKANKAEAENKMLIDRWMLEKMKDAERLNEANALYEEMVEKLRASGLEQLARRQVDGIVRQSEEGAEFFLESNIPSICKYRLRAHEGGCASMLFEYNSSKLITGGQDRLVKMWDANTGSLSSTLQGCLGSVLDLTITHDNRSVIAASSSNNLYVWDVNSGRVRHTLTGHTDKVCAVDVSKISSRHVVSAAYDRTIKVWDLVKGY

SEQ ID NO: 249612 - protein, 68 aa, Glycine max
  Clone ID: PAT_MRT3847_67429C.1.pep
GIVKNTLRPHVPERCDSEWRKLMEECWSPDPESRPSFTEITGRLRSMSMALQAKGNHQTYQLRPGGAS

SEQ ID NO: 249613 - protein, 92 aa, Glycine max
  Clone ID: PAT_MRT3847_6742C.1.pep
ARDCPQPSIPNSTPHFLSLHSSSSPFSALQLFRFLLRFFLSIRVSILFSFSLFRFPEQPSYARVATICYPSLLFVACLFNYSLKQCYICLRQ

SEQ ID NO: 249614 - protein, 153 aa, Glycine max
  Clone ID: PAT_MRT3847_67430C.1.pep
NSARGRTGPWNGRVFLGSPRMSTEYLYGWRFEPNDSGTAYLTYNFENPSMFGVLTISPHGTLKLVEFLNKKIFLELEVDQNKCDLYGTCGPFGSCDNSTLPICSCFEGFEPRNPEEWNRENWTSGCVRNVQLNCGKLNNTSDVQQDRFRVSKI

SEQ ID NO: 249615 - protein, 74 aa, Glycine max
  Clone ID: PAT_MRT3847_67431C.1.pep
GPRGEWSPLILLFFPPLYQVRNLLKETQPGFTARFDPFMLWMPNQFFFVTPSHNLRGLGSPIMVRILFTVYIWV

SEQ ID NO: 249616 - protein, 144 aa, Glycine max
  unsure (1)..(144): unsure at all Xaa locations
  Clone ID: PAT_MRT3847_67432C.1.pep
FVLVGTEHDGYEPSFGGIQQYSTPMMPLDEEILSKVAQNMVEEWFDRVDEEDSFAEVFLSAVLNGVEGWDHMERPPLATCEGYPHVLSRKNGEKGTRLFVSGDGEXMPLIPGPSVEQAYHQLIFELDQTCPTLXGIEWFKDVKL

SEQ ID NO: 249617 - protein, 108 aa, Glycine max
  unsure (1)..(108): unsure at all Xaa locations
  Clone ID: PAT_MRT3847_67433C.1.pep
STLNLIHWNADMKGYAMHAMAGETMEMFHMMLLSAQNPDLVTFTXVFYHACALYGLTEQGRRXYNSMYQEHGIAPXMEHYACLATLLTRDRKPEDAYCIINETPFAPD

SEQ ID NO: 249618 - protein, 55 aa, Glycine max
  unsure (1)..(55): unsure at all Xaa locations
  Clone ID: PAT_MRT3847_67434C.1.pep
PLEPPLFFFFFXXXXREDMVSDLRMNVVHSGEDYALXVLPKNSSVFIFLKISTTF

SEQ ID NO: 249619 - protein, 64 aa, Glycine max
  Clone ID: PAT_MRT3847_67435C.1.pep
KEGENSALIICSNSVGKRSHSPSVTDKFFICQICTLSLWEREATPLPNALLLLYLFLPSIHPLH

SEQ ID NO: 249620 - protein, 38 aa, Glycine max
  Clone ID: PAT_MRT3847_67436C.1.pep
LIPECTYRMHNSIIHLMPVQCLFLLLSSKPKNIRSTLL

SEQ ID NO: 249621 - protein, 77 aa, Glycine max
  Clone ID: PAT_MRT3847_67437C.1.pep
LSFIPALQSCVICIFAVSFLDVGGSSLESELCYFCSLKCWWRYRGTRSLRDLQEYLPARISPGAKVARDSGRSCRVR

SEQ ID NO: 249622 - protein, 60 aa, Glycine max
  Clone ID: PAT_MRT3847_67438C.1.pep
SFQGCRIPCTISQIVTSHLFNSSSTTSTICWLIRWDLSGYPKMGEIGQSRFTNHRRRLFQ

SEQ ID NO: 249623 - protein, 65 aa, Glycine max
  Clone ID: PAT_MRT3847_67439C.1.pep
FIKNYVYFFYKKLKIMLLAPPVTKLPLFYIPHQFSRDQYQYKLAMQKAYFIIGNIKQWKGPSILY

SEQ ID NO: 249624 - protein, 152 aa, Glycine max
  Clone ID: PAT_MRT3847_6743C.1.pep
MRFRLLKETTSENMILLKDIVPAAQNNIDTKFIILDKGKTTVEGQNKICLALVADATAAIHFQFWGDECDAFDSGDIICLTNGIFSYQHGNLILRAGKRGKLVKVGGFTMAFVETPNMSEIHWIPDPNNSKNYIQQYVISPVSRIFPPPSDI

SEQ ID NO: 249625 - protein, 40 aa, Glycine max
  unsure (1)..(40): unsure at all Xaa locations
  Clone ID: PAT_MRT3847_67440C.1.pep
XXARAKSAEVLTLKRGNKWGGELQGGGGGANTNTYTKLDE

SEQ ID NO: 249626 - protein, 123 aa, Glycine max
  unsure (1)..(123): unsure at all Xaa locations
  Clone ID: PAT_MRT3847_67441C.1.pep
LAKRLNQILAQHIMAALPGLGARISTSLVADAKEYASYGEITECKAGQAALLLNILXKYWEAFSFMVEGNNEEISTSELFGGARIHYILQSIFVRSLEEVDPCEDLADDNIRTAIQNATGPKL

SEQ ID NO: 249627 - protein, 50 aa, Glycine max
  Clone ID: PAT_MRT3847_67442C.1.pep
SRIRQKEEKKKKRGTNLSASEVQQPTLEFLAQVERESTMRDIRRETYSFP

SEQ ID NO: 249628 - protein, 207 aa, Glycine max
  Clone ID: PAT_MRT3847_67443C.1.pep
MVKHNNVIPNGHFRKHWQNYVKTWFNQPARKTRRRLARQKKAVKIFPRPTAGPLRPIVHGQTLKYNMKVRAGRGFSLEELKAAGIPKKLAPTIGIAVDHRRKNRSLESLQANVQRLKTYKAKLVVFPRRAHKVKAGDSTPEELANATQVQGSFLPIVREKPTVELVKVTDDMKAFKAYYKLRLERTNKRHHGARLKKAAEAEKEDKK

SEQ ID NO: 249629 - protein, 242 aa, Glycine max
  unsure (1)..(242): unsure at all Xaa locations
  Clone ID: PAT_MRT3847_67444C.1.pep
YGELICKHLNRPGVSFCFQLENEAKINSIEIFKRPTATSEAINFVASDQGGGVDVFDVEKTFQFSHFQFPWPVKHASSSPDGRQLVVVGDDPEGRLVDSESGSTIQSFRGHFGCSCSSAWHPDGNMFATGNTDRTCRIWDVRNLLQPVAALEGNATAISSISFTSDGRFMAMCEDVDFVHVYDVQXAFRREQEIDLFGHVSGLSFXSPDTEYLFIIVSIDTVPTLXSYQRRNRIYHYLDSMN

SEQ ID NO: 249630 - protein, 75 aa, Glycine max
  Clone ID: PAT_MRT3847_67445C.1.pep
RFDLLLIILSVGGCATSNLRPNNEKILVPFRRHGASSNIHSIYAHKKTNKKKKGRRPTNNQLDPAVIYAAAAPAG

SEQ ID NO: 249631 - protein, 38 aa, Glycine max
  unsure (1)..(38): unsure at all Xaa locations
  Clone ID: PAT_MRT3847_67446C.1.pep
LLMIVFSCDNCYVCVICKFKSYNNYLIXIFLFLFFLCV

SEQ ID NO: 249632 - protein, 62 aa, Glycine max
  unsure (1)..(62): unsure at all Xaa locations
  Clone ID: PAT_MRT3847_67447C.1.pep
DSIVVMAMSTXGNSXTTGHLXYKXGGIDKRVIERFEKEAXEMNKRXFKYAWVLDKXKAERER

SEQ ID NO: 249633 - protein, 67 aa, Glycine max
  unsure (1)..(67): unsure at all Xaa locations
  Clone ID: PAT_MRT3847_67448C.1.pep
TPSPFLFLRGPQRESLPKPPKWEVLQTPLNXETRGSKVLFPTCSKRVASPMQSNKASQLEQFHEDHC

SEQ ID NO: 249634 - protein, 110 aa, Glycine max
  Clone ID: PAT_MRT3847_67449C.1.pep
KKTNEAGKQKITKFCGNEQTPTKPTHLRRYLNRVPSQRPKKKSNRSIWPAHNQNQIIIFFPSKGTNHKKISHGKRVNLLTQTPGEEGSNKSRGGIACFAYGEPCGGRLGG

SEQ ID NO: 249635 - protein, 170 aa, Glycine max
  Clone ID: PAT_MRT3847_6744C.1.pep
LKKKKKFKKKKKKKKKKKKKKKKKKKKKKKKKKKKKKKKKRGRPLKRTQVNVPGLARKKLFKGAPKIKSTARGLTPGGRENPGGTPTKSPGRKSPFPQLGKNQKAPTQSPFQKVAHPEGQREPPLKRPINPGGGGGSPQGNRNIGKALSPRSLGFFPFFSAKVGGFPPKA

SEQ ID NO: 249636 - protein, 47 aa, Glycine max
  Clone ID: PAT_MRT3847_67450C.1.pep
SSLYNYTFLLYACPTIAIAKLKGMGPPFKGNIFHLKTNNLTRKFLVH

SEQ ID NO: 249637 - protein, 171 aa, Glycine max
  unsure (1)..(171): unsure at all Xaa locations
  Clone ID: PAT_MRT3847_67451C.1.pep
MEFWPEFLASSTGKEFVAGGFGGTAGIISGYPLDTLRVMQQSSNNGSAAFTILRNLVAKEGPTALYRGMAAPLASVTFQNAMVFQIYAVLSRAFSTSVSVNDPPSYKGVALGGFCSGALQSMLLSPVEXIKIRLQLQNTGQSTEPQKGPIKVANNIWKREGLRGIYRGLGI

SEQ ID NO: 249638 - protein, 344 aa, Glycine max
  Clone ID: PAT_MRT3847_67452C.1.pep
MGLISASVPMNIVPQFGSLRTPIRVGNPSGLSFLRKRNNGFVCFAVDDELRQKQQDLSTTATGLGSALEERPGNTDLFESTTEETQGNFRQDGDPGPIYDFLYPDKELLPDDKEMSIFDHLEELRQRIFVSVLAVGASILGCFAFSKELIMILEAPVKSQGVRFLQLAPGEFFFTTLKVSGYCGLLLGIPVILYEIIAFVLPGLTKAERRFLGPIVLGSSVLFYAGITFSYLVLTPAALNFFVTYAEGAVESLWSIDQYFEFVLVLMFSTGLSFQVPVIQFLLGQLGLVSGDQMLSIWRYVVVGAVVAAAIVTPSTDPLTQVLLAAPLLGLYLGGAWMVKLTGR

SEQ ID NO: 249639 - protein, 114 aa, Glycine max
  Clone ID: PAT_MRT3847_67453C.1.pep
MEEIVFGTDLTLLLLLTSVSCTEFIYNTNFNSTNTLLHGNATIESSILTLTISSTFSVGRAFYPFKIPTKPSNSSTPLPFSASFIFSIAPFKDLLPGHGFVFILTPSAGTTGVN

SEQ ID NO: 249640 - protein, 275 aa, Glycine max
  Clone ID: PAT_MRT3847_67454C.1.pep
MEEITKNLSGTSLLVPSVQELAKEKISNVPQRYIQPQHEEDIVILSEEANSSLEIPVIDMQSLLSEESGSSELDKLHLACKEWGFFQLINHGVSSSLVEKVKLEIQDFFKLPMSEKKKFWQSPQHMEGFGQAFVVSEDQKLDWADLFFMTTLPKHLRIPHLFPQLPLPFDNAFPIYSQPNAFVVNVGDILEINTNGTYRSIEHRATVNSEKERLSIATFYSPRQDGVIGPWPSLITKQTPAQFKRIGVKEYFKNFFARKLEGKSNRDALRIEHHN

SEQ ID NO: 249641 - protein, 86 aa, Glycine max
  Clone ID: PAT_MRT3847_67455C.1.pep
VFFYCGMTQKSAPNVQLDECLQCEHSWLASTQSKKQDQYLEDSLVPFPDTSIHFSSPLTPPFTCPHLLTHCAPGNHPGYSHHCLVG

SEQ ID NO: 249642 - protein, 99 aa, Glycine max
  Clone ID: PAT_MRT3847_67456C.1.pep
SFIPHSEYINVTTSTTIFFKHYLNQQYVFSNGLFNVQRSNDKNPDPKFHHSFQFLNRKPDSCRGYNIASQLQACFSLTLTQYVRILLAYRRQSLESEWR

SEQ ID NO: 249643 - protein, 42 aa, Glycine max
  Clone ID: PAT_MRT3847_67457C.1.pep
GDEVIGTDGVVMGGGIVETGVKKALGLEWGMDDGKEKESLRN

SEQ ID NO: 249644 - protein, 128 aa, Glycine max
  Clone ID: PAT_MRT3847_67458C.1.pep
MTMVFKNTNQLEESMDSTYDRKAEVKAFDDSKAGVKGLVESGLTKIPRMFHSGRLDIIETSVSDSKFGIPIIDLQNIHSYPALHSEVIGKVRSACHDWGFFQVINHGIPISVLDEMIDGIRRFHEQDT

SEQ ID NO: 249645 - protein, 61 aa, Glycine max
  Clone ID: PAT_MRT3847_67459C.1.pep
NPMAASELENLLLLPSKQRNRTHDAQTATGTLPAFMNPILKATANMKSAHTGYYNCPSTHL

SEQ ID NO: 249646 - protein, 348 aa, Glycine max
  Clone ID: PAT_MRT3847_6745C.1.pep
SARKAGSWKRTQDVIQRIRARRKAQLALLEQLESLTQLEWPRLPCKSVPWALHTPLCNLGSWSPVRLPPVLRESSSPAVIDKEEHIQEPMDADVIERSGATKAEPQSITEDGELPTLLPKVSKLDLSAQLNLISKSIIPPLNKIRSQSFKKIDDSSDFLLDIESDIDEPAQIEQEHEKSNYHARKSVSWMNYGLKEFRLVLCRKISADESKLNLEAKIKISMEYPLRPPLFALSISCISSGENHDETGLEWYNELRAMEAAVNLHILKMLLVNQQNYVLAHQVNCLAMLFDYYLDEASPSSERTNCTSVVDIGLCKPVTGRFLGRSFRGRDRRKMISWKDMKLNSSCP

SEQ ID NO: 249647 - protein, 48 aa, Glycine max
  Clone ID: PAT_MRT3847_67460C.1.pep
TKKKNNCKMQNFKRAPLHTFILYHYLMHRSLMISKKIKYYSPHYIYIL

SEQ ID NO: 249648 - protein, 77 aa, Glycine max
  Clone ID: PAT_MRT3847_67461C.1.pep
FLFIFPLVFLWKIKKLFIIKIKIGSLMIGSGPSKFIPNKFPLPNDIVGTRGLSVFFSQWLYKTSQRVLQTLVLPYFI

SEQ ID NO: 249649 - protein, 87 aa, Glycine max
  unsure (1)..(87): unsure at all Xaa locations
  Clone ID: PAT_MRT3847_67462C.1.pep
RSGRTAYVARTRSIDTGTVQENIMEPXPVNRHRHIXVVRECHMKSVLDMMAHDDHTEIVEHGMNLPEGQKQNIHMVYAVDDDYNLYV

SEQ ID NO: 249650 - protein, 58 aa, Glycine max
  Clone ID: PAT_MRT3847_67463C.1.pep
LQLQLLHFPFIHLEEAGLLNLQKMKESAKFPRTKTVREKEGKVSRQPSHGEILTRRSL

SEQ ID NO: 249651 - protein, 63 aa, Glycine max
  Clone ID: PAT_MRT3847_67464C.1.pep
MKVYMKSAKTAFNVAGLVAYSGLPSAMVLIGIILNCRSRLFLGQVNAGSSLELPEGLVQPGNS

SEQ ID NO: 249652 - protein, 57 aa, Glycine max
  Clone ID: PAT_MRT3847_67465C.1.pep
RHVSTLVPTQQRVEICVTGPNVVSDTGCNREVETDALLKGVNGKAEPEIPAAHQLPR

SEQ ID NO: 249653 - protein, 100 aa, Glycine max
  Clone ID: PAT_MRT3847_67466C.1.pep
HTCPKNRLAHLTSTELQSTGHLLTTKLLGNLQRHDIYTQMTRIPLTTCWLICEEDQSLLMFQKVPNLNAQWDAHSKHQLSTGGSLPPLLTPAKLTHSIIP

SEQ ID NO: 249654 - protein, 52 aa, Glycine max
  Clone ID: PAT_MRT3847_67467C.1.pep
SSPFFFFLLEWVPNGYNFIYNLARVFKLTFLFKSRYRDAFLMDALQLQIKVL

SEQ ID NO: 249655 - protein, 198 aa, Glycine max
  unsure (1)..(198): unsure at all Xaa locations
  Clone ID: PAT_MRT3847_67468C.1.pep
MNRRTTLLVRTLLFLFVLNSFSLFLYFITHKASSSPSSSLQLKKPRTYLTPLSHQTHFSKPWPILPSYLPWSQAPTTAPPRSCEAYFGNGFLRRRDLLLSRGGAGWFRCRHSDTLRSSVCEGGRLRMVPERIAMAKGGEDLSAVMGRREEEELPPFQNGAFEVDGGEIVDREFLVDKKFLDEYVPRXGIDRHTMRDLI

SEQ ID NO: 249656 - protein, 312 aa, Glycine max
  Clone ID: PAT_MRT3847_67469C.1.pep
MQKGKHVELMLNRRVKMVKAKTNSDYDETEVDISLSHRLNAVKPSKTLSICHHATALLQADFDSPDVIAEAGMNATREGYTRYTPNAGTLELRHAICRPAIFALTIIQVIIPAPFYTSDPEIARLADATPVILPSHISNNFLLDPKLLEASLTERSRLLILCSPSHNYAPTTHTSFASLPGMWDRTPTVNGFSKTFAMTGWRLGYIACPKHFVAAFGKIQSQFTSGASSISQKAGVAALGIGYAGGEAVSTMYSIDHHHLATLHKKFALVLGSAFGDDSCIRISYDESLTNLKTTMERIKKALIPLSSDALV

SEQ ID NO: 249657 - protein, 35 aa, Glycine max
  Clone ID: PAT_MRT3847_6746C.1.pep
SRSVLKSGCVLGNKVFQISGPQDFKVWIFLSQWFP

SEQ ID NO: 249658 - protein, 442 aa, Glycine max
  unsure (1)..(442): unsure at all Xaa locations
  Clone ID: PAT_MRT3847_67470C.1.pep
MANALHNAAISRVMFGDQYSISRCVVPSLSTLPLRAMHKGKHVELNRTVMVVKAKTNSDFDDSDVDISLSHRVNAVKLSKTLSICDHATALLQAGVPVIRLFFGESDFDTPGAIAEAGMNAIREGYTRYTPNAGTLELRQAICHKLKEENGITYSPDQIVVSNGAKQSIVQAVLAVCSPGDEVIIPAPFYVSYPEMARLAHATPVILPSHISRSVYSKKLLEEIAQIVAKHPRLLVLSDENYEHIIYAPATHTSFASLPGMWDRTLIVNGLSKTFAMTGWRLGYIAGPKHFVAACEKIQSQFTSGASSISQKAGVAALGLGYAGGEAVSTMVKAFRERRDFLVESFREMDGVKICEPQGGFYVFLDFSSYYGREAEGFGVIENSDSLCRYLLDKGLVALVPGXAFGDDTCIRISFAESLTTLKTAVERIKKALIPLSSSALV

SEQ ID NO: 249659 - protein, 109 aa, Glycine max
  unsure (1)..(109): unsure at all Xaa locations
  Clone ID: PAT_MRT3847_67471C.1.pep
SLIIISAMDIXNVCLFSTMAVYTVATLSGEALDPHGATSHVYNDDGSNPMWHYRVKFSVNESLANENRLSLEIKRVSDRNLSDIVICSVHVPLRELMDNRGDDSSFRHI

SEQ ID NO: 249660 - protein, 71 aa, Glycine max
  Clone ID: PAT_MRT3847_67472C.1.pep
HHSLAAYGAYVRPMPYSNEIGLRMLIGGVAREAALLGYHITPLFSYYAFHGPVFRVLLRLNRGKIHDRRNY

SEQ ID NO: 249661 - protein, 59 aa, Glycine max
  Clone ID: PAT_MRT3847_67473C.1.pep
TVLSLILPELGDVSHTGTGEPSISNAKNCVKTTNSSSVIPPTPETNTMPHCAASCIYYF

SEQ ID NO: 249662 - protein, 81 aa, Glycine max
  unsure (1)..(81): unsure at all Xaa locations
  Clone ID: PAT_MRT3847_67474C.1.pep
RXWIPGADPPFRPPFRPPFLFFTLGVFWRGKRLILEGGCLPKGLFNPLLAWLTRKAHCWSPKWFPNGNVRSNQWGVFSIIV

SEQ ID NO: 249663 - protein, 61 aa, Glycine max
  Clone ID: PAT_MRT3847_67475C.1.pep
SDTLFGMSYNFVIIFVIVKYFLRQLRECRQEVSNQIKFLCLLLFFIRRNLCCVFTIICRYV

SEQ ID NO: 249664 - protein, 117 aa, Glycine max
  Clone ID: PAT_MRT3847_67476C.1.pep
PPFRGSPPLFRQFPGTPLGGVGPQPRLNSPPFEPGFKRFKNPRGVFSVGILGGVFFLGVLVVPPQYFFANFPGVFFLGNFFAILGGPGPILGGLIFGNFPRGALFPGPFFFLGETLK

SEQ ID NO: 249665 - protein, 278 aa, Glycine max
  Clone ID: PAT_MRT3847_67477C.1.pep
VTGLDLDCGPFLAVHTQNAVKKGLLSEADVNGALVNTLTVQMRLGMFDGEPTAHPYGHLGPKDVCKPAHQELALEAARQGIVLFKNTGPVLPLSSQLHRTVAVIGPNSKATITMIGNYAGVACGYTSPLQGIGTYTKTIYEHGCANVACTDDKQFGRAINAAQQADATVLVMGLDQSIEAETVDRASLLLPGHQQDLVSKVAAASKGPTILVIMSGGPVDITFAKNDPRIQGILWAGYPGQAGGAAIADILFGTSNPGGKLPMTWYPQGYIKNLPMTN

SEQ ID NO: 249666 - protein, 53 aa, Glycine max
  Clone ID: PAT_MRT3847_67478C.1.pep
GNVLKFGSISLKLRCCYERESKYGYLRPSMRFYHVFFSLICIFYILIFYLYFY

SEQ ID NO: 249667 - protein, 58 aa, Glycine max
  unsure (1)..(58): unsure at all Xaa locations
  Clone ID: PAT_MRT3847_67479C.1.pep
KLSVSGLSLVPYPPTSYQCFQRDVPLVFPSYEILESREYRXESSLTRTETSLRVGIQN

SEQ ID NO: 249668 - protein, 132 aa, Glycine max
  unsure (1)..(132): unsure at all Xaa locations
  Clone ID: PAT_MRT3847_6747C.1.pep
YKKVAPFFVLECLYRFVYEAYGFVPHDYFYFHEHRXVFLLSLSPLKFFCVPEPFPPLLSLGFLPFWVQICTIGYLCDRQHHRRHQIEFAMKRIGETFVFFVQCCRGCVSAYVCQCQDPSFSPKNFPVNLHLY

SEQ ID NO: 249669 - protein, 181 aa, Glycine max
  unsure (1)..(181): unsure at all Xaa locations
  Clone ID: PAT_MRT3847_67480C.1.pep
TLGEPPGFLHSWWCVFWDLYCAAPDRREACEHSGEAKAFQDYSAAAAPSPVMGSMAPGDTMAAGSMAAGFFQPFMSPRFPGGPRPTLRMPSQPPAGLPGSQPLLPGAMEPSPRAQGHPSMGGPMQRVTPPRGMASVGPQSYGGGMRPPPNFLAGPGLPAMNMXGPGVRGPWASPSGNLIPY

SEQ ID NO: 249670 - protein, 132 aa, Glycine max
  Clone ID: PAT_MRT3847_67481C.1.pep
MAVFSTKQLSTSTLTTTFIIFFVRSEFTGHGSLRVSPSEFIGSVTTVGDVLQNVTSILKSELRSVKNDFHLPDAAVSTCLDLLDLSADELSWSISAVQSSQGNDNSTGNLSSDLRTWRSAVLANTDTCMRVW

SEQ ID NO: 249671 - protein, 136 aa, Glycine max
  Clone ID: PAT_MRT3847_67482C.1.pep
MFKRIMKGGQKKPSKTDPSDPSPLAPAAAGAAAAPALVVPPPSGTIEPLPLFRDVAVSERQNLFIRKLQICCHVLDFSDTLKSVREKEIKRQTLMELVDFIQSGSGKITETCQEEMIKMVSANVFRCLPAASHENT

SEQ ID NO: 249672 - protein, 64 aa, Glycine max
  Clone ID: PAT_MRT3847_67483C.1.pep
VDPRVRLNVPNLELSVGMGGVWTIIACLFYEPIVYIKGSWHEHDHDKSHYYNQTIFLSKSDIFF

SEQ ID NO: 249673 - protein, 74 aa, Glycine max
  Clone ID: PAT_MRT3847_67484C.1.pep
FYKTSFGWDSPTLYTLSPRPSFTCRLKLTTRGRGGPFQDFAGRQVGISTVGPRVGIQRASIFMFISSNRSLTVA

SEQ ID NO: 249674 - protein, 80 aa, Glycine max
  Clone ID: PAT_MRT3847_67485C.1.pep
SDAVTFAHDVKLWRGPYADEIHIASSSSSTNRITKKRSRPLYSPILVPKPPNQPKQKQTNPWKIKEIRNPPNRVSHLSNL

SEQ ID NO: 249675 - protein, 96 aa, Glycine max
  Clone ID: PAT_MRT3847_67486C.1.pep
NAPFTGLVFPDKTLAIYHVDKVLIPLDFSKPRPPGLVSPLAKAPKADKDNSSADDDGQGEFNKAPFAANSLHLISLRGTMLVSLGVALVAAVTFSI

SEQ ID NO: 249676 - protein, 66 aa, Glycine max
  Clone ID: PAT_MRT3847_67487C.1.pep
FLRFTSALVVLGSLQWVVLHLLTTVGKKCIWWVQLQNHQRLEDIMRWMKCNINWFICIRTKIKSPR

SEQ ID NO: 249677 - protein, 118 aa, Glycine max
  Clone ID: PAT_MRT3847_67488C.1.pep
VTMEKNKSDDILLDDWEDALLEQLIQTEEQFVLTSTAPKPPTNPTSSSYSFSLALPPPLPPPPPSPPTSAVSFSPPREFSQRPTTSITLDSPSPTPIPICDNKDLEIDRLKRELEHAT

SEQ ID NO: 249678 - protein, 74 aa, Glycine max
  Clone ID: PAT_MRT3847_67489C.1.pep
MYNMAQNYVPTWSCDHMTYLSGRYHIQLHLDKYTATGFQSKGEYLSDHFTHDINMVPENSPGTCTALYSSSQNA

SEQ ID NO: 249679 - protein, 273 aa, Glycine max
  unsure (1)..(273): unsure at all Xaa locations
  Clone ID: PAT_MRT3847_6748C.1.pep
FLPGSFFARSYSFPLSLSFSFGFFFCSTVSIPSFLYAMSFSLLRLACLFGIRIALTVIYTWTELIRTSISFHVNIILRMITWTFGLISLPARVVNAFQRERQLEQKLHEMHIELENLVWDKKELQEHFQMDCQRSTRRIEIXLAELKEEHDMAIEKIEKLEGKLQDQTNENLRLKEIQGKRYWSSKDQSNSDRVQTINDSNYNISHPILSLNSNYNGSGISLQDLIMCKDIWEDESKTRSELLKLLKAVPKSGPVVKSKTSEALDYHRDVALS

SEQ ID NO: 249680 - protein, 60 aa, Glycine max
  Clone ID: PAT_MRT3847_67490C.1.pep
HSSSSSVLSFSIRFTVTRFNSKAFIDNDHRTSSFKAHRNGCLIGCDSDQRRELPRALHLR

SEQ ID NO: 249681 - protein, 115 aa, Glycine max
  unsure (1)..(115): unsure at all Xaa locations
  Clone ID: PAT_MRT3847_67491C.1.pep
NKNSSEKWDWGCLRHCCCCSKPHEIDIGDSWDSSPDHTPTQYSTPXXXTXXAPXXSNNKHPPXSTHMGAXLGNPXVNIHHIXXMKXDLXXXESXVTYLCVEKTTNARVYYKTXSL

SEQ ID NO: 249682 - protein, 94 aa, Glycine max
  Clone ID: PAT_MRT3847_67492C.1.pep
MTIQLRLLKVRWLQCKWLMILYFKTTHPYVVLKLQNHTSTTTLINTFLNPILNDELNFTLTQPLPVLNFQLLNIYLLNAYYNMATSFLNLQPLI

SEQ ID NO: 249683 - protein, 65 aa, Glycine max
  unsure (1)..(65): unsure at all Xaa locations
  Clone ID: PAT_MRT3847_67493C.1.pep
MGKEKVHISIAVIXGHVEDGISTTTGHLIYKLGGIXDKRVIERFEKEPAQMNKRPFKDAWVLNKL

SEQ ID NO: 249684 - protein, 224 aa, Glycine max
  Clone ID: PAT_MRT3847_67494C.1.pep
CLAPMTPESCGAPCVPLWLLDRVNARPSGLQSIELSETAAEVKREQFKDVDIIDVANESFCNGVESSYMHDSEAVKDSGDIDSNGSKTCSSSLEEISVCMEEQDDSDMAKSSPSSCLPDGFSSVDKDSSVSVDYRNTRKDSDSDHKDVVKCKVTSNGFANYSNGYASANKYDDVPVEDGDGCFSTETPSAKMHQLKERLASENAEVDKGNGVKRVEISGNKLII

SEQ ID NO: 249685 - protein, 65 aa, Glycine max
  unsure (1)..(65): unsure at all Xaa locations
  Clone ID: PAT_MRT3847_67495C.1.pep
QEAXKVFLLLSVRFVTGKKITLCAGHRLRESCSYPLLGYLLNTLLFVIGFRVRFKLILRLFQFSA

SEQ ID NO: 249686 - protein, 229 aa, Glycine max
  Clone ID: PAT_MRT3847_67496C.1.pep
RIPFVASEDDAQNVHVISKLHRLEELTIQVISYEQWCNDAENVLQHVASLENVTDLRCCFPSSIILREFLSRSKSWSCKQQNSFRFFVGCQNSRRPQILESFEYKITNYLRYCNGGQEDDSAIIEVLPKTDAFELVCHKDIKKLSNFAGIVCLERIRGLLIKKCNKVLTIVSADTSSNTMNGIQIETRVILPNLEKLYLENLLNLKCVFRGPLHSGTFSKLHTLSLKNC

SEQ ID NO: 249687 - protein, 63 aa, Glycine max
  Clone ID: PAT_MRT3847_67497C.1.pep
SSKSKCLKNEQQVTSRGEHYDQHTLAKRISKTIIGVRFKKHEGLKSRQYSLGASDFDPENPIA

SEQ ID NO: 249688 - protein, 112 aa, Glycine max
  Clone ID: PAT_MRT3847_67498C.1.pep
EIWHDLATYGAWIFIGYVFTRHIMGIYWIGYLVNIGMIWQATMHGWLTVATTLHYSLQYHSSVISYCIHAFSNAYHVAVYLVLNGRCMMWELCFYLMFNLLCFLTTMCSVLK

SEQ ID NO: 249689 - protein, 72 aa, Glycine max
  Clone ID: PAT_MRT3847_67499C.1.pep
QKNTEHCNKKNSPGPIYIRTRQATYLTKSDERDARLRSLMHPEIQIKVTVRERRKVPGYGPQRLDRMRGGPT

SEQ ID NO: 249690 - protein, 83 aa, Glycine max
  Clone ID: PAT_MRT3847_6749C.1.pep
FREGGLVRRLVFQCHGAGRTARVGTGSRVGSRRVKCRPWFVIYSIKVKAKSSVYTRCDPVQLHCAVTPRSIIFSRPASTSISP

SEQ ID NO: 249691 - protein, 129 aa, Glycine max
  unsure (1)..(129): unsure at all Xaa locations
  Clone ID: PAT_MRT3847_674C.1.pep
PPPKAPFFSPPPRLICPIIFFWAPRRFFQPGKNSVFFSPKWVPSPVKPPXGAFIPFFPKIFFPPPPLLKKGAKVFFYPGFFFFPPPTPFFSPFKNFFQRGGVFFPNTLPFFFQKTPRGFFFFLSTSPQR

SEQ ID NO: 249692 - protein, 71 aa, Glycine max
  Clone ID: PAT_MRT3847_67500C.1.pep
MATWFLARRGQVVVGVGRAREVIAGVNRSAVNAGGTIIRGPMTKASIFPHGAVGVFGAAMGMFILVFSGVG

SEQ ID NO: 249693 - protein, 78 aa, Glycine max
  Clone ID: PAT_MRT3847_67501C.1.pep
MAPKRVYEAWKVRHKFLFRGRLIFGPDARSLLVTLLLIIVPVIVFCVFVARHLRHEFSSYNAGYAIFVVAVLFNIYVS

SEQ ID NO: 249694 - protein, 66 aa, Glycine max
  Clone ID: PAT_MRT3847_67502C.1.pep
QPRYPRTNFYPYPPSLPILTIFARINTPPPHFHSFVLNKKEIPFQISKTYNPKISCYTSLQHNFLS

SEQ ID NO: 249695 - protein, 73 aa, Glycine max
  Clone ID: PAT_MRT3847_67503C.1.pep
SFHFPSPPLFSGDPRRNLTRKSRRKTIFPILQIHFPHHCCSKYHKAQNTLLNSFFSSSYVLIFIHFSNAIENL

SEQ ID NO: 249696 - protein, 63 aa, Glycine max
  unsure (1)..(63): unsure at all Xaa locations
  Clone ID: PAT_MRT3847_67504C.1.pep
TTPAAXXFFFFFFLNNLIPGSWGVLFTIIISQPLNYFIKAHVKKCNKAPETPRHQTWEQQMKH

SEQ ID NO: 249697 - protein, 113 aa, Glycine max
  Clone ID: PAT_MRT3847_67505C.1.pep
FPVYGVFVRPIDAGKGPLEKPCPSPCGPIQPQCVVISHKFGPRELGIKRKESWWLFKVFEVRFAKNIIYTKVFQKNRRIMCLPIQLCVTCFFPPPIKNKKIKKQTKKKIQKIG

SEQ ID NO: 249698 - protein, 67 aa, Glycine max
  Clone ID: PAT_MRT3847_67506C.1.pep
LPTDIPKIRGANCNNDFSNQYKEKDVKECLYVNLGVLDLIKSCLRSHTIKTSIIVINLNPSIYRIPC

SEQ ID NO: 249699 - protein, 56 aa, Glycine max
  Clone ID: PAT_MRT3847_67507C.1.pep
DPAIGIYGMDFYVVMSRPGERVARRRRCKTRVGASHKVNSTEVVKWYKNRFEGIVR

SEQ ID NO: 249700 - protein, 81 aa, Glycine max
  Clone ID: PAT_MRT3847_67508C.1.pep
THGQALLMVPINWHPFVLVVLPDRSFLDEQGFFMYVSRSYNGMKKMGWYSSTAVGVRRFNSRPFHGMYDYFINIKKNHILK

SEQ ID NO: 249701 - protein, 55 aa, Glycine max
  Clone ID: PAT_MRT3847_67509C.1.pep
RGECFPTLPHPVRLPLGDPLPHKQKKKLFLHSSGGIFFNHVHQFIFNQKKGGGLF

SEQ ID NO: 249702 - protein, 98 aa, Glycine max
  Clone ID: PAT_MRT3847_6750C.1.pep
WQGTLLLVRQPSCDESHPLPEMLATVPTIWCNDPTEADMNIMFTVWDAGGHDTIRSLGMLYLQDTKMLVSDSDADHKDAFAVANNDLNGIVSDDELRH

SEQ ID NO: 249703 - protein, 129 aa, Glycine max
  unsure (1)..(129): unsure at all Xaa locations
  Clone ID: PAT_MRT3847_67510C.1.pep
HNALNDIKTFLQIITIGDIDVALGKLREGYSQSVGDNTSTTWFLLYCQKLIXLVRVGALKKTVKSGRMEXPRFYDLPVFNDIFQDCVRLVAYEQALESCVRXGLQDSQREVVAXDTLNAMILSTTLSMK

SEQ ID NO: 249704 - protein, 114 aa, Glycine max
  unsure (1)..(114): unsure at all Xaa locations
  Clone ID: PAT_MRT3847_67511C.1.pep
PALTARHLTEEQWEDYXYISELAIQGDYETRLMDTEEMKERSVXQTTQGTECMEQLAAMEGMSEWLRKAEGAAEXARRYDGDLSIXTCGTDARGIDQAXDMNAIHRLEEKPSVR

SEQ ID NO: 249705 - protein, 111 aa, Glycine max
  Clone ID: PAT_MRT3847_67512C.1.pep
FDEPTHMTLYKKIGRAEFSCPSWFSPQAKKLLKHIFDPNPLTRIKIPELLEDEWFKKGYKPTSFPEEEDLNVDDVVVAFNESNVLIFRQYLYSTSFISCRKFCCLFIHFDL

SEQ ID NO: 249706 - protein, 47 aa, Glycine max
  Clone ID: PAT_MRT3847_67513C.1.pep
VKPKKKIGHCKNVSNTMSAMCLRSVGVGNVGPIHWKCPCFLGVINHE

SEQ ID NO: 249707 - protein, 48 aa, Glycine max
  Clone ID: PAT_MRT3847_67514C.1.pep
ARAHSFIHSFVLLRYNLFSNVYYPKRLLLLWSRITLVLFRFLNFPPCS

SEQ ID NO: 249708 - protein, 470 aa, Glycine max
  Clone ID: PAT_MRT3847_67515C.1.pep
MGSSSSRLGSRPSSSSSHSHRVNRFRLSSLLCGTSTSRSIHQMEELSAELRVDSARDFDGEILKDTEESSLSYTEARISSSPPAETVTPSDMRTEFHGNTSVEGSSRNVATNSQRNCLSEHEELVPPYQVSAGHTGHESYSDSSNTASTSFVEQQSSDPVSVNVSANKDVVNDVNNPVVSDVSQVSHETMHPRSSTPQEHGNFGSGEISVENHTSAFISIQNSSSPVAQVSNLAATSQLPEDEPRRETIPSGLGILVSNRERGPGNDSVLQVDVVTISSNILSGSSADANDNDARRNGRRLFWDAFSRRSSRRLGDSPTIVFSAGGADDSGSQDRWLVDFGGDLSNDGVGGASGYMGSRIHRLNERRMRHSRSEIWERLRGGFDEIGRWNSCPLGIHADGMCFCESSPMAEESSTRASISRIVMLAEALFEVLDEIHRQPGSLSLSMVSLPAPESIVDSLPLKSHRLMGL

SEQ ID NO: 249709 - protein, 66 aa, Glycine max
  unsure (1)..(66): unsure at all Xaa locations
  Clone ID: PAT_MRT3847_67516C.1.pep
CITTNKTKQSKGVVSAKQVTKPLQKQLLSTLYKKGQNRCTGLKLLQSRLFPMDMIIKQXFVGEADG

SEQ ID NO: 249710 - protein, 84 aa, Glycine max
  Clone ID: PAT_MRT3847_67517C.1.pep
ANEKGEVPHGINHHHFDFFRDSKLYSGGPRPLIVIRHNHRNGKGQSYHANVHNSGICCDSWELLLLVRKLTVGYNEVLICKKNK

SEQ ID NO: 249711 - protein, 62 aa, Glycine max
  Clone ID: PAT_MRT3847_67518C.1.pep
HVINLSLRRWSLFCRFLRLHLSRRDTIGQYVEDSFLVSFSIIQSYQCVERRQQSLSEARAAI

SEQ ID NO: 249712 - protein, 92 aa, Glycine max
  Clone ID: PAT_MRT3847_67519C.1.pep
MMMKSAKCAVVVVPHLLLAEVGPMAEAVTCSPTKLSLCLPTLTSGAIPSNACSTKLKHHKSCVYGYLKNASLKQYVNSPNARSTVASSGIPF

SEQ ID NO: 249713 - protein, 130 aa, Glycine max
  Clone ID: PAT_MRT3847_6751C.1.pep
FKFFRFGPGFPIKKKVLEGPSKRLALVLLVFNQGQLVDQKPVIKVDWLQMVSLGAEMVFSSKVSPFPVEVFVGIMAKGEEAPAELDAKMKKLLEDAIKLKMVDTAKLYDFVDKKDESRFDLKKIVSENWI

SEQ ID NO: 249714 - protein, 76 aa, Glycine max
  Clone ID: PAT_MRT3847_67520C.1.pep
ISLPFFEKISCVYVGSITGVCLRGATLNHTNIQERSRLYLSKTNLEYQCLIVWVYISLSYSHLMCAMCLCLCMYNT

SEQ ID NO: 249715 - protein, 153 aa, Glycine max
  unsure (1)..(153): unsure at all Xaa locations
  Clone ID: PAT_MRT3847_67521C.1.pep
GCEKTTEGSLFLKDSSVVLDEFFLFTYHGGNCFHVQIFGGNGLERLCLEETRQEQAAIPQFFDLPFSNNASLFDGYEIKKTRQEQASIPSLARTKNKSKQRKTSAGSLHHHESKSCQEDLPFCNKALLSKDFPKPMSSIKIESSEACXMVESF

SEQ ID NO: 249716 - protein, 57 aa, Glycine max
  unsure (1)..(57): unsure at all Xaa locations
  Clone ID: PAT_MRT3847_67522C.1.pep
GAVIILPEVDVLIKVKTVAQGVRWDIKKVGHXNGPLVHDKIVIAAKQYWVANASCTQ

SEQ ID NO: 249717 - protein, 76 aa, Glycine max
  Clone ID: PAT_MRT3847_67523C.1.pep
GGGGPQKKGGPPPPFCFACPPPPPRLGPGISRGNFSPPPPLLGGFFGKGVRGSPPGGGPFLPFFFSPPRNPPFRFG

SEQ ID NO: 249718 - protein, 94 aa, Glycine max
  Clone ID: PAT_MRT3847_67524C.1.pep
YLWQASLHYLVARGGTPVLGLLGYLSLDFSIEINQIVNKICTCLCVIFYIPSLNRLLGPLVKRSSSSWTVTSVVEYFHVLLYSEVILEWISRLV

SEQ ID NO: 249719 - protein, 103 aa, Glycine max
  Clone ID: PAT_MRT3847_67525C.1.pep
KSSWFRKGLEQPPITQNKNESLAPLVADGVFGACEHVDPIDAAKYSNPSNKLNAFDVISYSGGIDLSGLNEETFWKRNERFTSDKPASILLSKLEEICRSLRL

SEQ ID NO: 249720 - protein, 410 aa, Glycine max
  Clone ID: PAT_MRT3847_67526C.1.pep
MALLGLMSFAALTLFLVLTTVPRQAHASSRGNLGRNINPSVYGICASSVIVHGYKCQEHEVTTDDGYILSLQRIPEGRGKSSGSGTRKQPVVIQHGVLVDGMTWLLNPPEQDLPLILADNGFDVWIANTRGTRYSRRHISLDPSSQAYWNWSWDELVSYDFPAVFNYVFSQTGQKINYVGHSLGTLVALASFSEGKLVNQLKSAALLSPIAYLSHMNTALGVVAAKSFVGEITTLFGLAEFNPKGLAVDAFLKSLCAHPGIDCYDLLTALTGKNCCLNSSTVDLFLMNEPQSTSTKNMVHLAQTVRLGALTKFNYVRPDYNIMHYGEIFPPIYNLSNIPHDLPLFISYGGRDALSDVRDVENLLDKLKFHDENKRSVQFIQEYAHADYIMGFNAKDLVYNAVLSFFNHQV

SEQ ID NO: 249721 - protein, 828 aa, Glycine max
  unsure (1)..(828): unsure at all Xaa locations
  Clone ID: PAT_MRT3847_67527C.1.pep
MASSEVTMKGNCLNHNDGGATEPHSPSTAKDAEAALFRELWHACAGPLVTVPREKERVFYFPQGHIEQVEASTNQVADQHMPVYDLPPKILCRVINVQLKAEPDTDEVFSQVTLFQEPNQDENAVEKEPPPAPPPRFHVHSFCKTLTASDTSTHGGFSVLRRHADECLPPLDMSKQPPTQELVAKDLHANEWRFKHIFRGQPRRHLLQSGWSVFVSSKRLVAGDAFIFLRXGENGELRVGVRRAMRQQGNVPSSVISSHSMHLGVLATAWHAILTGTIFTVYYKXPRTSPAEFIVPYDQYMESLKNNYSIGMRFKMRFEGEEAPEQRFTGTVVGIEDSDPKRWRDSKWRXFKVRWDETSNTPRPERVSPWKIEPALAPPALNPLSMPRPKRPRSNAVPSSPDSSVLTREASSKVSIDPSPANGFPRVLQGQEFSTLRGNFAESNEFDTAEKSVVWPPTAVDDEKMDVSTSRKYGSESWMSMGRNEPTYSDLLSGFGTSGDPSHLSLKDQMSPAYSARKQSLDHEGKLHMPYPWPVMPSSLSLNILDSNAKGPTHGGDTSFQARGNLRFSAFGEYPELHGHKVEDSHGNLMPPPPAPQTQYQSPCSRELMSKQVSAKTCEAVKPKDGDCKLFGFSLISGPIVPEPSLSQRNVSEPAGQMHLTAHQQRTSENDEKSDHSKGSRPVDDLVVDDHDRPLRTSQSHTKDVQAKPLSGSARSCTKVHKKGIALGRSVDLTKYSGYDELVAELDQLFEFGGVLVSTKKDWLIVYTDNDGDMMLVGDDPWHEFCAMDCKIYIYPKEEIPKMSPGTMSSKNEEKQSVMASDGARCKS

SEQ ID NO: 249722 - protein, 148 aa, Glycine max
  Clone ID: PAT_MRT3847_67528C.1.pep
MARNFSLVFTLSSIIFLVTTVLPSTVSSTSTLEKHQVPRIMCDECKLPPPPPPPKPIECPPPPSPPPPIPPSPPPPLPPSPPPPVIKCPPPPKPLPLPPPPPVVVECPPPPKPPCGGGGVDCLLPTFPETPDGPHYLLSPRAFRRQER

SEQ ID NO: 249723 - protein, 191 aa, Glycine max
  Clone ID: PAT_MRT3847_67529C.1.pep
MATSEVSIKGNSVNGKGDNSSGGYTNDVRNGSGGGEARNSSSSSSSARDAEAALYRELWHACAGPLVTVPREGERVFYFPQGHIEQVEASTNQVAEQHMPVYDLPPKILCRVINVMLKAEPDTDEVFAQVTLLPEPNQDENAVEKEGPPAAPPRFHVHSFCKTLTASDTSTHGGFSVLRRHADECLPSLDM

SEQ ID NO: 249724 - protein, 93 aa, Glycine max
  unsure (1)..(93): unsure at all Xaa locations
  Clone ID: PAT_MRT3847_6752C.1.pep
MKMKGLVVFVATILVAXWQCHAXYDMFPLRMNTGYGARTPEGIMHRLKAGWXAHNIFVGDAGPAXCVAAPKDYVQWGAYSSDSPSVGRRACFY

SEQ ID NO: 249725 - protein, 213 aa, Glycine max
  Clone ID: PAT_MRT3847_67530C.1.pep
SRELMSKQVSAKTCEAVKPKDGDCKLFGFSLISGPTLPEPSLSQRNVSEAADQMHLTAHQQRTSENDEKLDHSKGSRPVDDIVVDDQDRPLRTSQLHTKDVQAKPLSGSARSCTKVHKKGIALGRSVDLTKYSGYDELVAELDQLFEFGGELLSTKKDWLIVFTDNEGDMMLVGDDPWQEFCAMVRKIYIYPKEEIQKMSPGTLSSKNEENHS

SEQ ID NO: 249726 - protein, 66 aa, Glycine max
  Clone ID: PAT_MRT3847_67531C.1.pep
GGEKNPKTHAQGLQGFITLFKKEAPRLFNQCLCPKRLAIQKEITQWAINGPPPIQKTKGGVAPFGM

SEQ ID NO: 249727 - protein, 70 aa, Glycine max
  unsure (1)..(70): unsure at all Xaa locations
  Clone ID: PAT_MRT3847_67532C.1.pep
MTSLEVTMKGNCLNHNDGGATEPHSPSTAKDAEAALFRELWHACAGPLVTVPRERERVFYXFPQGHTEQA

SEQ ID NO: 249728 - protein, 64 aa, Glycine max
  Clone ID: PAT_MRT3847_67533C.1.pep
LFLFLFFISNTYSLFSKSYLRLNQTLNANISLKRDLNLDSLGYQKVTFSTRLNLIDCYFHIASC

SEQ ID NO: 249729 - protein, 132 aa, Glycine max
  Clone ID: PAT_MRT3847_67534C.1.pep
MATSEVSIKGNSVNGKGDNSSGDARNSGGEAQNASSSSSSARGNVVSSACAFFFLVSDAEAALYRELWHACAGPLVTVPRERERVFYFPQGHIEQVEASTNQVAEQHMPVYDLPPKILCRVINVMLKVVTNA

SEQ ID NO: 249730 - protein, 75 aa, Glycine max
  unsure (1)..(75): unsure at all Xaa locations
  Clone ID: PAT_MRT3847_67535C.1.pep
RKVIFNGDVYIGKIKGMLPHGKGKYTWSDGAVYEGDWVXGKMTGNGLITWPTGAKMRGXFSGGYLHGHGTFHILL

SEQ ID NO: 249731 - protein, 63 aa, Glycine max
  Clone ID: PAT_MRT3847_67536C.1.pep
PEHVVTFYTHPDVKGTKVVVADFAVVDAVQDVESRPEMRGERALFDDCIAARVGRPRNSGLVL

SEQ ID NO: 249732 - protein, 90 aa, Glycine max
  Clone ID: PAT_MRT3847_67537C.1.pep
SFLPSFCSSAIDGTHKCSVKKKKKITYSDEPPLYWIISKCVQNGRRCKEMGSGHIKVGPTPLSLLLRSLPPSFPRALLGHQVLSIPFNSF

SEQ ID NO: 249733 - protein, 82 aa, Glycine max
  unsure (1)..(82): unsure at all Xaa locations
  Clone ID: PAT_MRT3847_67538C.1.pep
FPPPPQPDPYPEPLPXPEPPLPPPPPPPPPPPPPPPPPRPPFPPPXTXPPPSPYPEPEPYPEPLEPPPPPPPPLPPPTSQRK

SEQ ID NO: 249734 - protein, 72 aa, Glycine max
  Clone ID: PAT_MRT3847_67539C.1.pep
DNTKTVGLISLPGAMTGLIMGGASPLEAIQLQIVVMNMMIGAATVSSIMATYLCWPAFFTKAYQLETKVFSS

SEQ ID NO: 249735 - protein, 95 aa, Glycine max
  unsure (1)..(95): unsure at all Xaa locations
  Clone ID: PAT_MRT3847_6753C.1.pep
XXVYCXLFKISXPGSFCSLHFPXPCALLWKLVHSFPSAXEGXXXXALAIXXQIXVNLKMTEXHXXGAXASXEEQPXGPGPXXRXRPKXPLXXDHV

SEQ ID NO: 249736 - protein, 48 aa, Glycine max
  Clone ID: PAT_MRT3847_67540C.1.pep
YHTVFHDALGFLLMNSSRSIVGNRDIVEISDFMTVQGGVLLPVKVVNR

SEQ ID NO: 249737 - protein, 129 aa, Glycine max
  Clone ID: PAT_MRT3847_67541C.1.pep
TNFTVTSKASDEDGDFAELYVFKWTSLLIPPTTVLIVNLVGIVAGVSYAINSGYQSWGPLFGKLFFAIWVIAHLYPFLKGLLGRQNRTPTIVIVWSVLLASIFSLLWVRIDPFTSDSNKLTNGQCGINC

SEQ ID NO: 249738 - protein, 1085 aa, Glycine max
  unsure (1)..(1085): unsure at all Xaa locations
  Clone ID: PAT_MRT3847_67542C.1.pep
MEASAGMVAGSHKRNELVRIRHDSSDSGSKPLKSLNGQICQICGDTVGLTATGDVFVACNECAFPVCRPCYEYERKDGNQSCPQCKTRYKRHRGSPRVEGDEDEDDSDDIENEFNYAQGKAKARRQWEDDADLSSSSRRESQQPIPLLTNGQTMSGEIPCATPDTQSVRTTSGPLGPSEKVHSLPYVDPRQPVPVRIVDPSKDLNSYGLGNVDWKERVEGWKLKQEKNMVQMTGRYTEGKGGDVEGTGSNGEELQMVDDARQPMSRVVPIPSSQLTPYRVVIILRLIILGFFLQYRVTHPVKDAYPLWLTSVICEIWFALSWLLDQFPKWSPINRETYLERLALRYDREGEPSQLDPVDVFVSTVDPLKEPPLVTANTVLSILSVDYPVDKVSCYVSDDGSAMLTFEALSETAEFAKKWVPFCKKHNIEPRAPEFYFAQKIDYLKDKIQPSFVKERRAMKREYEEFKVRINALVAKAQKMPEEGWTMQDGTPWPGNNPRDHPGMIQVFLGHSGGLDTDGNELPRLVYVSREKRPGFQHHKKAGAMNALIRVSAVLTNGAYLLNVDCDHYFNNSKALKEAMCFMMDPVLGKKTCYVQFPQRFDGIDLHDRYANRNIVFFDINMKGQDGVQGPVYVGTGCCFNRQALYGYDPVLTEEDLEPNIIVKSCWGSRKKGKGGNKKYSDKKKAMGRTESTVPIFNMEDIEEGVEGYDDERTLLMSQKSLEKRFGQSPVFIAATFMEQGGIPPSTNPATLLKEAIHVISCGYEDKTEWGKEIGWIYGSVTEDILTGFKMHARGWISIYCMPPRPAFKGSAPINLSDRLNQVLRWALGXSIEIFLSRHCPLWYGYNGKLKPLMRLAYINTIVYPFTSIPLIAYCTLPAFCLLTNKFIIPEISNFASMWFILLFVSIFTTSILELRWSGVSIEDWWRNEQFWVIGGTSAHLFAVFQGLLKVLAGIDTNFTVTSKASDEDGDFAELYVFKWTSLLIPPTTVLIVNLVGIVAGVSYAINSGYQSWGPLFGKLFFAIWVIAHLYPFLKGLLGRQNRTPTIVIVWSVLLASIFSLLWVRIDPFTSDSNKLTNGQCGINC

SEQ ID NO: 249739 - protein, 489 aa, Glycine max
  unsure (1)..(489): unsure at all Xaa locations
  Clone ID: PAT_MRT3847_67543C.1.pep
MGNEPKVDEEDRILNEMEELTYVMDRKKKRAKKLLAKRRAKDKARKATGMQMDAIDDGYVDQELFALSSIKGKKDLVAVDNTEYEGDEGELEDSENEETHESPEHSSSDLEDSDEERKRYNEQMEDLMDKAYERFVIRKEGSAKQRKRIKKSYDAKAQLLEGGEDDDIVQSKYDSDEDQGDQEANPLMVPLNDEAELTQEEIMNKWFSQDVFAEAAEEGDFKKDESKDEMDIDEPKEKISIAKKVKENKTAXCSNSPQPQPSKAGDDFEIVPAPDTDSSDDSSSDEWEEDIEAKAEILAYAKKMMRKKQREHLLDDAYNKYMFDDEGLPKWFLDEERRHRQPIKPITKEEIAAMKAQFKEIDARPAKKVAEAKARKKRVAMRKLEKVRKKANAISDQTEISDSSKRKQIEQLYKRAVPKRPKKEYVVAKKGVQVRAGKGKVLVDRRMKKDARKHGMGKAGKGGSKTKGKAPKGKGSSKASAKKGKQRTK

SEQ ID NO: 249740 - protein, 58 aa, Glycine max
  Clone ID: PAT_MRT3847_67544C.1.pep
DPETIVAIDVAIVVVVVNMYDTVTTVELLAIVSAVDSNGRRYLALRVIAHEAGIRLVL

SEQ ID NO: 249741 - protein, 99 aa, Glycine max
  Clone ID: PAT_MRT3847_67545C.1.pep
KKKKKKKKKKKKKKKKKKKKRGGLFGGPNFFPLSGPLWAAPWAPQWNPPAIFCPSFYGDPLGLTRVFPILAPSLFIPFSFAKLFPTKPSPNIFPTIYEN

SEQ ID NO: 249742 - protein, 74 aa, Glycine max
  Clone ID: PAT_MRT3847_67546C.1.pep
NCFQGFQGQGYPISVGANEWKRKPHDSSCGVTVTHGPKRVVLKSACIEGIIQLDPRLISSPSGWERERRLWLGK

SEQ ID NO: 249743 - protein, 503 aa, Glycine max
  Clone ID: PAT_MRT3847_67547C.1.pep
QNIRQAVLEYRKVGNQQHVEPRVRRVALYRGAEYLERYFRLIAFAAYLGSEAFDGFCGQAEYKMAFKNWMHERPEVQAMKWSIRLRPGRFFTVPEELRAPQESQHGDAVMEAFVKARSGSVLGKGYILKTYFFPGQRTSSHIQIHGAPHVYKVDEFPVYSMATPTISGAKEILSYLGAKPKANVSSAQKVILTDLREEAVVYIKGTPFVLRELNKPVDTLKHVGITGPAVEHMEARLKEDILAEIRQSGGLMLFHREEYDPSTNKSSVVGYWENILADDVKTPAEVYSTLKDEGYDIIYSRIPLTRERDALASDIDAIQYCKDDSAESYLFVSHTGFGGVAYAMAIICIRLGAEASFASKVPQPLFGPHQCAATEENLASRASNEAALKMGDYRDILSLTRVLIRGPQSKADADIVIERCAGAGHLRDDILYYHKEFEKFTDGDDEERAYLMDMGVKALRRYFFLITFRSYLYCTSPANMKFSAWMDARPELGHLCNNLRIDK

SEQ ID NO: 249744 - protein, 158 aa, Glycine max
  unsure (1)..(158): unsure at all Xaa locations
  Clone ID: PAT_MRT3847_67548C.1.pep
RGIGWHGIGILLDGLYGTGTGSTVSVENVGLLGLTRVGSRRVVQISAGFMIFFSXLGKFGAVFASIPFPIFAALYCVLFGLVAXAVGISFLQFTNMNSMRNLIITGLTLFLGISVPQFSNQYWTSSHHGPVHTNAGWFNAFLNTIFSSHRAHTVPWTM

SEQ ID NO: 249745 - protein, 72 aa, Glycine max
  unsure (1)..(72): unsure at all Xaa locations
  Clone ID: PAT_MRT3847_67549C.1.pep
MKMKDLVFFKSTIFVAWEFDTYDMFFLXMNTVYGAYTPKEKYASWIFDEQSHNIFGFENLXNXCVEATKEYI

SEQ ID NO: 249746 - protein, 57 aa, Glycine max
  Clone ID: PAT_MRT3847_6754C.1.pep
RERHALKLGNLTWHLPASHFISLSRRNITHLEGSLFMRDLIELSAPTPEPTPLDPGA

SEQ ID NO: 249747 - protein, 94 aa, Glycine max
  Clone ID: PAT_MRT3847_67550C.1.pep
FRLLLKAKNHASAQICMAATVSFLNLIIMFSVISTINSLSFIYYSKTCPDLECIAAKAKKVATAMDKTVPAALFRMHFHDCFIREYDASMLLTS

SEQ ID NO: 249748 - protein, 68 aa, Glycine max
  unsure (1)..(68): unsure at all Xaa locations
  Clone ID: PAT_MRT3847_67551C.1.pep
KKSSVPFRDEHFFAPVYKPNSVLRLEHAFELVKGQPDXYNLDFGRGPYRKEADFSSDDIILGKSLVSV

SEQ ID NO: 249749 - protein, 447 aa, Glycine max
  unsure (1)..(447): unsure at all Xaa locations
  Clone ID: PAT_MRT3847_67552C.1.pep
MGRQSALLVFVLLLVHQICATNEQEHACPPSSCGKITNITYPFRLKGDPKGCGDNRYELACENNVTVLYLYSGKYHVQAINYNNFTIRVVDPGVQQPNCSSLPRYFLSQSNFSDSDNFYLDRYLAXKIEFIAWEHVFQHIVFMNCSNPVTDNGKYVDTASYVNWDSKDKYIYAIAGDLKAEDFQVGCHVKLVALTSWWGLDTNNYSYSAMHTGLVYGFEISWMRLICDQHCPSKHGCYYYKVCFFDSVSQEVHYWNWETLWGWSILIILIMLWAWKILLTVPLFIVILTCKWRKRHLSMFESIENYLEQNNLMPIRYSYKEVKKMAGGFKDKLGEGGYGSVFKGKLGSGSCVAIKMLGKSKGNGQDFISEVATIGRTYHQNIVQLIGFCVHGSKRALVYEFMPNGSLDKFIFSKDESIHLSYDRIYNISIEVARGIAYLHYGCEMQI

SEQ ID NO: 249750 - protein, 89 aa, Glycine max
  Clone ID: PAT_MRT3847_67553C.1.pep
CAVAFFFFFSGIPMAFEIHTYGLNEHPGPGVYYPQISFCNANQCLTLTSTTKGATKNSGFPTKFMYFSEKHPVNRCHPPQEFICPNSYN

SEQ ID NO: 249751 - protein, 211 aa, Glycine max
  unsure (1)..(211): unsure at all Xaa locations
  Clone ID: PAT_MRT3847_67554C.1.pep
STSLQIISFTSNELDSSILSWVLNVSKVFTSLDLSHNSLHSVPDGFANITLCQVKRLSLSHNKLSGQLSDYLPESCSAQHDLEELDLSHNPFSSGPLPDFSWFSSLKRLSLEYTNVVGQLSISFDHLRSLEDLDVSHNQLSGPIPYTIGQXXNLTHLYLCSNKLNGSISETHLSGLSRLKTLDVSRNSLSFNWXPNWVSPFQLGWVSASSC

SEQ ID NO: 249752 - protein, 232 aa, Glycine max
  unsure (1)..(232): unsure at all Xaa locations
  Clone ID: PAT_MRT3847_67555C.1.pep
MASRGYFSVLVHAFVFASLATSAFSQLSPNYYDYACPNALSTIKSVVEAAVQKEYRMGASLLRLHFHDCFVNGCDGSILLDPSPPLTXEKNAFANLQSVRGFEVVDDIKQAVDEACGTPVVSCADILAVAARDSVVALGGPTWEVQLGRRDSTTASKEAADANIPAPFFSLSQLITNFKNHGLDEKDLVVLSXXTIGYARCVTFXGHIYNDSNIDPHFAQYLNLAPLLTAAN

SEQ ID NO: 249753 - protein, 35 aa, Glycine max
  Clone ID: PAT_MRT3847_67556C.1.pep
CILAIFITVSDELASLSYALFGQTYYKCNIRRSNE

SEQ ID NO: 249754 - protein, 108 aa, Glycine max
  unsure (1)..(108): unsure at all Xaa locations
  Clone ID: PAT_MRT3847_67557C.1.pep
LSIFCESHYLLPDVFCFWNTSGGLDDDARIQQYLSALLNTYLGDALNGAVQVCSLELGQTDLLYEXKLLTXNSCAWMSRVNIIDLWMCTELGLTQTYMKWINYFTMRN

SEQ ID NO: 249755 - protein, 223 aa, Glycine max
  Clone ID: PAT_MRT3847_67558C.1.pep
FTYQHLKRVAEIARKLGIFVISDEVYAHVTYGSNPFVPMGVFSSIVPVITIGSLSKRWLVPGWRTGWIATCDPHGIFQKTGVVKSIISYLEITTDPPTFLQAAIPEILGKTKDDFLSKNLNILRETANIFYDLCKEIPCLTCPHKPEGAMCVMVEINFSQIKDIVDDMDFCAKLAEEESVLLLPGVTVGLKNWLRISFAVDTSNLVEGLSRIKAFCLRYAKMP

SEQ ID NO: 249756 - protein, 132 aa, Glycine max
  unsure (1)..(132): unsure at all Xaa locations
  Clone ID: PAT_MRT3847_67559C.1.pep
MSPVFSLQERTSSMVGIAVLGESATRPEILVDRGAIRFVLAGANIMCPGLTSPGGVXDEDVGAKCPVAIMAKGKQHSLAIGFTKMSNNMEDIARDAGSVDIEDVLYIIPLKELQMELQQLCSINACNLPTTI

SEQ ID NO: 249757 - protein, 153 aa, Glycine max
  unsure (1)..(153): unsure at all Xaa locations
  Clone ID: PAT_MRT3847_6755C.1.pep
TAXAPAIPSFPDSIFRAYDIRGTVPETLNGETAYWIGRAIGAQSLAQGEPNVSVGRDGRLSGPELVQQLIQGLHDSGCHVSDVGLVPTPALYXAANVLAGKSGVMLTGSHNPSNYNGFKIVIAGDTLANEQIQALHTRLKNNDLSSGKGSVEK

SEQ ID NO: 249758 - protein, 181 aa, Glycine max
  Clone ID: PAT_MRT3847_67560C.1.pep
MFKKFSGEDVSAQNQVKASVQRKIRQSIAEEYPGLEPVLDDILPKKSPLIVAKCQNHLNLVLVNNVPLFFSVRDGPYMPTLRLLHLYPNIMKKLQVDRGAIRFVLAGANIMCPGLTSPGGVLDEDVGAECPVAIMAEGKQHALAIGFTKMSAKDIKAINKGIGVDNLHYLNDGLWKMEKLD

SEQ ID NO: 249759 - protein, 332 aa, Glycine max
  Clone ID: PAT_MRT3847_67561C.1.pep
MSSTVLEVTRAAHEEVERLERLIVKELQNDPASNKERLYQSHRVRNMIDTITSTTEKLIGVYEDNDNARKDEIAALGGQTATGINVFSAFYDRLKEIREYHRKHPVARVVDANDDYETLLNEEPQIEFSGEEALGRYLDLHELYYQYVNSKFGEPIEYSAYLDVFSDTDKIPRKMKMTRQYREYLANLLEYLLYFFQRTEPLQDLDRMLSKVTTEFEESWAVGKVQGWENDNQENGHVLAEHATIDLDYYSTVEELMEVGPERLKEALAALGLKTGGTVQQRAERLLLTKHTPLEKWDKSKLLLLQDASSEKRKREEIRKHNEMLKASETGA

SEQ ID NO: 249760 - protein, 159 aa, Glycine max
  Clone ID: PAT_MRT3847_67562C.1.pep
RGSQPVPVLDPALAQVGVHGRKLPPKRIHLGQGSSGNARFVSLARGFGCNAPQDSRRWPAPLRDKAEGVIGAGVGHGSVYLGNRQGRIYKHCHALGKPRGSLKKPALHFDNEFRKVGDKHWLFMVLGMVPTPSRSASPRCWAAIKKWVQVRGPPGNFVS

SEQ ID NO: 249761 - protein, 35 aa, Glycine max
  Clone ID: PAT_MRT3847_67563C.1.pep
LFSHRCTLILPQHLISTHAQYSMIFWRCALCLFSH

SEQ ID NO: 249762 - protein, 169 aa, Glycine max
  Clone ID: PAT_MRT3847_67564C.1.pep
MAQQSSPPRRQTPPPSQYLEVNCRSSGKIRRFAAGTGAGFAVALINRKLKGTVVAASHIEAVKDGKEEEPIAFGPTSLLSNFGEGWKLQTVTLTDLSSEVGNGQFQQMAMQKPGLVPGVPGPARVSNPISFVYLVKIMFAFILIFVLVAIFTLFLDNLPAFILFLKSIT

SEQ ID NO: 249763 - protein, 172 aa, Glycine max
  unsure (1)..(172): unsure at all Xaa locations
  Clone ID: PAT_MRT3847_67565C.1.pep
MAQQPSPSSSPPRRKTPPPPQYVEVNCRSSGKTRRFAAGTDAGFAVALINRKLKGTLVAASHIEAVKDEEEPIAFGPTSLLSNFGEGWKLQTVTLTDLSSEVGDGQFQQMAMHTPGLVSGVPSPASRISNPISXVYLVKIMFAFILIFVLGAIFTLFLDNLPAFILFLKSIT

SEQ ID NO: 249764 - protein, 33 aa, Glycine max
  Clone ID: PAT_MRT3847_67566C.1.pep
FHSFTLQLSIRHDGTLTVAENRDFGTNPSIPQP

SEQ ID NO: 249765 - protein, 214 aa, Glycine max
  unsure (1)..(214): unsure at all Xaa locations
  Clone ID: PAT_MRT3847_67567C.1.pep
MRIGREEVVEEVKRLLWLAVPLFSVGILQYILQAISVMFIGHLVTLPLSGASMASSFASATGFNLLLGLATALDTFCGQSNGAGQYHMLGIHMQRSMLVALMXMIPSFVPYGIHRCILKFLATRKIVFPMVLTLGTVHVLQVIFCWLLVFKSGLANRGAALANSISYWVNAILISLYVRLSSACKHSWTGFSKMALHNLLDFLKLGAPSAAMHW

SEQ ID NO: 249766 - protein, 70 aa, Glycine max
  Clone ID: PAT_MRT3847_67568C.1.pep
PPDHYHSNMNTIDNKIFVLFLFFMVILFHRGLNNCDHVMLKGFSLHYLFVCILYIRDKISYSKYLFVISP

SEQ ID NO: 249767 - protein, 76 aa, Glycine max
  Clone ID: PAT_MRT3847_67569C.1.pep
GNKGVNSLSFPTLNVQQCNNNPNSLIGDFTKKFYILSSLFIFINHIRVVCPRTPDMDFSYTSKLLHANDTPNGLSL

SEQ ID NO: 249768 - protein, 64 aa, Glycine max
  unsure (1)..(64): unsure at all Xaa locations
  Clone ID: PAT_MRT3847_6756C.1.pep
FAKLPYKLNAILDIPXQQQRKWTTTLWLLVNFEISDFYHPNQKPYLSKTNHHRNGTADPGPNVR

SEQ ID NO: 249769 - protein, 154 aa, Glycine max
  Clone ID: PAT_MRT3847_67570C.1.pep
MAALNMSTVRLPRASLSGTTPARRSCALIKNPSSLRSVKNVSKVFGLKSSSFRVSAMAVYKVKLIGPDGEENEFEAPDDTYILDAAENAGVELPYSCRAGACSTCAGHVVSGSVDQADQSFLDDHQIKKGYLLTCVSYPKSDCVIHTHKEEDLV

SEQ ID NO: 249770 - protein, 47 aa, Glycine max
  unsure (1)..(47): unsure at all Xaa locations
  Clone ID: PAT_MRT3847_67571C.1.pep
LAPKFYLMYPKRAFVPWYVGEGMEKGEFFKAREDLAAFXKDYKEVGA

SEQ ID NO: 249771 - protein, 129 aa, Glycine max
  Clone ID: PAT_MRT3847_67572C.1.pep
GSSGSSGSSALKNKPGSQNRSSSSTEKDSLMSNEKNNAKALHKCDCKITEIDLTSIEDDSSEQLLPGEEGNGSSKVNAKTNEKELTKQSNNEQHSNVVSKQPKAIKTVVTALKDGKLKETSSPIRSNRI

SEQ ID NO: 249772 - protein, 40 aa, Glycine max
  unsure (1)..(40): unsure at all Xaa locations
  Clone ID: PAT_MRT3847_67573C.1.pep
MVDLHWKSKMPSSDMPSRTLKLSLXDNKSLPSLQXPXXTT

SEQ ID NO: 249773 - protein, 38 aa, Glycine max
  Clone ID: PAT_MRT3847_67574C.1.pep
AFFILDNLGTVGHPILKVYVSKENMNFYTFTLFSFKSK

SEQ ID NO: 249774 - protein, 62 aa, Glycine max
  Clone ID: PAT_MRT3847_67575C.1.pep
CHCFLIHKLSSRVAQGTEAAETEILLTFYALLLGDINTEITKLHPHFVWFCELNCIHIRIGL

SEQ ID NO: 249775 - protein, 88 aa, Glycine max
  Clone ID: PAT_MRT3847_67576C.1.pep
LNSNIKSRSTQWEDAITWFKFQIKTSQAEPKENSHKSFTTKQTLMINLKFNINGFAVYHGKTRPPNASKEYSRNIENTLKLNLYLYNT

SEQ ID NO: 249776 - protein, 29 aa, Glycine max
  Clone ID: PAT_MRT3847_67577C.1.pep
EQPGLSLDGNCQKAIVLIYMGAYNGYISK

SEQ ID NO: 249777 - protein, 80 aa, Glycine max
  Clone ID: PAT_MRT3847_67578C.1.pep
IRLEHRNTTSLLVFSDCHDVVTTTMALADDKGGEHTSPLPSDTVSRSTLTNQTEAGHMHGVKRQGGIIFKRNTHIAGMNK

SEQ ID NO: 249778 - protein, 52 aa, Glycine max
  unsure (1)..(52): unsure at all Xaa locations
  Clone ID: PAT_MRT3847_67579C.1.pep
VEMPLVLVSPTMLPFPPLLTPMLLLIQLLDWLSFWHIFRHFCYLKXQRMSHC

SEQ ID NO: 249779 - protein, 46 aa, Glycine max
  Clone ID: PAT_MRT3847_6757C.1.pep
LSGLQWQKWLLFCQLYRAVLVWTPGDKFFMYEFKIINLSTIFIGVI

SEQ ID NO: 249780 - protein, 66 aa, Glycine max
  Clone ID: PAT_MRT3847_67580C.1.pep
LQRYSKLLGPNFETYVPITSSSTFLSIIGISDITLTSKGCEFHRATLPRGGAWLLSLRHTTEHMIF

SEQ ID NO: 249781 - protein, 69 aa, Glycine max
  Clone ID: PAT_MRT3847_67581C.1.pep
QFVPIYETRPIKNVYGMDFDHSFGLWFIACWLKPDLMIESGAFKELLDYYNLFGSTKMLSLEGKNMTLS

SEQ ID NO: 249782 - protein, 42 aa, Glycine max
  Clone ID: PAT_MRT3847_67582C.1.pep
VINNIHYFLTCQCCVKFTNLNGRVDPCLSASKFSKCIIVGKR

SEQ ID NO: 249783 - protein, 289 aa, Glycine max
  Clone ID: PAT_MRT3847_67583C.1.pep
HASHTTSTPTHRHPNLSAPSMLERTLSSRRVNSYADDDADADVDADESKTKKNQHILFRITTRASNYLSRIAGSGSFYLPCVTILLFIFFAFSFLFTSRGFVCISSSYTPVSGAGFFGFDGLDSDFGSLGVPCCRSKHGKSVEWTSKDLLKGLEEFVPIYETRPIKNNMYGMGFDHSFGLWFIARWLKPDLMIESGAFKGHSTWVLRQAMPDTPIISLSPRHPEKYLKKGPAYVDGNCTYYAGKDFVDFGSVDYYLFGSPKMLSPPGKKYDFVIVNDYFQIYMGIFPCT

SEQ ID NO: 249784 - protein, 475 aa, Glycine max
  unsure (1)..(475): unsure at all Xaa locations
  Clone ID: PAT_MRT3847_67584C.1.pep
MFDREHMQQAHLGNMAENPIRVTMIPWSAFGHLIPFFKLSIALAKAGVHVSFISTPKNIQRLPKIPSTLSHLVHFVELPLPSLDNDILPEGAEATVDIPFEKHEYLKAALDKLQDAVKQFVANQLPDWIICDFNPHWVGDIAQESESXTVLSSILTFPATAFIVPPGTIARNLSAESLTAPPERVTFPSSEAFRIHEAIHFCAGFDKVNSSGVSDFERVIKIHDASKAVIFRSCYEIEGEYLNAYQKLFEKPMIPIGLLPVERGVVDGCSDNILDQVFEIASKIEEYELPFIWALRKPSWAINDEDGLPVAQLPWSSAGAXPSWESNDGYSLPVGFIERTSNRGRVCEGWIPQLEILAHSSIGGSLFHSGWGSVIENLQFGNTLVLLPFNIEQPLNARFLVEKRLAIEVKRNEDGSFTRNDIAASLRQAMVLEEGKKIRNNTREAAAIVGNLKLHQDHYVAAFVQFLKNGIRKPI

SEQ ID NO: 249785 - protein, 56 aa, Glycine max
  Clone ID: PAT_MRT3847_67585C.1.pep
RTAARRRQRGSGLNNTIEYETGKICIRWCHSLLRWGEKMYVTPPRRPWERFWLQFY

SEQ ID NO: 249786 - protein, 47 aa, Glycine max
  Clone ID: PAT_MRT3847_67586C.1.pep
PQASHFIFPGIMLCPIFWRVNLSTHKKAKLVILPGSYRNFYRENWGA

SEQ ID NO: 249787 - protein, 324 aa, Glycine max
  Clone ID: PAT_MRT3847_67587C.1.pep
MYVCMDPALKLCVLLLILLGLVNGSFAENDYGRCESVVKSWARSSLDEEMTKDDKHTLRDLLFFLHVPRTRGRTYFHCFLKKLYPSYLECPRSYDKLRFDPSKPKCRLLVTHDDYSITSKLPRERTSVVTILRDPVDRVFSTYEFSIEVAARFLVHPNLTSATKMALRLSSKTKGVSTLDIWPWKYLVPWMREDLFARREARYSRGLNIIESNDSYDMEDFAMPLQEYINDPVAVDVVHNGATFQVAGLTNNSYIAEAHEVRHCVQKYKTLGKYVLQVAKKRLDEMLYVGLTEEHRKSATMFANVVGAQVISQLNAPNTSLETT

SEQ ID NO: 249788 - protein, 59 aa, Glycine max
  Clone ID: PAT_MRT3847_67588C.1.pep
FIYNTITVTFKPPYPNNLNTQHSPPIFTYLNTLLLYNVQYLHLQIIYLHKSSLISTQLY

SEQ ID NO: 249789 - protein, 117 aa, Glycine max
  Clone ID: PAT_MRT3847_67589C.1.pep
MVDLQTVCCMCGDVGFPDKLFRCNKCRNRFQHSYCSNYYGELPEIELCDWCQSEEKNLRHIGTNLKKPVAAGNEAGATHRSAYSGEKMIKQHDHHHHHEESGSEKGKSPTPSLRPGT

SEQ ID NO: 249790 - protein, 42 aa, Glycine max
  Clone ID: PAT_MRT3847_6758C.1.pep
GNFVHSAVSLHLPNFPSTPLYLHVLLHETETHQNQRCDLIDL

SEQ ID NO: 249791 - protein, 86 aa, Glycine max
  unsure (1)..(86): unsure at all Xaa locations
  Clone ID: PAT_MRT3847_67590C.1.pep
LQRQQQRLPSLRHPAVVHPATLLLQQLLASNPLALANVAAYQQQQQLQQFXMPRLSQLAMVNPAVYLQLLSSSPLAVGNAPTYLQQ

SEQ ID NO: 249792 - protein, 134 aa, Glycine max
  unsure (1)..(134): unsure at all Xaa locations
  Clone ID: PAT_MRT3847_67591C.1.pep
GGPKTTHAAAEXKGTXGERRNGRDRKHXRKXKRPXTGXXRKREXGXXPKGGKRKKEQXGGREKXXPAENKREEGTPRXRNQAHSDQRGEKQRGRTRKRGQAGQTTRGGRRKAKTQTKRKTEERQRGGGASKTDK

SEQ ID NO: 249793 - protein, 50 aa, Glycine max
  unsure (1)..(50): unsure at all Xaa locations
  Clone ID: PAT_MRT3847_67592C.1.pep
RFRCSRGDGXGRNMVSQGAKCVHACLQHDVPGMDVSGISGNVWSDKTVAA

SEQ ID NO: 249794 - protein, 53 aa, Glycine max
  Clone ID: PAT_MRT3847_67593C.1.pep
KPTMLSSADRCMGNTAFCLGHFPEREESASSYRGEDSGANNAISMNMPNADTF

SEQ ID NO: 249795 - protein, 141 aa, Glycine max
  Clone ID: PAT_MRT3847_67594C.1.pep
MDWFSWLSRTTLEPSLIYDYGLTFARNELQLEDACYFNHEFLQSMGISIAKHRLEILKLVKKQEGGGAARPNKKLSGVIKKCLRKCMNKFVVSHDHHAVKHMPCSMVNVSVPSPLPPPPHEISWYHQGKLKGSLVEEATRE

SEQ ID NO: 249796 - protein, 98 aa, Glycine max
  Clone ID: PAT_MRT3847_67595C.1.pep
VLGLPLERTMISLSVLVLPLVLFGLVFKPSTSMVPQLVCPLVTVCHPNFSVSMVASARVFPMFRTSSLMSLNDPFEAVTLHLVFSGPSTSSDSVCNSP

SEQ ID NO: 249797 - protein, 114 aa, Glycine max
  Clone ID: PAT_MRT3847_67596C.1.pep
KKKFEPPLFPSFMNPTQVQKQPKEPFEVFMARGTLLGGKTRGGLSHKGRGVPGFFLSPGGPTGRHFFYGTNPFPKGWGSACTVSLDIAGVSTALEGAARPKWPLPMEEERPGPR

SEQ ID NO: 249798 - protein, 89 aa, Glycine max
  unsure (1)..(89): unsure at all Xaa locations
  Clone ID: PAT_MRT3847_67597C.1.pep
IILILETFRDRHGMQRRGCVASVEQXGTYYDPTRXCSSRNISCHDPRCRLVSAYDPPKPCXDENKNCPYFNWNGDXYNTTGDLALKTLT

SEQ ID NO: 249799 - protein, 68 aa, Glycine max
  unsure (1)..(68): unsure at all Xaa locations
  Clone ID: PAT_MRT3847_67598C.1.pep
KLHYVKRIAKWNRRGEKVPQGCVIGKCNFRLRNIQDPRWXFLGVGRTNNRKLTFLLFFFGLKKIWFFV

SEQ ID NO: 249800 - protein, 48 aa, Glycine max
  Clone ID: PAT_MRT3847_67599C.1.pep
TYVKKRNASPPQRLLKPLNPLGQIMTPILCFPKGLNPSRAGLEKIFFS

SEQ ID NO: 249801 - protein, 102 aa, Glycine max
  Clone ID: PAT_MRT3847_6759C.1.pep
GSFTRAFSAHFFKLAKPRKNLAHKGRLSLDPVWSGGSKSLSLNSGIKLASLCFKVTQGGNGRNLKGRGKLLKVEVGRSKREWINMEPMVLEIGDPKVWITHS

SEQ ID NO: 249802 - protein, 67 aa, Glycine max
  Clone ID: PAT_MRT3847_675C.1.pep
LGLGYSLSEEFPTECTKFQLLRGEKFQTGKNGKKKEKKSLKTPINLVSGTLEKLQKIHNKEYIYIST

SEQ ID NO: 249803 - protein, 116 aa, Glycine max
  Clone ID: PAT_MRT3847_67600C.1.pep
PKKRGGGPPKGPPGFNLKVSGSKFVWKFEGKTIFPRKNLCPRIPPALKPPPKRKNGSPPGTGPKIPGGPTGPLFFFVKKNGGVLTGGKPLGPPWEGKGQPQAGLLEVSTLGGCRGG

SEQ ID NO: 249804 - protein, 249 aa, Glycine max
  Clone ID: PAT_MRT3847_67601C.1.pep
QHVVAFLEKRGSAFSSSSTADEVTEGIDGTGLTAIVTGATSGIGAETTRVLAMRGVHVIMGVRNMNAAKDVKGAILKEIPAAKVDAMELDLSSMASVRKFASEFISSGLPLNILINNAGVFGTPFTLSTDAIELQFATNHMGHFLLTNLLLDTMKKTTQESKKQGRIVNISSILHQLTFRGGIPFDKINDPSSYHNWLAYGQSKLANILHANELARRLKQDGVDITANSLHPGAIVTNIFRHTSVLAGI

SEQ ID NO: 249805 - protein, 87 aa, Glycine max
  Clone ID: PAT_MRT3847_67602C.1.pep
ENNSPSPYAQDLCPPQGLTTQYVSPSNKSTISSEPTRGNSAVLKLYRFSTQSSCKLRPLGFRTLCSHVAMHRHQAQLGYDAWAREFG

SEQ ID NO: 249806 - protein, 82 aa, Glycine max
  unsure (1)..(82): unsure at all Xaa locations
  Clone ID: PAT_MRT3847_67603C.1.pep
NFRGEKPPKGGPPFFFFILKXXXIFFFFFFFFFFFFLFFFFFFFFFFXQKYLLVIYFSQTFPSRMEYYSYQHLITKTTCDTQ

SEQ ID NO: 249807 - protein, 237 aa, Glycine max
  Clone ID: PAT_MRT3847_67604C.1.pep
MYHPTRGGVRGGRDQFTWEDVKADKHRENYLGHSIKAPVGRWQKGKDLFWYTRDKKSQNAEMEAAKEEIKRIKEEEEQAMREALGLAPKRSNHPQGNRLDKHEFSELVKRGSTAEDLGAGHAEAARVQGLGFAREPRPWEESGSSKLSLSDTPAEVENVSMPNQPAPKTEDDSEDESRRKRRREERKEEKREKCVKHPSREDRKQEKREKHEKRHSRDSDDRKRHKKDKERRRHDSD

SEQ ID NO: 249808 - protein, 54 aa, Glycine max
  unsure (1)..(54): unsure at all Xaa locations
  Clone ID: PAT_MRT3847_67605C.1.pep
XGXKXKXXNYXNGIGKPIXLDWXEWASKKWSTNSHVXXIXELTXQLAXXSNXSF

SEQ ID NO: 249809 - protein, 117 aa, Glycine max
  Clone ID: PAT_MRT3847_67606C.1.pep
VVSPVFPARVSSPFTACSRCLLSPFSFVLPPLCVCEASVFIFPSFVSLARSPSPCLFLPPSVISLPYIAVGPCFVSARFLSCFSDCLFGGSCGYPAPSPVILLRSSPCVVGCLPARV

SEQ ID NO: 249810 - protein, 89 aa, Glycine max
  Clone ID: PAT_MRT3847_67607C.1.pep
MSTPVEYYRSLPPVSKAYGVACLMTTAAFYLQFYDAWNIALDYGSVFKRLQVWRLITNFFFLGPFSFPFAIRLIIIAKYGVSLERGPFD

SEQ ID NO: 249811 - protein, 269 aa, Glycine max
  unsure (1)..(269): unsure at all Xaa locations
  Clone ID: PAT_MRT3847_67608C.1.pep
TRPKSFLLTNSHEDHRLTTTRFTVHSLIFSHDDNEFAKRVGNLLSVAAQDFKLELKLASRSAQAEITAVYSLAKGFTDALSPDSVALGDLXRVGERERGRVGKVPAGTASRGSHHRFISVRCSHRDPFTQELVNSKERELIVPGPHTVRSCDLRIEQLRRRHVSARAVAESRKCVARNDVSGALQLLSSARASVSREQGDECLRWLEAKQAELRNQKLRSSNNNCLEEKGEPLTPMSAWRVAERLAKVAIMRKSMNRVSDLHGFEDARF

SEQ ID NO: 249812 - protein, 654 aa, Glycine max
  Clone ID: PAT_MRT3847_67609C.1.pep
MVSGWRRTFRTSNTIPQNTQEPENCNYCYDNNNINSSPKITSTNFSSSIPTLHSRTNSPLSKHNNNNARTPSPTKRNTPVSFHQSTPSSPNSPSTFSLLKSTLRLSKGSCEICMRSVKTGEGKAIFTAECSHVFHFPCLAGHVKKHRMVTCPVCNANWKQLQQNADENKGNAELKTTRSFKLHNYDDDEPLMSPTSVSRFNPIPESSENEEEEDEEQNDEETNFNVSSMIRTKNIDAFFSPEAAVVASNRSSETYVAVLNVKSQPRNAAANRPPADLVAVIDVGGSVSGEEYRMLKRSMQVVISSLGSADRLSVVAFSGGSKRLFPLRRMTGRGQMAARRVVDALSTVELRRDGTAARNNALKKAARVLEDRRQKNTVAKIILLTNSHEDQRLSSTRFDIHSLRYSYDGACNHAQHDHELAKRVGNLLSVAAQDFKLELKLTSRSAPAEISAVYSLAKGCTDALSPESVALGDLYAAEGREILVELKVPAGTASRGSHQRVISVRCSHRDPFTRELVISKERELIVPGPRTVRSCDPRIEQLRRCQVSARAVAESRRLMARNDVSGALELLSSARASVSREQGDECLRWLESEQAELRSQKLRSSCNNNCFDEKGEPLTPMSAWRVAERLAKVAIMRKSMNRVSDLHGFEDARF

SEQ ID NO: 249813 - protein, 93 aa, Glycine max
  Clone ID: PAT_MRT3847_6760C.1.pep
GQPATHGQTKTHRRPGAVATGDIGRVWPGTKMPGKMGNIYRTEYGLKVWRINTKHNIIYVNGSVPGHKNCLVKVKDSKLSAYKDLGKNLPFPT

SEQ ID NO: 249814 - protein, 42 aa, Glycine max
  Clone ID: PAT_MRT3847_67610C.1.pep
VQAHQPLLAASYNFCRGIIVWPRCHPIIHAVDRPKGINNYVQ

SEQ ID NO: 249815 - protein, 79 aa, Glycine max
  Clone ID: PAT_MRT3847_67611C.1.pep
GWFCWIYRFPSKINILLREIYSQTIDNFYTQYLSCTSRIYSHSSSKLEKKRIPIPPVESEKLIFLNIYSFRLVNLIIKP

SEQ ID NO: 249816 - protein, 371 aa, Glycine max
  Clone ID: PAT_MRT3847_67612C.1.pep
LTRPPTRPGRHRSRSISRSPEAQGPSLSAERIRRSPRRRSISPQRHSPRRSPHRRIPYSRRSRSPSPERRRMHSPVHRRSPSFRRRRSPSPVRRHRSPSPVRRRRSPSPVRRRRSPSPVRRRRSPSPVRRRRSPSPVRRRRSPSPVRRRRSPSPVRRRRSPSPGRRHRSPSPGRRHRSPSSGRCHRSPSPLGQRRSLSPRRRRSLVTRHRSPSPVRRIPPTNVQNRSDSPMQSPSHIRQRTESVTRQPSSPLGSAIRDKCGKASHYKSQDSMSTPEKSPIQSVSQEARSETSSEGRSPHESPMKQRRDKLSNEINTNPLKKQRTQRPSRDSPDTRDEAEETHYSRESRDPNMNSSKISKHFPGSKRKGSPA

SEQ ID NO: 249817 - protein, 253 aa, Glycine max
  Clone ID: PAT_MRT3847_67613C.1.pep
KGSPAKYRHEEFSPEMVSGYPASEHHYDNNDWCKKCQVIIRVISSGNGNEFPVQKSSMNKETFSREKPQESYAVDIKKSDVKDQSHSNYAKSSYRHHKSETTQDLVGKGDRVNHNASHDSVSEDSGKHRREGKDRKRHKRSEKKYTSSDEDYSDDSELEDRKEAKRRRKEEKKLQKEEKRRRCEEKRRRREERRAEKLKMKSKTDDISGDEEAKRMDYHQSDSVVTPSEQKKLEIELRNKALESLKAKKGMNN

SEQ ID NO: 249818 - protein, 58 aa, Glycine max
  Clone ID: PAT_MRT3847_67614C.1.pep
GFQKEKEIILLGFIYRDLFGPTFFKHGSMLGGEYLKKGKILKKGTPPLKGPSPSRPLV

SEQ ID NO: 249819 - protein, 313 aa, Glycine max
  Clone ID: PAT_MRT3847_67615C.1.pep
RRRSPSPGRRRRSPSPGPRHRSPSGGPRHKSPAPGRHHRSPSPLGQRRSLSPRRRRSLVTRHRSPSLVRRIPPTNVRRRSDSPMQSPSPIRQRYGSRTPSLSPSPLQRRSPIPSKQRSPNISPQRSPQDEQSSQSPIRCVSPSPIRKNSPRHQKSPLHSSMGRVRTESVTRQPSSPLGSAIRDKCGKASHYKSQDSMSTPEKSPIQSVSQEARSETSSEGRSPHESPMKQRRDKLSNEINTNPLKKQRTQRPSRDSPDTRDEAEETHYSRESRDPKMNSSKISKHFPVSKRKGSPAKYRHEEFSPEGCQASSF

SEQ ID NO: 249820 - protein, 77 aa, Glycine max
  Clone ID: PAT_MRT3847_67616C.1.pep
YPKVVKMRAPNNGDYPLPPSGAFFFPGASSRGGEIIIGRPLFDYVAPGGSFIKNSGFVNPQCGAGYKYFSPRPRELE

SEQ ID NO: 249821 - protein, 136 aa, Glycine max
  unsure (1)..(136): unsure at all Xaa locations
  Clone ID: PAT_MRT3847_67617C.1.pep
MLLARISHRCIGSTLTKPFSAVISTTDTPLTIETSIHSTAHNCEPPSRAVATSWGELLTFFLDMALMRRMEIAADSLYKAKLIRGFCHLYDGQEAVAVGMEAAITKMDSIITAYXDHCTFLGRGGTLLEGSAELMG

SEQ ID NO: 249822 - protein, 58 aa, Glycine max
  Clone ID: PAT_MRT3847_67618C.1.pep
SAPIRPADFTFSRSRILALYLRKICYISYSNILLKCLKDIQFSVHGMCTLNFKLNYTI

SEQ ID NO: 249823 - protein, 56 aa, Glycine max
  Clone ID: PAT_MRT3847_67619C.1.pep
MRYALVDMDSQENEIRLVLCLMDSAKATENNNLVVVEALEKQIDLLGLSQVAAMRK

SEQ ID NO: 249824 - protein, 145 aa, Glycine max
  unsure (1)..(145): unsure at all Xaa locations
  Clone ID: PAT_MRT3847_6761C.1.pep
VVYYIQKEYTLHWGLCLLGENHIFVYTFTGYTTTLDAESYGTIDNIQVNIHDKDGIPXTNIMLIFAGKQXLEEGRTLADYNIQKESHSSLXLPLRWGMQIFVXTLTEKTQTLEVXSSDTIYTFIAKIHDKDGFRPDQQMTIFAES

SEQ ID NO: 249825 - protein, 87 aa, Glycine max
  Clone ID: PAT_MRT3847_67620C.1.pep
KKNHGLLKILAPPNFPFCPDRAKKKTANKIGKGAYGLKPGRAKTPLLWGKSPWAYFPLKNFLGFYRNPLGGPPLSPIPGFIKLPQGV

SEQ ID NO: 249826 - protein, 115 aa, Glycine max
  unsure (1)..(115): unsure at all Xaa locations
  Clone ID: PAT_MRT3847_67621C.1.pep
AKDVEQVTEQGEYSEKDYHNPPPAPLSDPDELTKWSLDRAARGEFIATLLCLYITMLTIIGCKRLRDSXIPGDAECDGGGRLSIAWAFGGMIXMLEDCADELCGGHISPAVTFGV

SEQ ID NO: 249827 - protein, 82 aa, Glycine max
  unsure (1)..(82): unsure at all Xaa locations
  Clone ID: PAT_MRT3847_67622C.1.pep
RXXXKDFLTFFSXKXXWFNIMNLSLYVRPLGRGISRLHSTMXLXXTYXFLEMPNPISPNPNVPKHGCDIARKEIASEYIWGI

SEQ ID NO: 249828 - protein, 72 aa, Glycine max
  Clone ID: PAT_MRT3847_67623C.1.pep
LLNIPNRNIVSGRAEEATDSNTMEAGFDDVIFTWILKWTRSRCSINDNKVTDNRAVGGVGVIFAAIADAIAL

SEQ ID NO: 249829 - protein, 165 aa, Glycine max
  Clone ID: PAT_MRT3847_67624C.1.pep
KKSNSNENKAVLSAEKCGKDCCKNDTYREATTNKNESSGLSKLSSLKGNHNGNLVSIEVHIVKPCNGCGLGKVKMCEDFSCRTNNSSSDCCQEQSKTEKSDTGSIVTQEASIATLESDGYKGKSMDISKLSGTSVTPKCCKNLCCNDSVNNISNLSLSQPEIVIE

SEQ ID NO: 249830 - protein, 87 aa, Glycine max
  Clone ID: PAT_MRT3847_67625C.1.pep
EQTYRPLLLYLIDMCMVEEFQFFCVVIEDENPSSVARLGYYEMLMWLKDNNEEKIQGICDNIAENKGEDTSDIQENYLLALCESERM

SEQ ID NO: 249831 - protein, 56 aa, Glycine max
  Clone ID: PAT_MRT3847_67626C.1.pep
DSLSDLNLFCWFLSSLFTDVVMPVKPWTSALTIICAIGLPRRTLLLLSYLSLSSSH

SEQ ID NO: 249832 - protein, 60 aa, Glycine max
  Clone ID: PAT_MRT3847_67627C.1.pep
AFLNILVYYFLTQGLHQILFLCVYLWLCTLHGSKSSLIKHLVQINNSSKKLSIDYTEIIV

SEQ ID NO: 249833 - protein, 61 aa, Glycine max
  Clone ID: PAT_MRT3847_67628C.1.pep
VRITASIIVLDFMVMNCWGSEGGQGESKRVSLGMQGRETTLERGVREVKQETLTDSEGPSR

SEQ ID NO: 249834 - protein, 92 aa, Glycine max
  Clone ID: PAT_MRT3847_67629C.1.pep
KAPFVSPDSWGLPPLKKKLFLLELKKSCLYGFPPPERPPPTPPKPGVLNPPPNPGLLNPPPNPGLGNPPPPKPGKPPPPKPGKPPPPKPGKP

SEQ ID NO: 249835 - protein, 195 aa, Glycine max
  Clone ID: PAT_MRT3847_6762C.1.pep
SITTTTPCIIPGSRINATTHHYNNYHEMSSTTTSGSAGSVFYHRSTPPISMPLADHQTLNTRQQQQQQQQQEGAGNVSLSPMIIDSVPVAHHLHHQQHHGGKSSGPSSTSTSPSTAGKRLRLFGVNMECASSTSEDPKCFSLLSSSSMANSNSQPPLQLLREDTLSSSSARFGDQRGVGEPSMLFDLDPSLQYRQ

SEQ ID NO: 249836 - protein, 32 aa, Glycine max
  Clone ID: PAT_MRT3847_67630C.1.pep
QLLSDGGSNKNVSSYLNFRAIKHLEHLWHGVS

SEQ ID NO: 249837 - protein, 56 aa, Glycine max
  Clone ID: PAT_MRT3847_67631C.1.pep
VNVHGGTVALGHHIGCIGARIQVTHLGVLKQKNGSVRNWWPSNGAGGAFAMDVELQ

SEQ ID NO: 249838 - protein, 61 aa, Glycine max
  Clone ID: PAT_MRT3847_67632C.1.pep
LPVINASSNIAMVVTGAGRADAVYSALEEAPSDYKLPAQLVSPREGELKWFLDKGAASRLW

SEQ ID NO: 249839 - protein, 629 aa, Glycine max
  unsure (1)..(629): unsure at all Xaa locations
  Clone ID: PAT_MRT3847_67633C.1.pep
LENLNARVLFLAQLYEDDKCCSFLEEQSFPEILIKAMSFEKPIIAPEGLMNRKYVDDSRNGQLWTKXSHTVLRQILLEVISKGKISPLACNIASIGRSTAKNLMASEAIDGYASLLQNILRLPSEVSPPKAVSEIAPNFKEQWQWHLFEAFPNMTYQNRALRSNTFLDKYEHQLNHSQKNRSTTAVSANDVFVYSLWEEEKYTQLAITKKRREDEELKDRMEQSHGTWEDVYKSAKRADRSKNDLHERDEGELERTGQPLCIYEPYFGEGSWPFLHKKSLYRGIGLSGKGRRPGRDDVDAPSRLPLLNNGYYRDLLSDYGAFFAIANKIDRLHRNAWIGFQSWRATARKASLSIIAENALLDAIQSKRYGDALYFWVRMDMDSRNPSQTDFWSFCDAVNAGNCKFAFSEAMRGMYGVKGDADSLPPMPVDGDTWSVMQSWAMPTRSFMEFVMFSRMFVDALDAQMYDEHHLTGHCSLSLSKDKHCYSRLLELLVNVWTYHSARRMVFVDPETGLMQEQHKFKSRRGQMWIKWFSYSTLKSMDEDLAKLSDFEDPARHWLWPSTGEVFWQGVFERERSLRQKEKEKRKQKSIEKQNRMRKRHRQQVIGKYIKPPPDEESSNSSMLAVTAS

SEQ ID NO: 249840 - protein, 126 aa, Glycine max
  Clone ID: PAT_MRT3847_67634C.1.pep
MKKLNLILSKCKNLSKHLGRSSSFNSPRSKFAKEDLWEGNGMQEGEHCETVFVGSTRKRYVISSKYLNHPLLKALINNSKQKGSDESVLVVNCEVVLFDHLLWMLENADPKFGSDSLEELAELYVF

SEQ ID NO: 249841 - protein, 58 aa, Glycine max
  Clone ID: PAT_MRT3847_67635C.1.pep
YKLQLQHCLTILIFIFYFQILLFPLFSKCPQSFWFQCSTIIKILLHIIKHTLITYYPS

SEQ ID NO: 249842 - protein, 610 aa, Glycine max
  unsure (1)..(610): unsure at all Xaa locations
  Clone ID: PAT_MRT3847_67636C.1.pep
MLNSSFLSLSEHTFSHTPHHFPTRSASQNPNLHPKFQSLAFGNRGGSEFPSGSCSNTPRRKGVLVVRSKSTLGVEEVVVKGGGVKGKGEEFDAIVIGSGIGASGXVAGTQLAVKGARVLVLEKYVIPGGSSGFYQRDGYTFDVGSSVMFGFSDKGNLNLITQALEAVGCRMQVVPDPTTVYFHLPNNLSVRVHKEYDKFIEELTSYFPHEKEGILKFYGECWKIFDALNSLELKSLEEPLYLFGQFFQKPLECLTLAYYLPQNAGAIARKYIQDPQLLSFIDAECFIVSTVNALQTPMINAAMVLCDRHFGGINYPLGGVGGIAKSLAKGLVDQGSEIVYKANVTSIIIEQGKAVGVRLSNGREFFAKTIISNATRWDTFGKLLKGVPLPKEEENFQKVYVKAPSFLSIHMGVKAEVLPPDTDCHHFVLESNWSKLEEPYGSIFLSIPTVLDSSLAPEGRHILHIFTTSSMEDWEGLSRVEYEAKKQLVADEITSRLENKLFPGLRSSIDFMEVGTPKTHRRYLARDEGTYGPMPRRIPKGLLGMPFNTTGIDGLYCVGDSCFPGQGVIAVAFSGVMCAHRVAADIGLEKKSPVLDSMLLRLLGWLRTMA

SEQ ID NO: 249843 - protein, 115 aa, Glycine max
  Clone ID: PAT_MRT3847_67637C.1.pep
ERSFYEVIGEKYPSSPLGHPSSVDPDDGGGVDNFSENYGTCSYNDGDLSSIFTNNSLRRNLGELPNQNFRGNSISRSSYSSPNSVISSVEGPVDSPSSILQVPDLNSETHSILQF

SEQ ID NO: 249844 - protein, 56 aa, Glycine max
  Clone ID: PAT_MRT3847_67638C.1.pep
LVKMRGGTDGVLMMLLREQEDERDLYEVVQGEFPEQHDLTVYDGNVIHGRCYEGHA

SEQ ID NO: 249845 - protein, 279 aa, Glycine max
  Clone ID: PAT_MRT3847_67639C.1.pep
MMRRGSGLGSAASHRSRESLPLPQLLENKIAAQESEIEQLVSDNRGLASGHVTLREALVAAAQDVQKLKSHIRSIQTESDIQIRILVDKISKGEVDIRASDSVKKDLQKAHIEAQSLAASRQEVSAQIHRATQELKKVHGDVKSIPDLQAELDSLLQEHQRLRGTFEYEKNKNIELVDYMKAKEKNLIAMAREVEVLRAEILNAEKRVNAPNLFGAATPGHSSGPFADVYGRVHGQMAAGQVGESMVPVGESNGVAAINSAGVSGALWSSPYDPSVGRR

SEQ ID NO: 249846 - protein, 92 aa, Glycine max
  unsure (1)..(92): unsure at all Xaa locations
  Clone ID: PAT_MRT3847_6763C.1.pep
RDDTTXDPYAVGQEDAPGIAGIQEWWWADYENKNHAGKIFQLREGFKALIENIYTGRGGLVDDRACPLRAGAXWNGAMIDVADCVKWCIVNG

SEQ ID NO: 249847 - protein, 74 aa, Glycine max
  Clone ID: PAT_MRT3847_67640C.1.pep
TAAKKRQKGTAARKRQKGTAAKKRQKGTAAKKRQKGTAAKKRQKGTAAKKRQKGTAAKRRQKGQIKHLVYLVTR

SEQ ID NO: 249848 - protein, 212 aa, Glycine max
  Clone ID: PAT_MRT3847_67641C.1.pep
MKSPTIFILFLLSAFYTSLLPSATAQVVVDMEGNDLQNGGKYYVLPVIESSYGGIRVAATGKERCPLTVVQSADPYDKGIATIISTPYRVPVIREGFPLNITFGNFAVILPCVPLRSEWTVVNGQPEGPAVKIGSPPNAENGWFEIEKLLTSGYKLVFCTRPERSYCQDIGIHVDDENHARLVLTNDDPLVVEFLKYDPFWPQNNLVLPTSQ

SEQ ID NO: 249849 - protein, 61 aa, Glycine max
  unsure (1)..(61): unsure at all Xaa locations
  Clone ID: PAT_MRT3847_67642C.1.pep
XDVACPRRTVSLWIPSRAAPPLLCFFFFIILFYFFFLFFFFFFFFKKQKKRGAGVIITKKL

SEQ ID NO: 249850 - protein, 53 aa, Glycine max
  Clone ID: PAT_MRT3847_67643C.1.pep
MESKGGKKKSSSSSSKSIFYEAPLGYSIEDVRPNGGIKKFRSAAYSNCSRKPS

SEQ ID NO: 249851 - protein, 375 aa, Glycine max
  unsure (1)..(375): unsure at all Xaa locations
  Clone ID: PAT_MRT3847_67644C.1.pep
TRCFRFAHNRRESNRIESKGKCRMDDMPLPALFEQARKIHAAATDSGADQEVVKKGCEALHRCEDMVNNLGLFSPNETKEDISTTNLKYILVPFYLAELTEKIAQDDRIQILKSSQAKLKEFISFCEAMELVPKEELESYIDGAPKTVADQRARKIARFKRQRAAESKLLEIKERKERRGRSTKAAEXMLSAGKDRQSKDGDKEFSKDVLDERAKKAEAWHHDSAVRARYTKPSSPITCATFAQDVLEGRAKASQAHDHKHQPLIFGPXASLVNGNHXQPERERMAAQVFQPSHRMPTMSIEEAGLKEMEIMNKWQERNVRLMEEANSSWHNDRKSKPGEDDDEDDAAQEKARAWDDWKDDNPRGAGNKRLTPCG

SEQ ID NO: 249852 - protein, 118 aa, Glycine max
  unsure (1)..(118): unsure at all Xaa locations
  Clone ID: PAT_MRT3847_67645C.1.pep
MDDMPLPALFEQARKIHAAATDSGADQEVVNYTRGSFIFPSAQPYPHRNFSEEVAILDGYFGKLGAGSNAYILGGQDKAQNWHVYSASADSVTQCDXNSGIRKILPDSEICDFDFEPC

SEQ ID NO: 249853 - protein, 94 aa, Glycine max
  Clone ID: PAT_MRT3847_67646C.1.pep
LACAPQSTELLYVYILQNENVTQNNELIVYSCIIILKKKLFRFPKRKLVTTYQLKYIILHAQLHRAKYTNLCARLALFILLMVEKCKHTHFLYT

SEQ ID NO: 249854 - protein, 355 aa, Glycine max
  Clone ID: PAT_MRT3847_67647C.1.pep
MAMAVSAIGFEGFEKRLEISFFQPGLFADPEGMGLRALAKSQLDEILTPAACTIVSSLRNDHVDSYVLSESSLFVYAYKIIIKTCGTTKLLLAIPPILKFAEMLSLNVRSVNYTRGSFIFPGAQPYPHRNFSEEVAILDGYFGKLSAGSNAYILGGQDKSQNWHVYSASADSVTPCDNVYTLEMCMTGLDREKAQVFYKEQSASAAIMTVNSGIRKILPDSEICDFDFEPCGYSMNSVEGAAVSTIHVTPEDGFSYASFETVGYDFKVVNLNEMVKRVLACFLPTEFSVAVHVDGASKLFDQTCFLDVKGYCREERSHEGLGMGGSLVYQKFAKTCDCGSPRSTLKCWKEEDEEE

SEQ ID NO: 249855 - protein, 355 aa, Glycine max
  Clone ID: PAT_MRT3847_67648C.1.pep
MAMAVSAIGFEGFEKRLEISFFQPGLFADPEGRGLRALTKSQLGEILTPAACTIVSSLKNDNVDSYVLSESSLFVYAYKIIIKTCGTTKLLLAIPPILKFAEMLSLNVKSVNYTRGSFIFPSAQPYPHRNFSEEVAILDGYFGKLGAGSNAYILGGQDKAQNWHVYSASADSVTQCDNVYTLEMCMTGLDREKAQVFYKEQSASAAMMTVNSGIRKILPDSEICDFDFEPCGYSMNSVEGAAVSTIHVTPEDGFSYASFETVGYDFKAVNLNEMVQRVLACFLPTEFSVAVHVDGASKSFEQTCFLDVKGYCREERSHEGLGMGGSVVYQKFGKTSDCGSPRSTLKCWNEEDEEE

SEQ ID NO: 249856 - protein, 46 aa, Glycine max
  Clone ID: PAT_MRT3847_67649C.1.pep
GHILRALPVPCCGFCFFFRAREIPGGWGLGRVFSFFSRGGFFSTKG

SEQ ID NO: 249857 - protein, 58 aa, Glycine max
  Clone ID: PAT_MRT3847_6764C.1.pep
HFPLGGKDCELVGVSECGRDGGKGFITLFPIFPNPKKAVLPFFFYNLLLQEKMVGGKP

SEQ ID NO: 249858 - protein, 421 aa, Glycine max
  Clone ID: PAT_MRT3847_67650C.1.pep
TRCFRFAHNRRESNRIESKGKCRMDDMPLPALFEQARKIHAAATDSGADQEVVKKGCEALHRCEDMVNNLGLFSPNETKEDISTTNLKYILVPFYLAELTEKIAQDDRIQILKSSQAKLKEFISFCEAMELVPKEELESYIDGAPKTVADQRARKIARFKRQRAAESKLLEIKERKERRGRSTKAAALSTPVEAGEEEVLDDDGEEEREAWITTISLAICKALDMLDMLKKEEEMLSAVKDRQSKDGDKEFSKDVLDERAKKAEAWHRDSAVRAQYTRPSPPITCATFAQDVLEGRAKASQEHDHKHQPLIFGPASLVNGNITTERERMAAQVFQPSHRMPTMSIEEAGLKEMEIMNKWQERNVKLMEEVNSSWHNDRKSKLGEDDDDEDDDAAQEKARAWDDWKDDNPRGAGNKKLTPCG

SEQ ID NO: 249859 - protein, 355 aa, Glycine max; identical to SEQ ID NO: 249854
  Clone ID: PAT_MRT3847_67651C.1.pep

SEQ ID NO: 249860 - protein, 111 aa, Glycine max
  unsure (1)..(111): unsure at all Xaa locations
  Clone ID: PAT_MRT3847_67652C.1.pep
MKMKVLVLFVATVLAAXECHGSHYHKFPLQMTTGFGGQYSNDVACASWTLGVEAHNVLTWPTVPAACGEYISDYVLGDPXTSDSKSVHQQSYFYATSLTLTIKYVLVMDVD

SEQ ID NO: 249861 - protein, 67 aa, Glycine max
  Clone ID: PAT_MRT3847_67653C.1.pep
LDFSIQHYIMGHGVVIKDLILHILSFDARPHLYLNLNLIELILLSNMIIIKSLAFSLLNVLTVILIF

SEQ ID NO: 249862 - protein, 93 aa, Glycine max
  unsure (1)..(93): unsure at all Xaa locations
  Clone ID: PAT_MRT3847_67654C.1.pep
ARNSARDNFELKCPLKLKKKKKXXGXXXXSSSTXEXIXDRXXQXXXFPXXXXXXXFXEXXXXXVXXXKLLXAXNSTXHXXXXSRHXXFIXLVP

SEQ ID NO: 249863 - protein, 162 aa, Glycine max
  Clone ID: PAT_MRT3847_67655C.1.pep
NSARASLTATQQAVILAYCLLIEKSSRHDELQRWDMAPYIEAIDSQHLFYFTIRCLCDVLRIRWELSRSRTKERALLMMDNLVKHVYESSPAIAERIAFSYAVYMPSIPALRKEYGLLLVRCGLIGVAVKEFEDLELWDNLIYCYSLLEKKAIVVELIRKRL

SEQ ID NO: 249864 - protein, 31 aa, Glycine max
  Clone ID: PAT_MRT3847_67656C.1.pep
ENLRLITLAIPVNKPGRVESVCLSRIVERQC

SEQ ID NO: 249865 - protein, 65 aa, Glycine max
  Clone ID: PAT_MRT3847_67657C.1.pep
RVVQPSKQRSKALAWCVNFFSFRKRLIYLCVINCRLLYFIPPFVRIGIFLVLRMIIIFIKGSIIS

SEQ ID NO: 249866 - protein, 126 aa, Glycine max
  unsure (1)..(126): unsure at all Xaa locations
  Clone ID: PAT_MRT3847_67658C.1.pep
VRVKISNFIRLAFYSFLIYSLIYLAFSLPLIRDTFDIFWXSNLLVGDDISNLYGVVIKXKCSCCTNYCHANFTLYFTYNFCTDPCFAYTFMVRKPCYFNTGGMVLDVDTCWKDWYTDIVFVLIAVH

SEQ ID NO: 249867 - protein, 91 aa, Glycine max
  Clone ID: PAT_MRT3847_67659C.1.pep
AISGDLHAAHWWRRRMRMSTKKSGVGMRIVDGKGVNDEEKIKPSRADERDDLAVVDLLRELKETCSNQEGSVFVIFFLRQAFSSAHVVQPP

SEQ ID NO: 249868 - protein, 65 aa, Glycine max
  Clone ID: PAT_MRT3847_6765C.1.pep
YDQDKREKMLEMLKIGGLMKHFLFRSIVKIIERIDGAQIVFFLHRCCFYFLYLILIFRTRVRTRG

SEQ ID NO: 249869 - protein, 69 aa, Glycine max
  Clone ID: PAT_MRT3847_67660C.1.pep
KLPYVERVNCLENMHVGIKSYQCLPLMQQIICINPVEYCCPQTKDLTLERVINFYLYFSRGNFWGLRDY

SEQ ID NO: 249870 - protein, 225 aa, Glycine max
  Clone ID: PAT_MRT3847_67661C.1.pep
MQKVEESVMESLVCPSFSAYSSNTLDDIADQVIRNDVRFQENDTDFEFVAFRKVADGVFVDNNATPAFPIFDRDLATAAAEDSGEGKRRASGEEDDVAAIQITLGKLLMDDSSASCSSSEVEDELENVPPGTYCVWTPRKASPAPASPCRKSKSTGSSLSKRWKLLDLLRRSNSEGKESVVFLTPSSVNSAKKGTKSETGKKSLASSGGGEKEIAAVPAVSAHEA

SEQ ID NO: 249871 - protein, 172 aa, Glycine max
  Clone ID: PAT_MRT3847_67662C.1.pep
VLEQILLSWFQCQMLEVEQPVLFYYNKENRCKSWRFPSYNFSMSLIWSPFLVEAAIFEDENGVSSSNVELHLDKLDSKWTDQYLDFDYIIFSTGKWFLKSAIYYENDTILGCHFCPKRNLTELGFNLAYRKALKLVMNFIVSSNHKRVIFFRTFTPDHFENMESVNGGTCNR

SEQ ID NO: 249872 - protein, 182 aa, Glycine max
  unsure (1)..(182): unsure at all Xaa locations
  Clone ID: PAT_MRT3847_67663C.1.pep
MILNSCSMSPQPLSPHNFRDLFDSVEAFLFDCDGVIWKGDELIDGVPQTLDMLRAKGKKLVFVTNNSWKSRSQYADKFRSLGISVSAXEIFSSSFAAAMYLKVNNFPSQNKVYVIGGEGILEELQLAGITAFGGPDDANKTIDLKQNCFVEHDKSVGAVVXGIDPNINYYKLQYGTXLCIRE

SEQ ID NO: 249873 - protein, 49 aa, Glycine max
  unsure (1)..(49): unsure at all Xaa locations
  Clone ID: PAT_MRT3847_67664C.1.pep
GXKXXTAQQSXIXXXKTNWXILLKLVLANSSTHLNFVXSSSVLFHAXXG

SEQ ID NO: 249874 - protein, 83 aa, Glycine max
  Clone ID: PAT_MRT3847_67665C.1.pep
RNCCNILIPKFSTIRNSDFVKRIDIVCVPVIIAGKREGPAIGIDLGTMYSYVRLLQHDRVDIIAIDHGDITTPSYVAFNDAVL

SEQ ID NO: 249875 - protein, 90 aa, Glycine max
  unsure (1)..(90): unsure at all Xaa locations
  Clone ID: PAT_MRT3847_67666C.1.pep
NPGVPRLNGLFFXAPFLSCLATHQALPVRPSHQLARPNGHCHPPCSRTLNGAAPWVTPLVTAALAVPLPPPPSLAFPLLLATFRLAFPSL

SEQ ID NO: 249876 - protein, 268 aa, Glycine max
  Clone ID: PAT_MRT3847_67667C.1.pep
MGTGDSDSESNGWNRARGLALKTLLLIGGALLVKRLRKSTTRWDHAHFVSNSLTGEKYSKEQASRDPDNYFNIRMLTCPAAELVDGSKVLYFEQAFWRTPQKPFRQRLFMVKPCPKELKCDVELSTYAIRDMEEYKNFCDRPRDQRPQPEEVIGDIAEHLTTVHLKRCPRGKRCLYEGSTPPGGFPNSWNGATYCTSELAILKNNEIHTWDRGYDDDGNQVWGQKEGPYEFKPAPTSSFSDMFSPLNFPPPPSMERRIEGSFVLQEQE

SEQ ID NO: 249877 - protein, 45 aa, Glycine max
  Clone ID: PAT_MRT3847_67668C.1.pep
MVMRYLIISDGVTRSDVKCLSRFQAVGVKLLTSENLLTSERLLRL

SEQ ID NO: 249878 - protein, 91 aa, Glycine max
  Clone ID: PAT_MRT3847_67669C.1.pep
ENPNLFLHLAFTATFFAGVLQASLGLFRLGFIVDFLSHATIVGFMGGAATVVCLQQLKSILGLEHFTHEADLVSVMRSVFSQTHEWRWESA

SEQ ID NO: 249879 - protein, 89 aa, Glycine max
  Clone ID: PAT_MRT3847_6766C.1.pep
MASKTTIHCCFRGEDTRNSFTGFLFQALSRKGTIDAFKDGKDLKKGESIAPELIQAIQGSRLFFIVVFSNNYAFSTIRKKQVYCSRKIT

SEQ ID NO: 249880 - protein, 57 aa, Glycine max
  Clone ID: PAT_MRT3847_67670C.1.pep
KKPVLEGKGNFPLEGTPPIVKTDPWEGKNGEKIWEGEFFLEELMGEDVSSKDELCSI

SEQ ID NO: 249881 - protein, 71 aa, Glycine max
  Clone ID: PAT_MRT3847_67671C.1.pep
QGPPIFIRGHIFFFQTIIFYGATPLRGPLGINPKNLCKHNGLINGKMRKIQNWPFINWAEIPPKNLWQHAN

SEQ ID NO: 249882 - protein, 57 aa, Glycine max
  Clone ID: PAT_MRT3847_67672C.1.pep
MKQNTFSENKINSNAVGITPGTNLHGGKIYLVQYIISLVVRKLKDDDLPDTIFICTS

SEQ ID NO: 249883 - protein, 470 aa, Glycine max
  Clone ID: PAT_MRT3847_67673C.1.pep
MVRVSAVRLSATMFSSTSLRNPNFLLLPTRFDAPVLRSHTLSFSNRLSLRCYAARAAFDRVPVLNPIVEMDGDEMTRIIWRMIKDKLIFPYLDLNIKYFDLGLQNRDATDDRVTVESAEATLKYNVAVKCATITPDETRVKEFGLKSMWRSPNGTIRNILNGTVFREPIICCNIPRIVSGWKKPICIGRHAFGDQYRATDAIITGPGKLKLVFVPEDGDAPMELDVYNFKGPGVALAMYNVDESIRAFAESSMSLAFAKKWPLYLSTKNTILKKYDGRFKDIFQDVYRIGSRQKFEEHSIWYEHRLIDDMVAYALKSEGGYVWACKNYDGDVQSDLLAQGFGSLGLMTSVLLSSDGKTLEAEAAHGTVTRHFRFHQKGQETSTNSIASIFAWTRGLEHRAKLDNNEKLRDFTQNLEAACVETVESGKMTKDLAILIHGPKVSREFYLNTEEFIDAVAHNLQKKLREPAVV

SEQ ID NO: 249884 - protein, 91 aa, Glycine max
  unsure (1)..(91): unsure at all Xaa locations
  Clone ID: PAT_MRT3847_67674C.1.pep
GSAVEEGPHQFQIFKEREEEKGKEEGREREKEKAQREREREEIGERKLTGGCKRSLGXPFRREKDERDRNLTERERERRGERREERGEKRE

SEQ ID NO: 249885 - protein, 192 aa, Glycine max
  unsure (1)..(192): unsure at all Xaa locations
  Clone ID: PAT_MRT3847_67675C.1.pep
EPQLKSRPTKRGKTIELDDAPSHQGENLTRFNSKKTVIFAPPEGEFKLMKYRIPGGVILPFKVSPPIKDLGQTRMKKNVKEKSVFGEKMFPLGVVIKFPVQKHTAKTIFTKTSGQEKYKASIVCVFXKKKNFRGKSDPPLSEKIDFFPTRTKKNSSTTPPIQREFQVPMPTVCVSRPLFLRGGEKREHTLVE

SEQ ID NO: 249886 - protein, 73 aa, Glycine max
  Clone ID: PAT_MRT3847_67676C.1.pep
KKSQSSISEPWVTPIISNRHRAAYQLYLNRGVKKNGVTKGKTDVIVKLYSIQKLSKKINRKNKMKSTGRPRRE

SEQ ID NO: 249887 - protein, 224 aa, Glycine max
  unsure (1)..(224): unsure at all Xaa locations
  Clone ID: PAT_MRT3847_67677C.1.pep
LKSAAAPGQPSGQVLHGAAGGMSPQVQARTQQLPGSTLDIKGEISPVLNPTAAGPEGSLMGMPGSNQGSNNLTLKGWPLTGXEQLRSGLLQQQKPFMQAPXPFHQLQMLTPQHQQQLMLAQQNLASPSASEESRRLRTLLYNRNIGLNKDSLSNPVGDVVXNVGSPLQGWGPAFARGDTDMLMKLKLAXVQQQQQQSSTNAQQQQLLQHVLSRPASQTSNHSMH

SEQ ID NO: 249888 - protein, 89 aa, Glycine max
  Clone ID: PAT_MRT3847_67678C.1.pep
TKSSHTHTKLQQFFYYGSPPSGIDPHRSLLRCGGRHRRLHPPRPVILALTGPTSSRSSRKVVLFVKHLGVGANVCFIHFLWYQHAHCRK

SEQ ID NO: 249889 - protein, 38 aa, Glycine max
  Clone ID: PAT_MRT3847_67679C.1.pep
GGSRKRDVLFSFCNFCFEFKDGYHQFGGVLVCIGEMGI

SEQ ID NO: 249890 - protein, 52 aa, Glycine max
  Clone ID: PAT_MRT3847_6767C.1.pep
VRIHARLTFAFEENLSNLLNATVTVQSDLQHHRALNQPKLINIKIEQVTLIN

SEQ ID NO: 249891 - protein, 42 aa, Glycine max
  Clone ID: PAT_MRT3847_67680C.1.pep
EPYFSFHRHDLKHNMCWVTQLTHQRKMLYYKKHSASGIVQVS

SEQ ID NO: 249892 - protein, 70 aa, Glycine max
  Clone ID: PAT_MRT3847_67681C.1.pep
TTNQREPSKFKPRVYLRIVSVESLVSLHPRVMAINPLTIIAYRVIVAPYTPCPLTCIYCRCRWFYLCLNS

SEQ ID NO: 249893 - protein, 54 aa, Glycine max
  unsure (1)..(54): unsure at all Xaa locations
  Clone ID: PAT_MRT3847_67682C.1.pep
MGMKFIMKFLVEVDYIMDVGSCYKTAGFGYVFFLKINECINIXNACLYAWVGFF

SEQ ID NO: 249894 - protein, 80 aa, Glycine max
  unsure (1)..(80): unsure at all Xaa locations
  Clone ID: PAT_MRT3847_67683C.1.pep
MEGKEQDVSLGANKFPERQPIGTAAQSQDDGKDYQXPAPAPLVDPTGLTTWDLYRARIAXLGAHFLVIIHDCLTVMGVDG

SEQ ID NO: 249895 - protein, 80 aa, Glycine max
  Clone ID: PAT_MRT3847_67684C.1.pep
HGFFSSNLALSVLNLPQSLAAHPTSLHKNRHQPFHLHITLIVVVRLKVRTHYKLNFDIVRNPFPTPPHYYLLILFFVLSS

SEQ ID NO: 249896 - protein, 59 aa, Glycine max
  Clone ID: PAT_MRT3847_67685C.1.pep
FKLQSQYKISKFVPSLDGFKVNFRNNSLILYAAPFPCQRARSVPPPQRALSFFYKGFEY

SEQ ID NO: 249897 - protein, 90 aa, Glycine max
  unsure (1)..(90): unsure at all Xaa locations
  Clone ID: PAT_MRT3847_67686C.1.pep
PRTQGALRAAAPQIFYTXXKRKERERVEKRPGHKTQEQYTRRCNGREHEGKNTWKRQAHKRRKAEGGPTPKGRPINTATGSGAAAKQRGG

SEQ ID NO: 249898 - protein, 98 aa, Glycine max
  Clone ID: PAT_MRT3847_67687C.1.pep
VCINWIKSRILTVSLFPFMCFVIGFILNTIAIFYGSLSAIHLGTIDDVFVICAFISFPLSLLDTAVLINSNDALIYPCCFKTILWFIPYINSYLTPFL

SEQ ID NO: 249899 - protein, 79 aa, Glycine max
  Clone ID: PAT_MRT3847_67688C.1.pep
APCKRYYREVGSVYTHRRLYIYLYLSLRVARIALGQMIITYISIRRVGRPCYYIRDIVLTIRNDFELLNDQWANDISRS

SEQ ID NO: 249900 - protein, 63 aa, Glycine max
  Clone ID: PAT_MRT3847_67689C.1.pep
RENLFLLLIQTLEHPLLGRVLLALLVIKITQGLQSFNPNFIFLYLPGSVVLISSQVGFSFLHI

SEQ ID NO: 249901 - protein, 53 aa, Glycine max
  Clone ID: PAT_MRT3847_6768C.1.pep
TPITQGLDSSLTGYTKRHDKCLFSFRAATVEECLQVASSHTSHREKWPMHGDN

SEQ ID NO: 249902 - protein, 48 aa, Glycine max
  Clone ID: PAT_MRT3847_67690C.1.pep
CLVSAQQELYSPTSAFDLAYHPVQAPDQFVNVVPTFSYRQVEILGVAS

SEQ ID NO: 249903 - protein, 73 aa, Glycine max
  Clone ID: PAT_MRT3847_67691C.1.pep
VTSKPIQNNRSIEKDKVFRIYKTQGTCFEMKQRKKRGNFGSKEEVFFNSTNNSNYKGIIHTQNQPKVRFKTKN

SEQ ID NO: 249904 - protein, 83 aa, Glycine max
  Clone ID: PAT_MRT3847_67692C.1.pep
REELCCCSSDPIRISMDSQTPKPRSHPPSAAGNLIIAMFKTSQTYIPTSLPCSSTSLALRRNKISTTRSRISKTSSLEIPATL

SEQ ID NO: 249905 - protein, 201 aa, Glycine max
  Clone ID: PAT_MRT3847_67693C.1.pep
PRVRPRVRPRVRETVPDWIAIVGSGYIGLEFSDVYTALGSEVTFIEALDQLMPGFDPEISKLAQRVLINPRNIDYHTGVFATKITPARDGKPVLIELIDAKTKEPKDTLEVDAALIATGRAPFTQGLGLENIDVVTQRGFVPVDEHMRVIDANGKLVPHLYCIGDANGKMMLAHAASAQGISVVEQVTGKDHVLNHLSIPA

SEQ ID NO: 249906 - protein, 95 aa, Glycine max
  Clone ID: PAT_MRT3847_67694C.1.pep
MQIFVKTLTGKTITLDVGSSYTIDNVKAKIHDMEGIPPDQQRFIFARKPLEDCRTLSYYNIQKESTLHLVLRIPSCMQIIIKTLTGKTITLEVES

SEQ ID NO: 249907 - protein, 427 aa, Glycine max
  Clone ID: PAT_MRT3847_67695C.1.pep
MHSSLSLSFSATSSSVATVSRSRHSFHSPAAAMPLNLRFCGLRRDAFGSGLAASLNRYHSHLPRRPHSAAVSAALSSNGSPPKSFDYDLLIIGAGVGGHGAALHAVEKGLKTAIVEGATRPGTCVNRGCVPSKALLAVSGRMRELKSDHHLKSFGLQVSAAGYDRQGVADHANNLASKIRNNLTNSMKALGVDILTGFGTILGPQKVKVGSSDKIVTAKDIIIATGSVPFVPKGIEIDGKTVITSDHALKLESVPDWIAIVGSGYIGLEFSDVYTALGSEVTFIEALDQLMPGFDPEISKLAQRVLINPRNIDYHTGVFASKITPARDGKPVTIELIDAKTKEQKDTLEVDAALIATGRAPFTQGLGLENIDVVTQRGFVPVDERMRVLDANGNLVPHLYCIGDANGKMMLAHAASAQGISSKKQVM

SEQ ID NO: 249908 - protein, 67 aa, Glycine max
  Clone ID: PAT_MRT3847_67696C.1.pep
PQARDAHVVRDVRNRPPSNRGNAHICWVGQQKVAQIMPAACPRKNLMFEGRYYMNARRTVSLNKMCQ

SEQ ID NO: 249909 - protein, 187 aa, Glycine max
  Clone ID: PAT_MRT3847_67697C.1.pep
PQTRTKPRVRGTGHSTHTNLGSECTSYDAGATGTIARWGESFEVSMGNSKENNDHTEVWGVKYKPSQKNYTCGFHLRASRDNNKSVESIYFGLGDFSNNKTEFALKITRIGRDSLRGGITGIDSSTAPMYFTRAKQDHTIETTIVPYGCSFRDGLFVMEMKKKVNAENAYMVTIGHYYVTNVGGLFC

SEQ ID NO: 249910 - protein, 138 aa, Glycine max
  Clone ID: PAT_MRT3847_67698C.1.pep
FTAVPPATAKVFSCNFCMRKFFSSQALGGHQNAHKRERGAARRYQSQRSMAIMGFSMNTLTMCRSLGVQPHSLVHKPCRDGIMVAPSFHDAYARIGMAWTPFWTEDQADMVWPGSFRLVPKQPQSPQEPLKLDLDLRL

SEQ ID NO: 249911 - protein, 41 aa, Glycine max
  unsure (1)..(41): unsure at all Xaa locations
  Clone ID: PAT_MRT3847_67699C.1.pep
ASAILNLLLRDGAPLLANVXPYLAYANDQSSPRDYARFNQQ

SEQ ID NO: 249912 - protein, 207 aa, Glycine max
  unsure (1)..(207): unsure at all Xaa locations
  Clone ID: PAT_MRT3847_6769C.1.pep
MKSTIFFALFLFCAFTTSYLPSAIADFVLDNEGNPLENGGTYYILSDITAFGGIRAAPTGNERCPLTVVQSRNELDKGIGTIISSPYRIRFIAEGHPLSLKFDSFAVIMLCVGIPTEWSGVEDLPEGPAVKIXQAEDDKCGDIGISIDHDDGTXRRFVVSKNIRLVWQFQILDKGLAARKIVAVSAVSHTPSEYTTMNHPWYESCTQ

SEQ ID NO: 249913 - protein, 31 aa, Glycine max
  Clone ID: PAT_MRT3847_676C.1.pep
CENEGSTQTLAASLNYPKSDILGRAPQVNAR

SEQ ID NO: 249914 - protein, 223 aa, Glycine max
  unsure (1)..(223): unsure at all Xaa locations
  Clone ID: PAT_MRT3847_67700C.1.pep
PRVRLNLLSFFFKTLALTVAPESSPAMSAPAEAPSFTASPPSETTPSPNSTALSPPPPSTINATVSPPPPEAASPPTSTVNSGLSTGTVSGIVIGAVLGSVGMLIIGGIFFCFYRNWKRKKNHSQPPQPKADIAGGTLQNWQDSVPPTTDGKVGFSPKPPPGGLVNQQQSSAALLTLVVNSSNTSSSFGSEKAKSYISPSPXTSLALSXSTFTYDELSMATDG

SEQ ID NO: 249915 - protein, 88 aa, Glycine max
  Clone ID: PAT_MRT3847_67701C.1.pep
TAARRRRRVRDKPSYHSLSLQRHKKKKKNLNPNPNSPKLDSFGESFSQNQGFLKTGIAFLPSIKFSATNFAIFPWFRIVEFGGKRPHF

SEQ ID NO: 249916 - protein, 50 aa, Glycine max
  unsure (1)..(50): unsure at all Xaa locations
  Clone ID: PAT_MRT3847_67702C.1.pep
LDPLERXPFLFXXXXXPLNCVLFYSQGIYSFVIADNLFASHKGYQFICFS

SEQ ID NO: 249917 - protein, 176 aa, Glycine max
  Clone ID: PAT_MRT3847_67703C.1.pep
MAVTTPCINATEKKHWWLTNRKIVEKYMRDARSLIATQEQSEIGSALNLLDAALAIYPRLDEALELRARCLLYLRRFKDVADMLQDYIPSLRMANNDDSGSSVSSDSSLSREGVKLLPTSDSDQSFKCFSVSDLNKIVMAGLCNTCNNEWYWRFLVLVKACCHLCLMEDAMVLLQT

SEQ ID NO: 249918 - protein, 192 aa, Glycine max
  unsure (1)..(192): unsure at all Xaa locations
  Clone ID: PAT_MRT3847_67704C.1.pep
MSDPYQISFAQAFLCSAFAACFAEFCTIPLDTAKVRLQLQKKVGVDDGVGLPKYKGLLGTVKTIAREEGISALWKGIVPGLHRQCLYXGLKNWXYDPVCVYKDSSSLTTLIFIRGLXAFGFTVLIGSPVDVVKSRMMGDSTYKSTFDCFLKTLLNEGFLSFYKGFLPNFGRVGIWNVILFLTLEQAKRAVRG

SEQ ID NO: 249919 - protein, 117 aa, Glycine max
  unsure (1)..(117): unsure at all Xaa locations
  Clone ID: PAT_MRT3847_67705C.1.pep
ESKQFEXWRDSLETVXPTIKKLRAYAERIRLAELEKCLGKMGDDINKKTQRAVDDLSRGIVNKLLHGPMQHLRCDGSDSRTLSETLENMHALNRMFNLETEISVLEQKIRAKVEQKP

SEQ ID NO: 249920 - protein, 52 aa, Glycine max
  Clone ID: PAT_MRT3847_67706C.1.pep
RRAKTPFRGGNNEPSTLVWNIIIQSLHPLHRIDTRKRPNATNMVKTPVSETD

SEQ ID NO: 249921 - protein, 96 aa, Glycine max
  Clone ID: PAT_MRT3847_67707C.1.pep
PNRCTILPFAKTIKLRPIAGASPSLPEPHKYSILSRPIQKPYTLAPHQFPYHLPRANSGVYNNFTYSTSHATLCPLPPPPPPPPPPPPPKKEDVIQ

SEQ ID NO: 249922 - protein, 32 aa, Glycine max
  Clone ID: PAT_MRT3847_67708C.1.pep
FVGAQMANKRATNELTHVFPSILKGNRSNTGA

SEQ ID NO: 249923 - protein, 63 aa, Glycine max
  Clone ID: PAT_MRT3847_67709C.1.pep
SGIKKQGAVKLDFEASQVEYIQIAGGHLLSLFAINCFCFHHQMLTQFLFWCVLLRLIVFMKGK

SEQ ID NO: 249924 - protein, 108 aa, Glycine max
  Clone ID: PAT_MRT3847_6770C.1.pep
LCVGIPTEWSVVEDLPEGPAVKIGENKDAMDGWFRLERVSDDEFNNYKLVFCPQQAEDDKCGDIGISIDHDDGTRRLVVSKNKPIVVHFIKLDKDSVVKKNHGLFCSE

SEQ ID NO: 249925 - protein, 51 aa, Glycine max
  Clone ID: PAT_MRT3847_67710C.1.pep
PFQTQWSLCLALKNPKSKKSILTLVPPQSLHNIMSINLVLMTEKNHTTTIF

SEQ ID NO: 249926 - protein, 84 aa, Glycine max
  Clone ID: PAT_MRT3847_67711C.1.pep
LYLAPLLFLSGSLESKLPLHIYIQDISVINVCKFSIPYICTYYIFIQLQTPSHAQQTCISHKSFTTLNQIINTQSFIPQTGTRR

SEQ ID NO: 249927 - protein, 83 aa, Glycine max
  Clone ID: PAT_MRT3847_67712C.1.pep
KPPNTLNSSNNNSKPPACAITYLKLNSGWDTFFCFLLLPRKLFLLVSMPQDFSMDPFSVLVARRAASVGVASHLKSNYRYYSR

SEQ ID NO: 249928 - protein, 116 aa, Glycine max
  Clone ID: PAT_MRT3847_67713C.1.pep
MTTRRVRYSPLATDEDDYIGDRNRPFDPRFDYTPKALDKVPWKSIALALFLLFLGTGLLFLSYFIFTGHMGGERSQAYGLLALGFLSFLPGFYETRIAYYAWRGAKGYRFSAIPDY

SEQ ID NO: 249929 - protein, 154 aa, Glycine max
  Clone ID: PAT_MRT3847_67714C.1.pep
SPHIIFHGFVLFLVFLFLRGKLAYIFTPDPEVAKAVGDLSPLLSFSFLLNSVQPVLSGVSVGAGWQSVVAYVNIGCYYLIGIPVGVLLDNLFHLEVKGIWIGMLFGTFVQTVMLITITFKTDWDKQVEIARNRVNKWAVTTENEESNSRSSISS

SEQ ID NO: 249930 - protein, 153 aa, Glycine max
  Clone ID: PAT_MRT3847_67715C.1.pep
MLATLVLICCLFTAFLFLSLPVMSQEVEDESEFSYDEKSENGPSNWGDIHPEWSLCNNGSMQSPIDLLNERVQIVSHLGRLQMNYQPSNATIKNRGHDIKLEWVAGAGYLQINETEYVLKQCHWHSPSEHTIDGKRLDLEVHMVHDTSSGQSA

SEQ ID NO: 249931 - protein, 68 aa, Glycine max
  Clone ID: PAT_MRT3847_67716C.1.pep
KNCPKCSSVIISILKFFTKNIPITQMNLRTCYIYILSPLAMNLMLSFTINNLTYEESINKRFLNMIIL

SEQ ID NO: 249932 - protein, 213 aa, Glycine max
  Clone ID: PAT_MRT3847_67717C.1.pep
MVVKVYGPASAACPQRVLVCLLEKGVEFELVHVDLDQGEHKTPEFLLRQPFGQVPAVEDGDFRLFESRAIIRYFASKYADRGPDLLGKTLEERALVEQWLEVEASNFNNLCFNIMFQLVILPKMGKPGDLALAHKCEQDIEKVLDVYETRLSQSTYLAGDNFTLADLSHLPGLEHLIEEAKLGHLVTERKNVNAWWEKISSRPAWKKLKDLIH

SEQ ID NO: 249933 - protein, 66 aa, Glycine max
  Clone ID: PAT_MRT3847_67718C.1.pep
FGSRRLCGARCRYRPFRYHRLTDIEGFILPVHGHWNPHDVTLRAIRPSLGDKPVTLLDREPWSLPG

SEQ ID NO: 249934 - protein, 125 aa, Glycine max
  Clone ID: PAT_MRT3847_67719C.1.pep
MRGTMSMGTSPLAVEARHRLPASIEDLYKRRLPRNKAKDAEKPFHLSVQDRSSRCKLSFLKLILLITICGIFVTLLYSPEVYNTNHLSSSGTRWIWGGSNPRYMSNVATDWDDILEITEKLTGED

SEQ ID NO: 249935 - protein, 169 aa, Glycine max
  unsure (1)..(169): unsure at all Xaa locations
  Clone ID: PAT_MRT3847_6771C.1.pep
RSRVGKRRFDPGDGEXMTLIPGTSVEEAYIKLIVELEKSVPTLIGINGPKDDKLTRSKIFDKPKTRCFTIIPMEFNHVVRXKVLNFVRFIMKKRNKLCXXVGINRYCMEWTGLSNRLLSKGTDILRCDYARCDGVITKQDMCTMAEMINRLCGGDEKLMRDRTHLLLAC

SEQ ID NO: 249936 - protein, 87 aa, Glycine max
  Clone ID: PAT_MRT3847_67720C.1.pep
RSRTIPESSSVTTRSLLFFLPFFFLLKYNFQSLLSNHLSKETIPTYSPLKLFTHSLNLSTPLSLPYSYFSIYHNSSHHTIFIPLKIL

SEQ ID NO: 249937 - protein, 48 aa, Glycine max
  Clone ID: PAT_MRT3847_67721C.1.pep
RGSPSKIPPLSVSCRYFVVFVPQRSIIKALPSACNGKKKGALWEEQNV

SEQ ID NO: 249938 - protein, 66 aa, Glycine max
  unsure (1)..(66): unsure at all Xaa locations
  Clone ID: PAT_MRT3847_67722C.1.pep
LHTPKYPFTNNYDQITLLMSFPHVNTPPPSLVAFVTKGSRNXSPMVVSGTYRNYNSSSISXHHSXN

SEQ ID NO: 249939 - protein, 38 aa, Glycine max
  unsure (1)..(38): unsure at all Xaa locations
  Clone ID: PAT_MRT3847_67723C.1.pep
EGVRTARSSRHHSEKVFRWQKIILKLAWXQAWSNASPT

SEQ ID NO: 249940 - protein, 66 aa, Glycine max
  Clone ID: PAT_MRT3847_67724C.1.pep
RSSQNHFVKALFPLPSKGSKFLVPVPSKPNPVGFLKKKNHQELIKGPPGKKKKKRCFVVPNPMYGM

SEQ ID NO: 249941 - protein, 36 aa, Glycine max
  unsure (1)..(36): unsure at all Xaa locations
  Clone ID: PAT_MRT3847_67725C.1.pep
XSXWGSVRPKSTFXNDIRDYRRSXKXXTXHIIIHTT

SEQ ID NO: 249942 - protein, 81 aa, Glycine max
  unsure (1)..(81): unsure at all Xaa locations
  Clone ID: PAT_MRT3847_67726C.1.pep
XLEPXXXXTXXXXXLICGXARHXTXVEDPXVPNXXXRNFDADXXAVXXXWXKXXEDRXANXXSTGVXXKXXEKEPRRVKXG

SEQ ID NO: 249943 - protein, 155 aa, Glycine max
  Clone ID: PAT_MRT3847_67727C.1.pep
EEKWLITSPASCSNVTSDDTDSLKLRSLWILYVISGATSTICVLLSAIQSLVKSCHSIVRQVAPEGNDTPSDHKVWEKVITHAKQIFNKKINNSSEAQEQVVTDCSLRWDRVNMTVSPEHQQEMASPLPGMLMLPSPPPEVQMTTHDLGITNTSK

SEQ ID NO: 249944 - protein, 66 aa, Glycine max
  Clone ID: PAT_MRT3847_67728C.1.pep
ANKVKLSIRHSHIKSPYCSYKTLSMHSSAKQISEAHRWPEMEECENSTNLWMCWLIKGHTRKAIPC

SEQ ID NO: 249945 - protein, 107 aa, Glycine max
  unsure (1)..(107): unsure at all Xaa locations
  Clone ID: PAT_MRT3847_67729C.1.pep
AATLRLVSDACQEWGFLHVANHVVSHELMKTPRLVWRDFFHQPLDVNXVYANTPLTYEGYGSTLRVKNWTIFXWSEYFFLHYMPRSVRDQSTWTALPTCFRSISYEY

SEQ ID NO: 249946 - protein, 227 aa, Glycine max
  Clone ID: PAT_MRT3847_6772C.1.pep
PRVRVHSLIDDDDRVYCDNCNTSIVNFHRSCPNPNCQYDLCLTCCMELRNELHCEEIPASGNERTDDTPPVTAWRAELNGGIPCPPKARGGCGTTILSLRRLFEANWVHKLIKNVEELTVKYQPPNIDLSLGCSMCHSFEEDAVQNSVRKAASRETSHGNFLYCPDAIKMEDTEFEHFQRHWIRGEPVIVRNVFEKGSGLSWHPMGMGRALFSLLGLHHLIPTFSHR

SEQ ID NO: 249947 - protein, 53 aa, Glycine max
  Clone ID: PAT_MRT3847_67730C.1.pep
GWETTTGGAFWEKKIYNSMRGGGLYIGYKITFAFMRNENYFILSPIYTAQFVV

SEQ ID NO: 249948 - protein, 45 aa, Glycine max
  Clone ID: PAT_MRT3847_67731C.1.pep
MHRTCTLEGPVNESQAHIFKSYRVKTVHRLIGMIGCHIKPILKPK

SEQ ID NO: 249949 - protein, 107 aa, Glycine max
  Clone ID: PAT_MRT3847_67732C.1.pep
HFFIERHHETGLSIHSFNTRVICVLLCHRSSLLSRSRESSNHVSREHHALGCRSFQRLSCCSHWIRYASFLSTYMSHSLLLVCLPRSEVLCKQQPMMLPRHQGRPEV

SEQ ID NO: 249950 - protein, 75 aa, Glycine max
  Clone ID: PAT_MRT3847_67733C.1.pep
RFLLQSLQPFLYGIYLRIDRLSVCLSTFLLWWCRSSRYDCSSKRTINSRSLFLIMSSCCGGCKRRVWQCSRKRDQ

SEQ ID NO: 249951 - protein, 78 aa, Glycine max
  Clone ID: PAT_MRT3847_67734C.1.pep
VKVSIWKTCKIIWGRVAGLEGSVEVLMMDSLRWSWQWHSANQSRVRRLMYAHESIKLFSITGSAFSFPFFYLEILLVS

SEQ ID NO: 249952 - protein, 69 aa, Glycine max
  unsure (1)..(69): unsure at all Xaa locations
  Clone ID: PAT_MRT3847_67735C.1.pep
XXNQXCYVXVLAGXGRXLPXVXXYXPXSTFLLFIXEXKXXXLFCHXVSMXSMXXFHQYIXXYIPXXCVX

SEQ ID NO: 249953 - protein, 70 aa, Glycine max
  Clone ID: PAT_MRT3847_67736C.1.pep
APLKGEESLGPNRPHQRIATYCLFVATMFPFGNQQVIFIRTRLTVWPTHTHIFKIASPSAVSFHRHVRVV

SEQ ID NO: 249954 - protein, 215 aa, Glycine max
  Clone ID: PAT_MRT3847_67737C.1.pep
MDSSLQLTIIAILVSLLVFLWHTKRNRGGSKNKSKEAPIPAGAWPLIGHLHLLGGDDQLLYRTLGTMADQYGPAFNIWLGTRRAFVVSSWEVAKECFTSNDKALASRPTTVAAKHMGYNYAVFGFAPYSPFWREMRKIATLELLSNRRLEMLKHVMVSELNMVMRDLYNSWVQNRSRPVLVELNRWLEDLTLNMVVRMVAGKRYFGASASCDNDD

SEQ ID NO: 249955 - protein, 225 aa, Glycine max
  Clone ID: PAT_MRT3847_67738C.1.pep
MASSQNVASIEPWMLRPPVTDSWLAEFFARDADTLTRALQKSLSGAVLPQDNHLSPFLHQPAAAAATPTVSSLSGSDQESAPRRRAAPPPSGKISKRKSRASKRSQTTFITADPANFRQMVQQVTGVRFGGAPIAPAAVVKPEPQRASGLARFPAGVGCLPTLDTSAFLLDHHQQQVVPASVNSGPGTGLSGPGHSPSPNPSLTLTTLQLEIVDDHQVDGMRLHY

SEQ ID NO: 249956 - protein, 78 aa, Glycine max
  Clone ID: PAT_MRT3847_67739C.1.pep
IFLIGTFSGSTTTSNVGTPQRIVEIIEKKPEEEPKVTHRVFLDIDVDKQRVDRIVMRLYGKSRPKTVENGRAVGTEER

SEQ ID NO: 249957 - protein, 102 aa, Glycine max
  unsure (1)..(102): unsure at all Xaa locations
  Clone ID: PAT_MRT3847_6773C.1.pep
SRXPFLAVGGRRVAVGAAGAVPVRLXVAVCFWGAGCXXVSGAFRAVRSFXCRLXXRXRXCGSGVFSAVXFGCARFVSLGRASCGPWPSLPFSLVLSLCRAQR

SEQ ID NO: 249958 - protein, 412 aa, Glycine max
  Clone ID: PAT_MRT3847_67740C.1.pep
EELPIRILADPESLFIPCQGLTLHYKLSLPGSPPLNISSAFCSTSSMAGGLSKLNRQLTFIPPKVHQQLYRSYSNRADAWADAAALLDGPVTSPHLTEDIPVLHLDEIHEDEETYKSELEQNSEDIGQVGIVLIHGFGGGVFSWRHVMGPLARQSNCTVAAFDRPGWGLTSRLSQEDWEKKELPNPYKLESQVDLLLSFCSEIGFSSVVLIGHDDGGLLALMAAKRVQTSMNSFNVTVKGVVLLNVSLSREVVPSFARILLHTSLGKKHLVRPLLRTEITHVVNRRSWYDATKLTTEVLTLYKAPLYVEGWDEALHEIGKLSSETILSAKNADLLLQAVKDIPMLVIAGAEDSLVSMKYCQAMASKFVNSRLVAISGCGHLPHEECPKALLEAISPFINDKLFFSVYNSQSQ

SEQ ID NO: 249959 - protein, 185 aa, Glycine max
  Clone ID: PAT_MRT3847_67741C.1.pep
MLQRRLLETELSMPPSYGGSGGNNTRDTFISDANFDTNMVIILAALLCALICALGLNSIARCALRCGRRFGDETAEQAAARLAGTGLKRRELSRIPVAVYGAAGGENTIPATECPICLGEFEKGDKVRMLPKCNHGFHVRCIDTWLLSHSSCPNCRHSLLEKTSAAPESGSGRRSEVVVVVEQAS

SEQ ID NO: 249960 - protein, 75 aa, Glycine max
  Clone ID: PAT_MRT3847_67742C.1.pep
DHASLRKELSWESSSKNGPQFGYINNHHPPKQNFTLSFSLSHTPQKKKLAILQFSSCFVSFTTPNPHNTLCSTHY

SEQ ID NO: 249961 - protein, 127 aa, Glycine max
  unsure (1)..(127): unsure at all Xaa locations
  Clone ID: PAT_MRT3847_67743C.1.pep
RDGAGGVDCFSVTLHEQESMDRDHSPVTRQFFPAEDADAAGATFGGGPGLTSTIPCAHWLRVKFCHSYSLCTGKSXGEVFLPMKKSRRGPXSMSSQFRGVTLYHITGRWESHIWHWGKQVYLCGSYT

SEQ ID NO: 249962 - protein, 62 aa, Glycine max
  Clone ID: PAT_MRT3847_67744C.1.pep
LNRPVQTRLYVNQVVGSCRQVWPILTPSCTFSCLWLGIDVFVLGGLSLAKLHDGHRFSKYEL

SEQ ID NO: 249963 - protein, 99 aa, Glycine max
  Clone ID: PAT_MRT3847_67745C.1.pep
TIDHALFDSPPLFDSDCDDHYQSVNYHVISLNGTQTNFAISTDHIHIHLNLSKPHSTHIFYNVTNSYPHFFHIHATNSQCKHNVRINESNEPFFLDQFS

SEQ ID NO: 249964 - protein, 32 aa, Glycine max
  Clone ID: PAT_MRT3847_67746C.1.pep
QRDLTEPYKIILLDPTSTLPCNIPPRSTVSKA

SEQ ID NO: 249965 - protein, 71 aa, Glycine max
  Clone ID: PAT_MRT3847_67747C.1.pep
KNKQAATLKDSLLLPPTFNFLPLLYILLNSFHSPSFYNPFTCKTFPFPTLTSSHQIPFSPTLFIPNSPIPI

SEQ ID NO: 249966 - protein, 143 aa, Glycine max
  Clone ID: PAT_MRT3847_67748C.1.pep
LASDEFEKHVAHESLKDQIPAVDKLYSTKANKEAKIMNLRQSVVGDLKLITDGKLYEGKHIPVSNTSAGENHVIQIPLMAQEEILSSSACDCRTGYGSKNSKPKATAMHLGAITIIRDSFASPDCNISGTRLMCDTYHTNTEN

SEQ ID NO: 249967 - protein, 51 aa, Glycine max
  Clone ID: PAT_MRT3847_67749C.1.pep
PPGPPLFPQRPRATGHTPMPSHKVCSFHYKVTTPLQCPQHYIYLQVASCFP

SEQ ID NO: 249968 - protein, 54 aa, Glycine max
  unsure (1)..(54): unsure at all Xaa locations
  Clone ID: PAT_MRT3847_6774C.1.pep
NGSSFSDGSGIGITNSNXLKTVYLWKWSPNLRSSESPLMILMDQIALTPQIFMF

SEQ ID NO: 249969 - protein, 51 aa, Glycine max
  Clone ID: PAT_MRT3847_67750C.1.pep
NKTGGGDKKFGFFGGKFFLFYPSQVFFKKISTYLAIIWDGIINIKFKNVYF

SEQ ID NO: 249970 - protein, 102 aa, Glycine max
  unsure (1)..(102): unsure at all Xaa locations
  Clone ID: PAT_MRT3847_67751C.1.pep
VEVDDRCLHNLYKHFFISRHTFITERSFSTLDGQXXXLSSAISTNIPTVDVGVITNQYHTKIIIYLPXKIVIIFYSEMIASTAHTWTTLSGTAADYFMLMTR

SEQ ID NO: 249971 - protein, 52 aa, Glycine max
  Clone ID: PAT_MRT3847_67752C.1.pep
QNNHPTNPGSAFPIRSLRGAFFRSMIISHSPFPQPEFSIFRLYKYSLKICRD

SEQ ID NO: 249972 - protein, 129 aa, Glycine max
  Clone ID: PAT_MRT3847_67753C.1.pep
MMLNPGRGPFMGGIGVGGANPPRGGRPVNMPPMFPPPPPLPQNANRAAKRDQRTADWNDRFGSGSEQGKSQDMLSQSGGPDDDAQYQQGYKGNQDDHPAVNNFRNDDSESEDEAPRRSRHGEGKKKHKL

SEQ ID NO: 249973 - protein, 161 aa, Glycine max
  Clone ID: PAT_MRT3847_67754C.1.pep
MGFPVGYSELLFPKLLLHILSLLGLLRKLICSLLRFMGLHDFLEPDIAWAETQTRVPEEFESVSATLIREILPVVKFRELVDPPETCAVCLSEFEENDEIRRLANCRHIFHRGCLDRWMGYDQRTCPLCRTAFIPDEMQGAFIERLWAASGIAEYPHVAPF

SEQ ID NO: 249974 - protein, 47 aa, Glycine max
  Clone ID: PAT_MRT3847_67755C.1.pep
SYINFKKPSDFILENSLIKIYYSHPFIQKNQKIKLLMMMFLKLFISK

SEQ ID NO: 249975 - protein, 65 aa, Glycine max
  Clone ID: PAT_MRT3847_67756C.1.pep
LGALYEWRPTIAGIALKYPSIECAGVDICKSRIALWNRDHLPIYEPVLDGDEKLRHGMNLFFSTD

SEQ ID NO: 249976 - protein, 65 aa, Glycine max
  unsure (1)..(65): unsure at all Xaa locations
  Clone ID: PAT_MRT3847_67757C.1.pep
RLXVDNHGXLIXKTLTXFSXVLXMXFSPSTSXXXLXVXKQLXIARXRVLFAXGGSXXGHGLTRFD

SEQ ID NO: 249977 - protein, 116 aa, Glycine max
  Clone ID: PAT_MRT3847_67758C.1.pep
IKISKVISFFRDHFLLRPVAFNHFCVLCVSADADPRWAPTPPPPWASETCCEEIMAEASLDPKPLTILGSRLGGSEKTKGDADYSIADSVEITDIVRTNFIFMTSPVIDLPSGHAT

SEQ ID NO: 249978 - protein, 499 aa, Glycine max
  Clone ID: PAT_MRT3847_67759C.1.pep
MGYLYFLSFLFALCLSSPHNVLFAQNLPYKVVNLGNWLVVEGWMQEPSLFDGIVSKDLLDGTQVQLKSTKFNKYLTSENGGGADVVANRDSASGWETFKLWRISDSSFNLRVFNKKFVGLENHGGGNKIEAVSDSPNNPETFEIIRDDNDPFKIRIKASNGHFLQVGSETSVTADYEGTNWDESDPSVFRMNIVPGTTLQGEYQLTNGYGPNRAPQIMRDHWSTYITEDDFRFMSENGLNAVRIPVGWWIAKGPNPPKPFVGGSLAALDNAFIWAQNHGMKVIIDLHAAEGSQNGNDHSGTRDGYTEWGDSYIPNTVQVIDFLAERYGNRPNLGGIELMNEPQGVNLESLKKYYKEAYDAVRKHNPSAYVIMSNPLDADSKVLLSFVKGFDRVVIDVHYYNLYSSKFNNMTAQQNIDYIRNERASDLSGVSSSNALSFVGEWTGAWSIKGASKEDLKRYAQAQLDVYSRATFGWAYWSYKCRYMEWSLKSMIENGYIKL

SEQ ID NO: 249979 - protein, 217 aa, Glycine max
  Clone ID: PAT_MRT3847_6775C.1.pep
MKSTIFFALFLFCAFTTSYLPSAIADFVLDNEGNPLDSGGTYYILSDITAFGGIRAAPTGNERCPLTVVQSRNELDKGIGTIISSPFRIRFIAEGNPLRLKFDSFAVIMLCVGIPTEWSVVEDLPEGPAVKIGENKDAVDGWFRIERVSDDEFNNYKLVFCTQQAEDDKCGDIGISIDHDDGTRRLVVSKNKPLVVQFQKVDKESLAKKNHGLSRSE

SEQ ID NO: 249980 - protein, 116 aa, Glycine max
  unsure (1)..(116): unsure at all Xaa locations
  Clone ID: PAT_MRT3847_67760C.1.pep
FIPLGLANCPXAFCKLKVKEFRHGWVAMFTIFGLFGQDIVTAKGPCLTLCTPASGPVSSIAWGYAPNFVPGRLGCLHAMQFSAPFRRSLAFNSLFRNVHTPVYQIHVYELHSFFFN

SEQ ID NO: 249981 - protein, 64 aa, Glycine max
  Clone ID: PAT_MRT3847_67761C.1.pep
KAQWARSRVRLLLLLLSKSVRQLKLASWATPAIIMGSLFTFALTSYEHLRSTVGAPTYHPSSPP

SEQ ID NO: 249982 - protein, 249 aa, Glycine max
  unsure (1)..(249): unsure at all Xaa locations
  Clone ID: PAT_MRT3847_67762C.1.pep
MNISTSACACACACKQELPLVSFQKGSLMMESLFHHRNKEKVVVIMGATGTGKTKLAIDVAKHFQPAEVVNSDKMQVYEGXNKVTEEECSGVPHHLLGTVDPYINFTANDFCRHATLAIDSIVEKNGLPIIAGGSNSYLDALVNHYPEFRLRYQCCFLWVDVSLPVLHSSLQARVDRMIEAGQVNEVRQFFDPSVTDYTKGIRRAIGVPEFDDXLRAEANGGVDXENXQRLLEAAIAGLKINNCTLANR

SEQ ID NO: 249983 - protein, 86 aa, Glycine max
  Clone ID: PAT_MRT3847_67763C.1.pep
EAPSPKLIMRTQTAGNLGESVIDREVVPYYMVEIAPILRVTDEVEKTHPMDDYLCRIYASEKAHMVDPNISGRGVRQFTTALLHAL

SEQ ID NO: 249984 - protein, 73 aa, Glycine max
  Clone ID: PAT_MRT3847_67764C.1.pep
MLPTASKGRSSSSSSSSSSSRPNNPMLLPYLRRIIKWQQMDIEYTFWQMLHLCTSPKVVYRHTKYHKRKSLSH

SEQ ID NO: 249985 - protein, 71 aa, Glycine max
  Clone ID: PAT_MRT3847_67766C.1.pep
HITPAEFTSLLLRISVVLILNESETFFITLMLMPWVLGLLMTFYFTGILTSLSVLRKTNLCYPTPHKDLPE

SEQ ID NO: 249986 - protein, 79 aa, Glycine max
  Clone ID: PAT_MRT3847_67767C.1.pep
MLKSTNFSQRKFVLILCLVFLQFRLWKNGVPGGVRPEFRGFSFFFLGPFEEKTLGSQNYGWFLGFFPPSQKIFFVLFCL

SEQ ID NO: 249987 - protein, 212 aa, Glycine max
  Clone ID: PAT_MRT3847_67768C.1.pep
MSSETKAETQTLTTPSYSSDVDNGIVKDVVLWRRKKINISVLVAATAAWVLMEVFEFNFLTLISWVAILGLASIFLYANMLRLLGKEPPNLLGLEVSEKTTTRIAHTVRAWIEEGIRWLFLVGAEKEWPVFVGAVAGLLSLSYLGSCMDLLTLVYMGTLVGMAVPLTYVKNEDKIKRFVEWLREKHKRYYQIIDEKTIQKIKSRIVKEKKTE

SEQ ID NO: 249988 - protein, 89 aa, Glycine max
  Clone ID: PAT_MRT3847_67769C.1.pep
LNYLIELRWLFQKSLDYSYKLLNRFYVRSICVSFEKSDLINSNLNTCFIFVRLRRLLSILLRTLSIILAIILFAFSIKIVRNIRVAVRV

SEQ ID NO: 249989 - protein, 155 aa, Glycine max
  unsure (1)..(155): unsure at all Xaa locations
  Clone ID: PAT_MRT3847_6776C.1.pep
QFLQRQSIPLPKQVDYYSQVHEQLIQQIGASTLGKHLSKSIFIVVIGGNDIFGYFDSKDLQKKNTPQQYVDSMASTLKVQLXGFANVKAACCGLGELNAQIPCLPISSICSNRKDHIFWDAFHPTEAAARIFVDEIFNGPSKYISPINMEQLLAI

SEQ ID NO: 249990 - protein, 44 aa, Glycine max
  unsure (1)..(44): unsure at all Xaa locations
  Clone ID: PAT_MRT3847_67770C.1.pep
XXGPXRXCXXXXGXXMXQGXXXXHXHNSSRSRIXAAYVTRCXQT

SEQ ID NO: 249991 - protein, 46 aa, Glycine max
  Clone ID: PAT_MRT3847_67771C.1.pep
KIPLAYRTLVLAMQPTNARGSSVRLHLIVSVIYCLASHARMCGRPF

SEQ ID NO: 249992 - protein, 54 aa, Glycine max
  Clone ID: PAT_MRT3847_67772C.1.pep
HGCQKWLVWLPRCREWTNGVENSPPASDGPRLKRLDELARMWLHQCKVVGAARL

SEQ ID NO: 249993 - protein, 33 aa, Glycine max
  Clone ID: PAT_MRT3847_67773C.1.pep
PHVQRRESGRHIYPIFSLLSRYGSDITQAECSV

SEQ ID NO: 249994 - protein, 45 aa, Glycine max
  unsure (1)..(45): unsure at all Xaa locations
  Clone ID: PAT_MRT3847_67774C.1.pep
VAPLHXGHFKLYLHANQTPPTPSSALVNFPVPPKAANQPTNNTSR

SEQ ID NO: 249995 - protein, 79 aa, Glycine max
  Clone ID: PAT_MRT3847_67775C.1.pep
KLMSNLGYVQSTRPTKTEWQDPHRKPKHLSLFFAKVRRLFPSYIQLFNCCGGKKVFIIVVVNQIIKTTYCQVSFYNNCS

SEQ ID NO: 249996 - protein, 56 aa, Glycine max
  Clone ID: PAT_MRT3847_67776C.1.pep
HVVLAPQTMRMVGMLHARYITTFSAWVSTTTLTNRNIYSPSLLCLQFKTGRKVPFE

SEQ ID NO: 249997 - protein, 49 aa, Glycine max
  Clone ID: PAT_MRT3847_67777C.1.pep
VGVRRQLLCVYLVVWTDFILSVGVSQFWDHSYFTFCKILYLIIIITNTY

SEQ ID NO: 249998 - protein, 104 aa, Glycine max
  unsure (1)..(104): unsure at all Xaa locations
  Clone ID: PAT_MRT3847_67778C.1.pep
WAXPRXXXLACHXPNXXPXTXXXFFAXXRXXXRGXXQAXRXXNLXXXXSXXYXXXXXXXXXAPXGXKXGXXXAXTXPNXXXXLENPRGSXSSXYSRAYVRVXXT

SEQ ID NO: 249999 - protein, 131 aa, Glycine max
  Clone ID: PAT_MRT3847_67779C.1.pep
SRMNSSFDLLMAATLFTVTLHAPHQWATVHDMCGASWEPNYWGAISKTEDALSRLFADIHSGEAAQTYNADDTLQWIWNQHHYTTFLNSVVHAHMQQLMAATRIAYNKINGTHASFSTLNTYDPAGVQTLL

SEQ ID NO: 250000 - protein, 343 aa, Glycine max
  Clone ID: PAT_MRT3847_6777C.1.pep
MKSTIFFALFLFCAFTTSYLPSAIADFVLDNEGNPLDSGGTYYILSDITAFGGIRAAPTGNERCPLTVVQSRNELDKGIGTIISSPFRIRFIAEGNPLRLKFDSFAVIMLCVGIPTAWSVFHSPPKMKSTIFFALFLFCAFTTSYLPSAIADFVLDNEGNPLENGGTYYILSDITAFGGIRAAPTGNERCPLTVVQSRNELDKGIGTIISSPYRIRFIAEGHPLSLKFDSFAVIMLCVGIPTEWSVVEDLPEGPAVKIGENKDAMDGWFRLERVSDDEFNNYKLVFCPQQAEDDKCGDIGISIDHDDGTRRLVVSKNKPLVVQFQKLDKESLAKKNHGLSRSE

SEQ ID NO: 250001 - protein, 538 aa, Glycine max
  unsure (1)..(538): unsure at all Xaa locations
  Clone ID: PAT_MRT3847_67780C.1.pep
NGSLQSLLIKILEGPXEKNTPIATYLVILVGMTSGKFLDAVTVDKALKTLKKSGNMQSREAALRALNQISSCDPSAKILIEAGILSPLVNDLFAVGPNQLPTRLKEISATILASVVNSGEDFYSIPFGPDHQTLVSEDIVRNLLHLISNTGPAIECKLLQVLVGLTISPTTVLSVVAAIKSSGATISLVQFIEAPQKDLRVASIKLLQNLSPHMGQELADALRGSVGQLGSLIKVISENTGITEEQAAAVGLLADLPERDLGLTRQLLDEGAFVMVISRVIAIRQGEIRGTRFVTPFLEGLVKIVARVTYVWLGEDDRRALCRDHNLAALFIDLLQSNGLDNVQMVSATALENLSQESKNLTRLPEMPLPGFCASVFSCFSKKPVITGSCRLHRGICSLKETFCLYEGQAVLKLVGLLDHTNVNVVEAALAALSTLIDDGVDIEQGVAILCEAEGVKPILDVLLEKRTETLRRRAVWAVERLLRTDDIAYEVSGDQNVSTALVDAFQHGDYRTRQTAERALKHVDKIPNFSGIFPNMG

SEQ ID NO: 250002 - protein, 24 aa, Glycine max
  Clone ID: PAT_MRT3847_67781C.1.pep
PMRFLTNLFLHRRFSLLKCNFLKL

SEQ ID NO: 250003 - protein, 73 aa, Glycine max
  unsure (1)..(73): unsure at all Xaa locations
  Clone ID: PAT_MRT3847_67782C.1.pep
FPQALIFSVAISNQTPLKSTFLISRLFSPVSLHVEHXSIELFRKSNEAISPSRVPMTVKRLSSASKVPFDIPH

SEQ ID NO: 250004 - protein, 78 aa, Glycine max
  Clone ID: PAT_MRT3847_67783C.1.pep
ISKVYPAMFVDSVTELAFDDITPEDPDFSFIQGLAEAGLIESRLSRCYDRPWSTNEAYGPFNFSPESPLSRQDRDTWK

SEQ ID NO: 250005 - protein, 168 aa, Glycine max
  Clone ID: PAT_MRT3847_67784C.1.pep
EFPGRPTRPVRQNINLSTESLQLLFGREQHERAFEIINLLYKNGYYVKIEEVAQFLLKRGKLSEACKLLLFSLENHQNVDIDLCNATILNLCKINKVSEAFSLCYELVENGLHQELTCLDDLIAALEEGGKREEAAFISKRLPRLDNLNGSMPNHSTKKFRPIKALGS

SEQ ID NO: 250006 - protein, 225 aa, Glycine max
  unsure (1)..(225): unsure at all Xaa locations
  Clone ID: PAT_MRT3847_67785C.1.pep
KFRCKAGCVTPLSSHASPANLLSLHFPGRPKPLNPSPQHLHHRLPPRLHHCHRRPLTIPKSFSSDEFPVDETFLENFGPKDKETEDEARRRNWIERGWAPWEEILTPEADFARKSLNEGEEVPLRSPEAIEAFKMLNPNYRKKKREEMGLTEEEFYAKQFEIKGEIPDPLVTTWAXPLVVRLVAPRDWPPRGWCVDREELAFIREAHRMQARRVRLXEXGKWIED

SEQ ID NO: 250007 - protein, 38 aa, Glycine max
  Clone ID: PAT_MRT3847_67786C.1.pep
YLTIICCESHIFSNGPIRSLPSSESESYIFISSLKASA

SEQ ID NO: 250008 - protein, 44 aa, Glycine max
  Clone ID: PAT_MRT3847_67787C.1.pep
KKLKCYYAFCLDPNLLFRRSEFLPFPFWVIKGARKVVWEQAREA

SEQ ID NO: 250009 - protein, 64 aa, Glycine max
  Clone ID: PAT_MRT3847_67788C.1.pep
GSNLWADLCAWRHILYPSKATHQPTNKRWWWCVAIASSLFTTLIVINAICRLVQFLSFISRINI

SEQ ID NO: 250010 - protein, 50 aa, Glycine max
  Clone ID: PAT_MRT3847_67789C.1.pep
MCSRGHWRPAEDEKLRELVERYGPHNWNAIAEKLRGRSGKSCKLRWFNQL

SEQ ID NO: 250011 - protein, 366 aa, Glycine max
  Clone ID: PAT_MRT3847_6778C.1.pep
MGNRIVMGNSLLFISFFIFSFSFLEAQKAPAVYVFGDSLVDVGNNNYLSLSIEKAILPHYGIDFPTKKPTGRFSNGKNAADLIAENLGLPTSPPYLSLVSKVHNNNKKNVSFLGGVNFASGGAGIFNASDKGFRQSIPLPKQVDYYSQVHEQLIQQIGASTLGKHLSKSIFIVVIGGNDIFGYFDSKDLQKKNTPQQYVDSMASTLKVQLQRLYNNGAKKFEIAGVGAIGCCPAYRVKNKTECVSEANDLSVKYNEALQSMLKEWQLENKDISYSYFDTYAAIQDLVHNPASYGFANVKAACCGLGELNAQIPCLPISSICSNRKDHIFWDAFHPTEAAARIFVDEIFNGPSKYISPINMEQLLAI

SEQ ID NO: 250012 - protein, 118 aa, Glycine max
  unsure (1)..(118): unsure at all Xaa locations
  Clone ID: PAT_MRT3847_67790C.1.pep
KKPGRPTRTPTPTVLITNFIPRNTDIPPLIFXMFTTYXNHQTTISIQLFENEMNLTKDYLLLMKFDLSXISPTPKYTPQIKTTFQIHSNCILNLKAKNNGTCXSKNITITNENLLLNQ

SEQ ID NO: 250013 - protein, 60 aa, Glycine max
  Clone ID: PAT_MRT3847_67791C.1.pep
FTIGGGTLDLNPNEFMLLASEGTGAHCFIGSTALDMPPSRGPLWILGDDFMGRYNNTVSF

SEQ ID NO: 250014 - protein, 82 aa, Glycine max
  Clone ID: PAT_MRT3847_67792C.1.pep
TLGTQNRLIVEFNRRAQNEVFLYLEKKGHFLWAGTPPNLSIHGGSFAFKNKGGSNSEQNLRFKNPFFFLSTPFPNSQLDRKP

SEQ ID NO: 250015 - protein, 164 aa, Glycine max
  Clone ID: PAT_MRT3847_67793C.1.pep
QTTRENQSGSIKSNNSNCKVQRKLSATSPLRNPPGPKLQKVTDLDDNLKRKSRMMQRKIVRPRSALPRKKERVVLASNRSLGAEVAAATGAPGLPHPRTHVAASSPTSKTTGSVHRPFSRGRRDLTVPREPKCQSLHVPKDCSAGGHACGPFWRGILATLGKWL

SEQ ID NO: 250016 - protein, 85 aa, Glycine max
  unsure (1)..(85): unsure at all Xaa locations
  Clone ID: PAT_MRT3847_67794C.1.pep
KMFRNLTHKLAYQKLTCHIKNLYIVLHGTLFCFLVPILAWLHNVILDVFIYIQYVSIYLELLISXKRERENGKMSFFLDTTFSPF

SEQ ID NO: 250017 - protein, 72 aa, Glycine max
  Clone ID: PAT_MRT3847_67795C.1.pep
PRPRTPHFFVAISIPFPFKPIPFQHHNELTHKNIHHHYYFTPNEFPPIPLTQPCRSFRRFVLIEQPPFYPSC

SEQ ID NO: 250018 - protein, 46 aa, Glycine max
  unsure (1)..(46): unsure at all Xaa locations
  Clone ID: PAT_MRT3847_67796C.1.pep
SAIKKNLFRQGYKIVGIIGDQWSDLLXDPKGENRTFKLPNPMYYIE

SEQ ID NO: 250019 - protein, 178 aa, Glycine max
  Clone ID: PAT_MRT3847_67797C.1.pep
MKRYLKARKVTTGSGKKKKGPQGENGEKLGGGQSREQARTKREAEKKGRKQRKQREGGKKQNRGKTKSPETKGENGKSPAPKEKGPNRKERRGGKKRPRKEGKPPRDPDQKKLPKPEGAGEDGKGPPAAVRPNGKKPTKGGPTPDRQKKRWKKGPNPITQKGKKKGSKGEKGEKEKSP

SEQ ID NO: 250020 - protein, 50 aa, Glycine max
  Clone ID: PAT_MRT3847_67798C.1.pep
KLPSLQCIMRSRSGVWYLLVLFTGLNNTKGGKELSKNYIYINFFTIKPPL

SEQ ID NO: 250021 - protein, 482 aa, Glycine max
  Clone ID: PAT_MRT3847_67799C.1.pep
MADLENLLLEAAGRTGTAGRNRHSLPPSRRRHDGAYSDGGSDSRDDDSDDELNYASRKPSGSQVPLKKRLDPTERDDDLGSQEEADDDGRSDHDGDSSDESNIGDDLYKDEDDRRKLSEMTELQREMILSDRATKKDDKNLLGKIASKREKGKAAAPRKQSPPMSSSRMRASARSADRSAKNDALNELRAKRLKQQDPEAHRRLREASRNAGPRHFSPPKRKTFTSTSLSSSSHSESESRSHSDDEGSTGDGGIADSDDDRALAGSEGPSFQDIKEITIRRSKLAKWFMEPFFEELIVGCFVRVGIGRSKTGPIYRLCMVKNVDASEPDRQYKLENKTTYKYLNVVWGNESSAARWQMAMVSDSAPMEEEFKQWVKEVDCSGGRMPSKQDVLEKKQAIQKAITFVYSAATVKQMLQEKKSASTRPLNVAAEKDRLRRELEIAQSKHDEAEVERIKTRLQELEASRQAKQNDAKALKLAEMNR

SEQ ID NO: 250022 - protein, 69 aa, Glycine max
  Clone ID: PAT_MRT3847_6779C.1.pep
MYGGVIIRTYESCSPSAYLHFHQSAFVIFCRTACYADAPPRIEVGILLTQRVVHRGQASCPPPRLPKSP

SEQ ID NO: 250023 - protein, 61 aa, Glycine max
  Clone ID: PAT_MRT3847_677C.1.pep
SNAASHFNNKQHYDLFISHDHFTYNLSISSQYHIIQVILPKSNPYSTIFFQLHNILHHSAN

SEQ ID NO: 250024 - protein, 73 aa, Glycine max
  Clone ID: PAT_MRT3847_67800C.1.pep
VCGVSHMSRISFRRALGKLPLPTLPMGTHQAEQLLKWSSIQAELRAIGPDPAPFRFRRAQSLHLPCIEPSSHG

SEQ ID NO: 250025 - protein, 112 aa, Glycine max
  unsure (1)..(112): unsure at all Xaa locations
  Clone ID: PAT_MRT3847_67801C.1.pep
EFRCSGISFTILYAVAVAGESHVHASLPEEDNGEAVGPNTPIRTALRELLKPLPVSVEIDELPKQIDDTQAPKTFXCREDLHPGKTLKVQFTKRTYAQPYGVYTWLTDIKDT

SEQ ID NO: 250026 - protein, 70 aa, Glycine max
  Clone ID: PAT_MRT3847_67802C.1.pep
PKDHQKGRPRRRNNLQIPFLCPFNYFQTTSPSKFFNFLLSKPKTSYCFWPLKMSGKRTNGLIKAKPRRQQ

SEQ ID NO: 250027 - protein, 112 aa, Glycine max
  unsure (1)..(112): unsure at all Xaa locations
  Clone ID: PAT_MRT3847_67803C.1.pep
TKKKGKXXXRXXXPAXTTXNXAXAGFFAPXTVFLERVGFLFLXTNIDISSIASSGGRXQCLXVWPPXGXKKXGTLSYXPDLGDAXLXXEVXSLLRKGWIPCLEXELEHXXGF

SEQ ID NO: 250028 - protein, 36 aa, Glycine max
  Clone ID: PAT_MRT3847_67804C.1.pep
DDIEQIYSSNMKPPECLYFTKTAEQKFISYETKWAT

SEQ ID NO: 250029 - protein, 134 aa, Glycine max
  unsure (1)..(134): unsure at all Xaa locations
  Clone ID: PAT_MRT3847_67805C.1.pep
PQIVFPQVNFFGNNPLGKNPKVKGPPPPPLFRGAGGPPKPFSGSPPQFPKKKGAPGKHNPGXSSPGPPGGLGDLPVDPSPGPQDSPPESGXPPGGPRVPPLDYKGSPQGDPPKGGAPPGPFGGRGKGPPEISHF

SEQ ID NO: 250030 - protein, 44 aa, Glycine max
  Clone ID: PAT_MRT3847_67806C.1.pep
CSLVISYGTIDRSASAHIVLCILKMPMGASFFSCPQYSDAVRRA

SEQ ID NO: 250031 - protein, 73 aa, Glycine max
  Clone ID: PAT_MRT3847_67807C.1.pep
KKKNPQTQNLFFWFTGYYFKRRGLLKKGEFNFGKFNFSPRPKIFPRGNISPVFKKKAMLCPNKKSLFLKKLSN

SEQ ID NO: 250032 - protein, 50 aa, Glycine max
  Clone ID: PAT_MRT3847_67808C.1.pep
MLGKTRKVAARGESVAANYAFGPSEDDVIIKHRLLTRTTTTRGDPPLKNL

SEQ ID NO: 250033 - protein, 283 aa, Glycine max
  Clone ID: PAT_MRT3847_67809C.1.pep
MKKSSLFPSGNFLFLFLLLLLNVSASLAAPTPESVYTSFLQCLTNYTKSPDQVSNIVFAQTNASFSSVLQAYIRNARFNTTSTPKPLLVVTPSEEPHVQGAVICAKSIAIQLKIRSGGHDYEGISYVSDQPFIILDMFHFRNITVDIENEVAVVQAGATLGELYYRIWEKSKVHGFPAGVCPTVGVGGHLSGGGYGNMLRKHGLSVDHVVDAKIVDAKGRILDKESMGEDLFWAIRGGGGASFGVILSYNGKLVPVPEVVSVFRIAKSLDQNESATELVLHCS

SEQ ID NO: 250034 - protein, 110 aa, Glycine max
  unsure (1)..(110): unsure at all Xaa locations
  Clone ID: PAT_MRT3847_6780C.1.pep
LLVGGRVGGRVGPTALLESGLQKDRGLMEEYFGRTSYVAHNVNQPQKKDLLEGNFSFDMKSRSRLKKVTSTKAQFVSGKTFKYDIVGAGXHSLQDFPEKEDQDKPKKIDA

SEQ ID NO: 250035 - protein, 74 aa, Glycine max
  Clone ID: PAT_MRT3847_67810C.1.pep
VVFFFFFFFFFFFLFFFFLNRAHWNHNYDFINKLFYIFQRIPMGHTLKKMYLKWSSCLNNYGLLNAKKQLMGLT

SEQ ID NO: 250036 - protein, 38 aa, Glycine max
  Clone ID: PAT_MRT3847_67811C.1.pep
TLYYSICVTTDCMGYWIKRNLSSSRHSNSGINFFKNSK

SEQ ID NO: 250037 - protein, 66 aa, Glycine max
  Clone ID: PAT_MRT3847_67812C.1.pep
RYYDLICYMRTARWAFLVGLGLVKLIILRSRLHMILLGLLNWLTKWRYRSISHAHLICDLFTGSIE

SEQ ID NO: 250038 - protein, 105 aa, Glycine max
  Clone ID: PAT_MRT3847_67813C.1.pep
FLAKRWGVNQPFIYGKGSFFNFWHPIVEKTRFSLFLTMNNLLYKGSNLNKFFHFQAGKILPPPPLWKNLPKIVKPEKRGIFKQNWDFPDLCFTNYAKFTRTLWLP

SEQ ID NO: 250039 - protein, 46 aa, Glycine max
  Clone ID: PAT_MRT3847_67814C.1.pep
FVKGERRSLGVLFRRLSKCAVIVRIRSFCSDKFVDKEDIFNSSYIM

SEQ ID NO: 250040 - protein, 56 aa, Glycine max
  Clone ID: PAT_MRT3847_67815C.1.pep
KLSNPNKKFSLGRRRHVQPPAARKSNLPIANKFAWLLPQMVTIVKSATKGTFNIKH

SEQ ID NO: 250041 - protein, 58 aa, Glycine max
  Clone ID: PAT_MRT3847_67816C.1.pep
QRSYFITQRERVWCQDFSLILHAARPNKSAGRTLIAAYTFASNLNWPLIPRWVSLTKL

SEQ ID NO: 250042 - protein, 67 aa, Glycine max
  Clone ID: PAT_MRT3847_67817C.1.pep
TRKSVNKMQTTHSMGYKTMLINYYIDNSPKADNMYSIRLFGLLNVSVYNHFLIIFIGKHIITQVQLK

SEQ ID NO: 250043 - protein, 75 aa, Glycine max
  Clone ID: PAT_MRT3847_67818C.1.pep
CKILESVVTMLVLALTSFAPAANPFRFRPRAFCRRKLKINNSLPPPSSPAVPFENLFHSLITQFPSVNSLNFITP

SEQ ID NO: 250044 - protein, 308 aa, Glycine max
  Clone ID: PAT_MRT3847_67819C.1.pep
GQTTNVLLKTKPYFPNATLRTAPGPYFTGRGTFDNSTTAGTLIYKQPLKNSSVKNLTLLKPTLPPINATSFVANFTAKFRSLASAKFPAKVPQKVDRKFFFTVGLGTSPCPKNTTCQGPSNNTKFAASVNNISFALPSSVSIMQAYYSGQANGVFKTDFPATPLNPFNYTGTPPNNTMVTNDTKLVVLKFNTSVEVVLQDTSILGAESHPLHLHGYDFFIVGQGFGNYDPNNDPAKFNLIDPVERNTVGVPAGGWIAFRFLADNPGVWFMHCHLDLHTSWGLRMAWLVLDGPGPKQKLQPPPSDLPKC

SEQ ID NO: 250045 - protein, 58 aa, Glycine max
  unsure (1)..(58): unsure at all Xaa locations
  Clone ID: PAT_MRT3847_6781C.1.pep
LLLPSGRSSKVYIQVWPFLRLSCSGGAYERLPYFVLWXPPAPPAEEIQRPCFKRTRGS

SEQ ID NO: 250046 - protein, 156 aa, Glycine max
  unsure (1)..(156): unsure at all Xaa locations
  Clone ID: PAT_MRT3847_67820C.1.pep
DLFDWKHFINMLKNDVHIVEKLPPAYAGIEPFPKTPISWSKVPYYKTEVLPLLKQHKVMYFTHTDSRLDNNDIPRSIQKLRCRANYRALKYSAPVEELGNTLVSRMQQNGNPYLALHLXGCSHNLTAEEDEELRQMRYEVGHWKEKEINGTERRLL

SEQ ID NO: 250047 - protein, 178 aa, Glycine max
  unsure (1)..(178): unsure at all Xaa locations
  Clone ID: PAT_MRT3847_67821C.1.pep
AIFWALATVSLCCQLATNAQAPATMPVKLPPTTLPPTTPTATSPLSSGTPPAVTQPPTVAESPPVSSTPITSQPPEXVAPKSALVTPPAPKVAPVSSPKAPPPQQPKPSPVSPPTSPPPPPVASPPPLPPPKIAPTPAKTPPAPAPAKATPAPAPTKPAPTPSPVPPPPTPTPAPAPV

SEQ ID NO: 250048 - protein, 123 aa, Glycine max
  Clone ID: PAT_MRT3847_67822C.1.pep
EFGTRWDREIILTGLADYYDKDVSFLLQDIERNYTDGIWSDDVTSWKHCNDISQCVNNWAKESIQIACKWGYEGVQPGTTVADDYFDSRMPFVMKRIAQGGIRLAMILNKVFADSEEGFATAT

SEQ ID NO: 250049 - protein, 62 aa, Glycine max
  Clone ID: PAT_MRT3847_67823C.1.pep
KPFFPIIIFSKILFVYLYRIGKSNPPFRKITANSFQIIFYLAFAMTHLIFVFSTNAFWTKIL

SEQ ID NO: 250050 - protein, 116 aa, Glycine max
  Clone ID: PAT_MRT3847_67824C.1.pep
MAPIQKKSKTKKKTKKFKKHKQVSLVPVEPRTSETDWWDSFWHKNSTVPGYTVPGDEAEGFKYFFRVSKTTFEYICSLVREDLISRPPSGLINIEGRLLSVEKQVAIALRRLASGE

SEQ ID NO: 250051 - protein, 156 aa, Glycine max
  unsure (1)..(156): unsure at all Xaa locations
  Clone ID: PAT_MRT3847_67825C.1.pep
EIMRKSAQLENMSMKLEEMERFALGTNGILNDMRQKVADLVEETTRXQRQRAAENEEELSRVKREFESLKSYVSSLITVRETLLSSEKQFQTIEKLFERLVGKTTQLEGEKMQKEAEVQKLMEENVRLSALLDKKEAQLLALNEQCKMMALSASNM

SEQ ID NO: 250052 - protein, 164 aa, Glycine max
  unsure (1)..(164): unsure at all Xaa locations
  Clone ID: PAT_MRT3847_67826C.1.pep
VRXIPGVDPRVRQRILPAARWESRVKAPSHGCFSSKGHGTGRSIGGVCVLYSILHYLNVGACLFQILMALSCPKVTMTPYSSAMGSKGRMPPPPQLRGPNTGGPRRDAAYDRDAVITGAEVTCVGTEYGELTRGNAGRAHRHSATAGYPRWAEARSGGGTAPAV

SEQ ID NO: 250053 - protein, 103 aa, Glycine max
  unsure (1)..(103): unsure at all Xaa locations
  Clone ID: PAT_MRT3847_67827C.1.pep
MHLPVLHQDSSNAMDWAFVHKTCDKWASTNIGYSGHSLKAALLINYDPTGPSRLLSTIADQEGMRANPIELSHFVDFIKQNILHTEXFIIGFNQYLITSIHEN

SEQ ID NO: 250054 - protein, 70 aa, Glycine max
  Clone ID: PAT_MRT3847_67828C.1.pep
KFMLRLGQKPVSILHHRLVNMEFGTHNLLFLFPIKLYYLVLRLKKEQGYRFRLWGRKREKLFSFPPKKKE

SEQ ID NO: 250055 - protein, 56 aa, Glycine max
  unsure (1)..(56): unsure at all Xaa locations
  Clone ID: PAT_MRT3847_67829C.1.pep
ISLFFYLCELHQINVDYTQKIMKRTSLLCXLMKQNGKTTEGGKNPLISDEGEHXIS

SEQ ID NO: 250056 - protein, 70 aa, Glycine max
  unsure (1)..(70): unsure at all Xaa locations
  Clone ID: PAT_MRT3847_6782C.1.pep
NXWLPQHQQIQKVTQHATLKRELPQSPNHTYQRLITYYFISQAIHKRYKLKPFCCLKRTKSTVILDMTWA

SEQ ID NO: 250057 - protein, 160 aa, Glycine max
  Clone ID: PAT_MRT3847_67830C.1.pep
WYYVWRGETKKTLAIDLQGHRSDVRSVTLSSDNTFLMSTSHNAVKIWNPSTGSCLRTIDSGYGLCSLILPTNKYGLVGTKDGTIEIIDIGSGTCVEVMEAHGGSVRSIAALPHKNGFVTGSADHDVKFWEYQIKQKPGQMHLTYFLSNKFLFWILHEKGC

SEQ ID NO: 250058 - protein, 39 aa, Glycine max
  Clone ID: PAT_MRT3847_67831C.1.pep
TRVGVFLAGSGGASLLQVLVVALFLFSICFHRQNCSSVG

SEQ ID NO: 250059 - protein, 66 aa, Glycine max
  Clone ID: PAT_MRT3847_67832C.1.pep
MTRGNQRERDRERAQARAGGKTKQPKNDGLTPEQRRERDAKALQEKTAKKAAQAAGGNNAGGGGKK

SEQ ID NO: 250060 - protein, 81 aa, Glycine max
  Clone ID: PAT_MRT3847_67833C.1.pep
KVKYTQVSNVRRCHGGHSRIYINLYIILQLQAALKEGVESHTVQALKKIGREANSNIFVRKKEPGSYEVCEGLFKNPVEAH

SEQ ID NO: 250061 - protein, 96 aa, Glycine max
  Clone ID: PAT_MRT3847_67834C.1.pep
ASSSYLDRTVQGPVTREPQTTIAGHVTVSICNARVCGYEYLLLNDWLRPVGKIINQVRKMCLDKPLPNGQGIRDRSSTGLYRYIHDRCHRLILGAG

SEQ ID NO: 250062 - protein, 95 aa, Glycine max
  Clone ID: PAT_MRT3847_67835C.1.pep
GLPFGQSTLPLVQPHIQAPVLGHPLFFFKIPEFSALVRSGFQTQKVCGVSPNKGGAGVLFKFHFPQKLLYPAEVPEGRVSIETKPFNRQWGFFFP

SEQ ID NO: 250063 - protein, 72 aa, Glycine max
  unsure (1)..(72): unsure at all Xaa locations
  Clone ID: PAT_MRT3847_67836C.1.pep
XXHXSXXQLXXXXXTXXXXXXXQXXXXLLXXXPNHLINXTXXKNXXXXXXXXXXKXFXXXIXXXXXISSVEP

SEQ ID NO: 250064 - protein, 130 aa, Glycine max
  unsure (1)..(130): unsure at all Xaa locations
  Clone ID: PAT_MRT3847_67837C.1.pep
RGGEEKKRGARRAANKAKGKKAKGGGKKKKKKKKGGRXRGAKXTNAXRRXXSXXRGAPKXKXRAGXXQXRDGENXGXTQXKRRAAQPXXASGXXSEEARTXRXXQQXHNRKGEGDAPSEASAGEGGTRRG

SEQ ID NO: 250065 - protein, 82 aa, Glycine max
  Clone ID: PAT_MRT3847_67838C.1.pep
TFGHKNFSVPRMFLRKHVTWPPIFNSENKGGGVFKHLGFNSPPLKKKEIFFLFFTKNFWLPKKKIWEKTRGFFFWGKVFSDI

SEQ ID NO: 250066 - protein, 133 aa, Glycine max
  unsure (1)..(133): unsure at all Xaa locations
  Clone ID: PAT_MRT3847_67839C.1.pep
HFSFVLNRWMGKLTFPQGSXRSVKRMPLSIGGGAGAQNARVMNMPNADTSMCRHFVGDLGFEDCKMTSPYIKCTVSVFIPSGHVVEDTINFEAFSHKLVQFGEIQENFVWXFSHEDYVLSSDTEVHATTSLMN

SEQ ID NO: 250067 - protein, 42 aa, Glycine max
  Clone ID: PAT_MRT3847_6783C.1.pep
RCLYEFKMLVLQFRMARNVLRPSDQPAFFKYHASFNPYKSST

SEQ ID NO: 250068 - protein, 68 aa, Glycine max
  Clone ID: PAT_MRT3847_67840C.1.pep
QYISRLYSICSIIVGPILVDITLQSANLWWINFPSTFDNKFITNGSCQNYSHILMHANCTHLHVLTWC

SEQ ID NO: 250069 - protein, 90 aa, Glycine max
  Clone ID: PAT_MRT3847_67841C.1.pep
LLMMLPRSSGVEVSLVIVRRPDQVELSALLVAVASDSWLSPYWSVRCVALLAVSLAHLPEHFRACVLLDPPPLWACGGLQQRARNLGSSR

SEQ ID NO: 250070 - protein, 37 aa, Glycine max
  Clone ID: PAT_MRT3847_67842C.1.pep
MSKRGRGGSAGNEFRMSLGLPVAATVNCAYNTAAKKL

SEQ ID NO: 250071 - protein, 66 aa, Glycine max
  Clone ID: PAT_MRT3847_67843C.1.pep
RTKNIPKEIKLLSKIYNSGVFHLHFHKNDCIHVCIVDDSTIMNGFRKFLKKEYRKNNFNIYPVELV

SEQ ID NO: 250072 - protein, 77 aa, Glycine max
  Clone ID: PAT_MRT3847_67844C.1.pep
ILSLTQLTPCHSDSYRARTPGPSSLFRATYSYPLHIILAFHPTRLVHCAPLRALERITPAPGAREMCFGRSSPQPSH

SEQ ID NO: 250073 - protein, 237 aa, Glycine max
  Clone ID: PAT_MRT3847_67845C.1.pep
NWLLLSSTVGAITGVTGVVWVSTQKAWHWGFFIITIASSVGFVTLALGKQFYRIKTPGDSPTLRIAQVIVVSFKNRKLSLPESHGELYEISDKDATAEKIAHTNQMRFLDKAAIIQESSKPQAWKICTVTQVEEVKILTRMLPIVASTIILNTCMAQLQTFSVQQGNVMDLKLGSLTVPAPSIPVIPLVFISVLVPLYELFFVPFARKITNHPSGITQLQRVGVGLVLSAISMAVAG

SEQ ID NO: 250074 - protein, 73 aa, Glycine max
  unsure (1)..(73): unsure at all Xaa locations
  Clone ID: PAT_MRT3847_67846C.1.pep
AEIXXXXXXXXXXXQIWSRRIALAAFXFXLLFQRPQQTTSLCSLKITSRRSWSGQRSLVESMLLVWNAXRSRX

SEQ ID NO: 250075 - protein, 124 aa, Glycine max
  Clone ID: PAT_MRT3847_67847C.1.pep
TQGNSEEVADLLRPMEADSMVAMGCGGFYWQSPPRLLLEPLDLADIVDSMYVPTNDADEPVSGLCSSNRPAEDYSSSAEGANSCSAAVVPSPPPTTGVMTTTTRNMAMERDPRMKLNERLYSLR

SEQ ID NO: 250076 - protein, 92 aa, Glycine max
  Clone ID: PAT_MRT3847_67848C.1.pep
SYMIHRLLLSVQVLHLQSHSRKASHSFAVRAPWYPSHGLQHLSLLVPQGPSLVTFSDFLAPWSVSCSQTYTPCLGQHMSSLVLHFLNSLASF

SEQ ID NO: 250077 - protein, 325 aa, Glycine max
  unsure (1)..(325): unsure at all Xaa locations
  Clone ID: PAT_MRT3847_67849C.1.pep
YDMIQSMHQKELAEISRWWKDLGLIERLGFGRDGPRECFLWALGIFXNPRHSSCRIELAKAICVLQVIDDVFDTYGTLDELVLFTKAIKRWDLDAMEQLPEYMKICYMALYNTTHEIAYKIQKDHSLTVVACLKITWIDLIEAYLKEANWFNNKHVPTFXQYLDNGVISSGSXLALVHATFLIGDDLSKETIFMMNPYPRLFSCSGKILRLWDDLGTSRDEQERGDNACSIQCLMKQNNISDENVARKLIRQLIDNLWPELNGLTMTTNLPLSVMRASLNMARTSQVIYRHGDDQNMPTVDEHVQTLLFTPSINYRDENDINHVI

SEQ ID NO: 250078 - protein, 69 aa, Glycine max
  Clone ID: PAT_MRT3847_6784C.1.pep
GDAFGFGFCFMQQQEDEEVIVPHADLPANNHQPMEVVAQPENANTAESQPGEDPPSSTFTWRIDNFFKA

SEQ ID NO: 250079 - protein, 357 aa, Glycine max
  unsure (1)..(357): unsure at all Xaa locations
  Clone ID: PAT_MRT3847_67850C.1.pep
MPSIMSPQWQDKAAGFFSSSGVKLKEAKESAGTFVGEVTKDTKSNVAEVAGRVGSMVKSRWALLQQPSTRHAVQDRFISAAATTGTLLRRGFSGTKDKVVVGKSKVEEVAKITAQKSKTILTDIERWQKGVASTDVFGVPIEVTVQRQDCCKPIPQILINCASNRXVSIYNQDSTVSVPEGTNPVDVAALVKYYLASLPEPLTTLELYNEIRSARSSIYSMRNILKRLSSVNYMTLEFITALLLRVSQKSLLNKMDARSLAMEMAPVIMWQKERRPEFYHQYWNQVSKSLSNKTVDPTPGSYTAWDMLADDGEATDASSPIPLDDGTPVDFGAIEVVQLLTEHHNAIFTDANETVWK

SEQ ID NO: 250080 - protein, 93 aa, Glycine max
  Clone ID: PAT_MRT3847_67851C.1.pep
YGREDDRRGCTRLMGSKSSRWSVTWVVLFICLLLCFSAKAIATRNLAGYADEKGPSRRLLGRSPCKRGRMTSEVVQGDRKQQREDSPRCNNYL

SEQ ID NO: 250081 - protein, 236 aa, Glycine max
  Clone ID: PAT_MRT3847_67852C.1.pep
MPSIMSPQWQDKAAGFFSSSGVKLKEAKESAGTFVGEVTKDTKSNVAEVAGRVGSMVKSRWALLQQPSTRHAVQDRFISAAATTGTLLRRGFSGTKDKVVVGKSKVEEVAKITAQKSKTILTDIERWQKGVASTDLFGVPIEVTAQRQDCSKPIPQILVKCGDYLIVSGLNSPNLFKSEGDKKVIHQLVSLYNQDSTASVPEGTNPVDVAALVKYYLASLPEPLTTLELYNEIRSA

SEQ ID NO: 250082 - protein, 427 aa, Glycine max
  Clone ID: PAT_MRT3847_67853C.1.pep
MAHRRCLLIRGNLMNRKCHPSFSYVLHSNEGKRECPDEKSSSAGISNSIQRRMFGNSVDGSMRFVSYSGQRMHSNRFLSPYSGYNFCRHMSTVNQGSDKIDIMTDIADVLKDTTVEAVTSQAPIVKEVAIAAADSALLVKALQYIIDAVHSYTGLNWWASIVLTTLLIRTATVPLLINQLKATSKLTLRGSLNQGESVRITPRRPDSFSVLFGTLRIQPSHCATTATRVAHELAVTTIFIPCCLAITNMAENVPPVKHGGAAWFIDLSTPDALYIFPALTALSFLITVECNMQEGMEGNPVAGTMKNFSRGLAVLSVPFTMGFPKAIFCYWITSNLFSLVYGLVLKFPGVKKALRIPIIPQAAPTSGPQSPFSIFPALKQATSATNGPNSMPVEPSKHPKKKTSSSDVNQRLRRLEKQVKGRKKNKN

SEQ ID NO: 250083 - protein, 150 aa, Glycine max
  Clone ID: PAT_MRT3847_67854C.1.pep
GKVTYNNQPFSGAMKRRTGFVAQDDVLYPHLTVFETLLFTALLRLPNSLTKEEKVHHVEHVISELGLSRCRGSMIGGPFFRGISGGERKRVSIGQEMLINPSLLLLDEPTSGLDSTTAQRIITTIKGLACGGRTCVTTIHQPSSRLYYMF

SEQ ID NO: 250084 - protein, 50 aa, Glycine max
  unsure (1)..(50): unsure at all Xaa locations
  Clone ID: PAT_MRT3847_67855C.1.pep
TILLISLLFCNAHTSRASKWQHQQDSCRKQLXRVNLTPCEKHIMEYIQGR

SEQ ID NO: 250085 - protein, 68 aa, Glycine max
  Clone ID: PAT_MRT3847_67856C.1.pep
ILAPCLQVFLLTGGKMGGGKDLPWLKGGSVSLVTEGIGVLPHGARVLWLWAHIRRGFFSWESKDNGKQ

SEQ ID NO: 250086 - protein, 40 aa, Glycine max
  Clone ID: PAT_MRT3847_67857C.1.pep
MLQRTSKHLCLISEDMQRDVFMSPAEEAQAHGIVDLVAVK

SEQ ID NO: 250087 - protein, 84 aa, Glycine max
  Clone ID: PAT_MRT3847_67858C.1.pep
SCCRGPRWGIKHGSTVMDFESCLSHRSTTGYLRHVGREIMLAPHAFEKVPRSDVNAEYVNFDSTQEMSKTKVLLQKFIDLCLDS

SEQ ID NO: 250088 - protein, 109 aa, Glycine max
  Clone ID: PAT_MRT3847_67859C.1.pep
MGLKNNMVVLKVCFLVLFLVGVTNARMELNLFKSDHSSSDDESSKPCCDLCMCTASMPPQCHCADIRLNSCHSACDRCACTRSMPGQCRCLDTTDFCYKPCKSSDEDDD

SEQ ID NO: 250089 - protein, 94 aa, Glycine max
  Clone ID: PAT_MRT3847_6785C.1.pep
AAPGDDAAQITSCRTTTSTLAPLAAIFLLVFHIFLPSFPPQTTSPPCITLPSSSFSFSFPNFTFTITIFIQFFILPLIHHYHHRSCNAKLNLFS

SEQ ID NO: 250090 - protein, 68 aa, Glycine max
  Clone ID: PAT_MRT3847_67860C.1.pep
SGYVANAVNRILTPEKSLLMITHYRRILDLLNPTHVHVMDKGKIARTGDISVVEAIESDGYEAVSALT

SEQ ID NO: 250091 - protein, 305 aa, Glycine max
  Clone ID: PAT_MRT3847_67861C.1.pep
GQTREHAQLIRSFGVDRVIVAVNKMDAAVYSKDRFDFIRQQLGVFLHSCGFKDSSLSWIPMSAMENQNLVASPSDALLKNWYGGPYLLDAIDSLQPPTREFSKPLLMPVCDVIKSTTLGQVSASGKLEAGALRSGSKVLVMPSAVVGTVRSLERDSNACTVARAGDNVAVMLQGVDGNHVMAGDVLCHPDFPVAVAKHLELKVLVLDGASPILVGTQLEFHIHHAKEPGRVSRILSVLDPKTGKVTKKSPRCLTAKQSAVIEVILNETVCVVEFSSCKALGRVSLRSMGRTIAVGVVTRIIEEQG

SEQ ID NO: 250092 - protein, 309 aa, Glycine max
  Clone ID: PAT_MRT3847_67862C.1.pep
MHSLTCTPLSSSYSSHHTTLKPNLNPLLGADATFRPCSLPLKRRTCFTTRAILSSTREDVLKHFSERRALKIISGLQNFNKDNVASVVTAADKGGATHVDIACDPELVKLAIGLTSCPVCVSSVDPATFPAAVEAGALMVEIGNYDSFYEKGIFFTPEKILGLTKETRRILPSVVLSVTVPHTLSLPDQVKLAESLEQVGVDIIQTEGGKCSNPTQSGVMGLIEKATPTLAAAYSISHAVKIPVMCSSGLSAVTAPMAITAGAAGVGVGSAVNRLNDVVAMIAEVRSIANSLQAPFRISTTHAVETQRQ

SEQ ID NO: 250093 - protein, 49 aa, Glycine max
  Clone ID: PAT_MRT3847_67863C.1.pep
PSPSPPPPLGPRRGAPSPPPYHPSPPSSVPPPPPPLPPPPPPPPPPPLP

SEQ ID NO: 250094 - protein, 85 aa, Glycine max
  unsure (1)..(85): unsure at all Xaa locations
  Clone ID: PAT_MRT3847_67864C.1.pep
MAETSGGDALRPVVICDNMGGCTLACTGGSTCRCTRACTDTGGGDHVTCCYVXNCTCYTCSXCKIEDARSGCRCGTHCACTCRRT

SEQ ID NO: 250095 - protein, 47 aa, Glycine max
  Clone ID: PAT_MRT3847_67865C.1.pep
EAVATLGPFESKTRYRAQETLPTWTLVTPVWPLQDHSPIYIDKSEPK

SEQ ID NO: 250096 - protein, 33 aa, Glycine max
  Clone ID: PAT_MRT3847_67866C.1.pep
LKLLSCVPNIPFNPLNVIPRRFSRPQLLSLVPQ

SEQ ID NO: 250097 - protein, 105 aa, Glycine max
  Clone ID: PAT_MRT3847_67867C.1.pep
CSYESLLDVFWARHDPTTLNRQGNDVGTQYRSGISPTRPEQEKAAIESLEQQQKKLNRKIVTEILPAKKFYRAEEYHQQYLEKGGRFGSKQSASKGCNDPIRCYG

SEQ ID NO: 250098 - protein, 86 aa, Glycine max
  Clone ID: PAT_MRT3847_67868C.1.pep
SVYVEAGGNAFQFYSSGIFTGKCGTNTDHAITVVGYGKSRGGTKYWLVKNSWGAGWGEKGYIRMKRDIRAKEGLCGIAMNAFYPTA

SEQ ID NO: 250099 - protein, 54 aa, Glycine max
  Clone ID: PAT_MRT3847_67869C.1.pep
WTTKIWEIFRNVPRFFSQRQKNLMYVAAPAVAQSQTPATPPQKAPHPVMQPGFC

SEQ ID NO: 250100 - protein, 60 aa, Glycine max
  Clone ID: PAT_MRT3847_6786C.1.pep
DSLCGTPLSPSLKFFRVSEQILGCFYIFYQLYILHSHSEFCQFLCFCLIFSSVFRMFCVG

SEQ ID NO: 250101 - protein, 41 aa, Glycine max
  Clone ID: PAT_MRT3847_67870C.1.pep
NHLEQVVVLIVRYVRTHLPLFLPTRTKGSKDSNLTGFSLNP

SEQ ID NO: 250102 - protein, 117 aa, Glycine max
  unsure (1)..(117): unsure at all Xaa locations
  Clone ID: PAT_MRT3847_67871C.1.pep
GIIPQLGDWISHWILGLFRPFTVVASLENCLHQISERITSLCICMLMVNVASVADRSKAKRCSANFWSPNPPLLGAFFARXFFCVGVHTVWEGSYKLXFLVSRNLVCYCCINCIIYL

SEQ ID NO: 250103 - protein, 51 aa, Glycine max
  Clone ID: PAT_MRT3847_67872C.1.pep
PNLGEFRKMWAEGGKDDARSPQEKIGKVKLWPENHPFFSPFNHLRGPSNFE

SEQ ID NO: 250104 - protein, 322 aa, Glycine max
  unsure (1)..(322): unsure at all Xaa locations
  Clone ID: PAT_MRT3847_67873C.1.pep
DHLDKRTWTYTFGACCATSVFIPSFHNYRIWSFLGLGMTTYTAWYLAIAALIHGQAENVTHTGPTKLVLYFTGATNILYTFGGHAVTVEIMHAMWKPQKFKYIYLLATLYVFTLTIPSAAAVYWAFGDELLNHSNAFSLLPKNRFRDAAXILMLIHQFITFGFAXTPLYFVWEKVIGMHDTKSICIRALARLPVVIPIWFLAIIFPFFGPINSAVGALLVSFTVYIIPATAHMLTYRKASARQNAAEKPPFFMPSWTAMYVFNAFIVVWVLVVGFGFGGWASMTNFIRQIDTFGLFAKCYQCKAPTPPPMAAAPPPHAQHHH

SEQ ID NO: 250105 - protein, 53 aa, Glycine max
  Clone ID: PAT_MRT3847_67874C.1.pep
IQTIGLDLIYIIYFKKLEEIKGSVNYKKTKRLGCSCNFKIRPFSYASIIESIL

SEQ ID NO: 250106 - protein, 36 aa, Glycine max
  Clone ID: PAT_MRT3847_67875C.1.pep
GGSFLPLPCCPYSPPPPPPPPPPPPPPPPPPPPPPP

SEQ ID NO: 250107 - protein, 65 aa, Glycine max
  Clone ID: PAT_MRT3847_67876C.1.pep
IWQNSQKHFNLTPSPSNFNTHMFSTEKLTSKPHITHLTNSQWMRCPQCPCAPKPLSTGKLLKLPK

SEQ ID NO: 250108 - protein, 75 aa, Glycine max
  Clone ID: PAT_MRT3847_67877C.1.pep
RSKITFPFDMGKKRANLTRGLKRKSPPMGAGGLHKGKNYIGVVTKGNISFFLKKKGKKILHRRPKRAATNNFWAP

SEQ ID NO: 250109 - protein, 51 aa, Glycine max
  unsure (1)..(51): unsure at all Xaa locations
  Clone ID: PAT_MRT3847_67878C.1.pep
FFIRGHAYTMDTMSFAVHFWANGEAQXMVLRHEGFLGXALRAFMNYGKTGV

SEQ ID NO: 250110 - protein, 47 aa, Glycine max
  Clone ID: PAT_MRT3847_67879C.1.pep
ELLNFFLLLCVRLLKGKKITLCAGHRLRESFSLTLLFYLLNTLLFDI

SEQ ID NO: 250111 - protein, 68 aa, Glycine max
  Clone ID: PAT_MRT3847_6787C.1.pep
SSLEGQITKQHPREAGVYWYDKRWTSATETSSLNIASTSSSRQGVGHLTPHQLQECRENMKFFFKIRH

SEQ ID NO: 250112 - protein, 50 aa, Glycine max
  Clone ID: PAT_MRT3847_67880C.1.pep
TQSNSRFLQFFSPQCSWHLGTTMQSELSSYAFFQYFGIPGSELTFLQHAF

SEQ ID NO: 250113 - protein, 265 aa, Glycine max
  Clone ID: PAT_MRT3847_67881C.1.pep
MAQKENNIIPMIFDEAFYRKMATQKWRQQDYKKAAEYYEKVLELSPKDFDIQQHYAQCLVKLNIGKKAERLFYENIVKDFHVAESFYELSQLNIELNEPNKAFLFGINYVILSEDKDFREMLEKTFEVTYTNEQKIELEAQLFSTQLLFQFLFSQGRLEEARTYILNQSYEIQQHRVIRNLLAMCYLYLGEYDSAKAMFEELLKEDNSDVHALCHYTLLLYNKKETEKYQKYLKILNKVVPLNDDETFKLGIVLSYLKQYRASQK

SEQ ID NO: 250114 - protein, 66 aa, Glycine max
  Clone ID: PAT_MRT3847_67882C.1.pep
GPACIRCYLRIGGFFPLENHGNLFVLTPGVGVNYAPVGSLIGFGPPRKGTRVYFIWFPRVTFFGFP

SEQ ID NO: 250115 - protein, 66 aa, Glycine max
  Clone ID: PAT_MRT3847_67883C.1.pep
MGCFASKNADTKASRAARWRSTGIVALRDSKLKTFPDEILELDTSVRTLDLTHNRIVDIPVEISKL

SEQ ID NO: 250116 - protein, 53 aa, Glycine max
  Clone ID: PAT_MRT3847_67884C.1.pep
PSNYHLPSSYIHTCFTCLTCASTPVISSSQPRGSIPNSISSEAQTVLGAKPIY

SEQ ID NO: 250117 - protein, 64 aa, Glycine max
  Clone ID: PAT_MRT3847_67885C.1.pep
LYRQTSTPSPSCVMNIFKYLLDHDLNWGGIFYDSEKACYLSETRSPPSDNNLILAATRTKQRAL

SEQ ID NO: 250118 - protein, 60 aa, Glycine max
  Clone ID: PAT_MRT3847_67886C.1.pep
MHVVDTSFYYTAYIFLKKKKKKKKKKKKKKKKKKKKKKKKKKKKKRFKKKKKKKKRGGPF

SEQ ID NO: 250119 - protein, 55 aa, Glycine max
  Clone ID: PAT_MRT3847_67887C.1.pep
KSCLCYTIMQPSLRLTLLLTGQNQQAIKENDKSQPTMPCIHSLFQKSYVLIQFQR

SEQ ID NO: 250120 - protein, 40 aa, Glycine max
  Clone ID: PAT_MRT3847_67888C.1.pep
GGILNFFSGGKLGRLILKIKNLGKEKIWCRIWFRDQKIFF

SEQ ID NO: 250121 - protein, 117 aa, Glycine max
  Clone ID: PAT_MRT3847_67889C.1.pep
CRYAMTGQLNAKSDVYSFGVVLLELLTGRKPVDHTLPRGQQSLVTWATPRLSEDKVRQCVDARLGGEYLPKAVDKMAAVAALCVQYEADFRPNMSIVVKALQPLLNARHGPAGETPN

SEQ ID NO: 250122 - protein, 56 aa, Glycine max
  Clone ID: PAT_MRT3847_6788C.1.pep
LRSVAREMVRLIETATVTIFAEDVDGHVNVWNAQVSELTGLQINVAIGNVLIHYHD

SEQ ID NO: 250123 - protein, 361 aa, Glycine max
  unsure (1)..(361): unsure at all Xaa locations
  Clone ID: PAT_MRT3847_67890C.1.pep
MSCFGCCEEDDYQKTAESGGQHVVKNSTGNDGNSRASETAKQGTQAVKIQPIEVPELQVDELKEITDGFGESSLIGEGSYGRVYYGVLKSGQAAAIKKLDASKQPDDEFLAQVSMVSRLKHDNFVQLLGYCIDGNSRVLAYEFASNGSLHDILHGRKGVKGAQPGPVLTWTQRVKIAVGAAKGLEYLHERADPHIIHRDIKSSNVLIFDDDVAKIADFDLSNQAPDMAARLHSTRVLGTFGYHAPEYAMTGQLNAKSDVYSFGVVLLELLTGRKPVDHTLPRGXQSLVTWATPRLSEDKVRQCVDARLGGEYPPKAVAKMAAVAALCVQYEADFRPNMSIVVKALQPLLNARHGPAGETPN

SEQ ID NO: 250124 - protein, 170 aa, Glycine max
  Clone ID: PAT_MRT3847_67891C.1.pep
MATKPRLAYLAGIFVLLLVGFTSVTAQSPGPESSSLHDTFLQCLTKYTKNSSSQLSNIVFANTNPKFPTVLQNYIRNARFNTSSTPKPSLIVTPQKESHVQATVICAKSVNIQLKIRSGGHDYEGISYISDEPFIILDMFNFRRITVDIKNEVAVVQAGATLGDVYYRIW

SEQ ID NO: 250125 - protein, 88 aa, Glycine max
  Clone ID: PAT_MRT3847_67892C.1.pep
LTVRKGAFATRATDSREHCSLKFQALTTMSVFRLTTDWHEQHHPAYHDIWLPTVSYVYFQALRSSVERLIAENEAGLTTDEKGHASLN

SEQ ID NO: 250126 - protein, 42 aa, Glycine max
  Clone ID: PAT_MRT3847_67893C.1.pep
VASAVENDACLIIRGIGKPVYPLCHDVEGLTTKKYFDSSDAW

SEQ ID NO: 250127 - protein, 119 aa, Glycine max
  Clone ID: PAT_MRT3847_67894C.1.pep
LPDITSDIYSFVMDFVLTSFPFNTKKQEPPSLKTRTTITVVMFTLNLCELHQRRDPTMSPSPWTAHYRPPRRRRFIDNDHPSPLARDASPAPPYCDKRAAPLPTGCQEPRRGASGTRRP

SEQ ID NO: 250128 - protein, 64 aa, Glycine max
  Clone ID: PAT_MRT3847_67895C.1.pep
RCFWNPYYHKFTTPSMHNTAKIYTIHRQSVKHLMSLPQFTNTVTSLSSIYLHHPKNNRLLTLII

SEQ ID NO: 250129 - protein, 181 aa, Glycine max
  unsure (1)..(181): unsure at all Xaa locations
  Clone ID: PAT_MRT3847_67896C.1.pep
MGAPIKSFALPAMLLFSMIIIPQLALGGITRHYHFDIKYQNVSRLCHTKSVVTVNGQFPGPRIVAREGDNLLIKVTNHVQNNISIHWHGIRQLRSGWADGPAYVTQCPIQTGQSYVYNYTVVGQRGTLWWHAHISWLRSTXYGPLIILPQYGVPYPXTKPYKEVPIIFGEWWNADPGAVIT

SEQ ID NO: 250130 - protein, 57 aa, Glycine max
  Clone ID: PAT_MRT3847_67897C.1.pep
MYTHGALRSLIWGLFPPPRFILYETELVTLTFEQDETYFENPPSRSKPRLNSPFLPW

SEQ ID NO: 250131 - protein, 51 aa, Glycine max
  Clone ID: PAT_MRT3847_67898C.1.pep
DKIKQKMVCFFPGLNETIIISNHCIVSSWRFLNKRRRVYPCYKKHTNQVLL

SEQ ID NO: 250132 - protein, 74 aa, Glycine max
  Clone ID: PAT_MRT3847_67899C.1.pep
NHILLHNKLRSKYHLKTNEPKFSQKILHETVAKFVSLQTHYHKFISSSPLFIAHHKEDEIKLHKYHKELKRTLE

SEQ ID NO: 250133 - protein, 211 aa, Glycine max
  unsure (1)..(211): unsure at all Xaa locations
  Clone ID: PAT_MRT3847_6789C.1.pep
MKIKVLVVFXATILVAWQCHAYDMFPLRMNTGYGARTXEGKCAXXRLGXGGXNIFXFXTIPXXCVEATKEDIHGEQYRSDSKTGNQQAYFYARDARSPSQGAFVFSIDGTGLSNIPYYKKHGXYGVGKFNXTLDDEWGNKGNAPALPETLKNYNKLXALGFKIIFLXGRTLGKQGVTEANLKKGGYHTWXEKLILKGAQEPSTPSGGFIQN

SEQ ID NO: 250134 - protein, 26 aa, Glycine max
  Clone ID: PAT_MRT3847_678C.1.pep
MTSPYNKCSHPFFIPNSNTAFDTTKF

SEQ ID NO: 250135 - protein, 211 aa, Glycine max
  unsure (1)..(211): unsure at all Xaa locations
  Clone ID: PAT_MRT3847_67900C.1.pep
MALDASTFETIPPSRFIAFTVPHPTCSDSTLRVAVLDSPLQPTDSPRVGAMLVPEGRETDWIFSTESGHLQLLFSSPGISRLILIGTLFKEGTLTLLQSRAYHRSLECSLQHQGFEVWSKPLLLALSPKSLFKRGIPEIPLLSYEDSLVSSVVVHECVGCHVGEMLVEDVEIENESDHGREFRRKVRFXKRMPNLIQTEICIIPERDCDGV

SEQ ID NO: 250136 - protein, 55 aa, Glycine max
  Clone ID: PAT_MRT3847_67901C.1.pep
LVIAKSFFPVLFGWPKHTRIRLPKLNQIRGNDSCLSCVCCIVIFFLMIGCMGSIG

SEQ ID NO: 250137 - protein, 50 aa, Glycine max
  Clone ID: PAT_MRT3847_67902C.1.pep
GVNRNGDDHVNVSFLPCIEMKFSELVCISLAHNFSSVYDKSYVISVAKWR

SEQ ID NO: 250138 - protein, 27 aa, Glycine max
  Clone ID: PAT_MRT3847_67903C.1.pep
VKSISMMDSPDSMPLTAHYQQLYFFIS

SEQ ID NO: 250139 - protein, 49 aa, Glycine max
  Clone ID: PAT_MRT3847_67904C.1.pep
SYTHYILSSITLLIYSPLTKLTMAESKNYERGLLPFKSPPPIMTFQTLT

SEQ ID NO: 250140 - protein, 60 aa, Glycine max
  Clone ID: PAT_MRT3847_67905C.1.pep
RGETKGHTNVGKPNPKNNGPGTRTSKECGKPHGKTRKNGLMGDRQCKRSNAKKNGYIKNR

SEQ ID NO: 250141 - protein, 69 aa, Glycine max
  unsure (1)..(69): unsure at all Xaa locations
  Clone ID: PAT_MRT3847_67906C.1.pep
EMGTAISKRQLIRAYQTSTVKHTLAPKKYYITKLTYLXISRPYTPSMRDNLTHHAIYLPIRIPSRYLHR

SEQ ID NO: 250142 - protein, 154 aa, Glycine max
  Clone ID: PAT_MRT3847_67907C.1.pep
ISAITCESSGSCSKFLKDMADRRLTECIDDVILEYLSVGDPESCCEKLEEILTQGLKEHLEGIEVKPDCIFMLHPLHHHSIKAYTTLASAYKVCACDLLSVDSETDINQLKAFDMSRISAAYSLVLAGATHHLFNSESSLIASGANFWTGAGES

SEQ ID NO: 250143 - protein, 116 aa, Glycine max
  Clone ID: PAT_MRT3847_67908C.1.pep
MSTTIDVPAETTSKNNIGNGIRKVPGAPPRPEGGWKKGLAIIDFVLRLGAIASALGAAATMATSDETLPFFTQFFQFEASYDSFSTLQYFVIAMAFDGRYLVLSLPFSIVTIIRLH

SEQ ID NO: 250144 - protein, 73 aa, Glycine max
  Clone ID: PAT_MRT3847_67909C.1.pep
KPFKSTILIYLYPKQLYRFNEVCHHGCSINYSLSIWTVLVCSMRFVMFYRQNNSNNQVANVLFSSLVALVFFP

SEQ ID NO: 250145 - protein, 73 aa, Glycine max
  Clone ID: PAT_MRT3847_6790C.1.pep
LKVNRPKERAPPPKFQLFPRCFFALLVVIQNPPIGLCHHSPTYPGATNRSFPRRSLSMPAGGLLVPANHITIC

SEQ ID NO: 250146 - protein, 49 aa, Glycine max
  Clone ID: PAT_MRT3847_67910C.1.pep
KTIILKIYLSSPSFYPLNRNILFLHQYSYPYIKSSLVILIYNNTIFNFL

SEQ ID NO: 250147 - protein, 93 aa, Glycine max
  Clone ID: PAT_MRT3847_67911C.1.pep
MSASSLIESPVLQLHEISAVKFGNFKLKSGISSPIYIDLRLIISYPSLLQQISQTLISSVSSTSFDLVIRVPFTALAIATCVSLAQTIPMVMR

SEQ ID NO: 250148 - protein, 130 aa, Glycine max
  unsure (1)..(130): unsure at all Xaa locations
  Clone ID: PAT_MRT3847_67912C.1.pep
PPPPPPHPPAAPPPAPPPPPRTATDQPTPPPPPXPRPQPPPPHTPPTPTPPPTTPTPAPPPPPPHPPPPPPPTPPPPARPPPRPPPPPPHPPPPTTKGREKKAPPPQAPPXPXRIIKPAQHSSFLLSAPE

SEQ ID NO: 250149 - protein, 70 aa, Glycine max
  Clone ID: PAT_MRT3847_67913C.1.pep
KISLCVVKKPLPMLRTRTQTHAIKYYFVLIFKPHYAKIIHLYFRLMKARNYPKFKTQRIKLKVFLKDKTP

SEQ ID NO: 250150 - protein, 58 aa, Glycine max
  Clone ID: PAT_MRT3847_67914C.1.pep
LITFTPSLAINSPTEYGLISHFHISPNKLVFDEDVYTIDLNNCHVTNRSSKLGKPDTS

SEQ ID NO: 250151 - protein, 120 aa, Glycine max
  Clone ID: PAT_MRT3847_67915C.1.pep
RIEKMPGYNSWFMSHHGKRYEASKALDVGVTFYRLRSEAHLGSTLESELFLAYETIGLLVGGTTESQLSQYGRGAAAVAPVRQVIALFLLASKLFHSYLRVFFTVFLSFWPLESSDSFQL

SEQ ID NO: 250152 - protein, 81 aa, Glycine max
  unsure (1)..(81): unsure at all Xaa locations
  Clone ID: PAT_MRT3847_67916C.1.pep
MNTMLSSQGINNQDTEIITDHAKVNKDXGPRIKLLRDLKHLNLDSQLITDKNCKTQLKIDAYPVSRKSYYIIRTDLSQLDN

SEQ ID NO: 250153 - protein, 213 aa, Glycine max
  Clone ID: PAT_MRT3847_67917C.1.pep
MKGSFLHDLANGISVASTYHVGKSSKRYLLPDSCGKYSKSITKSKQNRAPFHHKSGFLQRFREHVRLGPKITDTVKGKLSMGARILQVGGVEKVFMQLFSVREGEKLLKASQCYLSTTSGPIAGLLFISTHKVAFCSDRSIKISSPNGDDVRVHYKVSIPLTKLKSVNKSQNVEKPSQKYIEIVTVDNFDFWFMGFFNYQKALRCLQQAVPQA

SEQ ID NO: 250154 - protein, 121 aa, Glycine max
  unsure (1)..(121): unsure at all Xaa locations
  Clone ID: PAT_MRT3847_67918C.1.pep
LLRVWALAQLLLDSRKIGSEKVHITIVVIGHVDSVKSTTTVHLIYKLVGIDXRVIERYEKDAPEMNKRSSKYAWVLDMLKAHRERXITLDIALXKFETTMYYCTVIDAPGHKDLIKYMITG

SEQ ID NO: 250155 - protein, 115 aa, Glycine max
  Clone ID: PAT_MRT3847_67919C.1.pep
VFMQLFSVREEKKLLKASQCYLSTTSGPIAGLLFISTDKVAFCSDRSIKISSPNGDDVRVHYKVSIPLTKLKSVNKSQNVEKPSPKYIEIVPVDNFDFWFMGFFNYQPFCRLLAA

SEQ ID NO: 250156 - protein, 43 aa, Glycine max
  Clone ID: PAT_MRT3847_6791C.1.pep
IKKNLKKKKKKKKKKKKKKKKKKKKKKKKKKKKKNKKKKRRQC

SEQ ID NO: 250157 - protein, 184 aa, Glycine max
  Clone ID: PAT_MRT3847_67920C.1.pep
MAGITTSPFKLSHFPTLFSSSDSKLFGLPLSNPYSLKFDPSSLSTTSLSYVKARKSSDSDDDDKALDLSTLRSDTVRLIDQSQNMVGVVSIDDAIQMAEDVELDLVILSPDADPPVVRIMDYSKYRYEQQKKKRGQQKKSAANRMDLKELKMGYNIDEHDYSVRLKAAQKFLKDGNKVKVIVNL

SEQ ID NO: 250158 - protein, 275 aa, Glycine max
  Clone ID: PAT_MRT3847_67921C.1.pep
MAGITTSPFKLSHFPTLFSSSDSKLFGLPLSNPYSLKFDPSSLSTTSLSYVKARYYGGGGGPPRSPNDSRFRKSSDSDDDDKALDLSTLRSDTVRLIDQSQNMVGVVSIDDAIQMAEDVELDLVILSPDADPPVVRIMDYSKYRYEQQKKKRGQQKKSAANRMDLKELKMGYNIDEHDYSVRLKAAQKFLKDGNKVKVIVNLKGRENEFRNMAIALITRFQNDVGELGIEETKNFRDRNIFIILVPNKVAVQKTQEPPKKRDKSAADEVSVSAQA

SEQ ID NO: 250159 - protein, 71 aa, Glycine max
  Clone ID: PAT_MRT3847_67922C.1.pep
TLTGKTITLEVESSDTIDNVKAKIQDKEGIPPDQQRLIFAGKQLEDGRTLADYNIQKESTLHLVLRLRGGQ

SEQ ID NO: 250160 - protein, 365 aa, Glycine max
  unsure (1)..(365): unsure at all Xaa locations
  Clone ID: PAT_MRT3847_67923C.1.pep
MDRAALTVGPGMDMPIMHDSDRYDLVRDIGSGNFGVARLMQDKQTKELVAVKYIERGDKIDENVKREIINHRSSLRHPNIIRFKEVILTPTHLAIVMEYASGGELFEKICNAGRFNEDEARFFFQQLISGVSYCHAMEVCHRDLKLENTLLDGSPALHLKICDFGYSKSSVLHSQPKSTVGTPAYIAPEVLLKQEYDGKIADVWSCGVTLFVMLVGSYPFEDPNDPKDFRKTIQRAEXVLSVQYSIPDNVQVSPECRHLISRIFVFDPAERITIPEILQNEWFLKNLPPYLMDEKIMGNQFVESDQPMQSIDTIMQIISEATIPAAGTYSLDQFMADNIIDDDMDELDSDFELDVDSSGEIVYAI

SEQ ID NO: 250161 - protein, 65 aa, Glycine max
  Clone ID: PAT_MRT3847_67924C.1.pep
IHKILLKIFKHLTDLTKLLFKHNLISYRKYILIFTIIQSISLISIIISYLKISFYYNYALSDLNI

SEQ ID NO: 250162 - protein, 66 aa, Glycine max
  Clone ID: PAT_MRT3847_67925C.1.pep
VCQQVCHIFPGLLVALIGKTTEKCAGKGRAVVGSSERGKASGVGAPEIRDHSGGWQRQRVLCTNEE

SEQ ID NO: 250163 - protein, 202 aa, Glycine max
  Clone ID: PAT_MRT3847_67926C.1.pep
MDRPATGPGVDMPIMHDSDRYDFVRDIGSGNFGVARLMRDKQTQELVAVKYIERGDKIDENVKREIINHRSLRHPNIIRFKEVILTPTHLAIVMEYASGGELFEKICNAGHFNEDEARFFFQQLISGVSYCHAMEVCHRDLKLENTLLDGSPALHLKICDFGYSKSSVLHSQPKSTVGTPAYIAPEVLLKQEYDGKIADVWS

SEQ ID NO: 250164 - protein, 104 aa, Glycine max
  unsure (1)..(104): unsure at all Xaa locations
  Clone ID: PAT_MRT3847_67927C.1.pep
YQIADVWSCGVTLFVMLVGSYPFEDPNDPKDFRKTIQVDLIFKIFACFLYKLLVAXAQPVLVGSLQRVLSVQYSIPDNVQVSPECRHLISRIFVFDPAEVISIF

SEQ ID NO: 250165 - protein, 38 aa, Glycine max
  Clone ID: PAT_MRT3847_67928C.1.pep
LMQCQVAQPSCLCIDLVVCSLFWDASCQLFVNMRAPSW

SEQ ID NO: 250166 - protein, 172 aa, Glycine max
  unsure (1)..(172): unsure at all Xaa locations
  Clone ID: PAT_MRT3847_67929C.1.pep
HASEHLSRRHPQNDVVLSLTSLPSHLHSLSLSLTPSLTGRRIFLRIRNHHRRILLCFFNRWIGRRGPGVDMPIMHDSDRYDFVRDIGSGNFGVARLMRDKQTQELVAVKYIERGDKIDENVKREIINHRSLRHPNIIRFKEVIXTPTHLAIVMEYASXXGELFEKIWHAGAF

SEQ ID NO: 250167 - protein, 95 aa, Glycine max
  unsure (1)..(95): unsure at all Xaa locations
  Clone ID: PAT_MRT3847_6792C.1.pep
FLKRRALARKYAFGKTLVMGTQPPFKVKGLWLSRGQEIPQFVSHECXNKDLYGWHKVEILYQARKGGVKHRWRDKDPFWGDPILEARGFWWEAHF

SEQ ID NO: 250168 - protein, 49 aa, Glycine max
  Clone ID: PAT_MRT3847_67930C.1.pep
CVYIYIYNKYSTGEEGRVVMISQPPSLLESKNHVPFLGSSKKHTTYKLT

SEQ ID NO: 250169 - protein, 51 aa, Glycine max
  Clone ID: PAT_MRT3847_67931C.1.pep
HCHALKSLKIWKGEYASRYRSRINWREDELNSRRAALPIHISTGMPSYIYA

SEQ ID NO: 250170 - protein, 132 aa, Glycine max
  Clone ID: PAT_MRT3847_67932C.1.pep
GDMWGNGERVRVGKIVVVDDNGCPMLFMLDANEILRYDMSSNRWLYESRVPRKAPYNSSFGVVVLDGELYVVTHLCVVDFTETRRSRQHKRAGTLFIQIYDPKKKTWRSLVAKSPFNYPIDINSAVLSSICL

SEQ ID NO: 250171 - protein, 100 aa, Glycine max
  unsure (1)..(100): unsure at all Xaa locations
  Clone ID: PAT_MRT3847_67933C.1.pep
AFCSSLNKTPQYNKHACLHIPAQSLFAHNLTPDYCTLVFLYDTVRRLSSRIGHXPPAHTPCLSAQHLPPDNITKXTTPQARHNCXIIQXXXDXXKQNXXX

SEQ ID NO: 250172 - protein, 71 aa, Glycine max
  Clone ID: PAT_MRT3847_67934C.1.pep
PLFNITLPTHRIPSIILTITNTTTPTLLYTPYSYYHSKFSTPIIIITPINLPQIPTFPSSPPFNPQLPTPP

SEQ ID NO: 250173 - protein, 116 aa, Glycine max
  Clone ID: PAT_MRT3847_67935C.1.pep
TRFNPTRYKIKITFLYYKLEYTDSGASNCGDTSYSNKNQILSQCRQIEFITDLNTFKWNTTKNPFTNIIRLRKNIKGTLLWFSRSRTLLAFSRSRTFLRFFRSRTDPWADPGADAW

SEQ ID NO: 250174 - protein, 56 aa, Glycine max
  Clone ID: PAT_MRT3847_67936C.1.pep
PFLHLRGFQKLVAIGNGFFKVAFQLVIVAVLASLVGFDVWNSIHCSAHFFFCDILV

SEQ ID NO: 250175 - protein, 129 aa, Glycine max
  Clone ID: PAT_MRT3847_67937C.1.pep
RGKQSWKVAFNDASISSTLRPHHVEQVLMNTLDDAKLALRFFNFLGLHKNMNHSTTSFAIMVHALVHSRLFWPANSLLHTLLLRGSHPKCVFSLFLHSHKRCKFSSTLGFDLLVQNYVLSSRVFDAVVT

SEQ ID NO: 250176 - protein, 168 aa, Glycine max
  Clone ID: PAT_MRT3847_67938C.1.pep
AFPMGKIDQTRMWKVGERVRSTRPAGDLGPLYPFTAGVYVALMMAQIEILRKKGHSYSEIINESVIESVDSLNPFMHARGVSFMVDNCSTTARLGSRKWAPRFDYILTQQALVAVDNGAPINQDLISNFLSDQVHGAIEVCAQLRPTVDISVPPDADFVRPELRQSSN

SEQ ID NO: 250177 - protein, 55 aa, Glycine max
  Clone ID: PAT_MRT3847_67939C.1.pep
ILVDNSAVDIIVLIIILLECIGLRYMNHGKCRLSITLELTSILLQQSYIWMSERL

SEQ ID NO: 250178 - protein, 74 aa, Glycine max
  Clone ID: PAT_MRT3847_6793C.1.pep
PPALQCISVPSLPYYASHGQLAYPCVAVKSCTLLILRGTNSSSIISSLFRLLWIQQVTQNVKLPMTFHPCFNAT

SEQ ID NO: 250179 - protein, 138 aa, Glycine max
  Clone ID: PAT_MRT3847_67940C.1.pep
MKKVFVTFLAVLVVFVLTAKASEARLPVKTNSASNDYNCSQVYNLLVSCVDYMIGGDDGAPSGVCCQSVNAVKASAPTQIQRMAACKCFFDVATRLPSLLENKANSLPKLCGVDLGFIMSKQNTNCNNVPVSSRQGRD

SEQ ID NO: 250180 - protein, 173 aa, Glycine max
  Clone ID: PAT_MRT3847_67941C.1.pep
MGKEIKGSTSTASNLTSNIITEHNSILWPPRFDGKNFTEWKERMRTFIQSVNFKLWLVIKNGPNIPTKLIYKKSEDEYDEYEYNEEDMKNLELEAKARHILYCTLYADAPKIFSEGHKTAKQIWDELDREMRANSPTPSPELISHYPSFPFNYPDLYFDETGESMDFLKFCVP

SEQ ID NO: 250181 - protein, 61 aa, Glycine max
  Clone ID: PAT_MRT3847_67942C.1.pep
KKLPTCDIQRFQHLAIVELMPLVSTNSETDTYYMLTALIDHTSCQIKHHAALSCDTLSCFY

SEQ ID NO: 250182 - protein, 73 aa, Glycine max
  Clone ID: PAT_MRT3847_67943C.1.pep
GEKGPYGKIWEDPFHLGFFFLALKTLRMLKMFPPSSIPTFSPWVSTTTFTNKNIYLPKLFCLQLKTGRKVPFE

SEQ ID NO: 250183 - protein, 82 aa, Glycine max
  unsure (1)..(82): unsure at all Xaa locations
  Clone ID: PAT_MRT3847_67944C.1.pep
RPTFRYIKVLIEKRLISIKMELTITQPDDWHLHLRDGSLLQAVLPHSAXQFGRAIVMPNLKPPITTTXAAGAYRESILKSNT

SEQ ID NO: 250184 - protein, 190 aa, Glycine max
  Clone ID: PAT_MRT3847_67945C.1.pep
TRPGSTLFGSSWQPSKSPFGSTFSTSLSSGFLFGTSTASVTSASSPSMFLSTSSASIPQFSFTPAAAASTSTQPAFVSPNPAFTFGSATVNNGQMSMEDSMAEDTGQATPPATSVYSQQPAPVQSNFVFGASTPSGGSPFQFGSQQNIAPQNPSPFQASGSLGGSFSLGTGGGDKSARRIVKVKHKPRKK

SEQ ID NO: 250185 - protein, 117 aa, Glycine max
  unsure (1)..(117): unsure at all Xaa locations
  Clone ID: PAT_MRT3847_67946C.1.pep
LGVLLEVSYSPQTSFLYSRRCYAALNNAACESCTVLTEDCVVTSSLISTTSCITPNTPTPRTSYVNINSALYPGGPAVPTXSLQRIRIVDTCDMTGGPQDTPGYCVASGAQAFCGEG

SEQ ID NO: 250186 - protein, 56 aa, Glycine max
  unsure (1)..(56): unsure at all Xaa locations
  Clone ID: PAT_MRT3847_67947C.1.pep
MSEILHGHTRQCSYQPGLMHWEVICDEHGIDPTGERIXGCNITIPLVRINVYYIEA

SEQ ID NO: 250187 - protein, 63 aa, Glycine max
  Clone ID: PAT_MRT3847_67948C.1.pep
KGNHVLVSHRVRPQHENKQVQKQQQPMNMLSPEAGSSSVEGAYKDSSTSKHGRRTTTHTIATP

SEQ ID NO: 250188 - protein, 135 aa, Glycine max
  unsure (1)..(135): unsure at all Xaa locations
  Clone ID: PAT_MRT3847_67949C.1.pep
MKTLRRCERFCNCYGIHIRKLTVISEAKPESSKVENVVHIDRVSNLHYLLQLCAKTRSSMGGRACHAQIIRIGLEMDILTSNMLINMYSKCSLVDSARKKFNEMPVKSLVSWNTVIGXLTQNAKDREALKLLIQM

SEQ ID NO: 250189 - protein, 78 aa, Glycine max
  unsure (1)..(78): unsure at all Xaa locations
  Clone ID: PAT_MRT3847_6794C.1.pep
AYPISTSSCLKAHKDPTINSSMLMLPAPKYGLPAFFTSVAPCTRYVXPLLPMDSSLFYAGIPHMIDQQYLQNQTSIRC

SEQ ID NO: 250190 - protein, 98 aa, Glycine max
  Clone ID: PAT_MRT3847_67950C.1.pep
CTIHKKENPYQNCKITKSYNIVKPKKIKITQVGGTKLANTTNQSILQITNEQHMDAPTKKKEKIMSPRMVLCTPFIHPFLISLFSPLPRRWILSSPFI

SEQ ID NO: 250191 - protein, 54 aa, Glycine max
  unsure (1)..(54): unsure at all Xaa locations
  Clone ID: PAT_MRT3847_67951C.1.pep
IWKKIARHRNLSSNQVTWYISKLKMHFTAIGSNXAYFNSSFNRXCGMYVFILRN

SEQ ID NO: 250192 - protein, 46 aa, Glycine max
  Clone ID: PAT_MRT3847_67952C.1.pep
PSVGLEVVLCSGGNRWLVFRNKVGIPSCVMPLVPPPLFFLGALIQP

SEQ ID NO: 250193 - protein, 84 aa, Glycine max
  Clone ID: PAT_MRT3847_67953C.1.pep
MNFSGKYQVQSQENFEPFMKAMGLPEDLIQKGKDIKGVSEIVHEGKKVKLTITYGSKVIHNEFTLGEECELETMTGEKVKAVVK

SEQ ID NO: 250194 - protein, 150 aa, Glycine max
  Clone ID: PAT_MRT3847_67954C.1.pep
TRFCGTREYEHLGAGQSCNAVVLDWNRHREKIQFQSQPNKLEIRVHIPFPQISSQISHWFALRGWFCGIEEEDGETGCAGEISDLRAFPFPAKDYAGSLEGLAHEDSPQGLRELDQRHSFARSPRRHLRVCSKLPGKGEAGSQVLSSCKS

SEQ ID NO: 250195 - protein, 55 aa, Glycine max
  unsure (1)..(55): unsure at all Xaa locations
  Clone ID: PAT_MRT3847_67955C.1.pep
QIRRARKDHXHCTHXSTVSEQXXITWXMSSSLTXNPLSFXXAQVXLSARXDSXKX

SEQ ID NO: 250196 - protein, 72 aa, Glycine max
  Clone ID: PAT_MRT3847_67956C.1.pep
MGKQIVPVKSVIYALSPFQQKIMPGLWKDLPTKIHHKVSENWISATLLLGPLVGTYTYVQNYLEKEKLSHRY

SEQ ID NO: 250197 - protein, 439 aa, Glycine max
  Clone ID: PAT_MRT3847_67957C.1.pep
MAFPLSSSSFHLTVARNRITCFSKKHQRHVIAKVTVCNCNTTTTRATPARSVVEKIVKRLRSVVVVPIVLASFPISAFVAPLVDYVTSPGVAEAVLYSPDTKVPRTGEVALRRAIPANANMKAIQDTLEDIFYLLRIPQRKPYGTMEGNVKKALKIAVDEKDSILASIPAELKEKGSLVHASLIEGKGGLQTLLQSIKEQDADKVSVSLTSTLDTVAELELLQAPGLSFLLPEQYAQQYPRLSGRGTVEFTIEKGDGSTFSPVGGEQKNTATVQVVIDGYSAPLTAGNFAKLVMDGAYNGAKLNCINQAVISDNGVDKNTGYSVPLEIMPSGQFEPLYKTTLSVQDGELPVLPLSVYGALAMAHSEASEEYSSPYQFFFYLYDKRSAGLGGISFDEGQFSVFGYTTTGRDILPQIKTGDVIRSAKLIEGQDRLVLPKES

SEQ ID NO: 250198 - protein, 76 aa, Glycine max
  Clone ID: PAT_MRT3847_67958C.1.pep
TKKFGSKNSGGPVFCIEKKPPFWEGGGQFLGGAPQPFRNWVQKRKNGQGDKHFKMGQTRPPLGVFNPKANQFLAFP

SEQ ID NO: 250199 - protein, 96 aa, Glycine max
  unsure (1)..(96): unsure at all Xaa locations
  Clone ID: PAT_MRT3847_67959C.1.pep
RTLNFDNFLPHQIAVDEKDSILASIPAELKEKGSLVHASLIEGKGGLQTLLQSIKEQDADKVSVSLTSTLDTVAELXLXQAPGLSFFVARSSMHNN

SEQ ID NO: 250200 - protein, 75 aa, Glycine max
  Clone ID: PAT_MRT3847_6795C.1.pep
GELVSTFPKSHIKIYSECHLKKIFTCITFNNNNNNNNNNNNNNNNNNNNNNRNTIWLYHKLKIIFLTKYESQLYV

SEQ ID NO: 250201 - protein, 128 aa, Glycine max
  unsure (1)..(128): unsure at all Xaa locations
  Clone ID: PAT_MRT3847_67960C.1.pep
HEYDKPYFRGSKLRSLISVYNVTITVGIDTTSATLHFKKLADCDFLXRNFKQMSNDXREDPEDMDSLWTQINYAXCNNLETQEATLVNHLNVVQELTLHSXPYEAXQLRRKALSRLEWLLKADVPAIA

SEQ ID NO: 250202 - protein, 77 aa, Glycine max
  Clone ID: PAT_MRT3847_67961C.1.pep
DGLIVGTEKGWLGSLCWVLSVPGVPYAVLQLEDRAAFLSCELIGCHLRRGFCFRATLLYLRGWICPSISKSGGMEPR

SEQ ID NO: 250203 - protein, 141 aa, Glycine max
  Clone ID: PAT_MRT3847_67962C.1.pep
MAAILSEDLIVEILTWVPVKSLMRFRCVSKSWNSLIFHPAFVKLHLQHQRASKNTHLLLRCRRDSMLNLSDEFIGPCSIHGLLENPSSTVDDACHQLHPGYFFIGSCNGLVSLLYHSRSLVRHGSIEYRVRFWNPAQGSCP

SEQ ID NO: 250204 - protein, 57 aa, Glycine max
  unsure (1)..(57): unsure at all Xaa locations
  Clone ID: PAT_MRT3847_67963C.1.pep
IXYFXSETXWAKLITEGICLTFFRATLQIMHFQHYLFKNKLKNLELVPFLFIILGTG

SEQ ID NO: 250205 - protein, 468 aa, Glycine max
  Clone ID: PAT_MRT3847_67964C.1.pep
TGRRLENSYSAKESKSNAIIDHLLRDCDLVGRFLQADKHCILSVESSQHTVPAAGKRGTRVGNIGHITRIFNKLLHLAHNQSHILACLQENSEWNEWQATVLQQRNVVENVHRWACGRPTALQDRMRDSDDEDLHDRDYDVAALANNLSQAFRYKIYGNDNNEEEHGGLDRDDEDVYFDDDSAEVVISSLRLGDDQGSNLFTNSNWFAFQDDRIGDAPGGTSSSEMMDEIKLNAVANSGSNSSDDEVVVGEDEELADSKNTVNGTSSLSADFFSGLTASDSMNGGTLNFESEKTSPSNDMGFFRFEAPDNEDLFGDRPLPDWVGWGEPSEMQDAGSSRNPFLDNDESGRPQVGSPNLSSPSNGESIPSNGSPTTSDSINGSSDSSPTSVAVPSLFEEDVEFVGVELEGTEKAMDQALKEGIVGEAGPLKRNVVSKVPEKENSEEGSPGVKEFNDANYWRVDNEVAVLE

SEQ ID NO: 250206 - protein, 43 aa, Glycine max
  Clone ID: PAT_MRT3847_67965C.1.pep
GRTRPFVSILSIYNIFSLQKVASPQPAPPHISSVLSASKVRPV

SEQ ID NO: 250207 - protein, 132 aa, Glycine max
  unsure (1)..(132): unsure at all Xaa locations
  Clone ID: PAT_MRT3847_67966C.1.pep
YQCFNISCVEIIVYRGLXFGMYDSLNLVVLVGGLSHSLSASFFCGWAITIGXGLAFYPLDTVRRRMMMIFGEAVKYKSSLYVFXIIVVNEGAKLLFKGAGANILRAVVGAGVFXGYDKLXLILFGKKYGFGG

SEQ ID NO: 250208 - protein, 139 aa, Glycine max
  unsure (1)..(139): unsure at all Xaa locations
  Clone ID: PAT_MRT3847_67967C.1.pep
HIAVRGAIIHRKYFRNSLLXPTRPAACGILPLPNVPFFWVLFRTYSHWRALQGSEKLLQLVSDGNKTSNTYTQTERKNSKSQSHSSNEPCWVLKPSKELDNLVGLEDGRDGLSQHAIVNICKIYDLNTKDVIKYQKSIF

SEQ ID NO: 250209 - protein, 200 aa, Glycine max
  unsure (1)..(200): unsure at all Xaa locations
  Clone ID: PAT_MRT3847_67968C.1.pep
MDDQEQHRQPQPNSNNGSNADPFLLNYSTSDLRTASEFLATWLPFLSRDLCTRCTLSLSDRIRSIDPGEAPQNEIPSDQNDVDVEDNCDNCDAHSLGSWKDGAEVNNSNVETPSQRISWADMAQEDDEFGDEEDSNNGGNFAVGDSNAFSYVAKVVAEKPTLAREQREYIRVMNVERKKDFICFERXVNGKLVNILEGLE

SEQ ID NO: 250210 - protein, 71 aa, Glycine max
  Clone ID: PAT_MRT3847_67969C.1.pep
RVSFGSCFSASAEPSVRLLVSRSDLCVFLASCTGSVAFLSVSHLFSRGLWRPAVVYALGPPCCRLLAKVNV

SEQ ID NO: 250211 - protein, 48 aa, Glycine max
  Clone ID: PAT_MRT3847_6796C.1.pep
LRKCLQERNKRGAVTTLKVKVNIQNDYCICMIRNHPISFLLHLDSEGE

SEQ ID NO: 250212 - protein, 175 aa, Glycine max
  Clone ID: PAT_MRT3847_67970C.1.pep
PRVRGNLYILQGTTCVEDGLFVVASRSNKNIPDLTQLWHTRLGHMSEKGMMILQKQQLLGNQKLDELKFCEHCVFDKQHGIKFPKAIHTTKGTLDYIHVDCWGPTRVPSLGGGRYFLSIIDDYSRMTWIYIMSQTSQAFKCFKEWKALIEKQTKRKGKRLRTNNGLEFCSTRFNK

SEQ ID NO: 250213 - protein, 189 aa, Glycine max
  Clone ID: PAT_MRT3847_67971C.1.pep
MGDANFAFFVLFLLPVFLLAVLYFLVRPRPVKIPIKNRHVFITGGSSGIGLALAHRAAAEGARVSILARSPDKLEEARNAIRLATGMEVAAFAADVRDFEAVKRAVDDAGPIDVLLLNHGVFVALELDKMELSEVKFTMDVNLMGTLNLIKAALPAMKNRNDPLPASIALVSRSRAPALFFFFLQLFVI

SEQ ID NO: 250214 - protein, 77 aa, Glycine max
  Clone ID: PAT_MRT3847_67972C.1.pep
ASLRVLRSPRVFKTLRLVETKGHEHHNQRLAKHLLHEKHREIGLRGWRRHSSSSSSIFFHQKHFFLCCFEALLVMEG

SEQ ID NO: 250215 - protein, 329 aa, Glycine max
  Clone ID: PAT_MRT3847_67973C.1.pep
QQSSQPRREKKQVRRRLHTSRPYQERLLNMAEARREIVTALKFHRAAMKEASEQKQQQQQAQEQQQRPSVSLQPSQFPSFNQDGKFKSRRNPRIYPACTTNFSSYMDMDDLSHSDLSQPPPLVPNSYTWPAASPITPPPLMAENPNFVLPNQTLGLNLNLQDFNNLDATLHLNNSSSSSSYSSATSSSPPQELPSVGISQGEGFSSLVDTIESNAATQVTGGLHTAMDDEGMAEMRSLGEQYQMEWNDTMNLVKSACWFKYLKNMEHRAHEANTVDVAYNNFDQLLEFPAWLNANESCLEQCSVDYFQESSLPCMDIGDIDSMDDDWLA

SEQ ID NO: 250216 - protein, 147 aa, Glycine max
  Clone ID: PAT_MRT3847_67974C.1.pep
PAYGNSQFRRRLMNDLQRPYDQEECDRLLLEVRQKKQKERHRETRHGVVKFCRTRGVSESYLDLYPDLAKAIAEFKKPEKVLFLLRGFIFWLQNVTHEGKFRPWLDKHCLDFLRQMKNWNLAKFGSKSLTNIVNKVYIRTVKSILEL

SEQ ID NO: 250217 - protein, 50 aa, Glycine max
  Clone ID: PAT_MRT3847_67975C.1.pep
ETKYTVYYLPFCLQLIGNYFVKVLARAARVKPYFPILILLFNTVIPLGTI

SEQ ID NO: 250218 - protein, 56 aa, Glycine max
  Clone ID: PAT_MRT3847_67976C.1.pep
RIQSCGYSLIHTSLLNNAESVLSFYRTRLIRPDLSGLDPYLHTTGGFGRIFHKSDA

SEQ ID NO: 250219 - protein, 48 aa, Glycine max
  Clone ID: PAT_MRT3847_67977C.1.pep
LVKGFREMRGSELICKGKGGFNIKVIFVSLDCSYLLLIIKGVVWLIVN

SEQ ID NO: 250220 - protein, 120 aa, Glycine max
  unsure (1)..(120): unsure at all Xaa locations
  Clone ID: PAT_MRT3847_67978C.1.pep
TASEKQXXXXXXXXPXXTTGNXAXAGTGXPXXGXKXXXGXPTRKTNXDXTXXXSNXGRXQXXQXXPPXGKKKXEXXXXXPDXXXAQXAKEGEXXXRKGRXXRXEXEXEHXXGDXEHNRXP

SEQ ID NO: 250221 - protein, 64 aa, Glycine max
  Clone ID: PAT_MRT3847_67979C.1.pep
NVITVNKLSYFRRIKLVKLSSIIEMTELQVSSILSIAYNMSHFSLSKNICLSFIGISLQYSNNS

SEQ ID NO: 250222 - protein, 194 aa, Glycine max
  Clone ID: PAT_MRT3847_6797C.1.pep
MAKKVYPQDPTSSPCMSHGPETYTLWMKSLILHSNGCTVYDSNGVIVYRVDNYDTKGRRHVNLLDLRGRVLCTIHKKLLAFGRWDVYRGSDNSNFKTQEKPWFQVKRCYKMVTRKITCQITVECQKYCIKKIGGKTTFQIVNIDGDTVADAKQKHSSSGVVLGNDVLTLDVEGGIDHSLIMALVIVFGLICGRM

SEQ ID NO: 250223 - protein, 76 aa, Glycine max
  Clone ID: PAT_MRT3847_67980C.1.pep
MIWYFPNLKMLNACINPTKNGPLKLKKNKLRLAQTEEIQKNGLRSSLTTKKEKRKNDQGLKMYLGWECLSLISLDF

SEQ ID NO: 250224 - protein, 139 aa, Glycine max
  Clone ID: PAT_MRT3847_67981C.1.pep
MRFLTCLALLPGALAAPALDFTSYITPRANANASLTGYLGVFFLGDAPNVYFYQSSGNNAVSMNPLNNGNPVIVPTLGTKGVRDPSIITSTADNKYYIIGTDLDIAKTTWDLSQRNGSRSIFVWESADLVTWTDERLVE

SEQ ID NO: 250225 - protein, 217 aa, Glycine max
  Clone ID: PAT_MRT3847_67982C.1.pep
LSIVEMGLNVPTQPQISHIGRQSDVGFQTVGTVGYKQEHLIKYQNETVGSALWPGLSPIASAGITRASYLQFSSAAKAQDWMKTAMGVSKQDLMETCSSGGKISEIITHKKSWKRCAAHVHISHLIRSLEVSKRQAGKEHELCPQTRVHQGSKCGVLTQAHNLNWMRSGNSHATRTVYSATTSNSRETKNGILQHDLYHENRSPTPGVYDPQKHCSN

SEQ ID NO: 250226 - protein, 75 aa, Glycine max
  Clone ID: PAT_MRT3847_67983C.1.pep
DMFCMTIWILYKESMRIRNWLKMRERLVEPYNLMDEHEGYTPRTILTCGGFEKQLLTRDTIVRILSAQDLQRWGH

SEQ ID NO: 250227 - protein, 182 aa, Glycine max
  Clone ID: PAT_MRT3847_67984C.1.pep
MARNWVVRSLALRHAMKNRVLTLSFNRILPSLPSKSSLLATTAAATASSQLSLLPSFHHSRSLSSASAPSDVVLVNSEEEFNNILTKVRDDSLHAVFYFTAAWCGPCRFISPIVGELSKKYPHVTTYKIDIDQEALQGTLGKLQISSVPTLHFFQNGKKADELIGADVARLNYITEKLFKKD

SEQ ID NO: 250228 - protein, 549 aa, Glycine max
  unsure (1)..(549): unsure at all Xaa locations
  Clone ID: PAT_MRT3847_67985C.1.pep
MARNWVVRSLALRHAMKNRVLTLSFNRILPSLPSKSSLLATTAAATASSQLSLLPSFHHSRSLSSASDDSLHAVFYFTAAWCGPCRFISPIVGELSKKYPHVTTYKIDIDQEALQGTLGKLQISSVPTLHFFQNGKKADELIGADVARLNYITEKLFNLAPLPPKGNILVESIEMEGLTLILAEWTMKCKMIELWLLGVCLGVPLDMLIRKQRNSVSKTFCSMSFSIAHRVHQPPRHLPHASANKAATLHHHSHHPTPIVSFLQTATLSKEPTWKQINQVPYSTTHSKRTWASDIDPHLCLKSLRETHGMALKCGFDAMQISATNALADAYAKCDSLEAVENVFNRMQGKDIVSWTTMVTAYCQYSEWGKALAIFSQMRNEGFVPNHFTLSSVITACGGLCLLEYGQQIHGLTCKASMDTETCIESALIDMYAKCGNLKGAMKIFKRISNPDTVSWTAIISTYAQHGLVEDALQLFRKMKQSDAKINAVTLLXILFACSHGGKVEEGLRIFHQMEDTYGVVPEMKNQYLLIMVRLNLTAGKSYPSKLLL

SEQ ID NO: 250229 - protein, 354 aa, Glycine max
  Clone ID: PAT_MRT3847_67986C.1.pep
MKSFHLTVTALCCVVVVLGVLPLSLDAQLDPSFYRDTCPRVHSIVREVVRNVSKKDPRMLASLIRLHFHDCFVQGCDASVLLNNTATIESEQQALPNNNSLRGLDVVNDIKTAVEKACPGVVSCADILTLASEISSVLGGGPDWKVPLGRRDSLTANRNLANQNLPAPFFNLSRLKSAFAVQGLDTTDLVALSGAHTFGRAHCNFILDRLYNFSGTGKPDPTLDTTYLQQLRQICPNGGPNNLVNFDPVTPDKIDRVYFSNLQVKKGLLQSDQELFSTPGADTIPIVNRFSSDQKVFFDAFEASMIKMGNIGVLTGKKGEIRKHCNFVNKKSVKVDIASVASEESSTEGMVTSI

SEQ ID NO: 250230 - protein, 49 aa, Glycine max
  Clone ID: PAT_MRT3847_67987C.1.pep
RCKIMIVRWCMCCVMGQCYPLLLSWKRPSSRVMSGCDCVICEIKNNPRV

SEQ ID NO: 250231 - protein, 158 aa, Glycine max
  Clone ID: PAT_MRT3847_67988C.1.pep
FFPTPTEEFPPTGVRTVDDITNNVKLVIETAKKPQQMIQEYKDMKLTPPAEATEVYNDANELYRAPQTILSENARIVSEIPKVLENPSKILADPANFAQRLKELIGDPEKLVAEYKTLIEKFKQLAENSQGLVGNANKYIEDYKNLIDGEYQKILTYL

SEQ ID NO: 250232 - protein, 100 aa, Glycine max
  Clone ID: PAT_MRT3847_67989C.1.pep
LKRNFIHFPFFFFFVLFPISTWSIYQHRSIMAHHSSQRLNLAASESNPTTPFSNPDLIQTYKPSFLVKHLTNLNLIQTHITCSSLKHSLLFTPICRQNPC

SEQ ID NO: 250233 - protein, 70 aa, Glycine max
  Clone ID: PAT_MRT3847_6798C.1.pep
DICRHYHAKSNMIKISFRSFALVSTRAFNTFHFTDMTSIHYWVLKRVKETQPLRKYRNIDILERKKNGLH

SEQ ID NO: 250234 - protein, 193 aa, Glycine max
  Clone ID: PAT_MRT3847_67990C.1.pep
GIRHEVGNRHHQLIPFNTFHLQTGRSDHCFQPDQAPHPVKTEGNNSHLHYPLMRSNLHHMLHPQQGGSQSSNELEAIKAKIIDHPHYSNLLQVYMDCQKVGAPPEVAARFATVKENFEARQRSLVRSMETCKDPELDQFMEAYYDMLVKYREELTRPIEEAKDFMQRIESQLNTLCNGTVRIFSGILSFYLWE

SEQ ID NO: 250235 - protein, 49 aa, Glycine max
  Clone ID: PAT_MRT3847_67991C.1.pep
VYSTTTITYKCFIEKLFYTRVENVTLIGYGHLKIKPQNLITWIPYQSGV

SEQ ID NO: 250236 - protein, 85 aa, Glycine max
  unsure (1)..(85): unsure at all Xaa locations
  Clone ID: PAT_MRT3847_67992C.1.pep
SLSLFVFIRVLTXGTILLYLWTSCLSNSFPGAIPKKSYVMVRIELQVDFPFPALDIIYTSPQLDRNFILLDLLDSLESDIKGILL

SEQ ID NO: 250237 - protein, 97 aa, Glycine max
  Clone ID: PAT_MRT3847_67993C.1.pep
QAKKIDEEILQEVVKMGFDRNQLVESLGNRIQNEGTVAYYLLLDNRFRVSSGYLGAEFQETMDSGFNQMHSSELASSVVGNRFPGYMEYPGVGSRQQ

SEQ ID NO: 250238 - protein, 96 aa, Glycine max
  Clone ID: PAT_MRT3847_67994C.1.pep
FTAWSALGAYPMFRGSVAAIELPILPDIATATAFPIALVALRWVSPPRSSFLALCPYRLCLNQPLAIFFSALSLTALDWVSQVPHRRPFSGATRLS

SEQ ID NO: 250239 - protein, 54 aa, Glycine max
  Clone ID: PAT_MRT3847_67995C.1.pep
YQVEVLSKLRHPNIITLIGACPESWTLVYEYLPNGSLEDRLNCKDNSPPLSWQT

SEQ ID NO: 250240 - protein, 113 aa, Glycine max
  Clone ID: PAT_MRT3847_67996C.1.pep
MYVLLCQCVYISESVLVLAFYFLVYILVSVPYSSLLTIVTVRCGHCANLLSVNMGASLQAFRPQEPQSQKQLLSFEEPSSCKELGSSSSECNKIAPFYDGVEHEQPKIPPNRP

SEQ ID NO: 250241 - protein, 81 aa, Glycine max
  Clone ID: PAT_MRT3847_67997C.1.pep
VILPAIVGGQSVNNLSWPPPHSSNDRRRPSLYQWQVHELFRFSQQLQRSCLNHGDLTFRMAGGHPMLRSTRKFVNAFAMGP

SEQ ID NO: 250242 - protein, 57 aa, Glycine max
  unsure (1)..(57): unsure at all Xaa locations
  Clone ID: PAT_MRT3847_67998C.1.pep
LNGYEKGSNRTLQGVKEYHLTLHVFIFSSFKIPKGVIIDPFIKISRPSSPVRDSSXR

SEQ ID NO: 250243 - protein, 178 aa, Glycine max
  unsure (1)..(178): unsure at all Xaa locations
  Clone ID: PAT_MRT3847_67999C.1.pep
TIAAPTFNISQLQKSFSQRGXLSLEDYVALSEGPTXGLAHCXSFQNRIHKXFSQKLEIDPSLTPSLARSLQGXCPSHTKVKNAGSSLDSSSTLFDNAYNKLLLQEKSLFSSDQALLTHPTTKALVSNFVDSQKEFERAFVKSMIKMSSITNGGQEIRLNCKLATSLIRMYKNVNMNFS

SEQ ID NO: 250244 - protein, 75 aa, Glycine max
  unsure (1)..(75): unsure at all Xaa locations
  Clone ID: PAT_MRT3847_6799C.1.pep
VITLTNKPSTSTCFXWCSMALGYFLCSILVKFMNCATKNITTSGGWLAGNNININHLNLFYLFLSIYIELHHVMS

SEQ ID NO: 250245 - protein, 105 aa, Glycine max
  Clone ID: PAT_MRT3847_679C.1.pep
CTFSPSQTHPLRLTICFGNSTFTVWFFDCCYALQKINMRVPLLCKSVLSWVHISLRILLVISPYTINSCLGLMCSRAPVCRTSVSLPRTPRCDVPVWSQTRSGIK

SEQ ID NO: 250246 - protein, 68 aa, Glycine max
  Clone ID: PAT_MRT3847_67C.1.pep
HSSSHSLSMLAICASCFLYHGYSGISRLAGVFTVLGECIPLLLDTCSSHNYQHSSTHLHNTYPAHMTF

SEQ ID NO: 250247 - protein, 25 aa, Glycine max
  Clone ID: PAT_MRT3847_68000C.1.pep
GGEGRILWGRFNIFLSSTIWDNLVY

SEQ ID NO: 250248 - protein, 51 aa, Glycine max
  Clone ID: PAT_MRT3847_68001C.1.pep
FMSSSCEDSRRNPNVKVLRFSNAVSECDVSMTIGKLDDIKWDLCSHGWRFS

SEQ ID NO: 250249 - protein, 103 aa, Glycine max
  unsure (1)..(103): unsure at all Xaa locations
  Clone ID: PAT_MRT3847_68002C.1.pep
LDFGTQALTLMHLTTYFRETRINIKISPTRLIYSANDSPYYHWPXRLIQYINTLLLRKSXYPTMYSAMYISSLQTYLYMILINNGLTLNLMDHYLLFYVSNPL

SEQ ID NO: 250250 - protein, 28 aa, Glycine max
  Clone ID: PAT_MRT3847_68003C.1.pep
VYLHDADAYVESGCFTMNVSLYCTGCYD

SEQ ID NO: 250251 - protein, 113 aa, Glycine max
  Clone ID: PAT_MRT3847_68004C.1.pep
DPLVLPENRSPKEQPGWCLKHPKAPLPPPLDQHMVPFFGPVGCSESRQLLKSKVRAVYPDFPSTHLAPHVSEICGNLGKPPAALDAIPICRMCVVSPFISSFLCWILRSPHND

SEQ ID NO: 250252 - protein, 47 aa, Glycine max
  Clone ID: PAT_MRT3847_68005C.1.pep
LQAQRKYHSNFIILIMMPSETDNSTMKNLNHNLQNAQPSNGTRIQAL

SEQ ID NO: 250253 - protein, 79 aa, Glycine max
  unsure (1)..(79): unsure at all Xaa locations
  Clone ID: PAT_MRT3847_68006C.1.pep
MAKRTKKVGIVGKYGTRYGASLXRKMVKKIEISQHAKYTCSFCGKTKMKRRAVGIWHCGSCMKTVAGGAWTYNTILQSQ

SEQ ID NO: 250254 - protein, 64 aa, Glycine max
  Clone ID: PAT_MRT3847_68007C.1.pep
HTFLTAITSGNYLTTNMVTINNIFNAWSKLTNMIKYHVLNNYKIELPYSHSTINQHRSLMYYLL

SEQ ID NO: 250255 - protein, 138 aa, Glycine max
  Clone ID: PAT_MRT3847_68008C.1.pep
PPLGPFSVRDMRPPVSVGVLQNVEKKGPSGAQVPQAAPKKKLIVRFGSSGGVVFFGSHKSWFFAPGFSFLGSLFFGPSFKFPPSFCHFCSPNWVFYPRWPAPLYPFVLKGWGCGTPPFPFFLAPPVFGLSPCVVGLLF

SEQ ID NO: 250256 - protein, 44 aa, Glycine max
  Clone ID: PAT_MRT3847_68009C.1.pep
RDVEPRAVINVCHLSQFLTLSICGRFMWISSLLKFENHRVMPFD

SEQ ID NO: 250257 - protein, 61 aa, Glycine max
  Clone ID: PAT_MRT3847_6800C.1.pep
MEFRCSVISFTILFSLALAGESHVHASLPEEDYWEAVWPNTPIPTALRELLKPLPAGLLIL

SEQ ID NO: 250258 - protein, 69 aa, Glycine max
  Clone ID: PAT_MRT3847_68010C.1.pep
FRIFSGMTFYSLSSLLCSYECPAGSIISRLVFHHMLSSTCSSPLVVIFLTTAGSTHDSFRWKAMRVLCT

SEQ ID NO: 250259 - protein, 65 aa, Glycine max
  Clone ID: PAT_MRT3847_68011C.1.pep
NFLQSVLTLTSFILINQVILIHVFTKNSLVSNPGKRHSMILDISKKWGRKVLTNDKIMEVTTDKC

SEQ ID NO: 250260 - protein, 67 aa, Glycine max
  Clone ID: PAT_MRT3847_68012C.1.pep
MMEDKNKKKKKRSKLWLKKVSWPFRWKRLDLQTTIMDTVVFKVLYAAEAVVLVSTLCFFYLCCGCHF

SEQ ID NO: 250261 - protein, 73 aa, Glycine max
  Clone ID: PAT_MRT3847_68013C.1.pep
LNNEPCPPVCLLQKSSTETLTHSFTTTNAMTLTSTPTSSYWIKTKAFFTENHGFWSGQITNLVQLYFTRLLLR

SEQ ID NO: 250262 - protein, 65 aa, Glycine max
  Clone ID: PAT_MRT3847_68014C.1.pep
SSSGLPMPAGRRYYCYSSFCSHSSEGELSGLFLKLATKGPFTPLVIIWRMLFFRCAGSFAPSICC

SEQ ID NO: 250263 - protein, 91 aa, Glycine max
  Clone ID: PAT_MRT3847_68015C.1.pep
HVTVSLLVGRIHILGGSVPVLQTACELYIIDPPDDEPAWRILNVPGRPPRFVWGHSTCAVEGPKAIVMGGQTGEQWLLSNPHDLSLPSFVS

SEQ ID NO: 250264 - protein, 71 aa, Glycine max
  unsure (1)..(71): unsure at all Xaa locations
  Clone ID: PAT_MRT3847_68016C.1.pep
XWDESKLIPPPSSESSTDATVEVTVKVKTMCSLQADHANSLREARTQSPNRNRWKKGGQKTIQKTRTTRWD

SEQ ID NO: 250265 - protein, 59 aa, Glycine max
  Clone ID: PAT_MRT3847_68017C.1.pep
RTHDLMRDPTRYKKGPAKGGLRKLTTSHPSCRRTKRATLTREKQNKITGASKNPPHPTH

SEQ ID NO: 250266 - protein, 80 aa, Glycine max
  Clone ID: PAT_MRT3847_68018C.1.pep
MATVASPADQATDLLQKLSLETQPKPLEIPEPTKKATGNQYGSVDSGNAANGQIPSYDRGSYYVVPPKWLPIHWLLLWGV

SEQ ID NO: 250267 - protein, 678 aa, Glycine max
  Clone ID: PAT_MRT3847_68019C.1.pep
MATVASPADQATDLLQKLSLETQPKPLEIPEPTKKATGNQYGSVDSGNAANGQIPSYDRSVTPVLQDFIDPTMCYLPNGYPSTAYYYGGYDGTGNEWDDYSRYVNSEGVEMTSGVYGDNGSLLYHHGYGYAPYGPYSPAGSPVPTMGNDGQLYGPQHYQYPPYFQPLTPTSAPFTPTPAVLPQGEVSTSVAADQKPLPVEAANGNSNGVSNGGNAKGRGPTSGYQDPRFGYDGVRSPIPWLDAPLFSDGQPRPVSSTTITSSISGGNNTASRSQTFRPNSQFMGLHHPRPMPAMGATHSFINRMYPNKLYGQYGNTVRSGMGYGTHGYDSRANGRAWLAVDSKYKTRGRSGGYFGYGNENVDGLNELNRGPRAKGGKNQKGFAPTILAVKGQNLPASLGTDEEKDKTSTVPDRDQYNKADFPEEYTDAKFFVIKSYSEDDIHKSIKYNVWASTQNGNKKLDAAYHEAQQKPGGCPVFLFFSVNTSGQFVGLAEMIGPVDFNKSVEYWQQDKWNGCFPLKWHVVKDVPNNLLRHITLDNNENKPVTNSRDTQEVMLEPGLKLIKIFKEYTSKTCILDDFGFYEARQKTILEKKAKQQFPKQVWEGKPADEKIEINGEVNTQKSEVSSEVLKESLAEKDSDDHKVPENGCATKTGDAPKGAKPVVPESKIVANGVVSNGC

SEQ ID NO: 250268 - protein, 56 aa, Glycine max
  Clone ID: PAT_MRT3847_6801C.1.pep
MCTLLGGPAPSLSLSLTHTLSLSSLSLSAPQRFTGCFCSFVIGRNKSAKPVCITPK

SEQ ID NO: 250269 - protein, 679 aa, Glycine max
  Clone ID: PAT_MRT3847_68020C.1.pep
MATVANPADQATDLLQKLSLETQPKPLEIPEPTKKATGNQYGSVDSGNAANGQIQSYDRSVTPVLQDFIDPTMCYLPNGYPSTAYYYGGYDGTGNEWDEYSRYVNSEGVEMTSGVYGDNGSLLYHHGYGYAPYGPYSPAGSPVPTMGNDGQLYGPQHYQYPPYFQPLTPTSAPFTPTPAVLPQGEVSTSVAADQKPLPVDAANGNSNGVANGGNAKGRGPTSGYQDPRFGFDGVRSPIPWLDAPLFSDGQPRPVSSTTITSSISGGNNTASRNPTFRPNSQFMGLHHPRPMPAMGATHSFINRMYPSKLYGQYGNTVRSGMGYGTHGYDSRTNGRAWLAVDSKYKTRGRSGGYFGYGNENADGLNELNRGPRAKGGKNQKGFAPTILAVKGQTLPATLGTDEEKDKTSTILECDQYNKADFPEEYTDAKFFVIKSYSEDDIHKSIKYNVWASTQNGNKKLDAAYQEAQQKPGGTPVFLFFSVNTSGQFVGLAEMIGPVDFNKSVEYWQQDKWNGCFPLKWHIVKDVPNNLLRHITLDNNENKPVTNSRDTQEVMLEPGLKLIKIFKEYTSKTCILDDFGFYEARQKTILEKKAKQQFPKQVWEGKPADEKIEINGEVNTQKSEVSSELLKESTLAEKDSDDHKVPENGSATKTGDAPKGAKPVVPESKIVANGVVSNGV

SEQ ID NO: 250270 - protein, 48 aa, Glycine max
  unsure (1)..(48): unsure at all Xaa locations
  Clone ID: PAT_MRT3847_68021C.1.pep
GFXLLFFLRNTKKFGLCCVXLLVYFVVSCSCPDEGFRQVSSSHLGVFM

SEQ ID NO: 250271 - protein, 94 aa, Glycine max
  Clone ID: PAT_MRT3847_68022C.1.pep
QKTRGARTLEGEQWLHNNLVLHSLQRGHVRSSQRNPCSTVPGRSRGRCTLGEINVAGHQYHVAIAHAPPLFQNVLPKFGEAKPSIHTPKDRLDN

SEQ ID NO: 250272 - protein, 96 aa, Glycine max
  Clone ID: PAT_MRT3847_68023C.1.pep
PPMFSSNPGQLKKTFSIYPPPKGSFVSFTFVTPPFTPHGYSRVPVPPAEFSVIKPPSPFSPPPLLGGGPIFFPPSPGLNFFPVKGASKVSPLEWEK

SEQ ID NO: 250273 - protein, 267 aa, Glycine max
  unsure (1)..(267): unsure at all Xaa locations
  Clone ID: PAT_MRT3847_68024C.1.pep
SDHQYSTGYVTKKSPPPPVEFRTSPQLIWGEEILHFSHPQHPLSMVDLPDLFNCVGCKEYGSGKRFVCQQCDFQLHDFCALAPPALKAHPFHSQHSVLFHSKPAKSGMAKSKCDVCGKPTKGFGFLCTACAFQMHPCCAMLNNEIEYPAHPHTLRMLPTTVPDPASFVCGECKKRRSGKVYRCTVCEYHLHAVCAKTKINGLQANGISXPEKPSVLAAAARVASQVVIEFIGGLVEGIGESVGDVLVQNIVKGNNAPANASPKPRYK

SEQ ID NO: 250274 - protein, 81 aa, Glycine max
  unsure (1)..(81): unsure at all Xaa locations
  Clone ID: PAT_MRT3847_68025C.1.pep
INHLVFEELQFTHLNLIYCTRSREQICFLLKKVFFFWGVIIGSILELGALEFYVCMFFFLFXRATCNLPAVSFLKGFGMGI

SEQ ID NO: 250275 - protein, 81 aa, Glycine max
  Clone ID: PAT_MRT3847_68026C.1.pep
NNNFYNLILFIPIIIIIIIIITHHSEDAYLKYTKTKINTVSNHFVYFQMFLNALIYMLNCYRKSQTAKTVPQGITYRALST

SEQ ID NO: 250276 - protein, 57 aa, Glycine max
  unsure (1)..(57): unsure at all Xaa locations
  Clone ID: PAT_MRT3847_68027C.1.pep
FGAASHLPPLCLIIXTQQMDKXLXFYGGTVSKRNSWNWPIGCQPXVSITXKYXNXSF

SEQ ID NO: 250277 - protein, 327 aa, Glycine max
  Clone ID: PAT_MRT3847_68028C.1.pep
MDSPAVSSIHFHNAHVLPEPDLFMHTPGGNRIPAHATILASASPVLENVIASNRVVKIHGVPDGAVTAFVAFLYSSRCTEEDMDKYGIHLLALSHVYSVPQLKQRCIKGLAQRLSTENVVDVLQLSRLCDAPDLYLKCVKLLRNRFKAVKETEGWKFLESHDPWLELDVLRLMGELEKRKRRVRKWREEERLYVQLSEAMECLEHICTEGCTEVGPYEVEVGRQKTPCSKFATCQGLQVLIRHLGTCNRLVKGGCLRCKRMWQLFRLHSSICLCQNSCKVPLCRQIRLKMEQENMKDDARWKLLVRKVASAKALSSLALPKRKLDQS

SEQ ID NO: 250278 - protein, 142 aa, Glycine max
  Clone ID: PAT_MRT3847_68029C.1.pep
QWHVDYNGNWSHYSNTVLLTTTTAIASMATHCNSRHFIHVANRRLIWFNITLGTHDALAYDFTFTTAGFVAICPLFYNASEPYYNIVFLLFCCYSISYINPIICIHSIPIYCIVIFCCQTPLYTYFLMPPPPPKEGGRHTVM

SEQ ID NO: 250279 - protein, 37 aa, Glycine max
  Clone ID: PAT_MRT3847_6802C.1.pep
YYKQMTCKITRAIIIKSPSHRVSITKNYSRRVGGRVG

SEQ ID NO: 250280 - protein, 100 aa, Glycine max
  unsure (1)..(100): unsure at all Xaa locations
  Clone ID: PAT_MRT3847_68030C.1.pep
MGGAFMILLSLPFSLIFLLILFYITLPATTGRGKKISGPAGPATYPLIGCLISFYRNRYRLLDWYTELLAQSPTNTIVVQRLGARKTIXPPNPQNVEYML

SEQ ID NO: 250281 - protein, 126 aa, Glycine max
  Clone ID: PAT_MRT3847_68031C.1.pep
MGANFSTFEFVEKSSHSSLVLTFHSTAKWKAHFDASKETNKLMVIDFTATWCGPCKYMDPIIKEFAAKYTDVEFIKIDVDELMEVAEAFQVQAMPTFILIKKGKVVEKVVGAKKEELQKLIEKRRN

SEQ ID NO: 250282 - protein, 102 aa, Glycine max
  Clone ID: PAT_MRT3847_68032C.1.pep
AVKISNWGKVVWAYKPVWALGTGKGATPAQGQEVHADLRKWVHANVRAEVPASVKIIYGGSVNGGNCKKLAAQPDVDGFLGGGASPKGGFVGLITPATVKKN

SEQ ID NO: 250283 - protein, 86 aa, Glycine max
  unsure (1)..(86): unsure at all Xaa locations
  Clone ID: PAT_MRT3847_68033C.1.pep
XXXXLLTRVXSGRSRNNXYGVXSXLHIXXXRAPYIXSSDXXHALXXYXEPSYGRKXKLXMLTAVAXEXNTYEIVTXLCXYXANVDI

SEQ ID NO: 250284 - protein, 78 aa, Glycine max
  unsure (1)..(78): unsure at all Xaa locations
  Clone ID: PAT_MRT3847_68034C.1.pep
VIQVVAKKVTILCKNQTNSHISPCFSSLLCGSNFGETQFFFSFKSLLHFAATKLEIKPYSPLXLCXFFISWGFLDNLR

SEQ ID NO: 250285 - protein, 188 aa, Glycine max
  Clone ID: PAT_MRT3847_68035C.1.pep
TVRLQISAGIINGKQRYAVNGVSFIPADTPLKLADYFKIPGVFNLGSIPENPTGSDCYLQTSVMAADFRGYAEIVFENPEDTVQSWHVDGHHFYVVGMDGGQWSTSSRSNYNLRDTISRCTVQVYPKSWTAVYMPLDNVGMWNVRSENWARQYLGQQFYLGVYSPANSWRDEYPIPSNALLCGRAIGH

SEQ ID NO: 250286 - protein, 564 aa, Glycine max
  Clone ID: PAT_MRT3847_68036C.1.pep
EKPQPKVKWSKNNGQLVLPNRVTVLCNGVEVIIFPSLHIVVCKCGFCRTEKQALSAWERHTGSKLRNWRTSIRVKDSMLPLEQWMLQLAEFHATAQVPTKPKKPSLKERKHKLLTFLQEKYEPVHAKWTTERCAVCRWVEDWDYNKIIICNRCQIAVHQECYGARNVRDFTSWVCKACERPDIKRECCLCPVKGGALKPTDVDTLWVHVTCAWFRPEVSFASDEKMEPALGILSIPSNSYVKICVICKQIHGSCTQCCKCSTYFHAMCASRAGYRMELHCLEKNGKQTTKMVSYCAYHRAPNPDTVLIMQTPLGVISTKSLLQTKKKTGSRLISSSRKKQDDSPVDNTEHEPFSAARCRIFQRTNHTKKRAADEAVSHRVRGPYHHPLDAIESLNTHRVVHEPQAFSSFRERLYHLQRTENDRVCFGRSGIHGWGLFARRNIQEGDMVLEYRGEQVRRSIADLREARYRLEGKDCYLFKISEEVVVDATDKGNIARLINHSCMPNCYARIMSVGDEESRIVLIAKTNVVAGDELTYDYLFDPDEPEENKVPCLCKAPNCRKFMN

SEQ ID NO: 250287 - protein, 67 aa, Glycine max
  Clone ID: PAT_MRT3847_68037C.1.pep
CPLLYFLDNNENIVFFTVSLFGKEFSEFALFRNGNSLRTLSIEHICAIFTQRPWCIFKGGLIGKFLF

SEQ ID NO: 250288 - protein, 61 aa, Glycine max
  Clone ID: PAT_MRT3847_68038C.1.pep
LFTAKPAFQQNYQGGTANLEDDQLPMLSDLDAQPYDEPSDSKFTRTVTRTQSASVSISMSS

SEQ ID NO: 250289 - protein, 199 aa, Glycine max
  unsure (1)..(199): unsure at all Xaa locations
  Clone ID: PAT_MRT3847_68039C.1.pep
ESNTLSLLSPLATLRVLSSEKLAPTNCYILRSYNHFLKHFSSSTTNLKLGTPQAILNTSPIAPSEVTTPTLRELCQSHVPEHILQRMEEIGYVMPTDIQREALPYLFSGLDCILHAXGSGKTLTYLLLIHSIINAAKSSVQALVLVPTRELGMQGNSLQRVTTECQNNLMTRSPRLLGHWLQSQLELMGSRSHVPSWLC

SEQ ID NO: 250290 - protein, 146 aa, Glycine max
  unsure (1)..(146): unsure at all Xaa locations
  Clone ID: PAT_MRT3847_6803C.1.pep
IKQLVASGKPDSFSGEFLVPSYRGRFFLDPKGRGAFSGYDNAVAFPVGGKGDXEELSKENNKSASSSKGKIPFSVPKTKPXTGEVIGVFQSFHPSPPDLGAKAPKDVKIQGIWYAQLESKRGFFWFFFFSSLCFFVTPCCCCIIIP

SEQ ID NO: 250291 - protein, 41 aa, Glycine max
  Clone ID: PAT_MRT3847_68040C.1.pep
IQLELYTATPYCETSYLHRIQTQMVLDNLNDYAVRALVNAV

SEQ ID NO: 250292 - protein, 1044 aa, Glycine max
  Clone ID: PAT_MRT3847_68041C.1.pep
MKDFDDRERVVRSPKGLRDVKSPSWSKDSVSESEQSKKRSSSSPRPFRDGNSVKSKSKSPTWSKDSESELSKSVEVKKAEEESLQQVQSGSGSGSEMEEGELEPEPQAETVPPVSEDLPSVAMETDEKQAQKNECHPNDDSTDAAVDERRELSSKEAVKPNEEVGCCEVKDGEEIEADEMADVRDDLSEKMLVTETEVESVGNGDDDKKEEALDAGAECEEETKKGADVDKQDKDKNKVVDLGTGADVVKPELNDGVSTGEENGVAGPRPVAMESAVNIAKDKGKGVSVALVPPTNVDHALDDSLWLDRRSRDLPTCSVDVIEGPSTRGFELFSRSPVRKVEKVDHSVLNKHKDDMEQLDLTLSLPNVLLPIGAHETDENRTTQAPGSPSQARSVQSLSNTFCTNSDGFTASMSFSGSQSFYHNPSCSLTKTSVDYEQSVGSRPLFGGIDQVSQGCWQGQSQSDPKQKEVPFGQRTSANGNGSLFQPQASWGVLDSQAVKGQHSRVLEGSSKMGSGLDRQLSFHKQFSGQSRRHDDVRSPSQSVGSHDIGSNYSFEKKREVRERGSGSLYRTTSQKEQEQLLVGGVDFVETIIARIVSEPVHAMSRKFHEMTGQSIVCLKEGIREIMLNADKHGQILAFQKVLLNRSDIILDVLLKCHRVQLEILVALKTGLTHFLHLESSISSSELAQIFLNLRCKNLSCRSQLPVDECDCKVCAQKNGFCRECMCLVCSKFDNASNTCSWVGCDVCLHWCHTDCGLRESYIRNGPGTKGMTEMQFHCIACDHPSEMFGFVKEVFQNFAKEWSVETLCKELEYVKRIFSASKDMRGRQLHEIAEQVLPRLANKSNLPEVLRHIMSFLSDGDSSKLPMTTNFSGKEQIKENNGVAGPSQEATWMKSIYSEKPPLLERPANILPTFDQNDKRTLVQELQMSSIQKDFCFDELESIVKIKQAEAKMFQSRADDARREAEGLKRIALAKNEKIEEEYTNRIAKLRLTETDEIRKQKFEEAQALERAHLEYLNMKMRMETDIKDLLSKMEATKMSLAM

SEQ ID NO: 250293 - protein, 146 aa, Glycine max
  unsure (1)..(146): unsure at all Xaa locations
  Clone ID: PAT_MRT3847_68042C.1.pep
DGLGLFSHLCDNNRAIYLMDNAKFRIVSAQTAEDIATARDLFTAYVAWLNIDLGFQDFQSELDFLPGKYGAPHGDLLLAYSIQDKPLGCVAVRPLDDSKHLCQMKRLYVSPEARGMGLGKALDKXIVQRAKDMGYKEMRRDTLHSR

SEQ ID NO: 250294 - protein, 46 aa, Glycine max
  Clone ID: PAT_MRT3847_68043C.1.pep
MGLITSFFLNKFWFLSIPTATCHFVALIKGQVLFFWLLSLNKKKNF

SEQ ID NO: 250295 - protein, 41 aa, Glycine max
  Clone ID: PAT_MRT3847_68044C.1.pep
AVRLGESFTKILFVHCNFRRHWKKAKNAKGELNGERPTFLA

SEQ ID NO: 250296 - protein, 47 aa, Glycine max
  Clone ID: PAT_MRT3847_68045C.1.pep
FILFFTHSIIQSPNPKKIVITHLIITYFIKILSFIYYYIFSLYICSI

SEQ ID NO: 250297 - protein, 61 aa, Glycine max
  Clone ID: PAT_MRT3847_68046C.1.pep
YETRVHVTFGYHGTIPIRCFFNTTPHGSFKCTCNKSTRILTLIFPTPSQKNSTRGTICIIF

SEQ ID NO: 250298 - protein, 53 aa, Glycine max
  Clone ID: PAT_MRT3847_68047C.1.pep
LGGFYKGLFKDYLPKFVLKIFLSCAKGTLNRIVPIKRRVLIPSYKKSILRFPS

SEQ ID NO: 250299 - protein, 170 aa, Glycine max
  Clone ID: PAT_MRT3847_68048C.1.pep
MTRLTRDFGDTMQRDAVPAVSSDVVFASSRFPNYRIGANNQIIETKDDPKVLSMKEVVARETAQLLEQHNRLSVRDLASKFEKGLAAAAKLSEEARLREAASLEKHVLLKKLRDALESLKGRVAGRNKDDVEEAIAIVEALAVQLTQREGELIQEKAEVKKLANFLKQAF

SEQ ID NO: 250300 - protein, 220 aa, Glycine max
  Clone ID: PAT_MRT3847_68049C.1.pep
ENVPHLYELEGNETLGSYLQIQPCSDNAPEVSKCSIQWYRVSSDGAKKELISGATKSVYAPEPFDVGRILQVDIISESEHVTLSTAGPIDPAAGLGTYVEALVRKHDTEFNVVVTQMNGSHHPTESIHVLHVGKMRIKLCKGKTTIAKEYYSSSMQLCGVRGGGNAAAQALFWQPKQGHSFVLAFESERERNAAIMLARRFAFDCNIMLAGPDDRAPLGT

SEQ ID NO: 250301 - protein, 331 aa, Glycine max
  Clone ID: PAT_MRT3847_6804C.1.pep
MAASLQAAATFMQPTKLSRSNTLQQKSTQSISKAFGLEPAGAKKVTCSLQADLKDLAHKCVDATKIAGFALATSALVVSGASAEGVPKRLTFDEIQSKTYLEVKGTGTANQCPTIDGGLESFAFKQGKYNAKKFCLEPTSFTVKAEGVAKNAPPEFQNTKLMTRLTYTLDEIEGPFEVSSDGTVKFEEKDGIDYAAVTVQLPGGERVPFLFTIKQLVASGKPDSFSGEFLVPSYRGSSFLDPKGRGASTGYDNAVALPAGGRGDEEELAKENNKSASSSKGKITFSVTKTKPETGEVIGVFQSLQPSDTDLGAKAPKDVKIQGIWYAQLES

SEQ ID NO: 250302 - protein, 494 aa, Glycine max
  Clone ID: PAT_MRT3847_68050C.1.pep
MTRVTRDFGDTMQREAVPAVSSDVVFASARFPNYKIGANNQIMETKDDPKVLSMKEVVARETAQLLEQHNRLSVRDLASKFEKGLAAAAKLSEEARLREAASLEKHVLLKKLRDALESLKGRVAGRNKDDVEEAIAMVEALAVQLTQREGELIQEKAEVKKLANFLKQASEDAKKLVDEERAFARAEIEDARAAVQRVEEALQEHERMSQASGKQDMEQLMKEVQEARRIKMLHQPSKVMDMEHELRALRAQLAEKTRQYLRLQKELTRTKKGGENVPHLYELEGNETLGSYLQIQPCSDNAPEVSRCAIQWYCVSSDGAKKELISGATKSVYAPEPFDVGRILQVDIISENEHITLSTAGPIDPAAGLGTYVEALMRKHDAEFNVVVTQMNGSHHPTESIHVLHVGKMRIKLCKGKTTIAKEYYSSSMQLCGVRGGGNAAAQALFWQPKQGHSFVLAFESERERNAAIMLARRFAFDCNIMLAGPDDRAPLGT

SEQ ID NO: 250303 - protein, 116 aa, Glycine max
  unsure (1)..(116): unsure at all Xaa locations
  Clone ID: PAT_MRT3847_68051C.1.pep
IELQVVELNEKNGSVAFTRLGSDRTQNREPQYTVPPNVWVGCFPTKDYTYFAQGVFVSVEAAGXAEARDSERRYTLVGCACAPAFQSRDWGLAKRSHLLARFRQYHPLVLDLTCPE

SEQ ID NO: 250304 - protein, 174 aa, Glycine max
  unsure (1)..(174): unsure at all Xaa locations
  Clone ID: PAT_MRT3847_68052C.1.pep
MASVKLNTPQTGEYEQPTGLFINNEFVKAVDGKTFEVINPSTEEVITSVQEATEKDVDIAVAAARKAFNGPWRKETPENRGRLLVKLADLFEKNADLLAAVEALDNGKAFGMARSVDVPAAAGCLRYYGGWADKIEGKVVDTTPDTFNYIRKEPIGVCGQINPWELXLLMWAWK

SEQ ID NO: 250305 - protein, 44 aa, Glycine max
  Clone ID: PAT_MRT3847_68053C.1.pep
NTGISIRAGAFPVFVYPPRIILCNNLNVCQQYSKPGFPSWLFST

SEQ ID NO: 250306 - protein, 52 aa, Glycine max
  Clone ID: PAT_MRT3847_68054C.1.pep
KMVPLGLLSASHSLRGFGVFICFLINYLFAPKMSALTRGGHRSVQFTQCLDL

SEQ ID NO: 250307 - protein, 40 aa, Glycine max
  Clone ID: PAT_MRT3847_68055C.1.pep
WSQPRGTRIYLSSPQIKFSRVLRDYMPKRNPGSIGATLNT

SEQ ID NO: 250308 - protein, 67 aa, Glycine max
  unsure (1)..(67): unsure at all Xaa locations
  Clone ID: PAT_MRT3847_68056C.1.pep
KMQHVSMVMWVYQFNSSSPVEYVHSFVLSLVGCTXIYYSAHDHSPRQLSXMWDKMQQKGKPXCCYMR

SEQ ID NO: 250309 - protein, 59 aa, Glycine max
  Clone ID: PAT_MRT3847_68057C.1.pep
CFEFSCASRPESKLNPNDLLAVHAGLFTFMEWLMDDLYAFTVSISCLTYALAGRDYSLA

SEQ ID NO: 250310 - protein, 69 aa, Glycine max
  Clone ID: PAT_MRT3847_68058C.1.pep
KIPFWEGISFSLVLFYGTSPIILEPGGLIEFLIILKGEFVKVRFKLCCERTCYLRLVFIFRRLGLKFIF

SEQ ID NO: 250311 - protein, 211 aa, Glycine max
  Clone ID: PAT_MRT3847_68059C.1.pep
MDESWRMRMGQTPGLPRRRSMEERSSARTRLSIFAGAGAGEQATLDPDDFADVFGGPPRNLLAHKFSRSNSFYEEIFRPPVFASPAPAKGGRSLPVFRIPAKNEAFYNDIFGSDDDRRSRERSGPQSKAKSKSNSSSALSSEELSPLRPSAGDDAALSAFASKLRPINVPCRWNSTTMMPGEHPIKQGGPYPCNSQSFENQFQDNEYKGEL

SEQ ID NO: 250312 - protein, 331 aa, Glycine max
  Clone ID: PAT_MRT3847_6805C.1.pep
MAASLQAAATFMQPTKLSRSNTLQQKSTQSISKAFGLEPVGAKKVTCSLQADLKDLAHKCVDATKIAGFALATSALVVSGASAEGVPKRLTFDEIQSKTYLEVKGTGTANQCPTIDGGLDSFAFKPGKYNAKKLCLEPTSFTVKAEGVAKNAPLEFQNTKLMTRLTYTLDEIEGPFEVSSDGTVKFEEKDGIDYAAVTVQLPGGERVPFLFTIKQLVASGKPDSFSGEFLVPSYRGSSFLDPKGRGASTGYDNAVALPAGGRGDEEELAKENNKSASSSKGKITLSVTKTKPETGEVIGVFESVQPSDTDLGAKAPKDVKIQGIWYAQLES

SEQ ID NO: 250313 - protein, 350 aa, Glycine max
  unsure (1)..(350): unsure at all Xaa locations
  Clone ID: PAT_MRT3847_68060C.1.pep
VLQPIRLHXLVPSVQELAKQNLSTVPHRYIQPQNEEAISIPEIPIIDMQSLLSVESCSSELAKLHLACKEWGFFQLINHGVSSSLLEKVKLEIQDFFNLPMSEKKKFWQTPQHMEGFGQAFVVSEDQKLDWGDLFIMTTLPTQSRMPHLFPQLPLPFRDTLELYSHKMKNLAMVIIGHMGKALNIEEMKIRELFEDGIQLMRMNYXPPSPQPEKVIGLTXHSDATALTILLQVNEVEGLQIRKDDMWVPVRPMPNAFVVNVGDILEINTNGTYRSIEHRATVNSEKERLSIATFYSPRQDGVIGPWPSLITKQTPAQFKRIGVKEYFKNFFARKLEGKSNRDALRIEHHN

SEQ ID NO: 250314 - protein, 50 aa, Glycine max
  unsure (1)..(50): unsure at all Xaa locations
  Clone ID: PAT_MRT3847_68061C.1.pep
VNSFWYFIYSFXPHLIFSRSTNTNGAAHSAICVTPNIPYLIIKKIPTIKS

SEQ ID NO: 250315 - protein, 64 aa, Glycine max
  Clone ID: PAT_MRT3847_68062C.1.pep
ISVHICCYLLPLLLMPASSASVCSIYVNFPYKKKIKEFTLVSYAAKVILIALVASASSCFYYWV

SEQ ID NO: 250316 - protein, 65 aa, Glycine max
  Clone ID: PAT_MRT3847_68063C.1.pep
EAQPHKIKTKYVKGFKKKIIHTKKSDSNKTRQGLVGGVGSCLLFGFKKSFQKSSQACLGGLKRKQ

SEQ ID NO: 250317 - protein, 108 aa, Glycine max
  unsure (1)..(108): unsure at all Xaa locations
  Clone ID: PAT_MRT3847_68064C.1.pep
KLSFPQGTSRSAKRMPLSIGGGAVAQNAILMNMPNAVLSMWRYFVGDLVFEDYKMTSPYIKCTGSLFIACGNAADDTINFAACPHTLVQSGEIQDKAGLXSSQDEFLT

SEQ ID NO: 250318 - protein, 187 aa, Glycine max
  Clone ID: PAT_MRT3847_68065C.1.pep
MQPNLFPFGSVLGNPFIFNGDGDLSEGGGGIESSRVFFLLPFFLLSQGGAMDLSKVGEKILSSVRSARSLGLLPPVSDRPEVPARAAAAAAVARALAGLPPHQRYSLSSSSEELSSIYGSIPQGQVVEELEDEFYEEDFDPIRHVLEHVPVEENELTYFEKQAALRLAQLDRVAERLSRHVMEHHEV

SEQ ID NO: 250319 - protein, 93 aa, Glycine max
  Clone ID: PAT_MRT3847_68066C.1.pep
MLVHDMAVDPLSVGHYGFQMARTMDKGEALEGFVNQADHLRQQTLIHMSRILTTGQAAKGLLAMGEYFHRLRTLSSLWTARSCDPSFPTQLSN

SEQ ID NO: 250320 - protein, 117 aa, Glycine max
  unsure (1)..(117): unsure at all Xaa locations
  Clone ID: PAT_MRT3847_68067C.1.pep
PRVRWNRTRPPPPPRRRPXRNRADPFLVACRCFSFLTSLAAILCIAVNVLSAVRSFKHASDIFDGIFRCYAVLIAXFRGPXRTEWSFIIKFXKVLEYWAARGMLQILYVFLSIFSKL

SEQ ID NO: 250321 - protein, 175 aa, Glycine max
  Clone ID: PAT_MRT3847_68068C.1.pep
SYYLPQHYDRVGIENFIRAKYEEKRWAARNEKPKSPSSFREEKSPSHWQKPEETKKIQPSNAIPATRISVPAPPKGPELVTPMAKPQHVEKVEPVAPPPQAETLKQTTETTQNSPPKVDYATDLFDMLSMDDPNEKGSGAANDNNWAGLQSAAEASADEKTDAPKAIESTPQSTP

SEQ ID NO: 250322 - protein, 98 aa, Glycine max
  Clone ID: PAT_MRT3847_68069C.1.pep
HYESWECHGSKVLRAARTGGAPLNRPGRITKDKPFQPLAMSARMGRKQGQQNGPEAAAQLPTETPATKYTHADSESCSGPMTTYLSTHLYKVILDRLY

SEQ ID NO: 250323 - protein, 35 aa, Glycine max
  Clone ID: PAT_MRT3847_6806C.1.pep
QNLITSTSFHFNFLYIVPCQIFSSILTFIINIHKP

SEQ ID NO: 250324 - protein, 48 aa, Glycine max
  Clone ID: PAT_MRT3847_68070C.1.pep
LSFGECEGQSSAVILKFELMHAPIIDTGPELLGSLDTYAASVHEYEIP

SEQ ID NO: 250325 - protein, 375 aa, Glycine max
  Clone ID: PAT_MRT3847_68071C.1.pep
LKSLANKCAEQVLEIKSLKTLTEKLQKENQELEFVLDMHGLENYDKRYSEVRESESKAHSQAEMLKNALDEHSLELRVKAANEAEAACEQRLSAAEAEIEDLRSKLDASERDILELTEAVKVKDAEAEAYISEIETIGQAYEDMQTQNQNLLNQVIERDDYNIKLVSDSVKTKQAHNTLMSQKQALAKQLQQINTSIENSKTRITHSEEQMKAILSDAIKCNQEEKHLAVTLEFAKWELADAEKELKLLKSAVSSSEKEYDQIQKDTEAIEMELESERSLRKKLEEELRELNCKIDELTSETGETTIQKLEKEIRICKNMIKCTVCTDRPKEVVIVKCYHLFCNPCIQRNLELRHRKCPACGTAFGQSDVRFVKI

SEQ ID NO: 250326 - protein, 71 aa, Glycine max
  Clone ID: PAT_MRT3847_68072C.1.pep
LIHPTLSNNYRQLSTKVYIITFEEEKVREREIYLTNTSTLPADWQNTTKEAVCMLLASRVLKHICSQGKLV

SEQ ID NO: 250327 - protein, 111 aa, Glycine max
  Clone ID: PAT_MRT3847_68073C.1.pep
MTTSGGSPKNAMGAHLQEPNINAQPYCYGDDCSNSNTKPIVLFTNSDCIECPGLVHLAEALPLQDLCDVHVCVPQSDKSDSAHSDTRGVTGEASSAHINGATVCEGSGTPV

SEQ ID NO: 250328 - protein, 70 aa, Glycine max
  Clone ID: PAT_MRT3847_68074C.1.pep
PLREDDRRGFTQLTNKVFPSPPKKNSTVWHALFQFRAYPTSHLPSFFVMACSTMNVTLLNMPAHIVSCPT

SEQ ID NO: 250329 - protein, 34 aa, Glycine max
  Clone ID: PAT_MRT3847_68075C.1.pep
DVLSRILLRCNVQCWIITYILVKNVMCNRFEITV

SEQ ID NO: 250330 - protein, 161 aa, Glycine max
  Clone ID: PAT_MRT3847_68076C.1.pep
MQKAKGTVAARKHTSKIMKAYFSDPVNRQKRSMAMKGVKFYCQNCGREGHRRHYCPELNDSLVDRRFTCRLCGGKGPNRRTCRKLKISLSNGRTIKHHQCKICHQFGHNRRTCPQAVPFAVPSKRRNAASRRPYKCRLCKKEGHNIRTCPSRTVVTENPQD

SEQ ID NO: 250331 - protein, 57 aa, Glycine max
  Clone ID: PAT_MRT3847_68077C.1.pep
YFSANIAQLFLQTTPIIFFTVEDAFFRFCRKYFQFTSSKFFRLSSTEVVFRPTTACF

SEQ ID NO: 250332 - protein, 101 aa, Glycine max
  Clone ID: PAT_MRT3847_68078C.1.pep
ILFPPKAFFFKGNFGAPKTFFSSPFWWLPTRILSLFHAFFRATNVKNPLPFFHSRIVKPCQKGGAGIFSPKKIFRWQKSLVLNNRFYVNPGKKLFYVKVEY

SEQ ID NO: 250333 - protein, 38 aa, Glycine max
  Clone ID: PAT_MRT3847_68079C.1.pep
MRANRVGCLKAPSRKRFKVNAQETSFCSKEPIFSYITK

SEQ ID NO: 250334 - protein, 48 aa, Glycine max
  Clone ID: PAT_MRT3847_6807C.1.pep
TFLIYQHLCCHSILTKALCSHVVLGFPTLTLASTMTNFELLYSTLEFQ

SEQ ID NO: 250335 - protein, 65 aa, Glycine max
  Clone ID: PAT_MRT3847_68080C.1.pep
SSDYKSKQKNYGSITVATLGFYKDKYSSHCVPSKFKRVKNMKTREKQAQSLNSNTNLPTHLRVGK

SEQ ID NO: 250336 - protein, 100 aa, Glycine max
  unsure (1)..(100): unsure at all Xaa locations
  Clone ID: PAT_MRT3847_68081C.1.pep
MEGYRVAFEEXSNPLHYSGKIIECXWDSDRQEWIFKRIRTDKSTPNDFNTYRKVMRSIRDNITEDILLNEISEIIRLPMYADRIRIDSKANHHTNMSRRR

SEQ ID NO: 250337 - protein, 58 aa, Glycine max
  Clone ID: PAT_MRT3847_68082C.1.pep
RIDFFGPGVWAMFLMATIYENFFFWGGYNLRPPKKKKNGRTFLSPKMGFLKKKSLWEG

SEQ ID NO: 250338 - protein, 80 aa, Glycine max
  Clone ID: PAT_MRT3847_68083C.1.pep
EGLYKNKTTYTPLIEFFSLLSGETFQSHNRQHASLNSEHIICVRTISAIAVLLQSWDPFERNFYETLRMSWICILLECFH

SEQ ID NO: 250339 - protein, 45 aa, Glycine max
  Clone ID: PAT_MRT3847_68084C.1.pep
DPNPMHLFYVFLFILKTIDSWDIFMFKKSIFSFLFYVNAVFMSIC

SEQ ID NO: 250340 - protein, 66 aa, Glycine max
  Clone ID: PAT_MRT3847_68085C.1.pep
FLTVKSLGYLSFKKYISILYFLNYLKWYANSEPPQNEQTQISKLKMTNLNLKLKITYLGHFAHLNL

SEQ ID NO: 250341 - protein, 72 aa, Glycine max
  Clone ID: PAT_MRT3847_68086C.1.pep
PPDSKRGNAGLDRNIGAGIKTATKTTLVPQYTPQRQFHKRSTLNSDANPYILLLKRGPTARPHKGPSPSPRR

SEQ ID NO: 250342 - protein, 66 aa, Glycine max
  Clone ID: PAT_MRT3847_68087C.1.pep
FFFFFFFFFFFFFFFFFFFFFFFFWSDKKKIIWNYKYFYITKFFAAGRGRTTICPHMLSQFHYVKY

SEQ ID NO: 250343 - protein, 54 aa, Glycine max
  Clone ID: PAT_MRT3847_68088C.1.pep
LMSEAWLYYSYLKNNASFFLSLVLVIYLSCLHFTIMYVSMETTFNTRSNVLNYV

SEQ ID NO: 250344 - protein, 71 aa, Glycine max
  Clone ID: PAT_MRT3847_68089C.1.pep
FTYNRNISSPFNQQPNFLHDHVWGHYQFDMYHRNLSVATPKALPKWMAILVGAITNLHLILKSLTGKFFDH

SEQ ID NO: 250345 - protein, 47 aa, Glycine max
  Clone ID: PAT_MRT3847_6808C.1.pep
VVTILDNGAIFVNIKNTIYHCNLLMQRIIILCNAGIMSKSLRCCASA

SEQ ID NO: 250346 - protein, 46 aa, Glycine max
  Clone ID: PAT_MRT3847_68090C.1.pep
AWSLNVTFDNNIHIYLCFKRNHIFSGVVLWCSTLNYHIHLNNQYVA

SEQ ID NO: 250347 - protein, 99 aa, Glycine max
  Clone ID: PAT_MRT3847_68091C.1.pep
FPSPINETESPPSKGVNPRTRTLFQSLNRRNAQITADIAKSAVENANEAHKGIISEQRRSNINRHILHSFLTQSYKQGYVRLVKVMLQYGMLCYVRNIG

SEQ ID NO: 250348 - protein, 134 aa, Glycine max
  unsure (1)..(134): unsure at all Xaa locations
  Clone ID: PAT_MRT3847_68092C.1.pep
XXXXPXHCXXXXRXXXXVXXGLAXXXRXXXXXXQXLRXXXXXCXXRRCXIVSXXXASXXXXXXXXXXXLDSXXSXXXXVXLXXXTVLYTMXXAXXTSXDXLXXALXPXIRXXXXSYXHADXAVAXXXVXXXLRC

SEQ ID NO: 250349 - protein, 139 aa, Glycine max
  Clone ID: PAT_MRT3847_68093C.1.pep
MKKTPPPNLHQSSKSRQNANLQLVETNNDAKRHNSKTLRSLKYAAKKCVAVFSLIIYGKRKSASYVVGNDDRKNTSKIRGVVSSSTDLSSESTTKNSSKWKFSYSYASSSTVSGQLGIGNFSFEEITKSRQKSLQLMKL

SEQ ID NO: 250350 - protein, 57 aa, Glycine max
  Clone ID: PAT_MRT3847_68094C.1.pep
VILTQSLFHASHRQCSRVQRLQSPFNEKTFSSGSLMCEMRLVWVHRRMHPCVNHGGA

SEQ ID NO: 250351 - protein, 92 aa, Glycine max
  Clone ID: PAT_MRT3847_68095C.1.pep
PGYVLSSDIAHYIVSEFEMNKLRLFKMEDVSMGMWVEQFNRTKPVNYLHSFKFCQYGCVEGYYTAHYQSPRQMMCLWDKLQMQTTPECCNMR

SEQ ID NO: 250352 - protein, 243 aa, Glycine max
  Clone ID: PAT_MRT3847_68096C.1.pep
MALLCGSTSVTPFLSHKNVGFTTSAKSSFVGFQLPLPKLTLSSSVRTLLPATSRVRCQQESTTVTPVAEEDPRFACVEPEPRFKGPDIWNKSWYPKAADHVNTEKTWYVVDATDKVLGRLASTIAIHIRGKNLATYTPSVDMGAFVIVVNAEKVAVSGKKRTQKLYRRHSGRPGGMTVETFAQLQNRIPERIIEHAVRGMLPKGRLGRRLFTHLKVYKGPDHPHAAQKPVELPIRDKRIHLQK

SEQ ID NO: 250353 - protein, 80 aa, Glycine max
  Clone ID: PAT_MRT3847_68097C.1.pep
TPFYLQIVPPHVIISLPLDIRIMKYGVVSNNINKHYENIKFHPNLQVHKSKMTFCIVLNFVFDSCNFNLHACKCVVSEII

SEQ ID NO: 250354 - protein, 60 aa, Glycine max
  Clone ID: PAT_MRT3847_68098C.1.pep
LYKISLYPLLPIIIVSKCWIAKLNHNVLETKHTSFATEHRRLTCLYSKKLPLESDNHSRK

SEQ ID NO: 250355 - protein, 164 aa, Glycine max
  Clone ID: PAT_MRT3847_68099C.1.pep
WSVTPMLPHWLLDRVNARPSGLQSIELSETAEVQTIKSKVQPGWTEQAECLSDMKSETYSYSRGYEAFPSDSSPELKVSCCESVTEMNSEIKREQSKDVDIIDVASESFCNGFETSHMHDSEAVIDLGDIDSDGSNTCSSVLEEISVCMEEQDDNDNDMAKSSP

SEQ ID NO: 250356 - protein, 56 aa, Glycine max
  Clone ID: PAT_MRT3847_6809C.1.pep
PSKVIFSNYGPQTIGYFLLINKKPPPKKEKKNPTRGFLRFHKLLVGFLKNPPTLGR

SEQ ID NO: 250357 - protein, 132 aa, Glycine max
  unsure (1)..(132): unsure at all Xaa locations
  Clone ID: PAT_MRT3847_680C.1.pep
MQRCCVDPLTYQGGHCGILIGATFWEVVXVEYGIYLTGRYGGDSXFXLWRSIFYYIEISWGRFVPHAALMDLXPCTMNRFRAGPVGNDVTTDNFVFXGSIWQDSXWGKVHYTEGAELNDSVLDEVRKEGENC

SEQ ID NO: 250358 - protein, 63 aa, Glycine max
  Clone ID: PAT_MRT3847_68100C.1.pep
LCGCLSLIPVSTKAIVIKLIVQWAHCILSPFYCERADSLNGFFFWGPITKGFVKGKFILLKLF

SEQ ID NO: 250359 - protein, 61 aa, Glycine max
  Clone ID: PAT_MRT3847_68101C.1.pep
LYLQVGMPHSDGVISGITVLIGQVRHVFAFLVSVRARVDLSCIFGAPHDAALHDVNGRKAA

SEQ ID NO: 250360 - protein, 87 aa, Glycine max
  Clone ID: PAT_MRT3847_68102C.1.pep
GVEFSYHETEDPNLNIFVSVDYFFNSSLSYCLFLFSIHPYIDQFMDDVICTYSYSRKNRLGIRKEAKYIISNVLSSIRIGIVNYETF

SEQ ID NO: 250361 - protein, 121 aa, Glycine max
  Clone ID: PAT_MRT3847_68103C.1.pep
SVQLESSPPRVKRSAQEVTRRDSRKLLGETKLIGGESLLLSELLRAQTCINRLNAEKLLWKRRELKNNQSMLEDLKDKLARERTSRERMESMNAKLVLELAQAKLYAKQFMVYYKGERGKE

SEQ ID NO: 250362 - protein, 61 aa, Glycine max
  Clone ID: PAT_MRT3847_68104C.1.pep
ARKGPSHGFMVNVPTSTSPGGSSRGALKNLLEAWKVGHPREWSPCSRDLISKRGPPSFFPP

SEQ ID NO: 250363 - protein, 94 aa, Glycine max
  Clone ID: PAT_MRT3847_68105C.1.pep
SSSPLDRECQGTKAQKPSCGRKVSFILLHLDTKSPHAYPQGKSGPRLACGSLRRQAVSAPAQGCHSKSGPPRPVPLKKRGYDVTSSRIPSLRTR

SEQ ID NO: 250364 - protein, 190 aa, Glycine max
  unsure (1)..(190): unsure at all Xaa locations
  Clone ID: PAT_MRT3847_68106C.1.pep
FPGRPSVRNSSFSLRRALPLLSRRQIFVKTLTGKTITVGGGSADTIDNGKGKIQDKGGVPPGQQRLIFAGKQLEGGRTLXDYNMQRGGTLHLGLRLRGGVXIFXKTLTGKTITLEGESSDTIDNVKGKIQDKEGIPPDQQRVIFXGKXLEDGRTLXDYNIQKESTLHLGLRVRGGMQIFGKTLTGQDYNP

SEQ ID NO: 250365 - protein, 291 aa, Glycine max
  unsure (1)..(291): unsure at all Xaa locations
  Clone ID: PAT_MRT3847_68107C.1.pep
ARADTELTGKIPDFIGNWSKLQTLRFQGNSFNGSIPSSFSNLSSLTELRISGLSNGSSSLEFLRNMKSLTILELRNNNISGSISSTIGELHNLNQLNLSFNNITGQNLGSIFNLSSLTYLFLGNNKFNGTLPMQKSSSLVNIDLSYNDLSGSLPSWVNEPNLQLNLVANNLDVSNASGLPIGLXLFQKIFPCNQGIGRYSDFAIKCGGNQIRSADGIVYEIGNQTLGPATYFVTGANRWAISNVGLFTGSSNPVYKSFVSNQSTGTVNSVLFQTARLSASSLRYYGLGLEN

SEQ ID NO: 250366 - protein, 107 aa, Glycine max
  unsure (1)..(107): unsure at all Xaa locations
  Clone ID: PAT_MRT3847_68108C.1.pep
KKIETLSYLPYLDDAQLAKEVKYLVRKGWIPCLEFELRYGFMYREHNRSPGYYYGSYWTMRNLLMIGCTXCITCVKELRRXKNAYRSGYIRIIGYTTVLHCSAIAYR

SEQ ID NO: 250367 - protein, 147 aa, Glycine max
  Clone ID: PAT_MRT3847_68109C.1.pep
LLVIPLTCLLGFFYVVPPVIKDFKYVDSHEWVKVDGNYATIGITDHAQDHLGDVVYVELPEVGAAVTQGGSFGAVESVKATSDINSPISGKVVEVNEALNSSPALVNSSPYKDGWIIKVEINDSGELNNLMDSEQYSKFCEEEDSKH

SEQ ID NO: 250368 - protein, 238 aa, Glycine max
  unsure (1)..(238): unsure at all Xaa locations
  Clone ID: PAT_MRT3847_6810C.1.pep
LEKDHWEREAALAGLVNRWLELYPLEGNGDVQSRNWHNDGKLAVSTSAEDNLETKMVDLTSYTVEFSTSISGSKDGSTTSESTVCSVCKEGDSKNRLTRDTADSEITSKSTMDSGLEEQGLDCHKSYAIDINTVINKVEDTFSNEDFNTDEALSEGVKPEDSSKSIMSSEDSNGNDKDELIDEITSKSTLDSVHEKQGFTAEHFQKSDVIDTSAVSTKIEDNFFSEDRTEAXEGKCQT

SEQ ID NO: 250369 - protein, 52 aa, Glycine max
  unsure (1)..(52): unsure at all Xaa locations
  Clone ID: PAT_MRT3847_68110C.1.pep
SLSKXNGVRCFYYAIFHIHITNHFIIMISQIINRLSXGNEKFIRIMTHLLMT

SEQ ID NO: 250370 - protein, 155 aa, Glycine max
  Clone ID: PAT_MRT3847_68111C.1.pep
MACRQLWASRAASYLRISVFHRGFSNVVKDLKYADSHEWVKVDENSATVGITDHAQDHLGDVVYVELPEVGAAVTQGGSFGAVESVKATSDINSPVSGKVVEVNEALNSSPALINSSPYKDGWIIKVEISDNGELNNLMDSDQYSKFCEEKDSKP

SEQ ID NO: 250371 - protein, 75 aa, Glycine max
  Clone ID: PAT_MRT3847_68112C.1.pep
PVITLFQRTKRIQGSNQNPFGRGPFNKPLVEGFKHTFLKGLTGVYNNPVMALNACGYVKKNPVSLVFTIFRSVWP

SEQ ID NO: 250372 - protein, 62 aa, Glycine max
  Clone ID: PAT_MRT3847_68113C.1.pep
FATILTIAPGSLINRRYKPSITNNGPASHAKHLQILILKRKTQSLTSNAHTFFTRCPLSYSF

SEQ ID NO: 250373 - protein, 76 aa, Glycine max
  Clone ID: PAT_MRT3847_68114C.1.pep
FFDMAPCISFQSCPPPPILPVLQPTVLGLHPRMVPQWPRDTEPAAKEPGFSISAVEARTLMVACAVIIPRPTDRAF

SEQ ID NO: 250374 - protein, 76 aa, Glycine max
  Clone ID: PAT_MRT3847_68115C.1.pep
SCSFTYIGSQSPTILSLYKMEIARFSYWMLNFLHSEYIVCEMGGVVMALLDSLVEDEKRILMGKLVTFGSFYLVQN

SEQ ID NO: 250375 - protein, 78 aa, Glycine max
  Clone ID: PAT_MRT3847_68116C.1.pep
IKFFQPFNCLQHPFLLLLKPSFYIQLYLILFLLDQPTQNPHSKSYTSKFSQTNPYKISHIYKLKTLKKIQTYAPFFFS

SEQ ID NO: 250376 - protein, 47 aa, Glycine max
  Clone ID: PAT_MRT3847_68117C.1.pep
KIPLMDYMFLQGVRFAFSIHQFAGGFDPSSMHAFGELRNMASFLPKT

SEQ ID NO: 250377 - protein, 57 aa, Glycine max
  Clone ID: PAT_MRT3847_68118C.1.pep
MLPPNTYSFSSSLFLLLLFYIIMLFYCALMSLNYNFSYVIWLSCSCAVLEKIIIIIK

SEQ ID NO: 250378 - protein, 65 aa, Glycine max
  unsure (1)..(65): unsure at all Xaa locations
  Clone ID: PAT_MRT3847_68119C.1.pep
WLASXXCLSPLXLXXXFGSVLAVVPVXXXLGALXXLSLLFLLRFPRLCLFLRCGFPSCLVRLRAP

SEQ ID NO: 250379 - protein, 190 aa, Glycine max
  unsure (1)..(190): unsure at all Xaa locations
  Clone ID: PAT_MRT3847_6811C.1.pep
PGRPLLSLFSGPPFIRKRVNPLLPFPRCPNLVSGGRHPPPHSLYIKHPLAPPSSGPKWPPSSXPIYFPNPGPNPGKNHPPDYSKGPPPVYLRGIGPPWPKTPARPFQQTPGQTRLRALQPGKGHNPTLPHPGKRPPGPVGKPAPPSPLCKRPRPGPCPPQGLNGSWGPPGEGRTPSSRGGGRAPPVRAGG

SEQ ID NO: 250380 - protein, 205 aa, Glycine max
  unsure (1)..(205): unsure at all Xaa locations
  Clone ID: PAT_MRT3847_68120C.1.pep
MAPAKSNKNKYSVILPTYNERRNLPIITWLLNRTFTENNLDWEIIIVDDGSPDGTQDVAKQLVKAYSPHVVLKPRAGKLGLGTAYVHGLQFVTGNFVIIMDADFSHHPKFIPEMVALQQTADYDIVTGTRYAGNGGVFGWDLKRKLVSRGANLFADTVLXRPGVSDLTGSFRLYKKSXLQKAIASTESKGYSFQMELMVRAKAMG

SEQ ID NO: 250381 - protein, 240 aa, Glycine max
  Clone ID: PAT_MRT3847_68121C.1.pep
GCENSTSTGTAKRKSVGVENSKERGIMEQEEHEVYGADIPDEEIDMDADAEQQDEQLAPNHTNKELEDMKKRLKEIEEEASALREMQAKVEKEMGAVQDSSGTSATQAEKEEVDARSIYVGNVDYACTPEEVQQHFQSCGTVNRVTILTDKFGQPKGFAYVEFVEIDAVQNALLLNESELHGRQLKVSAKRTNVPGMKQYFGRRPAGFRSRRPFMPAPFFPPYGYGRVPRYRRPTRYRPY

SEQ ID NO: 250382 - protein, 37 aa, Glycine max
  Clone ID: PAT_MRT3847_68122C.1.pep
TSLRCCAILALKKLPFVFLHGIEELLVVYLLPTIVLS

SEQ ID NO: 250383 - protein, 129 aa, Glycine max
  unsure (1)..(129): unsure at all Xaa locations
  Clone ID: PAT_MRT3847_68123C.1.pep
RANNWLPSLTFFLFPWLLAQRASANRVQGSNPQEESTTARATSTASTIMVFKDRNVVAXLVRRAERVGFKAIAFTMDIDILGRGEVDIKNSVFYKFTLPPNLVLKNFEGLDLGKLDKVCDYIAILHYLF

SEQ ID NO: 250384 - protein, 244 aa, Glycine max
  Clone ID: PAT_MRT3847_68124C.1.pep
SNPSPSTPTKPPFPTPPSSSSITPLLQDLFLNQNHSSTPHLHLSPSTHRTPRSPHRLSPQAHRILQTLIHPSFDSNRFHEILPLLFDQPSSSSLSWDILGIIKGLGFNNKFDLALSLFDFIRTRNDRVSLLNGSVIAVIVSILGKTGRVSRAASLLHNLEADGFEVDVYGYTSLITAYANNKKYRDALKVFGKMKEVGCEPTLITYNAILNVYGKMGMPWAKIIALVQDMNCHGLAPDLCTYNT

SEQ ID NO: 250385 - protein, 58 aa, Glycine max
  unsure (1)..(58): unsure at all Xaa locations
  Clone ID: PAT_MRT3847_68125C.1.pep
RVKKDYVLTTITQRNYLLCXRKWWTCKPTLEKRHGHTRWWNVLFLTRSWRRPIFTYRQ

SEQ ID NO: 250386 - protein, 85 aa, Glycine max
  unsure (1)..(85): unsure at all Xaa locations
  Clone ID: PAT_MRT3847_68126C.1.pep
SFCPGXPVWLRGXXLXPLXWLLGFPALVVALVRGGXXAXXLXSCXCCLALCPFWXGXLXXPSPFCSPVFSPGCXGGCXFRXPGRV

SEQ ID NO: 250387 - protein, 39 aa, Glycine max
  Clone ID: PAT_MRT3847_68127C.1.pep
IKTIFVNWKAPKLTWAECTVKRTLLLAGNIKCAEGHSFV

SEQ ID NO: 250388 - protein, 27 aa, Glycine max
  Clone ID: PAT_MRT3847_68128C.1.pep
ANKMWAAHVNSDLTGHSMARLHVMTTD

SEQ ID NO: 250389 - protein, 96 aa, Glycine max
  unsure (1)..(96): unsure at all Xaa locations
  Clone ID: PAT_MRT3847_68129C.1.pep
DCETRSRWEKATTAKAQPDRGKIDKKEKNGAGTQTSEDFHEKEDQEKPKKIDARLRQRIEPQYNEVQAKTETKSNKTTIEEXETSKGSMLDLKNLK

SEQ ID NO: 250390 - protein, 48 aa, Glycine max
  Clone ID: PAT_MRT3847_6812C.1.pep
TTMSHEFSLILTILRSQMSLVELSLIEQHYGYSIPKKPSYRTPCLDIR

SEQ ID NO: 250391 - protein, 41 aa, Glycine max
  Clone ID: PAT_MRT3847_68130C.1.pep
CITFLPLKHKYMVREIYSNILKTTYAELNGFHKGLRTRGST

SEQ ID NO: 250392 - protein, 224 aa, Glycine max
  unsure (1)..(224): unsure at all Xaa locations
  Clone ID: PAT_MRT3847_68131C.1.pep
HASACKHASALFLSFSLFGRKPTLLFSLLHTYTHSSFLFPSSLHCPASPCPSLTVCSSFSTFHFLPEIMVRKRRTELPSGGESSEAQRPAERSAPPQQQAAAAAPGGAGPQGGRGWGPQGGRGGYGGGRSRGMPQQQYGAPPEYQGRGRGGPSQQGGRGGYGGGRSGGGMGSGRGVGPSYGGPSRPPAPELHQATSVQFYQTGVSSQPALSEASSSLPXPEPVD

SEQ ID NO: 250393 - protein, 226 aa, Glycine max
  unsure (1)..(226): unsure at all Xaa locations
  Clone ID: PAT_MRT3847_68132C.1.pep
MANLARFSKRALRSAHALARPHVQPQLLTAERAFSTDAPTSITPSADRVKWDYRGQRKIIPLGQWLPKVAVDAYVAPNVVLAGQVTVWDGASVWPGCVLRGDLNKISIGFCSNVQERSVLHAAWSSPTGLPADTSIERYVTIGAYSLLRSCTIEPECIIGQHSILMEGSLVETQSILEAXSVVPPGRRIPTGELWAGNPARYVEXPLTHEEILKIPKLAVAINDLS

SEQ ID NO: 250394 - protein, 284 aa, Glycine max
  Clone ID: PAT_MRT3847_68133C.1.pep
MSSTGACNTSLMSSFSFSGFSLSLSLMANLAHFSKRALRSAHALARHHVQPQLLAAERAFATEAAKSISPSADRVKWDYRGQRKIIPLGQWLPKVAVDAYVAPNVVLAGQVTVWDGASVWPASVWPGCVLRGDLNKISVGFCSNVQERSVIHAAWSSPTGLPADTSIERYVTIGAYSLLRSCTIEPECIIGQHSILMEGSLVETQSILEAGSVVPPGRRIPTGELWAGNPARFVRTLTHEEILEIPKLAVAINDLSRDHYSEFLPYSTVYLEVEKFKKSLGISV

SEQ ID NO: 250395 - protein, 108 aa, Glycine max
  unsure (1)..(108): unsure at all Xaa locations
  Clone ID: PAT_MRT3847_68134C.1.pep
GVVLDFSGCSMNALKXSICELTRLGDCIYAMHLCPDSIDQSRNKQWGXSGSTLITLVEFTWPXMMKKYDVELDIGDMDMLGTAMRQKDTPIVALMYIADARQRLLYAT

SEQ ID NO: 250396 - protein, 142 aa, Glycine max
  Clone ID: PAT_MRT3847_68135C.1.pep
TYVFSLDVRVKEQRVSNLLQSLLVGASVFAMPAIKKIPTSVLWGYFAYMAIDSLPGNQFWERILLLFVTPSRWYKLLEGDHASFVESVPYKYIVFFTLFQCVYFLVCFGVTWIPIAGILFPLPFFLLITLKQHILPKLFKPH

SEQ ID NO: 250397 - protein, 136 aa, Glycine max
  unsure (1)..(136): unsure at all Xaa locations
  Clone ID: PAT_MRT3847_68136C.1.pep
YASGKTTGEEGHHFFKDDLWPEGMLILDTHANVYIWNDNSVERIEMPSGSAIGHNYIELDASLEGLCAHVPLSDDTAGDEPCFVTTSXTWDHGQTMIIGKXFQKKVILLLGLDHAVMEKKNVSSTRGPRNKAEALA

SEQ ID NO: 250398 - protein, 62 aa, Glycine max
  Clone ID: PAT_MRT3847_68137C.1.pep
QTRLRSYSCASLCFSSATMSDKPDMAEIEKFDKSKLKKTETQEKNPLPSKETIEQEKQAGES

SEQ ID NO: 250399 - protein, 141 aa, Glycine max
  Clone ID: PAT_MRT3847_68138C.1.pep
MMKRCELVFEASTRGGCEEHPYDKQSPGVCSSCLREKLSQLYNTNPIIDPRCFSSPSSPSSPHQSFFSSKHGSSGHRRPRFRRNASQAAESASCMLSLNLKKSKSLAFASRNRERDVMMSGRKKDGFWTKVLKLKRKDTRA

SEQ ID NO: 250400 - protein, 73 aa, Glycine max
  Clone ID: PAT_MRT3847_68139C.1.pep
LARETKIEQVMMDGEVDPLMKRETAKDNRVKNEGCEEDFLDNPITELIKMEVEGGDATKPHCFQYCNFIKKLL

SEQ ID NO: 250401 - protein, 127 aa, Glycine max
  unsure (1)..(127): unsure at all Xaa locations
  Clone ID: PAT_MRT3847_6813C.1.pep
GVIDVEEKAAIANNIATIKCGRPYSRMDLPSKNDQNELEEMKNMTATRLCSSLTNEKQRLLXGASVYRGMTMSYTAPSTQIHPHGRWQALHVRLSRNKDLYVGTYTAQDETGVAYYIGALTCREFYA

SEQ ID NO: 250402 - protein, 216 aa, Glycine max
  Clone ID: PAT_MRT3847_68140C.1.pep
MTIHNNKMTSIATNSTVVATRMLVVITLVLALVCCVTSAQSPAAAPAPESNGCLMALTNMSDCLTYVEDGSKLAKPDKGCCPELAGLIDSNPICLCELLGKPDSIGIKIDLNKALKLPSVCGVTTPPVSTCSAVGVPVSLPPSMSEGSLSPGIAPGVSSPSNTDASPASSPGGPGPSSEEAAASPSQNKNGVSAIQASALTNFIFGLSTLFVSVFF

SEQ ID NO: 250403 - protein, 690 aa, Glycine max
  Clone ID: PAT_MRT3847_68141C.1.pep
RVGYGKVLGITDSPPDECLPPLDMSKQPPTQELVAKDLHANEWRFRHIFRGQPRRHLLQSGWSVFVSSKRLVAGDAFIFLRGENGELRVGVRRAMRQQGNVPSSVISSHSMHLGVLATAWHAILTGTMFTVYYKPRTSPAEFIVPYDQYMESLKNNYTIGMRFKMRFEGEEAPEQRFTGTIVGIEDADTKRWPKSKWRSLKVRWDETSNIPRPERVSQWKIEPALAPLALNPLPMPRPKRPRSNVVPSSPDSSVLTREASKVSVDPLPTSGFQRVLQGQELSTLRGNFAESNESDTAEKSAVWPPVADDEKIDVSTSRRYGSDSWMSMGRHELTYPDLLSGFGTHGDHSSHPSFVDQNGPVANVGRKHLLDCEGKHNVLSPWSGVPSSLSLNLLDSNTKGSAQGGDTTYQVRGNLRYSSAFGEYPMLHGHKVEHSHRNFLMPPPPSTQYESPRSRELLSKPISGKPCEVSKLKDSDCKLFGISLLSSRPIASEPSLSQRNVTSESVGHMHTASHHQRAIENDQKSEHSRGSKPADGLLIDDHEKVLQTSQPHLKDVQAKSHSGSARSCTKVHKKGIALGRSVDLTKFSDYGELITELDQLFEFGGELTSPQKDWLIVYTDNEGDMMLVGDDPWQEFVAMVRKIYIYPKEEIQKMSPGTLSSKNEENQSASEGATDTQEIKCQLNNSASDT

SEQ ID NO: 250404 - protein, 241 aa, Glycine max
  Clone ID: PAT_MRT3847_68142C.1.pep
MKGGRLWRRPRLQWHVYMMEFWPSAVDNTVWGLAVPRGCLELITMGASIRKMMLFFSRMVIFSISNARYTYVHDQKYPSEDVDIHHVVSRRSNAKYLFVHASALLVLACALYLYVLKEKAISLVYYSLLFDIFLVNLLLGKPVKKESVVIMPAFGVQLETHYVSGKVIRYFVPIDKILKPVLIECVTPVTCYWTLSLIIRGESEMVLVFKNLRPPVKMLAYVWKALCAATDSKEETCTHAE

SEQ ID NO: 250405 - protein, 166 aa, Glycine max
  Clone ID: PAT_MRT3847_68143C.1.pep
NYATSVADERSVVRSLDHEKVLQTSQTHLKDIQAKSHSGSARSCTKVHKKGIALGRSVDLTKFSDYGELIAELDQLFEFGGLLTSPQKDWLIVYTDNEGDMMLVGDDPWQEFVAMVRKIYIYPKEEIQKMSPGTLSSKNEENQSASEGATDTQEIKCQLNNSASDT

SEQ ID NO: 250406 - protein, 488 aa, Glycine max
  unsure (1)..(488): unsure at all Xaa locations
  Clone ID: PAT_MRT3847_68144C.1.pep
XWDETSNIPRPERVSQWKIEPALAPLALNPLPMPRPKRPRSNVVPSSPDSSVLTREASKVSVDPLPTSGFQRVLQGQELSTLRGNFAESNESDTAEKSGVWPPATDDEKIDVSTSRRYGSDSWMSMGRHEPTYPDLLSGFGAHGDHSSHPSFVDQNGPVANLSRKHLLDREGKHNVLSPWPGVPSSLSLNLLDSNLKGSAQGGDTAYQVRGNLRYSSAFGEYPVLHGHKVEHSHRSFLMPPPPSTQYESPRSRELLSKPISGKPCEVSKLKDSDCKLFGISLLSSRPIASEPSLSQRNVTSESVGHMHTASHHQRAIENDQKSEHSRGSKPADGLLIDDHEKVLQTSQPHLKDVQAKSHSGSARSCTKVHKKGIALGRSVDLTKFSDYGELITELDQLFEFGGELTSPQKDWLIVYTDNEGDMMLVGDDPWQEFVAMVRKIYIYPKEEIQKMSPGTLSSKNEENQSASEGAADAQEIECQLNHSSSDT

SEQ ID NO: 250407 - protein, 123 aa, Glycine max
  Clone ID: PAT_MRT3847_68145C.1.pep
MAGSGTFAEIIDGDVFKYYAQGHWNKSSSGKFVPIINPTTRKTHFKVQACTQKEVNRVMESAKTAQKSWAKTPLWKRAELLHKAAAILKEHKAPIAECLVKEIAKPAKDAVTEVIRSGDLVSY

SEQ ID NO: 250408 - protein, 89 aa, Glycine max
  Clone ID: PAT_MRT3847_68146C.1.pep
FSNFHKLLFTKKTTPSILYLSGCFPSLDEDQLAKLDRSIFEDEIEMTIMRLGLRSLGPNKFKPLFSTDLKRKYCQGELIRLLRLRFETY

SEQ ID NO: 250409 - protein, 57 aa, Glycine max
  Clone ID: PAT_MRT3847_68147C.1.pep
FWTTVPRFQGKHPLRVFKATPQGGPPKLGKPGTILFTPPVFKGLEVSLKGAFPRFNI

SEQ ID NO: 250410 - protein, 147 aa, Glycine max
  Clone ID: PAT_MRT3847_68148C.1.pep
CSSSYALKMQRLYTTQGAAIIHGVMDRYNAIAIRLNLCYAPINWQFSSLLTAAGRSQTSSSMAPPLEVVVAASMEPPLLVVVPDPTNIMPFLLVTAPTPNLCLANDLSSTTLFCLCESPHPVPLSCVSAEWKPATQSAVARVYVRVD

SEQ ID NO: 250411 - protein, 166 aa, Glycine max
  unsure (1)..(166): unsure at all Xaa locations
  Clone ID: PAT_MRT3847_68149C.1.pep
IRLEKIIGAKYFRMDGSFGEDDIISPRDSNGHGTHCASTAAGNSVESTSFFGLASGTARGGVPSARIAVYKPCWSSGCDDADILQAFDEAIADDVDVISISLGPVSVDHRNYFEDVFAIGAFHAMKKGILTSHSAGNEGPELSTMSVYAPWLLSVAASTTDRKLXT

SEQ ID NO: 250412 - protein, 130 aa, Glycine max
  Clone ID: PAT_MRT3847_6814C.1.pep
GGDYLFAFRMIMVLFRREFSFCDSLYLWEDVDDKSEESKGRLKSLRHYGKYERENMKNGGKNGEDPPLPISVFLVASVLKDKSTMLLQQARGLDDVVKILNDVNGNLDAKKACVAALKLHKKYLKKAKNP

SEQ ID NO: 250413 - protein, 68 aa, Glycine max
  unsure (1)..(68): unsure at all Xaa locations
  Clone ID: PAT_MRT3847_68150C.1.pep
PXRAKKKRGVYHSKGNTGLHTPRNTDQYTTIGTMQSLEEFMRATSNNSQCNNQTAKKQVSGQVGPPKP

SEQ ID NO: 250414 - protein, 88 aa, Glycine max
  Clone ID: PAT_MRT3847_68151C.1.pep
SDPVTSMGLVQHEGGPCGVLAAIQAFVLKYIIFFSDELKDVSCMSQKGPGAAFKSQSVPSNNFSSLTEGEKVRALVKSMGEILFSCGS

SEQ ID NO: 250415 - protein, 65 aa, Glycine max
  Clone ID: PAT_MRT3847_68152C.1.pep
SSTNGDFVQGKDLAMVKVNVACAAVGLTSSYTPTPLLEFGLLKDSGFIVHYFRSSFYPNLFPYFF

SEQ ID NO: 250416 - protein, 43 aa, Glycine max
  Clone ID: PAT_MRT3847_68153C.1.pep
FTLAELFTEATNYQTLKTEIGSIPELNTPLTGPKHLNLLKGKT

SEQ ID NO: 250417 - protein, 63 aa, Glycine max
  Clone ID: PAT_MRT3847_68154C.1.pep
CYIILFGPRLRLLMLIPMVRNARLGIANSVVRHTQMLANTVCSHQLVHRCCMLSKDTGSISAA

SEQ ID NO: 250418 - protein, 57 aa, Glycine max
  Clone ID: PAT_MRT3847_68155C.1.pep
NALLNGINQSYITLAHRNLCEGHGRMVKLVIQILVFGTLYNWLLTARSHFLYLLKHC

SEQ ID NO: 250419 - protein, 69 aa, Glycine max
  unsure (1)..(69): unsure at all Xaa locations
  Clone ID: PAT_MRT3847_68156C.1.pep
EEEEEVDEEVVEDEEDEXVPRLKFQRMGGCIPLLLCNYSASFIFVSDRIIFFVSYGFSVYILYFFRFHV

SEQ ID NO: 250420 - protein, 90 aa, Glycine max
  Clone ID: PAT_MRT3847_68157C.1.pep
HASAAITPSRHRRRYQESTATTATTTTATSNKAFTSTTTRSHVKQISAALSSLLPSVFFFFFFFLIRYITSTDGYHGGGGTTMHRHQSHI

SEQ ID NO: 250421 - protein, 36 aa, Glycine max
  Clone ID: PAT_MRT3847_68158C.1.pep
NIHISLRTFSKRSMAEALTFIYSTSSLLMKHKITGN

SEQ ID NO: 250422 - protein, 107 aa, Glycine max
  unsure (1)..(107): unsure at all Xaa locations
  Clone ID: PAT_MRT3847_68159C.1.pep
NPLARGPRLGGLVXQFPSGPFSVGGPIITFFSGTDGFFDSLEIGPGREFFVGVRGFFNPNXPPFKEIFFFSQAFPGGAEVLFKGAFQEPMGLFFFPGPVGKNWLILL

SEQ ID NO: 250423 - protein, 198 aa, Glycine max
  unsure (1)..(198): unsure at all Xaa locations
  Clone ID: PAT_MRT3847_6815C.1.pep
MSERVKKEKQTGEKRERMKNIFKKLHIGSSHDPHRSNEASPSVPSPSCVADQSQSSAATPASPSSASASASTVVVTPGGGGGGASPVMNRQDFXSSEEEFQVQLALAISASNSEFREAPEKDQIHAATLLSLGGHRIDSARNKDDVAEALSRQYWEYNVLDYEEKVVDGFHDVYGPYNDSVMQGKMPSRTDLEANPGG

SEQ ID NO: 250424 - protein, 90 aa, Glycine max
  Clone ID: PAT_MRT3847_68160C.1.pep
KDLVQGKICPKFGGVTSQSKFAPNLGELLGKKEWNGKSRATHTVKCIKKNNNCKYKIKSVCVLLLIEKKKLSAKGKVIRLGIKRKGLIYG

SEQ ID NO: 250425 - protein, 77 aa, Glycine max
  Clone ID: PAT_MRT3847_68161C.1.pep
LNQTTSTNLSRQTKPTQPNNTHKPKQKPSVHLWLAQLLQNFHWVSSDGVSVELDEFLKLSMEMKKPLACKAVPRVAV

SEQ ID NO: 250426 - protein, 135 aa, Glycine max
  unsure (1)..(135): unsure at all Xaa locations
  Clone ID: PAT_MRT3847_68162C.1.pep
EKLGVLFNVMCVDSEDKASLWSQLHYVSRNNLEMQEAYLVNLVNVLRELSLHQSEEARQLRRKALSRIEWLQKADVPTIAQIEEFHSMQRMMNAPDSNDNIELPVSIDLXGLQGACKXFPNKIGLDDKLDVAYTQ

SEQ ID NO: 250427 - protein, 148 aa, Glycine max
  unsure (1)..(148): unsure at all Xaa locations
  Clone ID: PAT_MRT3847_68163C.1.pep
FVRSKQMSNVWWVAPEDKASLWSQLHYASCNNLGMHEAYLVNLVNVLRELFLHSPXEARQLIRKALSRIEWLQKADVPTIAQIEEFHSMQRMMNAPDSKENIDLLVSIDFAGLQGAGEAIPNTRVFNDKPVLANTQKFFDGNFSEDPW

SEQ ID NO: 250428 - protein, 75 aa, Glycine max
  Clone ID: PAT_MRT3847_68164C.1.pep
VSILVREIIVLYMLTRSFQAPLPLSELLLCFFTFSLIPSDLMHFPLMDLFDLILGWFGLSYLEYFCTTFYGLSMF

SEQ ID NO: 250429 - protein, 63 aa, Glycine max
  Clone ID: PAT_MRT3847_68165C.1.pep
HHIRHSMPNRMTGPILLTHGGKTLVSISTSVTTTSCKLVAYQECTQPTVLYAGNMLVLDAFSP

SEQ ID NO: 250430 - protein, 113 aa, Glycine max
  unsure (1)..(113): unsure at all Xaa locations
  Clone ID: PAT_MRT3847_68166C.1.pep
HPNEYLTTRSPVLRKGNFISNVMWMIILCQSLYHLYVDIGSFIQKEKSISLLDGPNSDLILNTLIFIYFVLXSSFYDIYSREMYXIIVCKVIIDNYIFLGVINATRSLPIIIN

SEQ ID NO: 250431 - protein, 44 aa, Glycine max
  Clone ID: PAT_MRT3847_68167C.1.pep
SFVDVHGHCYVHPCLSIRNEKEAAFRLHLLAECFSKLEPNSARA

SEQ ID NO: 250432 - protein, 65 aa, Glycine max
  Clone ID: PAT_MRT3847_68168C.1.pep
LGPEGAIITRGEVDVLTRVKKIVRGMRWEANLVVHEDGPLGPEKILVPVKGYWVGPSKTHPPPGD

SEQ ID NO: 250433 - protein, 174 aa, Glycine max
  Clone ID: PAT_MRT3847_68169C.1.pep
TRPSPSPSVTRVGRNPATPRLQPVVPPDFPLETPPNLRTTLPADRPVSAGRSRPGAVVTLPSKPNSEMQAPVNMSRRQPSPIANRGRLSEYTAKSRGHANAADASEVVARRSAKSSTTASENNVLGRTISKKSLDMAIRHMDVRNSSGTLRSVPSATLYPQSIRTSTPKTHHTR

SEQ ID NO: 250434 - protein, 83 aa, Glycine max
  Clone ID: PAT_MRT3847_6816C.1.pep
MEAQPPTPSTAPTTMPTHLRCRDSVEYWPCCRNTDWWDEPFAPAGTKLRLMCSCSGHIVRRPHDKSLCYMGGDTRMIGSERAS

SEQ ID NO: 250435 - protein, 71 aa, Glycine max
  Clone ID: PAT_MRT3847_68170C.1.pep
KIDALVAAWLPGTEAQGITDVIFGDHDFKGQLPMTWFRRVEQLDQPVGPRGNKGLFPLGYGLTYDKENLHD

SEQ ID NO: 250436 - protein, 182 aa, Glycine max
  unsure (1)..(182): unsure at all Xaa locations
  Clone ID: PAT_MRT3847_68171C.1.pep
MSPGGMFVQRREAAAAADNGSAAGNDNMTTVMVTVAHHSSHHHLYLPTNSTFWDVKRLLVHRTGLXPEEQRLFFGGKEKDNEGHLHAEGVRDMSKLLLLEDACREERKHEEIRKHNEMLKASEAVAEVSYEAPTRTLTRTPDTTWTRDTWTPIKITKNNVDTGVSCRCRTPNTQGAGGVPAS

SEQ ID NO: 250437 - protein, 62 aa, Glycine max
  Clone ID: PAT_MRT3847_68172C.1.pep
EKKVTAPHWEKFQGKATERKKIMCIRKRNRCHNFCRKKETTTGLNLLFFKSRKGDRANFPLL

SEQ ID NO: 250438 - protein, 137 aa, Glycine max
  unsure (1)..(137): unsure at all Xaa locations
  Clone ID: PAT_MRT3847_68173C.1.pep
KKPGYSWIEVDNQVHKXXVGDTSPPPARKIYDELDELALKIKNLGYIPNTDFVLHDVEDEQKEQYLFQHSEKIAVAYALISTPKPKPIRVFKNLRVCGDCHTAIKYISIVTGREIVVRDANRFHHIKDGKCSCNDYW

SEQ ID NO: 250439 - protein, 207 aa, Glycine max
  unsure (1)..(207): unsure at all Xaa locations
  Clone ID: PAT_MRT3847_68174C.1.pep
LKAGPTKQTXETNNTSTAESESSSINLEALTIDDKDVGSSKFLDDPDDSNIQAVTSGDTPYTSAARFEDLSLSPELLKGLYVEMKFEKPSKIQAISLPMILSPPHRDLIAQAHNGSGKTTCFVLGMLSRVDPKVQAPQALCVCPTRELAIQNVEVLRKVGKYTGIASECLVERHTAKIDVHFSTRVTEVRQSVQEYKTALKEAGLLQ

SEQ ID NO: 250440 - protein, 145 aa, Glycine max
  Clone ID: PAT_MRT3847_68175C.1.pep
QSLLLPMLISSCVTLCIHIPLCWALVFQTGMNNIGGALAMSISIWLNVTFLGLYMRYSPTCAKTRAPISMELFQGIWEFFRFAIPSAVMICLEWWSFELLILLSGLLPNPQLETSVLSICLNTISTLFSIPFGIAAAASTRISNE

SEQ ID NO: 250441 - protein, 79 aa, Glycine max
  unsure (1)..(79): unsure at all Xaa locations
  Clone ID: PAT_MRT3847_68176C.1.pep
MSCCGGNCGCGSSCMCGNCCXGCYMFPDLSYTEXTSTETYVIGVCPGYAQLEGAAMKVPSENDGCKCRPNCYCNPCTCK

SEQ ID NO: 250442 - protein, 91 aa, Glycine max
  Clone ID: PAT_MRT3847_68177C.1.pep
MIGMIMLKFSKKKKKKKKKKKKKKKKKKKKKKKKKKKKKKKKKKKKKKKKKKKKKKKKGGRLLKDPNFKNPWCNQIYFFLGPPNLIHGAGF

SEQ ID NO: 250443 - protein, 95 aa, Glycine max
  Clone ID: PAT_MRT3847_68178C.1.pep
FVSHNHRGRTQNDLSTCNLTHHTPSFAFQDMVLDHDSDRTYEKRKEGERFTLATCAKATYKKQGSVRDTTNRGGDQDRLVSLMNVEHARPKQITC

SEQ ID NO: 250444 - protein, 41 aa, Glycine max
  Clone ID: PAT_MRT3847_68179C.1.pep
NQKVGLIILANNITAPSVILLLGSSNSNNLYNVHLSQFLPK

SEQ ID NO: 250445 - protein, 79 aa, Glycine max
  Clone ID: PAT_MRT3847_6817C.1.pep
VMKQRTPVSPTTARNASKMQGDKYVQSAAPPAPRRLRAYFKATKSPAEIGNREFISLIRAKSVPSDLKNVSRAKRGVVV

SEQ ID NO: 250446 - protein, 49 aa, Glycine max
  Clone ID: PAT_MRT3847_68180C.1.pep
SDLCYCCCILVTMQAAFCCVIYPCLVLQYMGQAAFLSKNLSAVPISFYA

SEQ ID NO: 250447 - protein, 110 aa, Glycine max
  Clone ID: PAT_MRT3847_68181C.1.pep
MDEGLSGFCIISSSGSVRGKSGTKCGRWNPTTEQVKLLTELFRSGLRTPSTDQIQKISTQLTFYGKIESKNVFYWFQNHKARERQKNRKLSFDDHKDLICRQNAPSTQSK

SEQ ID NO: 250448 - protein, 73 aa, Glycine max
  Clone ID: PAT_MRT3847_68182C.1.pep
WYGKSLASRRFLPCCRYGRVPRQIFMYSSPLFNLLTVEGSETFKIKAMVQYFCVMWNCYHFSLVSSGEVSRSK

SEQ ID NO: 250449 - protein, 182 aa, Glycine max
  Clone ID: PAT_MRT3847_68183C.1.pep
MFEEQQDGVFEELWKLKLPSKITIFAWRLIRDRLPTRSNLRRKQIEVDDPRCPFCRSAEESAAHLFFHCSRIAPVWWESLSWVNLLGVFPNHPRQHFLQHIYGVTAGMRASRWKWWWLALTWTIWKQRNNMIFSNGTFNANKILDEAIFLIWTWLTHLEKDFSIHYNQWSSNIRAAFSNSDV

SEQ ID NO: 250450 - protein, 110 aa, Glycine max
  unsure (1)..(110): unsure at all Xaa locations
  Clone ID: PAT_MRT3847_68184C.1.pep
MPYVEGSVLVRILLAAGAGSSAQGSQDGWSALHTAAMADDVDLVRVIXGAGVDVSIRGVQISIPLHLALARGAKACVGRLLDAGAEYCLRDDDGDNAFHIAAVSASVLSR

SEQ ID NO: 250451 - protein, 183 aa, Glycine max
  Clone ID: PAT_MRT3847_68185C.1.pep
PTRPYGCDKHLKGYVEWYNSRGINALTFVVDVKELLRFDLGHVLETRISLLADHLVSWVSREEHDGRERCLVFHTFSNTGWFVYGYILARMLGSEELMEKIKGCIVDSGGGEPFNPKVWAAGFSAAILKKRNSLGPVVEVEGKLKSETEVSLSKVQQNEPSTIETVVLSLLEKFFSFVLQLPD

SEQ ID NO: 250452 - protein, 43 aa, Glycine max
  unsure (1)..(43): unsure at all Xaa locations
  Clone ID: PAT_MRT3847_68186C.1.pep
FFFFFFFFFFFFXVFFFFFFFFFKKWNPHNFCDLEQTKTNSRV

SEQ ID NO: 250453 - protein, 81 aa, Glycine max
  Clone ID: PAT_MRT3847_68187C.1.pep
FLFCFCLSFSPRLKGFAWRKGLLQLSNINNTLVIIALMFYVLKCHALVIYLNIFSLKLIEQNQINSLLIAGSRRKQFVEKN

SEQ ID NO: 250454 - protein, 118 aa, Glycine max
  Clone ID: PAT_MRT3847_68188C.1.pep
MLLIWTLSLLLGAVVGKEVCFPRLGCFSDDSPWAGIVERPLKILPWASKDVNTRLLLYTNENPYNFQELTADPSIITSFSFKTDRKTRFIIHGFIDKGEESWLANMCKKMFVVESVNC

SEQ ID NO: 250455 - protein, 147 aa, Glycine max
  Clone ID: PAT_MRT3847_68189C.1.pep
VGQVNPSSGCRSPSIKKRVKHEDKSDVYDFGVILLELILGRTIKSRNVDTLKDLLQASITTNGEARRSIIDPAVRKACLDQSLKTMMEICVRCLVKEQAERPSIEDVLWNLQFAAQVQDAWRGDSQSSSSSDGSPISPLASRPLNFH

SEQ ID NO: 250456 - protein, 94 aa, Glycine max
  Clone ID: PAT_MRT3847_6818C.1.pep
CGVFPLGKQMHISRRIVIQQERGKSNEPHSTAWEMTALCCVSLFDLCFFQPYLLVLLRDRSHGSIYPCNVVLCDSRRDYACHIQLWSERKLVML

SEQ ID NO: 250457 - protein, 64 aa, Glycine max
  Clone ID: PAT_MRT3847_68190C.1.pep
LTDLCTLKTRSSDSSQKSKLHKSPIVSLIQRAMELCVYDGGGVSYPPPPEIEKGVEALVAKKPS

SEQ ID NO: 250458 - protein, 414 aa, Glycine max
  unsure (1)..(414): unsure at all Xaa locations
  Clone ID: PAT_MRT3847_68191C.1.pep
MGKIFRENAKPSANSSSAYPSAAPATTSSTSVTETVRGSHQFKMTGYSLSKGIGIGKYMASDVFSVGGYNWAIYFYPDGKSVEDNATYVSLFIALASEGTDVRALXFELTLLDQSGKERHKXVHSHFXRGTLESGAYTPLKYRGSMWGYKRFFKRTALETSDYLKDDCLSVNCSVGVVRSHTEGPKIYTIAIPPSSIGQKFGQLLESGKGSDVNFEVNGDIFAAHKLVLAARSPVFRAQLFGPMKDQNTQRIKVEDMEAPVFKALLHFIYWDSLPDMQELTGLNSKWASTLMAQHLLAAADRYGLERLRLMCEASLCEDVAINTVATTLALAEQHHCFQLKAVCLKFIATSENLRAVMQTDGFEYLKESCPSVLTELLEYVARFTEHSDIMCKHRNEALLDGSDINGRRVKQRL

SEQ ID NO: 250459 - protein, 115 aa, Glycine max
  unsure (1)..(115): unsure at all Xaa locations
  Clone ID: PAT_MRT3847_68192C.1.pep
KFCPKGAKARALPGKTPEGTVLVSSFERNNTIKFXLGPGQVIKGWGQGFLEMCLGEKRKLKKPTKLGYGDQGSPPPIPGGATLIFYTELVGVNAKSLGEKKKNSALLPNQKKRKV

SEQ ID NO: 250460 - protein, 410 aa, Glycine max
  Clone ID: PAT_MRT3847_68193C.1.pep
MGKILQETAKPSANSTSAYPSAAPGTTSSMSVTETVRGSHQFKITGYSLSKGIGIGKYMASDVFSVGGYNWAIYFYPDGKSVEDNATYVSLFIALASEGTDVRALFELTLLDQSGKERHKVHSHFERTLESGPYTLKYRGSMWGYKRFFKRTALETSDYLKDDCLSVNCSVGVVRSRTEGPKIYTIAIPPSSIGQKFGHLLESGKGSDVNFEVNDDIFAAHKLVLAARSPVFRAQLFGPMKDQNTQCIKVEDMEAPVFKALLHFIYWDSLPDMQELTGLDSKWASTLMAQHLLAAADRHGLERLRLMCEASLCEDVAINTVATTLALAEQHHCFQLKAVCLKFIATSQNLRAVMQTDGFEYLKESCPSVLTELLEYVARFTEHSDIMCNHRNDALLDGSDINGRRVKQRL

SEQ ID NO: 250461 - protein, 94 aa, Glycine max
  Clone ID: PAT_MRT3847_68194C.1.pep
LYHLLFQCTRHSQDGCFQTGAAYIYYSLSTNYRQFIQQRNTLDFNIYGKHEHNLDCGSSYKNFITAHFDHTKQGEPTPYSFMHALHICGYRTNE

SEQ ID NO: 250462 - protein, 47 aa, Glycine max
  Clone ID: PAT_MRT3847_68195C.1.pep
ENEEGDWMLAEKGPWKMITDSCERLRMMKSAESLGLSPKAMEKCKSR

SEQ ID NO: 250463 - protein, 79 aa, Glycine max
  Clone ID: PAT_MRT3847_68196C.1.pep
PRGIKGFFSPGLKGVFSRENSPGYLGELGMFHPRGVGSFKKFCFPGPGGFFFGLWGWEVLGSLFFLIKPGGPLSRGFKC

SEQ ID NO: 250464 - protein, 120 aa, Glycine max
  unsure (1)..(120): unsure at all Xaa locations
  Clone ID: PAT_MRT3847_68197C.1.pep
MSAYETVGFGFGFFDKDDPNVFLLGNASVSGGALRLTNTDQLGKPVPHSVGRALHVTPIHLWNKNNGELADFSSGFSFVVNPKGSTPXGDGFAFFLAPANLNFPKNSSGGYLGLFNPETA

SEQ ID NO: 250465 - protein, 142 aa, Glycine max
  Clone ID: PAT_MRT3847_68198C.1.pep
ELGNGKPKFYSTPEIIAFCRKWRLPTNHVWLFSTRKSAASFFAAYDALCEEGTATSVCKALDEIADISVPGSKDHVKAQGEILEGLVARLVSHDSSNHIEKTLKEFPPPPADGVALDSGPSLREICAANRTDEKQQQLSYFL

SEQ ID NO: 250466 - protein, 54 aa, Glycine max
  Clone ID: PAT_MRT3847_68199C.1.pep
GESVGGNGDVTHARESTEEHACRYLPVIDEIQTEPCDSLSAAVPQRNGRHALRV

SEQ ID NO: 250467 - protein, 77 aa, Glycine max
  Clone ID: PAT_MRT3847_6819C.1.pep
QQILASDASSPQTKPLLIQCFNFQCHGYKECRNLSPSLMKPTHGKRAVFTVLLSSLHSTAARGKTRIENRREERRSI

SEQ ID NO: 250468 - protein, 198 aa, Glycine max
  unsure (1)..(198): unsure at all Xaa locations
  Clone ID: PAT_MRT3847_681C.1.pep
RFSSXXVTCLVSDGGMTFTIEAAHELGVPNVLFWPASACCFLSIINFPALVEKGLTPLKGTINLCSFPSDFIRTTDLNDVMLQFFIEVANKVQRNSTILFNTFDELEGDVMNALSSMFPSLYPIGPFPLLLNQSPQSHLESLGSVILPSEFVNETKDRSLLIASWCPQEQVLNHPSICGVPMLCWPFYGDQPKNCKYF

SEQ ID NO: 250469 - protein, 255 aa, Glycine max
  Clone ID: PAT_MRT3847_68200C.1.pep
NSSRIGSSVRALFTLAAKVSPTIIFVDEVDSMLGQRTRVGEHEAMRKIKNEFMTHWDGLLTKQGERILVLAATNRPFDLDEAIIRRFERRIMVGLPSVENREKILRTLLAKEKVDNELEFKEIATMTEGYTGSDLKNLCTTAAYRPVRELIQQERIKSLDKKQKASRGQNKDVQESRGQSVVGNTQDALDEEEEVKQERVIITLRPLNMQDFKEAKNQVAASFAAEGAGMGELKQWNDLYGEGGSRKQQQLSYFL

SEQ ID NO: 250470 - protein, 117 aa, Glycine max
  Clone ID: PAT_MRT3847_68201C.1.pep
ALGCKGFGVNYFSYRVLQLTNPHLTIHKHPQTDGQNEVANKCLETYLHCMCFRKPTRWSKWLSLAKWWYNTNFHSSIQTTPYEVVYDQAPPIQLPFMPGEVANPTVDRTLCKREQVI

SEQ ID NO: 250471 - protein, 98 aa, Glycine max
  Clone ID: PAT_MRT3847_68202C.1.pep
PHSLCASSTCVPTSASNRTSFALHALPQPPWSVSSIVISPMSDPSTVNPKTSFSMLSMRWPPTALHSLVAASTDTCATEPFRSTVSFNMPPGRSIWCD

SEQ ID NO: 250472 - protein, 46 aa, Glycine max
  Clone ID: PAT_MRT3847_68203C.1.pep
YRSRLPFEGAERERECKIPNAVKNAVNLTGYLNYSYLYEHLLVITF

SEQ ID NO: 250473 - protein, 39 aa, Glycine max
  Clone ID: PAT_MRT3847_68204C.1.pep
GMEGAGLWENELFYVKESSTERLSLSLSQPWDGHLRSRL

SEQ ID NO: 250474 - protein, 110 aa, Glycine max
  Clone ID: PAT_MRT3847_68205C.1.pep
SWAVMSHYGKPITNLNLYGLKNGPERGNWVMGAAQGLQILQILTVTACTTVTDTRIPAITQGRICLNHLRLIPTCLVPDNGLDAFAKAPLSLVCLHLDECNTNTHSVIIG

SEQ ID NO: 250475 - protein, 49 aa, Glycine max
  Clone ID: PAT_MRT3847_68207C.1.pep
RDQFKGRVQPAGWLRDPGIQTQACGRLSTTSGQLKPCSGQLNHLEDREN

SEQ ID NO: 250476 - protein, 61 aa, Glycine max
  Clone ID: PAT_MRT3847_68208C.1.pep
TTCRPLRQKRLVHGLSKSRSHLFHQPVERAVRSPRSIMCLGKCPSLYMQDFLRDGSIDTAG

SEQ ID NO: 250477 - protein, 69 aa, Glycine max
  Clone ID: PAT_MRT3847_68209C.1.pep
AIWPYFPPNGPQKTPKGGEPGPQEKNLPDKLPSKPPPRCRRPRKEAPRKGNLEPGCFPPGGKNRETGDL

SEQ ID NO: 250478 - protein, 53 aa, Glycine max
  Clone ID: PAT_MRT3847_6820C.1.pep
LSYNNMKLITPSPPCPEIIQLWLALMIVFEGGKGLKTYYKPNFANIKDKCWLP

SEQ ID NO: 250479 - protein, 82 aa, Glycine max
  unsure (1)..(82): unsure at all Xaa locations
  Clone ID: PAT_MRT3847_68210C.1.pep
MSILCGLPLVECVYCLACARWAWKRCLHTAGHDSENWGFATAEEFEPIPRLCRYILAVYEDDLRHPLWAPXGGYGISPDLLL

SEQ ID NO: 250480 - protein, 31 aa, Glycine max
  Clone ID: PAT_MRT3847_68211C.1.pep
RIYGLLLKLYIASSYDEYEAGKISIKDHEYY

SEQ ID NO: 250481 - protein, 167 aa, Glycine max
  Clone ID: PAT_MRT3847_68212C.1.pep
VRIARNSAREYLGDEDIKVKEAAGGILANLALSRVNHDIMVEAGVIPKLAKFLTSNLEGSKVIRKEARNALLELVKDKYHRILVIEEGLVPVPLIDAAAFKSFTPGLHLWPTLPDGTEIERTSRLPSRYGASELLLGLNVDDKNANLEEAKVNAIVGRTQQQFLARV

SEQ ID NO: 250482 - protein, 137 aa, Glycine max
  Clone ID: PAT_MRT3847_68213C.1.pep
RIEDFNLLKRKNHNDEVCPLFCRSRIDIEEFARGPLSRVYYVPNWITQDEEEAILEQVYAVPDACDIWVKLKHRRLQMWGGEVKEPFDAKPLPQWLMQISHALIDMGAFTDEKKPNHALINGEKPHVLEVQAFDLRA

SEQ ID NO: 250483 - protein, 83 aa, Glycine max
  Clone ID: PAT_MRT3847_68214C.1.pep
FSCKLDSLLLTFMQPRPTYSTTRWSAVCCLPLGNLHSKYTFSGKKQAKTFRPHGEENDIFRVRHSLELLQKAPSNKDSNQFLK

SEQ ID NO: 250484 - protein, 46 aa, Glycine max
  Clone ID: PAT_MRT3847_68215C.1.pep
HTMANSQQGEGDHNLLFTSLLNNTPQLKLFLETLAMRTCQIFLLPY

SEQ ID NO: 250485 - protein, 122 aa, Glycine max
  Clone ID: PAT_MRT3847_68216C.1.pep
SYIQKFFTPKHEFCENHNSRAQHDQLIQNKNKKTKPQFAETVHHTNFNKKFMKLDHREEIASFNLTNSETIQYPKEREREILGNSEKLNMTYDLDRHERHLLLDDTCLRLITAFFLRLFKKI

SEQ ID NO: 250486 - protein, 131 aa, Glycine max
  Clone ID: PAT_MRT3847_68217C.1.pep
YSNPIVFMHVVSSDVSCFQGLLFCPEAYYLLLHNFCIYHISPPGHELGAAAIDQDHPILSVDDLADQIAEVLNFFGLSAVMCMGVTAGAYILTLFAMKYRQRALGLILGSPLCKEPSWTEWLYTKVMSNLL

SEQ ID NO: 250487 - protein, 47 aa, Glycine max
  Clone ID: PAT_MRT3847_68218C.1.pep
LELNSTSATTLSFYKFNHAFLYSHGQGQDRRQRRWKNWPSGCQSHSA

SEQ ID NO: 250488 - protein, 53 aa, Glycine max
  Clone ID: PAT_MRT3847_68219C.1.pep
LFYAFLSVVCGRYLVFVFNKNGIPLPLFFLSCSPVVCKIYFPTFVFEIKFFFG

SEQ ID NO: 250489 - protein, 85 aa, Glycine max
  Clone ID: PAT_MRT3847_6821C.1.pep
IEFCFGYYIRLHCIEHFILTNRSKGCTGCPKLHRVPLSIMHTPIQHLKLIHENFIDKNSIIGMTLSTKAQQQTKEQKTKKHPKAF

SEQ ID NO: 250490 - protein, 63 aa, Glycine max
  Clone ID: PAT_MRT3847_68220C.1.pep
PTRPPILSSFNCFPLRMEGKSRAQAHFLYQLSGKCFALYHHLLSKLSLLPLNHTTMHTRRVSR

SEQ ID NO: 250491 - protein, 56 aa, Glycine max
  Clone ID: PAT_MRT3847_68221C.1.pep
APTRSASWTGDMASHANYVLTVDPTIDRAHASVIPCGYSTAYAAACKDSKVECGST

SEQ ID NO: 250492 - protein, 39 aa, Glycine max
  Clone ID: PAT_MRT3847_68222C.1.pep
TAARRRQKGTAARRRQKGTAARRRQKGTAARRRQKGRCP

SEQ ID NO: 250493 - protein, 69 aa, Glycine max
  Clone ID: PAT_MRT3847_68223C.1.pep
TTVTMLNEMDKVGIFVPHPLTNACLLIQLSLECGCKPLVCLLKRPALLSVDFQDRSIKDYSSCTLVGVP

SEQ ID NO: 250494 - protein, 135 aa, Glycine max
  unsure (1)..(135): unsure at all Xaa locations
  Clone ID: PAT_MRT3847_68224C.1.pep
LNPIWNEKFKLIAEDKETQLLILXVLDKDIGQDKRLGIAQLPLIGLEIQTEKEIELRLLPSLDTLKVKDKKDXGTLTMKVMYYQFNKEXQLVALEAEKKILEERKKLKEAGVIGCTMDVLDGAVSVVGSGVGLVW

SEQ ID NO: 250495 - protein, 167 aa, Glycine max
  Clone ID: PAT_MRT3847_68225C.1.pep
IEGIRVQSLTKGQIIMDIDFRWGGDPSIILAVEAALVASIPIQLKDLQVFTIVRVIFQLAEEIPCISAVVVALLAEPKPRIDYTLKAVGGSLTAIPGISDMIDDTVNSIVTDMLQWPHRIVVPLGGIPVDTSELELKPQGKLALTVVKATALKNMEMIGKSDPYVVV

SEQ ID NO: 250496 - protein, 342 aa, Glycine max
  Clone ID: PAT_MRT3847_68226C.1.pep
MEEEVICQWSVFRSLLAILQWWAFNVTVIIINKWIFQKLDFKFPLSVSCIHFICSAIGGYVVIKVLKLKPLITVDPEDRWRRIFPMSFVFCINIVLGNVSLRYIPVSFMQTIKSFTPATTVVLQWLVWRKYFDWRIWASLIPIVGGILLTSVTELSFNAFGFCAALLGCLATSTKTILAESLLHGYKFDSINTVYYMAPFATMILAIPALLLEGNGVLEWLSTHPYPWSALIIIFSSGVLAFCLNFSIFYVIHSTTAVTFNVAGNLKVAVAVLVSWLIFRNPISYLNSVGCAVTLVGCTFYGYVRHMLSQQPPVPGTPRTPRTPRSKMELLPLVNDKLDDKV

SEQ ID NO: 250497 - protein, 45 aa, Glycine max
  Clone ID: PAT_MRT3847_68227C.1.pep
RFSFKSLKIKILLYNSYTTIQTTQKDIEEIINSPLVQSHKVNKSP

SEQ ID NO: 250498 - protein, 114 aa, Glycine max
  Clone ID: PAT_MRT3847_68228C.1.pep
GKEYGRKVDIWSLGIMSIEMIEGEPPYLNESPLRALWLIATNGTPTIKEEHALSPVFRDFLGFSLKVDPDKRASAHDLLVHPFIQTAEPLGTLAPLVQSARKARAEERRKKGGL

SEQ ID NO: 250499 - protein, 158 aa, Glycine max
  Clone ID: PAT_MRT3847_68229C.1.pep
AARRRQKDTAARRRQKDTAARRRQKDTAARRRQKDTAARRRQKDTAARRRQKATAARRRQKGNRCGGSSIMASAVRLASRSFFANRSRSFVKSSTTPFVFSSSSASRISRASRVLSVVISVESLMPLHSAIANARLTSNIAFDSTCWSSLSRGLKKTL

SEQ ID NO: 250500 - protein, 63 aa, Glycine max
  Clone ID: PAT_MRT3847_6822C.1.pep
PFRCPKFSPSQPNSKHSPPSTTMGITPNTNCFWRTRGCSPLAALPTHLSCTPCTIRPTLTFHP

SEQ ID NO: 250501 - protein, 97 aa, Glycine max
  Clone ID: PAT_MRT3847_68230C.1.pep
QQLSKLPHVWHFLSMLGFTRNSPQISASPYQLDFTLYASGSYNTQWNAPGLLHDKHTLRSSRILRKVEVDEPWLGLWLPLNYQVDMGANQHRTLELG

SEQ ID NO: 250502 - protein, 305 aa, Glycine max
  unsure (1)..(305): unsure at all Xaa locations
  Clone ID: PAT_MRT3847_68231C.1.pep
KREVENLVAVQLEDSHVCNLTKGGSDGDISTKIQLTQEEEKESGDVGWKPFCDYIFFPKGSLLLCLSILLQFAFVGFQAASTYWLALPRVRQKVTSSILIGVYSVISFLSIVFVYLRSYFAAHLGLKASKVFFSAFTDAIFNAPMLFFDSTPIGRILTRASSDLSILDFDIPFTTIFVTSEIAELLTMIGIMVSVTWQVLIVAVLAMVASKYVQGYYQASAREIIRINGTTKAPLMNFTAETSLGAVTIRAFNMTDRFFKNYLNLVDTDATMFFHSNAAIEWVILRIELLQNLTLFTAAXLLVLL

SEQ ID NO: 250503 - protein, 424 aa, Glycine max
  unsure (1)..(424): unsure at all Xaa locations
  Clone ID: PAT_MRT3847_68232C.1.pep
MGLFSGIFMGVLFGIALMAGWARMMRYRSAKRIAKAADIKLLGSLYRDDLKKICGDNLPEWISFPVYEQVKWLNKKLTKLWPFVAEAATMVIRESVEPLLEEYRPPGITSLKFSKLSLGNXVAPKIEGIXRVQSFTKGQIIMDSAFRWGGDTGIILAVVDDFVASIPIQWRDLLLFTSFRVXFQLAEDIPCISPVVVGLFLEPIRLEDYTLKAVGGSLTAIPGISDMIDDTVNSIVTDMLQWPHRIVVPLGGIPVDTSELELKPQGKLALTVVKATALKNMEMIGKSDPYVVVHIRPLFKYKTKVIDNNLNPIWNEKFELIAEDKETQSLILEVLDKDIGQDKRWGIAQLPLIDLEIQTEKEIELRLLPSLDTLKVKDKKDRGTLTVKVMYYQFNKEEQLXALEAEKKILEERKKLKETGLNRR

SEQ ID NO: 250504 - protein, 111 aa, Glycine max
  unsure (1)..(111): unsure at all Xaa locations
  Clone ID: PAT_MRT3847_68233C.1.pep
AAGETQTTVVXXXXEEANXXATQQTKAPEHPTARKPATEPDPXENTAKAGPGGQKTPTDISARLPTHNPEAPATKDRKLAPPGGEKNPAPPQHTPPQGKAERHHGQNPAAK

SEQ ID NO: 250505 - protein, 47 aa, Glycine max
  Clone ID: PAT_MRT3847_68234C.1.pep
TYTFTCIVYTESPPLHNFTQITRAYWRFTDTSIMSTKTHYINYSHLL

SEQ ID NO: 250506 - protein, 62 aa, Glycine max
  Clone ID: PAT_MRT3847_68235C.1.pep
QFRSHHLTRLITSSPHWSNKAYNAITFSPYSDHHYLDRLNRLYKPAFYILEYTNTITHSYGI

SEQ ID NO: 250507 - protein, 36 aa, Glycine max
  Clone ID: PAT_MRT3847_68236C.1.pep
NKLMVFVLARQKVGFRWSSLHWYGVKCGDLFTFANA

SEQ ID NO: 250508 - protein, 122 aa, Glycine max
  unsure (1)..(122): unsure at all Xaa locations
  Clone ID: PAT_MRT3847_68237C.1.pep
NSTFPFCPSSSVNSPLPFCPSSSVNSSLPFCPSSSRNSSLPFSPSSSFNSSLPFSPSSSFNSSLPFSPSSSFNSSLPFSPSSSFNSSFAFSASSXFNSSFPFSASTVLNSSFPFSPFRSFNS

SEQ ID NO: 250509 - protein, 57 aa, Glycine max
  Clone ID: PAT_MRT3847_68238C.1.pep
CPFSITETTGVAALVQSPKPSCQLQSVAPYHLQFWCFRFMNSMVVNRKNQNGFCCFD

SEQ ID NO: 250510 - protein, 90 aa, Glycine max
  Clone ID: PAT_MRT3847_68239C.1.pep
RTKKKKHHRTEPIQKQIRKPLTLYYWYSAVHDKSLNQSCQKVQKLMSVCTFLRKIIWKRWMMMLKNKYTMMEWMELKTTMLNVVLKKMNM

SEQ ID NO: 250511 - protein, 165 aa, Glycine max
  Clone ID: PAT_MRT3847_6823C.1.pep
MADATKYVPIGGGNVATDLKSLSFILKTKKTVAAAYAFILAFVAFTVFLAFSPSPNASSPWFTNIFSPASTTDGSYKPQIPNIFSLLFPNSSDPLHNNTNSSRSPYPNTTTESQTLKETSLENRTQTTLVNSTQDAVPVPTTQTTDSHAPSLEEIPPPLGTTRCL

SEQ ID NO: 250512 - protein, 39 aa, Glycine max
  Clone ID: PAT_MRT3847_68240C.1.pep
LILNPKSIYEFFYNIKMYLKLIIKSKSILDHEIKSTLNS

SEQ ID NO: 250513 - protein, 101 aa, Glycine max
  Clone ID: PAT_MRT3847_68241C.1.pep
MSMLSVLRSQVINVMPMIQWLLKLNSGTKGKAFQLKAGFWESIKSGLMKNNSMQVMDAASTDEEDVQAVPQEFGLEQKTEPDGAIEQMIFSSGGEVDVYGS

SEQ ID NO: 250514 - protein, 100 aa, Glycine max
  Clone ID: PAT_MRT3847_68242C.1.pep
MGKSCPTVSADYQNAVEKAKKKLRGYIADKRCAPLMLRLAWHSDGTYDVSSKTGATYGSMMIQYKLFQNLFDVTDIYRTLIMPVGLDAYIISLLAVEYRN

SEQ ID NO: 250515 - protein, 93 aa, Glycine max
  Clone ID: PAT_MRT3847_68243C.1.pep
WQSLKGRDEPVDMAGGNSPHVPYASESYVDAPERYPIPQAELHDIDDPAAFSSNYQHISVEERKEHLVVARNSLELLSSILNSDAEPKTLKED

SEQ ID NO: 250516 - protein, 149 aa, Glycine max
  unsure (1)..(149): unsure at all Xaa locations
  Clone ID: PAT_MRT3847_68244C.1.pep
DPIKSALRGDSGGILEGLFGSCGPPVVSGVFVGDTXSRIFGSQAGIALCRNFVGVVSGGGPGWGSSSRVFSLPESVFKKFFFFRWFWPYVLVKFRFGVMFGQKLKSFSPPVFGTPCCSPVSRFKLFFGACCGLGEDFFGFLETGRCNRA

SEQ ID NO: 250517 - protein, 64 aa, Glycine max
  unsure (1)..(64): unsure at all Xaa locations
  Clone ID: PAT_MRT3847_68245C.1.pep
LVLLSKTLTYSIITQRWKLEAIXKCDVTVYTKIFLKFPYQFWPSGPGNEFFIYAHDQRGYYTFW

SEQ ID NO: 250518 - protein, 64 aa, Glycine max
  unsure (1)..(64): unsure at all Xaa locations
  Clone ID: PAT_MRT3847_68246C.1.pep
SNYFAARRPVVTVAQSLDDGHDYQEPAPARLFVPSEYTSWYFDCAGIAEFVVTILXVYINVSTV

SEQ ID NO: 250519 - protein, 49 aa, Glycine max
  Clone ID: PAT_MRT3847_68247C.1.pep
IYKVSGLFKITVKKETNNQCTITGKKHRINKSLDFQSHSQFLIIINRHP

SEQ ID NO: 250520 - protein, 429 aa, Glycine max
  Clone ID: PAT_MRT3847_68248C.1.pep
MGGDSIVSHGTDEGSCLEENFPLLSSHSSPALRDNLGLQDEDNRMKAENGLTCSETDEEIIHPSRVDFEVNERRRVINYQEILQCCDELKIHSKDLKREKQKILRYKPGAWIEKAGGLKISDYDVPKTTCLLLVGPRGSGKSSLINRISKVVEDDRFAPARAQESYNSLLGDGTSFLQEYMIPRYSNSICLYDTRSLSDNSEKDENIRMLKSWMTKGVHHGELVVRKTDNQRLRKSLKGKAHKKGYLSSKTRKVNFVIYVVNGLLVLKAMENDGALETQCVQSIVSTFNCPFLSFKDDKPVLVFTHGDLLSFSERALVREHLGTLLGIPPTKQIFDIPDCDCPATESAIIRMLRYSLAHADRHFPQRSKVMDKVHKMSLSLYMILLILGIGIAIGWAQNTENRRVQFPRPKQKVPKSKPIEWHKIRHIW

SEQ ID NO: 250521 - protein, 71 aa, Glycine max
  unsure (1)..(71): unsure at all Xaa locations
  Clone ID: PAT_MRT3847_68249C.1.pep
WTSQTGLWISASGAHCQSERQDTWDGDDSPLMDQHXPIAMAVGDWLSDRXTVKAVDWAYPCDNTCHNLVFN

SEQ ID NO: 250522 - protein, 193 aa, Glycine max
  unsure (1)..(193): unsure at all Xaa locations
  Clone ID: PAT_MRT3847_6824C.1.pep
TRPDFFRKLMEVFRVCEDLENMDGLHLIFKIIKGIVLLXNSTQIFERXNFSDEFMMDIVGALEYDPEVPHVQHHRKFLKEYVIXKEAIPXIKNTTVLSKIHQTYRVGFLKDVVLARVLDEATVANLNSIIHANNAXIVVSLLKDDSTFIQEXLFARLKSPTTSPESKXNMVRFFMNFCSLSKSLQMVQQLRLF

SEQ ID NO: 250523 - protein, 228 aa, Glycine max
  Clone ID: PAT_MRT3847_68250C.1.pep
MDSALSRLHLHNLPPLSSAAHRPLLQPLAAAASFYRSSPPLPRLRLSPLLAANTLTANDVSPRSGLYTVGDFMTKKEDLHVVKPTTSVDEALEILVENRITGFPVIDDNWKLVGVVSDYDLLALDSISGHGLKDNNMFPEVDSTWKTFNEVQKLLSKTNGKLIGELMTTAPMVVRETTNLEDAARLLLETKFRRLPVVDAEGRLVGIITRGNVVRAALHMKQANQKKE

SEQ ID NO: 250524 - protein, 66 aa, Glycine max
  Clone ID: PAT_MRT3847_68251C.1.pep
MLVWISQSFQLSWIWELFGTCVLGKNLFCWFKLFQYRIYDAWSAIDFVLLFVFLKVIKIVFSYSLE

SEQ ID NO: 250525 - protein, 186 aa, Glycine max
  Clone ID: PAT_MRT3847_68252C.1.pep
MQRSREALLHRRRAKTGSGYKLSLSLLFLLWPLIFRAHGYPAPTESNWKQNKQGQCKTSNFANKCLLKETHDYILPDPEDAESVPNDSDTPTREDVQKSDHLPWAVPLGLDEFKSRAISSKINSGTAGSSGSVMHRVEPGGAEYNYASASKGAKVLGSNKEAKGASNILSGDKDKYLRNPCSAEEK

SEQ ID NO: 250526 - protein, 94 aa, Glycine max
  Clone ID: PAT_MRT3847_68253C.1.pep
QKEREGNHDPERSFGRHRSKRERDGERKGKDKDRERRDKDKDRRARDRDRERERREKDRERERERAERERSPRSRSRFERDRDRERDFDMGDGR

SEQ ID NO: 250527 - protein, 91 aa, Glycine max
  Clone ID: PAT_MRT3847_68254C.1.pep
SSALMVTPHPQVNKLQLWVLLLRIIKTIFLLVTLLSMDVESNWKQNKQGQCKTSNFANKCLLKETHDYILPDPEDAESVPNDSDTPTREDV

SEQ ID NO: 250528 - protein, 448 aa, Glycine max
  Clone ID: PAT_MRT3847_68255C.1.pep
MSDHLPWAVPLGLDEFKSRAISSKIKSGTSGSSGSVMHRVEPGGAEYNYASASMGAKLLGSNKEAKGASNILSRDKDKYLRNPCSAEDKFVIIELSEEILVDTIQVANFEHHSSNLKAFELLGSLSFPTDVWVFFGNFTASNVRHAQRFVLQEPKWVRYLKLNLQSHYGSEFYCTLSVVEVYGVDAVERMLEDLIHTQDNLLAPGDGNADKMTVSPHPNPPESEDAHQNTFGGINSYPASDISSANHEKLNSNVPDPVEEIRQQVGRMPGDTVLKILMQKVRTLDLNLFVLERYMEDLNSRYVNIFKEYSKDMGGKDILIQNIKEGIRNLVDQQDAITKDASDLKSWKSHISMQLDHLLRDNAVLRSEVNEVRRKQTSLENKGVLVFLVCCIFSLLVILRLSLDMATSVYRVVLSVNRTDCSRKFCAVSSSWFLLLLNCIIVIFILTL

SEQ ID NO: 250529 - protein, 48 aa, Glycine max
  Clone ID: PAT_MRT3847_68256C.1.pep
PAKKPENKKDPNQQIEELVKLSKAYNPPMAPPFYGQSAEENPNACAIC

SEQ ID NO: 250530 - protein, 186 aa, Glycine max
  unsure (1)..(186): unsure at all Xaa locations
  Clone ID: PAT_MRT3847_68257C.1.pep
FQPVFLVPAFFSVLKKEKRGGFFRASPWSGLYFPNPIKPTFTFFAWRAKRKSNQNLCPGRAKPGVPAFPPVPNFPPKGKKPLRKAMVVIPGPHFELALPTVKALVKTGNWLVLLACRNTFKLAEPPKSVALVKENSTFFHLNLAXLRSVRQLVDNXRRTEFPLDXLVSKPAVNLPPAKNPTFTARG

SEQ ID NO: 250531 - protein, 46 aa, Glycine max
  Clone ID: PAT_MRT3847_68259C.1.pep
TTQRLCRLLLMGHVIDMYVKHMLIHESHCILHWDSSTMHLHSAIMA

SEQ ID NO: 250532 - protein, 62 aa, Glycine max
  Clone ID: PAT_MRT3847_6825C.1.pep
VTRGPATRLFYEALVIPLHAHRLFQNTLIPLHPPNQYSQNTQTPPALGLSRYAVTKHLLLHP

SEQ ID NO: 250533 - protein, 74 aa, Glycine max
  Clone ID: PAT_MRT3847_68260C.1.pep
LCSIGWIKNISRFIWHIVPAAAIEIRHKIAVKVLTRQRTTLSISTRLRNFNKSSVVHENTTLWRLRSGDWPLGK

SEQ ID NO: 250534 - protein, 297 aa, Glycine max
  Clone ID: PAT_MRT3847_68262C.1.pep
IIWCRDCGKQVYLGGFDTAHAAARAYDRAAIKFRGVDADINFNLSDYEDDLKQMQNLSKEEFVHILRRQSTGFSRGSSKYRGVTLHKCGRWEARMGQFLGKKAYDKAAIKCNGREAVTNFEPSTYEGELKSAAINEGGSQNLDLNLGIATPGPPKENWGQLQFPSFPYNTHGGRSSMMETNVSSGIGNPSLKRMVATEDRPSLWNGMSPNFFPNGERAERIGVDPSNGLPNWAWQTHGQVNATPVPTFFAAASSGFSISATFPWGAIFPTSSMNSIPQSLCFTSSSMPTRNASEYYY

SEQ ID NO: 250535 - protein, 243 aa, Glycine max
  Clone ID: PAT_MRT3847_68263C.1.pep
RTRGRTRGAVTNFEPSTYEGEMKSAAINEGGGQNLDLNLGIATPGPGPKENWGQLHFPSIPYNTHGGRSSKMETNVNSGIGNPSLKRMVVTEDRPSLWNGMSPNFFPNGERAERIGIDPSKGLPNWAWQTHGQVNASPVSSFFSAASSRILQERAERIGIDPSKGLPNWAWQTHGQVNATPVPSFSAAASSGFSISATFPSTAIFPTSSMNSIPQSLCFTSSSSPTRNVSEYYYQVKPPQAPP

SEQ ID NO: 250536 - protein, 228 aa, Glycine max
  unsure (1)..(228): unsure at all Xaa locations
  Clone ID: PAT_MRT3847_68264C.1.pep
MRSQSQRPAKNIGRGPTSQIKQYIEVTYYRWTXKXELHNWDCGKQVYLGGFDTAHAAARAYDRAAIKFRGVDADINFNLSDYEDDLKQMQNLSKEEFVHILRRQSTGFSRGSSKYRGVTLHKCGRWEARMGQFLGKKYIYLGLFDSEVEAARAYDKAAIKCNGREAVTNFEPSTYEGELKSAAINEGGSQNLDLNLGIATPGPPKENWGQLQFPSFPYNTHGGRSSMV

SEQ ID NO: 250537 - protein, 98 aa, Glycine max
  Clone ID: PAT_MRT3847_68265C.1.pep
LTKHCARSDSCSLVLDARGKLFTWSRPSGQPRRQPVGHHRIRARSSCAGRAGHPLGDRRVQMACRPHRAGSIRPSCLPRRRVPCHHRSRGWRRGAGRA

SEQ ID NO: 250538 - protein, 80 aa, Glycine max
  unsure (1)..(80): unsure at all Xaa locations
  Clone ID: PAT_MRT3847_68266C.1.pep
DPXPAPASDPEDXTQGPQNPAAKGEGRGFFFFQXTTVLTIIGYKTQSDTKSFGKTQCDGVDILGIAWDYRGMIFIPCLLY

SEQ ID NO: 250539 - protein, 168 aa, Glycine max
  unsure (1)..(168): unsure at all Xaa locations
  Clone ID: PAT_MRT3847_68267C.1.pep
MRSFSSSLFLLLFFFSSSLSNPQNAPLSLKGVDIERPVLEFSPSVLPGISGSLGVKDALRCERVRVSGISRVKLGSYANSXHVTLAPSVSIPEKLHSKIQVCFHRNETVGWCQCEKDEWRGVQKGVWNAVMSPYETRYVDVRDHGEILGSVTVAIERDFPQGALLVLP

SEQ ID NO: 250540 - protein, 52 aa, Glycine max
  Clone ID: PAT_MRT3847_68268C.1.pep
IHPNIITQHCTSSINLLKIIIYIYIYIYIYIYIYIYIYIYIYIYIYIYIYMY

SEQ ID NO: 250541 - protein, 136 aa, Glycine max
  Clone ID: PAT_MRT3847_68269C.1.pep
LKCISENNLESQDLVKEINERIVDLEQQKENIVRSASGPSSKVEVQQPEEKKRDTGVLLPINNQWGNISKRPRTAVTHPRFTPSPQYQRVFMPVPGAPQFGLPAAYFVPANSMGVARSGNTGTHYCGNSRPYPPFR

SEQ ID NO: 250542 - protein, 68 aa, Glycine max
  Clone ID: PAT_MRT3847_6826C.1.pep
MIEVVCNDRLGKKVRVKCNTDDTIGDLKKLIAAQTGTRWNKIVLKKWYTIFKDHVSLGDYEIHDGMNL

SEQ ID NO: 250543 - protein, 72 aa, Glycine max
  Clone ID: PAT_MRT3847_68270C.1.pep
GGRSWHPPIFQFFLWPGLKGYIIAAFLLGPWEVPLSLFLGPSGSKIKNAPFHFYPYNSLIGGGGAFLLKFNF

SEQ ID NO: 250544 - protein, 155 aa, Glycine max
  unsure (1)..(155): unsure at all Xaa locations
  Clone ID: PAT_MRT3847_68271C.1.pep
FGLKXXXDXXXEEXRXKXLGXKXDXXXRXXKXXXXXXXXXXXEKLXEXVDWRIEGVVXXXKEXGGCGXCWXXXXIGGVEGINKIVXGEXILLLEKELVDCDXGYKEGXNGGXMXYXFEFIIKNGGIDFEEDXXLXGVDGRCEXYRKNGKVVFIDE

SEQ ID NO: 250545 - protein, 123 aa, Glycine max
  Clone ID: PAT_MRT3847_68272C.1.pep
KVGRGFQLGLRPPINELFPGPTPGASMNPAKSLGPAIGPNGYKGIWIYLVSPTLEPGAGPWAYNFFRYPNKPGGEITKRASFLKGGEAGCFTSKGKKVVFFSPFFYLQVPHALGLKFKKKFLV

SEQ ID NO: 250546 - protein, 62 aa, Glycine max
  Clone ID: PAT_MRT3847_68273C.1.pep
SINKAPCSFLKSKSITPLVSPSPRVPIILHSFLITADPFSDYECNFSVNGSLHHTSLYTILP

SEQ ID NO: 250547 - protein, 50 aa, Glycine max
  Clone ID: PAT_MRT3847_68274C.1.pep
SAHALLSSDILSFFYSAGRAVHFDSISSLWMLFAPASTSSVLIHMIVVAS

SEQ ID NO: 250548 - protein, 91 aa, Glycine max
  Clone ID: PAT_MRT3847_68275C.1.pep
ERKGFPLEGHFSVFCPEVWPNGLNPRNFIIRNKVYAAIKIGLFSQSLCPPRETWGLVDQIDFNYCLGHSRLIVLEGGRNFSSIFSLPLPPI

SEQ ID NO: 250549 - protein, 69 aa, Glycine max
  Clone ID: PAT_MRT3847_68276C.1.pep
LANNFSSSNSSIKTTLKPNLNPLLGAVATLRPCSLPWKRKTCFTTKAFLYSTKEDVWKLFSERKALKII

SEQ ID NO: 250550 - protein, 115 aa, Glycine max
  unsure (1)..(115): unsure at all Xaa locations
  Clone ID: PAT_MRT3847_68277C.1.pep
XXXXXMXXXXLSXXXXVXXYXXXXXWXXMGXXXXCXXXTVXCXXFXXXXXLXXGXXXXXXXXAXXXESXXXXXXGXXXXKXXXXDXXLSXXXELPVVXXXXXXRXVXXAXXXXSI

SEQ ID NO: 250551 - protein, 57 aa, Glycine max
  Clone ID: PAT_MRT3847_68278C.1.pep
LLSEVVAGDVLCIYSNPYVLSLLSEFWWQLHVSTVGCLDPFLKTHAWTRSSALPGDG

SEQ ID NO: 250552 - protein, 92 aa, Glycine max
  unsure (1)..(92): unsure at all Xaa locations
  Clone ID: PAT_MRT3847_68279C.1.pep
FSTMTLNLVLLMAMDATNILSLYHLSSTLQSPKSPKPHPPVHDQLLXQLHTIRATISHLTRLQNTHNPAQKSTIPSDLLLYSHLSPIASSCH

SEQ ID NO: 250553 - protein, 117 aa, Glycine max
  Clone ID: PAT_MRT3847_6827C.1.pep
MAGSQDQLEIKFRLSDGTDIGPKSYSAATSIVTLKESVLAQWPKDKEYGPRTVKDLKLISAGKVLENNKTVGDCQSPLCDLPGGVTTMHVVVQPPSVEEDMKVASEAKQSKCVCVIL

SEQ ID NO: 250554 - protein, 155 aa, Glycine max
  unsure (1)..(155): unsure at all Xaa locations
  Clone ID: PAT_MRT3847_68280C.1.pep
ARDGCEKTTEGHSNDNIFLIINRIRKSNPITLAAENRKKMQVFYGVLLQYFAVLANKEPLNVELLNMLVKPLIEMSMEIPYFAAICARRRIXTTRKQFIESIKQSESSSWPSSKTLCLLRLWSMIFPCSDFRHPVMTPVILLMCEYLMRCPIVSG

SEQ ID NO: 250555 - protein, 124 aa, Glycine max
  Clone ID: PAT_MRT3847_68281C.1.pep
KSSNAPEKDYSLKGDTTNRLFGIFNAIPIIATTYGSGIIPEIQATLAPPVKGKMLRSLCACYVVVLFSFFCVAISGYWAFGNQAEGLIFSSFVDSNKPLAPKWLIYMPNICTIAQLIANGAVSN

SEQ ID NO: 250556 - protein, 235 aa, Glycine max
  Clone ID: PAT_MRT3847_68282C.1.pep
IRIHSLAQHFAFQPRQVAIWFQNRRTRFKTKQLEKDYGVLKASYDRLKSDYESFGQEIEMQNPRVHDSESKHCIKDGEKQEHSDEKSSPDDAVNSSSPHNNKEPMDLLIISKNATTTTTSENGTKVLSPLPLPIMVTCCKQEDANSAKSDVLDSDSPHCTSFVEPADSSHAFEPEDHSEDFSQDEEDNLSENLLMTFPSSCCLPKVEEHCYDGPPENSCNFGFQVEDQTFCFWPY

SEQ ID NO: 250557 - protein, 184 aa, Glycine max
  Clone ID: PAT_MRT3847_68283C.1.pep
MEAVCLHCGDRGFPETLVFCSQCKAYALHRYCLKGPVIFTDAVTWFCEDCATKLWVPPALDQSTPISSVTRKNCVLGVKKHNKQQKKKVKKKQKEGKANSVLVAETKVVLSGSHSSPGPEHPQCSNRGEEYEVKNDCGPAPRDVANFVAGEEESVARDIANSDEGFKSVPVSQGANNSDSGWVE

SEQ ID NO: 250558 - protein, 343 aa, Glycine max
  Clone ID: PAT_MRT3847_68284C.1.pep
NSSTLIGSTFSLSKLSHLSALPFNLFTSDTLLILLPVPLSGSKSVVDFENVNGSRVTDRPFFQALEKEENCDEDYEGCFHQPVKKRRLTSEQVQFLERNFEAHDKLEPERKVQLAKELGLQPRQVAIWFQNRRARFKTKQLEKDYGVLKASYDRLKSDYESLVQENDKLKAEVNSLESKLILRDKEKEENSDDKSSPDDAVNSSPHNNKEPIMDLLISKNATTSENGTEVSTLPLPIMVTCKQEDANSAKSDVLDSDSPHCTDYGNHPSSFVEPADSSHAFEPEDHSEDFSQDEEDNLSENFLTLPSSCCLPKVEEPCYDDPPENSCNFGFHVEDQTFCFWPY

SEQ ID NO: 250559 - protein, 345 aa, Glycine max
  Clone ID: PAT_MRT3847_68285C.1.pep
MASGKLYAGSNMSLLLQNERLPCSSEVLESLWAQTSNPASFQGSKPVVDFENVSGSRMTDRPFFQALEKEENCDEDYEGCFHQPGKKRRLTSEQVQFLERNFEVENKLEPERKVQLAKELGLQPRQVAIWFQNRRARFKTKQLEKDYGVLKASYDRLKSDYESLVQENDKLKAEVNSLESKLILRDKEKEENSDDKSSPDDAVNSSSPHNNKEPMDLLIISKNATTTTTSENGTKVLSPLPLPIMVTCCKQEDANSAKSDVLDSDSPHCTSFVEPADSSHAFEPEDHSEDFSQDEEDNLSENLLMTFPSSCCLPKVEEHCYDGPPENSCNFGFQVEDQTFCFWPY

SEQ ID NO: 250560 - protein, 117 aa, Glycine max
  unsure (1)..(117): unsure at all Xaa locations
  Clone ID: PAT_MRT3847_68286C.1.pep
GVGVLTLRFPIMVTCKQEDANSAKSDVLDSDSPHCTDYGNHPSSFVEPADSSHAFEPEDHSEDFSQDEEDNLSENFLTLPSSCCLPKVEEPCYDDPXENSCNFGFHVEDQTFCFWPY

SEQ ID NO: 250561 - protein, 53 aa, Glycine max
  Clone ID: PAT_MRT3847_68287C.1.pep
SPQRTSLFLKVYLFRLSFYSLENVILKLPNNFWCKNPNIQGQSCIILSHQNKP

SEQ ID NO: 250562 - protein, 119 aa, Glycine max
  Clone ID: PAT_MRT3847_68288C.1.pep
SFFFFFFFFFFFFFFFFFFFFFFKGKKNNPFKNIKWKGKPKAPKTPRKKGDRGGEKKFCFLGQTKLKGNQSPLKRGGKGIPSLKQKNPRGGEAGEKSGPRPPFPTGKKRNSGQPKKGGL

SEQ ID NO: 250563 - protein, 78 aa, Glycine max
  Clone ID: PAT_MRT3847_68289C.1.pep
LVFWKRNLLLVFWRRNLLLVFWRRNLLLVFWRRNLLVVFWRRNLLLVFWRRNLLLVFWRRNLLVVFWRRNLLVVFRSR

SEQ ID NO: 250564 - protein, 90 aa, Glycine max
  Clone ID: PAT_MRT3847_6828C.1.pep
LVNENVSSQSDYLKFVCDSTLRTRESEIENLQSSDDVAKPANPNSSTVKNEEFVPYVAENQIDDNDSSSGGQQGLPSEDLGIVKPEPQLA

SEQ ID NO: 250565 - protein, 286 aa, Glycine max
  Clone ID: PAT_MRT3847_68290C.1.pep
TLPQWCTRCRFCPSVENSSRSSRIGSRQNEIAGLEKEIESLIWELVEERKRECSETSSSEKDLMQLLLEAAMTDQSLGKDFSKRFIVDNCKNIYFAGHETTAVAASWCLMLLALHPEWQTRIRTEVAELCPNGVPDADSVPLLKTVAMVIKEVLRLYPPAAFVSREAYEDIQIGNLNVPKGVCLWTLIPTLHRDPDIWGPDANEFKPERFSGGVSKACKFPHAYVPFGLGTRLCLGKNFAMVQLKVVLALIISKFSFSLSPSYRHSPAYRMIVEPGHGVHILIQEI

SEQ ID NO: 250566 - protein, 46 aa, Glycine max
  unsure (1)..(46): unsure at all Xaa locations
  Clone ID: PAT_MRT3847_68291C.1.pep
MXXWXXXEXYPLFXXVXXAVGICGHQXVXNICINPEVXVNKAGRXA

SEQ ID NO: 250567 - protein, 88 aa, Glycine max
  unsure (1)..(88): unsure at all Xaa locations
  Clone ID: PAT_MRT3847_68292C.1.pep
RKLGLRYVXESEXQCGPRLXPGGRRRGFXSEVEVAGXCQEVRWVPEASEKSLLRRRWWXMRWKSRXMXKVRKLGRKTTSFRRRSASRT

SEQ ID NO: 250568 - protein, 714 aa, Glycine max
  Clone ID: PAT_MRT3847_68293C.1.pep
MADKGGKSCPICTEEMDLTDQQLKPCKCGYEICVWCWHHIMEMAQKDETESRCPACRSPYDKERIVTMAANCQRLVAEMNSQHKKKMQKLNLKPKSVDGRKHLSDVRVIQRNLVYIIGLPLNLADEELLQRREYFGRYGKVMKVSISRTANGIIQHSANSSCCVYITYSKESEAVQCIQSVHCFVLEGRPLRACFGTTKYCHAWLRNVPCSNRDCLYLHDHGSHEDSFTKDELVLAFARSRVQQIIGATNNLHRRSGNVLPPPVDNPKHMSSATKLVSQSPLDKCENQIKGFASGIGAVTSTVLPAVTSWVRCVSGNLPHDTSSSCSGNLANRKIEASNDPQALVSGVASTERSINIRKSGEAENSSDVCSNGAFVPSETNNHNSGGNSKTSFMDNDQDTVAPSVSTGFLELSRQHDFNIDTAVGINSNGDVHGLCSGLSSISINIHLEDSYLTPDSDGLPFTRNSIDSSLGQHLQQDNEYSTEHSSTPAFWEDIIVDDVLNIDSKQQKFSKGINYSSSSGLHSSCLTQNVNHSSHQPFQQDQICHQNHFRKPSTESFNEHLETGHVKYGESKDNGAGVDSMVASDMGENNIISDILSLELDAWEGSLVNLLGESDELYRPFKAPILRKVQDKNQSRFSFARQDDFMNGASNLLQSFAVTGRDPEGNFSSGALMGNKDTLTGKYPHVFPSGNSVPSDKLVGSQSLVPSNFSCEC

SEQ ID NO: 250569 - protein, 46 aa, Glycine max
  Clone ID: PAT_MRT3847_68294C.1.pep
SLTHGYVRRFSKGTFSGSLSQCERNHPKGHPHVVSSPLPLQASPFP

SEQ ID NO: 250570 - protein, 642 aa, Glycine max
  Clone ID: PAT_MRT3847_68295C.1.pep
MSSATKLVSKSPLDKCENQIKGFASGIGAANSTVLPAMSSWVRCVSGNLPQDTISSCSGNLANRKVEASNDPQALVSGVACTERSISTRSGEAENSSDVCSNGAFVPSETNNHNIGGNSKTSFMGNDQDTAAPSVNTGFLELSRQHDFNIDTAVGINSNGDVHGLCLGLSSISINDHLEDSYFTPDSDRLPFTLNSINSSLGQHLQQDNEYSTEQSSTPAFWEDIIVDDILNIDSEQQKFSKDINCLSSSGLHSTCLPQNVNQSSHQPFKQDQICSQNHFRKPSTESFNELLETGHVKHVESKDNGTGVDNMVASDMGENNIISDILSLELDAWEGSLVNLLGERDELYRPFKAATLRKVQDKNQSRFSFALQRKTLTEASNLQQPFAVTGHGPEGNFSSGGLIGNKDTVTGKYPHVFPSGNSVSSDKFVGSQSFVPSNFSMSKAHSSGPPGFSLSSRIPPGFSCGRVEQDSNTSVKHLQQQYVSSTGNIGSMGDEFNNLAVLNFGKGMLAERLNNASFDMRQTSLPQFIPGEDDPRLKLLMQQSTPTQNLRFPDHVGNRFLPQNDSYRISSRFLDQFPPNSPSIYEQLHSQQFSSNTLPSNNQWGGWNDAKNFSDLSISEVLNNERVGFSNFMPNYENIKF

SEQ ID NO: 250571 - protein, 89 aa, Glycine max
  Clone ID: PAT_MRT3847_68296C.1.pep
GKREVGKDCNIFSHAKESTKKSKGEFNSFPPFNKNWHEGEQPLEETTFSFPLLFNYYYFKFISYIAQPISQSSPVHLVRFLFHFFFIAA

SEQ ID NO: 250572 - protein, 75 aa, Glycine max
  Clone ID: PAT_MRT3847_68297C.1.pep
ITSSHYVIDCWIQIWQYPHISYLPFLSSPIFLYQFSLDCLLISFSSASCTGFLIHIFWIKISVNLKLLSCKNMLL

SEQ ID NO: 250573 - protein, 284 aa, Glycine max
  Clone ID: PAT_MRT3847_68298C.1.pep
MDNEEGVQEQMKANLSALKDQMASITEAMLKLQKTIEDNATVAASNTAREAEPVLQPAINLGRDKNMTVFSRRYSPQAYPYGLPPDFTPRTAPNDLSQAPTFEGQLPPYADYPLQEDDEGDAHLGTLLPLKDPAPHELSQPNIVRHVPSPPAPVKEFDPFAKDKGKIDLFEERLRAVEGLDNYPFSDLADLCLVPDIVIAPKFKVPDLDKYKGTTCPKSHLWMYCRRMGAYLTDEKLLMHFFQDSLAGAAVAWYTNLEASQIRSWKDLATAFIRQYQYNTDMAP

SEQ ID NO: 250574 - protein, 75 aa, Glycine max
  Clone ID: PAT_MRT3847_68299C.1.pep
YGKSITSVFVFWQSSVTVLLFYDPDIPRSTTFGYARDGSERCCKCPHYGRARKPVLALLSTHNMFCMIAASFSAL

SEQ ID NO: 250575 - protein, 55 aa, Glycine max
  Clone ID: PAT_MRT3847_6829C.1.pep
GTCAAASVRFCCRRWCGAFAGSTVVSILLSLSSSPSRDRSDRITRHCRRVRRTRQ

SEQ ID NO: 250576 - protein, 68 aa, Glycine max
  Clone ID: PAT_MRT3847_682C.1.pep
HPFFKNQGCGCHVSNIHFAFPRISEPLTFLISVLQLPKCCNVVAVVIVATASAIHCFPLCNGASQSHR

SEQ ID NO: 250577 - protein, 73 aa, Glycine max
  Clone ID: PAT_MRT3847_68300C.1.pep
RAPRKGSPRGPYPRGPGLHTQQTKRKKGALTPCSLYPTQITAPPKRTNPKGQKPRGPPKKGSQKHSSPVKPRR

SEQ ID NO: 250578 - protein, 59 aa, Glycine max
  Clone ID: PAT_MRT3847_68301C.1.pep
RGAPPGFFSVGFVVYLRASVLFFRCLYIKVYDFSMPVYVSLFLLYLSALFFFFFKNKFF

SEQ ID NO: 250579 - protein, 94 aa, Glycine max
  Clone ID: PAT_MRT3847_68302C.1.pep
TPVFGQGNDLFPPRVQKIRFGTAFPLPISPLAKEKSLSKNPHPSAYVFRSSSPDDREKFLAPPNIIPLWRLCTPPKFVKKHVEPTIFLRVGNIL

SEQ ID NO: 250580 - protein, 38 aa, Glycine max
  Clone ID: PAT_MRT3847_68303C.1.pep
GSSTAASCFFCFFFFFLNLNSMYLVIKRKGLNNCLLHA

SEQ ID NO: 250581 - protein, 89 aa, Glycine max
  Clone ID: PAT_MRT3847_68304C.1.pep
SHSPFMMRNYCEAHSVLTFSLLRQLTKDRFPPSRLSLITTISFTWLKAVIITTLQCPEFISHYTSYHLSCTPISVSILLDSPPFSNPLN

SEQ ID NO: 250582 - protein, 116 aa, Glycine max
  unsure (1)..(116): unsure at all Xaa locations
  Clone ID: PAT_MRT3847_68305C.1.pep
TPPAQYILQPYIAANGGHRLQKSTNNAPAMGKGRMTASELPTTNTVTPRPNSSTANQSGGFVLRQTNPYMRYSXLSLGASNAHAACKDTLVCPHTPWLVAHATKRPGRPYRPALDG

SEQ ID NO: 250583 - protein, 65 aa, Glycine max
  Clone ID: PAT_MRT3847_68306C.1.pep
KRTREANHEHTHRLNHQKKPFSSFCISLSENHLISVSEHPLIVKLKAAPIAVSFLNFQNLCIFSQ

SEQ ID NO: 250584 - protein, 115 aa, Glycine max
  unsure (1)..(115): unsure at all Xaa locations
  Clone ID: PAT_MRT3847_68307C.1.pep
SYVGSDVIQPRQKYLLPGNCTLACXSRSGLEKVGSSQAETVGGTNFSFDLIGAGIQCLISMAVIGPSXRPTEIDARVRQKIDPLYNDVQAHMETQMFQSSVEDAXTPNGSLLDVK

SEQ ID NO: 250585 - protein, 111 aa, Glycine max
  Clone ID: PAT_MRT3847_68308C.1.pep
MQKRTKPNIIENQKNGGRCLQPTTSINKGLPTTTVLVCHPIKFGRVLVGTYFKHIICSILIRHLNTYRFRQIHTERWEYANDEFLPDPKHVIPNIHSRKPIHSHRHSASSL

SEQ ID NO: 250586 - protein, 45 aa, Glycine max
  Clone ID: PAT_MRT3847_68309C.1.pep
YMRMLICITDCILFNFVFLAFITGLVPNRCSINICQMIKGFHFWD

SEQ ID NO: 250587 - protein, 76 aa, Glycine max
  Clone ID: PAT_MRT3847_6830C.1.pep
PRVRPSVFPLIRSTEGHIGLTPSGPRGDPALLHTTDNPILGLFNNHHEVNNYYTARDRPISAKANEEKSETLPNLP

SEQ ID NO: 250588 - protein, 102 aa, Glycine max
  unsure (1)..(102): unsure at all Xaa locations
  Clone ID: PAT_MRT3847_68310C.1.pep
HSCVDGVFGTTCPIPARTNWTYILXAKDQTGTFYYLPSLAFHTADGGFGGIRILSRPRIPEPFPDPSGDYTVLIGDRYKSNHTTLKARFDRGKKLPFSDGTL

SEQ ID NO: 250589 - protein, 146 aa, Glycine max
  unsure (1)..(146): unsure at all Xaa locations
  Clone ID: PAT_MRT3847_68311C.1.pep
CFIWLGGFXSSELLKIVRNQLEPLTEQQLMGIYNLQQSSQQAEDALSQGMDALQQSLSETLSSSSLGPSGSGNVAEYMGQMAIALGKLATLENFLHQADLLRQQTLQQMRRILTTFQAARALLVINDYVSRLRALNSLWLACPREY

SEQ ID NO: 250590 - protein, 495 aa, Glycine max
  unsure (1)..(495): unsure at all Xaa locations
  Clone ID: PAT_MRT3847_68312C.1.pep
MDLQPLYFTSILSIFIFMFLGHKIITKKPTSTPNLPPGPWKIPIIGNIHNVVGSLPHHRLRDLSAKYGPLMHLKLGEVSTIVVSSPEYAKEVLSTHDLIFSSRPXILAAKIMSYDSIGMSFTPYGDYWRQLRKIFALELLSSKRVQSFQPIREEVLTSFIKRMATIEGSQVKITKKVISTVFMFSSISPFLLSYRHHKKLISVVTEAAKISGGFDLGDLYPSVKFLQHMSGLKPKLEKYHQQADQIMQNIINEHREAKSSATGDQGEEEVLLDVLLKKEYGLSSDNSINVVFYNMFGGGTQTSATITWAMAEMIKNPRTMEKVQTEVRRVFDKEGRPNGSGTENLKYLKSVVSETLRLHPPAPLLLPRECGQACEINGYHIPAKSRVIVNAWAIGRDPRLWTEAERFYPERFIERSIEYKSNSFEFIPFGAGRRMCPGLTFGLSNVEYVLAMLMYHFDWKLPKGTKNEDLGMTEIFGITVARKDDLYLIPKTVHN

SEQ ID NO: 250591 - protein, 78 aa, Glycine max
  Clone ID: PAT_MRT3847_68313C.1.pep
ILLYLFFFFFFFFLGRKQILLFSFKIKPYMARLNYFLKKGFFVLGYHNPPKKILRFLDIIRGLPHKRHSVDFPGRFFR

SEQ ID NO: 250592 - protein, 353 aa, Glycine max
  unsure (1)..(353): unsure at all Xaa locations
  Clone ID: PAT_MRT3847_68314C.1.pep
VPNVSSLIGWKDWTRFIKRMATIEGSQVNVTKEVISTVFTITARTALGSKSRHHQKLISVVTEAAKISGGFDLGDLYPSVKFLQHMSGLKPKLEKLHQQADQIMQNIINEHREAKSSATGDQGEEEVLLDVLLKKEFGLSDESIKAVIWDIFGGGSDTSSATITWAMAEMIKNPRTMEKVQTEVRRVFGGKVGRPNGSGTXNLKYLKSVVTVTXRLSPSGPLLLPRQCGQACEINGYYIPIKSKVIINAWAIGRDPNHWSEAERFYPERFIGSSVDYQGNSFEYIPFGAGRRICPGLTFGLTNVEFPLALLMYYFDWKLPNEMKNEDLDMTEAFGVSARRKDDLCLIPITFHL

SEQ ID NO: 250593 - protein, 116 aa, Glycine max
  Clone ID: PAT_MRT3847_68315C.1.pep
FLGPKTIVSPFGDPRQVPVKFPKGGFLSKALVRRGFRRVGAAVIYTFMQVGGLTNGHIISWFRFKGGASHAKAMGKKSSLPSKGKKKANGGPPQVGLLLAANKLGFFFKKPWEGFG

SEQ ID NO: 250594 - protein, 57 aa, Glycine max
  Clone ID: PAT_MRT3847_68316C.1.pep
HINTIFLISLSTNKLNDLVQDITQRKQHNNGPVMSRTQLLNMIWNTHWTPSQKPLCI

SEQ ID NO: 250595 - protein, 586 aa, Glycine max
  Clone ID: PAT_MRT3847_68317C.1.pep
MEQLVRAIKMGLFEFSPQDELEGELVYFQHRLLQNAVAKKRHIDNLIYSVAKSLPHEIDKAHQQRWDEVIVNQYLRDLREAKKQGRKERKHKEAQAVLAAATAAAAASTRALRKDNLDESMQQENLLKLDTLNGRTGACSQPMSRAKRRQKGVAVTRTSSEKYSEFCMPTSDLSKEQCKSCDICRRSEFILNPILVCSGCKVSVHLDCYRSVKETTGPWYCELCEDLSSRSSGAAAINFWEKSVVECALCGGTTGAFRKSSDGQWVHAFCAEWVFESTFKRGQIDAVEGMETLQKGVDICCICHHKHGVCMKCCYGHCQTTFHPSCARRAGLYMNVRPTGGKAQHKAYCEKHSLEQKAKAETQKHGIEELKSIRQIRVELERLRLLCERIVKREKIKRELVISSHDILAFKRDHVARSVLARSHFILPDGSSESATTSLKGNTEGYRSCSEPLQRSDDVTVDSSVSAKRRVRVAISMDTDPKLDDDCSTSQSRYNHKILDRSQFSGKKVPQRAAASRNISDEGGWRSKSRKHSETFGKELVMTSDEASMKNSMLPKGYAYVPADCLSNEKHSNEDVYASEPVEHDR

SEQ ID NO: 250596 - protein, 62 aa, Glycine max
  Clone ID: PAT_MRT3847_68318C.1.pep
WISKSRNHSDRFGKELVMTSDEASMKNSMLPKGYAYVPADCLSNEKHSDEDVYASEPVEHDR

SEQ ID NO: 250597 - protein, 386 aa, Glycine max
  Clone ID: PAT_MRT3847_68319C.1.pep
MKVTKGKETKIVLTKPFQLEGESDLEPSYRAPNLLHRLLSLLKNVRPGSDLTHFQLPPVFNFPKSQLQCYGESVYCTSSNLLSKCNNGQSPLDRFTSVVAWSISTTRPTSFGVAPYNSTLGETHHVSKGNLNVLVEQVSLNPPVSALHATDEKENIEMIWCQQPVPKFRGTSIEAQVHGKRLLKLQNHGETYEMNSPHLSIRILPVPGIDWVGNVNIRCPETGLVAEISYRSSHSFLGFGGSRKLIKGKILDSSLLKVLFEVDGHWDKIVRVKDTNSGEVRVIYDAKEAISGLKTPIIKDVESVWPTESALVWSELSQAIMNKDWERAREAKQDVEERQRNMLRDRAMKGETWFPKNFRVSYSKDTWEWDCSPTHKWVPEAPIIAQ

SEQ ID NO: 250598 - protein, 91 aa, Glycine max
  Clone ID: PAT_MRT3847_6831C.1.pep
IRHEASYNFHLLFFSNPYSISSRPSYMASMSKAMTPEIKKHACDKKDGVLYHYDPTACAEGDDYNGNINYVFAYMEGDDDDDGGYDYAPAA

SEQ ID NO: 250599 - protein, 162 aa, Glycine max
  unsure (1)..(162): unsure at all Xaa locations
  Clone ID: PAT_MRT3847_68320C.1.pep
GSSSSRSSRFRGQINAVEGMETLPKGVDICCICHHKHGVCMKCCYGHCQTTFHPSCARSAGLYMNVRTTGGKAQHKAYCEKHSLEQKAKVELERLRLLCERIVKREKIKRELVLCSHDILAFKRDHVARSVLVRSPFILPDGSSEXATTSLKGTQRDTDHAV

SEQ ID NO: 250600 - protein, 134 aa, Glycine max
  Clone ID: PAT_MRT3847_68321C.1.pep
MMTPESAEELEKHAISGHHVRGNSEYVRLAISDEPRAVETEMLQPLADSRMKSFMWWIKVFLWCFVIVVLGLVILKWGVPFTFEKVLYPIMEWEATTFGRPVLALVLVASLALFPVFFIPSGPSMWLAGMIFGY

SEQ ID NO: 250601 - protein, 165 aa, Glycine max
  Clone ID: PAT_MRT3847_68322C.1.pep
MPRAKETLSRVAVTRTSSEKYSEFCMPTSDLSKEQCKSCDICRRSEFILNPILVCSGCKVSGLSPCLFSCFCFSDLCSIVILFILQVSVHLDCYRSVKETTGPWYCELCEDLSSRSSGAAAINFWEKSVVECALCGGTTGAFRKSSDGQWVHAFCAEVNYSTLIT

SEQ ID NO: 250602 - protein, 109 aa, Glycine max
  Clone ID: PAT_MRT3847_68323C.1.pep
WGFFSAPPISCFGQFQTKNWWLDKKSVYKPLSPLRPRGNSVANPQEMFEPLFPPWGVLSFSFSSFQPPPCRSWFYWKKCWRGPSFFGQVFMVQPPFFFFGPPLMNPWQR

SEQ ID NO: 250603 - protein, 60 aa, Glycine max
  Clone ID: PAT_MRT3847_68324C.1.pep
MAAILARKSLLALRTLQLAVSGQGLHNFQNYGLPLSAQSYSTKKEDEAREPLAKEMSKGM

SEQ ID NO: 250604 - protein, 60 aa, Glycine max
  Clone ID: PAT_MRT3847_68325C.1.pep
FWRYPPPGIYLRGKADLELAPPPHKSVNKKNMAVFYHILDDLRSCSWKDKGWIVKGMFRL

SEQ ID NO: 250605 - protein, 50 aa, Glycine max
  Clone ID: PAT_MRT3847_68326C.1.pep
VIRASHIDKCHLTNIRYSCKQSTSDRTKSRRNNLIVNLLRIKLRAFSNSL

SEQ ID NO: 250606 - protein, 38 aa, Glycine max
  unsure (1)..(38): unsure at all Xaa locations
  Clone ID: PAT_MRT3847_68327C.1.pep
FXRXVVTGXAYELFXGXGCCHEXXSERXPPKIQSIVXC

SEQ ID NO: 250607 - protein, 73 aa, Glycine max
  Clone ID: PAT_MRT3847_68328C.1.pep
RQGFLSKALVKKRPVETKAAYTRKELLHLHARVRNFCIFYIFSFLFFFFFFFFFFFFGRVGGRVGGRVGGRVG

SEQ ID NO: 250608 - protein, 55 aa, Glycine max
  unsure (1)..(55): unsure at all Xaa locations
  Clone ID: PAT_MRT3847_68329C.1.pep
MSECEHHNGNNRKIFRQVIWCIVXFLFLVLTTTLLIWAILRPTTPTFSLQDVTVY

SEQ ID NO: 250609 - protein, 57 aa, Glycine max
  unsure (1)..(57): unsure at all Xaa locations
  Clone ID: PAT_MRT3847_6832C.1.pep
FMGLRXSXXLFXXSYXKIXXXXLXXXFXXXXHXXXPIXPQXXIXSSRXPXXXTRXXV

SEQ ID NO: 250610 - protein, 92 aa, Glycine max
  Clone ID: PAT_MRT3847_68330C.1.pep
QMGKGRGGPTVFIHFSPQMEREGLQPNRGKIFRGGRQYPPGGGRIIEKPPQQFKTLVKGKFWGAHGKSKKTLGVSPYQGKNFFFFFFWERGA

SEQ ID NO: 250611 - protein, 71 aa, Glycine max
  Clone ID: PAT_MRT3847_68331C.1.pep
KFCSKKEGVFFWDIGSPFLGNCVFHTKYKISHIMYPFFFAKKGFSIVGVERHRSISSSMCSVARNPLLLFF

SEQ ID NO: 250612 - protein, 57 aa, Glycine max
  Clone ID: PAT_MRT3847_68332C.1.pep
KLNANLRHSFLAAKEMDLNPMAGWEFENLKLLPLKPKTVLIKNQPQPIFYRPSRTQF

SEQ ID NO: 250613 - protein, 74 aa, Glycine max
  Clone ID: PAT_MRT3847_68333C.1.pep
EVPKKPPLVRCKGLRPVGNTSSRRPPGFPMCKAFFFSSRGLSPANQKAFGLFQLVLLAGVFTMCEKPCYAKPNE

SEQ ID NO: 250614 - protein, 72 aa, Glycine max
  Clone ID: PAT_MRT3847_68334C.1.pep
GAFGDRKFETKPLYYSLITITASDERSLSDSLISSFHSLLYPSILRLLSPITFLLLIIAFYHFNASQDQKNF

SEQ ID NO: 250615 - protein, 59 aa, Glycine max
  Clone ID: PAT_MRT3847_68335C.1.pep
LCNYKYASNVTLITTSSSTTSRSISLSLSTITVMGLQEAFDPSAETAKTVPPTQSHDAL

SEQ ID NO: 250616 - protein, 59 aa, Glycine max
  Clone ID: PAT_MRT3847_68336C.1.pep
MPISPCGCISWSVSSRHRDRARKTPSGPGEVQQGLEVSSSDYGLLSVLRSVCHPRQGHQ

SEQ ID NO: 250617 - protein, 118 aa, Glycine max
  Clone ID: PAT_MRT3847_68337C.1.pep
MSSFEQVVVIDGKGHLLGRLASIVAKQLLNGQKIVVVRAEALNISGEFFRAKLKYHAYLRKMTRYNPTRGGPFHFRAPSRIFYKAVRGMIPHKTARGAAALERLKVFEGVPPPYDTQK

SEQ ID NO: 250618 - protein, 90 aa, Glycine max
  Clone ID: PAT_MRT3847_68338C.1.pep
MAGWVSSLVLLLATLILMPQRLATYYKPIKKPPMFKPLTLTPATYKPPVYKPKPPLYKPKPPVYKSPYKTPPYKKPPYGNYPSEQDNTHS

SEQ ID NO: 250619 - protein, 58 aa, Glycine max
  Clone ID: PAT_MRT3847_68339C.1.pep
PNFVQPYKHFSSSSGIMIVAYFLIPPIKDSYPSSTTPNNLSTPIFRTRGRTRGRTRGR

SEQ ID NO: 250620 - protein, 53 aa, Glycine max
  Clone ID: PAT_MRT3847_6833C.1.pep
NVYRTYYITTSTPQVIDHSSTYSSDKRLQLLFINTSVTLFSFSCILLLDNQTT

SEQ ID NO: 250621 - protein, 199 aa, Glycine max
  unsure (1)..(199): unsure at all Xaa locations
  Clone ID: PAT_MRT3847_68340C.1.pep
KHLVQNKKKGGGGGHITINWASQPSIMILGNLALAFVNLLLKKGLNEGMDYMSIITYRQAMGGGGXSXFSXIYXREHKLEGHIICLLPLRAILGVTIPQYLFLLGLKYTSATFSCAFLNMVPVFTFIMAVPFGREXVNVQSKSGKAKVMGTFVCIGGALLLVLYKGMPLINPQSQHIANKITSTLPAAKLEKWIVGSIL

SEQ ID NO: 250622 - protein, 54 aa, Glycine max
  Clone ID: PAT_MRT3847_68341C.1.pep
NLSVSLHYTSFIHSPVRGRGHRVWCVCVSLSFSAFEELNESQNDAQNSRGVSML

SEQ ID NO: 250623 - protein, 93 aa, Glycine max
  Clone ID: PAT_MRT3847_68342C.1.pep
NFTRIEKVNVQSKSGKAKVMGTFVCIGGALLLVLYKGVPLINPQSQHIANKITSTPPTAKLEKWIIGSILLTLGCLLWSSWFIIQAKISKYTH

SEQ ID NO: 250624 - protein, 44 aa, Glycine max
  Clone ID: PAT_MRT3847_68343C.1.pep
CFLFKGYFITCNLVLHNNYNGKTRVFPAEYSKYTLRHSLRVSNS

SEQ ID NO: 250625 - protein, 172 aa, Glycine max
  unsure (1)..(172): unsure at all Xaa locations
  Clone ID: PAT_MRT3847_68344C.1.pep
SLSRHSYPINIPKPSSPQFSLVGRPSLPPPLDAISDPPPHLHGTTMENIEKSGPYEQAMGTSSFHWXYQTLIHSPPLTISTRRTXNSVRVNPEQKVPSXSTWPEVPQQTTEFIQPQHATFEGTPENPKDPAEKENHQPCDIPTLLPSHPTCIDALKGDAEQDIHYTHSEYIG

SEQ ID NO: 250626 - protein, 76 aa, Glycine max
  unsure (1)..(76): unsure at all Xaa locations
  Clone ID: PAT_MRT3847_68345C.1.pep
RSFXFWVIKATSIDLQQVLSLSEGFHMFLYYVFNTMLIMLLIFHIYWWKLICAMILRQLKNRGKVGEDIRSDSDDD

SEQ ID NO: 250627 - protein, 76 aa, Glycine max
  Clone ID: PAT_MRT3847_68346C.1.pep
NPDRECSMVCYFSCSGVVECMDLLEILIIHLCLFVCEVFQFRLYCGRYVLTVTGLSPCHFKLIVSLIMISMWMFIF

SEQ ID NO: 250628 - protein, 169 aa, Glycine max
  Clone ID: PAT_MRT3847_68347C.1.pep
EGMAGLSSLSNWNNSLPAPTSPSVGDYTHEFNRLAGVQPTNGDDIFGSQIQYPARIQVHQNVNQQLRGYPSNPYNSSVIGSPSFRVDPSGTAATMPLNPRNAAFANRSQSFVEPNMVNIDSDFPSATSTAAEPSTFSGWGPSDGKLDWSIRGDELKKPSKSSSSGFLKQ

SEQ ID NO: 250629 - protein, 154 aa, Glycine max
  unsure (1)..(154): unsure at all Xaa locations
  Clone ID: PAT_MRT3847_68348C.1.pep
ALHCLVMSLSVLFTLGLTRKSHTRDKNFWHAIXPNTPIPSSLRNLLKPSPTSIKINNHPIQIKETQYPKTFFYKEDLHPNKTIKVQFSKPPFQQPXNINTXLKKIKDTTKRKYSFEKLCIKKEXVKKEKKLYAECWGTXISVSISKLGNNMQIL

SEQ ID NO: 250630 - protein, 42 aa, Glycine max
  Clone ID: PAT_MRT3847_68349C.1.pep
GQNDQTINHCLIQRYYEPHSSHVSGDAQTGTDHARSDVRPDA

SEQ ID NO: 250631 - protein, 165 aa, Glycine max
  Clone ID: PAT_MRT3847_6834C.1.pep
EPNSNGTVNRSSRCDGCVLKLFATRPGSVFSLHLNSRRRFHRRFNAKIKMSSSDAALPSLPDNRTVVGFGMTAVDFLATVDGFPKPDDKVRSASLKVEGGGNAGNALTCAARLGLKPKLISKVADDSHGFAILKELEADGVDTSFIVVSKGGSSTFSYVLVDNQT

SEQ ID NO: 250632 - protein, 28 aa, Glycine max
  Clone ID: PAT_MRT3847_68350C.1.pep
FPLFSVSEAGSPEKVSLINSLGTLKIGY

SEQ ID NO: 250633 - protein, 36 aa, Glycine max
  Clone ID: PAT_MRT3847_68351C.1.pep
FRWHVHISLSYLARGRRSGSFRATPGKCFCSLFVNS

SEQ ID NO: 250634 - protein, 37 aa, Glycine max
  Clone ID: PAT_MRT3847_68352C.1.pep
YPNQLKGCKARFAGSYMLTPQHSGVPRDVNYVYILVF

SEQ ID NO: 250635 - protein, 103 aa, Glycine max
  Clone ID: PAT_MRT3847_68353C.1.pep
GARDPRAGRARWRLVYAPQIPSLVSVDPTADPLKSLASNISFGTEVEVQLGKRLRATIVRQMKESEMAKQWTLSYLLTSRLRVLLQSAASKRLLFEYSATSQD

SEQ ID NO: 250636 - protein, 47 aa, Glycine max
  Clone ID: PAT_MRT3847_68354C.1.pep
SLITLGAYWIARESYICKLYVSIWPSCRYARSLDCSGLPCSVCCRIT

SEQ ID NO: 250637 - protein, 88 aa, Glycine max
  unsure (1)..(88): unsure at all Xaa locations
  Clone ID: PAT_MRT3847_68355C.1.pep
WGLNVANMFVFFGKTGAPVFXEFIFGTPKPLIFKGVVFNGSKGILRGPGSSPKKDVVPHEGPLVASLSETTGAKIPHPFKGLSKSGAM

SEQ ID NO: 250638 - protein, 311 aa, Glycine max
  unsure (1)..(311): unsure at all Xaa locations
  Clone ID: PAT_MRT3847_68356C.1.pep
KSFLYLHPSIGTAQWPQDLLVKAIEAIVVPKTCPKDQQSKSRPQKELDFIFPWCHSINTKFSYYNNYSGTQPNCLCNACRXYWTEGXTTFNIPVGGASKKKSYSSSKVSSHYHNHLKHHSLHSHILSEFVQELYKVWHTQNPNSNNAIHQCQDLNLAFPSSTPDFRKISELVQQNNNNNNSSNNSMSASASSSSTTTTTSTSHLSALELLTGITSSSSAGLTSFMPVPVPSDPNSIYTCGFPLQDFKPTLNFSLDGIGNGYTSLQNVQSGRLLFPSDDLRQVSSSTITTMDQKQQGDSTGYWTGMLGGGSW

SEQ ID NO: 250639 - protein, 64 aa, Glycine max
  Clone ID: PAT_MRT3847_68357C.1.pep
LKCDTAVIIYLEVSIGPHFSTAQIISRQLSPILSVRHLVQERISALPYLSLFRDLWSVPQHIVP

SEQ ID NO: 250640 - protein, 289 aa, Glycine max
  Clone ID: PAT_MRT3847_68358C.1.pep
AKRIASGNFGSCPIFLFFSVNASGQFCGVAEMIGPVDFNKDMDFWQQDKWSGSFPVKWHIIKDVPNANFRHIILENNENKPVTNSRDTQEIMYSKGLEMLKIFKNHNLKTSLLDDFMYYENRQKIMQEEKAKLLIRSFKNPLVLPTLEPPRKLNFVVDIPPVSVEKKAKMDDEFDSLKQTSSAGHIVSSSEVTSTASVDEKAEKGSVEKEDIASVLKIGSVTITPKQVETKPSGISVANKEPLDVITVGSMQVKVNGFAESSGLLKIGSIPLDPRTLQLDGGTRVKNGS

SEQ ID NO: 250641 - protein, 114 aa, Glycine max
  unsure (1)..(114): unsure at all Xaa locations
  Clone ID: PAT_MRT3847_68359C.1.pep
DYCKAENESXPLAPKQAIALNPQNLPLSLTAMESPGTNRSKTRRRITLTSKQSPEESPRPLQRPGATRQPKTARRTATPPTQPQRTGAPPQTTPGQRSPENRSSRDAGGDRAKK

SEQ ID NO: 250642 - protein, 242 aa, Glycine max
  Clone ID: PAT_MRT3847_6835C.1.pep
KYTRSLKVIVLPRIPVIVSQDRSKLRIQRQRRSRSRIQNRMNNPLPTDYRILDLHAVVSHHSITMPSPSADQSQSQPKPNPNLLSLFLKPIIMLLLTSLFFLFLGFAAFLLLNLFLLGGAFHRLRFRPSVTSAPASSIGLPPRDINNLPRFLVANGSATRPDSNCVVCLDAFHNAQWCRKLAACGHVFHRRCVDTWLLKVAACPTCRTPVGFNAGATVHDPPQRSDHLHTCGTDSNALTTLL

SEQ ID NO: 250643 - protein, 82 aa, Glycine max
  Clone ID: PAT_MRT3847_68360C.1.pep
LKRWRTTKDDSNKIWSKGRNFFIQPGPIQRFSMSMDESDVSKLESLITPKIKRVSFRDSVKLCTYEDMPETTTVDAIDDKRT

SEQ ID NO: 250644 - protein, 164 aa, Glycine max
  Clone ID: PAT_MRT3847_68361C.1.pep
RGPNFQDRNCGAHFFSPAHVMPLLEIVRTKQTSAQVVVDVLDISKKIKKTPVVVGNCTGFAVNRMFFPYTQAGLFLVEHGADVYQIDRVITKFGMPMGPFRLVDLVGFGVAIATGMQFIQSFPERTYKSMLIPLLQEDKRAGKAKLCINLNWNSDEISVWNIFM

SEQ ID NO: 250645 - protein, 53 aa, Glycine max
  unsure (1)..(53): unsure at all Xaa locations
  Clone ID: PAT_MRT3847_68362C.1.pep
ITKIPLQKNNLQLFPINYPFITTXYITYIFKYNTIHXQXKHFYIKLNNSNTLL

SEQ ID NO: 250646 - protein, 354 aa, Glycine max
  Clone ID: PAT_MRT3847_68363C.1.pep
MAPVPLAEKLVLVSDMASTMKQVPSNFIRPLGDRPNLQGVVQSSDVCIPLIDLQDLHGPNRSHIIQQIDQACQNYGFFQVTNHGVPEGVIEKIMKVTREFFGLPESEKLKSYSTDPFKASRLSTSFNVNSEKVSSWRDFLRLHCHPIEDYIKEWPSNPPSLREDVAEYCRKMRGVSLKLVEAISESLGLERDYINRVVGGKKGQEQQHLAMNYYPACPEPELTYGLPGHTDPTVITILLQDEVPGLQVLKDGKWVAVNPIPNTFVVNVGDQIQVISNDKYKSVLHRAVVNCNKDRISIPTFYFPSNDAIIGPAPQLIHHHHHPPQYNNFTYNEYYQNFWNRGLSKETCLDIFKA

SEQ ID NO: 250647 - protein, 30 aa, Glycine max
  Clone ID: PAT_MRT3847_68364C.1.pep
TSKYPNPMCSLHTNHHCCLNTNYFSLTEFS

SEQ ID NO: 250648 - protein, 181 aa, Glycine max
  Clone ID: PAT_MRT3847_68365C.1.pep
MIIPEKNRKEICKYLFQEGVCFAKKDFNLAKHPEIDVPNLQVIKLMQSFKSREYVRETFAWMHYYWFLTNDGIEFLRTYLNLPSEIVPATLKKQAKPAGRPFGGPPGDRPRGPPRFDGERRFGGDRDGYRGGPRGPGGDFGDKGGAPADYRPSFGGGPGGRPGFGRGSGGYGAPTSSNIPS

SEQ ID NO: 250649 - protein, 182 aa, Glycine max
  unsure (1)..(182): unsure at all Xaa locations
  Clone ID: PAT_MRT3847_68366C.1.pep
MIIPEKNRKEICKYLFQEGVCFAKKDFNLAKHPEIDVPNLQVIKLMQSFKSREYVRETFAWMHYYWFLTNDGIEFLRTYLNLPSEIVPATLKKQAKPAGRPFGGPPGDRPRXGPPRFDGERRFGGDRDGYRGGPRGPGGDFGDKGGAPADYRPSFGGGPGGRPGFGRGSGGYGAPTSSNIPS

SEQ ID NO: 250650 - protein, 513 aa, Glycine max
  Clone ID: PAT_MRT3847_68367C.1.pep
MSPLIVALATIAAAILIYRIIKFITRPSLPLPPGPKPWPIVGNLPHMGPVPHHSLAALARIHGPLMHLRLGFVDVVVAASASVAEQFLKIHDSNFSSRPPNAGAKYIAYNYQDLVFAPYGPRWRLLRKLTSVHLFSGKAMNEFRHLRQEEVARLTCNLASSDTKAVNLGQLLNVCTTNALARAMIGRRVFNDGNGGCDPRADEFKAMVMEVMVLAGVFNIGDFIPSLEWLDLQGVQAKMKKLHKRFDAFLTSIIEEHNNSSSKNENHKNFLSILLSLKDVRDDHGNHLTDTEIKALLLNMFTAGTDTSSSTTEWAIAELIKNPQILAKLQQELDTVVGRDRSVKEEDLAHLPYLQAVIKETFRLHPSTPLSVPRAAAESCEIFGYHIPKGATLLVNIWAIARDPKEWNDPLEFRPERFLLGGEKADVDVRGNDFEVIPFGAGRRICAGLSLGLQMVQLLTAALAHSFDWELEDCMNPEKLNMDEAYGLTLQRAVPLSVHPRPRLAPHVYSMSS

SEQ ID NO: 250651 - protein, 116 aa, Glycine max
  unsure (1)..(116): unsure at all Xaa locations
  Clone ID: PAT_MRT3847_68368C.1.pep
MYQFCLKLSLLISLFHLSFAARRLKQLHQDQSQLLHYHNDPNLYGXNVLNLIWYDHFKPCQTAIIIDDGTXLAYSSSHSSQSCRATWSKTTDKYYHLYSKNKNAASSLDLSLGDQF

SEQ ID NO: 250652 - protein, 99 aa, Glycine max
  Clone ID: PAT_MRT3847_68369C.1.pep
AISTVRSGPPSLRKRRPPSTGSVLAFVGVSSRPPSLNLFSTNPLSVRSALNENGFLAEIEGTGTAPQGLLALGGRSLPNNPVVGLGLFCIKNKDSLKKY

SEQ ID NO: 250653 - protein, 67 aa, Glycine max
  Clone ID: PAT_MRT3847_6836C.1.pep
VEHKVVANNKMERYSIAYFLCPSYSTVINGCKGPSVYRKFTFGEYRHQIQEDVKKIGHKIGLSRFLL

SEQ ID NO: 250654 - protein, 99 aa, Glycine max
  unsure (1)..(99): unsure at all Xaa locations
  Clone ID: PAT_MRT3847_68370C.1.pep
VXXAXVXHXXXYXPLGQLXXYSXXGXAXXSTSXVLXSXSVPAXNXXXLQTYXDEHXXHXLLVLAXSVSLXNXLXSFSXVLKNXFXXXSSRIPSLRTRAX

SEQ ID NO: 250655 - protein, 80 aa, Glycine max
  Clone ID: PAT_MRT3847_68371C.1.pep
GTSKKAGGNRKPAQRHDLERRGARESRAVPAPDANAELPLSMQRQSQAQSKSRSEKVNPHLEEASGFPIAPPRPSQAAEA

SEQ ID NO: 250656 - protein, 323 aa, Glycine max
  Clone ID: PAT_MRT3847_68372C.1.pep
MLRIAPKFFTTVPLRTISPFACRFSVRSIADSSPFNKIRIQRDDTVSHNHNPFKGLRIAPKFFTTVPLRTISPFACRFSVRSIADSSPFNKIRIQRDDTAFDAYVVGKNDAPGIVVLQEWWGVDFEIKNHAVMISQLGRGFKALIPDLYRGKVGLDVAEAQHLFDGLDWQGAVKDINASVNWLKANGSKKAGVTGFCMGGALAIASSVLVPNVDATVAFYGVPSSELADPAQAKAPVQAHFGELDNFVGFSDVTAAKALEEKLKASGVPHEVHIYPGNGHAFMNRSPEGIKRRKNMGMPDEDEAAVQLAWSRFQSWMTHYLSS

SEQ ID NO: 250657 - protein, 84 aa, Glycine max
  Clone ID: PAT_MRT3847_68373C.1.pep
IIYIHLRWPEEATHPPTVNAGLPEFIYSSISKFAGSGDGLDYSMLTNDGASSPSGLISGFIPHAAGLYGSVWMRATMFGGHLSA

SEQ ID NO: 250658 - protein, 57 aa, Glycine max
  Clone ID: PAT_MRT3847_68374C.1.pep
VCTCRVSTCSTNGRECKVCWRCHCPRRLFITVRCRVRISLRTGMIVMTVQKRNQQLL

SEQ ID NO: 250659 - protein, 180 aa, Glycine max
  Clone ID: PAT_MRT3847_68375C.1.pep
MASKFKSVSSIRKITHLSGDMDQEDANGGRASLDNYSVHIPPTPDNQPMEISLERSNSRRVEDQYASSSLFTGGFNQLTRAHLKDKVTESESSHPQMAGAKGSSCAVPGCDGSLMTKERGLDVVPCECNYKICRDCYMDALRAGEGICPGCKDPYKEPEVQGGVANSQALPLPPPPGANK

SEQ ID NO: 250660 - protein, 46 aa, Glycine max
  Clone ID: PAT_MRT3847_68376C.1.pep
SNPVPRSLKRGEKRTYTKQSVKNKKHWKLESWLVDHQYVVLGESIS

SEQ ID NO: 250661 - protein, 95 aa, Glycine max
  Clone ID: PAT_MRT3847_68377C.1.pep
YGVTTSTNAELYRCDRFDLSKDEEERFAHNNDNDGSFLFQFPLLRTFSKHCHASSSSSTYSSSPTLSFTSTLCLKERKSLRRLFLCIRKWELVCA

SEQ ID NO: 250662 - protein, 139 aa, Glycine max
  Clone ID: PAT_MRT3847_68378C.1.pep
MASKFKSVSSIRKITHLSGDMDQEDANGGRASLDNYSVHIPPTPDNQPMEISLERSNSRRVEDQYASSSLFTGGFNQLTRAHLKDKVTESESSHPQMAGAKGSSCAVPGCDGSLMTNERGLDVVPCECNYKICRDCYMD

SEQ ID NO: 250663 - protein, 64 aa, Glycine max
  unsure (1)..(64): unsure at all Xaa locations
  Clone ID: PAT_MRT3847_68379C.1.pep
MIMMTMDGMMDEGVLDHLIRKLLERKGRKQVQLSESEIRXLQVNAQEIFLSQPILLDLRALIRN

SEQ ID NO: 250664 - protein, 93 aa, Glycine max
  Clone ID: PAT_MRT3847_6837C.1.pep
RGSAAVLNFPVEKVKESLRDMNCTLSQLDGSSPVVALKRRHSLGRKMAAKKKKVEETHGDVRLENVVVLEDLGAEYLEHLLMMSSHDTTSCSW

SEQ ID NO: 250665 - protein, 88 aa, Glycine max
  Clone ID: PAT_MRT3847_68380C.1.pep
LVSRKASACSSLLNFNNFAVTLLLSFSQFHIFTTFLQILCFSLWDMEIVFTCDLGLILILRLWGYGSQENMFCGALMLFDEMPHCRDI

SEQ ID NO: 250666 - protein, 165 aa, Glycine max
  Clone ID: PAT_MRT3847_68381C.1.pep
MSVLPSMELPTTDVDLEPKKIEPEKNEGPLFHCDFCDTEVVHKLAQMFLPGLACACVDNTTGGPFKTPGSVAVDLRKEMIEFVTQKSESFVAESVILEGGPDGGALEHPFDIICYFVDEFVSSKRNLLSQVSGWLLSDKREDKIDDFVQEMEMNGFWPLDRRETL

SEQ ID NO: 250667 - protein, 98 aa, Glycine max
  unsure (1)..(98): unsure at all Xaa locations
  Clone ID: PAT_MRT3847_68382C.1.pep
NRTDWVFSKYFQIVKTCDRAQDVNHGLNXDKAGDTAVVQKTLEASLQQTDAVLSQANLPTSEIAASINEYRXSRHLDELTEXCEASEGSLGLWIIIGL

SEQ ID NO: 250668 - protein, 40 aa, Glycine max
  Clone ID: PAT_MRT3847_68383C.1.pep
SPRPCCRHITLFLVAVAHYIICQDAVYYGAGYVDTSANYI

SEQ ID NO: 250669 - protein, 132 aa, Glycine max
  Clone ID: PAT_MRT3847_68384C.1.pep
GGTASGLCVLARLCTGGSFAVSGFLASLWTRGSIAVANVRATFRSCGSIGVDHVWASFTTCGWRVGGFYWGSYFLVLGGRCPFVVRPDGELIDVDVLENAGWGGDLGFKSLASARYGMAVSVTFWTVGRGVG

SEQ ID NO: 250670 - protein, 35 aa, Glycine max
  unsure (1)..(35): unsure at all Xaa locations
  Clone ID: PAT_MRT3847_68385C.1.pep
XXLWNCSAVNARNQLELVVGFILSLYSCXVGXLVK

SEQ ID NO: 250671 - protein, 41 aa, Glycine max
  Clone ID: PAT_MRT3847_68386C.1.pep
YLDIKEHIMTPKYKGATWTQYSCLHFHSISSHLIKLERNII

SEQ ID NO: 250672 - protein, 57 aa, Glycine max
  Clone ID: PAT_MRT3847_68387C.1.pep
MDAHMTDLDWETFSDGSSSEDQEDIDFQYGRQARSILSSLEESIGRIDDFLSFERAF

SEQ ID NO: 250673 - protein, 72 aa, Glycine max
  Clone ID: PAT_MRT3847_68388C.1.pep
GVFPTVQLFCQQVLYTQVWFVIAPPVNSKGLCSVPCKMMLYPRSGWGFISVIGTFSCLFSFSISLWLLGNIC

SEQ ID NO: 250674 - protein, 50 aa, Glycine max
  unsure (1)..(50): unsure at all Xaa locations
  Clone ID: PAT_MRT3847_68389C.1.pep
KKESYSNKFLQQVPFYFILSVRDTXXXALSRVVFFXIQNPKVEDKILREI

SEQ ID NO: 250675 - protein, 72 aa, Glycine max
  unsure (1)..(72): unsure at all Xaa locations
  Clone ID: PAT_MRT3847_6838C.1.pep
STRXXXIRTIGHRAEFKSQXRXXTVRWXMXXXXXVRIRARSARXPXVRLPTRQLGXFCXLKARAVGXPREXX

SEQ ID NO: 250676 - protein, 97 aa, Glycine max
  unsure (1)..(97): unsure at all Xaa locations
  Clone ID: PAT_MRT3847_68390C.1.pep
LVSDITGLLESSANAKTAKCVVHFFCLLSLLTARFILSIYLSLLTIQCILDENTTYLLNISLMHYRTEYPHQVHLLWFLPIALXFPCFFSLRSVEFL

SEQ ID NO: 250677 - protein, 58 aa, Glycine max
  unsure (1)..(58): unsure at all Xaa locations
  Clone ID: PAT_MRT3847_68391C.1.pep
NLCILFNFXPIQIAFFKEKIKIGSLLTKGFNCQIRPVPVWNSSYWFIELKGISQDERI

SEQ ID NO: 250678 - protein, 56 aa, Glycine max
  Clone ID: PAT_MRT3847_68392C.1.pep
KACMMTIVEIRTSCFWGGCSHNYIYGCTTLMGPSTHHAPSDALSLKPAINYIYLSS

SEQ ID NO: 250679 - protein, 154 aa, Glycine max
  Clone ID: PAT_MRT3847_68393C.1.pep
MRKYDGHEAETVRDYSDGVTEHFQFEVIKGCAVILELLAIEKEYQQLVVDAGALPCLVDWLRMQKISTIAQPLIDLLKRVADAITSLAHENTGIKTLVRMEGGIAPLVELLEFNDIKVQRAAARALRTLAFNNDANKNQIVECNALPTFVLMLP

SEQ ID NO: 250680 - protein, 187 aa, Glycine max
  Clone ID: PAT_MRT3847_68394C.1.pep
TSYSQRAQWLRAAVLGANDGLVSVASLMMGVGAVKKDISAMLLAGFAGLVAGACSMAIGEFVSVYTQYDIEMTQIKREREANNNRGVNEETQREKLPNPFQAALASALAFSVGALVPLIAAVFIRNHKIRMGVVAAAVSLALLVFGGVGAVLGKTPVTRSCLRVLVGGWMAMAITFGLTKLIGSADL

SEQ ID NO: 250681 - protein, 92 aa, Glycine max
  unsure (1)..(92): unsure at all Xaa locations
  Clone ID: PAT_MRT3847_68395C.1.pep
MKWTNWEPHSWKLIFPKKVGGPNNGFKMXSSEGANQNSWHLSFLIDNPKQXTVFYILLEISKDFEMAGNTLRPAFFVPQAAARFFENGESSA

SEQ ID NO: 250682 - protein, 238 aa, Glycine max
  Clone ID: PAT_MRT3847_68396C.1.pep
MKRTPILFPLFFLLCAFTSYLPSATADDDHVYDTDGDKLQYGVNYFVLPVIRGNGGGIQVAKAGNETCPLTVVQSGNELSEGLPIKIASRSAGVAFITQGQLFKSIQFGVFPSTLRPGCPPSPIPSKWDPPSKWTIVEGLPERGLAVKLVGYQNRVSGWFSIVKVADDASSSSVGYKLVFCLWPEEEVMIHLCKNVGIRTDGKGIRRLVLSENTPLVVQFQKFRSALALNNHVLSASE

SEQ ID NO: 250683 - protein, 57 aa, Glycine max
  Clone ID: PAT_MRT3847_68397C.1.pep
VSEMLTYVVLCSIGIKCQWCIWYSRCMFLMLHSYQMFTSNVLYDNVLAYVSASLQNC

SEQ ID NO: 250684 - protein, 36 aa, Glycine max
  unsure (1)..(36): unsure at all Xaa locations
  Clone ID: PAT_MRT3847_68398C.1.pep
GYNGPCSAYRNKVTRLXFLWKNIKKTYLMLFIYQCI

SEQ ID NO: 250685 - protein, 113 aa, Glycine max
  unsure (1)..(113): unsure at all Xaa locations
  Clone ID: PAT_MRT3847_68399C.1.pep
GRFVIAWVNPRGRDQQSSFLFFGLFLGRQKKGSVIFSINYLFAGRGRPTKEFVIXYKAMFLFPGGKSAVYTNLPSLACPSFMTKVSLFFIFFFLPLIVLLSTHPFPPFFCFNN

SEQ ID NO: 250686 - protein, 158 aa, Glycine max
  Clone ID: PAT_MRT3847_6839C.1.pep
MALAWNLVITLILLLLQQSCFLVTFASSNVHIVYMGDRMSQSEQQLVEDSHLDILLRILGSKVAARRSILYSYKHGFSGFAAVLSQPQAKLIADFPGVVRVIPNKILSLHTTRSWDFLHVKQDIVTGALSRGQSGRGTIIGIMDTGIWPESESFRDEH

SEQ ID NO: 250687 - protein, 45 aa, Glycine max
  Clone ID: PAT_MRT3847_683C.1.pep
HKPTDVFLLTQSTHSNINFIDNKNNKSSTYFFLISEKSNNKNSKK

SEQ ID NO: 250688 - protein, 54 aa, Glycine max
  Clone ID: PAT_MRT3847_68400C.1.pep
RRVSSDTHSLSVEMAASSSSSRLAFSLGLPRRLHQHRLRSRMSILLGMKASRSI

SEQ ID NO: 250689 - protein, 96 aa, Glycine max
  Clone ID: PAT_MRT3847_68401C.1.pep
MPSSPESIFLEDFGQTVDLTRRIREVLLNYPEGTTVLKELIQNADDAGATTVSLCLDRRSHPAGSLLSDSLAQWQGPALLAFNDAVFTEEDFVSIS

SEQ ID NO: 250690 - protein, 87 aa, Glycine max
  unsure (1)..(87): unsure at all Xaa locations
  Clone ID: PAT_MRT3847_68402C.1.pep
RTGVRRRQKGGLVFNPYETKVAGISGEATPPPHRKWNFYKIQFFVNWYDPSTGAALNFTNQAKRLFTFMXPFVIKNPKSAYSNYSGL

SEQ ID NO: 250691 - protein, 247 aa, Glycine max
  unsure (1)..(247): unsure at all Xaa locations
  Clone ID: PAT_MRT3847_68403C.1.pep
LAKAISKLEDEFRQLLLSYSKPVEPERLFDCLPNSMRPSSPGHEGDPSGKNHHSESHNNNAEAVVYTPPALIPPRFLPLLHDLAQQMVEAGHQQPLLKIYRDARSHVLEESLQKLGVEKLNKDDVQKLQWEILEAKIGNWIHFMRIAVKLLFAGERKVCDQIFEGFDSLSEQCFAXEVTTNSVSMLLSXGEAIAKSKRSPEKLFVLLDMYEIMQELHSEIETLFKGKACSXIREAATSLTKRLAQTA

SEQ ID NO: 250692 - protein, 97 aa, Glycine max
  Clone ID: PAT_MRT3847_68404C.1.pep
KVLETIPLITNGFKPPPNHEAKGQGFFLLNWEELQGFFFSQIFSQKKKPFFLPQEALLFPNFDPLYDKRLLPSPPQGIFFPPENPCKKFLSHPQTPP

SEQ ID NO: 250693 - protein, 48 aa, Glycine max
  Clone ID: PAT_MRT3847_68405C.1.pep
SSIQGGIRFPSFRFMGPKWQPWAPKLNPLALGNFIRVFRVNLRGGEKI

SEQ ID NO: 250694 - protein, 71 aa, Glycine max
  Clone ID: PAT_MRT3847_68406C.1.pep
MDDALKRVVMEHDRMVERYADIQDRYDDLVTKHDATMEGIAEVKKAAAIASDEGHARFGKSLCPKLFASRE

SEQ ID NO: 250695 - protein, 71 aa, Glycine max
  Clone ID: PAT_MRT3847_68407C.1.pep
IFIIFILFFFFFFFFFFFCTKHISFAFCLLLLVATVHSYNEASCLRRHRKQLNIIGFIFMIMIMILILVRC

SEQ ID NO: 250696 - protein, 95 aa, Glycine max
  Clone ID: PAT_MRT3847_68408C.1.pep
EESNPKDGIDQKILILKINCIFRYWRIAQKHNWHIYSFQFADIRKGYSQNKILRERRQIPKVPFLTQLISFATNELQKEFATGRNILKQNLKKKN

SEQ ID NO: 250697 - protein, 58 aa, Glycine max
  Clone ID: PAT_MRT3847_68409C.1.pep
GEKKMGPTVMGEYYLLAPPCDPLFKELNFRLDLGLSKPHGNFFTLWSSPVNWHPLFGN

SEQ ID NO: 250698 - protein, 86 aa, Glycine max
  Clone ID: PAT_MRT3847_6840C.1.pep
MNPSLVNNSSPTHPRWRKVAYGGMQPGYDDNHTDESFLEGMVMNASVVKRDMLKVMLDSVSISEYLCIVALVVLVWTCTLASTIDE

SEQ ID NO: 250699 - protein, 72 aa, Glycine max
  unsure (1)..(72): unsure at all Xaa locations
  Clone ID: PAT_MRT3847_68410C.1.pep
XXHNLIXYTKXGXNXAXXNXXXXIXXSQGNTGDYXNXPGXQELXXQLSAXNRXGXLPASKSXSMXCXPXXIX

SEQ ID NO: 250700 - protein, 65 aa, Glycine max
  Clone ID: PAT_MRT3847_68411C.1.pep
SSNIHKIILIISLTNNVSSAYYNYETTYTITATLNMLKLNPNSDALLINYATRRKRKGARKSLLA

SEQ ID NO: 250701 - protein, 22 aa, Glycine max
  Clone ID: PAT_MRT3847_68412C.1.pep
MSCCGGNCGCGSSCKCGNGCRR

SEQ ID NO: 250702 - protein, 76 aa, Glycine max
  Clone ID: PAT_MRT3847_68413C.1.pep
MKWRKETQRLLPYYSSPIHHIRYARDATKGDNLTTDTVDAAGMATFMLLLLLHGMLILDLGGGATLLAVDLVLDLV

SEQ ID NO: 250703 - protein, 81 aa, Glycine max
  Clone ID: PAT_MRT3847_68414C.1.pep
MTEEHENGANASEEEQPIGPGPAPRARPKRPLQFEHAYLDVLPSANMYEKSYMHRDVVTHVAVSAADFFITGSADGITCSS

SEQ ID NO: 250704 - protein, 123 aa, Glycine max
  unsure (1)..(123): unsure at all Xaa locations
  Clone ID: PAT_MRT3847_68415C.1.pep
PCVYETGGECPVAYNPYCINEDQAFFASKGKXTCSWYLCITCDRNACYLCYSCTLYLSTEGIKDSXSKGVAGIKGLRETCMRTVLLTGQNAQGNYGRQIYFDDLNRWDYVFNDYYLDLIDILS

SEQ ID NO: 250705 - protein, 149 aa, Glycine max
  Clone ID: PAT_MRT3847_68416C.1.pep
METQSQSNIPNPNPNPNPNPNPNPNPNPHRNNSVASSMPLRPTIDGPLGLSEEESVGYARRFYTFWFALLPFLWSVNCFYFWPALRHSHSFPCIRPYVVGSAIGFAVFATLLSSWALTFAIGGERLFGPVWDQLVMYNLADRLGLTGWS

SEQ ID NO: 250706 - protein, 101 aa, Glycine max
  Clone ID: PAT_MRT3847_68417C.1.pep
ETFVRALCHRNTFFINCYRDIPYRLDPCRFIYQDRGLIRVSHGTTCAIVVTRFLCHGTSVPDLEAICWTLSSRAITCNKQHDRKYLVQQFHMIRVFKGCCI

SEQ ID NO: 250707 - protein, 241 aa, Glycine max
  Clone ID: PAT_MRT3847_68418C.1.pep
ARGEGNLSVIPDVKEWIVDLEVVSLGGNRIKEIPEGISPNCPRLSTLILSGNCIGHIPEGFFIHMNALTVLNISYNDFLTSLPHSLSNLRSLLQALSRLDISGCSIRQVPEGLKNLINLKWLDMSINEHLTLAHTCSLPGLTNLQYLDLRCDSAIIAEDVQGMSMLECFGGIFLGKDNYNSYVQEILDRGHGPKTYDIHVEDVRDLIFAFDIDDPVSLYEDHQNVRFWQCEGLLYLLPRDL

SEQ ID NO: 250708 - protein, 56 aa, Glycine max
  Clone ID: PAT_MRT3847_68419C.1.pep
FKSGYISQQVGAVEALSGVGACTVMGTARHLEVREPMHTVTALHFPPYPSQRHNST

SEQ ID NO: 250709 - protein, 64 aa, Glycine max
  Clone ID: PAT_MRT3847_6841C.1.pep
TPARRSSCQTAFQEHGEIEEGAEIYDKGTGKSRGYGFITFKNMESTQQALRAPNQLIDGRLAVC

SEQ ID NO: 250710 - protein, 165 aa, Glycine max
  unsure (1)..(165): unsure at all Xaa locations
  Clone ID: PAT_MRT3847_68420C.1.pep
QRILQENEEREKSEWLSFLQLIYIYTLVVQYFSIFCASTLYLQTRSIVVFVINSHIVSTAAFSSSRWNYERWGGFDXPISSRNAKPPGVELWAVLDVPVHXVGASWKNLSHSLSGLFCASINFMESSTTYSTPELAFQSALGSLRYGTLPREIDKVWVPLPDEIL

SEQ ID NO: 250711 - protein, 62 aa, Glycine max
  unsure (1)..(62): unsure at all Xaa locations
  Clone ID: PAT_MRT3847_68421C.1.pep
FKVELVACRPRKGSRLGSXSKERARLYXLKKQKKLAFSSKGGGKKKREEAKPVASARVQPKF

SEQ ID NO: 250712 - protein, 249 aa, Glycine max
  Clone ID: PAT_MRT3847_68422C.1.pep
MSNFSSWYSRFRFSAKYLYCYHRTLHKNAPSTIFNNHGTRKNAWPTSLLPLALAVSAGSLALQPHFNPSFCDTDDRGVGVGGKGSTQYVVKGSQKEFPRELLQDLKIVCQDNISLDYDERYIHGKPQNSFHKAVNIPDVIVYPRSEEEVSKIVKLCNSHKVPIVPYGGATSIEGHTLSPHGGVCIDMSLMKRVKELHVNDMDVVVEPGIGWMELNEYLEPYGLFFPLDPGPGASIGGMCATRCSGSLAG

SEQ ID NO: 250713 - protein, 349 aa, Glycine max
  unsure (1)..(349): unsure at all Xaa locations
  Clone ID: PAT_MRT3847_68423C.1.pep
MEAIKKMNYRGWRSKVIDITYSKECGKRGLDEALDRMCAEAHDAINEGYTTLVLSDRAFSKKRISVSSLLAVAPVHQHLVKNLERTRVALIVESAEPREVHHFCTLVGFGADAICPYLAVDAIWRLQVDGKIPPKASGEFHSKDELVKKYFKASNYGMMKVLAKMGISTLASYKGAQIFEALGLSSEVIAKCFAGTPSRVEGATFEMLARDAFQLHELAFPSWVFSPGSAEAVALPNPXDYHWRKGGEVHLNDPLAMAKLHEAARSNSVDAYKQYSKLIHELNKACNLRGLLKFKETAVKIPIDEVEPASEIVKRFCTGAMSYGSISLEAHTALAMAMNKMGGKSNTGE

SEQ ID NO: 250714 - protein, 59 aa, Glycine max
  Clone ID: PAT_MRT3847_68424C.1.pep
YPNLFFPTLPAIIMDLCFPPKFSSFVGSNHILLLPFLISGGLDDHVLLFWQTYFFKILS

SEQ ID NO: 250715 - protein, 61 aa, Glycine max
  Clone ID: PAT_MRT3847_68425C.1.pep
GEKKRLQPWPFNPRRGPPHNPQGLFCSPKPFWHPGETFPPGKQKLERTKSFYLNFKQKAPP

SEQ ID NO: 250716 - protein, 74 aa, Glycine max
  Clone ID: PAT_MRT3847_68426C.1.pep
RGVQASPLTCLQSHGQFSWRAPRSITYFSCKVCPVTFSMSTVGSVHDRVNQEITGSNRAACCPSGAQQHSRGSS

SEQ ID NO: 250717 - protein, 129 aa, Glycine max
  Clone ID: PAT_MRT3847_68427C.1.pep
DNNFAKQTWLINAREEAINWILKVHAYYSFKPETAYLSVDYFNRFLLSHTFTQDKAWPLQLLSVTCLSLAAKMEESKVPLLLDLQVIESRFLFKPKTVQRMELLVMASLKWRLRTITPFDFVHLFIFKL

SEQ ID NO: 250718 - protein, 60 aa, Glycine max
  unsure (1)..(60): unsure at all Xaa locations
  Clone ID: PAT_MRT3847_68428C.1.pep
LRRXAGAWGARTTSMGRRSKRLHPXVSXGVQSAXSVITTXXNGGVRGSVSWSREHGVTRH

SEQ ID NO: 250719 - protein, 64 aa, Glycine max
  unsure (1)..(64): unsure at all Xaa locations
  Clone ID: PAT_MRT3847_68429C.1.pep
MSNTCGNCDCADKTSCTKGNSYGVIGETEKKYLXTGGMDVPTAEHEGKCKGGTNWTCTDWNWGH

SEQ ID NO: 250720 - protein, 64 aa, Glycine max
  Clone ID: PAT_MRT3847_6842C.1.pep
REEAEGRKWTKWCYMIESPFIFKLKICVLVIILEKKQTFEINFDVLEEGRRKRQKRVDRVVLHD

SEQ ID NO: 250721 - protein, 105 aa, Glycine max
  Clone ID: PAT_MRT3847_68430C.1.pep
MKVKKCWLAVQVEEETEEAGGVGSQRFVIPISYLCHPLFKHLLDKAYEVYGYHTEGPLKLPCSVDDFLHLRWRIQQESSTHHHHNHNHNHHHHRQLPHALYFHAC

SEQ ID NO: 250722 - protein, 53 aa, Glycine max
  Clone ID: PAT_MRT3847_68431C.1.pep
LLIYPHHNPQLIDHDWLRTHHKSVARQSCVIVSSSQAQSIGNAFKPCIRLKQF

SEQ ID NO: 250723 - protein, 45 aa, Glycine max
  Clone ID: PAT_MRT3847_68432C.1.pep
REGPLLVVACGRDTISTASSTKRLASENVFVVQVLVSLVCRFLVA

SEQ ID NO: 250724 - protein, 55 aa, Glycine max
  unsure (1)..(55): unsure at all Xaa locations
  Clone ID: PAT_MRT3847_68433C.1.pep
TLFGIRWFIIXPCFGSKGTDDRASNHTVIPLLRSARXRLGISQRDDSDSRDKEKV

SEQ ID NO: 250725 - protein, 87 aa, Glycine max
  Clone ID: PAT_MRT3847_68434C.1.pep
FSRIGRLSGNKGYVKADFCYEYTTPGGCQRGQDLPKCRNPGDLFVKKSLFPDYENVTFEMNPAFGYSDCEASCWSNCSCGWIQCIMG

SEQ ID NO: 250726 - protein, 37 aa, Glycine max
  Clone ID: PAT_MRT3847_68435C.1.pep
DHSRCSLIISKSRGGRECSQKSSHSPSIYTTSYTSNN

SEQ ID NO: 250727 - protein, 38 aa, Glycine max
  Clone ID: PAT_MRT3847_68436C.1.pep
DARKLGTCGERRKIIYRLIKGIIKSGLVFPNKIISFPQ

SEQ ID NO: 250728 - protein, 69 aa, Glycine max
  unsure (1)..(69): unsure at all Xaa locations
  Clone ID: PAT_MRT3847_68437C.1.pep
MASYQXHYDDQGRKVDEYGNVXRQTDEYGXPVHAXXVTYXATKSVRGTMMTANXXXGXTGXVYPEXDTG

SEQ ID NO: 250729 - protein, 374 aa, Glycine max
  unsure (1)..(374): unsure at all Xaa locations
  Clone ID: PAT_MRT3847_68438C.1.pep
MTATGVAVSLGLGTFSNCYCYPVPVKELLFSTTRIRNRSRKKRFGFGQKRFCVGAANANHEFDPELRSVLELATDSELYEIETILFGPSYLSPLLKSIPLAFTNTNTNDDLDRSMIGVDLGLRQQFIAALESRFFFLAADARSTLRGWRPSYRNILLQIRTKLNIPCSTQLFTHDLELEIFLHLLHFNSTNSTQNNIYFSFILFSLIXKSSIVLTSSQGQATLQHELSQWKVQSKVGAQDIPSIVLKGGXGVFTLSKIYQLLARKLSGKVLVEAANYQVKKELVKKGGQLAMINLESRAAMLAAKQGFLGAASRYLGFRSVVTLLGPVLWGTFLADLVIQMLGTDYARILRTIYALAQIRVIRTYRLPSEVTDE

SEQ ID NO: 250730 - protein, 84 aa, Glycine max
  Clone ID: PAT_MRT3847_68439C.1.pep
KYWIIYVRNLRILMSVSLDTLINLAEDLASSTKKRKGEGLCCFHIYIHAHAYAVTNYEMYRDFGILKFLEWEGLLAPCKDWIVV

SEQ ID NO: 250731 - protein, 340 aa, Glycine max
  Clone ID: PAT_MRT3847_6843C.1.pep
MEDFKKRKLELDEAGGDGDFSSKEELRFLIEPLAKPQLVDLLAKLGSQYPSIAEEIKSIASADPAHRKLFVRGLAWNTTSETLRAAFQEHGEIEEGAVIYDKVTGKSRGYGFITFKNMESTQQALRAPSKLIDGRLAVCNLACESLSGTSSAPDLSLRKLYIGSLSPEVTSEILLNYFARHGEIEEGSVAYDRDTNESRGFGFLTYKTAEAAKKAIDDLEKTLGGRNIVVKYADSQKGKTGQPPFPAGVVPMAALPMNPGYMQQPGKANVSSRPPINYSYPQTVAPYSALPYPNPPTAPSPYPTQGQIPYPQVSAKKDRHGFLPTQPVGMNNYPYYYPKQ

SEQ ID NO: 250732 - protein, 62 aa, Glycine max
  Clone ID: PAT_MRT3847_68440C.1.pep
MQTPIGPWDDIKAGWVGGSNLRTDFPTPKEIFKGLDKFVIGQHMAKKVLSVAAYNHYQRIYH

SEQ ID NO: 250733 - protein, 30 aa, Glycine max
  Clone ID: PAT_MRT3847_68441C.1.pep
GTYVVCSLTICTSEWRNVQCQREKKKNNKK

SEQ ID NO: 250734 - protein, 71 aa, Glycine max
  Clone ID: PAT_MRT3847_68442C.1.pep
SWKHCNDISQCVNNWAKESIQIACKWGYEGVEAGATLADDYFDSRVPFVMKRIAQGGIRLAMILNKVFADF

SEQ ID NO: 250735 - protein, 171 aa, Glycine max
  unsure (1)..(171): unsure at all Xaa locations
  Clone ID: PAT_MRT3847_68443C.1.pep
AKAIIMHGYPLSIADHLGFRRYFTVLQLVFQVPTRNTIKKEIMKIYENERATNLKLLNSLDGRVVITSDMWTSTNQKRGYMAIMAHYIDGCWNLQSQILRFIYVPASHTSERLXNVLTHCLMDWNIDTKLSIITLDNFTTNDIMIDKIKDKLRGGRLLKVVSLLDIGLLCT

SEQ ID NO: 250736 - protein, 143 aa, Glycine max
  unsure (1)..(143): unsure at all Xaa locations
  Clone ID: PAT_MRT3847_68444C.1.pep
MGIRFVLMVNKQGQTRLAQYYEYLTLEERRALEGEIVRKCLARNEQQCSFVEHRNYKIVYRRYASLFFXVGVDDDENELAILEFIHLLVETMDRHFGNVCELDIMFHLEKAHFMLEEMVMNGCIVETSKSNILTPIQLMDKTS

SEQ ID NO: 250737 - protein, 71 aa, Glycine max
  Clone ID: PAT_MRT3847_68445C.1.pep
MMLQNELAILEFIHLLVETMDRHFGNVCELDIMFHLEKAHFMLEEMVMNGCIVETSKSNILTPIQLMDKTS

SEQ ID NO: 250738 - protein, 247 aa, Glycine max
  unsure (1)..(247): unsure at all Xaa locations
  Clone ID: PAT_MRT3847_68446C.1.pep
KLQVIITEMGLRIQQRGEVLKGVPLVQPGDHLFWFNPIEVSLLFLSVFSXQNAFQLAFFAWSALQFGIKSCFHSHTEDVVIRITMGVLIQILCSYVTLPLYALVTQMGSTMKPTIFNDRVAVALRNWHQTAKKHIRQNRVGPLSLSGTPTSSRPTTPSHHLSPVHLLRYYRSEIDSFPASPRRSNFDDNNMDSPSPSYSLHQLPPQTTATTNDSANDNNATTHHEIVVVHSKEFSFDKRPTSSSGNT

SEQ ID NO: 250739 - protein, 47 aa, Glycine max
  Clone ID: PAT_MRT3847_68447C.1.pep
KRVSLFPWKTKKGPVNSFPWKKIKVPPIHFRLLSRLGPKSNLKVTFP

SEQ ID NO: 250740 - protein, 67 aa, Glycine max
  Clone ID: PAT_MRT3847_68448C.1.pep
SSNKHCLPKPSTARDLFWPNSAIPTLVRDFQAATHLFLGEFSSQSPAFMKTHLFLLCSFSDSGFKIA

SEQ ID NO: 250741 - protein, 92 aa, Glycine max
  Clone ID: PAT_MRT3847_68449C.1.pep
ADTTLIVSWDTCHICRLKASRFRQSSMHVGPSADAFLVGNPPLHIVVWQRRSVSEVTESECVSLAPRHSPQCPYIKFWCWPHKSSLHRFVRL

SEQ ID NO: 250742 - protein, 67 aa, Glycine max
  unsure (1)..(67): unsure at all Xaa locations
  Clone ID: PAT_MRT3847_6844C.1.pep
CARAEIIALYTSWLLVFXXXXXLAMXISWXVXPKRFHVTKCEFLAKRQWRRRLELSTRISAVPRLPA

SEQ ID NO: 250743 - protein, 117 aa, Glycine max
  unsure (1)..(117): unsure at all Xaa locations
  Clone ID: PAT_MRT3847_68450C.1.pep
CMDISSDGDLIVTGSADKNIKIWGLDFGDCHKSIFAHADSVMAVQFVPKTHYVFSVGKDRLVKYWDADKFELLLTLEGHHADIWCLAVSNRGDFIVTGSHDRSIRXWDRTEEQFFIE

SEQ ID NO: 250744 - protein, 89 aa, Glycine max
  unsure (1)..(89): unsure at all Xaa locations
  Clone ID: PAT_MRT3847_68451C.1.pep
PKLNSHYQYTQQNLINNIPKLLQINPIHMTIPPILHNAIPNSKSAILEHYINEPXTDKAPILPSYPYDRTQAKFSLDYIYTNAYHTWRK

SEQ ID NO: 250745 - protein, 458 aa, Glycine max
  unsure (1)..(458): unsure at all Xaa locations
  Clone ID: PAT_MRT3847_68452C.1.pep
GIPGSTPRPEKTNTTRAESARAARADMASSLRISRLISRSFSSTSFFSRGGNGFLGSRHCKYSTSSAIEEEPVKPSVQVEHTQLLIDGKFVDAASGKTFPTLDPRTGEVIAHVAEGHSEDVDRAVAAARKAFDHGPWPKMTAYERQRILLRAADLLEKHNDELAALETWDNGKPYEQAAKIEVPMLVRLIRYYAGWADKIHGLTVPADGPYHVQTLHEPIGVAGQIIPWNFPLLMFAWKVGPALACGNTIVLKTAEQTPLSALYAAKLFHEAGLPAGXLNVVSGFGXTAGAALARNDPNNQIDSDQFEKILRYIRSGVESGATLETGGDKLGNKGFYIQPTVFSNVKDGMLIARDEIFGPVQSILKFKDLGEVVQRANNTRYGLAAGVFTKNMDTANTLTRALRVGTVWINCFDTFDAAIPFGGYKMSGQGREKGEYSLKNYLQVKAVVNPLKNPAWL

SEQ ID NO: 250746 - protein, 201 aa, Glycine max
  unsure (1)..(201): unsure at all Xaa locations
  Clone ID: PAT_MRT3847_68453C.1.pep
CCCVGSRTFVHESVXHEFVEKAKARAFKRVVGDPFKGGIEQGPQIDSDQFEKILRYIRSGVESGATLETGGDKLGNKGFYIQPTVFSNVKDGMLIARDEIFGPVQSILKFKDLGEVVQRANNTRYGLAAGVFTTNMDTAYTLTRALRVGTVWINCFDTFDAAIPFGGYKMSGQGREKGEYSLKNYLQVKAVVNPLKNPAWL

SEQ ID NO: 250747 - protein, 200 aa, Glycine max
  unsure (1)..(200): unsure at all Xaa locations
  Clone ID: PAT_MRT3847_68454C.1.pep
MYPSTPPLLLLLLSTFIIFILSIIFLRRNQSKDGPPGPPALPVIGNLHMLGKLPHRTLEALAHXYGPIMSLRLGQVPHVVVSSSEAAEDFLKAHDAVFASRPRLEASKYFGYGSKGLAFSEYGPYWRYMRKVCTLRLLTASKVDSFAPLRKRELELAVKSLQESAAAKEGEVVVDLSEVVHNVVEEIVYKMVLGVASMTS

SEQ ID NO: 250748 - protein, 119 aa, Glycine max
  Clone ID: PAT_MRT3847_68455C.1.pep
GYEKKPGEKNWTLAFQSQKTGGRTPGNLIWGKKGDLNPGIHNAPGEHLAKKRTRTLKMEEPSLNHKPYFHAWEIGIFSSPKTPKRMGFLFLGPLMSKKRPRTTMATGHFFGKTKTTNSL

SEQ ID NO: 250749 - protein, 114 aa, Glycine max
  unsure (1)..(114): unsure at all Xaa locations
  Clone ID: PAT_MRT3847_68456C.1.pep
PRQQCEVYACCGGXGSGTVNSMPYGNFLNGYEPNLQSDWNLTDYSCGCVNKTKFQCXNPNSSDKEKDRFLPILNMKLPNHSQSILSWTVWNLFAYFLNIFSFSWNAYFNILLFN

SEQ ID NO: 250750 - protein, 53 aa, Glycine max
  Clone ID: PAT_MRT3847_68457C.1.pep
HAYYASELMLHKRNGLHSSRGNGHTQFSMRGHKKHKAVTRMRCIGHSHTMHSH

SEQ ID NO: 250751 - protein, 240 aa, Glycine max
  Clone ID: PAT_MRT3847_68458C.1.pep
EKRKQELLAEMVFEEQRGRELSKIVNELVPSKEDNPIQNPSRARKRSNDRSRMSMRLTEEAEKYIEDFISNVEDTDISSVDGERSDASSSIGGLIKPETFNSPPVPRSLPVLTDGVTLPWLQWETNNDASPMTSQNKARMTITPKTENIKVQDQGNNSISSRGSWSPDYLQEYVGKDVYSKLGEGYGYPDQSFSAKSKGLRYDMDDYLKVKSNEDLLIESWKQRRRINSGSLLLCSLRLF

SEQ ID NO: 250752 - protein, 643 aa, Glycine max
  Clone ID: PAT_MRT3847_68459C.1.pep
MWSAVTDPIRAFFANFLRHFIHKDFHEAVARMTIIDAFLFVIVHSIDKLGIWPRLPVFLGLLYLAIRRRLHQEYNLFNVGTTPVGVRFNHSDFPYRTADGKYNDPFNEVAGSHGTFFGRNILPVDQKKKLLKPDPMVVATKLLARRTYKDTGKQFNVIAASWIQFMIHDWIDHLEDTNQIELIAPREVARQCPLKSFKFYKTKEIPTGFFEIKSGSSNIRTPWWDASAVYGSNGDVLQRVRTFKDGKIKISKDGHLLHNENGTAIAGDIRNSWAGVSTLQALFIQEHNAVCDNLKKHYPHPRVRTAARRRQMGTSAVIAKVHTIDWTVELLKTDTLLAGMRANWYGLLGKKFKDTFGHVGGVILGGLVGLKRPENHGVTYSLTEEFVTVYRMHSLLPDNLQLRDISATPGPNKSPPLVKEIPMKNLIGLQGEKTLSEIGVARQLVSMGHQACGALELWNYPEWLRDLVPQNIDGTDRPDHVDLAALEIYRDRERSVARYNQFRRALLLIPISKWEDLTDDKEAIQVLEEVYGDDVEELDVLVGLMAEKKIKGFAISETAFVIFLLMATRRLEADRFFTSNFNEETYTKKGLEWVNTTESLKDVIDRHYPEMSHKWLNSSSAFSVWDSPPNSQNHIPLYLRVPH

SEQ ID NO: 250753 - protein, 167 aa, Glycine max
  unsure (1)..(167): unsure at all Xaa locations
  Clone ID: PAT_MRT3847_6845C.1.pep
SFXXXXSXAWXXPXXXLXXLPXXRXAFLXXXXXXRXWXXLXXLFXACXAXXXRXXKVALFXPALCXXXWRXPPXSWVRWWXXWLPPLLLFQCQXXLIHLSPXPPFSFSXXXXXXXXRXXXXXXGFXXXXVCXXLXFXXXXXLVXACFLXLXXXXWVPLLCGPPKKFS

SEQ ID NO: 250754 - protein, 48 aa, Glycine max
  Clone ID: PAT_MRT3847_68460C.1.pep
KFWMQHEVKLAKCLTRQKDSWPMCSTHRILLNLPFFSLSTIIIRPMIS

SEQ ID NO: 250755 - protein, 93 aa, Glycine max
  Clone ID: PAT_MRT3847_68461C.1.pep
ETSRSHDKLLSVFRESVKYGAGIGPRVYVILSPAIQSTEGLAVSITKMHAVLQKNISWVNPEGGLKTRKYSEVRPAVTHMVAAAELIRGVPAQ

SEQ ID NO: 250756 - protein, 172 aa, Glycine max
  Clone ID: PAT_MRT3847_68462C.1.pep
MAMTGNHSPRHSSDNHQSRRATRLPASSPWNQVVCGESEPVAAVPSSSTEDFPSAAAPVEDFSSSATESSDNGGAAKRPVWNKPSPNGAAAAAASEVRPEMDANSWPLPSESTRAATKSESLKGLLDGSSVPHRRVWEDGVPSSLPRSEGGRNASTTVVPARQKSTSITVLM

SEQ ID NO: 250757 - protein, 116 aa, Glycine max
  unsure (1)..(116): unsure at all Xaa locations
  Clone ID: PAT_MRT3847_68463C.1.pep
KYLFSFLYELTINVGYVYTAEGPXSYLGLLNYRGYWTMVLLDILKKHKGNISIKEQSDMTAIIAEDILTTFHSLQLIYYLKGHHVICADPKELDRHPKAVFMGGLXVDVFKLISTS

SEQ ID NO: 250758 - protein, 125 aa, Glycine max
  unsure (1)..(125): unsure at all Xaa locations
  Clone ID: PAT_MRT3847_68464C.1.pep
AKTFRNSKMVRIPXCFWDLTTRQILTMQFYTGHKIDDLDFLNQIGVDPEKVDLSQLWXTHVAKSLTELFAEMIFVHGYIHGDPHPGNILVSPEGCNGFSLVLLDHAVYTVLDEEFRKDFCQLWEA

SEQ ID NO: 250759 - protein, 72 aa, Glycine max
  Clone ID: PAT_MRT3847_68465C.1.pep
IFFSLFFLIKKVSTWSAQGHPRVRFLSYVFFNIEFVYPLLWCVGTAGSKCKVALSKWEKEGVSLVPFNFLRG

SEQ ID NO: 250760 - protein, 74 aa, Glycine max
  unsure (1)..(74): unsure at all Xaa locations
  Clone ID: PAT_MRT3847_68466C.1.pep
YSEDLLMSIELVGLQGAGXVFHNMMADDDKMGKANTQQXFEGNFAGESGLPNKGNWVYPASQVRSDAVKVNTPC

SEQ ID NO: 250761 - protein, 152 aa, Glycine max
  Clone ID: PAT_MRT3847_68467C.1.pep
EAALCIPGRGFILNTEGHPGRILRKDLMTLAKVWSVLSYSNLAPTSHTSDPTVDRARLIFGLVSRMDMNIGALIFGQMTSIAQSNSSRLGFPTLITALCQAKGVVSDSLTFERLSPVINLAYIRKNCWNPNDLTVFIRGDKRARARPADLPS

SEQ ID NO: 250762 - protein, 59 aa, Glycine max
  unsure (1)..(59): unsure at all Xaa locations
  Clone ID: PAT_MRT3847_68468C.1.pep
SIQHCRVLLVPLFAGFCLAVHAHPXTLAKVTDALHPVGALTGYIQLDINSVYILASVQP

SEQ ID NO: 250763 - protein, 39 aa, Glycine max
  Clone ID: PAT_MRT3847_68469C.1.pep
ECFLHLYHIKKNMNHMMGNDMAPLLRRYTYLTVHSTLIN

SEQ ID NO: 250764 - protein, 79 aa, Glycine max
  Clone ID: PAT_MRT3847_6846C.1.pep
PPGGGPPKEKSFFFPQPLGLWRAKTFFFILRLTPRPRVVPPPGGGTPSSGVLSRARVLTVGQKETPFVGANIFFGQRLG

SEQ ID NO: 250765 - protein, 43 aa, Glycine max
  Clone ID: PAT_MRT3847_68470C.1.pep
FLSFVHYGQISSLLYIYATYVIDHFPINSCRCPSLRFFHCVNL

SEQ ID NO: 250766 - protein, 162 aa, Glycine max
  Clone ID: PAT_MRT3847_68471C.1.pep
MADNEDGGDKTSRGNEWEVVSLTASTYAAAPGPDEVEMKDDGKEDVYGQDEGETSHALFMSRHFVFPPSQHENLPVEPDYGEIHDDFGDKDVASEETPEEVTIPSGKDEENLTLPGLEVAEEFEGMRYFDEKINRLSVRGKQFEEGTTLPAFGLTEKGESMY

SEQ ID NO: 250767 - protein, 55 aa, Glycine max
  Clone ID: PAT_MRT3847_68472C.1.pep
CSRVRPRVGGRVLGNCLNSTHGRGLNYPNLLQGTVTPKSTTRLADQMAPVRRVAE

SEQ ID NO: 250768 - protein, 352 aa, Glycine max
  Clone ID: PAT_MRT3847_68473C.1.pep
MADNEDGGDKTSRGNEWEVVCTTTSQVVLLCGSRIQKMADNEDGRDKTTRGNEWEVVSLTASTYAAAPGPDEVEMKDDGNEDVYGQDEGETSHALFMSRHFVFPPSQHENLPVEPDYGEIHDDSGDKDVASEETPEEVTIPSGKDEENLTLPGLEVSEEFEGMRYFDEKINRLSVRGKQFEESTTLPAFGLTEKGESMYDPAKYTSFDSETAIGGITAYGESIVDPETTESAEQGSNVSPDLSLSNYSSKDNEYNSSDLPCGAWWKRRAASLYAHAKEANAFWSVFIAAAVMGLVMLGQRWQQERALQLKWQISINDEARSRVLAPIYRLKDVIVGGNRRGSLIRGSSSGES

SEQ ID NO: 250769 - protein, 165 aa, Glycine max
  Clone ID: PAT_MRT3847_68474C.1.pep
SSMKLKRIVHTLIVSHLCRIIRALSKVKDVMVEILKENSTTIHFPHKKHCNRRKKIILGSFRLHYNWCSSKSSHVLPVPEPIYATCRDDDDEDCPYLRWLEEKKVEGEGGGDSNNKGASATRNEHVEMNEIDVLAEMFIANCHEKFRLEKQESDRRFHEMLARSM

SEQ ID NO: 250770 - protein, 196 aa, Glycine max
  Clone ID: PAT_MRT3847_68475C.1.pep
MFSPSHLKTLYPLQQAFSVKPSSTISSMKLKRIVHTLIVSHLCRIIRALSKVKDVMVEILKENSTMIHKKHYNNYRRKNKIILGSFRLHYNWCSSKSSHVLPVPEPVYATCRDSGEPPRDEEDCPYLRWLEEKVEVEGGGGDNSNNKGASATNDEHDEMNEIDVLAEMFIANCHEKFRLEKQESDRRFHEMLARSM

SEQ ID NO: 250771 - protein, 43 aa, Glycine max
  Clone ID: PAT_MRT3847_68476C.1.pep
QQNYKNVNKRSLCDHFNREAGKGLEKSQNAHTSHVPYHSFSEY

SEQ ID NO: 250772 - protein, 80 aa, Glycine max
  unsure (1)..(80): unsure at all Xaa locations
  Clone ID: PAT_MRT3847_68477C.1.pep
MLEFNFMQHILYRQKEQFSDGVGYGWIDGLKAHAEKHVTDRMMLNAANIFPFNTPTTKEAYYYRMIFERFFPXVNLINHA

SEQ ID NO: 250773 - protein, 285 aa, Glycine max
  Clone ID: PAT_MRT3847_68478C.1.pep
MAFAVRALWAVRKSCRGSPRRYCFSKHAHSNSNSHSNSNPLLLKLLQVPNSHIKTTLDQEMASLQSSQRSWDFLITSLSPSSSDKARLILEWILEKMLKENEKDRDLFSELIFLCGKVKDVMLGMRVFSSMEATGVKPNSLVFNSLISVCLSSHDIVTAVSLFEIMESSRARAADFHTYNIFISAFSKSGNVDAMLAWYSAKKAARLGPDLQMFESLISGCVNSRKFKIADRIFEEMMISGIVPSASIIESMLNGICKQKRLGRAEEFFTFAMDSGWEIYENMVG

SEQ ID NO: 250774 - protein, 69 aa, Glycine max
  Clone ID: PAT_MRT3847_68479C.1.pep
GVGIRLSEERAPPQLEKRNSGLEELEVHHGDDVGEVGIDEVEFLVGGDMGGEEGGRGRGHGDCLRLAKE

SEQ ID NO: 250775 - protein, 58 aa, Glycine max
  Clone ID: PAT_MRT3847_6847C.1.pep
GPSDTTLSFTNLTSSYATTKALISSTFSPPPYETYFPLLHVYTELPPPFSLRPKRRVF

SEQ ID NO: 250776 - protein, 52 aa, Glycine max
  unsure (1)..(52): unsure at all Xaa locations
  Clone ID: PAT_MRT3847_68480C.1.pep
IVFYFSAASARVQXRKKVPVFRSRLKPNWKKNLLRRLKRNPQRIKQKSNYSF

SEQ ID NO: 250777 - protein, 66 aa, Glycine max
  Clone ID: PAT_MRT3847_68481C.1.pep
QLAFFKDLRGKVVFSSELLLSLHCCYLQNNKNKGPAQQKNTKFKSKVTLTYKFKTLSKSTRAKFLT

SEQ ID NO: 250778 - protein, 41 aa, Glycine max
  Clone ID: PAT_MRT3847_68482C.1.pep
FVTTLLTRQLLMISLSHLIRRTRKERITRRTPFAELYKKEE

SEQ ID NO: 250779 - protein, 48 aa, Glycine max
  Clone ID: PAT_MRT3847_68483C.1.pep
NVIFVPTALLTHCVQLGPLAPINLERQVPEFPGRFLNNCPMEPFAGFS

SEQ ID NO: 250780 - protein, 622 aa, Glycine max
  unsure (1)..(622): unsure at all Xaa locations
  Clone ID: PAT_MRT3847_68484C.1.pep
AHVFKERFIKSRSSMEEERRKIMKEMKREKHASYSSHNSCKSLSEELRDYYEGRHRSHLNWEKKVEQLFACHHISEERKVPLATLSFQGYALYWWTSLVRKQRIHGDPPVEYWNDLKSALRKRHIPSYYKSELMDKLQRLRQGSMSVEEYRQQMELLLLRSRLREEERTSIARFLSGLNMXVRDKVELLPYRDLDELVQLCIRVEQQLKRKPSSKSYGFHSYPRKDXAQQILGAASSKPKEDKGKTIEKSTPTTSSQERTSNIKCFKCLGKGHIASQCPTKKTMIMRGQDIYSSQEEKESSEEVYPHEEGDLLMVKRLLGGQSCDLSQSQRDNIFHTRCKILDKTCSHIVESGSCCNCCSTRLVSKLNLRIISHPKPYKLQWLNEQGEMIVNQQVKVPFSIGTYKDEVNCDIVPMEAGHILLGRLWKFDRKIIYDDLTNEITSPILALNXVASSNTFIGGQRSTNYEXKRDEEEKLEKQIKELLDEGLVRKSLNPCALLVCFIPLLSXNFLNSDQGLPMDPKRIKVILEWPTPPSIREIWGFNDLTNFYXRFIPYFSILVAPLIELVRNYVGWVGDLAAIDAFLAYHNHKESPVVAMIADLYDTFDRRCEKSSTRISLILSQ

SEQ ID NO: 250781 - protein, 77 aa, Glycine max
  Clone ID: PAT_MRT3847_68485C.1.pep
RAKFKIQSLFWYQGKPTTTTLYPIRWDRLHGTTFAIMFYQVLCNWIKKNVFFSYLLMMCELGKKRGKIIRKEQKIMR

SEQ ID NO: 250782 - protein, 447 aa, Glycine max
  unsure (1)..(447): unsure at all Xaa locations
  Clone ID: PAT_MRT3847_68486C.1.pep
QQLKIKPSSKSYGSHSYPRKDQAHGILGAAPSKPKEDKGKTIDKYTPKTSSQERTSNIECFKCXGXGHIASQCPIKKTMIMRGQDIYSSQEETTSCSSSSGSEDEVRGQESSEEVYPHEEGDILMVRRLLGGQSCDLSQSQRENIFHTRCKILDKTCSLIVERGSCCNCCSTRLVSKLNLTIIPHPKPYKLQWLNEQGKRIVNQQVKVPFSIGTYKDEVNYDIVPMEAGHILLGRPWQFDRKIIYNGLTNEITLTHLGTKFVLHPQTPSQVAKDQLTMKDKRDEEEKFEKQKKKKDSKALSSKARGKEKEGKDSSKKIVKKENHFATKGDIKRALLLKQSSYLLLSRETSLSNTTIPTLETLPPKVQELLHEFGDIFPKGISPGLPPLRGIEHQIDLVPGASLPNRPTYRTNPQETKEIESQVKELLEKGWVQESLSPCAVLAVVGA

SEQ ID NO: 250783 - protein, 110 aa, Glycine max
  unsure (1)..(110): unsure at all Xaa locations
  Clone ID: PAT_MRT3847_68487C.1.pep
CPFCMLILYRNFSNSFLDMXYKQFSVFLAGGYSTFCFTYIFIAHCISRIPHLLPQFIQISILNNSPKLAIKVYKRSFILESCLTRSSSTIFHPSSVKLYFIQFLTTHDSF

SEQ ID NO: 250784 - protein, 101 aa, Glycine max
  unsure (1)..(101): unsure at all Xaa locations
  Clone ID: PAT_MRT3847_68488C.1.pep
KINGQECSTDLEKIKQVGLYDPISFTLSDICRRYYHKETGLDVVMIMAITSXRSLLPSRFSACMAVAVRVRRSRRQTDDDFFIATAHLKDEPMAHIVALYI

SEQ ID NO: 250785 - protein, 319 aa, Glycine max
  unsure (1)..(319): unsure at all Xaa locations
  Clone ID: PAT_MRT3847_68489C.1.pep
MAGKDRILILGPTGAIGRHIVWASVKAGNPTFVLVRNTPGSNNRVNLVKAANPETKEELIESFKNSGVNLIQGDMNDHESLVNAIKQVDVVICAFGRLLIEDQLKIIAAIKEAGNVKRFFPSEFGLDVDRHDSVDPVREVFEEKARIRRIIEAEGIPYTYLCCXAFTGYFLSNLAQIDITVPPRDKVFXILGDGNVKGAFVTEADVGTLTIEAANDPNALNKTVHIRLPKNYLTINEIISLWENKIGKTLEKTYVSEEKVLKDIKEASFPNNYLLALYHSQQIKGDAVYEIDTAKDLEASEAYPNVEYTTVDEYLNQFV

SEQ ID NO: 250786 - protein, 69 aa, Glycine max
  Clone ID: PAT_MRT3847_6848C.1.pep
LLLFFVPYLFVVSQRFNRGLPAELNAIINLNQLDTKEAHSAGHSIFSAWGTDFLNACGAHTPPTGWGAY

SEQ ID NO: 250787 - protein, 82 aa, Glycine max
  Clone ID: PAT_MRT3847_68490C.1.pep
SFSFHLHIHSIGGFHGIVGVKQLTVCDATPCYIRQKRDLHSAPTNPTAGAYKELEEHLLQVLLKLVEAAWPAVEHLSPLQQA

SEQ ID NO: 250788 - protein, 151 aa, Glycine max
  Clone ID: PAT_MRT3847_68491C.1.pep
GAPPAPGGRPLGRPGFIPGVPPAPTRGWGGLSSPQRHRSAALFARGAPGPPLGPAASSRAFGDTPRWWGPPLLERSLPGAVCVPSAPSVFAPPASFMPRAAPPWGVRHQQKPCRTLILNLACLKYSPASCINPPSDETVRIKKKLENQKRW

SEQ ID NO: 250789 - protein, 127 aa, Glycine max
  unsure (1)..(127): unsure at all Xaa locations
  Clone ID: PAT_MRT3847_68492C.1.pep
LSSTPSKKLPKSFTPPPTPSPSTPEPIHAPPSTLSSTSKQKPTPPSPPSTQPSATSPACSPPSVPXSTNSTSTTATPPDPSSTATSPPTKSPTSHAPSNPKSNPTSTASTFAISSTPFKTNNSSSSS

SEQ ID NO: 250790 - protein, 73 aa, Glycine max
  Clone ID: PAT_MRT3847_68493C.1.pep
AQKPKNVWGPRTLLGLPFPKGPSGIWLKKGRGAPKNGFNWGGGFLNPKLKNPFFFPGGGSLTHRFGGGPKNHP

SEQ ID NO: 250791 - protein, 99 aa, Glycine max
  Clone ID: PAT_MRT3847_68494C.1.pep
DTQLFLTTSCSKLLTLSQKSFSSSLGFCFAAASCMTFSNSTRFLLSFMMLPLFRIWGDSKASKDSLENFNPFNHAGLNELMESKGGKKKSSSSSSISML

SEQ ID NO: 250792 - protein, 72 aa, Glycine max
  Clone ID: PAT_MRT3847_68495C.1.pep
FFSFIKGCNMRGIKIGPMISTRLTPGALLNLCIQSLKLCLQKKKAIPTHHMPSLKNSHSYLNRNYSNLSAVS

SEQ ID NO: 250793 - protein, 397 aa, Glycine max
  Clone ID: PAT_MRT3847_68496C.1.pep
MQELECAALVLLFELLTWRSEGLDPLYARAVLMMEKDPGTGKMKVANPVSSSLVGGTCWRGCKSVGESPVRVPSPKCHVLKDFAASVFPMLEDILSCAAVIQMVVLEDTFKVACMEDPLAREVAGIVQSEGFWNELEGVYSLVNLIGEVVLDIGAERPLIGRCLPLWEEIRTKVVKEWCVKYSVAEAPVVEILEKRFRKNYHPAWSAAFILDPLYLVKDASGKYLPPFNCLTREQEKDVDKLLTRLASREEAHVVLMELMKWRSEGLDPLYAQAVQMKQRDPVTGKMKVANPLSSRLVWETCLSEFKSLGKLAVRLIFLHGTSSGFKSNCSFIRKISANKHSRVSLERALKVVYIAAHAKLERRDFSNEEEKEAELLAREGSDDGMLAEVFADAPLL

SEQ ID NO: 250794 - protein, 155 aa, Glycine max
  unsure (1)..(155): unsure at all Xaa locations
  Clone ID: PAT_MRT3847_68497C.1.pep
VIHSSWAMLGALGCDYLELWSRLGVKXGQGVRWKAGYHIFREGGLDYLDHPNLVRPQSRLCIXAIQLILMGAVKGCRVAVGPLGEVNDPIYSAGMCYSXCLADDPHAFADLKVKELYIGRLAMSSMLGISAQAIGTCPGSLXILADHSADARNND

SEQ ID NO: 250795 - protein, 34 aa, Glycine max
  Clone ID: PAT_MRT3847_68498C.1.pep
PRVRTRVHATSIRLHQDSATRRPQKDTPSIRRRY

SEQ ID NO: 250796 - protein, 92 aa, Glycine max
  Clone ID: PAT_MRT3847_68499C.1.pep
PPDSLLFEYHHVQLFIHPKTAAPQQNPNGQVQFRITVESYTVIKLMKQTKKKSIPCSLLLGTLVQKGEDKTPKIKETNKLNKCEKFKSPFFY

SEQ ID NO: 250797 - protein, 79 aa, Glycine max
  Clone ID: PAT_MRT3847_6849C.1.pep
FFRGTWNLKNSKGCGKGTSPFSGGGGARHFLVPPKKRDTKAGPKKEEWNPYSPFGFTFKNRLAPLKAKTGRAKRPAKSP

SEQ ID NO: 250798 - protein, 126 aa, Glycine max
  Clone ID: PAT_MRT3847_684C.1.pep
MLQFHKGLPKIRKYVLKCDKYLMNQRHSCHFLILTLYHTCTLVCERMIPELSFGLHRLMRTRLMSGNIQERGYMGKTHTKFCPSHATFGDLWQIAVDQNGINTDCQFLHSITRGYDQSEHSEPSLH

SEQ ID NO: 250799 - protein, 303 aa, Glycine max
  unsure (1)..(303): unsure at all Xaa locations
  Clone ID: PAT_MRT3847_68500C.1.pep
MYTVYQAVISGIRQEKFFPVAILFSGGLDSMILAALLDKCMDPSYEIDLLNVSFDGQLAPDRKSAKAGLNELRRVAPSRKWRLVEIDADLSDLVFETSHVMSLINPANTYMDLNIGIALWLAAGGDGWVSDANTYDNDGNHVRIKYKSNAKILLVGSGADEQCAGYGRHRTSYRRGSWLGLHEEMRLDMQRIWRRNLGRDDRCIADXGRRFPFLDEDVIRLLLNIPLWEVANLDQPSGIGDKRILREVAELLGLYEAAVLPKRAIQFGSRIARESNRKNFGSNRAANQASAGSVTIHRKSNFC

SEQ ID NO: 250800 - protein, 248 aa, Glycine max
  unsure (1)..(248): unsure at all Xaa locations
  Clone ID: PAT_MRT3847_68501C.1.pep
TPPPXPPPPPPPPPXPXPLPPPPPPPXPPPPXXPPPPPPPPPPPXPPPPPPPTPPXPPXXXPPXPPPPPPPPPPPPPPXPPXXPPPPPPPPPXPPXPPPPPPPPPPXPPPPPPTPPPPPHPPTPPPXXKTXPPPPPXPPXPHQPPNPQXXXPPTPPPHPTPPPPPHLIXPSPHNYYHLPQHISTPFLYQNYYHNPQFSSLYTPPPKHLHPTTNKIILHSHKHHITHLSPSHSSQPFTSKPHIQPLFPY

SEQ ID NO: 250801 - protein, 60 aa, Glycine max
  unsure (1)..(60): unsure at all Xaa locations
  Clone ID: PAT_MRT3847_68502C.1.pep
LPSFTTLSYKSEKLDVNTISQVLVTDNNICKAADQSSLEHLIHLIIKWPKNHQRSDXXTS

SEQ ID NO: 250802 - protein, 85 aa, Glycine max
  Clone ID: PAT_MRT3847_68503C.1.pep
RAPIPWATTRAGEVPARARQPWPGRGSRWQSCWKRLGAGHGLFGAHSGSRGITGLRDRVVVERLSNSVVFDGGSRAGILGSLTVP

SEQ ID NO: 250803 - protein, 59 aa, Glycine max
  Clone ID: PAT_MRT3847_68504C.1.pep
SPIKNISFSHQKKKKLGELQKWLRSPLNQNPNHKTLNYTLYENLNLNDFPLTQPKFLPP

SEQ ID NO: 250804 - protein, 134 aa, Glycine max
  Clone ID: PAT_MRT3847_68505C.1.pep
TSAAASMLQSPSLSSQLGPANSDTVPLINSSVAYNLNALNFTSSSYDQQFSKLSQHLYFHNSSISTSNSHPTITLDLTSAQTSPHVGKFTPGLSFIPKHSSTNLHFSSVLSLLCNQACYSHLGVLMVIASTMRD

SEQ ID NO: 250805 - protein, 65 aa, Glycine max
  unsure (1)..(65): unsure at all Xaa locations
  Clone ID: PAT_MRT3847_68506C.1.pep
RXXXXXXXXXXXXKLLIVXHGSTPVPXGICIIXSXRVRFSXNSXXGXVGSXRRSXFSXQXEWMXL

SEQ ID NO: 250806 - protein, 47 aa, Glycine max
  Clone ID: PAT_MRT3847_68507C.1.pep
ASLRLLIGESRWYSQIAKNPSLEILPLCLHLGNTCNFQPAPSGSGAS

SEQ ID NO: 250807 - protein, 188 aa, Glycine max
  unsure (1)..(188): unsure at all Xaa locations
  Clone ID: PAT_MRT3847_68508C.1.pep
SPRVRPRVCSNLYSDNQSSELITFRSSSSSTFALGVSVGYFIADLGMIFWFFXSLGGYEYVIHHLLSLVAVAFSMLSGEGQLYTYMVLISETTTPGINLRWYLDAAGMKKSKAYLINGVVIFIAWLVARILLFVYMFYHVYLHFDQIEQMHAFGQVLVIVVPLALSVMNLIWFSKIIKGLRKTLAKRQ

SEQ ID NO: 250808 - protein, 60 aa, Glycine max
  Clone ID: PAT_MRT3847_68509C.1.pep
HSQRTSAKAVKQFETSEVTQRTSVRTDNQLKYPSYPLHSLRHFFLPIKDLHFAFAFLSIS

SEQ ID NO: 250809 - protein, 85 aa, Glycine max
  Clone ID: PAT_MRT3847_6850C.1.pep
FVKQPPNWFRGRILRGTKYTRQPTSSSPLTKSRGVHQCDDRCKSKLHLFYTAYRAPYSHHSIRRHVGQNLPAIYVSFFYLPTLSN

SEQ ID NO: 250810 - protein, 195 aa, Glycine max
  Clone ID: PAT_MRT3847_68510C.1.pep
MTHLCSLSIGAMGNDGMLKLESLRNPPSSLQRLYLYGRLEKLPIWIKEIPNLVRSYWKWPSLKEDPLPYLKDLSKLLYLKFYEAYGGDELHFNNGWLKGLKVLHLESLPKLKTIKIAKGAIPYLAELKIGKCQKMVTFPRDIQNLTSLQKLYLYDMQEQFINESRSEDCKIIFNKIPLVEFSNDDHFSTFNNADA

SEQ ID NO: 250811 - protein, 240 aa, Glycine max
  Clone ID: PAT_MRT3847_68511C.1.pep
MLASKEMMKFKSYQNRANLFVKEYLLADPLIPYTSIIGGIFACKMVYDLTQLFSTVHFKSYSSLTRIQRVEWNNRSMSTIHAIFITTMSLYLVFCSNLYSDNQSSELITFRSSSSSTFALGVSVGYFIADLGMIFWFFPALGGYEYVIHHLFSLVAVAYAMLTGEGQLYTFMVLISETTTPGINLRWYLDVAGMKKSKAYLINGVVIFISWLVARILLFIYMFYHVYLHFDEVITIRTLN

SEQ ID NO: 250812 - protein, 74 aa, Glycine max
  Clone ID: PAT_MRT3847_68512C.1.pep
YHLKQCDSCGGQAHAYWMLQVPGATSYMGGIGKDKFGEEMKKNSRLAGVNVHYYEDETTPTGTCAVCIVGDDRS

SEQ ID NO: 250813 - protein, 341 aa, Glycine max
  Clone ID: PAT_MRT3847_68513C.1.pep
MVSEGTLLGMGNPLLDISAVVDEDFLKKYDITSNNAILAEDKHKPMYQELAEKYNVEYIAGGATQNSIKVAQWMLQVPGATSYMGGIGKDKFGEEMKKNSKLAGVNVHYYEDETTPTGTCAVCIVGGERSLVANLAAANCYKSDHLKRPENWALVEKAKYIYIAGFFLTVSPDSIQLVAEHSAANNKIFSMNLSAPFICEFFRDVQEKALPYTDFVFGNETEARTFSKVHGWETDNVEEIAVKISQWPKASGTHKRITVITQGADPICVAEDGKVKKFPVKLLPKEKLVDTNGAGDAFVGGFLSQLVQEKPIEECVRAGCYAANVIIQRSGCTYPEKPDFH

SEQ ID NO: 250814 - protein, 64 aa, Glycine max
  unsure (1)..(64): unsure at all Xaa locations
  Clone ID: PAT_MRT3847_68514C.1.pep
HRAYYGAGTILLGCSWGRGGASTDLCAVYCVELCSGGVDHFVSLLGRACFVLRVFLRXWWWSMP

SEQ ID NO: 250815 - protein, 341 aa, Glycine max
  unsure (1)..(341): unsure at all Xaa locations
  Clone ID: PAT_MRT3847_68515C.1.pep
MVSEGILLGIGNPLLDISAVVDQDFFKKYDITSNNAILAEDKHTPMFEELVEKYNVEYIAGGATQNSIKVAQWMLQVPGATSYMGGIGKDKFGEEMKKNSRLAGVNVHYYEDETTPTGTCAVCIVGDDRSLVANLAAANCYKSDHLKRPENWALVEKAKYIYIAGFFLTVSPDSIQLVAEHAAANNKIFSMNLSAPFICEFFRDVQEKALPYTDFVFGYETEARTFSKVHGWETDNVEEIAXKISQWPKASGTHKRITVITQGVDPVCVAEDGKVKKFPVQLLPKEKLVDANGTGDAFVGGFLSQLVQEKPIEECVRAGCYAANVIIQRSGCTYPEKPDFH

SEQ ID NO: 250816 - protein, 57 aa, Glycine max
  Clone ID: PAT_MRT3847_68516C.1.pep
WVIAAIAWEAGKPLVIEEVEVAPPQAGEVRLKILYTSLCHTDVYFWDAKVITLSLLD

SEQ ID NO: 250817 - protein, 60 aa, Glycine max
  Clone ID: PAT_MRT3847_68517C.1.pep
RELRPEKTDLSRPCPNLLTHIHVCTSYTRSWITHSLMYNFPNSLPTMVQLTRAMSCDDRL

SEQ ID NO: 250818 - protein, 38 aa, Glycine max
  Clone ID: PAT_MRT3847_68518C.1.pep
LSRKAMHQNGTVHQDSHPKERTHSKASLTYTLMTTLTH

SEQ ID NO: 250819 - protein, 138 aa, Glycine max
  Clone ID: PAT_MRT3847_68519C.1.pep
WPDITSDIYSFVMDFVLTSFPFNTKKQEPPSLSSCFNLTFVCFTAVVTPPCLSIFPSKSPLQFTASKPPPRPPFFSGFEFPTLFPLLPFTSLLNPKTLTPFSSPRIRNPNATLTENTGLEHSITAHLINLTPPSPSLP

SEQ ID NO: 250820 - protein, 57 aa, Glycine max
  Clone ID: PAT_MRT3847_6851C.1.pep
IGTASNYIVYRGECSTQCMTMGLGFSEVLLSPLRYHADRSIVVQDLNFLRFLLKQIL

SEQ ID NO: 250821 - protein, 44 aa, Glycine max
  Clone ID: PAT_MRT3847_68520C.1.pep
NPLKTGPLFFYFFFFFFFFFFFFFFFFFFFFNYIFLLKRIGGRV

SEQ ID NO: 250822 - protein, 51 aa, Glycine max
  Clone ID: PAT_MRT3847_68521C.1.pep
MGLGGAEHGKVMVESQDVCKSKGRKQRKKEDGDVEVEQETGCRFRLKFIGS

SEQ ID NO: 250823 - protein, 72 aa, Glycine max
  Clone ID: PAT_MRT3847_68522C.1.pep
SNLELRKIKILYSQQKKFFFNRRYFHTPTTIKTLPSFTHSTMITIIHYIRNIMQTKFVRPSIFQLTLLKYNV

SEQ ID NO: 250824 - protein, 48 aa, Glycine max
  Clone ID: PAT_MRT3847_68523C.1.pep
RSLSFSTKCVATPYGCAGSPIMPYIFWWPGRRVVLSPCFAVTKAYVAV

SEQ ID NO: 250825 - protein, 56 aa, Glycine max
  Clone ID: PAT_MRT3847_68524C.1.pep
DVVVDSIKDDGSLGVDVIMRHVTKIERHKGSEQSSLYPAFDQATISSVISAAYCRD

SEQ ID NO: 250826 - protein, 28 aa, Glycine max
  Clone ID: PAT_MRT3847_68525C.1.pep
APCFASHICGRLITVHVSHDSLDVRLSF

SEQ ID NO: 250827 - protein, 99 aa, Glycine max
  unsure (1)..(99): unsure at all Xaa locations
  Clone ID: PAT_MRT3847_68526C.1.pep
LLDLIHHLILLILTFTIIITPKHLPILNPHLYSHPNTVQTLNLPFPTHSNISYDTYNFLQVDYKINYPFINAFCKLQPXIIHYFTTHTNPPVTLLFYFF

SEQ ID NO: 250828 - protein, 123 aa, Glycine max
  unsure (1)..(123): unsure at all Xaa locations
  Clone ID: PAT_MRT3847_68527C.1.pep
MIVNVLVFIVATHLVARQCHAXDMYPPRMNTGHGARTPEVKCASWRLAVEXHTIFGFETIPEECVEAEKEYVRGEQYISDAKTVNQQAYLYGRDLEVHLKDTFVFSRDGTVLSNIPYYKVHGY

SEQ ID NO: 250829 - protein, 69 aa, Glycine max
  unsure (1)..(69): unsure at all Xaa locations
  Clone ID: PAT_MRT3847_68528C.1.pep
AGXXXTPPLVSXATAAPNXTRDARHRLNDQXCXXCQRVEWDLCDMLMKLTRGNLXIEKVTMXXXXXXXV

SEQ ID NO: 250830 - protein, 71 aa, Glycine max
  Clone ID: PAT_MRT3847_68529C.1.pep
LPSHNILMHNFVEIKSSCWLLYSVMFNKLFIFVFIFLSILFLFLLLLSSLLEKILLTSIILDIQHWFFHHL

SEQ ID NO: 250831 - protein, 69 aa, Glycine max
  Clone ID: PAT_MRT3847_6852C.1.pep
GSSPTGYRFFLTGLAISMPWNSDLGPLLRLQRVLPPCRTELAFKGCSMGNPSHKGKPPLLPLGGQGPLL

SEQ ID NO: 250832 - protein, 61 aa, Glycine max
  Clone ID: PAT_MRT3847_68530C.1.pep
PTRTHAQGQTRGGHFLPPRPLCGTKLTVYMKSAAKEDCSMHGLIPYVEENGQAHNAEDNFD

SEQ ID NO: 250833 - protein, 48 aa, Glycine max
  Clone ID: PAT_MRT3847_68531C.1.pep
GFVRVRWCGKVMSIVNGLSLTLTLDIHFYLKSEMVRCCRRVRTCGSSG

SEQ ID NO: 250834 - protein, 44 aa, Glycine max
  unsure (1)..(44): unsure at all Xaa locations
  Clone ID: PAT_MRT3847_68532C.1.pep
LPLSLFRECFFLGFPFLFSMLTHHFVISESXPRAEFRAYVRVHA

SEQ ID NO: 250835 - protein, 66 aa, Glycine max
  unsure (1)..(66): unsure at all Xaa locations
  Clone ID: PAT_MRT3847_68533C.1.pep
ECNGELRFDSTAISPNQLTAISVARGETGTQEQMLGMCLQAQQLSLGLXLLGGMGPTWGTLKGTFL

SEQ ID NO: 250836 - protein, 47 aa, Glycine max
  Clone ID: PAT_MRT3847_68534C.1.pep
DNISYICSFLFKIVNETPALSDELNIKLRLNMFFLLPENRLIFIFIS

SEQ ID NO: 250837 - protein, 110 aa, Glycine max
  unsure (1)..(110): unsure at all Xaa locations
  Clone ID: PAT_MRT3847_68535C.1.pep
RHLTLLSLKLTGRSXETVSMIHAYVMANKLVIDCNEPQPKXVNSSYLELNLDXVEPSIXRPKRPHDQTPLKXMNADRHACLDNIAGFKGFAMPYDVQREAAKFDFHGQSE

SEQ ID NO: 250838 - protein, 387 aa, Glycine max
  Clone ID: PAT_MRT3847_68536C.1.pep
MVRGSGGEIVQVEGGHIVRSTGRKDRHSKVCTAKGSRDRRVRLSAHTAIQFYDVQDRLGYDRPSKAVDWLINKAKSSIDQLAHLPPWKPTLPSPAPPHLNDDHSDKPNPNPNPNPNPNPNPNHSPDAQILNQFDHDDGAGAGSSYLPMDNDAIRSFFPTTTSSLVQFQSYPPDLLSRTSSQDLRLSLQSLQDPILLHHNHNNNEHVLFAGTAFDNMVAWNNNSNNNHNNNNHNNNNNNNNNTASNDTCGGGGGGGGGGGGFVFNAPSTLPGPATVASPTVVFGHGYGQGQYFSQTARAARGNSPSVRAWIDAPSFVAAAADHRHHHYLSPAAAAAALVYQSAPSTAAFTAAPGGFSGFRVPARIQGEEEHDGGMSDKPSSASSDSHR

SEQ ID NO: 250839 - protein, 114 aa, Glycine max
  Clone ID: PAT_MRT3847_68537C.1.pep
IRFSWAFCPLHIVVSLTAILLSMGATAELRFGSGGSISVFLIFLERNRKKRGSSAPESASGSGERRSENGAAVGEGMREKEKEKEKKIRCGECTLTAYELHKSNRNRLLFFRNL

SEQ ID NO: 250840 - protein, 60 aa, Glycine max
  Clone ID: PAT_MRT3847_68538C.1.pep
SSSEGNCSVCSPPSKEQQLNVDAADELTIEACDHNAIILYSRISLSWKREISLSVPKIFI

SEQ ID NO: 250841 - protein, 70 aa, Glycine max
  Clone ID: PAT_MRT3847_68539C.1.pep
LFLVSLLQSWDQIPARDPETGTKTWKSNGNRFGKMVSEKTTDETFYPALAPVQAAAGVAACGLPPDCPQD

SEQ ID NO: 250842 - protein, 41 aa, Glycine max
  Clone ID: PAT_MRT3847_6853C.1.pep
NDTIASYTLSNHAPDIAARRHSTRVARTFRYHAPVYAISVQ

SEQ ID NO: 250843 - protein, 155 aa, Glycine max
  unsure (1)..(155): unsure at all Xaa locations
  Clone ID: PAT_MRT3847_68540C.1.pep
PKDSCHPXRDSEKTMPNNNPAQTHTSKKETDTGQKNPERAPXKRRAHRQPKHNTERKKARKQEANNEYDACTIPNDCGSLVAAKVGNHKQIVGFHVAGSKGRLGYASLIPXCEPVVPAQSAEDYFDTFPVEGDSKDGVAHIGELKPXVYVPLPTK

SEQ ID NO: 250844 - protein, 87 aa, Glycine max
  Clone ID: PAT_MRT3847_68541C.1.pep
EYSVSLILLTCTYFQSLKSCIHQRGEENTKSKHQGPGGGSQMATAQVLSLNLITISLIPLRSGVFYTNHRNPHPQISDRETHQNHVC

SEQ ID NO: 250845 - protein, 83 aa, Glycine max
  Clone ID: PAT_MRT3847_68542C.1.pep
IQKKDNWRDVCFIDGIHLSTEGSKIVTKEILKVLKEAEWEPSLYWRSMPSDFGEDSPYDPVGPDGKSTINLSNFAFPNNDQWD

SEQ ID NO: 250846 - protein, 61 aa, Glycine max
  Clone ID: PAT_MRT3847_68543C.1.pep
KAPAHKHTLIQLHLLLIYHKTHFSLIQLKHFNFPHLIHLHPYCSHSSIRPCVYHINSLLYL

SEQ ID NO: 250847 - protein, 66 aa, Glycine max
  Clone ID: PAT_MRT3847_68544C.1.pep
TPVSGQQVRIVICSERPRRGFFIISWYRISPALNFCQFKRAVSVDRSIPRSYLRCELWSRSITKVP

SEQ ID NO: 250848 - protein, 98 aa, Glycine max
  unsure (1)..(98): unsure at all Xaa locations
  Clone ID: PAT_MRT3847_68545C.1.pep
PDLIRIHFLSLQITRNGGCSPARARTDYDYLIKLLLIGHSGLRQSCLLLRLSDCSLTTSFITPIRIDLXIRPIDQDGKRIKLHIWDTAAHERVRTNTT

SEQ ID NO: 250849 - protein, 281 aa, Glycine max
  Clone ID: PAT_MRT3847_68546C.1.pep
MQFAKLDDSPMFRKQIQCMEESAESLRERSLKFYKGCRKYTEGLGEAYDGDIAFASALETFGGGHNDPISVAFGGPVMTKFTIALREIGTYKEVLRSQVEHMLNDRLLQFVNIDLQEVKEARKRFDKASLIYDQTRERFLSLRKGTKTGVATALEEELHSARSTFEQARFNLVTALSNVEAKKRFEFLEAVSGTMDAHLRYFKQGYELLHQMEPYINQVLTYAQQSRERSNYEQAALNERMQEYKRQIDRESRWASNGSNGSPNGDGIQAIGRSSHKMIEA

SEQ ID NO: 250850 - protein, 226 aa, Glycine max
  unsure (1)..(226): unsure at all Xaa locations
  Clone ID: PAT_MRT3847_68547C.1.pep
MEAPSPTKPNDPTKPSNTSTTLSLEAGPAQASPLRKMFAVASIAAGIQFGWALQLSLLTPYVQLLGVPHAAASFIWLCGPISGLVVQPIVGYYSDHCTSRFGRRRPFILGGALAVAVAVFLIGYAADIGYAAGDDISKTTRPRAVGVFVIGFWILDVANNMLQGPCRAFLADLAAGDQRKTRIANGFFSFFMXPVGNVLGYAAGSYXGLXKMFPFTETKGCRRVLR

SEQ ID NO: 250851 - protein, 67 aa, Glycine max
  Clone ID: PAT_MRT3847_68548C.1.pep
PVFFNLMYIKATSTIVMIIMPLNIAFFLSLTYKQTVKAPFYGSNISCIISYNNNIHMTAYGQNTKRD

SEQ ID NO: 250852 - protein, 97 aa, Glycine max
  unsure (1)..(97): unsure at all Xaa locations
  Clone ID: PAT_MRT3847_68549C.1.pep
LTRSDLHIGVRSPDPRINXYVNFRDDVVPXLNXLDCNAVQTMAYAKTFLTYKLRRPSIKSCARSYMQXGTSDDLKSLIDRAHELCLVGLXDIVHSRA

SEQ ID NO: 250853 - protein, 134 aa, Glycine max
  unsure (1)..(134): unsure at all Xaa locations
  Clone ID: PAT_MRT3847_6854C.1.pep
KSCLQLSAWTKSEGYAGTFKHTIGKWYGDPEDSGPQTYTDAKHSHICGQIPELSNKDSNLVVQYDVPSEHYIDCDEGYIKIACGYDNRTTVDADAAYRMKIGPDLCSXLTKKLLHILSCQDQVSPDEEDRECET

SEQ ID NO: 250854 - protein, 93 aa, Glycine max
  Clone ID: PAT_MRT3847_68550C.1.pep
LEVTITGPIIFETMRMIIVTALACIILSEQLFLGSIIGAIVVVLGLYLVAWGKAKERRGLMTPSSAENNFPEDQRQLPVTAPRNDSINNNNKA

SEQ ID NO: 250855 - protein, 59 aa, Glycine max
  Clone ID: PAT_MRT3847_68551C.1.pep
CTTLPTYSARLDVFLLESDKGSTGTETVRGQRMLDSDLLALSLPSLGMSGVLIAYIGLL

SEQ ID NO: 250856 - protein, 165 aa, Glycine max
  unsure (1)..(165): unsure at all Xaa locations
  Clone ID: PAT_MRT3847_68552C.1.pep
MAYHNHNLSQQDLPLHHFPNQSILPDQQQQLPSSPEPNSKPPSDLQTAPNWLNDALLRTHYTETTTNDATTNTATVAAAAANSNVNGSNFLNLNPGASDAQWPALHRHPGEVIDAGAGDSMVEHADLKGGGGDGGGDAVNWQIGRWKAEILQHPLYEQLLXAHVS

SEQ ID NO: 250857 - protein, 295 aa, Glycine max
  Clone ID: PAT_MRT3847_68553C.1.pep
GNALKCSACQGYCHTGCSVSSTVSTCEEVEFLATCKQCHHAKLLTQKESCYESPTSPLLLQGQERSTLAVLKGPRPNCDGQGLISTKTKNSRLDMKLVASDFPLETKGRSISCSWGVIWKKKNNEDTGFDFRLKNILLKEGSGLPQLDPVCRLCHKPYRSDLMYICLETCSNWYHAEAVELEESKLFDVLGFKCCKCRRIKSPVCPYSDLYMMQGGKKLLTRASKKEHFGAYSDSGTPIDTRTCEPATLIYPAGDVSRQDNDPLFFSLSSVELITELQLDADDANFSVSGGFKPK

SEQ ID NO: 250858 - protein, 41 aa, Glycine max
  Clone ID: PAT_MRT3847_68554C.1.pep
LCRMLSLVTVDFLTWQSLLVSWARFLTLSFGTCYEVLFPIM

SEQ ID NO: 250859 - protein, 68 aa, Glycine max
  Clone ID: PAT_MRT3847_68555C.1.pep
TSRVSGFSISILSLSSLPIRVSSSTRSPMADESQYAGDPDSSPTPRSLQGRVQGRVAPYWVLGRPEPG

SEQ ID NO: 250860 - protein, 79 aa, Glycine max
  Clone ID: PAT_MRT3847_68556C.1.pep
PGAPVIDVGPNAVDAPPKKSGSRLVGDVDFGEASKVAGWIPPVPGGVGPMPVPMLLKNPLEGAQRSLDQKNWSSLNLNK

SEQ ID NO: 250861 - protein, 75 aa, Glycine max
  unsure (1)..(75): unsure at all Xaa locations
  Clone ID: PAT_MRT3847_68557C.1.pep
VPPPPLEVPPKYGGPPRGPPPFGTPRGTPKALXAPPRFGGRPPFPPLNPPGHLKGGLPFLFSLAPIKTPPLGFGF

SEQ ID NO: 250862 - protein, 77 aa, Glycine max
  Clone ID: PAT_MRT3847_68558C.1.pep
LSHVFSFRFSPRDLTSRGTYSLSVFFFGVSVVSFKGASFSGPLASRLPPSPSPSPTFTGVLPTSPPHLRPHRITEDE

SEQ ID NO: 250863 - protein, 45 aa, Glycine max
  Clone ID: PAT_MRT3847_68559C.1.pep
RTSWGIRVSGGSNSDPCGTACNSGTGTAATPTDIRYSESVGLHDI

SEQ ID NO: 250864 - protein, 73 aa, Glycine max
  Clone ID: PAT_MRT3847_6855C.1.pep
MEWSFSISVVLFLTLLIQIHGSGYLDHKQARGFAENYGCNLFQGSWVYDDSYPLYETSQCPFIEREFDCQNNG

SEQ ID NO: 250865 - protein, 63 aa, Glycine max
  Clone ID: PAT_MRT3847_68560C.1.pep
STGVIDRLCTVLVQNRVQSVQCYSLPLEYYICTRASAYDEVVIVLGQVLEKSYSFVCRIGWSG

SEQ ID NO: 250866 - protein, 44 aa, Glycine max
  unsure (1)..(44): unsure at all Xaa locations
  Clone ID: PAT_MRT3847_68561C.1.pep
PFKFNSFSIWVSLCSFESAGDSTLNRYSFIKIYFLNSILSXSLS

SEQ ID NO: 250867 - protein, 125 aa, Glycine max
  Clone ID: PAT_MRT3847_68562C.1.pep
ARGLINGFFPLLMDNGKPNPKLKLKFQLWFKPAELEPSWAKMLSNDWEFQGLREATFPLRSNCQVKLYHDAHHSSAFQPPFDLCGAPKKLWEDVYKAIEGAKYLVYIAGWSFNPMMVLVRDPLTE

SEQ ID NO: 250868 - protein, 62 aa, Glycine max
  Clone ID: PAT_MRT3847_68563C.1.pep
KKFLKFNSPGKEWECFPPFWVFKSQISGFCPKKKKKKKKKKKKKKKKKKKKKKKKKKKKKRK

SEQ ID NO: 250869 - protein, 92 aa, Glycine max
  Clone ID: PAT_MRT3847_68564C.1.pep
TFSDLFKKKIKKKKKKKKKKEKKKKKKKKKKKKKKKKKKKKKKTKKKKKRLIKNKNETNTRNMQYKLDRKQAITLIHNYNMIAIVQAKKPRS

SEQ ID NO: 250870 - protein, 166 aa, Glycine max
  unsure (1)..(166): unsure at all Xaa locations
  Clone ID: PAT_MRT3847_68565C.1.pep
IYCPTTTSADVCRLSMATKAFHSAGEANTEGDRFLLYDWTCIISXTSSAPTFHSIKDLYLYLYERPTLIDQCTNSFXLQKRTGNNGYMLPARDLIIIWGDTTYYCXWTILPYPMFKQVARLQAERWLDITARKNTPVLYSNTNHAGLLVHKRIDAAGFHYYPVVLT

SEQ ID NO: 250871 - protein, 193 aa, Glycine max
  unsure (1)..(193): unsure at all Xaa locations
  Clone ID: PAT_MRT3847_68566C.1.pep
IQEAVFLYGVEDKVLQLQTELRMMRSYLQDADRKQDGNERXRNWISEIREAAYDSDDVIESYALRGASRRNLTGVLSLIKRYCFXTLTNSLKTHKVGSHVDNVXARISNLTKSLETYGIRPEEGKASNSMHGKQRSLSSYSHVIEEDIIGVQDDVRILELCLVDPXQSYRVVAICGXGGLXKTTLAKKVYHSL

SEQ ID NO: 250872 - protein, 113 aa, Glycine max
  unsure (1)..(113): unsure at all Xaa locations
  Clone ID: PAT_MRT3847_68567C.1.pep
MASLGPAAAGEQASGAEAEPGPAWPSSSSSPCLSGAPCSPLQRGTLSTNWAGRPRTSAEESAFAXSSSTRELLSDVRFVLSKGRGADAAGGPQRILAHRFMLADGNAVFDPMF

SEQ ID NO: 250873 - protein, 139 aa, Glycine max
  Clone ID: PAT_MRT3847_68568C.1.pep
MKGKWFFPPWAAQRIIEGNVSDVMDKRLGNAYNIEEARRVALVAVWCIQDDEAMRPTMGMVVKMLEGLVEVSVPPPPKLLQALVTGDSFHGVKADSGNGASSTGGSLSDGDLEVSTADSESYTGNVFSPLDVNVNVSVR

SEQ ID NO: 250874 - protein, 117 aa, Glycine max
  Clone ID: PAT_MRT3847_68569C.1.pep
LERRVTDTSFTLVLHLHLMLKSLTRLYQEECTCDLCLSPMALTLDLYEGGAGGVAVITMGIPPKNAGDNTTSMGETNRSDDASRRSDLRTLWETVKGRTLSGGFDISDMQQVHRTKD

SEQ ID NO: 250875 - protein, 177 aa, Glycine max
  Clone ID: PAT_MRT3847_6856C.1.pep
SLYSYLRTNAIIDSKTTIRIAKDICAGMIHLHAENLVHRDLAARNVLLGKNLEAVVADFGMSRTVDFGGSGNKTRSDVGPVRWMAVECIMLKVYSKKSDVWSFGVVLYELYSRQDPWAGMELIDVAYAVRDGKRLTPPPHCPNEVKDIMKRCFDTSPDNRPSFDELFETFEKMESRM

SEQ ID NO: 250876 - protein, 75 aa, Glycine max
  Clone ID: PAT_MRT3847_68570C.1.pep
LQSQFHLDNYIANRNDSRMEGFKNEIIMEEFFQEKYKLFSGEYFNSNADQPLNKIINTSHWFLALQINFIFISFP

SEQ ID NO: 250877 - protein, 48 aa, Glycine max
  Clone ID: PAT_MRT3847_68571C.1.pep
LLIPLASWHSNCILGVSECRIQRSIILPIGQGSQLLSVQQKPPFLCCC

SEQ ID NO: 250878 - protein, 120 aa, Glycine max
  Clone ID: PAT_MRT3847_68572C.1.pep
TIQLCYFYGGELLLTYIYIGKKRVCSNCIPKRNRAQLPKQSPPSLWDKEKRPRHKKRRLGLPTPNNKKGAGLVLVIKPVRNKASAWGGKKPLTGARSLQKGGRFPGKGGATTNLTCHTAN

SEQ ID NO: 250879 - protein, 312 aa, Glycine max
  unsure (1)..(312): unsure at all Xaa locations
  Clone ID: PAT_MRT3847_68573C.1.pep
TSRGISSHSLRTSTVLCKSTNLHQAATLESAFILFAPQRFSNSHRFSAKAPISIKLHASTSLFFSSKSSFKTGRLCFQLCSTLQEVAATEETPELTQPTDNVKKLYVVNLSWSLTAADINDLFRQSGSSCVVKIIKSKDGRSKGYAYVTMGDXENPLPVLDKFDSYELSHRHVMDASTLAWKARSTHLRPVFPEHGKTPHVIHACILACNADDLLGTDLSLFLPGRNHQPGFVFDSPSGRSAGYGFVSFLTKEDAEAAISTVDGKELMGRPLRLKFSEKKDKAGREKDEDQDKDAGSEEDEDEGSDARPEES

SEQ ID NO: 250880 - protein, 621 aa, Glycine max
  unsure (1)..(621): unsure at all Xaa locations
  Clone ID: PAT_MRT3847_68574C.1.pep
MEGIIQIRSVLLLLSITMASLTLAVADGVSREEAKELRDEVKDMFYHAFNGYMDHAFPLDELRPLSCAGHDTLGGYALTLIDSLDTLALLGDRQRFSASVEWIGKNLRFDINKTVSLFETTIRVLGGLLSAHLIATDYATGMRVPLYDNQLLNLAEDLARRLLPAFDTPTGIPFGSVNLLHGVDKHESKITSTAGGXGTLTLXFGVLXSRLTNDPIFEQVTKNAVRGLWARRSKLNLVGAHINVFTGEWTQKDAGIGTSIDSFYEYLLKAYLLFGDEEYLYIFQEAYAAAMHYLYHDPWYVEVNMDSAAIVWPLFNSLQAFWPGLQVLAGDINPAIRTHAAFLSVWRRYGFTPEGFNLASLSVQHGQKSYPLRPELIESTYWLYKATRDPRYLDAGRDMVASLQYGTRCPCGYCHISDVENHQQEDHMESFFLAETVKYLWLLFDLAVGPDNLVENGPYKYIFSTEGHLLPATPQISLVREHCLYYGAYCRSGDLRQTYFVPESDKDKKESNDTGFYESWTKPTYSSDYTTVEPSAVSGLIKGFCPGLNHGQKFGILYAYPTDERHDYETNQVQQKESTTAVQLQSHSVLVLRDQSSDNLLPEDNSSNHNDSQTNESSDTP

SEQ ID NO: 250881 - protein, 44 aa, Glycine max
  Clone ID: PAT_MRT3847_68575C.1.pep
HSLTSYTTFTIFTQLLHNAYFEKYPYHDTPFTSHNYSIIFYSLN

SEQ ID NO: 250882 - protein, 137 aa, Glycine max
  unsure (1)..(137): unsure at all Xaa locations
  Clone ID: PAT_MRT3847_68576C.1.pep
LLVTKHPQCAHNFVLAFCRRYYISEGLRKLQCRLLIFVGDMSPFHVEALHMTSKLDRRFSALVEVQACGSMVTEEQPHAMLISMEYFLMGXGLYXPPKLSVSPRSPLSPSCISPELYSPESMGLKLKPIKTRISLEI

SEQ ID NO: 250883 - protein, 67 aa, Glycine max
  Clone ID: PAT_MRT3847_68577C.1.pep
NPWCLRNWFICCLVTIQNDSMGLRVVLIPNCENINTILKTTFEDGITKKSCSELLSTIDLADCICAV

SEQ ID NO: 250884 - protein, 344 aa, Glycine max
  Clone ID: PAT_MRT3847_68578C.1.pep
MADSVSVDMEAISPPPEEHVVRTRHGCVSVAVYGDQDKPALITYPDLALNYVSCFQGLLFCPEACSLLLHNFCIYHISPPGHELGAAAIDPDDPILSADDLVDQIAEVLNYFGHSTVMCMGVTAGAYILTLFAMKYRHRVLGLILVSPLCKAPSWTEWLYNKVMSNLLYFYGMCGVVKEILLKRYFSKEVRGSDYLPESDIVQACQRSLDERQSLNVWRFLEAINGRYDISEGLRKLECRSLIFVGDMSCFHGEALHMTSKLDRRLSALVEVQACGSMVTEEQPHAMLIPMEYFLMGYGLYRPSKLSVSPRSPLSPSCISPELYSPESMGLKLKPIKTRISEEI

SEQ ID NO: 250885 - protein, 354 aa, Glycine max
  unsure (1)..(354): unsure at all Xaa locations
  Clone ID: PAT_MRT3847_68579C.1.pep
MADSVSVDMEAISPPPEAHILRTRHGRVAVAVYGDQDKPTLITYRDLALNXYVSCFQGLFFCPGVCSLLLDNFSIYHISXTLIIFLHLSCXLCLGAADIDPDDPILSADDLADQIAEVLNYFGLSTVMCMGVTAGAYILTLFAMKYRHRVLGLVLVSPLCKAPSWTEWLYNKVMSNLLYFYGMCGVVKEILLKRXFSKEVRGSDYLSESDVVQACQRSLDERQSLNVWRFLEAINGRYDISEGLRKLQCRSLIFVGDMSPFHAEALHMTSKLDRRLSALVEVQACGSMVTEEQPHAMLIPMEYFLMGYGLYRPSKLSVSPRSPLSPSCISPELYSPESMGLKLKPIKTRISVEI

SEQ ID NO: 250886 - protein, 63 aa, Glycine max
  Clone ID: PAT_MRT3847_6857C.1.pep
NFLLTYHKQMPAPTIASILHNNSSVMTFLNMRSNTLTISLLYQQLWINKLSFIINKHAHGVTL

SEQ ID NO: 250887 - protein, 58 aa, Glycine max
  unsure (1)..(58): unsure at all Xaa locations
  Clone ID: PAT_MRT3847_68580C.1.pep
GSFEAIHVXDDFGHEFKFCMGNVFSIGKVSKQWISVHKGKGFKLLIIEEVRKRIFFNK

SEQ ID NO: 250888 - protein, 135 aa, Glycine max
  unsure (1)..(135): unsure at all Xaa locations
  Clone ID: PAT_MRT3847_68581C.1.pep
TNLVMVFGEITIKAFAVYXKIVRDTCRNIGSXLNAVGLDADNCKALVNIEQYSPDIAQGVHGHLTKKPEEIGAGDQGYMFGYATXDETPVLMPLSHVLATKLGARLIEVCKNGTCPWLRPVGKTQATLEFYNDNG

SEQ ID NO: 250889 - protein, 41 aa, Glycine max
  Clone ID: PAT_MRT3847_68582C.1.pep
RVTVFLTRTAKPVIKEVPLMMSTISHCMCSQINTLFEWYKL

SEQ ID NO: 250890 - protein, 61 aa, Glycine max
  Clone ID: PAT_MRT3847_68583C.1.pep
GTMLETEDLGMSILQRLHSQRQSLLHTHDTLHGVDDNTDKSKKILANMSRKMDKNKWILST

SEQ ID NO: 250891 - protein, 63 aa, Glycine max
  unsure (1)..(63): unsure at all Xaa locations
  Clone ID: PAT_MRT3847_68584C.1.pep
MHESLGPKGGISYYVFKKXHESRXFXKLLRLGEEFXGEPXIFLREHPETFWLNDLXPYNXXLG

SEQ ID NO: 250892 - protein, 143 aa, Glycine max
  Clone ID: PAT_MRT3847_68585C.1.pep
HASGSSKNPFIDHDDSSGSNLSTTKPQIGSPNPSPPSNGESVPSNRSPTKDSIDGGVDLSQRAVAVPSLFEEDVEFVGVELEGTEKAMEQALKEGIVGEAGPLKRNMVSKVPEKESTDEGGPGIKEFNDANYWRVDQEVAVLE

SEQ ID NO: 250893 - protein, 54 aa, Glycine max
  Clone ID: PAT_MRT3847_68586C.1.pep
KRYLISFQREVRVGNKTPRRNSATAMMRSGGGEGRSLSPSSRSTAQGKELQSGF

SEQ ID NO: 250894 - protein, 87 aa, Glycine max
  unsure (1)..(87): unsure at all Xaa locations
  Clone ID: PAT_MRT3847_68587C.1.pep
VAPVFYFPPAWCGFRRFILLIVGELSNKYFYVTTYKIDIDXEAXPGTCGKLHILSVAILYFFXNGKKGDEVIGADVARFKYILDQLF

SEQ ID NO: 250895 - protein, 185 aa, Glycine max
  unsure (1)..(185): unsure at all Xaa locations
  Clone ID: PAT_MRT3847_68588C.1.pep
GGVPRTPTHPPFIPPRFPPPTRVFPPGGKPGGPAGATPQGPRGEGQTRWAPPPGKKKTPPGAPNANPPSPGGCRFLKTGGPPGFPPGKRPVGPPPFIWGGPPPRPPPLSPFCFRPVFCGEFWPENHFPPGTPLPPXPPPFKPPPKRKSGAPPGARPEIPGGPPRPPAGKKPPKGVFGKPPFKFFK

SEQ ID NO: 250896 - protein, 87 aa, Glycine max
  Clone ID: PAT_MRT3847_68589C.1.pep
NQEGRDPPPKGHPAQPLFLKTTGFPTLGFPLPKMDLGDPNPPSKGQLFFKPKPPTQSPGIQRKPPGGKNPFLGPPRTQSCFGGSIPL

SEQ ID NO: 250897 - protein, 54 aa, Glycine max
  unsure (1)..(54): unsure at all Xaa locations
  Clone ID: PAT_MRT3847_6858C.1.pep
QDILVIQRGDPADGNATXDLNLFAFGINAENNQRNFLAGSKDTVISQIPIQVQE

SEQ ID NO: 250898 - protein, 91 aa, Glycine max
  unsure (1)..(91): unsure at all Xaa locations
  Clone ID: PAT_MRT3847_68590C.1.pep
QKPEFFWPPPPGNGLPPFGFPNVERAFFGNPPPGRALFSLPPGGALYFGFSPGEKVPLWFQVDGWFFVXKNPPGWDGQMAGLVPFFFVSPS

SEQ ID NO: 250899 - protein, 33 aa, Glycine max
  Clone ID: PAT_MRT3847_68591C.1.pep
FDLSVNTLILAYSRGALSKDLGNQIYKYSTCVI

SEQ ID NO: 250900 - protein, 80 aa, Glycine max
  Clone ID: PAT_MRT3847_68592C.1.pep
HSDTLFMFFRLWTAHYTRVRKAYGETSSRRKWNTVLEFCSSVGQTVDEITHNVESLYSTQILHLRRIVCVTIGGTTEPLE

SEQ ID NO: 250901 - protein, 76 aa, Glycine max
  unsure (1)..(76): unsure at all Xaa locations
  Clone ID: PAT_MRT3847_68593C.1.pep
SFSGVSVKLTPKSITLXRSKPLTVLAATKKAAAVLKGTSAVKGVATLIQEDNGPPPVFVRITGLTPGLNGFNLHGF

SEQ ID NO: 250902 - protein, 77 aa, Glycine max
  Clone ID: PAT_MRT3847_68594C.1.pep
RTCERQRSYFRHASGEVYVVSKALAQFVSINRFILRTYAHDDVSIGSWFIGLDVEHLDETKFCCSSRWSPGAICAAV

SEQ ID NO: 250903 - protein, 72 aa, Glycine max
  Clone ID: PAT_MRT3847_68595C.1.pep
DRMIIILKSDLAQHYDGLEDRLILPHYDILNMSMTLKYPLLSHQSSSDLYFYHPCSFLNSRYLLYVQKLITG

SEQ ID NO: 250904 - protein, 62 aa, Glycine max
  Clone ID: PAT_MRT3847_68596C.1.pep
IGPFTRPVNCDGGSLNSHPSHSFQGNGLGTCFCMGILVLFDTDVSDVHVFCQALIRLYIVVV

SEQ ID NO: 250905 - protein, 80 aa, Glycine max
  Clone ID: PAT_MRT3847_68597C.1.pep
LLEIKLCVQRFGTLMVFTDLVKSFGACSTQLCVVPTNSSWCMTYVAPLDTRCFIGAFPHVSFRAVCFVRAITNNVFSFAC

SEQ ID NO: 250906 - protein, 131 aa, Glycine max
  unsure (1)..(131): unsure at all Xaa locations
  Clone ID: PAT_MRT3847_68598C.1.pep
ILSKVAQDMDEERLDRVDEEDSFEEVHLSAPLNGVVGWDYLXRIPLATYDASPHVLLRINGEKGIKRFVFGDSEEMTLIPETMVEKAYTKLIAELEKYVSTLVDIECPMDEKPPRTYIFDRPKTRXFTILP

SEQ ID NO: 250907 - protein, 57 aa, Glycine max
  Clone ID: PAT_MRT3847_68599C.1.pep
QGNNEVLGSVPLLLLLCFMKQSKEGKVKKSKNQGGEKQVRKGRIDLVTPFQASFGNH

SEQ ID NO: 250908 - protein, 470 aa, Glycine max
  Clone ID: PAT_MRT3847_6859C.1.pep
HVSAHASAEPKLGATPVFIFATAGMRLLPFEKQQILMEHLRNELPQMTKLQILDQHIRVISGRWEGIYSWIAINYMLGRFNLSKSVNKSKSESLEERSQPALSVEKKERPKTAGMIDMGGASAQIAYELPLGHSDAATGGQENVQLLNLGCRDDESRFRFRLFVTTFLGFGVNEGAKAYEKFLWKRLNNKRQAANSTETDNGKDGAKVPTVVDGCLPVNMLKLSHAEENYDQFVRKGNGDWDSCVSDIVSLLFESNSKCSPAKECFFNGVHAPPQLSLSDVELYGFSEYWFSVDDVLSLGGKYEHDKFEQKAKEFCGQPWAVIKRKVKAHFYQKADSERLETQCFKSAWIHAVLHNGFHVDEIQHHFQSAFRINGQEVQWALGAIIYQMRYFPLFAESKGIIQPKQKSRIRPLFSAGPSVFYFLCVLSLAALLIRILWKSKQRQISVAKRRDNGKIVKYWRLDEELSNSP

SEQ ID NO: 250909 - protein, 130 aa, Glycine max
  Clone ID: PAT_MRT3847_685C.1.pep
RSIARNVPGAVHRDVTHNSWQEICGVQKLQGGVVVWCGSGQWSVCKSTHARVSYSPYLPRYRPNLAAHCDACQYPRYLQPYSLTQNMRPPPQQLGNIGGTQMPLPNYRLSLRGRQCHLMRRQQRTMPIDS

SEQ ID NO: 250910 - protein, 283 aa, Glycine max
  unsure (1)..(283): unsure at all Xaa locations
  Clone ID: PAT_MRT3847_68600C.1.pep
MSSLSRELVFLILQFLDEEKFKETVHKLEQESGFFFNMRYFEDMVTNGEWDEVEKYLSGFTKVDDNRYSMKIFFEIRKQKYLEALDKQDRAKAVDILVKDLKVFAAFNEELFKEITQLLTLDNFRHNEQLSKYGDTKSARGIMLAELKKLIEANPLFRDKLQFPTLKNSRLRTLINQSLNWQHLCKNPRPNPDIKTLFVDHSCGQVHPNGARAPSPVTNPLMGAXPKAGGFPPLGAHGPFQPTPAALPTSLAGWMANPSPVPHPSASGRTHRFGKQANNASYF

SEQ ID NO: 250911 - protein, 83 aa, Glycine max
  Clone ID: PAT_MRT3847_68601C.1.pep
HLHILSENQTMLTPEYELTPYCTDIFFTPNLYNTILAHWPIYFHSQCTTPCIQNPNSTSSSYTAFFLLIKAHPSLSLFFSTPG

SEQ ID NO: 250912 - protein, 50 aa, Glycine max
  Clone ID: PAT_MRT3847_68602C.1.pep
LDFILKILYPFDLIPHLKLKASLYHTEIKGVIRISVYAVHVISYLLCETF

SEQ ID NO: 250913 - protein, 158 aa, Glycine max
  unsure (1)..(158): unsure at all Xaa locations
  Clone ID: PAT_MRT3847_68603C.1.pep
QRQCECLAILMYYSISSDDHTTLSQAGGKSMLKLAQLMTSNYCSGVSASSALKWDNLHISTLGDDMKVMTRKNVDDPGEPTGIVLTAATSVWVPVTRMRLLNSLLDEHLRSEWDILFNGGPMHDMVHIVRXQGHGNCVSILRLMPLRQLIYLLILHDT

SEQ ID NO: 250914 - protein, 190 aa, Glycine max
  unsure (1)..(190): unsure at all Xaa locations
  Clone ID: PAT_MRT3847_68604C.1.pep
MPPTLLLLLSLENDEAALGQRERRISTPTCERLTIQQAHAFMPGLKCCNRPLSHSETYMGTTLDATFLXRSVTGVFSELLHAXCPENVWCHCIITTHRQTELRRIITETVPYLSLQLYHFHENLVRSKMLYSIRRALDQPLNYARMYDAYLRMANGRRIIDFYYNLIELHDLDKLWSIDLHTRLLGAPKY

SEQ ID NO: 250915 - protein, 513 aa, Glycine max
  unsure (1)..(513): unsure at all Xaa locations
  Clone ID: PAT_MRT3847_68605C.1.pep
MNDQSQMIMNLNQMNQPQVMNQVKPQMLSHNQQAQQPQMKTSQIMMNHSQPQPPMMNRGYNKVWSQHPPLDPNMKFQNPMKPNYWSNWKGKKVTDKRKDPRRMEKPIPSGIATLSISNSGVVGYQPPTLHELQSQNRFLARKFYPDFEFNNRFAPXARGNTTSFIIRAKKSGGIASLVSPCPVTPAVLPTPILSPSREVLGDMAKEEWGVDGYGSMKGLIRLRSPGNEADVHDYEDEEDGGSSESDVEEHVEVERRLDHDLSRFEMIYPNYGGEYNNVLENRVDDQDSHIAQLEEENLTLKERLFLMERELGDLRRRLLFLERQNQAVEDVNEEVVENGSDNESEGGSDVPVLGIENNVEMADSLPESGRVGNVEAGAKLDNDGVLEAEGVDDIFMEGSVPNEAIAKKDEIRGHEMGDDCVFDEVKEKDEQQDEVVTQQCLTDNFFAKDNDVMDNKESDDFEMLNRNEESTSQGATDENTNDVVLNEKDGSKNQVVGTSLETTSGDDNLSVPC

SEQ ID NO: 250916 - protein, 106 aa, Glycine max
  unsure (1)..(106): unsure at all Xaa locations
  Clone ID: PAT_MRT3847_68606C.1.pep
IHHXRLRLRLVHHNLRCLHLRLLRLLIHSLIVREHLRLRLTYNLHLIHHLRLAHLVQIHHHLRLVVHLNETLGLTVPAITISNGTVENKVVSLIVKTGTGKERPKP

SEQ ID NO: 250917 - protein, 95 aa, Glycine max
  unsure (1)..(95): unsure at all Xaa locations
  Clone ID: PAT_MRT3847_68607C.1.pep
FAWVQKAVAPTIAQRGEFHSMQTMMNAPDSNDNIDLLLSIDLLGLQGAGKAFSNKIVFDDKLVLANTQXFFDGNFPVDSWLPIFVKCIYPRSQLP

SEQ ID NO: 250918 - protein, 314 aa, Glycine max
  Clone ID: PAT_MRT3847_68608C.1.pep
MAVGLSAAITMKSLLRFHQPHLNLPKSIPTTLPFSPMRIFHHTASPRTQKVSTFTVCVLMQDPKQGTHMEIEPQEQPPPPPPPPAQQVLSPKLAEKLARKESERFTYLVAAVMSSFGITSMAVFAVYCRFSWQMEGGEVPWSEMFGTFALSVGAAVGMEFWARWAHRALWHASLWHMHESHHRPREGPFELNDVFAIINAVPAIALLSYGFFNKGLVPGLCFGAGLGITVFGMAYMFVHDGLVHKRFPVGPIANVPYLRRVASAHQLHHSEKFNGVPYGLFLGPKEIEEVGGLEELEKEISRRARSYKIANENN

SEQ ID NO: 250919 - protein, 175 aa, Glycine max
  Clone ID: PAT_MRT3847_68609C.1.pep
PSRPPTRPVPLIDLETSGNGMELQVETSQVHCSEGELPYSCQVEDGWSKTNSYSNVYSVKKLNKEDFSKQSGTRNNAPNLVARLMGIDTMPLPLDTKSVVPLDESKHGNMERKFSKNGMNPRGSVGRGSSNFNSSSHMVFDSFYRDIDVGDDQCGQNFGKPRPREHPQERGLKFK

SEQ ID NO: 250920 - protein, 177 aa, Glycine max
  Clone ID: PAT_MRT3847_6860C.1.pep
GGTHASEFERPLFFFFFFFFFFYALCVQMEFSFGPRRWLPKELLQDRRADDDVGNNENYALGLHAPGFFDKILNVDNCLLQSHPANKVLAAVQECWRDPQLGFSPYSVHSHKGFLKHLMLRTGRDVTTYQPEVMVNFVTSSYKPELLKFLVDKVSVFPEVVSVVNNVNTSVGEEDTL

SEQ ID NO: 250921 - protein, 100 aa, Glycine max
  Clone ID: PAT_MRT3847_68610C.1.pep
NSLRIATDPGDARYTSASTEDVAGYGQRNALNVANNITVSSARNEHSEINSHMGTSWLEQCVTFKTANMLQMYDTLTYDSINSYGPSFNYKEPICVVASC

SEQ ID NO: 250922 - protein, 120 aa, Glycine max
  Clone ID: PAT_MRT3847_68611C.1.pep
MGTKVQNLPGYNSMRDLNEESSSCGWPLFYGDKSLTNGQYYNNYLPSSTTDACSAYDKDVVKQMMLEHEAVFKNQVYELHRLYRIQRDLMNEVKRKEIHRNKIPVEASFSAGHMTSQLTT

SEQ ID NO: 250923 - protein, 69 aa, Glycine max
  Clone ID: PAT_MRT3847_68612C.1.pep
LGIRLEVLDRERSPFLIDYFFKDNPFMFYTTGDNINLTEPLTQHRCPTSLNLTKHIPKHHSISLIKQIS

SEQ ID NO: 250924 - protein, 99 aa, Glycine max
  unsure (1)..(99): unsure at all Xaa locations
  Clone ID: PAT_MRT3847_68613C.1.pep
SLCSQGPPTKREMAPKPPSTAPKDGPNKGHAATKKEKPTRPTERKGKTSKRAHPARNXTREAAGPAPQEKRKTEEPNGGKEKRAPKAAKRQPRHTHNAP

SEQ ID NO: 250925 - protein, 104 aa, Glycine max
  Clone ID: PAT_MRT3847_68614C.1.pep
DHPITEISDSPGHLLLLKLWQKEEELFAKPLAHQETRLDTIKAELFQLSSFFFILHALFLTLLITAWTKAQKTGPTTPYRWKQVAATLHGGPFHLPCGCGGRAS

SEQ ID NO: 250926 - protein, 67 aa, Glycine max
  Clone ID: PAT_MRT3847_68615C.1.pep
MINGEKGKRRGGAGEGEETTTKTGTRGEEAHNKQIGEREKSGPTQEGNEGTKDEKPPGRKKKDKPKT

SEQ ID NO: 250927 - protein, 84 aa, Glycine max
  unsure (1)..(84): unsure at all Xaa locations
  Clone ID: PAT_MRT3847_68616C.1.pep
YFKRLILDSWLKKPKVKKKENQIRIRSTISLWHFDVCFFMIDSIVTFKSMNSITRLYDIXHMDFNSINLPIFRRERNYKNHSIN

SEQ ID NO: 250928 - protein, 161 aa, Glycine max
  unsure (1)..(161): unsure at all Xaa locations
  Clone ID: PAT_MRT3847_68617C.1.pep
MYCGEEAKQWSCGKAGAVNLRKVSSIVRDIGDPCLSQSPVKVNRMLKPDKWQAMSDSEGKVFGFRKALKLIVLGGVDPSIRPEVWEFLLGCYSLSSTAEYRRRLRAARREHYSGLIKQCQTMHSSVGTGSLAYXVGSKLMDLRTSSKDGPEIASLNRRINI

SEQ ID NO: 250929 - protein, 41 aa, Glycine max
  unsure (1)..(41): unsure at all Xaa locations
  Clone ID: PAT_MRT3847_68618C.1.pep
XNHPXHSAPHLHLQXXHPXSFSPMXXIPSPXMNTGXSTNXX

SEQ ID NO: 250930 - protein, 45 aa, Glycine max
  unsure (1)..(45): unsure at all Xaa locations
  Clone ID: PAT_MRT3847_68619C.1.pep
SFISVTHHTNLQCLGYQDETQXWLINNTGSTSMVLNLNFLPPFLI

SEQ ID NO: 250931 - protein, 120 aa, Glycine max
  Clone ID: PAT_MRT3847_6861C.1.pep
FRLECCTYDNIHGLVRREERASIRRADGRGRLQPSRDASPRATSSPTTMSPTPISSLIVRDDFSALMHICYCPSLLHEDSRRYNFLEYGYFISKGPLHYVHRITRLNIGLPLLMLGLSCE

SEQ ID NO: 250932 - protein, 79 aa, Glycine max
  unsure (1)..(79): unsure at all Xaa locations
  Clone ID: PAT_MRT3847_68620C.1.pep
MSCCGGNCGCRSSCQXATGSGASRXFPNLSFTXSTTTQTLVIGVAPVXAQFEGALMGVPAENHSCKCGPNCFCDPCTFK

SEQ ID NO: 250933 - protein, 89 aa, Glycine max
  Clone ID: PAT_MRT3847_68621C.1.pep
VFEKLGPSLYGLLRKNNGGSFPIDLVREIGRQLLECIAFMHDLRMIHTDLKPENILLVSPEYVKVPDYKSSFRPPSSYLRRVPKSSAIK

SEQ ID NO: 250934 - protein, 41 aa, Glycine max
  Clone ID: PAT_MRT3847_68622C.1.pep
NMVHTILPKTMCVSHQQHNCSWGHQSCIRGVAHTLYDVLAS

SEQ ID NO: 250935 - protein, 162 aa, Glycine max
  Clone ID: PAT_MRT3847_68623C.1.pep
MYKERGFEIKPEIAGLMISAIISDSLLFKSPTCTKEDVDAAQALKDIANVDLEAYGLEMLKAGASTTDKSAETLVNMDAKSFNMGDYVTRIAQVNTVDIDEVLDRKEEFEKVMLEMSANEKYDLFVLVVTDIINSDSKILVVGAEKDKVGEAFKVQLDDGVD

SEQ ID NO: 250936 - protein, 63 aa, Glycine max
  Clone ID: PAT_MRT3847_68624C.1.pep
LILAILCWEDVSTISEMHNGSLSGCLGVPCSSVPLKGALERAAGHDIYWVEPTAEVLLDLRLV

SEQ ID NO: 250937 - protein, 145 aa, Glycine max
  Clone ID: PAT_MRT3847_68625C.1.pep
DIKNYWNTHLKKKLKQSDQSGSDEGVDHEGHSSSSSSISHPKGQWERRLQTDIQMAKKALCDALVFHKSATATTTNLVVPDDATKPSSSSHHQPYNHASSSYASSYENISRLMENWMKPPNSTNNSPGYYSSFSNMVNNNTSTTG

SEQ ID NO: 250938 - protein, 77 aa, Glycine max
  unsure (1)..(77): unsure at all Xaa locations
  Clone ID: PAT_MRT3847_68626C.1.pep
LHLLNPISNLNTNYKTQTNNIPFILQMTPIHKKIPILIHNXNPFNXSLIESHYIDDFCHYTHYLFPSDPYHTPQPTF

SEQ ID NO: 250939 - protein, 68 aa, Glycine max
  Clone ID: PAT_MRT3847_68627C.1.pep
NQAYKDKQWQKAIGFYTEAIKLCGDNATYYSNRAQAYLGLGSYLQAVEDCTKAISLDKKVTFFIERFA

SEQ ID NO: 250940 - protein, 152 aa, Glycine max
  Clone ID: PAT_MRT3847_68628C.1.pep
KEWHHLLTISASHTQGQESSSILMKYMSQYKILQVRYWYSKHNFQRSPILLEFPTFLRYVSVYYLAFSAVSINKRNIIIRKTLPILNRILATKYVDGLYEKLLTRNIMLPIWKEDARGIERPSNKRSQHQVFRSINNYLFNMYSVRVDISLH

SEQ ID NO: 250941 - protein, 171 aa, Glycine max
  Clone ID: PAT_MRT3847_68629C.1.pep
GSRFIGHRCGGGEMEEGKSKSTLAKNPSRSRNPSRRVALDVPSPRHMGSTLSGIHSSIDHLDKGRYHPCCFACCAWSCLIVFILIIAILFLGITYLAFLKSGMPKINVRAFNITKFQVDDGSQKMNSVIGLGLIFSNKNDKLKLLYGPLDVDVTSEDVLLGKKKQGGFSQK

SEQ ID NO: 250942 - protein, 74 aa, Glycine max
  Clone ID: PAT_MRT3847_6862C.1.pep
MYIVLHNRELYSNNITGPIPSDLGNLTNLVSLDLYLNHFTGPIPDSLGKLSKLRFLRLNNNSLSGPIPMSLTNI

SEQ ID NO: 250943 - protein, 88 aa, Glycine max
  Clone ID: PAT_MRT3847_68630C.1.pep
LALENGNRNYRLRKINSDKAKANGNVVQEPQRGGCGCLCYVKMTMTPKGLGSMEMKLLHWTSLTISKILMQPKAFADAAFGSCIYTCK

SEQ ID NO: 250944 - protein, 207 aa, Glycine max
  unsure (1)..(207): unsure at all Xaa locations
  Clone ID: PAT_MRT3847_68631C.1.pep
MTSAHDLTDNEDDGQQQSESQIQSPSANGISDPDISTQNVNVQYATPGQLGTGHAMVPPVYPYPDPYYRSIFAPYDTQPYPPQAYSGQPMVHLQLMGIQQAGVPLPTDAVEEPVFVNAKQYHGILRRRQSRAKAESENKVIRNRKPYLHESRHKHALRRPRGYGGRFXLNSKKDENQNDDVTSADKSQSNINLNSNKNDQTSSDRTS

SEQ ID NO: 250945 - protein, 72 aa, Glycine max
  Clone ID: PAT_MRT3847_68632C.1.pep
FYFLSFQRKTKLIPSNPNNKLHNYTNAYLHQKETGSFAGLRCLSRKCLYIFLKIPFIYQRYKPSPIKNFCPK

SEQ ID NO: 250946 - protein, 87 aa, Glycine max
  unsure (1)..(87): unsure at all Xaa locations
  Clone ID: PAT_MRT3847_68633C.1.pep
MMKIFPRYPPVYPYPDPYYRSIFAPYDTQPYPPQAYSGQPMVHLQLMGXSXAGVPLPTDAVEEPVFVNAKQYHGILRRXQSRAKAES

SEQ ID NO: 250947 - protein, 51 aa, Glycine max
  Clone ID: PAT_MRT3847_68634C.1.pep
EWGNITQFDVIYTVSLYVLCSHSWYIIFWISPLNVEKHKTVHCGLCLFVIS

SEQ ID NO: 250948 - protein, 291 aa, Glycine max
  Clone ID: PAT_MRT3847_68635C.1.pep
MGEKDDDFGLSLSLSLGRVNQQQQHPPPLNHMHQPQQLQPVPMNHNKTLFGDLSQLPDRSSEMIRGIDVNSAAECDGVSSPNSAVSSVSGGDGKQSERDDDNNAAAVAGERTSCSRGSDDDDGGGSDASRKKLRLTKEQSMVLEETFKEHSTLNPKRKQALAEELNLKPRQVEVWFQNRRARTKLKQTEVDCEYLKRCYENLTEENRRLHKEVQELRALKLSPQMYMHMNPPTTLTICPSCERTHSFASSSTATIHSAVAATSSNRKLFGTNIRLPVSFNTRPFEGPIPRP

SEQ ID NO: 250949 - protein, 163 aa, Glycine max
  Clone ID: PAT_MRT3847_68636C.1.pep
MAKICCWSGTPPLQPLHKQFRRNHGVQNCSNTNTLNRRKIYACLNREKESETPQILKIAVSGVTELLRLFSPSSHQTSLEKQRDQIEFPASSVDDVLRIIKSYYDNAYFVTGNFSSSIYAENCIFEDPTIKFRGRELYARNLKLLVPFFDSASIILQKIDKDV

SEQ ID NO: 250950 - protein, 143 aa, Glycine max
  unsure (1)..(143): unsure at all Xaa locations
  Clone ID: PAT_MRT3847_68637C.1.pep
MAPNNLPPIFNPTSQDIEMLLAAQAHLGSKNLQVHMEPYLWKTRPDGINVINIGKTWEKIVLAARIIVAIDNPADICVISARPYGQRAVLKFAAHTGAVAIAGRFTPGNFTNYITRXFKEPRLIIVTDPRTDAQAIKEASYVN

SEQ ID NO: 250951 - protein, 62 aa, Glycine max
  unsure (1)..(62): unsure at all Xaa locations
  Clone ID: PAT_MRT3847_68638C.1.pep
ERRCRYRLRERYXXSSVSLDFRGFCIRNRGGSGGPRCGLRHVLWMIPSMDRLHHIFLQRKVS

SEQ ID NO: 250952 - protein, 95 aa, Glycine max
  unsure (1)..(95): unsure at all Xaa locations
  Clone ID: PAT_MRT3847_68639C.1.pep
QKELEFRLFKVTFAFSNDTSHLSESLHHLYWFLVDPNRMLNKSFKVLHKNQNIFTKNLVFFLNECPHIKFLHGFLKKISFNFHXTQTFPCPSNYF

SEQ ID NO: 250953 - protein, 145 aa, Glycine max
  Clone ID: PAT_MRT3847_6863C.1.pep
MGGSSCFFIICVLHSAIALTCGSLMVFYSKELSVLGHGPKTASKLQGSTPHDQFLIQTSDSFSGLLLFTIGFLVFMVACVKDWEFQSFFAKGCVLLHISMAVWRFYFEGKLEDLAHDWPRHAVGDIALATSWLFFLVYMWREKYD

SEQ ID NO: 250954 - protein, 48 aa, Glycine max
  Clone ID: PAT_MRT3847_68640C.1.pep
KGVTTGKKKKKKKEKSCLPQGLKSLPFPSLIYNPPTRVFKPNLTVCAP

SEQ ID NO: 250955 - protein, 178 aa, Glycine max
  Clone ID: PAT_MRT3847_68641C.1.pep
MALVPTRPFFDSFHSSPNFHSLRFCNSLFRHSLTPSPNSTFLRRKPLFIFRCNPAKSFSTDKHWLKRWNDPTNNHARPKPPCAVLDYSENGHASKSGLASSDEEGGDGNTGGSTMDRIVEKLKKFGYVEDGIQNKERVIEKGSVEDIFYVEEGMLPNSRGGFSSESPLGFGSFGSDDG

SEQ ID NO: 250956 - protein, 64 aa, Glycine max
  Clone ID: PAT_MRT3847_68642C.1.pep
TFESPLIHHEALLLHDPIRNIPNYRLLGGSHTTTFHSTSLLIKNLHRYPFLRPRSLALTSLNCS

SEQ ID NO: 250957 - protein, 61 aa, Glycine max
  unsure (1)..(61): unsure at all Xaa locations
  Clone ID: PAT_MRT3847_68643C.1.pep
FATFLFSKAFIARSSTXQIGSMVNWNRNYSXKTFXFGVEAPALMLKGVEKLAHSLKITIGP

SEQ ID NO: 250958 - protein, 257 aa, Glycine max
  Clone ID: PAT_MRT3847_68644C.1.pep
MNNSVSENSFIIESDEEDEEKDLNKGGVDGNDSDSSNYSNENPPQRKPSSYNISWPQSYRQSIDLYSSVPSPNIGYLGTPSLSRLSSSFLSTSLTRRHTPEALPSVAKPLIQDTEDEQHQRRSSHTLLPPLPSRRSSLIKKDSKVIHHEVPSGHCSFGQAVLNGINVLCGVGILSTPYAAKVGGWLGLSILVIFAIISFYTGLLLRSCLDSEPELETYPDIGQAAFGTTGRIAISIVLYVELYVSTDAFSQQRVFRS

SEQ ID NO: 250959 - protein, 63 aa, Glycine max
  Clone ID: PAT_MRT3847_68645C.1.pep
NKHATDGQANTSRTEMINTRDRPKWEAWKAIEGTPKDEKRSDYRKNAKQTAGSSRARRLDNIR

SEQ ID NO: 250960 - protein, 83 aa, Glycine max
  unsure (1)..(83): unsure at all Xaa locations
  Clone ID: PAT_MRT3847_68646C.1.pep
MKETTKVINKPMITIPIVNNDPNLTTSDSEFRQTSISLVAKFMRVKALLEPLSFKDIYSILNPISGHYIXFKPTTTIPNKRKA

SEQ ID NO: 250961 - protein, 121 aa, Glycine max
  Clone ID: PAT_MRT3847_68647C.1.pep
ILREGVWSIVRNPNYLGDALVHISFIVMLYGSDMLAPVELLGPIANYCFLRFFGGDKQKEQHQVRRYSESHPDKFAELQKFRADKNAFWPSMDELKNKWLWTVVGIGALGVAIEQSLRTLH

SEQ ID NO: 250962 - protein, 82 aa, Glycine max
  unsure (1)..(82): unsure at all Xaa locations
  Clone ID: PAT_MRT3847_68648C.1.pep
MGVFIFNDDYISPVVHANLDKVLVTYLDNIFPMAHDSFKSVDNVYGNSGTGYITNITFLEDRXFKFVLHRIESIDDANLGYI

SEQ ID NO: 250963 - protein, 55 aa, Glycine max
  Clone ID: PAT_MRT3847_68649C.1.pep
VIWHVAININLEICLVFHSVYKKYSISDILYSYLNSCVYSIPLFPIQVIMLVYCY

SEQ ID NO: 250964 - protein, 58 aa, Glycine max
  Clone ID: PAT_MRT3847_6864C.1.pep
NVLLDALLFCDDIPNQTQHYVTSLTSLSQITNGLRGLALTTLLRRLFDRKAIRTTMGG

SEQ ID NO: 250965 - protein, 46 aa, Glycine max
  Clone ID: PAT_MRT3847_68650C.1.pep
IVLEPQAQHASMLSYEDRIIIRPKRYIALNLQTQPLLHKRYCTSVI

SEQ ID NO: 250966 - protein, 76 aa, Glycine max
  Clone ID: PAT_MRT3847_68651C.1.pep
FRSGQEGPPYEFWATPLPAFFFFFSQKGCSFPPPKKGFFLRLEVKNFQAPGESFISTPFFFHPNFFLFFTSFFFIR

SEQ ID NO: 250967 - protein, 71 aa, Glycine max
  unsure (1)..(71): unsure at all Xaa locations
  Clone ID: PAT_MRT3847_68652C.1.pep
LCFIDPITLLLLLSPPFEIALSTPFYSAESSHQFPIQRCVLIIVLDRVLPGSRPSLNVIGRVGRXREXPXP

SEQ ID NO: 250968 - protein, 95 aa, Glycine max
  unsure (1)..(95): unsure at all Xaa locations
  Clone ID: PAT_MRT3847_68653C.1.pep
LNNRSRRSSRSSESSVSREAKKRLSERWKMTHKSQGLQGISRSNTLAEMLAVPDKVLKAANSYSMASGEGFHDXFTPNSQPSKWVEPXGISSRDG

SEQ ID NO: 250969 - protein, 76 aa, Glycine max
  Clone ID: PAT_MRT3847_68654C.1.pep
MVGVPEEHQSGHAFNMYHPTRPDDTVTFEFQHNVCGRSIYAEGTVDAVLFLAKKIETKDPKRLYNMIDVLREGNMR

SEQ ID NO: 250970 - protein, 175 aa, Glycine max
  Clone ID: PAT_MRT3847_68655C.1.pep
MLSFPENVVDVEKLVLGCPFLRKLQVEGRMERLPAASLFPPQLSKLTLWGCRLVEDPMVTLEKLPNLKFLNGWDMFVGKKMACSPNGFPQLKVLVLRGLPNLHQWTIEDQAMPNLYRLSISDCNNLKTVPDGLKFITTLRELEISWLPKSFKTRLGTAGEDYHKVQHVPSIVFLN

SEQ ID NO: 250971 - protein, 395 aa, Glycine max
  unsure (1)..(395): unsure at all Xaa locations
  Clone ID: PAT_MRT3847_68656C.1.pep
SWVCKACETPDIKRECCLCPVKGGALKPTDVDTLWVHVTCAWFRPEVSFASDEKMEPALGILSIPSNSFVKICVICKEIHGSCTQCCKCSTYFHAMCASRAGYRMELHCMEKNGKQTTKMVSYCAYHRAPNPDTVSIMQTPLGVISTKSLLQTKRKAGSRLISSKRIKVEDTSPAENTRHEPFSXARCRIYRRTNHTKKRAAGEAIAHHVRGHYHHPLDAIQSLNADRMVDKPPAFSSFRERLHHLQRTENERVCFGXRSGIHGWGLFARQNIQEGEMVLEYRGEQVRRSIADLREXRYRLEGKDCYLFKISEEVVVDATDKGNIARLINHSCMPNCYARIMSVGDDESRIVLIAKTDVSTGDELTYDYLFDPDEPDEFKVPCLCKASNCRKFMN

SEQ ID NO: 250972 - protein, 100 aa, Glycine max
  Clone ID: PAT_MRT3847_68657C.1.pep
LLRVRSYAAHNVNQPQEKDLLEGNSPLDIKARSRWEKVSSTKAHYGSGKTFKYDIIGAGSHSTEDLPEKEDQEKPKKIDARSRHRIDPQYKEAQAQMETK

SEQ ID NO: 250973 - protein, 53 aa, Glycine max
  Clone ID: PAT_MRT3847_68658C.1.pep
NQMLLLLPALLIFLLVLKTKILRIRRRPYNLIFVKKNASLQLVKKNKKILILK

SEQ ID NO: 250974 - protein, 45 aa, Glycine max
  unsure (1)..(45): unsure at all Xaa locations
  Clone ID: PAT_MRT3847_68659C.1.pep
PRXKLLKIXEFPGNTIIRIXGXNRGXAKXKCXXXQXTXXXTXXVG

SEQ ID NO: 250975 - protein, 50 aa, Glycine max
  unsure (1)..(50): unsure at all Xaa locations
  Clone ID: PAT_MRT3847_6865C.1.pep
INTISDPQVKAIAECRTHIMKSKKNHPLLQNHCESXSFLTFQYSIRLLPQ

SEQ ID NO: 250976 - protein, 233 aa, Glycine max
  Clone ID: PAT_MRT3847_68660C.1.pep
MESGGNGKRAHEEAGPSSGIDGRKLEMTEKASDDDKEEEEEEEEEEEGAIEDSKNGFFVPGPLLSLKEQIERDKEDESLRRWKEKLLGCLESDIDGQLDPEVKFHSIGILSEDFGEIVTPLPVDENRNGCTLFTLREGSRYQLKLKFSVLHNIVSGLTYSNTVWKGGLQVDQSKGMLGAFAPQKEPYVYALKEDTTPSGALARGVYSAKLKFEDDDRRCHMELKYLFEIKKRS

SEQ ID NO: 250977 - protein, 64 aa, Glycine max
  Clone ID: PAT_MRT3847_68661C.1.pep
EEGTGIKLSNYSSFPFSLMDFPVIILLGIIICTGPMHFIFWHHFTEKLWPDCILNTLIIILSSL

SEQ ID NO: 250978 - protein, 116 aa, Glycine max
  Clone ID: PAT_MRT3847_68662C.1.pep
MPGIPVAARATSSHPDACEHLSAEEELAAEESLSIYCKPVELYNILQRRAIYQIGRIFIFRNSPGIDLNTQVQANFTLPEVNKLAEEARSCSLDILFVSTATVENSNLSSGSQFKL

SEQ ID NO: 250979 - protein, 195 aa, Glycine max
  unsure (1)..(195): unsure at all Xaa locations
  Clone ID: PAT_MRT3847_68663C.1.pep
MPGIPVATRATSSHPDACEHLSAEEELAAEESLSIYCKPVELYNILQRRAMRNPSFLQRCLHYRIKAKHKKRIQMAVSLTRTITESQNVFPMSICLARRISDHGASRQTAIYQIGRIFIFRNSPGIDLNTQVXANFTLPEVNKLAEEARSCSLDILFVSTATVENSNLSSGVNSNSKPSDLNHLAFFECEMCFSC

SEQ ID NO: 250980 - protein, 53 aa, Glycine max
  Clone ID: PAT_MRT3847_68664C.1.pep
IVLLLQIHLLFASTLITSKIRFPQVVSKVKDTLLHISDYHHTLVHMKLPHVDH

SEQ ID NO: 250981 - protein, 154 aa, Glycine max
  unsure (1)..(154): unsure at all Xaa locations
  Clone ID: PAT_MRT3847_68665C.1.pep
HASGFACPDCNIVGALLLGDTYHTNPENAVRSIFAAPFKGGRPIRVVTFPNTIVQIVPNMNSRFQLLSTTTNGDLAQGKDLXLGKVNVTCAGVGLTSCYTPTALLECGLQQDRGSIVEYLGRMSYAAHNINQPHEKDSVEGNFSFDIKSRSRLE

SEQ ID NO: 250982 - protein, 39 aa, Glycine max
  Clone ID: PAT_MRT3847_68666C.1.pep
ASSSVSTASVAPRIVLCTAHSTSLKWFTVLASYSPISAV

SEQ ID NO: 250983 - protein, 109 aa, Glycine max
  Clone ID: PAT_MRT3847_68667C.1.pep
LSSISPWAATLPSPSTGATSSLLLPPPVVPTPASISPILRFLGGGAICAHVFILEDSAPSPGNPSDSYCSYAAFPAPIGHRCIAPAFLFSPPIPSALLTFHGPPSAAPL

SEQ ID NO: 250984 - protein, 107 aa, Glycine max
  unsure (1)..(107): unsure at all Xaa locations
  Clone ID: PAT_MRT3847_68668C.1.pep
PRVRSNRWSVVPTVGQCPPSRDGHSAVVNGDFMFIFGGFEEREHRFSQETYAFHFPTKVWKKLKTEGESPQYRDFHAASVLGGIMYVFGGRSDEMGQLHTXHDVYCD

SEQ ID NO: 250985 - protein, 79 aa, Glycine max
  Clone ID: PAT_MRT3847_68669C.1.pep
SLYNHRIVNLLSNYTIPTLQMTHGSPINLKYRVKLSALIFHFCNIPMTMTLEIYRVGWMVKKERKDKKVTDSIVPTNKN

SEQ ID NO: 250986 - protein, 67 aa, Glycine max
  Clone ID: PAT_MRT3847_6866C.1.pep
FERARVVVSRKKEQDPEFMLKLRRIVGMEETQKPSKKPDLFLPCCVYGKTKEVYIFIKYIRDNKTMS

SEQ ID NO: 250987 - protein, 236 aa, Glycine max
  Clone ID: PAT_MRT3847_68670C.1.pep
MSAICGRAILECVYCLACARWVWKKCLYTAGYESENWGLATAQEFEPVPRICRLILAVYEDDIRNPQWAPQGGYGINPDWVILRKDYDDNQGRVTPYMIYLDHDHAEIILAVSGLNLGKESDYIVLLDNKLGQAEFHGGYVHNGLLKAAGWVFDAEYEVLRELAAENPTYMLIFTGHSLGAGVVALLTMLAVHNRDKLGISRNKIRCFAIASPRCASLNLAVRYADVINSVVLQVE

SEQ ID NO: 250988 - protein, 190 aa, Glycine max
  Clone ID: PAT_MRT3847_68671C.1.pep
LCIMCLKDTCTLEEKKLRDPRRLYAPGRLYHIVERKPFRIGRLPPVVRTAVPVDGRFEHLVLSCNATSDHAIIWIERESRRALDIMRDNDEHMEIPAEQRMERHESIAREHSEEYHAALQRAVALDIPQAYSPSSYGTFHQIDVGEDSGRSSALGSSLFHKKRTQSWNEFIGRLFDVDDAGHMVFKKTSP

SEQ ID NO: 250989 - protein, 291 aa, Glycine max
  Clone ID: PAT_MRT3847_68672C.1.pep
MARVRIDVDFPSPDAASQVGLLHKEIVGKAMIYKLSEAVEEGDGANFVKVLKQQCEENKLRLSDVFDKVTLAGHSLLHVAADMGQKSIVQVLCDLFPLLLIRRNVRGDTPLHVAARSKKYETVKLILSQYATKKSTYDEMKDKKITRETNECGNTPLHEAVYSGDVDVVKENFDQDKAVAYCLNKSKRSPLCLAVVNGNEQILELLLQIPLPADQPLSQCRRSSPLHTAVQHLELLLQIPLPADQPLSQCRRSSPLHTAIQHQKRVMILAIIEIRPELVYLRDEDGNTPLS

SEQ ID NO: 250990 - protein, 131 aa, Glycine max
  Clone ID: PAT_MRT3847_68673C.1.pep
RLREDDRRGSPINNEQSKLEGSTSEEGAAPDEHKRKRGLDYNFTFSSNKNAEGEALKDSSGKSCDDDVTEQCERKPRVAQNSTANLCGKQLLKQKKDDSESEEGSKENFIHVRARRGQATNSHSLAERVRR

SEQ ID NO: 250991 - protein, 56 aa, Glycine max
  Clone ID: PAT_MRT3847_68674C.1.pep
TARSTVPVLRKHPIDLYISNFQKRTYICYWRPLIHIIQLHITDKGLQIKQDGNYIL

SEQ ID NO: 250992 - protein, 73 aa, Glycine max
  Clone ID: PAT_MRT3847_68675C.1.pep
LHSYYHSHLPLTVDNCHLCIWDLRLLIIFLFTIISHTLIYLIYFSTYYFDSYYIPISHLPLLLFQNPYNFHTS

SEQ ID NO: 250993 - protein, 153 aa, Glycine max
  unsure (1)..(153): unsure at all Xaa locations
  Clone ID: PAT_MRT3847_68676C.1.pep
MSSRGKQGAIVSYQNVVVMRHGERFDNFEPSWAATAARPWDPPLAEAGRKRAFKTGLRLRESVEFPIGRVFVSPFLRCLQTAVELVASLSDGVAVKPSEVKVSVEYGLCEMMNSKAIRPNVAPKDGNMGFDVAXCEAMLPAEIVDKNXERMCK

SEQ ID NO: 250994 - protein, 64 aa, Glycine max
  Clone ID: PAT_MRT3847_68677C.1.pep
KCKHCHLTHKKCHDASCDIHLYACPSLPHGYRFMPNLNSQPYPPIVPEVAVSIYGANSQWGAHR

SEQ ID NO: 250995 - protein, 58 aa, Glycine max
  Clone ID: PAT_MRT3847_68678C.1.pep
YTICSSTIQRFVTKGTCTSLASVSGSTHRAGKHCTAYDTCDIHASSINEWIIMPRPLI

SEQ ID NO: 250996 - protein, 102 aa, Glycine max
  Clone ID: PAT_MRT3847_68679C.1.pep
FVSISATIQCVFLDFASSHIMSSMSTSIHYLILQRSCLIPILCFSTSVSLLSITTVNIVGLDCSRLIPLLMGSTVIRGVKRPFLSLPPYPCVSIPARCMQRS

SEQ ID NO: 250997 - protein, 39 aa, Glycine max
  Clone ID: PAT_MRT3847_6867C.1.pep
IYILTYVLLYHAIFYLSKTIRTRENEGNSHSVGKILSES

SEQ ID NO: 250998 - protein, 102 aa, Glycine max
  Clone ID: PAT_MRT3847_68680C.1.pep
IPTIGSTLETVEDRTISFTVWEVGGQDRIRPLWRHCFENTQGRIFVVHSNDRERFVKARDELHRILIEDELGYAVSLVFANSHYLPSAMNAAQITENLGSQS

SEQ ID NO: 250999 - protein, 59 aa, Glycine max
  Clone ID: PAT_MRT3847_68681C.1.pep
ISMLQFDNISIRQILKRWMYTPTQCKLMNDMNRTHLLYSISNYNYYPYFIYLFILSRNI

SEQ ID NO: 251000 - protein, 71 aa, Glycine max
  Clone ID: PAT_MRT3847_68682C.1.pep
LPFAENVFNLCSLPNLEGMTYRQIRHRFQEAVVCGLYRSGKIYFHPNDGEILQQTDKVLFIGSLRDTNTKK

SEQ ID NO: 251001 - protein, 110 aa, Glycine max
  Clone ID: PAT_MRT3847_68683C.1.pep
ELKDKIPTASDPFADANADDAGAGAKEYVHIRAQERNVWKSQTSGQGSKKEFRYNKRLKDAKKEFCCNGTAGQDPELGQVTPLPSEQRKKAPTLIEQGGIVKKEQIKSHG

SEQ ID NO: 251002 - protein, 236 aa, Glycine max
  Clone ID: PAT_MRT3847_68684C.1.pep
MGEGIVERSLNSLGKGFDLASDFRLKFCKGEERLVLLNETEKRELMVPGFRPIRDVSVDIKCDKGDRTRYQSDILTFTQMSELFNQKSSIPGRIPSGYFNTVFGFDEGSWATDAANTKCLGIDGYFIKLFNAHIDRYPLVLSQQVLEAVPSSWDPPALARFIENFGTHILVGLSIGGKDLVLVKQDVSSNLEPSELKKHLDELGNQLFNGTCNFLPKSKEQKYKAPQAFDVFGPQI

SEQ ID NO: 251003 - protein, 81 aa, Glycine max
  unsure (1)..(81): unsure at all Xaa locations
  Clone ID: PAT_MRT3847_68685C.1.pep
DQKGSAPTILAVKWQTFDCNFRHXEDRDKTSTILECNQYNKDDYPEEYTGAXYLSSSLTTKDDIHTSIKHDVWASTQNGNK

SEQ ID NO: 251004 - protein, 47 aa, Glycine max
  Clone ID: PAT_MRT3847_68686C.1.pep
GSRYHPRLPQHSAYALTMWKAKTDQAHHSICQNLSVSGKRSACTYFK

SEQ ID NO: 251005 - protein, 78 aa, Glycine max
  Clone ID: PAT_MRT3847_68687C.1.pep
MVVRKVGKYEIGRTIGEGTFAKVKFAQNTETGESVAMKVLDRSTIIKHKMVDQIKREISIMKLVRHPDVVRLHEACGS

SEQ ID NO: 251006 - protein, 88 aa, Glycine max
  Clone ID: PAT_MRT3847_68688C.1.pep
DEHAHHMYTAQPSQPMQPKDQPQRERYLTRRRKTKRSETKRILSLPNLVQTQNTSPDNQNLDGLQNSGDTRTAASDQKRTSSITGRRK

SEQ ID NO: 251007 - protein, 75 aa, Glycine max
  Clone ID: PAT_MRT3847_68689C.1.pep
HEVVISNRRVFSKYTKNGKENYSRSLWSAQRVLFFPLRTRTQKSRKKLIDSWNPVSTAFVPGLKVRQPMLPVYQD

SEQ ID NO: 251008 - protein, 95 aa, Glycine max
  Clone ID: PAT_MRT3847_6868C.1.pep
YGRHVTMNSAWDHVLGFCLLFKGLINELDDGNSPFCMNLGLCSTQSVAWISHFAQLGSYVWFGMFVKVTTMLLNLMQPGIQFEVIVIHDTEWTMC

SEQ ID NO: 251009 - protein, 34 aa, Glycine max
  Clone ID: PAT_MRT3847_68690C.1.pep
SPHLHSYHQHTCLCHKISLKLGNLLNNSLIYNYK

SEQ ID NO: 251010 - protein, 66 aa, Glycine max
  Clone ID: PAT_MRT3847_68691C.1.pep
ILAPHFIEHSEGSTNIACHVDCRRYTRENTHARHKCQGSTILQEANRLYGQPLAYRDSLPRVAASP

SEQ ID NO: 251011 - protein, 60 aa, Glycine max
  Clone ID: PAT_MRT3847_68692C.1.pep
TSAIHFSFQIYASHCKEELIQILRTLPLATLVIVHCLCHHFFNLTHSLKIFNLLFPLSPH

SEQ ID NO: 251012 - protein, 59 aa, Glycine max
  Clone ID: PAT_MRT3847_68693C.1.pep
TPPQQNHCYSSSLSLHNARSMDRPRNVDLEAQTSHTTRIDTGLTRSGRVIGFTHRKRSG

SEQ ID NO: 251013 - protein, 94 aa, Glycine max
  unsure (1)..(94): unsure at all Xaa locations
  Clone ID: PAT_MRT3847_68694C.1.pep
TAARRPQKADSSWTLLSTSYALLMLSGVTSLGIGVTIPDYGXTTHKIFHLMNFIANGDRAEVFGLHKLVFLXHPKVLISPLLNLPRLRFILQHI

SEQ ID NO: 251014 - protein, 45 aa, Glycine max
  Clone ID: PAT_MRT3847_68695C.1.pep
RHGLCYPMLCSRVSGRDVLNHFNVNMPKNSLSMEMAKEASNRFGS

SEQ ID NO: 251015 - protein, 49 aa, Glycine max
  Clone ID: PAT_MRT3847_68696C.1.pep
RVRTCVGFTKRGETCVIYSSYNLHFLCLSFELCINVSPEYLFSFLCLFI

SEQ ID NO: 251016 - protein, 52 aa, Glycine max
  Clone ID: PAT_MRT3847_68697C.1.pep
ACCSSFILSFCKVSISSDFFDISACSLSVFSLLSVSKAETFSSKPCTWFSVI

SEQ ID NO: 251017 - protein, 172 aa, Glycine max
  unsure (1)..(172): unsure at all Xaa locations
  Clone ID: PAT_MRT3847_68698C.1.pep
MATARALFLLGAALLSCTLIGASSRGVENRRSLLLPVPNNGPAIFDVTKFGAVADDQTDNIDAFRAAWGEACKNSTTQAKVLIPAGTFRAAQTMFAGPCTSPKPIIVEVIGTVKANTDPSEYVTPEWFSXLDIDGLVLTGNGVFDGQGAASWPYNDCAKTKGDCAPLSASLK

SEQ ID NO: 251018 - protein, 51 aa, Glycine max
  Clone ID: PAT_MRT3847_68699C.1.pep
VTKLRIGESCISAVQSTVLATIIPASGRTIATCQKLRVSRPKFNGVLGFPL

SEQ ID NO: 251019 - protein, 234 aa, Glycine max
  unsure (1)..(234): unsure at all Xaa locations
  Clone ID: PAT_MRT3847_6869C.1.pep
MGKSKVLXVVGGTGYVGRRIVKASLEQGHETYVLQRPEIGLDIEMMQMLLSFKKQGAHLVEASVSDHQNLVEAVKLVDVVICTMSGVHFXSHNLLVQLKLVEAIKAAGNIKXVYMDEDDVATYTVKTIDDPRTLNKMVYLRPPENILTQRQLIEKWEKLFGKQLEKSSMNEQDFLASMEGLDYEAQVGVGHFYHIXYEGCLTNFEIGEGGEEAPELYPEVKYTRMDEYLSICLI

SEQ ID NO: 251020 - protein, 78 aa, Glycine max
  Clone ID: PAT_MRT3847_686C.1.pep
TDKLNIVYSWQHHHPKAVRVTVYTSGIGHASVQFQGVFFFFVGHNCSLQMVLLLYEFASSGILVLFVVVLVCLMVTRS

SEQ ID NO: 251021 - protein, 48 aa, Glycine max
  Clone ID: PAT_MRT3847_68700C.1.pep
LLNPGIRSKNNPKPRVKHNPPRTKVSRKKKLTGNPEPEKNQPNNFGLG

SEQ ID NO: 251022 - protein, 86 aa, Glycine max
  Clone ID: PAT_MRT3847_68701C.1.pep
LSYAHACAHTCVTAFLRMLLLLLHMTSSTKSMLHKTRGDKPLLELHWVQGPQLLIWDLCAAPLAPIQVLYCEELKLTGDIHMPCVT

SEQ ID NO: 251023 - protein, 51 aa, Glycine max
  Clone ID: PAT_MRT3847_68702C.1.pep
KSVMQIHVKRRIISSQVVLIKDRVASHVFTMFISLAAIRLPEASMISYISQ

SEQ ID NO: 251024 - protein, 72 aa, Glycine max
  Clone ID: PAT_MRT3847_68703C.1.pep
FSINIQYFKFSTPLFSIFFYNFWTISISFKSKNMRTLFLVYEILLWPLCICQVQNPQYKQSIQKILEQYLNF

SEQ ID NO: 251025 - protein, 239 aa, Glycine max
  Clone ID: PAT_MRT3847_68704C.1.pep
MELWNVVFVCCVLCYSFCHTAEAIVKLRGNETIPALILFGDSIVDTGSNNNLITGLKCNFPPYGRDFEGGIPTGRFSNGKVPADFVAEELGIKEYIAPYTSPALQPGDLLRGVNFASGGTGYDPLTAQLVSVIPLSEQLEQFKEYIGKLKGNFGEAKTNFILSKSLVLVVSSSNDIANTYFATGVRKLNYDVPNYTDMLVQQASSFVKELYGLGARRIGVFGAPPLGCLPFVRTLFGGL

SEQ ID NO: 251026 - protein, 55 aa, Glycine max
  Clone ID: PAT_MRT3847_68705C.1.pep
CCGTAHYRNGHIARYVVCYGSKQESCSMRSEERALYSLFILMRLDIGSLHLRFPH

SEQ ID NO: 251027 - protein, 279 aa, Glycine max
  Clone ID: PAT_MRT3847_68706C.1.pep
MGSIFSPLTTIFLLLLLVLWGGEARDPFACDPKNTATKNLPFCKASLATGARVKDLIGRLTLQEKVNLLVNNAAAVPRLGIKGYEWWSEALHGVSNVGPGTKFGGQFPAATSFPQVITTAASFNASLWEAIGRVASDEARAMYNGGTAGLTYWSPNVNIFRDPRIKGTHETCGKDSILAHKYVKNDGSKDGIHTLLVFSAPPAGNGHWAPHKQLVAFEKVHIPAKAQQRVRVKIHVCKLLSVVDRSGTRRIPMGLHSLHIGDVKHSVSLQAETLGIIKS

SEQ ID NO: 251028 - protein, 57 aa, Glycine max
  Clone ID: PAT_MRT3847_68707C.1.pep
SKCSSKYLSIANRLVNCLNPLSPLKSHGTTWTLQGVLVIGMPPFLVKKFLPFFFPPL

SEQ ID NO: 251029 - protein, 99 aa, Glycine max
  unsure (1)..(99): unsure at all Xaa locations
  Clone ID: PAT_MRT3847_68708C.1.pep
YIFIKIIFLVFFFSTIFGSKIKTTVPYHPIFQSTLPFGSPPSQIKIPFFKLSRQAHKFLPFKPFPKXAPQTPKEYIHDPQYTSKSKSGNQQPYIYPPYL

SEQ ID NO: 251030 - protein, 227 aa, Glycine max
  Clone ID: PAT_MRT3847_68709C.1.pep
MNSTKQKNRSWDSFSNAMTNPVGVPSGKDSAAFQSSGLQCTPHEADALPPAASEKHDSVELGLQDAKSFPEKKDISHAKSSASETDTKRAKQQFAQRSRVRKLQYIAELERNVQALQAEGSEVSAELEFLNQQNLILSMENKALKQRLENIAQEQLIKYLEQEVLEREIGRLRALYQQQQQPPQTQPQQQPSGSHRRSNSRELESQFANLSLKHKDTNSGQDPALRI

SEQ ID NO: 251031 - protein, 54 aa, Glycine max
  Clone ID: PAT_MRT3847_6870C.1.pep
FKTFPGVFQGSQSPTKILEKLALPESNYQNNKYILKSKFRERKKRHSLTKPAHR

SEQ ID NO: 251032 - protein, 87 aa, Glycine max
  unsure (1)..(87): unsure at all Xaa locations
  Clone ID: PAT_MRT3847_68710C.1.pep
PDXLYQIGLRVRFKLHXXXFXVLXLISSSSWXNLGISAPXLLSGIDFVGRXXISLLXXTLXXSLDPHWPXKVXLFEKPLGRGXKMFA

SEQ ID NO: 251033 - protein, 70 aa, Glycine max
  Clone ID: PAT_MRT3847_68711C.1.pep
YTNSLGPCSHLIREEALQNSTLPLFISYIPIHSSIYHFNNYISFHLHIYSIPFNLLINQFYFNLLISSFF

SEQ ID NO: 251034 - protein, 74 aa, Glycine max
  Clone ID: PAT_MRT3847_68712C.1.pep
LAYGRSYWDAYASTKVEPTHSLCLTLSNHASVSGVQPESATVSIITNLFLLQNPDFVAGNTLLLRMQRVRSASG

SEQ ID NO: 251035 - protein, 93 aa, Glycine max
  Clone ID: PAT_MRT3847_68713C.1.pep
YTETLAGVSPCTIQCVKEWPLRTKLHPQIYGPPESAIAKQVIEPQMIGYCTVEQAIKDNKLFMLHYHDLFLPYVTKVTQIKGTTLYGSRTLFF

SEQ ID NO: 251036 - protein, 75 aa, Glycine max
  unsure (1)..(75): unsure at all Xaa locations
  Clone ID: PAT_MRT3847_68714C.1.pep
MSSCACDISRNCVSTCGYIKYSSHLSYVDXAATKTLVLGVGPVSAPLEGAELGVASXXGGCICGSICSCDPCDRK

SEQ ID NO: 251037 - protein, 102 aa, Glycine max
  unsure (1)..(102): unsure at all Xaa locations
  Clone ID: PAT_MRT3847_68715C.1.pep
YEFLIDEAILDSCSGCLHGRTLGGISLSRDYETTGGSGTXLPDMLRIEXGDAQARERSFGAAREHIGAWIXRTXQGEAYARFAANGYLKCCRDHLIQYNVLM

SEQ ID NO: 251038 - protein, 105 aa, Glycine max
  unsure (1)..(105): unsure at all Xaa locations
  Clone ID: PAT_MRT3847_68716C.1.pep
FXXXXXXXLXXXPXXXXXXLXSSFXXXLXFIIXPXPXHXPLXNFPLXXFXXTSXXTXFFXXHXXXXFXXXXXXXFSXXSIXXXXXXPSXHSXXSLIXXXXXXXXF

SEQ ID NO: 251039 - protein, 86 aa, Glycine max
  unsure (1)..(86): unsure at all Xaa locations
  Clone ID: PAT_MRT3847_68717C.1.pep
MRDSALYMTLHDDCXFKILDLNSKRTHRFIVIKTHFHIXHILMYTFDDTSQYYXYITVSLPTNDCTYTDYHFQYLTKRNVPKSIIF

SEQ ID NO: 251040 - protein, 176 aa, Glycine max
  Clone ID: PAT_MRT3847_68718C.1.pep
DTSSLQIGGQMGAPLTEKSTFATNMAPPSFGVLQQHHHHQQPNGQPFMNQYMHSGHHHQQQEVNISTQYSFGSANGMGGGSVGMNGQNNNRSSSGGTTNGGSSSAINNVAGSKGSGDVMTLDFLGIGGGGSGSGGGAHGNFYGGAQQGETGAPDEVWRNWSSKNAGFESFSTTSSI

SEQ ID NO: 251041 - protein, 29 aa, Glycine max
  unsure (1)..(29): unsure at all Xaa locations
  Clone ID: PAT_MRT3847_68719C.1.pep
NXXQSEGTRXXCTINPLVLTLGFNXKVTG

SEQ ID NO: 251042 - protein, 318 aa, Glycine max
  Clone ID: PAT_MRT3847_6871C.1.pep
MGKSKVLVVGGTGYVGRRIVKASLEQGHETYVLQRPEIGLDIEKVQMLLSFKKQGAHLVEASVSDHQSLVEAVKLVDVVICTMSGVHFRSHNLLVQLKLVEAIKAAGNVKRFLPSEFGMDPALMGHALEPGRVTFDEKMTVRKAIEDANIPFTYISANCFAGYFAGNLSQMGTLLPPRDKVLLYGDGNVKVVYMNEDDVAAYTIKTIDDPRTLNKTVYLRPPENILTQRQLIEKWEKLIGKQLEKSSINEQDFLASIKGLDYAAQVGVGHFYHIFYEGCLTNFEIGEGGEEASELYPEVKYTRMDEYLKVYKHEKLCI

SEQ ID NO: 251043 - protein, 258 aa, Glycine max
  unsure (1)..(258): unsure at all Xaa locations
  Clone ID: PAT_MRT3847_68720C.1.pep
MAPLESLEKEYPLIDSNFQSFCASHGIFSVEDFLLHDLDALLSFTDNHSTSQTLKQGIDQLISIIDALHPPLLNGLQLLEDAQRNKHVLSTGCEGGGLREGQLTELVGSSSSGKTQACLLSASTVVAKHKSSVIYLDTGNSFSPQRIAHFVGQSSGHIFGNQADHMLKKVLDRIICYSVFDVYQMFDVLHQLKINLRSEIVKSNQHVRLLIVDSISSLITPILGGSGPQGHALMISXWVFXLKKXAHEHNIAXLVTNH

SEQ ID NO: 251044 - protein, 318 aa, Glycine max
  Clone ID: PAT_MRT3847_68721C.1.pep
GIPKQHLILLFIGQMASALFRAIAALGRNMIVSNTFGAFAVLTFLTLGGYVMSKNDIKNWWIWGYWISPLMYGQNALMVNEFLSNSWHNTSRNLGVEYLESRGFPSSSYWYWLGLGAMAGFVLLFNVMFSAALEILGQESPNEGTVAEVELPRIESSGRGDSVVESSHGKKKGMVLPFEPHSITFDEVIYSVDMPQEMKEQGVQEDRLVLLKGVSGAFRPGVLTALMGVSGAGKTTLMDVLAGRKTGGYIDGSIKISGYPKKQETFARISGYCEQNDIHSPHVTVYESLLYSAWLRLPSGVDSKTRKMFMCELITVKH

SEQ ID NO: 251045 - protein, 38 aa, Glycine max
  unsure (1)..(38): unsure at all Xaa locations
  Clone ID: PAT_MRT3847_68722C.1.pep
MASKRILKELKDLQKDPPTSCSACPIAXDLVHWPATNI

SEQ ID NO: 251046 - protein, 90 aa, Glycine max
  unsure (1)..(90): unsure at all Xaa locations
  Clone ID: PAT_MRT3847_68723C.1.pep
DQLPKPKEVVAKEAMPPKSPITRMEQGEKSNGHKTRPQHVQEESMLKSAAIASTPRKETGKSQKGHEEIVPKIEDIGMKSSNKQMDXTXI

SEQ ID NO: 251047 - protein, 93 aa, Glycine max
  unsure (1)..(93): unsure at all Xaa locations
  Clone ID: PAT_MRT3847_68724C.1.pep
SIDTIDNVRAKMQDLEGITPDHQHLIFAGKQLEHGTTLAEYXIQKESTLHLVLRLRGSIIDPSLMALAHTYNHDTIICRKCYARLQPTAVNCR

SEQ ID NO: 251048 - protein, 93 aa, Glycine max
  Clone ID: PAT_MRT3847_68725C.1.pep
MASSKVMCRLSCRIQSVVAHNHNKFTKPSPLSPLSLSLSARRLSRTSRLPVELGSLESMMPLHSAVASARLVSSLSIESLGWGLVPQGISMPL

SEQ ID NO: 251049 - protein, 54 aa, Glycine max
  Clone ID: PAT_MRT3847_68726C.1.pep
SFTAHDAFDPGNTQTIPVEEDTLILSLIHNHGIYLPGNACICHIKVSSTRAKPR

SEQ ID NO: 251050 - protein, 91 aa, Glycine max
  Clone ID: PAT_MRT3847_68727C.1.pep
SHIYTSSTVNVKGHHVPKHFLIETATRFKHLLLMSANFVTGVSSNRYNMCRHCHGLASICIAGCFDENHTRELNDTLVCFYIHASFMVSIM

SEQ ID NO: 251051 - protein, 57 aa, Glycine max
  Clone ID: PAT_MRT3847_68728C.1.pep
RQKRYITSTTAVKTPKTHPISYILLTNCMQHLKPIYTLFNTYQSDYFFYRGCFHASD

SEQ ID NO: 251052 - protein, 67 aa, Glycine max
  Clone ID: PAT_MRT3847_68729C.1.pep
LLGILLELTCFTTPCCFLHSLLRIGNVPHAAVNIRQRARERSPTRLLSSSFSLCSLNDESMSEHSYN

SEQ ID NO: 251053 - protein, 86 aa, Glycine max
  Clone ID: PAT_MRT3847_6872C.1.pep
LLLSITYCFAVSRSLFCCVSTSWLDPVSIFPGWPPFNMLWYYLQTLIGCHLHSNIIRNQMFPLDLQYPHKHLRSPHPARLYQAEKW

SEQ ID NO: 251054 - protein, 126 aa, Glycine max
  Clone ID: PAT_MRT3847_68730C.1.pep
LVLCNLEIPLFSPPLLGDMPPQSQVFKKLPHLVSVVQSTRGMVPPHMVVSPPVVNPVLARLLPCIAPVFMVVGVMLTPPYIPPMVIQVGLLPEPMMEPLPRLFYRLVLFKRPPKVDLVKFVKFGSF

SEQ ID NO: 251055 - protein, 87 aa, Glycine max
  Clone ID: PAT_MRT3847_68731C.1.pep
PLGHLKPCMMDTPVIHRDSSLCTIVNTLASADSQLHCYLLGGALMCITFLFASPQHVLFILGFFFRCCGLIFILVFTSSCCILYCLI

SEQ ID NO: 251056 - protein, 18 aa, Glycine max
  Clone ID: PAT_MRT3847_68732C.1.pep
ITDPIEMQLERSLHSLNY

SEQ ID NO: 251057 - protein, 68 aa, Glycine max
  Clone ID: PAT_MRT3847_68733C.1.pep
RRLRQAARRGRPCFPMASSPSHPSFLSLLNLSASIPISSSVCMFPPSKKPRNATKRRHASARSMHWYP

SEQ ID NO: 251058 - protein, 206 aa, Glycine max
  Clone ID: PAT_MRT3847_68734C.1.pep
MASSASGATGWYRGKVKSVPSGDCVVIMAMPTGKPGPLPEKSITLSSLMAPRLARRGGVDEPFAWESREFLRKLCIGKEVAFRVDYTVPSINRDFGTVFIGDKNVAMLVVSAGWAKIREQGQQKGEASPYLAELLRLEEQAKQEGLGRWSKIPGAAEASIRNLPPSAIGDSSNFNARDLLHANKGRPMEGIVEQVRDGSTLRVYLL

SEQ ID NO: 251059 - protein, 46 aa, Glycine max
  Clone ID: PAT_MRT3847_68735C.1.pep
QLGIGHIPERPTAVEDGCIQFINEVGHHKPLSLQDLRASNDATSSS

SEQ ID NO: 251060 - protein, 51 aa, Glycine max
  Clone ID: PAT_MRT3847_68736C.1.pep
AKRSYTTNLLTLNFSQLRCRNKMRRLRGHEAEKQARRSKWQNGAVLAGNHT

SEQ ID NO: 251061 - protein, 31 aa, Glycine max
  Clone ID: PAT_MRT3847_68737C.1.pep
TYGTYYSQSIKRRNYCAYTCVFLFNKLCIFS

SEQ ID NO: 251062 - protein, 89 aa, Glycine max
  unsure (1)..(89): unsure at all Xaa locations
  Clone ID: PAT_MRT3847_68738C.1.pep
MEKLEKWKMALHXVANLSDIKIKHGARYEYDFIGEIVEWVSSKIXNPAHYPVGLRSKVLEVRKLLDVGRDDGVHMLGIHGIDGVGKSTL

SEQ ID NO: 251063 - protein, 42 aa, Glycine max
  Clone ID: PAT_MRT3847_68739C.1.pep
AKARKENDPSAMLCSVRVRGYVRCICLFLRASASIIQCMITS

SEQ ID NO: 251064 - protein, 80 aa, Glycine max
  Clone ID: PAT_MRT3847_6873C.1.pep
ANTIKRTATAMAALSNGLNSMVGSLTHNITTDITLIANIGGRVHCMQLRTPCGTNKNDTFTYIENIMDAQSAARTRKLFL

SEQ ID NO: 251065 - protein, 62 aa, Glycine max
  unsure (1)..(62): unsure at all Xaa locations
  Clone ID: PAT_MRT3847_68740C.1.pep
MAAPEKAKDSLPSAFRSTNIPAVAEYSLVGHRCKPXIPHESCSVAFSFSGVRCXSREEPYFR

SEQ ID NO: 251066 - protein, 80 aa, Glycine max
  Clone ID: PAT_MRT3847_68741C.1.pep
EPKVQQAPFKVGMTKLFYICALTLTHTIRHSSFQDSRLTDQIMYDTKISTPKSQRSIPCGHSLIQQSNTLIRWNEDTEGP

SEQ ID NO: 251067 - protein, 52 aa, Glycine max
  Clone ID: PAT_MRT3847_68742C.1.pep
TASIWVGKNGNDRMEMVCNFSKKGEDRHLSKKGMRYQVSVSPVRKRLVSLQR

SEQ ID NO: 251068 - protein, 35 aa, Glycine max
  Clone ID: PAT_MRT3847_68743C.1.pep
STDTHICLSVPSLLFDLFLCCIIMPIQLTYNPEMA

SEQ ID NO: 251069 - protein, 50 aa, Glycine max
  Clone ID: PAT_MRT3847_68744C.1.pep
IRHRQINLLNIRLMSNLLVEQDVPFGFKFIVACNRYGGLEPSLLVSRLQR

SEQ ID NO: 251070 - protein, 143 aa, Glycine max
  Clone ID: PAT_MRT3847_68745C.1.pep
PELHLGPDFCERITSDAIKAIAHCCPKLNKLRLSRIRDLNADAINAWAKHSSKLTDIAFIDCLNVDDVALGNVLSDAFLSDARTSTMKWGVDSHLWHKLPNLIGLDVSRTDIGPSALLIMLSLSQNSRALIALNCPILEEDTS

SEQ ID NO: 251071 - protein, 44 aa, Glycine max
  Clone ID: PAT_MRT3847_68746C.1.pep
ILLKIVRVTDKQVHNQRVHSVNMNLGIVVVWIRRTRRRSGCLLD

SEQ ID NO: 251072 - protein, 119 aa, Glycine max
  Clone ID: PAT_MRT3847_68747C.1.pep
TLKSIGKWRCHGESGQSSSSTVRVILLSQIQAQPLPHHCFVSFFSGLSFYTTQEQLKKLFSPFGLVTQADLALDPITKRPKGFGFVSFKSEIEAEKALKAMNGRVINGRLILVEPANEK

SEQ ID NO: 251073 - protein, 83 aa, Glycine max
  Clone ID: PAT_MRT3847_68748C.1.pep
FPYNHVCIQITRIKSFTFITFQGSALYPNMHAKTSILKVKFQNSEPSYILTKPTWSHLRSQHSLTNRLLISHVAYIGRPGNSR

SEQ ID NO: 251074 - protein, 35 aa, Glycine max
  Clone ID: PAT_MRT3847_68749C.1.pep
LNSPSETQTLKIPHTDLTHIYNPHSVLFTLHYSWR

SEQ ID NO: 251075 - protein, 84 aa, Glycine max
  Clone ID: PAT_MRT3847_6874C.1.pep
KRTGDWEFTSPPLVRGPFPFSLRERKSPPPPPPGLVFSNLRLGLKQKKQSTPPPPPFLVGGTPPPVWVLSFPLASPLFFPARGG

SEQ ID NO: 251076 - protein, 211 aa, Glycine max
  unsure (1)..(211): unsure at all Xaa locations
  Clone ID: PAT_MRT3847_68750C.1.pep
TRPDTHHLEREVDRWCLIIGCMGIVTLVANFLQHFYFGIMGEKMTERVRRMMFSAMLRNEVGWFDDEENSADNLSMRLANDATFVRAAFSNRLSIFIQDSAAVIVGLLIGALLHWRLALVAFATLPILSVSAIAQKFWLAGFSRGIQEMHKKASLVLEDXVRNIYTVVALCAGNKVMELYRLQLXKIFKQSFLYGXWQLGFAFGFSQFLLF

SEQ ID NO: 251077 - protein, 122 aa, Glycine max
  Clone ID: PAT_MRT3847_68751C.1.pep
VVDNQLYAVEHLANMVKKYGKEKNPWKELGRLPIKADFFKGWGVAFKVCGKQLLVVGGQKGPKGEFIVLSSRCPKSRIIKGPINWQVLGVKKQVRGFGEKCAVKGCLKNFKLTPQRMLVSPI

SEQ ID NO: 251078 - protein, 138 aa, Glycine max
  unsure (1)..(138): unsure at all Xaa locations
  Clone ID: PAT_MRT3847_68752C.1.pep
MVVAPKVMEAXITELDLLFVKRNLLPFAIFNISYVTRLFPEKYFNDKTVPPLXMTINYLMPXDAEPGILTDWMEKGGYYALHNKYLSTLLFXGAKXQDGPTIDEYALLFMLAKLDNQDVSISINRTGRLAYLWTFSTT

SEQ ID NO: 251079 - protein, 240 aa, Glycine max
  Clone ID: PAT_MRT3847_68753C.1.pep
HASGVWHFTPIACRTRRSLAVNQLINRDIPSKSLRGGDIGIRSLEKSSGIGLQASKALNSKSTTGSSDHFEVDDNSKSCQFENSVPKASAVNVSDDVKIDTLDCPKRRRSLRIRQLSNDDKQSETLVGSSKPSAHPEDIGKSTAGKRKMRTDSVVKFHVNCQARSSSYDGSVITSVDRKQGKISEINLDKANPGDNINNSEVSSSDESPRERYKSSDLASATQAKCKMPVNDASPICMGD

SEQ ID NO: 251080 - protein, 307 aa, Glycine max
  unsure (1)..(307): unsure at all Xaa locations
  Clone ID: PAT_MRT3847_68754C.1.pep
RLREDDRRGKKWRCSRDAVVDQKYCERHMNRGRHRSRKPVEGQSGHALTTTNTPNASSNSTVVPGNHNNNTFAHINVHHPLPPHSSPANTINRMFMSNNKENNNTSERTKDGLALPMLPPTLEPKPKDNNNSFMVHKHQEPYDESSRNKNEFGLVTSDSLLNPSQKRSFDSSSSSQKDDSESQQQHSLRHFIDDSPKPQSHHNHHRSSSXWPELDNMQSDRTQLSISIPISSSDHFMSFTTSSPSNEKLTLSPLRLSRELDPIQMGLGVGSVPPMKQTXRQANWIPITWESSMGGPLGEVLNLSKII

SEQ ID NO: 251081 - protein, 165 aa, Glycine max
  Clone ID: PAT_MRT3847_68755C.1.pep
IWPELDSMQSDRTQLSISIPISSSDFMSFTTSLTLQRELTLSPLGLSRELDPIQMELGMGSGASNEANTRQANWIPITWESSMGGPLGEVLNLSNNSNASDQCGKNNNTSALNLMKDGWDNNPPLGSSPTGVLQKSAFGSLSNSSAGSSPRAENNKEGATLCNAL

SEQ ID NO: 251082 - protein, 55 aa, Glycine max
  Clone ID: PAT_MRT3847_68756C.1.pep
RGKGFYGCSNLGLPKNSLGDPSFWVQKGFNKEKHGPLNFNIGGKIPNTMAPPNDF

SEQ ID NO: 251083 - protein, 57 aa, Glycine max
  Clone ID: PAT_MRT3847_68757C.1.pep
LLLLFKYLFCSVSKTFVIPIKSGFLFTPVSRLPFLESKMRACYYAAFCRNFEGGKKY

SEQ ID NO: 251084 - protein, 81 aa, Glycine max
  unsure (1)..(81): unsure at all Xaa locations
  Clone ID: PAT_MRT3847_68758C.1.pep
NGKERGEASIGNKTILTLLLFFFLTKLVPFPFAILLSVPTTCTKCLFXKIPHNICLLAHYLLIPKEYNHNPTIGRKGTLPF

SEQ ID NO: 251085 - protein, 72 aa, Glycine max
  Clone ID: PAT_MRT3847_68759C.1.pep
QYRRPPTSMNHRASLSCFTTHIKHIRSILSVIVLPSDPVNGIESGSPQIPDNIPFIEETRIRNEGSPECSRC

SEQ ID NO: 251086 - protein, 68 aa, Glycine max
  Clone ID: PAT_MRT3847_6875C.1.pep
FVFFFFFFFFFFFKFFHFFFYFWGKRILLNKKINAFLENWLKKTYHRILILKRNFIFTTRPGFPLNNY

SEQ ID NO: 251087 - protein, 200 aa, Glycine max
  Clone ID: PAT_MRT3847_68760C.1.pep
MEKMDYIERSQTQQSRSHLYNKCSHIFLIRIIFKSNNMRNTNFRVSLKNVTNVSNSNRKGKKMMKRCEFVFEEARRGGCKEHPYDKQSPGVCSSCLREKLSQLYNTNPIIDPRCFSPASSPASPHQSFSSSKHGSSGHRRPRFRRNASHVAESASCMLSLNLKKSKSLAFASRHRDVMMSGRKKDGFWTKVLKLKRNDEF

SEQ ID NO: 251088 - protein, 46 aa, Glycine max
  Clone ID: PAT_MRT3847_68761C.1.pep
IGLLIHDLNLNSTIRYWTIHKRFFYLKIFNNIPVLSAFGALVIIFC

SEQ ID NO: 251089 - protein, 84 aa, Glycine max
  Clone ID: PAT_MRT3847_68762C.1.pep
LPLHTTLDSLPVEFDFSPLFVIALSEVCLVFGSIVCILLYSHSVKLEISAIKQKPLTGQAFLATVMLLTQQHPYRLVPLLFKCY

SEQ ID NO: 251090 - protein, 70 aa, Glycine max
  Clone ID: PAT_MRT3847_68763C.1.pep
FNMTHNSEFEVATREESGCHISWLHDRLRRRTSKSNSCLNIVASIVIQSVDMDIAGQCRCHIPRFQNRPQ

SEQ ID NO: 251091 - protein, 198 aa, Glycine max
  unsure (1)..(198): unsure at all Xaa locations
  Clone ID: PAT_MRT3847_68764C.1.pep
XXETQHXXXGPXMSPXXXXESVDTLIQXXTLEXILSDPISPQSSGLLEAIVYNSKSLKGSNNDLLLQETIATANEVANISTLNHSFQTEWDELGDPNSPLGQSAASVLTDYTPVRMCSVDGYQSTETSQDHDDKHEAPTTQFPDSSSKKKILKQVDYTQPDALLDLGWFGNNTKYESDQFVQQDALGALFGDNCQHQP

SEQ ID NO: 251092 - protein, 210 aa, Glycine max
  Clone ID: PAT_MRT3847_68765C.1.pep
SIYMDISAKGGKPWKAVKLFKEIKKKGFKLDVVVYNIVIRAIGLSHGVDFSIRVFREMKELGINPTVVTYNTLIRLLCDCYRHKEALALLRTIMPRDGCHPTAVSYHCFFASMEKPKQILAMFDEMVESGVRPTMDTYVMLLNKFGRWGFLRPVFMVWNKMKQLGCSPDAAAYNALIDALVDKALIDMARKYDEEMFLFSSSQVSQRTFA

SEQ ID NO: 251093 - protein, 144 aa, Glycine max
  unsure (1)..(144): unsure at all Xaa locations
  Clone ID: PAT_MRT3847_68766C.1.pep
MAGGRRQQRLNKSCILLIAIAGIERFAFKGVASNLVTYLTDVVNLSNSSAAKMVNSWVGFTSIMPLLVAPIADAYWHKYSTIMVSSFLYFVGLAALTTTALARSWHHKNRTMSXSFLSLXLYLISLGQGXYNPSLQAFGADQLG

SEQ ID NO: 251094 - protein, 109 aa, Glycine max
  Clone ID: PAT_MRT3847_68767C.1.pep
RNKKMAYFWFDLANNSNVANALGVLFFYIFYRTVVLSYRKQKKDYEDRLKIERAEAEERRKMRELEREMEGIEGVDEEGAHLTGGDHLMHYNIEGLDFDEFCATALSVH

SEQ ID NO: 251095 - protein, 55 aa, Glycine max
  Clone ID: PAT_MRT3847_68768C.1.pep
RRGSGSFSVSYKNIAGFKQVSKENLYWQPKVAPEMGKIIKGSWPWVILSHVPAPG

SEQ ID NO: 251096 - protein, 79 aa, Glycine max
  Clone ID: PAT_MRT3847_68769C.1.pep
RMKGCGRGVWSAMIMARFGVLIVVLVVRKQNNIQNKNLKPWCVYLFCCCCMKHRCGCLHDSGVVVLSVIEFHSAVRSYI

SEQ ID NO: 251097 - protein, 48 aa, Glycine max
  Clone ID: PAT_MRT3847_6876C.1.pep
MQIFEKTMTGKTLTLQVESIDTIDIVQAKIQDREGISPEQQRLIITAK

SEQ ID NO: 251098 - protein, 56 aa, Glycine max
  Clone ID: PAT_MRT3847_68770C.1.pep
YQHQPYLDAQALISTIIRSLATCAVKALDPSQGSHTKRAGLPKGLFQRVESVLELN

SEQ ID NO: 251099 - protein, 39 aa, Glycine max
  Clone ID: PAT_MRT3847_68771C.1.pep
ARDLVGLFEVSFYCAIHAYRVTVVPKDIQLARRILGERA

SEQ ID NO: 251100 - protein, 52 aa, Glycine max
  Clone ID: PAT_MRT3847_68772C.1.pep
GGKTKPLKYFTERPILLDVELGTHNTYVPIITLPLRVDESVANTLQHFTQPF

SEQ ID NO: 251101 - protein, 35 aa, Glycine max
  Clone ID: PAT_MRT3847_68773C.1.pep
VIQRILHYLLHYYFNIHNYSFDISYLCCTIQNKTL

SEQ ID NO: 251102 - protein, 57 aa, Glycine max
  Clone ID: PAT_MRT3847_68774C.1.pep
SLTHTAQTVDKKHAGGGEQFRNLGDHTHQRKRQMDPMTNLNLEQTSERLSGYYVMCP

SEQ ID NO: 251103 - protein, 55 aa, Glycine max
  Clone ID: PAT_MRT3847_68775C.1.pep
TGFFDNWSAKNTKEAKCRLVELQSEQQLVLNSIKNYQTTLNGTWNTLQHQMGAAT

SEQ ID NO: 251104 - protein, 53 aa, Glycine max
  unsure (1)..(53): unsure at all Xaa locations
  Clone ID: PAT_MRT3847_68776C.1.pep
GHGVGWSPIIPYXIRAXEEWEEVPVSIADXGSTXINXRFASSKEGXLXXIVAP

SEQ ID NO: 251105 - protein, 69 aa, Glycine max
  Clone ID: PAT_MRT3847_68777C.1.pep
IAGTWLKKAFILFLKLIPVHNASLAQQFKDQPQLLQHPCAWIFHTGSLHTGLSDSWTHEPPELLAKRYC

SEQ ID NO: 251106 - protein, 181 aa, Glycine max
  Clone ID: PAT_MRT3847_68778C.1.pep
FISFSFIFQTALLKHLLEVFLTGGTLKKWINEQRIWMMKSVTCHLYGCLDALLKKVGIREASFLPTNKLGNDEQTVLYQMDKYDFQASNIFVVPMLALITINISCFFGGVYRVLLVGDCDKMFVQLFLAVFIITVNYPIIEGLMIRKDKGRISKLVAIPVILATVVLLAFFKLLGMHSMLY

SEQ ID NO: 251107 - protein, 26 aa, Glycine max
  Clone ID: PAT_MRT3847_68779C.1.pep
QKIFPFFGYVLKDINKVTTIFGIHLI

SEQ ID NO: 251108 - protein, 310 aa, Glycine max
  Clone ID: PAT_MRT3847_6877C.1.pep
AWRLRNAIKDATYLCGVFVAADAIPSLSWIDFQGYVSFMKRTNKEIDLILEKWLEEHLRKRGEEKDGKCESDFMDVMISAFQEEEEICGYKREMVIKATSVLLILTASGSTAITLTWALSLLLNHPKVLKAAQKELDTHLGKERWVQESDIENLTYLQAIIKETLRLYPPAPLTGIREVMEDCCVAGYHVPKGTRLLINLWNLQRDPKVWPNPNKFEPERFLTTHHDINFMSQNFELIPFSIGRRSCPGMTFGLQVLHLTLARLLQGFDICTKDGAEVDMTEGLGVALPKEHGLQVMLQPRLPLGLYERL

SEQ ID NO: 251109 - protein, 85 aa, Glycine max
  unsure (1)..(85): unsure at all Xaa locations
  Clone ID: PAT_MRT3847_68780C.1.pep
MVSSHEEVTLMGVIASAFACRVKIDLKLKGVXXRYXGENLRNNSELLLKSEPVHRKIPVFIHNEKPIAESLVIVEYIDETWKNYP

SEQ ID NO: 251110 - protein, 118 aa, Glycine max
  unsure (1)..(118): unsure at all Xaa locations
  Clone ID: PAT_MRT3847_68781C.1.pep
ARAIFKLVYCTAAISRRHINPAVTLGLILARRESLIRAIMYMVTQSLSAMWSFAIAKDLQNAXLTKYGGEANSLPGGTSXXTALGAEIIATFRMAYTGSCVTDSNRNARDSHVPSSGF

SEQ ID NO: 251111 - protein, 83 aa, Glycine max
  Clone ID: PAT_MRT3847_68782C.1.pep
KNIQKIKNLLAFLQYENYKKNPLHNTDRKNRDKINLIPNKNEKCNGLPKQNEKKRLDQSEKKQRAKKKKFYNTKKHIIKPLTT

SEQ ID NO: 251112 - protein, 446 aa, Glycine max
  Clone ID: PAT_MRT3847_68783C.1.pep
MGSACCVAAKDPNLPNRTGDESLHRDVVCSPSGSFQWDSRGRFADEIENPSYHTSHVDSRNVSMELKGSLSSERGNLSDGGSIVENSVTPIFLKSPVDEALVANLMTPTSDLSMSSNFSTVVKNPAGTREILTRERKEDAVSHSHRIETEAPFPFSNNLYPNAVITDHLRNSTPTRWAHRSPAHPLLRQISDSRIMGLKSPDNSISEGRPSFVLSTCSNEMAAGSICGSSDGWSMRTFSELVASSQRERWSFDSECGIFLGHKISGSSSRFSYSPSMELQSCGACSKLLTERSTWSNQKFIANSDLSVVAVLVCGHSYHAECLEAMTSEADRYDPACPICMVGDKNLSKLLSRKGLRAESEMKAKNHKISRNRVVDSYLDGGFDVFDRQKDIDLRGKVSKMEPSCSARSSFGKPFLRRHFSLGSKWSRSLSENDSARKKGFWARYR

SEQ ID NO: 251113 - protein, 78 aa, Glycine max
  Clone ID: PAT_MRT3847_68784C.1.pep
LQCKELIWKAILEAALFTWIQSGAVPCPRMILPGRKAFGQDIVKIEFHLLNSSQVDVVHMNCMNINVPWQMMLSQSSD

SEQ ID NO: 251114 - protein, 64 aa, Glycine max
  Clone ID: PAT_MRT3847_68785C.1.pep
FDVFDRQKDIVLRGKVSKMEPSCSARSSFGKPFLRRHFSLGSKWSRSLSENDSARKKGFWARYR

SEQ ID NO: 251115 - protein, 103 aa, Glycine max
  unsure (1)..(103): unsure at all Xaa locations
  Clone ID: PAT_MRT3847_68786C.1.pep
XLREKTENNLAQVIVLLTAQTERDGALYKLRRVRFTVEASRRGSTNRYDGVRVEVVGKRKWCLCFFSMTVTHCTFSSLFYIYNFFFLLQTSASLFCLFLFPPP

SEQ ID NO: 251116 - protein, 115 aa, Glycine max
  Clone ID: PAT_MRT3847_68787C.1.pep
HVVGQKFQTSSIKTELTHAALFLQQMLELGGRVERFLQRSNSHFSFIFGVLKIISPFLLIITPGESFETRSWKISQHGASSARAHHCGGFGLRGVDGEVALVPLATTCMGTLKAE

SEQ ID NO: 251117 - protein, 128 aa, Glycine max
  Clone ID: PAT_MRT3847_68788C.1.pep
GQGYSFISKEEFLGMVEREELLEYMLVYSDYKGMSKQQIRECLAKGCNFVLRVDTEWGATVMVLAAAVVFVASESEMVLVETARVEALLVRIGRAREELKLAKNRGSVVVIAKGKWSMLKGRLISLSD

SEQ ID NO: 251118 - protein, 313 aa, Glycine max
  unsure (1)..(313): unsure at all Xaa locations
  Clone ID: PAT_MRT3847_68789C.1.pep
VKNPAESSIPNLSFSIPSVFSTPTADPLPNHNYHHLPNSTPTRWAHRSPAHPLLRQISDSRIMGLKSPDNSISEGRPSFVLSTCSNEMTAGSICGSSDGWSMRIFSELVASSQRERWSFDSECFGSGRHKISGSSSRFSYSPSMELQSCGACSKLLTERSTWSNQKFISNSDLSVVAVLVCGHSYHAECLEAMTSEADRYDPACPICMVGDKHLSKLLSRKGLRAESDIKAKNHKISRNRVVDSYLDGGFDVFDRQKGIDLRGKXVKMEPSSSARSSFGKPFLRRHFSLGSKWSRSLSENDSARKKGFWARYR

SEQ ID NO: 251119 - protein, 135 aa, Glycine max
  Clone ID: PAT_MRT3847_6878C.1.pep
VHGLTLKGKMDENWFQLLAPFISQWNNRAEFRVDVYARQEGLLSFNSDYMVWYRRKTKMFINPNNANTVTLGEVTETLQYMVSPQGQNTWTVDDLVSYVEKLAILSQEQERITEPVAHGPASERRFPPQQFHMLQ

SEQ ID NO: 251120 - protein, 94 aa, Glycine max
  Clone ID: PAT_MRT3847_68790C.1.pep
PSYPSKGFDKANLATNSGGEDLQTKYLTVGITSLSKNKWDRRKKPPIPNTGLATDPKPNTFHSVTPPFENKNWVKKNKKLGFKTIFTGRPIFPF

SEQ ID NO: 251121 - protein, 83 aa, Glycine max
  Clone ID: PAT_MRT3847_68791C.1.pep
PPPFFGGAISKNSLVCFLKGTFLPRILFKGYLFSPPPPFGEIMPLPGVGFPLKKKNLPPGGREKKFFFGGKKKKPGACWPKVF

SEQ ID NO: 251122 - protein, 312 aa, Glycine max
  unsure (1)..(312): unsure at all Xaa locations
  Clone ID: PAT_MRT3847_68792C.1.pep
LCNRWIEVGAFYPFSRDHANFYSPRQELYQWESVAESARNALGMRYKLLPYLYTLNYEAHVSGALFARPLFFSFPTYTECYGLSTQFLLGSSLMISPVLEQGKTQVTALFLPGTWDNLFDLTQTIVSKDGNYVTLDAPLHVVNVHLYHNSILPMQQGGMISKDARXMTPFSLIVTFPAGATDGEAKGNLFLDDDELPEMKLVNGYSTYIDFHATIKEGTVKIWSEVQEGKFALDKGWVIDTINVLGLNRNGALPKIEIDGEPLMSLSNVQVSTTQHKYLYGQGDGDKILMVGLKGLNIPVGKNFNVTWKMGS

SEQ ID NO: 251123 - protein, 99 aa, Glycine max
  unsure (1)..(99): unsure at all Xaa locations
  Clone ID: PAT_MRT3847_68793C.1.pep
LLFSFSILICVYIAVCILTYRRYFPFLFFGLESSLVFILFIVAKQTDQIFSRKSKFEILEINNYMPFLIECPHFSALSPPLXFHADTLVCLHMNRCVLI

SEQ ID NO: 251124 - protein, 149 aa, Glycine max
  Clone ID: PAT_MRT3847_68794C.1.pep
GFEGFFGFIAPTLPFLSKEFGSRILQALLRNATDAMRESRVLEIINTMEPLAYRKMDFEEFCAATISTHQLEAHEWWEDIASTAFEHFEREGNRLISVEELARELNLGPSAYSVLKDWIRNTDGKLSLLGYTKFLHGVTLRSSNPRQHR

SEQ ID NO: 251125 - protein, 92 aa, Glycine max
  Clone ID: PAT_MRT3847_68795C.1.pep
MITEGEARDEPILKSKADRKIEAIERRADRDRDRERYRDRERDRDRDRDRTKSRDRDRGRDSDKEREREEAERGKLKDRDHRSRERAKDSGV

SEQ ID NO: 251126 - protein, 261 aa, Glycine max
  unsure (1)..(261): unsure at all Xaa locations
  Clone ID: PAT_MRT3847_68796C.1.pep
VRFKSEVVACGVVYAAARRFQLRLPENPPWWKAFDGEKSGIDEVCRVXLAHLYSLPXAQYIXVCKDGDFTFSNKSSESKSQSTPKDVPQNSPPADTDNSVPKGTQREANIESNGSKDAIIQGSHXKLKDSKRSDDESKGMSTEAEARYEPILKSKADRKIEAIERRADRDRDRERYRDRERDRDRDRDRTKSRDRDRGRDSDKEREREEAERGKLKDRDHRSRERAKDSGHSEKSKRHSSHDRDSHGSSYSSREKDRHRHH

SEQ ID NO: 251127 - protein, 85 aa, Glycine max
  Clone ID: PAT_MRT3847_68797C.1.pep
SITAPFYMLFFLPLFIFLDSVFFASLFCFPKFEGAQFGCDGWEHEYVKVSEAHLCTLLLCSWLLLCHTCKAHAICKFQSSDYDCV

SEQ ID NO: 251128 - protein, 60 aa, Glycine max
  Clone ID: PAT_MRT3847_68798C.1.pep
SLLRCILLFIESLIILFYPYIQSETNFLHVTKISLTLPMIFPLYAFHIKYCMPINDFLYF

SEQ ID NO: 251129 - protein, 113 aa, Glycine max
  unsure (1)..(113): unsure at all Xaa locations
  Clone ID: PAT_MRT3847_68799C.1.pep
MSGIIHKNGETLHVXRHQKEEERIGVHPSLEXHKGAPFGKHSCEHKGEHHGKHKSGEHHGEHTPXHKEGFLDKVKDKILGEGAPSAGKMKKDGKKKEGALDHGHDSNSSIDSD

SEQ ID NO: 251130 - protein, 67 aa, Glycine max
  unsure (1)..(67): unsure at all Xaa locations
  Clone ID: PAT_MRT3847_6879C.1.pep
SALRVREEEARLGLDMRGERLVSRRSSKRGAASPHIGRXXXLMRTGMVSRNMKMHRLVMMGGNHITK

SEQ ID NO: 251131 - protein, 55 aa, Glycine max
  unsure (1)..(55): unsure at all Xaa locations
  Clone ID: PAT_MRT3847_687C.1.pep
MSTDNGALDVHEKKINCILHQIMDKLTVXEHARTLEFIASGVEKSLMNCVCHGHC

SEQ ID NO: 251132 - protein, 74 aa, Glycine max
  Clone ID: PAT_MRT3847_68800C.1.pep
GFQFSTGTVVGSAMCMVLLDRFWAPHARSEVEDYQGPCVVVQAILLHVVGNGLCGSTIGITGFALAFAFGKPSA

SEQ ID NO: 251133 - protein, 132 aa, Glycine max
  Clone ID: PAT_MRT3847_68801C.1.pep
MGLLDHLWDDTVAGPRPENGLGKLRKHHTFAFRSASGKESDSGSESDSGSVKSYGEDSPKNAVRVTRSIMIVKPPGNQSPSGSAPASPAGSTPPVSPFSGARESFRFRRRSTSDAYEKTGQNRSSSSSPFDV

SEQ ID NO: 251134 - protein, 37 aa, Glycine max
  unsure (1)..(37): unsure at all Xaa locations
  Clone ID: PAT_MRT3847_68802C.1.pep
KKFVVHGRACLRRSLMINIKEXXQXCDCAYDPWLWLS

SEQ ID NO: 251135 - protein, 75 aa, Glycine max
  Clone ID: PAT_MRT3847_68803C.1.pep
LVQVHMLAYSNLARRSLGCVSVNFCWFILFSRTTDKIYQEYFILIKRQQKNCDADGTRFLVTGSLCILLTFKIFY

SEQ ID NO: 251136 - protein, 42 aa, Glycine max
  Clone ID: PAT_MRT3847_68804C.1.pep
TGLQGSLTFIKTRNYIGEIVTYWKRLNPSTDQYNAPNSQLKT

SEQ ID NO: 251137 - protein, 92 aa, Glycine max
  Clone ID: PAT_MRT3847_68805C.1.pep
GNNVVTTSPTDYHRLNPLLSEPVNYPKKTSLFAFKGMLSMELIPMTAVPKKMDGGSLKALANWHQSQHSCHLWTIQMTPAVLLIGLIPIQTI

SEQ ID NO: 251138 - protein, 60 aa, Glycine max
  Clone ID: PAT_MRT3847_68806C.1.pep
AWKMMKMQDPRVLLEKFICTKQKKLMFRILLLHHEFCKIKKYTWEGVLPLINYTTMMMIH

SEQ ID NO: 251139 - protein, 109 aa, Glycine max
  Clone ID: PAT_MRT3847_68807C.1.pep
CASIFHNAHSKTLQDHLDSLLYLTLLIESGFSLSELSSLESLARFIMVSWDDSDVLCYLKSVVIKMLKELTHFTYKSHWVLITVAKKIPRLSPQLQRQSPNVPHQDPAT

SEQ ID NO: 251140 - protein, 49 aa, Glycine max
  Clone ID: PAT_MRT3847_68808C.1.pep
IISIRHLPAEMSVASSSDTCTGVAVYSQVTESLTCFVRSVNQICTTTMY

SEQ ID NO: 251141 - protein, 75 aa, Glycine max
  Clone ID: PAT_MRT3847_68809C.1.pep
FSCFYNSPKKTCFLLNIFKYKLYNVKINFKLVFINAHQNTHLFLNIQLAMYLTMMVLHEEYLWFRKKILTNSYLN

SEQ ID NO: 251142 - protein, 66 aa, Glycine max
  Clone ID: PAT_MRT3847_6880C.1.pep
DPLERAAGVFFFFFFFWATNHLHTTSFIKEELFFLQTIFPHLFPQPKNAYVLPYQQPQFKSFFPHS

SEQ ID NO: 251143 - protein, 81 aa, Glycine max
  unsure (1)..(81): unsure at all Xaa locations
  Clone ID: PAT_MRT3847_68810C.1.pep
RTMRIESCXNPSPLLISIIYIYIGRVFFTDIAPPPNTFPYIYTFTAPPTLTTYYTIISILQYHNAIPNILTFIYSTLYSTF

SEQ ID NO: 251144 - protein, 61 aa, Glycine max
  Clone ID: PAT_MRT3847_68811C.1.pep
PTMREVVQKLTELPKPPGFKKGDLTITKSFLSSSNALKFPSPASKKDQNPPQSPPPDLFSI

SEQ ID NO: 251145 - protein, 183 aa, Glycine max
  Clone ID: PAT_MRT3847_68812C.1.pep
MEKATRVKILEICLVSPPQEKTTTQTSLSLTFFELLWLRLPPVERLFFYEFPNQTISFFDTILPNLKHSLSLTLQHFLPFAGSIIWPLDSPHPIINYVPGNAVSLTIAESNTDFNMLCSNICDASLRHPLIPHLANSHEQAFVMALQVTLFPNHGFFFGIATHHAAIDWKALTFVFKAWAMLA

SEQ ID NO: 251146 - protein, 85 aa, Glycine max
  Clone ID: PAT_MRT3847_68813C.1.pep
GGVFLAFCPKKKRGGYLNAFWFRGGPKNTFTWAFDFFFFLGGPFNPHLFLGGLPGDGEQNTWPKTWPKFFRGPLSLKPNIPQVGV

SEQ ID NO: 251147 - protein, 89 aa, Glycine max
  Clone ID: PAT_MRT3847_68814C.1.pep
KLEPLPVPVPNPRAGQGPRVRCRPHSLGQGGEVKKYCVNQASPMRRARLWGPRTSGKIATPAATATKLWLSIRPRRRKLGLEPPLSYLV

SEQ ID NO: 251148 - protein, 56 aa, Glycine max
  Clone ID: PAT_MRT3847_68815C.1.pep
LSEQLFFVIPASDAEEVNAASYLSTFTVGINAEKQQTNLLSRSQDNVISHIPIRVQ

SEQ ID NO: 251149 - protein, 79 aa, Glycine max
  Clone ID: PAT_MRT3847_68816C.1.pep
GATALSSIPSSVGRLARYPPQLAPWRPCLLASHLSLTKLQGQSVSSPLVTGVIPGRLSLLLPESQSAITSSAHPSPTAT

SEQ ID NO: 251150 - protein, 73 aa, Glycine max
  unsure (1)..(73): unsure at all Xaa locations
  Clone ID: PAT_MRT3847_68817C.1.pep
CRLLXRSHTTTLHTISLLIKTPPIGSPFLVWSTLTHNITVKHCYKLFCIPYIYLVCKVHCSCGMWIVPSCAAC

SEQ ID NO: 251151 - protein, 43 aa, Glycine max
  unsure (1)..(43): unsure at all Xaa locations
  Clone ID: PAT_MRT3847_68818C.1.pep
XTFXCEXSXLPXXYLXRDLRLXSMVNQLXEXHFXPHSQPXXVS

SEQ ID NO: 251152 - protein, 144 aa, Glycine max
  Clone ID: PAT_MRT3847_68819C.1.pep
MGKIRRESARPFSNCSSSASPSSAPPATTSSMSLTDTVRGSHRFKITGYSLSKGIGIGKYIASDIFSVGGYDWAIYFYPDGKSVEDNATYVSLFIALASEGTDVRALFELTLLDQSGKERHKVHSHFERTLESGPYTLKYRGSM

SEQ ID NO: 251153 - protein, 446 aa, Glycine max
  unsure (1)..(446): unsure at all Xaa locations
  Clone ID: PAT_MRT3847_6881C.1.pep
KWLLWEEKQGRDINDVPSSITNQSPNKVLKSLNRKFGFRESEKVLNQTNNGDNSSQSGSSNHLEKDANGSQSGEDSGVKSVSAYRSSSHPITAPSPLSGLPEFSHLGWGHWFTLRDLELATNRFSKENVIGEGGYGIVYHGQLINGNPVAIKKLLNNLGQAEKXYASELAKLMLASILEGRTVCLPSLCSEILYNYIYIYEEKVKRFCCSCLLLCFLKIGMVIPYCLSSCNFRICSLTNAVEPLNFKAKGSIFLDKIHYWRGSFLHSFELLSVDNCHVXTSKTWEQERVTLGWLEYLYFVAXIIEVGDGLYFIVFYYETXKDPYPTQECRAQAEVNLVDWLKMMVGCRRSEEVLDPNIETRPSTSALKRALLTALRCVDPDAEKRPRMSQVVRMLESEEYPILREDRRRRRSQAGNMEVETQRENSDTDKSDNPDYKPSGRRNQRM

SEQ ID NO: 251154 - protein, 76 aa, Glycine max
  Clone ID: PAT_MRT3847_68820C.1.pep
MVYVKAQKSKAYFKRYQVKFKRRREGKTDYRARIRLINHDKNIYNTSKYRFVVRFSNKDIVAQILFSSIACDIVLC

SEQ ID NO: 251155 - protein, 206 aa, Glycine max
  unsure (1)..(206): unsure at all Xaa locations
  Clone ID: PAT_MRT3847_68821C.1.pep
VSIEXSKEPXACRMTVHMKEVGTVAVDDSPLKEVGAADVKEIKSNIQDEYGCKRKLVDILKTDSESIAAKRVKKPLEIKRDKHVTLREESNHRVKINSKAVVKEQNREETRPLVLSHSKHKLKGNFNGSRVSSDRKVVLGLMAESECPWRSGKGSSKFKFSDAKNEGKKKKVASALPDRSKTAIKSKGALSYSGQKPLKKKKGNAT

SEQ ID NO: 251156 - protein, 194 aa, Glycine max
  Clone ID: PAT_MRT3847_68822C.1.pep
TRPDEYGYKRKLVDIVQTDSESNAAKRVKKPLEIKRDKHFTLPEESNHHVKINSKAEVKEQNREETKPLDLSHSKHKLKGNFNGSRVSSERKVVLGLMAESECPWRSDKGSSKFKFGDAKNEGKKKKVTVALPDRSKTAIKSKGAQNYSRQKPFKKKKGNATSEGMSELVICEKKDSLDSYENNEDLQNWSEIT

SEQ ID NO: 251157 - protein, 125 aa, Glycine max
  Clone ID: PAT_MRT3847_68823C.1.pep
MMMEILMAGAEALSKMSNLTLLIFRDVKFMGILNSVNCLSNKLQFLEWYNYPFSYLPSSFQPNLLVELILQHSNIKQLWKGIKHLPNLRALDLTYSKNLIEAPDFGGVLNLEWIILEGCTNLARI

SEQ ID NO: 251158 - protein, 101 aa, Glycine max
  Clone ID: PAT_MRT3847_68824C.1.pep
PHQYYDSDDEYAPDRVPLLKNAPPHYVVDPGYAHGNDTWRRQGIKDWHSLIDHSFLILAILDFLYHLFSLVCFKYLLSCISLILKWFEEASRPYFDLYYNL

SEQ ID NO: 251159 - protein, 56 aa, Glycine max
  Clone ID: PAT_MRT3847_68825C.1.pep
YSSLSLSLSLSLSLYIYIYVVISFEQAITYVLFVVRVDNVFHYFCNLCMIKAYSKN

SEQ ID NO: 251160 - protein, 74 aa, Glycine max
  unsure (1)..(74): unsure at all Xaa locations
  Clone ID: PAT_MRT3847_68826C.1.pep
WLFPFLVQEPLHYCSQLINFKGKKFLRLCPSSRVLYDAVASPHAHMRGCQPHSSRFFSWXSHEFSTFVIKVSYG

SEQ ID NO: 251161 - protein, 263 aa, Glycine max
  Clone ID: PAT_MRT3847_68827C.1.pep
MTSSFSTQLVQSQNLPPRFHRHVQGNFSQDVSKVSMTHVVRSSTKSQLGYGKTLASRSHYAARFSVSRQSEAKSITYRRMTCTNAKENVLQLQAKVTNKCFFDVEIGGEPAGRVVFGLFGEDVPKTVENFRALCTGEKGYGYKGSYFHRIIQNFMVQGGDFTEGNGTGGISIYGDSFDDENFNLKHVGPGVLSMANAGTNTNGSQFFICTVQTPWLDNRHVVFGHVIDGMDVVRTLESQETGKFDNPRKPCKIADSGELPIDS

SEQ ID NO: 251162 - protein, 50 aa, Glycine max
  Clone ID: PAT_MRT3847_68828C.1.pep
ERGQNREVRPRDVVGIKHVRVWSGDSCVASRGKCNESLLWIDDCVFVWAA

SEQ ID NO: 251163 - protein, 210 aa, Glycine max
  Clone ID: PAT_MRT3847_68829C.1.pep
MCDTMSMSSAPITDHRPVKGLEMEYVEDDKKKKLGSLKKVAISASSKFRHSLQMKGRRHSRVVSVAIEDNVDAQELQVVDAFRQALILEELLPAKYDDHHTMLRFLRARKFDIEKTKQMWADMLQWRREFGADTIMEDFEFKERDEVQKYYPQGHHGVDKEGRPVYIEKLGQVDSNKLMQVTTMDRYLKYHVREFEKTFVVKFPACSSQQ

SEQ ID NO: 251164 - protein, 71 aa, Glycine max
  Clone ID: PAT_MRT3847_6882C.1.pep
RSFRRITNLFFPLHIHHIGNAYNGYTLFFSLVTNRAESFSNSKRVSHTKFNICILALQPSCFLESRIPVYA

SEQ ID NO: 251165 - protein, 55 aa, Glycine max
  Clone ID: PAT_MRT3847_68830C.1.pep
VHLLSEKTRAKSKFTNARLAVQIHAKRTSTNKATYLSLKSEMEGEFGQFSKLLHV

SEQ ID NO: 251166 - protein, 101 aa, Glycine max
  unsure (1)..(101): unsure at all Xaa locations
  Clone ID: PAT_MRT3847_68831C.1.pep
TGPLSNRCLAGLQGSVSLVGLVVILPCCVSTNGISSCVDHIPFTAQSLTFTXLQYVRGVVLHSVCGWAGFTSGLFLEGILGVIWAYFLIRVLSLPFNINVL

SEQ ID NO: 251167 - protein, 55 aa, Glycine max
  Clone ID: PAT_MRT3847_68832C.1.pep
NSPFSKIARAANVTLKFFQRGPKAGTFNWAHQKIGGGNFPLILLMGNFFVPKNIF

SEQ ID NO: 251168 - protein, 63 aa, Glycine max
  Clone ID: PAT_MRT3847_68833C.1.pep
CRMGLTNPMFPRCPEQIDKESKVQILRIQREFFFCGMGRFGFRRETLFLFPRKTPVVSASLDY

SEQ ID NO: 251169 - protein, 62 aa, Glycine max
  Clone ID: PAT_MRT3847_68834C.1.pep
RFLLGLMLRLDPVLNGFLFDLFFNLLRSDRFFVFYDVSGSLHFLFDDRRLLGSALAPIKYRS

SEQ ID NO: 251170 - protein, 54 aa, Glycine max
  unsure (1)..(54): unsure at all Xaa locations
  Clone ID: PAT_MRT3847_68835C.1.pep
PVFPVLGMAPKGTFDVHNMFFXTAAYFPRGGDSGIFSPMPMILSRKPHGKDAHN

SEQ ID NO: 251171 - protein, 80 aa, Glycine max
  unsure (1)..(80): unsure at all Xaa locations
  Clone ID: PAT_MRT3847_68836C.1.pep
HILVIVLLKRAGCFTXIXDVYSMTGTVGVPMTTIXARLXSVPXIXARLESLAQIQAWLQSVPEMGYDALSNVPRGEICLR

SEQ ID NO: 251172 - protein, 106 aa, Glycine max
  Clone ID: PAT_MRT3847_68837C.1.pep
LVPNSARGRDDDRYGRDGYRDDEYRRRSVDDDQYGSRSRRSFRDRDHNFNDDGQHSSRGSSAKAEDHSLEGRDGGSSPAAAPKGSSPVSGNPRQTYCSYRIFSFKR

SEQ ID NO: 251173 - protein, 205 aa, Glycine max
  unsure (1)..(205): unsure at all Xaa locations
  Clone ID: PAT_MRT3847_68838C.1.pep
LYTTAAENVKQISASLXASSSDGEPSSHASDTIKARFIHSXEKYDRNIFDGELAICHSPNFMAXVCSDSMAXLSHVLXQQPLQAFGDMNXVVNIALAYDHPKYTGTVAVYDYACKHLKASDIDGIGHIASGRIKGLLTMPSYXTYSTDVIDDSLIIVLPADAEVKTSPDDAPYAELSSHCEKEFVNASHGYAVTYPCVRDCLLTR

SEQ ID NO: 251174 - protein, 92 aa, Glycine max
  Clone ID: PAT_MRT3847_68839C.1.pep
KPTLQAAKKTRGEKKKKGGPQKTGINKPPPGGLFSLEEKKKWGFIRGAYKSLRTNPFFLEFGGGPLWATGTKTFHLGGRPQKGKKARATSPF

SEQ ID NO: 251175 - protein, 87 aa, Glycine max
  unsure (1)..(87): unsure at all Xaa locations
  Clone ID: PAT_MRT3847_6883C.1.pep
RKVAKWQPPSDAESDEESESDSGIESTDSDDEFQICEIXTTEEERKKXQQSTSXXKXXXTTARXQLXGDIVXEERTAXXCKEKTDEY

SEQ ID NO: 251176 - protein, 44 aa, Glycine max
  Clone ID: PAT_MRT3847_68840C.1.pep
MTFISLSISSCNNPLGLKFGHCTSPLSSLYLVLKFSLFYLEEWE

SEQ ID NO: 251177 - protein, 65 aa, Glycine max
  Clone ID: PAT_MRT3847_68841C.1.pep
SPQYRTISHKQRISCLQGMKNAFSLAQQALFDQVVITNMSGVVDDLPFRALCHSIIIIVQQLRIL

SEQ ID NO: 251178 - protein, 135 aa, Glycine max
  Clone ID: PAT_MRT3847_68842C.1.pep
MALECVGGAVLSSFLGALFQKLASPQVLDFFRGTKIDQNLRRDLENKLLSIQAVLDDAEQKQFGNMPVRDWLIELKVAMLDVEDVLDEIQHSRLQVQPQSESQTCTCKVPNFFKSSPVSSFNKEINSSMKNVLDD

SEQ ID NO: 251179 - protein, 148 aa, Glycine max
  unsure (1)..(148): unsure at all Xaa locations
  Clone ID: PAT_MRT3847_68843C.1.pep
MSSISTLRRQVKNVACNYTDAQVKVREATSNDPWGPTTVLMSEIADLTHNPVSFTEIMSMVWKRLNDHGKNWRHVYKSLVLLDYLIKCGSEKVSAQCRENLFSIETLKDFQHIEDNRDQGLNVRAKAKQMVALLQDDHKLKXERARFL

SEQ ID NO: 251180 - protein, 701 aa, Glycine max
  Clone ID: PAT_MRT3847_68844C.1.pep
MDEYFRVSNCKSAKEMWDTLRLTHEGTTNVKRSRINALTHEYELFRMNANENIQSMQKRFTHIVNHLAALGKEFQNEDLINKVLRCLSREWQPKVTAISESRDLSNMSLATLFGKLQEHEMELLRLPQKKKKKKKKKVKFKDTLCTPKRMENFRDHPLDNIIGDISKGVTTRHSLKDLCNNMAFVSMIEPKNIKEAIVDDNWIIAMQEELNQFERNNVWKLVEKPENYPVIGTKWVFRNKLDEHGIIIRNKARLVAKGYNQEEGIDYEETYAPVARLEAIRMLLAYASIMNFKLYQMDVKSAFLNGLIQEEVYVEQPPGFEISDKPNHVYKLQKALYGLKQAPRAWYERLSNFLLEKEFSRGKVDTTLFIKRRHNDILLVQIYVDDIIFGSTNDSLCKEFSLDMQSEFEMSMMGELKYFLGLQIKQTQEGIFINQSKYCKELIKRFGMDSAKHMSTPMSTNCYLDKDESGQSIDIKQYRGMIGSLLYLSASRPDIMFSVCMCARFQSNPKQSHLSAVKRIMRYLLGTINLGLWYPKNSTCNLIGYSDSDFAGSKTDRKSTSGTCQFIGSALVSWHSKKQNSVALSTAEAEYISAGSCCAQILWMKQQLSDYGIILDRIPIKCDNTSAINLSKNPVQHSRTKHIEIRHHFLRDHVLKGDCVLEFVDTKNQLADIFTKPLPKEVFFSIRRELGLLDIILVDLV

SEQ ID NO: 251181 - protein, 60 aa, Glycine max
  Clone ID: PAT_MRT3847_68845C.1.pep
RTRGRTRGRTRGPTPGEGIPPDQQRVIFAGKQLEDGRTLADYNIQKETTLYLVLRLPGGV

SEQ ID NO: 251182 - protein, 89 aa, Glycine max
  Clone ID: PAT_MRT3847_68846C.1.pep
KPHSPRHSPPPYWNGGLAAMLGLIACARLILACAYCKLSGYRQGNGESERGLEAGETEHDLKPAYRYKGRILEIIAGHEKPTFYAAPSD

SEQ ID NO: 251183 - protein, 168 aa, Glycine max
  Clone ID: PAT_MRT3847_68847C.1.pep
MLQTPLLQHKNPKFVLQHKKMKPTITILLLSLLLLITSPSLATRPASNPDQVKHNKNNNQGGGAGAGAGGFFGPGGGFSIPGFGNGFGNGIIGGGYGSGYGGPNGGSSKGGIIRPTVVCKDKGPCFQKKVTCPAKCFSSFSRSGKGYGGGGGGGGCTIDCKKKCIAYC

SEQ ID NO: 251184 - protein, 223 aa, Glycine max
  Clone ID: PAT_MRT3847_68848C.1.pep
MAMATLTPMCCSCSTPRFSGQHHQHGYQLKLKPSVLNFRPQKQNRSIRIRSPSASNPNQNESSSPGLYSAKKFDLTASNVDLVLDDVRPYLIADGGNVDVVSVEDGVVSLRLEGACESCPSSTTTMTMGIERVLKEKFGDAVKDIRQVYLTEPRETTVEAVNNHLEILRPAIKNYGGSVEVVSVEGGECEVKYVGPDSIGSGIKATIKEKFPDILNVTFTTTT

SEQ ID NO: 251185 - protein, 81 aa, Glycine max
  Clone ID: PAT_MRT3847_68849C.1.pep
HQFFFYCQIYSVFLFSLTRNPLPPFPSDFSLPFLLSISHLLPLSSSLLYPFFGFPYSYESKPATLDVVGGLSSLPTITDEG

SEQ ID NO: 251186 - protein, 112 aa, Glycine max
  unsure (1)..(112): unsure at all Xaa locations
  Clone ID: PAT_MRT3847_6884C.1.pep
CSRRELLTHAQEAFFTASSSQVRPATTLLADGCPYRAAMVHEGXVTTMPREVVMGVQVATMNNLXAYGLRAGLSGTRTPGTIPNAISQQTVGHQLAPGRTPQNLDPRQQSWK

SEQ ID NO: 251187 - protein, 146 aa, Glycine max
  Clone ID: PAT_MRT3847_68850C.1.pep
MKPTITILFSLLLFIASPSLATRPASNPDQVMHSKDNKNNNNQGDGGGFFGPGGRFSIPGFGNGFGNGIIGGGYGSGYGGPNGGSSKGGIIRPTVLCKDKGPCFQKKVTCPAKCFSSFSRSGKGYGAGGGGGGCTVDCKKKCIAYC

SEQ ID NO: 251188 - protein, 39 aa, Glycine max
  Clone ID: PAT_MRT3847_68851C.1.pep
IRMENCECGKGRLLDLKQKIVEPERTCNVVVVELLGCGV

SEQ ID NO: 251189 - protein, 131 aa, Glycine max
  Clone ID: PAT_MRT3847_68852C.1.pep
KDIRPLKPPQSKNFYIFFGNTKKKTPLGKKKGGPQSPKTEKFLKGKKKNNRTGKKPRKKKKGGGEPSKKKGGSKRGKTNLPIKNTKIGKGWPNHGVEGKLGKKIRGITGKKKGSGPNFERNTLERGNHKKG

SEQ ID NO: 251190 - protein, 84 aa, Glycine max
  Clone ID: PAT_MRT3847_68853C.1.pep
TTYHCMKYELSTLDKTRPSLIVAFSIMTVSPDKTEKHMLEYIRFWNAIIVHDDDDDRELGIVERHAIHLIRSSLQNQWETCPHA

SEQ ID NO: 251191 - protein, 43 aa, Glycine max
  Clone ID: PAT_MRT3847_68854C.1.pep
GSLKDQLRRVFEYFCNFDSIFTIITVNYICLTDQLMSQCEIAV

SEQ ID NO: 251192 - protein, 104 aa, Glycine max
  unsure (1)..(104): unsure at all Xaa locations
  Clone ID: PAT_MRT3847_68855C.1.pep
KTGRDPTSDLSKVCTFFXSNIPTIIPRPLLFKITYSYTLLNISILLSPKFHILSILSQLFLLIKPFHFPTYIPSNLTLSFLLTYNLIFLFPTSFPLSSHSQLLN

SEQ ID NO: 251193 - protein, 91 aa, Glycine max
  Clone ID: PAT_MRT3847_68856C.1.pep
IGILICVKATFMRRCITSAVYVSSSTFWVRVPRSGPLLVSERVGVSLVDSFDSHWKQYPSYSSSWKFWSGGPMFFQLSISISFNTCLIVST

SEQ ID NO: 251194 - protein, 198 aa, Glycine max
  Clone ID: PAT_MRT3847_68857C.1.pep
FSRELLPSNASRFPPLSLNFWSPESNIPLSGKGIPNNGTIPIDKTHIKPFNIGNQFQEHFYQHYFKNQTPFREALAETLTKAISTDTSFRSAIAAAVSSIRGQGSSSENKGDGEVLGSGLSLKLGEHPQLASSNSLNKNEKECLTGYFNRSSSSSSSSQGGNSMLLQPQWPFSIRKTSTPPSNVDYINHWISEINSHH

SEQ ID NO: 251195 - protein, 132 aa, Glycine max
  Clone ID: PAT_MRT3847_68858C.1.pep
MDALCLHSSICGIAPSISITASARANDYASHSQVKAVGSFSLFSRFSFRFPLKSFWPRPPTGNASGYHGLAVDDDAVLAENATAETERGEGEGQNGNWVLKIFHIRSVWRGEQRSDEGEAMANGQTDKECDD

SEQ ID NO: 251196 - protein, 115 aa, Glycine max
  unsure (1)..(115): unsure at all Xaa locations
  Clone ID: PAT_MRT3847_68859C.1.pep
SLLVPKNXTLNFMVPIIRLHPKVSEHPIPFNPHRFLNHQGFHIPGSKHINIIPFPPATTISPPYKFPFLNLQYFIPNLVFNFQCKVPQPTHLISYKQQFITLIKKTLQAPPIPRI

SEQ ID NO: 251197 - protein, 90 aa, Glycine max
  Clone ID: PAT_MRT3847_6885C.1.pep
LESIFKLIEYPKQQYDSYKREEENSLKSLEEFAKQKYFNEKLDDHLTLEQFLKKESTCIEDQYLLYKDHKRKNIKTMEQYFMQRLRSNRE

SEQ ID NO: 251198 - protein, 42 aa, Glycine max
  Clone ID: PAT_MRT3847_68860C.1.pep
DTSIHAGLPAKGKHIKNRRTKRSKLTYTNLPLYRIQTLRTLT

SEQ ID NO: 251199 - protein, 69 aa, Glycine max
  Clone ID: PAT_MRT3847_68861C.1.pep
GPPHRSKIYCYVLWTVMSLKTSPNPVIGCSKIEMPLFLVGPPKGWKIYCWTHEIHFNPRYLLFLIFDKN

SEQ ID NO: 251200 - protein, 69 aa, Glycine max
  Clone ID: PAT_MRT3847_68862C.1.pep
NLLLVHYSSLVLCAYTSNLLSSTHTNTNHGFPYLLFFFPFLSSKFHSCMGKAKKIDADRMSVNCKYMCH

SEQ ID NO: 251201 - protein, 54 aa, Glycine max
  unsure (1)..(54): unsure at all Xaa locations
  Clone ID: PAT_MRT3847_68863C.1.pep
IPRGIWGSHRKVXNSQNGLIIXRDLAPYFFGGEKQKFKFRIPGRIWREELDLLK

SEQ ID NO: 251202 - protein, 56 aa, Glycine max
  Clone ID: PAT_MRT3847_68864C.1.pep
EAGVYPRRGLSGTIKGHWVKRLQAGYYYKEREYFPLGAGKLKSQSGFFPLQSTSGN

SEQ ID NO: 251203 - protein, 51 aa, Glycine max
  unsure (1)..(51): unsure at all Xaa locations
  Clone ID: PAT_MRT3847_68865C.1.pep
MGRTTKPTPKKPXEHFPWXTSQPAIPLGELLTKMGKNGSQKRAHXSKQPNS

SEQ ID NO: 251204 - protein, 62 aa, Glycine max
  Clone ID: PAT_MRT3847_68866C.1.pep
FPFIWGHNIFPPPENFPFWVWDPFFGRGRCEIRGDPLGFPFLGAHHKIICECYICRPKALCF

SEQ ID NO: 251205 - protein, 69 aa, Glycine max
  Clone ID: PAT_MRT3847_68867C.1.pep
YNTDGNTLCFPRITQSASPTYLMLVSPFGSPRFFFFLCCPLPCCKLLRVQIFSTQIVSTFINPTFYHTP

SEQ ID NO: 251206 - protein, 214 aa, Glycine max
  unsure (1)..(214): unsure at all Xaa locations
  Clone ID: PAT_MRT3847_68868C.1.pep
MMHILHKTLTGKTXTLEEESSDTIDIAEAIIQDKEXGIHPDQQRLIFAGKHLRTDAPLLXYNIHKERTLQLALRLRGGXQILGKTLTGKTITVEGESSDNMHNVXAKIQDKEGIPTDQQRLIFGAKQLXDGRTLADYNIQKETTAYLVLRLRGGMQIFVNTLTGQTITLXGESSDTISNVKANIDDKDGMLPDQDMLIFSGKQLADGRTLADYN

SEQ ID NO: 251207 - protein, 169 aa, Glycine max
  unsure (1)..(169): unsure at all Xaa locations
  Clone ID: PAT_MRT3847_68869C.1.pep
MAACALFSGGGNITEDGNVNGSGSANSTPLTSASNSSNMSNEEQQQLHAGGIMPQPYCERKMMRKRMASEMEVNVHATPPHNSSSTTSDYPRFPRRSNTNTNMLEKGSPTTTSSTTTLAAGPXYNNNNNNNNNNSHHYNNSNNSNSGNISSRDNVAIPNYPTVTVTTNY

SEQ ID NO: 251208 - protein, 87 aa, Glycine max
  Clone ID: PAT_MRT3847_6886C.1.pep
VPFYFPGLLTRKHPTGTFFLFCCYACLFHYYLFLLQGSNFVCCYACFLLNNSYVFLLIFQLCFWFLFYFPEHPTNKPFSLLLLCMFG

SEQ ID NO: 251209 - protein, 65 aa, Glycine max
  Clone ID: PAT_MRT3847_68870C.1.pep
HACQYFYLVKMMMKLGYKNEAQLKLQNGCSVNDHHQLQIPFSASCLIFCCNHKQICPRKFPFICS

SEQ ID NO: 251210 - protein, 36 aa, Glycine max
  unsure (1)..(36): unsure at all Xaa locations
  Clone ID: PAT_MRT3847_68871C.1.pep
XSRRXFXXSYXVWKFPEACXAXRERAPKDPQRLKMR

SEQ ID NO: 251211 - protein, 185 aa, Glycine max
  Clone ID: PAT_MRT3847_68872C.1.pep
FGSRWLPDQWTHHTVSKVEGTFGYLPPEFFMHGIVDEKTDVYAYGVLLLELITGRQALDSSQKSLVMWAKPLLTANNIKELVDPVLADAYDEEQMKLVTLTASLCVDQSSIQRPVMSQVLDILRGEEESLRIMKERSKSKLQRTYSEELLDAEEYNSTKFLSERDRHMETILGCSSSVTEDEDKI

SEQ ID NO: 251212 - protein, 285 aa, Glycine max
  Clone ID: PAT_MRT3847_68873C.1.pep
MLKEKERKEQELRALAQTPRSERIGGERIGVVPAAPPAVAVDEDDMRVDYEHEKENPRERDRERSFVKESREEKEERMQREKIREERRKERERERRLEAKDAAMGKRSKITRDRDRDISEKVALGMASTKPGTEVMYDERLFNQDKGIASGFATDDQYNVYEHGLFTAQPTLSTLYRPKKNIDDETYGGADEQLEKIMKTDRFKPDKGFSGASERAGPRDRPVEFENEEADPFGLDQFLTEVKKGKKAMEKVGGGGTMRASAGSSMRDGNEGGSGRTRIGFERGH

SEQ ID NO: 251213 - protein, 182 aa, Glycine max
  unsure (1)..(182): unsure at all Xaa locations
  Clone ID: PAT_MRT3847_68874C.1.pep
ARRCRTPVSSLEPRENLTLGPKVVQQTIEKVKLIQKRMRIAHSRRKSYHDKRRKDLEFEVGDHVFLRVTPXTGVGRALKSXKLTPHFIGPFQILKKVDFVAYQIALPPSLTSLHNVFHVSQIHKYINDPSHMVNLDVVQVKENLAHETLPLRIKDMRTKHLRGKEILLVKVIWGGASGEEAT

SEQ ID NO: 251214 - protein, 54 aa, Glycine max
  Clone ID: PAT_MRT3847_68875C.1.pep
LATPKIPPPPCVIRKFPPPPKKNPPPRTEGFGFPPPKKKWLKAVLKKKKKKKKE

SEQ ID NO: 251215 - protein, 87 aa, Glycine max
  Clone ID: PAT_MRT3847_68876C.1.pep
KQEKRYNRAWRRFLSTELTAQQTAVSSIGGATERYARAEDEASKASIERNIQANKRAEEDRRKADSGRGVHVAKSVEKEASVLKAEL

SEQ ID NO: 251216 - protein, 47 aa, Glycine max
  Clone ID: PAT_MRT3847_68877C.1.pep
RNKLSPYLLPEQVRNSSDTLIVLPSPPNYPLATLFHSTPPPVFFCNR

SEQ ID NO: 251217 - protein, 76 aa, Glycine max
  unsure (1)..(76): unsure at all Xaa locations
  Clone ID: PAT_MRT3847_68878C.1.pep
LVSMESSKIYGLPASFGMLFPSAFRHSHFCGCGYCGKPPKXHKPGKXPKTPTVPVVKPPVTIPPISHQSQSLPCYP

SEQ ID NO: 251218 - protein, 350 aa, Glycine max
  Clone ID: PAT_MRT3847_68879C.1.pep
MMMKSSYSSYLSILFLFFLLLVDKSLSKSGARFSLTRAVFMPHHPVIGGSQWDQTVETVEQQESAPQPTKQIKGLSKIKDYFSNFGYLPSSGGTFNDDLDQATVSAITTYQRFFNLKITGDLTNETLQQISLPRCGVPDMNFDYDVSKDNVSWPMSRYHRRWFPDRNLTYGFSPASKIPSNATKVFRDAFARWAGSVPGLNLTEMNYNSADLKVGFYNLDEGVEDVVWGESIIRLNASNVVSGEIRLDATKDWKLPGEKGENGTALDLESAAMHHIGHLLGLDHSNDEESVMYPYVLPSRRQKVKLSSSDKENIRLVYSKGHSGNGGSWGVVRIVTPLALGFAYYAVVLA

SEQ ID NO: 251219 - protein, 60 aa, Glycine max
  Clone ID: PAT_MRT3847_6887C.1.pep
YYADIYPNKRTLLLYLCPEFTEVYHTTLLITGRNCLMNNWALLKSVPLELLVLHHHKRLL

SEQ ID NO: 251220 - protein, 75 aa, Glycine max
  Clone ID: PAT_MRT3847_68880C.1.pep
SVVYSINVVCQAHANNRITLQLPLPFIYYTFTLSDNCPPNYSIPVYSIIMYNHLHIIISNTVHLPLDTTHSTLYT

SEQ ID NO: 251221 - protein, 60 aa, Glycine max
  Clone ID: PAT_MRT3847_68881C.1.pep
LKLILLKIFGDTIGLSNNSWWMHGYYRVKRLMNHKMYLEKGGEHTQWISHECAPGTMYPD

SEQ ID NO: 251222 - protein, 129 aa, Glycine max
  Clone ID: PAT_MRT3847_68882C.1.pep
MADPELEAIRQRRLQELMASHGGVGNQQNPEQEKAQDDAKREAEERRQMMLSQILSAEARERLARIALVKPEKARGVEDFILRAAQMGQITEKVSEERLISLLEQINNQTTRQTKVTIQRRRSVLEDDD

SEQ ID NO: 251223 - protein, 167 aa, Glycine max
  Clone ID: PAT_MRT3847_68883C.1.pep
SYGPDFHVQSLREDLLEPERSGSCSGETIKRQRGFDLERPAERDIFGGGCDEHEAGLSSYTALERCKISSNNDDGYDEDMEVDLTLSIGGGSQVNKKNSSSKKPYLLPLGCSDSPNGKTRELNSSVSFQSDRVGDFSDPTTPMSSSSVTFDQERKGPHWLSQGLKLK

SEQ ID NO: 251224 - protein, 80 aa, Glycine max
  Clone ID: PAT_MRT3847_68884C.1.pep
FTLFFTPNLHITNPHLKLVFRATNLTPQIVLFKLPLQKKKHLSHQTHLNNLMITLIRIYLHNSNCPLLHARIYTLLQRLL

SEQ ID NO: 251225 - protein, 116 aa, Glycine max
  unsure (1)..(116): unsure at all Xaa locations
  Clone ID: PAT_MRT3847_68885C.1.pep
VAQEISKLDLFRHLLYLTTTRPDICFATQLSHSYHFSTCCITKQPKKFLKYLKGIFGKRIYFLTPXTSYSWFSDADWAGFPDTRHSISFYCFFXGDSLFSWKSKQNTVVSSSAEEE

SEQ ID NO: 251226 - protein, 137 aa, Glycine max
  Clone ID: PAT_MRT3847_68886C.1.pep
GCLFLPFSSGLNPAGTLWNDGNNILEEKSTPSKTGTQYSQDLNEGQTKTASDSLGPSVIPGWPSQIKDPTLPGANYYSNKLPSSSIYHLSMVNYERPKHCIQSQSPCGSKLQPPGPETSSYSSQTKRSSVIIQPRQC

SEQ ID NO: 251227 - protein, 76 aa, Glycine max
  unsure (1)..(76): unsure at all Xaa locations
  Clone ID: PAT_MRT3847_68887C.1.pep
TVERLSQQQQLHYGTPEDHHKFPEVSLNEIAGPQGEPLAQSLKPSADVSDDSXPSALGLATPTTILGGTSLGARKG

SEQ ID NO: 251228 - protein, 93 aa, Glycine max
  unsure (1)..(93): unsure at all Xaa locations
  Clone ID: PAT_MRT3847_68888C.1.pep
LNYLSCHAASVWYFLFNPAGLSLIVQSCRLRWLNYLPPDVXEGXITPAQRLLIMYLPPQWGNTRANLASHLPARTDCEIDNYFLTAIHTHIHQ

SEQ ID NO: 251229 - protein, 28 aa, Glycine max
  Clone ID: PAT_MRT3847_68889C.1.pep
FFFFFFFFFFFFTVKTNHFSVQLYNVSE

SEQ ID NO: 251230 - protein, 213 aa, Glycine max
  Clone ID: PAT_MRT3847_6888C.1.pep
SEVNDKSVSGTTQLVCERCWCAIENNKGITSLDSISPGEGINSVNNSGAASAGCNSSREVTKVKKNTVLKEQLEFSQSSKSSQGDYSSSTSTSDESNLSGSSCGNRPHMSKDVRWKAIRHAQMQHGVLGLRHFNLLKKLGCGDIGTVYLAELIGKNCLFAIKVMDNEFLARRKKTPRAQTEREILRMLDHPFLPTLYAQFTSDNLSCLVMEYC

SEQ ID NO: 251231 - protein, 115 aa, Glycine max
  Clone ID: PAT_MRT3847_68890C.1.pep
PRVRPRVRSVRGYDIAHIQGLFLTKGVKSGGRMLGSEYNYATLPIYNGEQPLLGPPSYAIAHAEPSELNHAAEEETLYEELQSTLDMKDVDESDEKVSDFNDGGGVCDEETGDGD

SEQ ID NO: 251232 - protein, 138 aa, Glycine max
  Clone ID: PAT_MRT3847_68891C.1.pep
PEYLCISVQGDNAPSSNNVAGLSRVENACGNVTQSGTTRQYSCQQKPHDASLIEAALKADRIGDANQSNPHQQSSESMNISSSATQFTGSTRLSNENSVPVGADGALASELNASPDLSTFDGAFYFDFETTWDCLARV

SEQ ID NO: 251233 - protein, 51 aa, Glycine max
  Clone ID: PAT_MRT3847_68892C.1.pep
LVMGVAPAKAQFEGPAMRVPADNDGGQWGPNCSCNPCTCKSGVGRPSFKQT

SEQ ID NO: 251234 - protein, 95 aa, Glycine max
  unsure (1)..(95): unsure at all Xaa locations
  Clone ID: PAT_MRT3847_68893C.1.pep
FNSATVXYDQXPPDIFHPASLEERHKLFCRLNEDLFRSLGVRDCVRNSLVASCHQNETLFATEVGSNIYLKPNRPALVVSSTSWYVYPIMNCLFW

SEQ ID NO: 251235 - protein, 59 aa, Glycine max
  Clone ID: PAT_MRT3847_68894C.1.pep
RRRSQKKEAKKKAPKVGFKSSSLVFLTFLVGFPSGFHSFDLTPLVRPFSKVFTIHQFLT

SEQ ID NO: 251236 - protein, 94 aa, Glycine max
  Clone ID: PAT_MRT3847_68895C.1.pep
FFFLMLNKDFLLLYVKLLCHPSAPHTRATPSTSPKEREDPRSHRAPKSSRDDVRLARLRTRQRGRTSHLGRSTFADDPNQILLLIQQRAPDSTP

SEQ ID NO: 251237 - protein, 62 aa, Glycine max
  Clone ID: PAT_MRT3847_68896C.1.pep
MKKAIGQTVRELKREVNKKVLKVPGIEQKGLDATNNEAWGPHGSLLADIAQASRNFHEYQMI

SEQ ID NO: 251238 - protein, 134 aa, Glycine max
  Clone ID: PAT_MRT3847_68897C.1.pep
PDPTLNPIFESQWDEQHAALCDLNSSASNDRCGWGISPRGAGYTFGQDISEQFNHTNKLKLIARAHQLVMDGFNWAHEQKVVTIFSAPNYCYRCGNMASILEVDDSMGHTFIQFDPAPRRGEPDVTRRTPDYFL

SEQ ID NO: 251239 - protein, 68 aa, Glycine max
  unsure (1)..(68): unsure at all Xaa locations
  Clone ID: PAT_MRT3847_68898C.1.pep
NSHRKQLFKYKIGGIQQISKPKQLIGYLISGRTSHHPSSSHXLEQNCPLYLCPQHCGNISTLHSTLPA

SEQ ID NO: 251240 - protein, 137 aa, Glycine max
  Clone ID: PAT_MRT3847_68899C.1.pep
MSVTETPKKTGAPQIVKLDKALKLAELWVNNMSKDADDDRTNADVEGRPSRLGLGAKVSRQSKFVPSDDPVERKLYAKLNAEKRKAANIAKESATIARDALDDDEDNEDLDSRANAFTKRKATAPLISSMLRNKKQK

SEQ ID NO: 251241 - protein, 402 aa, Glycine max
  unsure (1)..(402): unsure at all Xaa locations
  Clone ID: PAT_MRT3847_6889C.1.pep
MVLLSARRARSPPAWDGPEKVLADTRKAYCFGTRQGPAAIAPPTLDKGQAAKIQDQDNLLRSAVNAGDGLRIPGDQRHITPAQPPLHLADALPVVIANDPTTAQPQPQLSANTMGMPAQNSLLQASSATVSQLLGRSAASPSAATTTTTSFDNTTASPIPYANSPRSSTNIMNTPSPQPQQTQQQPPVLQQQQQRQKFMQCPRRAAXSQKLNHTSSCFIFXAYHCLGQLRKQHLIRFSQPRGPRPVRGFKLPSGHVQHGIGQSQLNQGNQMTRLSQFSGPANSALFSAAQTTPNTQMIPNISGTLPSQSLLPRVQLGLSGNNPQRSHPSQMLSDQVFNMGGGNPGGMMPIQQQQQQQQQQQHGSQAFGSMANAQNLQSGLVTLQNTQQNHPNFSQQRQQNPQ

SEQ ID NO: 251242 - protein, 49 aa, Glycine max
  Clone ID: PAT_MRT3847_688C.1.pep
GSWIHCGYHLITTIVSPSLLSLPYALTFLGWKARILCLVIGALVSFYSF

SEQ ID NO: 251243 - protein, 117 aa, Glycine max
  unsure (1)..(117): unsure at all Xaa locations
  Clone ID: PAT_MRT3847_68900C.1.pep
MEEGLEKRELEGEVVTKVVEVVSAXKNAKHVDQVIRALHSLVTLLFPFDSSLLSDSIDQSYRDQVEVPSAEKRHAWWRAFYRGAAFPTLARVLLLDGASNWVGWFPFMGQKDIYDGF

SEQ ID NO: 251244 - protein, 57 aa, Glycine max
  Clone ID: PAT_MRT3847_68901C.1.pep
NKKINLKAIINNNRLRKNQITMVPEKYVKNYIHPNIIGPHGILGKFHYLIIGLGALL

SEQ ID NO: 251245 - protein, 259 aa, Glycine max
  Clone ID: PAT_MRT3847_68902C.1.pep
AGRAMSLLVGVFLMVAVKKAVILVALGAVIVPVVVLIAWNCVWGRRGLLGFVKRYPDAELRGAIDGQYVKVTGVVTCGSIPLESSYQRVPRCVYVSTELYEYKGLGGKSANSKHRCFTWGSRYSEKYVADFYVSDFQSGLRALVKAGYGAKVAPFVEPTTVVDITKDNRELSPNFLGWLADHKLSSDDRIMRLKEGYIKEGSTVSVMGVVQRHENVLMIVPASEPVSTGCQWIRCLLPTYVEGLILTCDDSQNADVIPV

SEQ ID NO: 251246 - protein, 54 aa, Glycine max
  Clone ID: PAT_MRT3847_68903C.1.pep
RSFFSAQLTHYYISSYNKTNNNYGCFKSTFMIISTSDEYGNVETNHVYCTLSCC

SEQ ID NO: 251247 - protein, 91 aa, Glycine max
  Clone ID: PAT_MRT3847_68904C.1.pep
PVRGSHSYLFSRCRGGPPPTRPTPLSPYSSHAAFAITVHARHLLYHVRPTYLPCLRHLRWVMGRFVRRNRPTAQLVVSVHVNPTPPTVPVV

SEQ ID NO: 251248 - protein, 45 aa, Glycine max
  Clone ID: PAT_MRT3847_68905C.1.pep
RKDSQGPTTSTLRKSYQCNPSKKLHCSFSAYFIMYIVRGTRRGSK

SEQ ID NO: 251249 - protein, 88 aa, Glycine max
  Clone ID: PAT_MRT3847_68906C.1.pep
SPWACQYPSRRSILWAVSIVTLVPFTYSSGMYHVGRLIYLLPNHLWHEQSLKLLKVTIVKDRLMIISTIIRRILPSLESLSIAGSLDL

SEQ ID NO: 251250 - protein, 250 aa, Glycine max
  unsure (1)..(250): unsure at all Xaa locations
  Clone ID: PAT_MRT3847_68907C.1.pep
RRLLSEKADLGGVAXAAKIKQLTAELDTATANGSTPFNPDERIRTGFAHFKNEKYQKNPELYGELAKGQSPKFMVFACSDSRVCPSHILDFNPGEAFVVRNIANMVPPYDKTXVFRNLGRPIEYAVLHLKVENIVVIGHSCCXGGIKGLMSIPDDGXTTASEFIEHWVQICTPAKSKVKTEANTLEFSEQCTSCEKEAVNVSLGNLLTYRFVRDAVVKKTLALKGAHYNFVKGTFELWDLDLKISNSVSV

SEQ ID NO: 251251 - protein, 60 aa, Glycine max
  Clone ID: PAT_MRT3847_68908C.1.pep
NSARACDNTTEGLGCLSSERTSLVPDVPDSFMSCDAACLKSNICDESQTKILNTPPILKS

SEQ ID NO: 251252 - protein, 54 aa, Glycine max
  unsure (1)..(54): unsure at all Xaa locations
  Clone ID: PAT_MRT3847_68909C.1.pep
GFARIVKLILSYCESESSQFLSXFSQARXISHPDPCPILIHYLLFCQHPPPYVR

SEQ ID NO: 251253 - protein, 47 aa, Glycine max
  Clone ID: PAT_MRT3847_6890C.1.pep
RNLYNKRSVKIKFKKLLQNELVIPVTTDMDLKMSPQGREYDNTVAYS

SEQ ID NO: 251254 - protein, 41 aa, Glycine max
  Clone ID: PAT_MRT3847_68910C.1.pep
IRLEPPLEFFFPSSKFFMRTLVYFWREREVLIKNLLEGNLI

SEQ ID NO: 251255 - protein, 61 aa, Glycine max
  Clone ID: PAT_MRT3847_68911C.1.pep
PKKKKKKGARQQLTPSPRNLFPTRNLQAYHLAPIDSLIKPWRNHGQTGSLGKIVTRPKSHT

SEQ ID NO: 251256 - protein, 141 aa, Glycine max
  Clone ID: PAT_MRT3847_68912C.1.pep
PLSLVVSTLTTGKPALEGQVPFESFAMCSLIGLCFSVTALIMFLSILTSRKEIRDFRTNLPLKLLMGLSSLFISIAALFATFCSAHFFVIDDKFKQVLILIYTVTCLPVTFYAVAQFPLYIDLMRAITTKVPLASDKGDDL

SEQ ID NO: 251257 - protein, 69 aa, Glycine max
  Clone ID: PAT_MRT3847_68913C.1.pep
TILFLEQIKWDAFFKINVSNKNQILKLVKFEKTKTQVTLFFTTKKRTTWLFGRGRKNKHLSHPTAVTLY

SEQ ID NO: 251258 - protein, 88 aa, Glycine max
  Clone ID: PAT_MRT3847_68914C.1.pep
SLGYKPWNNKLTYVMVCFNHSKSTDFSHCTCLSLTSVTYILIIFDISYITYILRNFAGFCISRSRIIYLQRSYWKLFSTFDAFLNVIL

SEQ ID NO: 251259 - protein, 39 aa, Glycine max
  unsure (1)..(39): unsure at all Xaa locations
  Clone ID: PAT_MRT3847_68915C.1.pep
PXRPRVRKNLFLAPTNFMCSRLCVRIRILTHXKAPPPSR

SEQ ID NO: 251260 - protein, 63 aa, Glycine max
  Clone ID: PAT_MRT3847_68916C.1.pep
LSPWIGGYVECWLDLLGMPNHAHGQKIPCLERPVWIITSSWFPCIWRAASRSFYAFSFRNLCW

SEQ ID NO: 251261 - protein, 216 aa, Glycine max
  unsure (1)..(216): unsure at all Xaa locations
  Clone ID: PAT_MRT3847_68917C.1.pep
MASATNTGGFIHVLPILDGKNYDQWVVRMEAILGFHEILDIVKEGISEKEKDDVAIMKKDFKAKCLLHQCVDFVVFKKIAKASTTKEAWEILXKAFGNAGKTKKVKLQSLRRQYELLSMSDQETVADYFNRMXLLVNSMKTCGESLLDQMIVEKILRTLSPRFDHIVVAVEESKDLERLKIEELQNSLEAHEQRLNERANSRDLDQAMQAQFTKND

SEQ ID NO: 251262 - protein, 59 aa, Glycine max
  unsure (1)..(59): unsure at all Xaa locations
  Clone ID: PAT_MRT3847_68918C.1.pep
VTAQDISTMIRCGQKTIIFLINNGGYTIEVEIHDGPYNVIKNWDYTRFVEXIHNGQGKC

SEQ ID NO: 251263 - protein, 53 aa, Glycine max
  Clone ID: PAT_MRT3847_68919C.1.pep
LPQFVHWLGVSLKERGPFVFPCNKPCVSVSVYGNKILARKKKGTYVCRQQDSS

SEQ ID NO: 251264 - protein, 562 aa, Glycine max
  unsure (1)..(562): unsure at all Xaa locations
  Clone ID: PAT_MRT3847_6891C.1.pep
MDLAAKLHHLDLTGVVILDARKPSALRHLPPRVLSRTNTNTNLIYTNRFSGPPRPNSASSTGLSMITVEDDIESLFSETNSEEERRVRKQPSIGASGISSGVKLENVGKAYKGVTVLKDVSWEVKKGEKVGLVGVNGAGKTTQMRIIAGLEEPDFGNVVKAKANMKIAFLNQEFEVAPSRTVREEFMNAFKEEMEVAGKLEKVQKALEGAVNDLELMGRLLDEFDLLQRRAQNVNLDEVDAKISKLMPELGFAPEDSDRLVASFSGGWQMRMCLGKILLQXVNASCWIVLNHLECFXDQLCTKMETDMGVSRRGEXNISNVISSKCSHVCFHVEELLQLILSXEKPTGGEVLLGEHNVLPNYFEQNQAEALDLEKTVLETVEEAAEDWRIDDIKGLLGRCNFKADMLDRKVSLLSGGEKARLAFCKFMVKPSTMLVLDEPTNHLDIPSKEMLEEAINEYQGTVITVSHDRYFIKQIVNRVIEIKDGTIQDYAGDYDYYLEKNFDARERELEREAELDSKAPKVKAKSKMSKAEKEARKKQKMQAFQAAKQKSKGVKNAKRWN

SEQ ID NO: 251265 - protein, 85 aa, Glycine max
  unsure (1)..(85): unsure at all Xaa locations
  Clone ID: PAT_MRT3847_68920C.1.pep
RKMFFNFKNFLKGLFKVGTVKFSGGXFXKKKKSFISRGAILGGPLADAREKIWGGPEIPNQNLFFSRGAYNPPFGGGPRGGKVVP

SEQ ID NO: 251266 - protein, 62 aa, Glycine max
  unsure (1)..(62): unsure at all Xaa locations
  Clone ID: PAT_MRT3847_68921C.1.pep
LIFCQQGGIPPRKQLRTXAPRKYVPATGGTTKPKRYLPGTVALRVIRTYQNTTDLLIKKLTL

SEQ ID NO: 251267 - protein, 67 aa, Glycine max
  Clone ID: PAT_MRT3847_68922C.1.pep
MYEGIRALTIDKDNAPKWEPSSLAKVEDGKLDLIFQPFEKNLELQIPESEEYRWDGKYENSAYALPN

SEQ ID NO: 251268 - protein, 77 aa, Glycine max
  unsure (1)..(77): unsure at all Xaa locations
  Clone ID: PAT_MRT3847_68923C.1.pep
GHYGVITDNKXDRPKIHANNAGAQYIASPIPSYEMGYIKLACPLTYVGATETTTRYITNPLDKSLTESHRLAYWDTG

SEQ ID NO: 251269 - protein, 37 aa, Glycine max
  Clone ID: PAT_MRT3847_68924C.1.pep
VFAMPHRVYYKVGRLCLVYRCSKCSFWAISLFQRNNC

SEQ ID NO: 251270 - protein, 231 aa, Glycine max
  Clone ID: PAT_MRT3847_68925C.1.pep
MEDGNNSGGSTAKKLKQRRKRKDYLVDKDGQVGEREKLAKRILLSLTRPSYVLGLGPKPLRVEHRARLRYLLRRLVNQHHWVAASGVLSAYLKGTLDDASPYTNRLKFWVLLELLKHVENHSINPTRIKNLYDIWSKKIGSMKTWPVESRYAVHLEFMLFCLLQGNAEDAYQLALCLGQEKGDIGPMSKMMMGLTFYELWYSSIPKEFQWRNSDQFDLQENSDMEGTSFNN

SEQ ID NO: 251271 - protein, 112 aa, Glycine max
  Clone ID: PAT_MRT3847_68926C.1.pep
LFTAFKSFHVKGLVITYISLGNYLVFVSHQGLNPFLCTIRWWRLLLFFTAFFLVIGLFFGGWGVGIGPDGQGKGTYQVFFQGLNQVLKVVNKAFLASNRVFTRLCNGRRAFQ

SEQ ID NO: 251272 - protein, 81 aa, Glycine max
  unsure (1)..(81): unsure at all Xaa locations
  Clone ID: PAT_MRT3847_68927C.1.pep
MEDGNNSGGSTAKKLKQRRKRKDYLVDKDGQVVEREKLAKRILLSLTRPSYVLXLGPKPLXXEHRARLRYLLPRLVNQHHW

SEQ ID NO: 251273 - protein, 175 aa, Glycine max
  unsure (1)..(175): unsure at all Xaa locations
  Clone ID: PAT_MRT3847_68928C.1.pep
VTADENLNFSSLLSRYLAKACVGRKQRASSLLTMEDDLLDTEDRNNNGSSTAKKSKQRRKRKEYMVDEDGQVGAREKLAKRILLSLTRPSYVLGLGPKPLRVEHRARLRYLLRRLVSQHHWVAASGVLSVYLKGTLDDNSPYRNRLKXWVLLELLKHVENHSINPTRIKNLYDIW

SEQ ID NO: 251274 - protein, 124 aa, Glycine max
  Clone ID: PAT_MRT3847_68929C.1.pep
NESDADDVGSFDDENDNRVKSDEAGSKPCVGNSKSRLMIEQLLMKESSLRNEFDMLVKIFRSRVVDPVHDDDGDKTPTVIPNKIFGSDSPELHSAAIMEAQKWLAKKKSGLDTNSHIRYGRTSL

SEQ ID NO: 251275 - protein, 63 aa, Glycine max
  Clone ID: PAT_MRT3847_6892C.1.pep
TLTPSPHFSSFIAPFDPPVQFFHQQREAVNFFLLFCPLSTFVSFFMDQFSLAHVMWQGGFKVD

SEQ ID NO: 251276 - protein, 59 aa, Glycine max
  Clone ID: PAT_MRT3847_68930C.1.pep
GHARALTLVSRRSSQFALLTPGRAVHPRGYSDYSHRRSEVVRYGWHHVFCCTLDCCDDF

SEQ ID NO: 251277 - protein, 742 aa, Glycine max
  unsure (1)..(742): unsure at all Xaa locations
  Clone ID: PAT_MRT3847_68931C.1.pep
MSGAVLVAVAAAIGNLLQGWDNATIAGHIFIRLANXDNIQPSLIGFLCYAGSILYIKREFNLQSEPTIEGLIVAMSLIGATVVTTCSGPLSDLLGRRPMLIISSILYFVGSLVMLWSPNVYILLFARLLDGLGIGLAVTLVPLYISETAPPEIRGLLNTLPQFTGSAGMFFSYCMVFAMSLTKAPNWRLMLGVLSIPSLIYFALTLFFLPESPRWLVKGRMLEAKKVLQRLRGRQDVAGEMALLVEGLGVGRDTAIEEYIIGPAXEFSEAEQIKLYGTAEGVSWIAKPVTGQSSIGLVSRKGSMANQSGLVDPLVKLFGSVHEKLPETGSTLFPHFGSMFSVGGNQPRNEDWDEESIAREGDDYVSDAVDTDDSDDNLQSPLISRQATSAERDMPAPAQGSMRQGSLLQGEPAGNSGIGGGWQLAWKWSETEGVFKRIYLHQEGGPGSRRGSIISLPGCDAPTLTDGEIVQAAALVSQSALYNKELMHQQPVGPAMIHPSQTAAKGPSWSDLLEPGVKHALIVGVGIQILQQFSGINGVLYYTPQILEQAGVGYLLSNLGLGSTSASFLISSVTTLLMLPCIAVAMRLMDISGRRTLLLTTIPVLIVSLLILVIGSLVELDSTINAFISTSSVIVYFCCFVMGFGPIPNILCSEIFPTRVRGLCIAICALTFWICDIIVTYSLPVMLNSVGLGGVFGMYAVVCIIAWVFVFLKVPETKGMPLEVIIEFFSVGAKQAQVANNT

SEQ ID NO: 251278 - protein, 214 aa, Glycine max
  Clone ID: PAT_MRT3847_68932C.1.pep
MDQQQRHVSSGTTNPVLRFPTVRPLPFARLVAASRRRLFLSDCADRRSDDDGDGDGDSGECAYSRAVLVLDMVWNLAFVVVAAGVLLSTLRERPSTPLRLWLCGYAFECVLHMAFVYFEFRTGIRDSFSHTAYSIVKKLEPMNTLASSVWWIFGFYWIVEGDQALLEDSPRLYWLTVDFLAFDAFFIIFCIGMACIGLCGLFCIIAIIGLAYAM

SEQ ID NO: 251279 - protein, 247 aa, Glycine max
  Clone ID: PAT_MRT3847_68933C.1.pep
MYNGTVQSSAIQDLTSLEKIEEGLAQARASIQESILSRNYTSQRRESFVPKGSIYRNPHAFLQSHIEMVKRFKVWVYQEGEQPLVHDGPVNNIYAIEGQFMDEIDNNDKWSQFRARHPEEAHVFFLPFSIANVVHYVYKPILKQSDYEPVRLQLLVEDYISVIEDKYPYWNRSKGADHFLLSCHDWAPKVSNGNPELFLSFIRALCNANTSKRFHPNRDVSIPGVYLPVGKLGPPSLGQHPTAALYW

SEQ ID NO: 251280 - protein, 102 aa, Glycine max
  Clone ID: PAT_MRT3847_68934C.1.pep
LVGGMDITKGQQPKCQMIAKTVVTGIPEGKPRLYSRHTLVAFHILFLPLVLANNLTSCISGDASISILSKIVFPFSLKSFPPPFPPKLTLYPDFSTIGMQKG

SEQ ID NO: 251281 - protein, 38 aa, Glycine max
  Clone ID: PAT_MRT3847_68935C.1.pep
SKCVEIKGKKIDGIQKDCNGKDISETHTEQNTKGNQLR

SEQ ID NO: 251282 - protein, 41 aa, Glycine max
  Clone ID: PAT_MRT3847_68936C.1.pep
FVLVEKSSLCFSFLDSKPYCLLCNRSRVWSTVISLDDSSRD

SEQ ID NO: 251283 - protein, 44 aa, Glycine max
  Clone ID: PAT_MRT3847_68937C.1.pep
NLEIMRRRRRKRKIIRENEYSLRTSMEKIEILIMYFKNQIDLNA

SEQ ID NO: 251284 - protein, 75 aa, Glycine max
  Clone ID: PAT_MRT3847_68938C.1.pep
NTFVFVMDLEVWWYKDIADCETVIGLDVYVISMDAFRACCNVVVRTAVKPKVPLCCHCWRTTFSLHLSVNDCHAP

SEQ ID NO: 251285 - protein, 73 aa, Glycine max
  Clone ID: PAT_MRT3847_68939C.1.pep
TCNTSFTFIGSSTHRLCVSSGNIYRVIGRFYICDEVCVRPINVVRSHLSYHQRRAPHQNIPPLTQRHLAYSLA

SEQ ID NO: 251286 - protein, 51 aa, Glycine max
  Clone ID: PAT_MRT3847_6893C.1.pep
TDGNYFVSMIPNNTCTLQLMLKCISPQLRIKNEHNDLILYIGKKNLKSKSL

SEQ ID NO: 251287 - protein, 40 aa, Glycine max
  Clone ID: PAT_MRT3847_68940C.1.pep
TGEHDFSFTLDSYYPHLCNIIAVHIVVWYYDAGTIKSAII

SEQ ID NO: 251288 - protein, 162 aa, Glycine max
  Clone ID: PAT_MRT3847_68941C.1.pep
MRVLSLKDHIIHRATDRRRGVVEDLHLGIELSIEAVFDVVHKAAHLLFSPSEAFGTLFRLFSSHESDTKEDCDGVEDTPIYTATLGENDPMPTERNVKYQPLNTDARTCQDVITDLGYPYEAIRVITGDGYILLLERIPRRNSREACYLQHGVFDSSMGWVS

SEQ ID NO: 251289 - protein, 193 aa, Glycine max
  Clone ID: PAT_MRT3847_68942C.1.pep
MASSSIITPEDVLESLMNDGTIDALRLKIINQLKANEELKSTTIKMAEQSKVLNTPGAEKQTKRELFDALRQELEASVLEKASKSVWDLILDNNGLGKEISETVERVFCRLSGQEPPLFPLPNGEPQPDKETDNRKEKGKQKENENTNSNTPSKKRSFSEINLDGADETATRSSDPAAVLEGSGKSPLSISKT

SEQ ID NO: 251290 - protein, 121 aa, Glycine max
  unsure (1)..(121): unsure at all Xaa locations
  Clone ID: PAT_MRT3847_68943C.1.pep
LTRGFIAQDIGFENTLCPQNLQGGALCVGGDQYRMNRYCIDAFQDTLCADCNRQEYRDSVITGTDHCIFGKAAGAFQXCELGALKPMGIQNNMDTAHGREDPNQNTRTAIQQCHLTASSDL

SEQ ID NO: 251291 - protein, 66 aa, Glycine max
  Clone ID: PAT_MRT3847_68944C.1.pep
VRPFFVNSQNVNIWYVPSKKDSSGKPEDVLTAAEKYIKEHGTEAFENLLDRAGKSRKSSRHANGSY

SEQ ID NO: 251292 - protein, 86 aa, Glycine max
  unsure (1)..(86): unsure at all Xaa locations
  Clone ID: PAT_MRT3847_68945C.1.pep
MENSSSTKNLINAELGRRENITLIIFYSQXAPPFNTEIFLSRVNNYRYNXELPXNDNDICENKPNSCPKLHXLLDTNPIANALPAR

SEQ ID NO: 251293 - protein, 1224 aa, Glycine max
  Clone ID: PAT_MRT3847_68946C.1.pep
MGHGRMTNSETSNRDVPAAFTLAVDNELRSYGGDLSPVHGFSSAVNCAINSYGEDLGGFHSPEHNFASVVNNAMASDGEDLGASHPPVHGFPSSTDHAISSNGGDLGGSSSPVHGFQLYPLAELVAATDNFSLQNMIGAGSIGVVYRAELVAGGEVAIKRVEVSWSKRKELHEIVRGYLLAFLSRLHHKHLVELVGFCAEKDKRLFVFEYMKNGALYDHLHCKGSRVLNSWKRRIKIALDASRGIQYLHNYAVPCIIHGDIKSSNILHDATWPAKVPDYGLSIMMKTAGTVGYIDPEDIAGRAVTAKSDVYFFEVVILELLTGKIAIFKSGDDGGSVVDFAVPHILSGEWVKILDPRIGPPDENEADAVELVTYTALHCVNLEGKDRPTIDEVVVNLESALASCCHSGTIPSRGFIRRDFELLKMKESETVKDYYSKVKGIVDQMRAFGEDILDKKIVEKILITMPQKFDPIVTTIEETKDLSTLSETELVGSLEAYEQRLYRHKEDTIENVFQSKFKFQPQNKENGGKKNYGETSRRREGSRNFLKNKTDKNSSCNICKRQGHAEKNCWFRNMPQCNHCKKFGHVEKNCRNKNRHQANIAEEHDQEQCTFYATQDSIKEKGGSWYLDSGCSNHMAKDETIFKSIDESVKVKVRLRNGSVVESKDKGTVMVETDKGTRLIHDVLLVPSLKENLLSIGQMMERGYTHHFEGGVCKILDNKNKRSEIAQVKMNKSNRSFPLNLKYATNIAMKVQVDDSWLWHRRFGHFNSHALKLLHEKNMMRDLPSIKENNEVCEGCLLGKQHRFPFSTSGAWRAKDLLELIHTDVCGPMRTPSHGNNRYFILFIDDFSRMTWVYFLKEKLEVFGVFKKFKALAENQSEKRIKVLKSDRDKEYTSCEFERFCEDEGIERQLTVTYSPQQNGVSERKNRTVMEMARSMLKEKGLPNTFWAEAVYTVVYILNRCPTKSVKDKTQIEAWNGKKPFAKHLRVFGSICYIHIPDVKRHKLEDKTIRGIFLGYSNISKGYRVYNLQTKKLIISRDVEVDEYASWNWDEEKVEKNVLIPAQLPQEEDEEEDLGEPPSPPSQQQDQELSSPESTPRREVWVKAMEEEIQMIEKNNTWELVNCPHGKDIIGVKWVYKTKLNPDGTIQKHKARLVAKGYSQQPEIDYNETFAPVARLDTIRALIALASQKRWSIHQLDTHEKVQKRTLGGVHAKRIIAAITALSA

SEQ ID NO: 251294 - protein, 116 aa, Glycine max
  Clone ID: PAT_MRT3847_68947C.1.pep
KNPINTGPHNKIFPNLPRFRVKQEPGPLKIFWNGKRGSKKPKKKIFFLKKGGKLTTRGGPKTQLKKSSKKKNQVLIWTKTPGSWKKIYPYSLGSPRGRGKIGISTGGPLGPPLGGQ

SEQ ID NO: 251295 - protein, 108 aa, Glycine max
  unsure (1)..(108): unsure at all Xaa locations
  Clone ID: PAT_MRT3847_68948C.1.pep
QHKKGQPRRAATXXXRGKXGKXXGKGGAKRQRKGXRDXXQGNTKPAXRRPARRXGXKRNSXXSHEETRGXXKXXXENAXREAATDTEHARRKTEXAKXXXDAPKRQGR

SEQ ID NO: 251296 - protein, 64 aa, Glycine max
  unsure (1)..(64): unsure at all Xaa locations
  Clone ID: PAT_MRT3847_68949C.1.pep
VPXXLXWVXXHXXERLSGHGTGXTHDFVLGLAYQHCXITRXYXAYXXXSXCXXIXCHSCCWXWL

SEQ ID NO: 251297 - protein, 81 aa, Glycine max
  unsure (1)..(81): unsure at all Xaa locations
  Clone ID: PAT_MRT3847_6894C.1.pep
GRVGDLGGQRRFRSMWERYCRGVSAIVYVVDAADRDSVPISRKDLSXIKDREVCCYMISCKDSVNIDVVIDWLIKHSKTAK

SEQ ID NO: 251298 - protein, 91 aa, Glycine max
  Clone ID: PAT_MRT3847_68950C.1.pep
VSPVLPGFSSVVDLCVIAGAQFVCFFCLSLLVFALSPSISFCLGVLIAGPLCCLGVAFFRAYVYARMVVLFALIFLLFYFLIFNKLLKSTD

SEQ ID NO: 251299 - protein, 52 aa, Glycine max
  unsure (1)..(52): unsure at all Xaa locations
  Clone ID: PAT_MRT3847_68951C.1.pep
MTMQKHFLRPGTSPKPIPGQNVSFHXTGFFKNHYLSHKFCSTNHPGQDPFTF

SEQ ID NO: 251300 - protein, 90 aa, Glycine max
  unsure (1)..(90): unsure at all Xaa locations
  Clone ID: PAT_MRT3847_68952C.1.pep
AFGNNCKRQGIACHHPKLIVLQRKDSIQIVITSANLVEKQGNSVTNTIWXQDFPXPPSVDFGSLFPKLAMLTFIKGQTVGTKLNFGRTDG

SEQ ID NO: 251301 - protein, 385 aa, Glycine max
  Clone ID: PAT_MRT3847_68953C.1.pep
MALSVICSSKGNVLSESNILVVSCVVLNGLASFVIVEGLHDGSKARDVNLGGWLVIEGWMIKPSLFGGTANGDMLVQFKSGTLQKYVSAENGGEMNNLTICVFIIVIAGTTCIIFFLITLFKILRYYYPNRYNVSRSNPPILFDIRGDSPFSDDEEHDQAIRHPIWFIPTEGLQQSIIDSITVYKYRKDEGLVKETLTECLVCLGEFQQEESLRVLPKCNHAFHIPCIDTWLRSHKSCPLCRAPIVLDVATVLVVAPMRVGDEENSSEEGRDDGIHVLNECVEVSGHSTILIGSASDVSAQEFDDEIELKMKRSVSVDSSSASIVFSDVLELNFDIESLDTNTNLVVEKVSISSNKDVAIAKEGSESSTNNKLASEPEFNSSIVN

SEQ ID NO: 251302 - protein, 53 aa, Glycine max
  unsure (1)..(53): unsure at all Xaa locations
  Clone ID: PAT_MRT3847_68954C.1.pep
LVFDEYMNLVLIDVKEVSIKKKSKXTLGRILLKEDTITLMMNTGKMMNTQGQM

SEQ ID NO: 251303 - protein, 58 aa, Glycine max
  Clone ID: PAT_MRT3847_68955C.1.pep
GEFSMIAWCYYLIGSLIRLESHVGKDGVKIKFCWLIVTNYNLESQQSQHRDGPLQDKR

SEQ ID NO: 251304 - protein, 54 aa, Glycine max
  Clone ID: PAT_MRT3847_68956C.1.pep
MADLKERLLAPKPASALNVREVSNRPSASGRQAFQGVDVLGLKKRCQGLRSWIR

SEQ ID NO: 251305 - protein, 89 aa, Glycine max
  unsure (1)..(89): unsure at all Xaa locations
  Clone ID: PAT_MRT3847_68957C.1.pep
DKGGINLTATCPQSELDAETVKSILAEYKIHNADVTLRSDATADDLXDVVEGNRVYIPCIYVLNKIDQISIEELDIIYKGPVCVPISAH

SEQ ID NO: 251306 - protein, 70 aa, Glycine max
  Clone ID: PAT_MRT3847_68958C.1.pep
GWILNGVRTNMVKALAPYLIGIERLGSHNFLTLGGFLSKEFPVCIQCNVLHPIFNHGTGLFLWGLGHFRG

SEQ ID NO: 251307 - protein, 62 aa, Glycine max
  Clone ID: PAT_MRT3847_68959C.1.pep
TLVLSKHYLTRSVNHAVITRSSFIPHHVGSCLLRTQVLTGSSLYNPTRPRTRGRYAWAARVG

SEQ ID NO: 251308 - protein, 64 aa, Glycine max
  Clone ID: PAT_MRT3847_6895C.1.pep
PAESKQNTNKEGNLLRWSGFHIQQLLLHKLTIAPHLFKGLTYPYDISSQLTGDLNTLKPTLNLG

SEQ ID NO: 251309 - protein, 56 aa, Glycine max
  Clone ID: PAT_MRT3847_68960C.1.pep
LTSFHHFVAYHHITTRLIHFHIIYVLKDQNTISLNQSISINTQTLCNRYTKTQSYM

SEQ ID NO: 251310 - protein, 59 aa, Glycine max
  Clone ID: PAT_MRT3847_68961C.1.pep
LKKERGISILILRRKLGFHQTRKFLGSPPKKRPGGVLILIPQLKIPIIPTQSKQRVFCP

SEQ ID NO: 251311 - protein, 39 aa, Glycine max
  Clone ID: PAT_MRT3847_68962C.1.pep
PSLMVICSSRFRLDAVCSPAQGLLSPWIISSARIHQRSY

SEQ ID NO: 251312 - protein, 134 aa, Glycine max
  unsure (1)..(134): unsure at all Xaa locations
  Clone ID: PAT_MRT3847_68963C.1.pep
AKRLDPKGLTLLAEQIXRRTLALSACAWGEGQNXGLVMNVYKEQCPYAEDIMTKQEKLVYMRYMNTDLYWLRNISHDXADHSCDAXTGAELHKKALGXKETYTSFDERNYRYIETIKEVMDRECQPVVSCADIL

SEQ ID NO: 251313 - protein, 85 aa, Glycine max
  unsure (1)..(85): unsure at all Xaa locations
  Clone ID: PAT_MRT3847_68964C.1.pep
NSSTLWSLVVLLFXLLGLFXXSPVISXHRSILDXXLTKXTTQXQVXSLXQXWKSEHGRVYHNHXEEAXRXEIFRNDLXYIRXMQQ

SEQ ID NO: 251314 - protein, 58 aa, Glycine max
  Clone ID: PAT_MRT3847_68965C.1.pep
CQYFKKLISDSESRIPLTFKSFSVPCKFIYYCVFKRLVAKLTLPFFRLMVDMIPIRVY

SEQ ID NO: 251315 - protein, 58 aa, Glycine max
  Clone ID: PAT_MRT3847_68966C.1.pep
EKSSLLSISHLACYESSIPFFYDPMKCKIFHGCERQLPLLERSSQNPWNLHSKTDQDV

SEQ ID NO: 251316 - protein, 40 aa, Glycine max
  Clone ID: PAT_MRT3847_68967C.1.pep
NHVVRMKPVCQVGLTIHSLEFGVLVDIRLSYVDNVSPNVS

SEQ ID NO: 251317 - protein, 70 aa, Glycine max
  Clone ID: PAT_MRT3847_68968C.1.pep
TAHLFNLSALANKNHNNLQPGKKKPEQGTLEISLKGKNKMILPIPNPHNKKNFQKKKNYFNHINTLTLTP

SEQ ID NO: 251318 - protein, 54 aa, Glycine max
  Clone ID: PAT_MRT3847_68969C.1.pep
MSVNTTFKLTVALLANFMTFAAVCDRAYLPRSAKELIWLRIKTYSKAFHPKSIR

SEQ ID NO: 251319 - protein, 227 aa, Glycine max
  unsure (1)..(227): unsure at all Xaa locations
  Clone ID: PAT_MRT3847_6896C.1.pep
MGFDFHLRFQSFLPSNSILFTLCWSAKFLVPSSFSFFDSHTMGLWDSFLNWLRSLFFKQEMELSLVGLQNAGKTSLVNAIATGGYSEDMIPTVGFNMRKVTKGNVTIKLWDLGGQRRFRSMWERYCRGVSAIVXLYVVDAADRDSVPISRSELHDLLTKPSLSEIPLLVLGNKIDKSEALSKQALVDQLGLESIKDREVCCYMISCKDSVNIDVVIDWLIKHSKTAK

SEQ ID NO: 251320 - protein, 62 aa, Glycine max
  Clone ID: PAT_MRT3847_68970C.1.pep
TVARRLQMGGHSQFYCKSATGVTVSLPLSASTLSLVSIEKYHGQKTLPWWQLVIQWDHRRGE

SEQ ID NO: 251321 - protein, 89 aa, Glycine max
  Clone ID: PAT_MRT3847_68971C.1.pep
MAFCGGTFVKLNYSVSPCHKYKATRPYHSYRYKLCARVSASGSADEERTIINKEKDGWKINYAGKKPGTLLLDTINYPIHMKKLSTQES

SEQ ID NO: 251322 - protein, 105 aa, Glycine max
  Clone ID: PAT_MRT3847_68972C.1.pep
FGGAPIAPAAVVKPEPQPASGLARFPAGVGCLPTLDTSGLPCGPLPQQQVVPASVNSGPGTGLSGPGPLPFAQPLLDAHAASFASSGLDFDTFSNFPTLESWKVM

SEQ ID NO: 251323 - protein, 120 aa, Glycine max
  unsure (1)..(120): unsure at all Xaa locations
  Clone ID: PAT_MRT3847_68973C.1.pep
FCFDSEKTLPNNLSAELLSCKLDTVTGQYYPEWAPIYCRVHRQPIYITEGNYVRKQDVSIEYDACTIPKEWGSLVGATVGKHKPNVGFQGAGSQRRLGFALLIPYGEPVVQAXSAEGYFD

SEQ ID NO: 251324 - protein, 95 aa, Glycine max
  unsure (1)..(95): unsure at all Xaa locations
  Clone ID: PAT_MRT3847_68974C.1.pep
MGPGTLTSCKTLAKLAKGMDFFRYVNLMTYYTMMNREDVAEYSMKMRELALKLVEAISESLXEKAVGKHGQDMAMNYYPPCPEPELRPHHHTPSR

SEQ ID NO: 251325 - protein, 376 aa, Glycine max
  Clone ID: PAT_MRT3847_68975C.1.pep
MAGYQAFDHVTFYVGNALQAATFYIARFGMTPVAYSGLETNSRQVCTHVVRQGSINFAFSSALNPEGKETDEIGHHVWKHGDGCKDVAFKVNDCRAIYEKAIERGATSVSAPKELKDENGTVIMATIQAFGDTTHSFVQHVDYKGPFLPGFRAYTDVDPLTKMTPPIGLDFIDHIVSNHPDQQMETIVQWYEKILGWHRFWSVDDKQIHTEYSSLRSIVVADDTEKVKCPVNEPAKGKKKSQIQEYVEYYGGSGVQHMALHTNDIIHAVHHMKERGCKFLTIPASYYANVRERLQHSSTKVKEDMDTLQKLNILIDFDETGYLLQIFTKPSQDRPTLFFEVIQRHGHQGFGAGNFKSLFEAIERDQNDRGNLTDTA

SEQ ID NO: 251326 - protein, 147 aa, Glycine max
  Clone ID: PAT_MRT3847_68976C.1.pep
NSARGRAEAHQLYSRKAIFDALGVQLFAVLHEQIDSEVKDFWPRYWGGVVLLDRGRDFFKALGGGKLLKEKFLSGFLLNPRSLSNYKRAKAMHIDYNFKGEGEIKGGLFIIGMGKSGIAYQFIERNFGDWAPIAEVIEICTQMQNFQ

SEQ ID NO: 251327 - protein, 35 aa, Glycine max
  Clone ID: PAT_MRT3847_68977C.1.pep
IELVMTQASVSRPKAVKALKASNGDIVTAIMDLTT

SEQ ID NO: 251328 - protein, 120 aa, Glycine max
  Clone ID: PAT_MRT3847_68978C.1.pep
NSLLGWPNPHVANWTNYMDMTGQLGLAKGPTRNKKNKPRGGNRDPGKKWNHKNLLYIGGATKRDGKKKGPIKQKFKIFTERQQTLTIHHAGYTVIPAAMSPHFFRLKQFLFKPQFFSKTH

SEQ ID NO: 251329 - protein, 80 aa, Glycine max
  Clone ID: PAT_MRT3847_68979C.1.pep
SSNTFSREETKWIIIPLPKPLSFFSYPSPPSSSSQPPRATSTSAVPTSTPTSPNSARKPPTPPSAPRPSNPTSSKTTSTP

SEQ ID NO: 251330 - protein, 184 aa, Glycine max
  Clone ID: PAT_MRT3847_6897C.1.pep
MGLWDSFLNWLRSLFFKQEMELSLVGLQNAGKTSLVNAIATGGYSEDMIPTVGFNMRKVTKGNVTIKLWDLGGQRRFRSMWERYCRGVSAIVYVVDAADRDSVPISRSELHDLLTKPSLSAIPLLVLGNKIDKSEALSKQALVDQLGLESIKDREVCCYMISCKDSVNIDVVIDWLIKHSKTAK

SEQ ID NO: 251331 - protein, 90 aa, Glycine max
  Clone ID: PAT_MRT3847_68980C.1.pep
KDWLFSQNGVSRRVWRVHEWMPCTHCQVSIRAGLLVSLKKSSVALIMNSIIEYIAFVPFFYSKVTFCNHVMYIKLFIKVNILHNKQFLNT

SEQ ID NO: 251332 - protein, 93 aa, Glycine max
  Clone ID: PAT_MRT3847_68981C.1.pep
HASAGNKMAATRSQLCMFFVLVAITFTPSAVFGQKTATCVFIKANCGTNHDCFAPCKLKLKNDYCPGYAICDNGSSCCCQRIPNCGSPPLRKT

SEQ ID NO: 251333 - protein, 41 aa, Glycine max
  Clone ID: PAT_MRT3847_68982C.1.pep
MSGESAPKPKPRLVLCPKCWQLLPESPDYDVYKCGGCGTTL

SEQ ID NO: 251334 - protein, 80 aa, Glycine max
  Clone ID: PAT_MRT3847_68983C.1.pep
YGCERRQKGEAVSEGIMLRIAPKFFTTVPLRTISPFACRFSVRSIADSSPFNKIRIQRDDTVSHNHNPFKGLLCFAAFCR

SEQ ID NO: 251335 - protein, 66 aa, Glycine max
  Clone ID: PAT_MRT3847_68984C.1.pep
PMDPSCSIRAPYSFHHPIVSSYKPRTNSNRIKCPLRLISWKGRSRACYLPIASTRSSFSLKCKHAV

SEQ ID NO: 251336 - protein, 98 aa, Glycine max
  unsure (1)..(98): unsure at all Xaa locations
  Clone ID: PAT_MRT3847_68985C.1.pep
DLIGAGSHYSEDFFEQDDPETPXLREAKLTLTVEPQHSAVQAQMETNLPKMSLDDADTSRGAMWHDQRTEFRIGLPKNTCAGTILRSDLWENHLTQGN

SEQ ID NO: 251337 - protein, 71 aa, Glycine max
  Clone ID: PAT_MRT3847_68986C.1.pep
SSGNLGAQIGYEAWRSTQSQQCFLVLWPMANIKLWTSIDPRKVRCPSYELLLYDLKHPWYKKSCVIWAHHQ

SEQ ID NO: 251338 - protein, 131 aa, Glycine max
  unsure (1)..(131): unsure at all Xaa locations
  Clone ID: PAT_MRT3847_68987C.1.pep
ATLRSLLLLHAGLNPFPQVLAFYDNPSVFKPPIEEPQSXKAPVEKPPVXNPPVENPPVXQPPVQKPPGVKPPVEIPLVYKLPVENPPVYKLPVDNTPVYKPPVEXPPVYQPPVXETITVKLPVEKPXVYKP

SEQ ID NO: 251339 - protein, 175 aa, Glycine max
  unsure (1)..(175): unsure at all Xaa locations
  Clone ID: PAT_MRT3847_68988C.1.pep
PRNSARGEAGWVVLPDGSTFPSRSQGQKPAGGNSTIVTSSSSLAASQQTPSASLRGVASGYRSPLEYNACQTKGVFMPTPSPYDLSSSSRSQTSMVGDGEAQRDNRPLIAGSMDNADDKQIADLPPRLPERDLAGTPYVPVYVMLSLGVINIKCELVDPDGLLKQLRXLKSVHVD

SEQ ID NO: 251340 - protein, 64 aa, Glycine max
  Clone ID: PAT_MRT3847_68989C.1.pep
GFDFCTVLSSGLTFTRHCHPLPKKDIFFLLIIKCNAHSLYIIWVFLTPAHYVMIVSPCNKNRSP

SEQ ID NO: 251341 - protein, 87 aa, Glycine max
  Clone ID: PAT_MRT3847_6898C.1.pep
RIQSIQHEHANKINLVSRHKEKDSQNRRSSQMETRKTLTLPKLKTLPDIPISPATKITKTLIPQTLPNKKTKLNSKWNTPCNLIIKL

SEQ ID NO: 251342 - protein, 51 aa, Glycine max
  Clone ID: PAT_MRT3847_68990C.1.pep
TLRKLCPSFPLTANDSERHKKMKLYSIPVTIRIQSLYKGRVCFVRVRHNAE

SEQ ID NO: 251343 - protein, 82 aa, Glycine max
  Clone ID: PAT_MRT3847_68991C.1.pep
RSVDQRAGPLIIERGEGPYVFDTAGKRYLDAMAGLWSAGLGFSEKRLIEAAHRQMQILPFYHTFASRSDGPSIALAEKLVKM

SEQ ID NO: 251344 - protein, 151 aa, Glycine max
  unsure (1)..(151): unsure at all Xaa locations
  Clone ID: PAT_MRT3847_68992C.1.pep
TGILLRKLMGDQSLSGITHIIVDEVHERSLLGDFLLIVLKNLIEKQSTNSSGKLKIILMSATVDSSLFSRYFNNCPVVTAEGRTHPVTTYFLEDIYDQIEYRLASDSPASLTDGTFPKGQILQRDVVTNSRGKKNLVLSAWXDESLLSEEH

SEQ ID NO: 251345 - protein, 166 aa, Glycine max
  Clone ID: PAT_MRT3847_68993C.1.pep
NTNHSSNCACCSPNTITTKLLGATTNLLNATTGIPMPSTFNVWYTAFALPLWPIILMLFAPITKTYSLPRHAFNSNHNLAKPYLFYKSLSPGNPNAHYRSSIPPLINFYLFFLIPSDCFSNTNIGLLGLCLAPPSRSVLRLSPHPSPQTTGWTVIQLMIGKSFLGT

SEQ ID NO: 251346 - protein, 125 aa, Glycine max
  Clone ID: PAT_MRT3847_68994C.1.pep
MLPTASKGRSSSSSSSSRPNNPMLLPYLRRIIKWQQMDIEYTFWQMLHLCTSPKVVYQHTKYHKQTKNQWARDDPAFVVICSLLLAVATLAYCAAYDHSTAHTLLVIFSVLVFHFILTGVFLATF

SEQ ID NO: 251347 - protein, 53 aa, Glycine max
  Clone ID: PAT_MRT3847_68995C.1.pep
AFQERAPIDSRLLRLLIPVAGCHALRRVSSNVSFAGMAGSCTHTSKGVEPLLN

SEQ ID NO: 251348 - protein, 76 aa, Glycine max
  Clone ID: PAT_MRT3847_68996C.1.pep
EAAMMTALSSLLTALAWPAALLTATDFIDSKWTIAINRCISSADWSRIKHLLGSGEEASACWCYLISYMQSRVLDG

SEQ ID NO: 251349 - protein, 147 aa, Glycine max
  Clone ID: PAT_MRT3847_68997C.1.pep
QPIQSQQSCLPSDLLLLRQVQVQPSPSAGAVHRLAPQLALLLQPGRSWLRSPPPHSLVERWLVMVVAAGGAWLCLGWHLYALWSPLHSRSWSCMWPAVEGDRYPVFPVRPVVGLRLTVFVRLIAYFIRFIGLVYYHCFLRVFYYFLW

SEQ ID NO: 251350 - protein, 260 aa, Glycine max
  Clone ID: PAT_MRT3847_68998C.1.pep
MEQKNWNLLDEALGLNNNNAKPWPLCGRFVLVEDCVDTSAAFVLHQILKRSFSSHPSSAVVFLAFSHPFSHYDRVLRKLGCNLAAQRDNGRLFFLDMLMLQCPDEGKANHDGLASVFEQIERVITALHQDKKFISIMIDDISFLEVAANGSSNDVLNLVHYCHTLTSDSEYGCAFIALDHKDIYLNGDRTAVMLEMEFLADILVKAEPLATGLAKDVHGQLMVLDKETQHRHGVSTVKTHNFHFKIKENGIECFYPGTKI

SEQ ID NO: 251351 - protein, 128 aa, Glycine max
  unsure (1)..(128): unsure at all Xaa locations
  Clone ID: PAT_MRT3847_68999C.1.pep
MADQKNQNPDSGTISVESAKEKRRNKLPNFLLSVRLKYVKLGYHYVISNAMYLLLIPLLGIASAHLSTLSIKDFLQLWENLKFNLVSVTLCSSLXVFLATLYFMTRPRGVYLVDXACYKPDVVCTCTR

SEQ ID NO: 251352 - protein, 101 aa, Glycine max
  Clone ID: PAT_MRT3847_6899C.1.pep
MTIFCTCSKTLVYNNSALVVLDYYGKKKKKKKTLQCMEPTLYNLLPWITIKRCQDNNVTHLDALLPCVLVWLAAAADIMRNRLAISVKDGLAAGLGDTTLF

SEQ ID NO: 251353 - protein, 62 aa, Glycine max
  Clone ID: PAT_MRT3847_689C.1.pep
AFERTGPKLRRDQKKRLGPLKGPTRGYSLFRKCLEIGLGIMISWVDQGNPWGDFEAISNLGD

SEQ ID NO: 251354 - protein, 68 aa, Glycine max
  Clone ID: PAT_MRT3847_68C.1.pep
QRFQTANSKVCTLGLLKRNLANQGLIQTHHNISVIKNKINQHCYKIQIKSNKYTLLVKNYCLSCFEQF

SEQ ID NO: 251355 - protein, 72 aa, Glycine max
  Clone ID: PAT_MRT3847_69000C.1.pep
VMGRMIIRTNWNEWQRCVALPTSPLAHIRFDIYNLPCSDAGEHNILESANFAFGRAIIANKHMVFWNRVLYH

SEQ ID NO: 251356 - protein, 89 aa, Glycine max
  Clone ID: PAT_MRT3847_69001C.1.pep
KYVRTALFGNSGEIPNNSHFGRAQTKYLTTKLWIYINIFKGKYFYLLVLSFQHKTQQKAHKAIRIDNKRNGSPFLPTLFIVPVALPDAA

SEQ ID NO: 251357 - protein, 58 aa, Glycine max
  Clone ID: PAT_MRT3847_69002C.1.pep
TKTSTLCSLRERGRVSPTRYFVVEDVGWDETHLYGSGVQTSYSGRSQERNNDLRNMCC

SEQ ID NO: 251358 - protein, 53 aa, Glycine max
  Clone ID: PAT_MRT3847_69003C.1.pep
HLCQDQLHFVFHSQPEPRLPYPVLMLILHSNSPVHHGGNDLRPLCQPEQFHSS

SEQ ID NO: 251359 - protein, 135 aa, Glycine max
  Clone ID: PAT_MRT3847_69004C.1.pep
NSPKREKGPKQRGKRPPPFFFKKPPPPPKGGGKGGETRVFPPRGGGPPPPPGKPPGGGPGDPSQRGGPPPKRGGGKPPKGARGGPGPGPPPQNPKGSGGPHGPKWPRGPRGFGFLGGRPGAPGGPGKRGGGGGGP

SEQ ID NO: 251360 - protein, 51 aa, Glycine max
  Clone ID: PAT_MRT3847_69005C.1.pep
DTHTETQILNLLTASSLSSLASTFSSMLHYMLTGNSKGHSTTQFTNKNVRY

SEQ ID NO: 251361 - protein, 233 aa, Glycine max
  unsure (1)..(233): unsure at all Xaa locations
  Clone ID: PAT_MRT3847_69006C.1.pep
MEDHESQRKVRILCLHGFRTSGEILKQLVLRWPEPVLQKLELVFLDGPFPAQGRSDVEGIFDPPYFEWFQANEEFTEYTNFEECLAYIEDYMLKNGPFDGFLSFSQGAILAAALPGMQXAGVALGKVDKIKFLIEISGAKFGENRFGMPKLASNAFSKPIDCPSLPFIGEKDFMKAESIALLEAFQDPVVIPPPKGHTVPKLDAIGDWCIDRSLCPLPCLMFQCAMEICIVYT

SEQ ID NO: 251362 - protein, 63 aa, Glycine max
  Clone ID: PAT_MRT3847_69007C.1.pep
PDGTTTMLPTSATVALGALLDDPFHLLPRSSRKNYGLCPDGLTKLRPCEALGVRDRLQCECSC

SEQ ID NO: 251363 - protein, 171 aa, Glycine max
  Clone ID: PAT_MRT3847_69008C.1.pep
AMTPEFGNYQKQVRSNCSAFAQSLLEKGYELVSGGTDNHLVLVNLRNKGIDGSRVEKVLEAVHIAANKNTVPGDVSAMVPGGIRMGTPALTSRGFVEEDFEKVAEYFDAAVKLALQIKENTNGTKLKDFVAAMQSDEQVQSKIANLRHEVEDYAKQFPTIGFDIETMKYGK

SEQ ID NO: 251364 - protein, 165 aa, Glycine max
  Clone ID: PAT_MRT3847_69009C.1.pep
QRPQKQVLSNCSAFAQSLLEKGYELVSGGTDNHLVLVNLRNKGIDGSRVEKVLEAVHIAANKNTVPGDVSAMVPGGIRMGTPALTSRGFVEEDFEKVAEYFDAAVKLALQIKENTNGTKLKDFVAAMQSDEQIQSKIANLCHEVEDYAKKFPTIGFNIETMKYGK

SEQ ID NO: 251365 - protein, 48 aa, Glycine max
  Clone ID: PAT_MRT3847_6900C.1.pep
NTAAYDITTLGVINVRYCGNETTVKFDLRVIDDDQSPSHQNIGIVRST

SEQ ID NO: 251366 - protein, 498 aa, Glycine max
  Clone ID: PAT_MRT3847_69010C.1.pep
HSVLASLLQSSSLSAHEKHKSRADWIKQLNDPLEAIDPEIADIIELEKARQWKGFELIPSENFTSLSVMQAVGSVMTNKYSEGYPGARYYGGNEYIDMAETLCQKRALEAFQLDPAKWGVNVQSLSGSPSNFQVYTALLKPHERIMALDLPHGGHLSHGHQTDTKKISAVSIFFETMPYRLNESTGYIDYDQLEKSAALFRPKLIVAGASAYARLYDYARVRKVCDKQKAVLLADMAHISGLVAAGVIPSPFDYADVVTTTTHKSLRGPRGAMIFFRKGVKEINKQGKEVLYDYEDKINQAVFPGLQGGPHNHTISGLAVALKRAMTPEFKNYQKQVLSNCSAFAQSLLEKGYELVSGGTDNHLVLVNLRNKGIDGSRVEKVLEAVHIAANKNTVPGDVSAMVPGGIRMGTPALTSRGFVEEDFEKVAEYFDAAVKLALQIKENTNGILPLHLNYFVAAMQSDEQIQSKIANLRHEVEDYAKQFPTIGFNIETIKYGK

SEQ ID NO: 251367 - protein, 72 aa, Glycine max
  Clone ID: PAT_MRT3847_69011C.1.pep
KLKGKIVKVSCHFNPRGKPHVTALAHCFCSRLFIYVRYFCLTGPHNPLDLPKRERVMGTILPPIWAFSNFFF

SEQ ID NO: 251368 - protein, 501 aa, Glycine max
  unsure (1)..(501): unsure at all Xaa locations
  Clone ID: PAT_MRT3847_69012C.1.pep
MAMALPLRRLSSTLNKPLASATSIYHRMSSSLSAQEKDKSRADWIKQLNDPLETIDPEIADIIELEKARQWKGFELIPSENFTSLSVMQAVGSVMTNKYSEGYPGARYYGGNEYIDMAETLCQKRALEAFRLDPAKWGVNVQSLSGSPSNFQXVYTALLKPHERIMALDLPHGGHLSHGYQTDTKKISAVSIFFETMPYRLNESTGYIDYDQLEKSAVLFRPKLIVAGASAYARLYDYARVRKVCDKQTAVLLDEMAHMSGXVGAGVKPYPIEYAXDLVSTSTXKSLHVTLRARTFFGKGVRNLEKQXTRNFSSCSTVAHSVLDEGDNHVFDGINERVVLXRSPETRRKKIIEFIGKITRGRACEGFSSRSNGHLVSHNLRNXRVEDVQKVVHIAANKNTVPGDVSAMVPGGIRMGTPALTSRGFVEEDFEKVAEYFDAAVKLALQIKENTNGTKLKDFVAAMQSDEQIQSKIANLCHEVEDYAKKFPTIGFNIETMKYGK

SEQ ID NO: 251369 - protein, 89 aa, Glycine max
  Clone ID: PAT_MRT3847_69013C.1.pep
RVAHPFRNLFLGCGRPPRGPPFLLVPLPGVGGLNLVSKGLVVFFQGLGSLALSSFLGPPKLCPLLLALFITSFKAVHLFLLSFLFLPPP

SEQ ID NO: 251370 - protein, 153 aa, Glycine max
  unsure (1)..(153): unsure at all Xaa locations
  Clone ID: PAT_MRT3847_69014C.1.pep
AAPAGAVPDLPTRSHSSVFYELIVAGSHFFEDFPXXGYQDTPREIDACLIHSINPXCVMAHAQRGTSLSKWSLADGETPRGTMMDLIGTLCKSALPRYTVGGTILRCALLANFLTEGNFRARVDLQRPYLISGMIYMVATVGIPENTGIALAC

SEQ ID NO: 251371 - protein, 74 aa, Glycine max
  Clone ID: PAT_MRT3847_69015C.1.pep
VVFLPKNRSTAKTSLRRVFVLNQWFVFELLIKLIFFQYSVPHTHDILDTIDKSREASIHSRDMAATQEREASMM

SEQ ID NO: 251372 - protein, 520 aa, Glycine max
  Clone ID: PAT_MRT3847_69016C.1.pep
MTEADTDDVGTKCNFSFAFNNINFSDRILNIEVIPDPHFIRAQSHSLSTLAPNRKRRRLSLMKANDVLLQPEEKLNCNLPDAEEVVAITEASLSGDEVSHGNDSSLGMSWSKVLRVRTIQISSPILAEKSPFFYKLFSNVTRESKQQNVTLQIHDSEEAAVMDLLNFMYSNTLSRTTSAAVLDVLMAADKFEVMSCIRYCSRMLGLMPMTCESALLYLDLPSNILTLDAIQPLVDTAKLFLATHYRDITKFADELLNLPLAGIEAVLSSDDLQMPSEDVVFEFVLKWARIHYPKIEDRKDVLEARLGRLIRFPYMSSRKLKKVLTCNDFHPDFASRVRLEALFYKAETPYRQRSLAAQDAGTTYSRLVERAYKLRHVKVVEFALPRPRCVVYLDLKKEECAQFFPNARIYSQAFPLGEQWFFLSARCNMDQQNASHCFGLFLAVQFKGSVSLHVDYEFAARSKSTEEYISRCKGDYTFTAGKAVGYRNLFGIPWTAFIADDSHFFIKGLLHLRAELTIRQ

SEQ ID NO: 251373 - protein, 343 aa, Glycine max
  unsure (1)..(343): unsure at all Xaa locations
  Clone ID: PAT_MRT3847_69017C.1.pep
LCVPSXADSIEGXYDTXKECXSPLAKSAGGIGVSVHNIRATGSYIRGTNGTSNGIVPMLRVFNDTARYVDQGGGKRKGAFAVYLEPWHADIFEFLDLRKNHGKEEHRARDLFYALWVSDLFMERVQSNGQWSLFCPNEAPGLADCWGEEFEKLYTQYEREGKAKKVVQAQNLWFEILKSQIETGTPYMLFKDTCNKKSNQQNLGTIKSSNLCTEIIEYTSPTETAVCNLASIALPRYVREKGVPMESHPSKLVGSRGSKNRYFDFDKLGEVTAIVATNLNKIIDVNYYPVDTARRSNMRHRPIGIGVQGLADTFILLGVAFDSPEAQQLKQDIFETIYYHALK

SEQ ID NO: 251374 - protein, 85 aa, Glycine max
  Clone ID: PAT_MRT3847_69018C.1.pep
WFRLKRVLEYQFKKYKFVFCPHQAEEDECGDLGICLDHGNGSRGLVVYKNKPLVVQFHKFDKNPLARKNHGLSRSVLNTSVGVLN

SEQ ID NO: 251375 - protein, 48 aa, Glycine max
  Clone ID: PAT_MRT3847_69019C.1.pep
ETYSKIKKLYHPLNPKQSFLKGSDNKIPHCRKKKAFFFKKKRPLSPLF

SEQ ID NO: 251376 - protein, 115 aa, Glycine max
  Clone ID: PAT_MRT3847_6901C.1.pep
PYLPPGHLIISRTDTLPPILWLYFFDILVVRLSFIYDSIFSYPLSHVVPSSCGRSNLEYITGLSVSYSPLLRLYSQYILSVRRAPVFALSLNSRLAVPPPPPPKEGGRHTVMTGN

SEQ ID NO: 251377 - protein, 131 aa, Glycine max
  unsure (1)..(131): unsure at all Xaa locations
  Clone ID: PAT_MRT3847_69020C.1.pep
PRVRSPQSFAQPNTTAKYERWVAPXSDLTGLGCPEDGPYNDYETNMXLYDATVVGNNHLTYTNCVTXENHIPWSDHLXQRQDSFSPGQGRVLXGTRLXREEGAFDRIKATMIMNTPFDSNHSSHNVHWMIN

SEQ ID NO: 251378 - protein, 72 aa, Glycine max
  unsure (1)..(72): unsure at all Xaa locations
  Clone ID: PAT_MRT3847_69021C.1.pep
KXDDDGEVITYHVGEFGEDHKGDWVKINVLEMKATCRCQKIEDTGLLRPHVVADKRETNVFTRPSHYILKRW

SEQ ID NO: 251379 - protein, 66 aa, Glycine max
  unsure (1)..(66): unsure at all Xaa locations
  Clone ID: PAT_MRT3847_69022C.1.pep
XQENXXCGCQVFMSYQFCNSATQWFCDNWLINKEGNLFVSNTLVSLHTCVTTLDVRFPAFLKPKPK

SEQ ID NO: 251380 - protein, 68 aa, Glycine max
  Clone ID: PAT_MRT3847_69023C.1.pep
RDGGREPPFEIRNPTTTMENNFPYPTSPKCSYWYNPLYSETSLYSPSYRITSQQHIDSTIGFSKEQAS

SEQ ID NO: 251381 - protein, 66 aa, Glycine max
  Clone ID: PAT_MRT3847_69024C.1.pep
CSVSLRGHESVLAPRQSEKPSSGLSCCAETDDLPDVYEDHGVLGWHASTISRCSLRSSLFGNPMTC

SEQ ID NO: 251382 - protein, 83 aa, Glycine max
  Clone ID: PAT_MRT3847_69025C.1.pep
GVPRPLIIPFLNVPAGAVIGLGPLGICPQAPHVMGPLGFAPWLGPQAPLVFGIVGKVASLETPAPRPIMKKGVFNFWDLRPFF

SEQ ID NO: 251383 - protein, 46 aa, Glycine max
  Clone ID: PAT_MRT3847_69026C.1.pep
GNITITTWIPNLNLPDLGGIKSKMALLPLMGTNSSREEGFTTLSFI

SEQ ID NO: 251384 - protein, 97 aa, Glycine max
  unsure (1)..(97): unsure at all Xaa locations
  Clone ID: PAT_MRT3847_69027C.1.pep
PLSLLFYLNNGNTLGLGSDATYSILISNVXKHTCRLYSEWDLLPPNTNKDPEAXNYHKXDDXKFIPDPEDKKPKGYXDDIPKELPRFLNPKNSENLV

SEQ ID NO: 251385 - protein, 104 aa, Glycine max
  Clone ID: PAT_MRT3847_69028C.1.pep
MSLKNNMVVPKVCLLLLGGVGVTPPNMEASFLTNDPSSSYDDDQYSKPCRDLCMSTPSMPPQCTREDITPNSYHPHCNSCMSTLPQPRQSPCGDTNDPLATHPA

SEQ ID NO: 251386 - protein, 57 aa, Glycine max
  Clone ID: PAT_MRT3847_69029C.1.pep
LWSLQSYDISKAVSITAESRSPCLMRVVNFPEYLSDLGGKPSLGNFRKLESVKIPFV

SEQ ID NO: 251387 - protein, 155 aa, Glycine max
  unsure (1)..(155): unsure at all Xaa locations
  Clone ID: PAT_MRT3847_6902C.1.pep
KKKLGATPKAGVTLQKGGYELKAPLKDYRPGGPTDIPTNPAPKGKNKGKEQKWPPKHRQKGEILNRPPPVXQKRRAGPLFARFFPQGPPPKNPGQWPLGFPPGNPGGKXPRGGPRGKPPGHHGGASQKVPLEEKNPPGGGRGFLGGPKGLKPPRG

SEQ ID NO: 251388 - protein, 92 aa, Glycine max
  unsure (1)..(92): unsure at all Xaa locations
  Clone ID: PAT_MRT3847_69030C.1.pep
MLCERITKRGDAEDDKXIKKLDAQLTPYKEQINKTRPGPAQEAVKXLQLMIVLKQKLLHEGQLDMLYNHDXSILDQVQXAADGIKDAQHTTL

SEQ ID NO: 251389 - protein, 107 aa, Glycine max
  unsure (1)..(107): unsure at all Xaa locations
  Clone ID: PAT_MRT3847_69031C.1.pep
FQRSRFLRGGLAISATTGFSGGNWVFSTSAHFXGLGPCPPHTRPNTAKRDGFRYPHWFTVFTLMALMMALSPSLDIWGLCHTYVCFYPWFLGYPPPPPQRRRTSYSD

SEQ ID NO: 251390 - protein, 211 aa, Glycine max
  unsure (1)..(211): unsure at all Xaa locations
  Clone ID: PAT_MRT3847_69032C.1.pep
KQTPMFHRVMPTGFRIYPTDXEELLMEYXSPKVAGHHYXVAYIGEYGWDRCDPWGLPGSSIFGEKECCFFXPEYRRYPNGSRPNTGSGSGYWXKPTETNEIMTTRXPNDYIRKVLVLYFGKNLKGTITXVIMHEYRLLDSSRKNTVPSXDDCVLCXIYNMNCCAQKTAQNGVDPSDELTLYSNGYSLSSSTQLEDYLESLPSIDERCFTMP

SEQ ID NO: 251391 - protein, 127 aa, Glycine max
  Clone ID: PAT_MRT3847_69033C.1.pep
PEPKYTITCPQELYINLATNKSNIMHTKNLIFLHSTPFSSLLFLTTTNISFPNSTFLLASFKSSFIFSTLSCNSLMSANWAATKAFNSSFYSTSSTNSDQEKKAYSSRFASRFAATNKLPSRLLCIS

SEQ ID NO: 251392 - protein, 84 aa, Glycine max
  unsure (1)..(84): unsure at all Xaa locations
  Clone ID: PAT_MRT3847_69034C.1.pep
MSYDDVEIEDMEWNEELQAYTYPCPCGDLFQITKEDLKLGEEIARCPSCSLYITVIYKLDDFLSDSDQXRPNGLQPSKQQLNVA

SEQ ID NO: 251393 - protein, 60 aa, Glycine max
  Clone ID: PAT_MRT3847_69035C.1.pep
RTINMVFIHTNILSYIHIFGHLNKIFKKTGTTQELYYHIIFGVFIAFINIKNEEKIMDKF

SEQ ID NO: 251394 - protein, 88 aa, Glycine max
  Clone ID: PAT_MRT3847_69036C.1.pep
MSSSRTWAVAASVGVVEALKDQGLCRWNNALRSAQYQVKNHVRSLSQANKVSSSSSSAVVSSRLKEEGAKQSEESLRTVMYLSCWGPN

SEQ ID NO: 251395 - protein, 184 aa, Glycine max
  unsure (1)..(184): unsure at all Xaa locations
  Clone ID: PAT_MRT3847_69037C.1.pep
MLFMLSAYSVGIGKHIFICFSRHLQHHQHQYRLLFHSSISMNNLRQTETHVHYNHTHPSKYARWTARESFEFMYARPWQRVNDFYLNIVRANLSLPLLFGAQTLVVDHNDTGIAALSGSSELESVASEDRSGRWARTTFKIILSYHGGSFDGWQKQPGLNTVQSIVEGSLGKFXDEKKTQLLKD

SEQ ID NO: 251396 - protein, 103 aa, Glycine max
  unsure (1)..(103): unsure at all Xaa locations
  Clone ID: PAT_MRT3847_69038C.1.pep
VSSIXXXKEXXVQVILGSYKGCXGKLNQVXHXKRVIHXXRIIRXKVNGXSVIVGILTSKVVXTKFXLYKDCKAIIDRKSKGRKSLDKYKGYKFALENIMQTVD

SEQ ID NO: 251397 - protein, 60 aa, Glycine max
  Clone ID: PAT_MRT3847_69039C.1.pep
LKGTIIHTLKVHTELHLFYVQEMVINMNPTVSHNSSNKLTGVELHDKLRVSNPFSLIHSP

SEQ ID NO: 251398 - protein, 59 aa, Glycine max
  Clone ID: PAT_MRT3847_6903C.1.pep
HSYFSFVSSRGAPRVVPLLLRIPYLREGNHTYLSSLGTKPRVSKFYLSRTTCSDQKRSL

SEQ ID NO: 251399 - protein, 54 aa, Glycine max
  Clone ID: PAT_MRT3847_69040C.1.pep
MTSILILLLMNMTPGCPLVRASRPDDNNASKKSGENSMQHHDPSESNGKKEDTD

SEQ ID NO: 251400 - protein, 64 aa, Glycine max
  Clone ID: PAT_MRT3847_69041C.1.pep
SKNKRFSKKPNWFTRPLTGLFLEMQKRMLFRGGLSPILKSEAKKTWQKKIFVLEGWCHNPSVKS

SEQ ID NO: 251401 - protein, 43 aa, Glycine max
  Clone ID: PAT_MRT3847_69042C.1.pep
GFRIMGVPLSGLQKNKLDLKTVPNRFYKGFRALTRAGKFEVKS

SEQ ID NO: 251402 - protein, 49 aa, Glycine max
  Clone ID: PAT_MRT3847_69043C.1.pep
SNKADENGILKFLLSGCVSHLIFTYTRDKEIGSAVSPVVLPNPIPHVFD

SEQ ID NO: 251403 - protein, 97 aa, Glycine max
  unsure (1)..(97): unsure at all Xaa locations
  Clone ID: PAT_MRT3847_69044C.1.pep
MPMGNIAVGRPEXATHLDTLKAVLAEFISTFIFAFAGSGSGIAYNKLTDNGAATPAGLISAFIGHAFALFVAVSVGANIFCGHVNPVVTFGAFVGGN

SEQ ID NO: 251404 - protein, 100 aa, Glycine max
  unsure (1)..(100): unsure at all Xaa locations
  Clone ID: PAT_MRT3847_69045C.1.pep
MPIRNIAIGRAEEATHPDTLKAGLAEFISTLIFVCAGSGAGIAYNKVTDNGAGTPAGLIXASIGHAFALFVGGSGGANISGGHVNPGGGFGAFVGGDITL

SEQ ID NO: 251405 - protein, 40 aa, Glycine max
  unsure (1)..(40): unsure at all Xaa locations
  Clone ID: PAT_MRT3847_69046C.1.pep
VLHALLPTSVLTSFQHLNLRTQLHRLETWTXKPFYSHLNL

SEQ ID NO: 251406 - protein, 142 aa, Glycine max
  Clone ID: PAT_MRT3847_69047C.1.pep
MPIRNIAIGRTEEATHPDTLKAAVAEVISTLIFVVADSGSGIVYNKVTDNGAATPDGLISASIGHAFALFVAVSVGADISGGHDNPAVTFRDFVVGNITLLRGIVDVIDQILGCIVALPILLDFVTASPDPELLLSGGVNRC

SEQ ID NO: 251407 - protein, 187 aa, Glycine max
  unsure (1)..(187): unsure at all Xaa locations
  Clone ID: PAT_MRT3847_69048C.1.pep
PIRNIAGGRPEXATYPNTLKAGLAESISTFIFAFVRSSSCIAYIMLTDNGAATPAGLIFAFIAHAFALFVAVSVGANISGGHVNPAVTFGAFVGGNITFLRGIDYVINQLLGSIGDSLLLAFVTASTVPAFGLSAGVGVGNALVLEIVMTFSLVYTVYATAIDPEKGNWGMIDPIAIGYIVGDYIIV

SEQ ID NO: 251408 - protein, 141 aa, Glycine max
  Clone ID: PAT_MRT3847_69049C.1.pep
MPIRNIPVRKAEEANQPDTLKAALAEFNSTFNLLFAGSSSGIAYNKLTDNGAATPAGLISASIAHAFALFVAVSVGANISGGHVNPAVTFGAFVGGNITFLRGIVYVIAQLLGSIVSFLLLGFRTDCTVPAFGLFAGAGVA

SEQ ID NO: 251409 - protein, 54 aa, Glycine max
  Clone ID: PAT_MRT3847_6904C.1.pep
KISSQCVEGLRNHGPYCTSPRCGLPSAFALCSSGHSCPSKTLSSLVVIISESHH

SEQ ID NO: 251410 - protein, 188 aa, Glycine max
  unsure (1)..(188): unsure at all Xaa locations
  Clone ID: PAT_MRT3847_69050C.1.pep
MPIRNIAIGRPEEATHPDTLKAGLAEFISTLIFVFAGSGSGIAYNKLTDNGAATPAGLISASIAHAFALFVAVSVGANISGGHVNPTVTFSAFMGGNITLLHSIIYIITQLLNSIMASLLLTFITASPVPAFQLSTRMQINXALIFEIMITFDLXYTVYANSLNPQKNKLKIYYSPSPLVLLVAPNLL

SEQ ID NO: 251411 - protein, 143 aa, Glycine max
  unsure (1)..(143): unsure at all Xaa locations
  Clone ID: PAT_MRT3847_69051C.1.pep
MEELKSAMEEHIDLMADLVQKLSSDLRAGFRPAYDNFIGFFHAIDWKEPWLMGLLGFHVVLLLVAIISRKKTNFQMFLFLLTLAGVYFVESLNRFLGKNLESFSSQNYFDPRGLXMSVLSSXPLLVIXMIILIIHFLLMYMIV

SEQ ID NO: 251412 - protein, 237 aa, Glycine max
  Clone ID: PAT_MRT3847_69052C.1.pep
ATHPDTLKAALAEFISTFIFVFAGSGSGIAYNKLTDNGAATPAGLISASIAHAFALFVAVSVGANISGGHVNPAVTFGAFVGGNITFLRGIVYVIAQLLGSIVASLLLAFVTASTVPAFGLSAGVGVGNALVLEIVMTFGLVYTVYATAIDPKKGNLGIIAPIAIGFIVGANILLGGAFSGAAMNPAVTFGPAVVSWTWTNHWIYWAGPLIGGGIAGLVYEVVFISHTHEQLPTTDY

SEQ ID NO: 251413 - protein, 252 aa, Glycine max
  unsure (1)..(252): unsure at all Xaa locations
  Clone ID: PAT_MRT3847_69053C.1.pep
MPIRNIAIGRPEEATHPDTLKAGLAEFISTLIFVFAGSGSGIAYNKLTDNGAATPAGLISASIAHAFALFVAXVSVGANISGGHVNPAVTFGAFVGGXNITLLRGIVYVIAQLLGSIVASLLLAFVTASPVPAFGLSAGVGVGNALVLEIVMTFGLVYTVYATAVDPKKGNLGIIAPIAIGFIVGANILLGGAFSGAAMNPAVTFGPAVVSWTWTNHWIYWAGPLIGGGIAGLIYEVVFISHTHEQLPSTDY

SEQ ID NO: 251414 - protein, 37 aa, Glycine max
  Clone ID: PAT_MRT3847_69054C.1.pep
KSMHDYGITLNWLIYVVQLYRQIEIIIIVISIPNDLV

SEQ ID NO: 251415 - protein, 63 aa, Glycine max
  Clone ID: PAT_MRT3847_69055C.1.pep
AGQTSGSIIHILLCMCQITNFINNIGIKTGYVLSRILISEQPSFSYEANSIKIRCGDYIYSLS

SEQ ID NO: 251416 - protein, 225 aa, Glycine max
  unsure (1)..(225): unsure at all Xaa locations
  Clone ID: PAT_MRT3847_69056C.1.pep
MPIRNIAVGRXPEEATHPDTLKAALAEFISTFIFVFAGSGSGIAYNKLTRQRRCHPLPGLISASIAPWAFALFVAXSSVGANISGGHVNPAVTFGAFVGGNITFLRGIVYVIAQLLGSXVASLLLAFVTASTVPAFGLSAGVGVGNALVLEIVMTFGLVYTGYATAIDPXKKGNLGIIAPIAIGFIGGANILLGGAFSGAAMNPAVTFGPAVVSWTWTNHWIYWA

SEQ ID NO: 251417 - protein, 120 aa, Glycine max
  unsure (1)..(120): unsure at all Xaa locations
  Clone ID: PAT_MRT3847_69057C.1.pep
EETDTELDDQIGHSIRHEDVTGPDAILKAMTGGVLLRETLXDLALDKARVIGMDQTPEITLYTHGLFGILKKRAAQRRDXKLIVTSSTMNAQKIFNLFGRDTXNHNPGQTLSANILWSQF

SEQ ID NO: 251418 - protein, 78 aa, Glycine max
  unsure (1)..(78): unsure at all Xaa locations
  Clone ID: PAT_MRT3847_69058C.1.pep
NTLGSTTGNFRTRVTGFSISVRXHLLSCIPLQXXQLSLKXFCPNNITYLSICNXTSFLXLPXXXXGGFDIVGNLAKPC

SEQ ID NO: 251419 - protein, 79 aa, Glycine max
  Clone ID: PAT_MRT3847_69059C.1.pep
AICVEQVLRHLGRHLTLEHWFLQLYSEPWFSCPYLHNIEALVWIHLLISQSPLCGVSCACTHEHRFCSSGKPYGPLSSR

SEQ ID NO: 251420 - protein, 68 aa, Glycine max
  Clone ID: PAT_MRT3847_6905C.1.pep
MAEESKSSSEESVKLFVGQVPKHMTEPELLAMFKEFALVDEVNIIKDKATRASRGCCFLICPSREEAD

SEQ ID NO: 251421 - protein, 100 aa, Glycine max
  unsure (1)..(100): unsure at all Xaa locations
  Clone ID: PAT_MRT3847_69060C.1.pep
QELLYKDNGNTQGWGYSDADWASCPIDRRSTTGCCVSFGGNIVSWKSMKHTVLLADQGFXAEYRAMALVTCELLWIKQLEELKIWDIHLITMHGDNQAGF

SEQ ID NO: 251422 - protein, 131 aa, Glycine max
  unsure (1)..(131): unsure at all Xaa locations
  Clone ID: PAT_MRT3847_69061C.1.pep
FVQRGPKATETKLMKADATLKHNNATKRXVGRDPTRQKKGKEDYEDEKEKHKGTTGTPAKQRQMDAHREKKPPRQKATLRGMGHWPTRKSQETRKTGRKEKPGQKRKSMEETEGTEWPGPRKITAGTSPRN

SEQ ID NO: 251423 - protein, 69 aa, Glycine max
  Clone ID: PAT_MRT3847_69062C.1.pep
MVFFCFLVDQRREVQRSKPAAGICSRCGGGASVADIKTATRFCYVPFYWKSWRAIVCTFCGAVLRSYQH

SEQ ID NO: 251424 - protein, 68 aa, Glycine max
  Clone ID: PAT_MRT3847_69063C.1.pep
SVLFNGKLITPETVSRCYFVYQILLLNPFTQQRFFSVLTERSKATKWRLEKQRETSFKGTFLGSPPPL

SEQ ID NO: 251425 - protein, 48 aa, Glycine max
  Clone ID: PAT_MRT3847_69064C.1.pep
CAFSPQVGAYNCCLRVKGCSEQNAEAHPKLVSAQRLYLHRLPETALEP

SEQ ID NO: 251426 - protein, 51 aa, Glycine max
  Clone ID: PAT_MRT3847_69065C.1.pep
RVICIVATVIFVDKPSSELRETNRAIRCFPATSISYINTPSVASLICREAW

SEQ ID NO: 251427 - protein, 116 aa, Glycine max
  unsure (1)..(116): unsure at all Xaa locations
  Clone ID: PAT_MRT3847_69066C.1.pep
YVAVSHPQTCVLRTKGLDCFCGTILVACGCHAYDMLPLSTNTAYGARTPRGQCARSKLAGGTHNIFGFVTIPEKCAXATKRFIHGDPYEFDSITINQQAYFYATNLFFHAHDTFVF

SEQ ID NO: 251428 - protein, 115 aa, Glycine max
  Clone ID: PAT_MRT3847_69067C.1.pep
FYPPLNCNFSFFLHPNLTLLTLKFNTCPREYLIKNLSILTSLYILPFFSTFFPFQHSFFFSISSNFTPSPYFILFHFHFYSNFLPQFFNLYFFHLLHTYFLLIFFIPLSLQFTSS

SEQ ID NO: 251429 - protein, 97 aa, Glycine max
  Clone ID: PAT_MRT3847_69068C.1.pep
IMASHGYGLSKRAFFGRVSNHCEENVECPVFDVGKPKPCPRKDIGLKKKIIEPVPGLFLCQKKPTSLRQPLMWDWATAGVDCLARQGKPRVIMNVEG

SEQ ID NO: 251430 - protein, 48 aa, Glycine max
  Clone ID: PAT_MRT3847_69069C.1.pep
SSRVAVDAVHVSPLTCPKTRDPFRMVVVRGAAPLSAHPSLRGALLSLY

SEQ ID NO: 251431 - protein, 80 aa, Glycine max
  Clone ID: PAT_MRT3847_6906C.1.pep
PTFINDPHLYAPEWAQILTDMTYTDPSYRAKSGLTSEFDSFPPYMDHMDTYQFPPYPPQMSNVLGSLADISDLTQIDSMD

SEQ ID NO: 251432 - protein, 802 aa, Glycine max
  unsure (1)..(802): unsure at all Xaa locations
  Clone ID: PAT_MRT3847_69070C.1.pep
SRKDPTSDMAIISRKGSTLVREIHEKQSMNKSRQRFWELAGSKLGDILGVEKTAEQIDADTAEVGEDGEIDFKEEAKFSQHMKKGEAVSDFAKSKTLAEQRQYLPIFSVREELLQVVRENQVVVVVGETGSGKTTQLTQYLHEYGYTMHXEVGCTQPRRVSAQRVTDSVCEEMDTELGDKIGYAIRFEDVTGPKTIIKYMTDGVLLRETLKDSDLDKYRVIVMDEAHERSLSTDVLFGILKKVVAQRRDFKLIVTSATLNAQKFSNFFGSVPIFHIPGRTFPVNILWSKTPVEDYVEGAVKQTMTIHITSPPGDILIFMTGQDEIEAACYALAERLQQIXSSSKKAVPKLLILPIYSLLPADLQARIFQKAEDGARKCIVATNIAETSLTVDGIFYVIDSGYGKMXVYNPRMGMDALQVFPVSRAAADQRAGRAGRTGPGTCYRLYTESAYLNEMLPSPVPEIQRTYLGNVVLLLKSLKVENLLDFDFMDPRARDNILNSMYQLWVLGALNNVGGLTDLGWKMVEFPLDPPLAKMLLMGEQLGCLEEVLTIVSMLSVPSVFFRPKDRAEESDAARERFFVPESDHLTLYNVYQQWKQHDYRGDWCNDHFLHVKGLRKAREVRSQLLDILKTLKIPLTSCWPDTDIVRKAICSAYFHNSARLKGVGEYVNCRNGMPCHLHPSSALYGMGCTPEYVVYHELILTTKEYMQCATAVEPQWLAELGPMFFSVKDSDTSLLEHKKRQKQEKTAMEEEMENLKKVQAEVEKERKHKEKEKMAKHQQQISMPGLRKGSSTFLRPKKFGL

SEQ ID NO: 251433 - protein, 111 aa, Glycine max
  unsure (1)..(111): unsure at all Xaa locations
  Clone ID: PAT_MRT3847_69071C.1.pep
SNVVYHELILTTKXYMQCATAVKPQWLAELGPMXFSVKDSDTSLLEHKKSQNQEKPAMEEEMENLKKVQAEVEKERKQKEKEKMAKHQQQISMPGLRKGSSTFLRPKKFGL

SEQ ID NO: 251434 - protein, 224 aa, Glycine max
  unsure (1)..(224): unsure at all Xaa locations
  Clone ID: PAT_MRT3847_69072C.1.pep
RAASISIQASLNYCSILESQGLKLSKLLLVLLRPSVEEVLESNFRRARRVVLDMAECCPLSPQFASSLSAIASSSSSMLVESGMRFMHIVEEILEQLTPTVSLHFGGNVLNRILQLFDKYMDALTRALPGPSDDDNLPELKEVALFRAETDSEQLAILGIAFTILDELLPNAVLSRWMLQSESKAQGXNSGATENVTFNTNASVELKEWRKHLQHSFDKLRDHF

SEQ ID NO: 251435 - protein, 117 aa, Glycine max
  Clone ID: PAT_MRT3847_69073C.1.pep
RGRGRGTKKGVQVKGEWVTKRRELLLHASSVAFSLSPFNSIALAENDVPEDFRVYSDDVNKFKIMIPRDWQIGAREGDGLRSLIAFYPQEASNTNVSIGITSLDADFTKMESFGKVY

SEQ ID NO: 251436 - protein, 110 aa, Glycine max
  Clone ID: PAT_MRT3847_69074C.1.pep
GTKIKKSYPLEGMGPTFSIGPAFKKLDLQMKGARQNANGAKTMGLGLTENGMPPLSLPMKRAPYPGKLVLTPNEPRGIWIINWVKLNSKFKTLINPLIPPKRPTRVNNAP

SEQ ID NO: 251437 - protein, 60 aa, Glycine max
  Clone ID: PAT_MRT3847_69075C.1.pep
ADDTPRTLKRMQKDTLKTYIRDFHKAPRSRGSKHKEASELEPAYIRTLEQTGEPQKTGQL

SEQ ID NO: 251438 - protein, 44 aa, Glycine max
  Clone ID: PAT_MRT3847_69076C.1.pep
KPFHSKYYFWVNSKGCLNIFLKITFHLPVIISFSHPFMERAEMK

SEQ ID NO: 251439 - protein, 46 aa, Glycine max
  unsure (1)..(46): unsure at all Xaa locations
  Clone ID: PAT_MRT3847_69077C.1.pep
XTAPYXELSHXLXLFXSLXSFSLRKXRDXANXCFMGLSTXPXXRLI

SEQ ID NO: 251440 - protein, 260 aa, Glycine max
  unsure (1)..(260): unsure at all Xaa locations
  Clone ID: PAT_MRT3847_69078C.1.pep
RVRNYKRSLLWHSKLKFTEGSASPFFQNLRMAQNASFQQQKFIIPNKYGYKLVGILHESGTKEIVLLCHGGRASKENFIMTNLAAALENAGISSFRFDFTGNGESEGSFEIGGFWREADDIHAVAQHFQEANRTVIAIVGHSKGANAALLYASKYHDIKTIVNLSGCHDLKVGLENRFGKDFLERLRKEGFIEFKAESGINYRVTAXSMTDRLDIIMLDTSLHIDNCARYTCVSTRTLLFVAFVAAHESXKILPNHKLHI

SEQ ID NO: 251441 - protein, 60 aa, Glycine max
  Clone ID: PAT_MRT3847_69079C.1.pep
TSSHSSYHSSSYSYNYPIILHDWFNFIVYLKTTNQQFTKIIPIYTIHNLITLISKNLHLI

SEQ ID NO: 251442 - protein, 60 aa, Glycine max
  Clone ID: PAT_MRT3847_6907C.1.pep
ISCPNVPTKQELHALSYEKKLVFDSRRLCSQHERKGKGQLPRCKRTQRSYACIQPYILHL

SEQ ID NO: 251443 - protein, 121 aa, Glycine max
  unsure (1)..(121): unsure at all Xaa locations
  Clone ID: PAT_MRT3847_69080C.1.pep
SYQNSQPQGSQNENDPNNTTIFVGNLDPNVTDDHLRQVFSQYGELVHVKIXRSPSNKQAQADPNQWNGGAGSGGGYYGYAAQGYENYGYAPAAGQDPNMYGSYPGYPGYQPPQQQQQIGYS

SEQ ID NO: 251444 - protein, 138 aa, Glycine max
  unsure (1)..(138): unsure at all Xaa locations
  Clone ID: PAT_MRT3847_69081C.1.pep
DVTDYLLQETFRARYNSVKGAKVVIDRLTGRTKGYGFVRFSDESEQVRAMTEMQGVLCSTRPMRIGPASNKTPTTQSQPXIFVGNLDPNVTDDHLRQVFSQYGELVHVKIPAGKRCGFVQFADRSCAEEALLVLNGTL

SEQ ID NO: 251445 - protein, 313 aa, Glycine max
  unsure (1)..(313): unsure at all Xaa locations
  Clone ID: PAT_MRT3847_69082C.1.pep
MMQQPGPGMAPPTMGQQPQQQYQQQPPPQQQQPYVMMPPQHQAPQPMWAPSAQPPLPQQPASADEVRTLWIGDLQYWMDENYLYTCFAHTGEVSSVKVIRNKQTSQSEGHGFIEFNSRAGAERILQTXNGAIMPNGGQSFRLNWATSSAGERSRQDDSPDYTIFVGDLAADVTDYLLQETFRARYNSVKGAKVVIDRLTGRTKGYGFVRFSEESVXMRAMTEMQGVLCSTRPMRIGPASNKTPATQSQPKASYLNSQPQGSQNENDPNNTTIFVGNLDPNVTDDHLRQVFSQYGELVHVKIPAGKRCGFVQFA

SEQ ID NO: 251446 - protein, 135 aa, Glycine max
  Clone ID: PAT_MRT3847_69083C.1.pep
LQIFVGNLDPNVTDDHLRQVFSQYGELVHVKIPAGKRCGFVQFADRSCAEEALRVLNGTLLGGQNVRLSWGRSPSNKQAQADPNQWNGAAGAGSGGGYYGYAAQGYENYGYAPAGQDPNMYGSYPGYPGYQAPQQ

SEQ ID NO: 251447 - protein, 410 aa, Glycine max
  Clone ID: PAT_MRT3847_69084C.1.pep
MMQQPGPGMAPPTMGQQPQQQYQQQPPPQQQQPYVMMPPQHQAPQPMWAPSAQPPLPQQPASADEVRTLWIGDLQYWMDENYLYTCFAHTGEVSSVKVIRNKQTSQSEGYGFIEFNSRAGAERILQTYNGAIMPNGGQSFRLNWATFSAGERSRQDDSPDYTIFVGDLAADVTDYLLQETFRARYNSVKGAKVVIDRLTGRTKGYGFVRFSEESEQMRAMTEMQGVLCSTRPMRIGPASNKTPATQSQPKASYLNSQPQGSQNENDPNNTTIFVGNLDPNVTDDHLRQVFSQYGELVHVKIPAGKRCGFVQFADRSCAEEALRVLNGTLLGGQNVRLSWGRSPSNKQAQADPNQWNGAAGAGSGGGYYGYAAQGYENYGYAPAGQDPNMYGEYPGYPGYQAPLPQQQIGY

SEQ ID NO: 251448 - protein, 154 aa, Glycine max
  Clone ID: PAT_MRT3847_69085C.1.pep
WATFSAGERSRQDDSPDYTIFVGDLAADVTDYLLQETFRARYNSVKGAKVVIDRLTGRTKGYGFVRFSEESEQMRAMTEMQGVLCSTRPMRIGPASNKTPATQSQPKGSSYQNSQPQGSQNENDPNNTTIFVGNLDPNVTDDHLRQVFSQYGGI

SEQ ID NO: 251449 - protein, 409 aa, Glycine max
  Clone ID: PAT_MRT3847_69086C.1.pep
MMQQPGPGMAPPTMGQQPPQQYQQPPPQQQQPYVMMPPQAQAPQAMWAPSAQPPPQQQPASADEVRTLWIGDLQYWMDENYLYTCFAHTGEVTSVKVIRNKQTSQSEGYGFIEFNSRAGAERILQTYNGAIMPNGGQSFRLNWATFSAGERSRHDDSPDYTIFVGDLAADVTDYLLQETFRARYNSVKGAKVVIDRLTGRTKGYGFVRFSDESEQVRAMTEMQGVLCSTRPMRIGPASNKTPTTQSQPKASYQNSQPQGSQNENDPNNTTIFVGNLDPNVTDDHLRQVFSQYGELVHVKIPAGKRCGFVQFADRSCAEEALRVLNGTLLGGQNVRLSWGRSPSNKQAQADPNQWNGGAGSGGGYYGYAAQGYENYGYAPAAGQDPNMYGSYPGYPGYQPPQQQQQIGYS

SEQ ID NO: 251450 - protein, 167 aa, Glycine max
  Clone ID: PAT_MRT3847_69087C.1.pep
CCVHHHSKMPFTLHPSKSLCSPNFTITPGKDTTLFTNTFFFINKPRKNPTKFRSFAKVVLYTPRASIVSKKDPILGYTHFTLRSRSDGFDGFSTDVSQDDGTSQELEQLELLNKPSPVLVTEESSSEVEVEEEKPSKEEALAPFLKFFKGKDSGQDVEEDGEGLGSF

SEQ ID NO: 251451 - protein, 107 aa, Glycine max
  Clone ID: PAT_MRT3847_69088C.1.pep
DATRHLYATPCMIKHVTSSTSTLILRSILEISLIIPTLLHGALLYVPVVPIRSIAYLHCHVPRYFLDLREHGTCHYECTFDINARTHVPCPTLFSARFFMPLLQDIH

SEQ ID NO: 251452 - protein, 82 aa, Glycine max
  Clone ID: PAT_MRT3847_69089C.1.pep
SYPTTHPNKKIKQGMGIHFSSFKVRVLLAGHPQHGVFTVEVPEMFFCLGLLMFSLYLATGGTSTIGAGTYMQMPNINNTCNI

SEQ ID NO: 251453 - protein, 118 aa, Glycine max
  unsure (1)..(118): unsure at all Xaa locations
  Clone ID: PAT_MRT3847_6908C.1.pep
SKHFAKRDKQSIKNLASSPKLXEAGNAPSLAIKASVDKTNMRFDSYAKQGLLCSGAWLPHLIVNGYQTHSGEFITPGILILYISGWICRVGRTHLIAIRDHKNHTMNEIIIDVPLASR

SEQ ID NO: 251454 - protein, 75 aa, Glycine max
  Clone ID: PAT_MRT3847_69090C.1.pep
GQSAITPFSASSWRPFCIGLALTLAKTPVPAFGLTLPNSWYNPQRSTPVNINNGIIWACFIAKYTRHRCGQCLLP

SEQ ID NO: 251455 - protein, 157 aa, Glycine max
  Clone ID: PAT_MRT3847_69091C.1.pep
VSELHASEYSLGIEGSTVTVECQDGGNARNLTLEEATNTILFCSSIIHDLAYQAATIAMEKEHSEPLEGSEPTVTILTKPNSDIKDSRSRTAGKRAMKPQKATRPKMVEVDVKSPSKIENDENIDESLTRNVGLPNKIDNVKPLPNKLESKCNCVIM

SEQ ID NO: 251456 - protein, 72 aa, Glycine max
  Clone ID: PAT_MRT3847_69092C.1.pep
KRFRLGFRVKLFIEPNRTDLNPQCASSSSQVLLIILTAAIIDSVSKDAMASLDIHSLLLFSAIFRVILIVYG

SEQ ID NO: 251457 - protein, 65 aa, Glycine max
  Clone ID: PAT_MRT3847_69093C.1.pep
TEWSFVEDHFFLSRAGLNILVNVHLVPFYLNGAVIGIAPCPASSPSRRYSAVCGLPPQVPTKPPF

SEQ ID NO: 251458 - protein, 67 aa, Glycine max
  Clone ID: PAT_MRT3847_69094C.1.pep
FCLLGFFPPHCPPRPPLFFCLGISPPPYPIPRLGSFFPPQKKKKKKKKKKKKKKKKKKKKKKKKKKP

SEQ ID NO: 251459 - protein, 43 aa, Glycine max
  Clone ID: PAT_MRT3847_69095C.1.pep
LSSSGAVSLNRSWELGQCKKCVAPQDLHFMRVKKKNPSSWRER

SEQ ID NO: 251460 - protein, 68 aa, Glycine max
  unsure (1)..(68): unsure at all Xaa locations
  Clone ID: PAT_MRT3847_69096C.1.pep
GLPWEQFLFLSQAEFDTRCHTPLLTPXGKFFHKEDDPSTQNVQQNGVGLEESLHLLGCPENQSRFQTK

SEQ ID NO: 251461 - protein, 62 aa, Glycine max
  Clone ID: PAT_MRT3847_69097C.1.pep
FSVYLQLCITRLNMLPLFVWFLRQHNSEFGVLDMADTESIHSFGDLEENTNLRFLSGCQTSS

SEQ ID NO: 251462 - protein, 27 aa, Glycine max
  Clone ID: PAT_MRT3847_69098C.1.pep
DNTTGGLICNSAKLEANRIYIQLYSRI

SEQ ID NO: 251463 - protein, 82 aa, Glycine max
  Clone ID: PAT_MRT3847_69099C.1.pep
PLYCQPQQYALPNPTANHTIGPLPGLNFGVSMSPTGWDLRHICIFIYPSFLNIVVCKRIVYNPSIHFSLCMSSHISLIRPVF

SEQ ID NO: 251464 - protein, 68 aa, Glycine max
  Clone ID: PAT_MRT3847_6909C.1.pep
ALLDAGCLVQRSGWTRDPDVFFSWLSSIPFNGGGFNDAAIAEGLSEALMVCMMATFRFLFACILSMFL

SEQ ID NO: 251465 - protein, 131 aa, Glycine max
  Clone ID: PAT_MRT3847_690C.1.pep
MGMELRDDQILQNIIVSGSPEIDVFLKPSLPVPGRRMKVKVIPRNSRHTVKIEVNSTDKVSVLRQELERLQQLGGFSLPANGGYFFIHKRNAMDENNSFLWHRVRESDTIETFDGLISSTAASASSSSRPA

SEQ ID NO: 251466 - protein, 150 aa, Glycine max
  unsure (1)..(150): unsure at all Xaa locations
  Clone ID: PAT_MRT3847_69100C.1.pep
MELHGQAGYAGHDRSKLIXPTIVRHPSNTFFMLGVGHRDACLRHQAQVMRGIMRLKYLIXHGLVSNXDDMDNTXHNTFYNELREAVEEHHVLLTYATLNPMVNREKMTYMMFETFLALAMNVAIQGVLSVSASDRTTGLVVDSGDGRSHT

SEQ ID NO: 251467 - protein, 59 aa, Glycine max
  Clone ID: PAT_MRT3847_69101C.1.pep
NSDLHLAAPIIVYVIFSLRECDCLGGTEEVEQRVMEWVKMMGYAREFMVGVAEMTAGVR

SEQ ID NO: 251468 - protein, 94 aa, Glycine max
  Clone ID: PAT_MRT3847_69102C.1.pep
LAATMLNHSTIMAPHYSLFCLTSSTLDCLFQSVLPMLHNSSMAQFNLKILFVLTKSDPDMEFVHGLPEHEGSKRHREVRRHFHHLSFFFSGFPS

SEQ ID NO: 251469 - protein, 49 aa, Glycine max
  Clone ID: PAT_MRT3847_69103C.1.pep
FCSQTRPCNISISHCKALFVSKQQTCFIKDNQISAVKVKIHCLIYSCSQ

SEQ ID NO: 251470 - protein, 64 aa, Glycine max
  Clone ID: PAT_MRT3847_69104C.1.pep
MVKVATYFAMTLGAFVFWQSMDKLHVWIALRQDEKKERLEKEAEIRRVREELLQQQASQKDSLS

SEQ ID NO: 251471 - protein, 582 aa, Glycine max
  Clone ID: PAT_MRT3847_69105C.1.pep
MVLKSMVASASDLSLVSVAGNSPLDFKNRVFGGRLISLGFRFNKGSKCKGNERFNFEVRAAVEVGVERSKSKALEGGFGLDVVSEAELTVKGFAGLRKTKLVCTVGPACSSLEDLENLALGGMSVARLNMCHGTREWHRDVIRKIKKLNEEKGFCVSVMIDTEGSQIHVVDHGAPSSVKVEEGSNWVFTAEHYEGSRPFTVQTNYRGFSEGTEVGDELVIDGGMACFEVTEKTGNDLHCKCIDAGLFLPGAKFSFWRDGKLVRGNNKLPTLSTKDWADIDFGIAEGVDFFALSFVNHADSVKDLKMYLSTKSTKSIKVLAKIESLESLHKLEEIVQASDGIMVARGDLGVEIPLEQIPTVQEDIIYVCRQLNKPVIVASQLLESMVEYPTPTRAEVADVSEAVRQYADALMLSGESAIGSYGRKALAVLDMASSRMESWSREENRQSLVSHHQLGESLPECITEQICNCAVEMANNLGVDAIFVYTKYGHMASLLSRNRPNPPIFAFTNDDSTRMALTLQWGVVPILVDLSDDAESNISKSVQLMKSRGLISQGDVVLVVSDVAPTRASPMAFQSIQVKTII

SEQ ID NO: 251472 - protein, 152 aa, Glycine max
  unsure (1)..(152): unsure at all Xaa locations
  Clone ID: PAT_MRT3847_69106C.1.pep
MSTSNPCISFNHLPHMTPTITSTTVSFAANGFDFIKRNTSNVATTLTQISKSTTTIKAFVIDLFCTTAMEAASSLGIPVFYFFTSGAAVLELHSYFPKLHEETNMSFKDMVAVELRVTGNAPLKAVNXCNPYFGEGGPCVLGHVTVPHAPSK

SEQ ID NO: 251473 - protein, 83 aa, Glycine max
  unsure (1)..(83): unsure at all Xaa locations
  Clone ID: PAT_MRT3847_69107C.1.pep
VILIIFMIXEAFASKRKVLIAARPSINLEXLHGCPPPYHTFEEPVYIKSRQKRKESNPPKLVSSQPHGLHDFFKKKVVRKKGG

SEQ ID NO: 251474 - protein, 55 aa, Glycine max
  Clone ID: PAT_MRT3847_69108C.1.pep
RKLKFTFGLFYLRHKKPSRLNIRDLERIIPFHNGWAKIPRGPSPSKQIKAGIFAG

SEQ ID NO: 251475 - protein, 57 aa, Glycine max
  Clone ID: PAT_MRT3847_69109C.1.pep
TIFINNTISRDDVVINMGLHSSLFPPSLSCTSSTTVTRWPTSRLGACLNWMSSSLIP

SEQ ID NO: 251476 - protein, 43 aa, Glycine max
  Clone ID: PAT_MRT3847_6910C.1.pep
LVILNKKPVGCQNTFLSFVLMWCHSTQYFIIIVKVINIFILRK

SEQ ID NO: 251477 - protein, 174 aa, Glycine max
  unsure (1)..(174): unsure at all Xaa locations
  Clone ID: PAT_MRT3847_69110C.1.pep
NYKGECIVKRRTAGLEIHTMYNYKTTXELVHYNRNGTYKGIGKPRCVKYXFKTQNIMLSKLGIMLVGWGGNNGSSVNDDVIDNLEGIXGVHMTRTNKSXYLGSLTLSXAILVGSLQGEEIYAPFKRQLPMANPNIHGLGGLDIIYITLANVIVNANVVDIVMHKLLRPNVGHML

SEQ ID NO: 251478 - protein, 203 aa, Glycine max
  Clone ID: PAT_MRT3847_69111C.1.pep
MAESFLFSIAESLLSKLASQAYEEASRVLGLYDHLKNLKDTLSLVQAVLLDADQKQEKNHELREWLRQLKRVFFDAEDVLDEFECQTLQNQVLKAHGTIKDKVSHFLSTSNPLVFRSKMAQQIKDISMRLDKVAADRHKFGVHTHSHVNDSGVIGRERRTRHIRESYSQQNPNDDHKSLPIALLRQLIPGGVVLLRFCLLIVV

SEQ ID NO: 251479 - protein, 81 aa, Glycine max
  unsure (1)..(81): unsure at all Xaa locations
  Clone ID: PAT_MRT3847_69112C.1.pep
LETVLTLVSLYFWPCVRPSSNCSFVSRKWGLAVAAVACAXIRPTSAITWLCVCLLELFQAHNRFRFIFLEVAPIGEDPRMS

SEQ ID NO: 251480 - protein, 73 aa, Glycine max
  Clone ID: PAT_MRT3847_69113C.1.pep
LPQDYRMGFSSVLSLSLSLSTPHLSVSLTLTVSSGDWVSSTERSLTTLAPLERMLSPVHRTRSDSDPLPYDAF

SEQ ID NO: 251481 - protein, 124 aa, Glycine max
  Clone ID: PAT_MRT3847_69114C.1.pep
GSAERKRQRGMVARKGERVTDARTRHVDPDEKALQKDTVGRTRHKGSDARKQQDGTDCRGLQKGTVARKQQKGVIDKITGTDLITICTVKCQKTLIKLRMVPTHAKIPFGETEIDENIDQSFTH

SEQ ID NO: 251482 - protein, 2172 aa, Glycine max
  unsure (1)..(2172): unsure at all Xaa locations
  Clone ID: PAT_MRT3847_69115C.1.pep
MNMEKEGGPVNRPPILDGTNYEYWKARMVAFLKSLDSRTWKAVIKGWEHPKMLDTEGKPTDELKPEEDWTKEEDELALGNSKALNALFNGVDKNIFRLINTCTVAKDAWEILKTTHEGTSKVKMSRLQLLATKFENLKMKEEECIHDFHMNILEIANACTALGERMTDEKLVRKILRSLPKRFDMKVTAIEEAQDICNMRVDELIGSLQTFELGLSDRTEKKSKSLAFVSNDEGEEDEYDLDTDEGLTNAGVLLGEQFIKVLNRMDRRQKPHVRNIPFDIRKGSEHHRMSDEKPSHSKGIQCHGCEGYGHIKAECPTHLKKQRKGLSVCWSDDTESEQESDSDRNVNALTGIFESDEDSSDIDQEAQLKKIIANLEAEKEAHEEEISELKGEIGFLNSKLENMTKSIKMLNKGSDMLDEVLQLGKNVGNQRGLGFNHKSAGRSTMTEFVPAKNSTGASMSQHRSRHHGTQQKKSNRKKWRCHYCGKYGHIKPFCYHLHGHPRHGTQNSSSGRKMVWVPKHKIVSLVVHTSLRASAKEDWYLDSGCSRHMTGVKEFLVNIEPCSTSYVTFGDGSKGKITGMGKLVHDGLPSLNKVLLVKGLTANLISISQLCDEGFNVNFTKSECLVTNEKNEVLMKGSRSKDNCYLWTPQETSYSSTCPSSKEDEVKIWHQRFGHLHLRGMKKIIDKGAVRGIPNLKIEEGRICGECQIGKQVKMSHQKLQHQTTSRVLELLHMDLMGPMQVESLGGKRYAYVVVDDFSRFTWVNFIREKSDTFEVFKELSLRLQREKDCVIKRIRSDHGREFENSKFTEFCTSEGITHEFSAAITPQQNGIVERKNRTLQEAARVMLHAKELPYNFWAEAMNTACYIHNRVTLRSGSLTSLYVIGMGRKPTVKHFQVFGXCSVELISESXREIDSKSEAGIFLGYSINIXAYRVFNSRTRTVMESINVVVDDLTPARKKDVEDDVRTSGDNVADTAKSAENAENSDSATDEPNINQPDKSPSIRIQKMHPKELIIGDPNRGVTTRSRESEIVSNSCFVSKTEPKNVKEALTDEFWINAMQKELEQFKRNEVWELVPRPKGTNVIGTKWIFKNKTNEEGVITRNKARLVAQGYTQIEGVDFDETFAPVARLESIRLLLGVACILKFKLYQMDVKSAFLNGYLNEEVYVEQPKGFADPTHPDHVYKLKKALYGLKQAPRAWYERLTKFLTQQGYRKGGIDKTLFVKQDAENLMIAQIYVDDIVFGGMSNEMLRHFVQQMQSEFEMSLVGELTYFLGLQVKQMEDSIFLSQSRYAKNIVKKFGMENASHKRTPAPTHLKLSKDEAGTSVDQSLYRSMIGSLLYLTASRPDITFAVGVCARYQANPKISHLNQVKRILKYVNGTSDYGIMYCHCSDSMLVGYCDADWAGSADDRKSTSGGGFYLGNNLISWFSKKQNCVSLSTAEAEYIAAGSSCSQLVWMKQMLKEYNVEQDVMTLYCDNMSAINISKNPVQHSRTKHIDIRHHYIRDLVDDKVITLEHVATEEQLLLSERAQTSHSTLIARSLLSQNKFKLRPPTFLIQTYIFVAISFSFPNTSQIFTKPLQKLCFSMATSPKETSSPVSPSVPSSPSSSKTPSNQEQPEFNIQPIQMIPGPGPVLEKLIPKRQQGVKISENPSFATSPREVDTEMDKKIRSLVNSILKNASVPDADKDVPTSSTPNAEVLSSSSKEKSTEEEDQATEETPAPRAPEPAPGDLIDLEEVESDEEPIVKKLALGIAERLQSRKGKTPITRSGRIKTIAQKKSTPITPTTSRWSKVAIPSKKRKEISSSDSDDDVELDVPDIKRAKKSGKKVPGNVPDAPLDNISFHSIGNVERWKFVYQRRLAVERELGRDALDCKEIMDLIKAAGLLKTVTKLGDCYESLVREFIVNIPSNITNRKSDEYQKVFVRGKCIRFSPAIINKYLGRPTEGVVDIAVSEHQIAKEITAKQVQHWPKKGKLSAGKLSVKYAILHRTGTANWVPTNHTSTVATGLGKFLYAVGIESKFNFGNYIFDQTIKHSESFAVKLPIAFPTVLCGIMLSQHPNILNNIDSVKKRESPLSLHYKLFEGTHVPDIVSTSGKAAASGAVSKDDLIAELKDTCKVLEATIKANTEKKMELERLIKRLSDNGIDDGEAAEEEEDAAEDTESDDDDSDATP

SEQ ID NO: 251483 - protein, 52 aa, Glycine max
  Clone ID: PAT_MRT3847_69116C.1.pep
KLEPFYFAQSPIKEEFVTSNPNPTHTAFLIILAFTLFGAFKFLFLFFFFFYP

SEQ ID NO: 251484 - protein, 325 aa, Glycine max
  Clone ID: PAT_MRT3847_69117C.1.pep
MDKKIRSIVSSILKNASVPDADKDVPTSSTPNAEVLSSSSKEESTEEEDQATEETPAPRAPEPAPGDLIDLEEKDYKAEREKPPITRSGRIKTMAQKKSTPITPTTSRWSKVAIPSKKRKEISSSDSDDDVELDVPDIKRAKKSGKKLALERELGRDALDCKEIMDLIKAAGLLKTVTKLGNCYESLVREFIVNIPSDITNRKSDEYQKVFVRGKCVRFSPAVINKYLGRPTEGVVDIAVSEHQIAKEITAKQVQHWPKKGKLSAGKLSVKYAILHRIGTANWVPTNHTSTVATGLGKFLFRYCEAPNPYDRWYDEYVEWCNPLL

SEQ ID NO: 251485 - protein, 137 aa, Glycine max
  Clone ID: PAT_MRT3847_69118C.1.pep
PPPFPPTRAIMCPARFFFKRRRSPPSFFGPFGNLVLRPPVLIPCLKSLRPKKTPSMLPGPRLKRRFPPPPPLGLGVLSCLHPLRKREFKKKIREPLEKSPPLRLAGPDKYSYIINIPAPKYPPARGSLSNLPLLGGP

SEQ ID NO: 251486 - protein, 71 aa, Glycine max
  Clone ID: PAT_MRT3847_69119C.1.pep
QPLFTTFSPNHYPCNLYLRATLRYENPSHSLSITLPCLQLNQIHTRDCSLNNRDQLCTNYRDQLYTLRSNT

SEQ ID NO: 251487 - protein, 114 aa, Glycine max
  Clone ID: PAT_MRT3847_6911C.1.pep
MRKPEVSGKNNNINNKLRKGLWSPEEDDKLMNYMLNSGQGCWSDVARNAGLQRCGKSCRLRWINYLRPDLKRGAFSPQEEEIIIHLHSLLGNRYNILYTLLFYLHMHVFITIFV

SEQ ID NO: 251488 - protein, 46 aa, Glycine max
  Clone ID: PAT_MRT3847_69120C.1.pep
MLPPTFAYVYNHTSEQILFAHCIKLHTTLAFFCSFILSLTTWTSQW

SEQ ID NO: 251489 - protein, 63 aa, Glycine max
  Clone ID: PAT_MRT3847_69121C.1.pep
QPLFTTFSPNHYPCNLYLRATLRYENPSHSLSITLPCLQLNQRHTRDCSLNKRDQLYTLRSNT

SEQ ID NO: 251490 - protein, 735 aa, Glycine max
  unsure (1)..(735): unsure at all Xaa locations
  Clone ID: PAT_MRT3847_69122C.1.pep
SRPAAITPQQNGIVERKNRTLQEAARVMLHAKELPYNLWAEAMNTACYIHNRVTLRRGTPTTLYEMWKGRKPTVKHFHIFGSPCYILADREQRRKMDPKSDAGIFLGYSTNSRAYRVFNSRTRTVMESINVVVDDLTPARKKDVEEDVRTSXXDNVADTAKSAENAENSDSATDEPNINQPDKSPSIRIQKMHPKELIIGDPNRGVTTRSREIEIVSNSCFVSKIEPKNVKEALTDEFWINAMQEELEQFKRNEVWELVPRPEGTNVIGTKWIFKNKTNEEGVITRNKARLVAQGYTQIEGVDFDETFAPVARLESIRLLLGVACILKFKLYQMDVKSAFLNGYLNEEAYVEQPKGFVDPTHPDHVYRLKKALYGLKQAPRAWYERLTEFLTQQGYRKGGIDKTLFVKQDAENLMIAQIYVDDIVFGGMSNEMLRHFVQQMQSEFEMSLVGELTYFLGLQVKQMKDSIFLSQSKYAKNIVKKFGMENASHKRTPAPTHLKLSKDEAGTSVDQSLYRSMIGSLLYLTASRPDITFAVGVCARYQANPKISHLNQVKRILKYVNGTSDYGIMYCHCSDSMLVGYCDADWAGSADDRKSTSGGCFYLGNNLISWFSKKQNCVSLSTAEAEYIAAGSSCSQLVWMKQMLKEYNVEQDVMTLYCDNLSAINISKNPVQHSRTKHIDIRHHYIRDLVDDKVITLEHVDTEEQIADIFTKALDANQFEKLRGKLGICLLEEL

SEQ ID NO: 251491 - protein, 126 aa, Glycine max
  Clone ID: PAT_MRT3847_69123C.1.pep
MLSHLPNILTTIDSVKKREFVLSLHYKLFEGTHVPDIVSTSGKAAASGAVSKDALIAELKDTCKVLEATIKATTEKKMELERLIKRLSDSGIDDGEAAEEEEEAAEEEEDAAEDTESDDDDSDTTP

SEQ ID NO: 251492 - protein, 640 aa, Glycine max
  unsure (1)..(640): unsure at all Xaa locations
  Clone ID: PAT_MRT3847_69124C.1.pep
MNMEKEGGPVNRPPILDGTNYEYWKARMVAFLKSLDSRTWKAVIKDWEHPKMLDTEGKPTDGLKPEEDWTKEEDELALGNSKALNALFNGVDKNIFRLINTCTVAKDAWEILKTTHEGTSKVKMSRLQLLATKFENLKMKEEECIHDFHMNILEIANACTALGERMTDEKLVRKILRSLPKRFDMKVTAIEEAQDICNLRVDELIGSLQTFELGLSDRTEKKSKNLAFVSNDEGEEDEYDLDTDEGLTNAVVLLGKQFNKVLNRMDRRQKPHVRNIPFDIRKGSEYQKRSDEKPSHSKGFQCHGCEGYGHIKAECPTHLKKHRKGLSVCQSDDTESEQESDSDRDVNALTGRFESAEDSSDTDSEITFDELATSYRELCIKSEKILQQEAQLKKVIANLEAEKEAHEEEISELKGEVGFLNSKLENMTKSIKMLNKGSDMLDEVLQLGKNVGNQRGLGFNHKSAGRITMTEFVPAKISTGATMSQHRSRHHGTQQKKSKRKKWRCHYCGKYGHIKPFCYHLHGHPHHGTQSSSSRRKMMWVPKHKIVSLVVHTSLRASAKEDWYLDSGCSRHMTGVKEFLVNIEPCSTSYVTFGDGSKGKITGMGKLVHDGLRYVKEXDRAAQCTRQDKMSNEELKLQDP

SEQ ID NO: 251493 - protein, 64 aa, Glycine max
  Clone ID: PAT_MRT3847_69125C.1.pep
AKEKQREHGENARGGPPAKKNSAGETRRPKDTREPKPPKSCTMQTPQGQDDPRNPETPTPPEEG

SEQ ID NO: 251494 - protein, 81 aa, Glycine max
  unsure (1)..(81): unsure at all Xaa locations
  Clone ID: PAT_MRT3847_69126C.1.pep
MEFLDEDSRPRFGFHSGSASTSTEPPYPIHIPTKPFLFVTDFLCSLLATLYLFLLXSXPFKSLLFWLALSXLDGPFPTYSI

SEQ ID NO: 251495 - protein, 89 aa, Glycine max
  Clone ID: PAT_MRT3847_69127C.1.pep
ATLFTQKTHLHVLLIYLQDVDSDTNFVLASWKLRTNLKLPWRPLISIDGSTVYELNEDYKIVRHVESWNISAVEAVLQIFSFKSKNPGG

SEQ ID NO: 251496 - protein, 37 aa, Glycine max
  Clone ID: PAT_MRT3847_69128C.1.pep
NSNYEKLSILERKVSSWYLQHPAVHIDLSRSLSHFVN

SEQ ID NO: 251497 - protein, 51 aa, Glycine max
  unsure (1)..(51): unsure at all Xaa locations
  Clone ID: PAT_MRT3847_69129C.1.pep
XFSFGXGNLLLAXRPWXGPCLXXTTAXXQXXXXXXXIRPLXXEFXXLRXXT

SEQ ID NO: 251498 - protein, 130 aa, Glycine max
  Clone ID: PAT_MRT3847_6912C.1.pep
VGLYTESLQQLLETVRGLHAPSNDVVLEDLSLPGLSELKGHWHGSLDASGGGNGDTLAEFDFHGEDWEWGDYKTQRVLAVGAYSNDDGMYLERIFIQKDNATIHADGTLLGPKTNLHFAVLNFPVSLVPT

SEQ ID NO: 251499 - protein, 96 aa, Glycine max
  Clone ID: PAT_MRT3847_69130C.1.pep
CWHILSPLGCYQTTSACLKRRVDSATQSDDACEDLLFSYMTQLSPTLKLIGEDTTSACRPTELTDEPSWLADPLHGTTNFGHGSPLDSVPFGLTFG

SEQ ID NO: 251500 - protein, 361 aa, Glycine max
  unsure (1)..(361): unsure at all Xaa locations
  Clone ID: PAT_MRT3847_69131C.1.pep
MKRRDLLGDPLETCCSKISIPQLHSQCLKVGLALDSFVVTKLNVLYARYASLCHAHKLFEETPCKTVYLWNALLRSYFLEGKWVETLSLFHQMNADAVTEERPDNYTVSIALKSCSGLQKLELGKMIHGFLKKKIDSDMFVGSALIELYSKCGQMNDAVKVFTEYPKPDVVLWTSIITGYEQNGSPELALAFFSRMVVLEQVSPDPVTLVSAASACAQLSDFNLGRSVHGFVKRRGFDTKLCLANSILNLYGKTGSIRIAANLFREMPYKDIISWSSMVACYADNGAETNALNLFNEMIDKRIELNRVTVISALRACASSSNLEESKQIHKLAVNYGFXVDITVSTALMDMYLKCFSPENA

SEQ ID NO: 251501 - protein, 151 aa, Glycine max
  unsure (1)..(151): unsure at all Xaa locations
  Clone ID: PAT_MRT3847_69132C.1.pep
NNNHNLIVPNPQDSLXMIDYITKETMHSQSYPELPYEPYCSYYMITFLYRFYSTFLFNHPPNKKLSIATSNIIVXFPQRILQPXFHYYLNTVTCKFLTTCKFHHPKYQALISLKISLNILSYPILPNYPXCTYYLITRQFKFVNTFKFHHS

SEQ ID NO: 251502 - protein, 59 aa, Glycine max
  Clone ID: PAT_MRT3847_69133C.1.pep
RHLQYIQRITSLRFLVEIDPLNRYRLLARFSIHITASAIFGYHNGIMHRLEVMVRSDKE

SEQ ID NO: 251503 - protein, 107 aa, Glycine max
  unsure (1)..(107): unsure at all Xaa locations
  Clone ID: PAT_MRT3847_69134C.1.pep
KKGPSKPGPGKPNPPNRPKVPGTRKTPTAFLTGKNKIFGPGLPPPPXRGAPPQRGSKVSPFAPIRGGPWPPPKPLGGLLAPXPSPRGKKPLNKTPGFPGKRPPPWPF

SEQ ID NO: 251504 - protein, 42 aa, Glycine max
  Clone ID: PAT_MRT3847_69135C.1.pep
KNGTHRQSNWAFNFNPELYSTDKNEPLEILCLRMCVHSIVLT

SEQ ID NO: 251505 - protein, 77 aa, Glycine max
  Clone ID: PAT_MRT3847_69136C.1.pep
AAATLIVGISTSFPIIKSPYLCYSAREQLSDNVPSFVQSLAIGPSGQLAADRICFLHIPNLYESQSSTFLFATSKHR

SEQ ID NO: 251506 - protein, 188 aa, Glycine max
  Clone ID: PAT_MRT3847_69137C.1.pep
YQAVLTDFGLAKKFNENERSNSMCGTVEYMAPEIVMGKGHDKAADWWSVGILLYEMLTGKPPFSGGNRHKIQQKIIKDKIKLPAFLSNEAHSLLKGLLQKDVSKRLGSGSRGSEEIKSHKWFKLVNWKKLECRETRPSFVPDVAGKYCVANFEERWTSMPLLNSPAASPKKDDNTFNKFSYSGTPVAS

SEQ ID NO: 251507 - protein, 121 aa, Glycine max
  Clone ID: PAT_MRT3847_69138C.1.pep
AAALFFFFFFFFFVFFIFFTCALGKKESLDFPKRLAPLGHALNPPFAHACERSIPTPRIKIPAPGNQPAWGNHRAPHRNCKGHPAYELGQEMIANCPAYQAAYGTMGPVSAIHPCTSNLYI

SEQ ID NO: 251508 - protein, 62 aa, Glycine max
  Clone ID: PAT_MRT3847_69139C.1.pep
VHNFLIFFLISNPMKKKPKTVANNLISESNCKRHAGDDSFQWLCPLGIEGEPWGNKWWGTGP

SEQ ID NO: 251509 - protein, 97 aa, Glycine max
  unsure (1)..(97): unsure at all Xaa locations
  Clone ID: PAT_MRT3847_6913C.1.pep
MSMGSSLRHLCLTLDSLVSSAFCAFPRQSVDVPFCIXYVPTWASDHITYFSAGSDNQVHLXQYTGNGFXCKGSYVYGHFSMSMKMVPGDSAVQVTAF

SEQ ID NO: 251510 - protein, 152 aa, Glycine max
  unsure (1)..(152): unsure at all Xaa locations
  Clone ID: PAT_MRT3847_69140C.1.pep
SKQCDSLPRGEFASKALSHSFXVYACDMLEAINFSNLYAPEHLIINVKDAEKWESFIENAGSVFLGPWTPESVGDYASGTNHVLPTYGYARMYGGVSLDSFLKYITVQSLSEEGLRRLGPYVATMAEVEGLEAHKRAVTLRLQYILEPNRLE

SEQ ID NO: 251511 - protein, 63 aa, Glycine max
  Clone ID: PAT_MRT3847_69141C.1.pep
YYGPRAAICFKYLRETFPSGEHFKLRHSHRDCFRLPNEWQKRRNISPVESNACAPNTSRGLFH

SEQ ID NO: 251512 - protein, 55 aa, Glycine max
  Clone ID: PAT_MRT3847_69142C.1.pep
MATSHAQDSLLYHERYVDTLEPAPYVCYHECDEHHAGKVRTGAGAIMVMACVLTY

SEQ ID NO: 251513 - protein, 67 aa, Glycine max
  Clone ID: PAT_MRT3847_69143C.1.pep
DDNFITTINNVFDHLTTCGDQLCLFHYILTGAIKKMCLFVHTLELCINTTFDNSIIYKTCLLLFEND

SEQ ID NO: 251514 - protein, 69 aa, Glycine max
  Clone ID: PAT_MRT3847_69144C.1.pep
SPCLGWARAVKRGRHASPGSAGGSSMRKTVTKQASCGSPWCGPDRVKYLGPFSGEPAYYLTGEFPGDYG

SEQ ID NO: 251515 - protein, 28 aa, Glycine max
  Clone ID: PAT_MRT3847_69145C.1.pep
VVTHHILKPQSFFAVAFGDFCAHTFENT

SEQ ID NO: 251516 - protein, 50 aa, Glycine max
  Clone ID: PAT_MRT3847_69146C.1.pep
GRPFFFFLIPFNLPFMKDQLKEYAKVLHQINTRQCSVQQKLKNIDMQGTI

SEQ ID NO: 251517 - protein, 186 aa, Glycine max
  Clone ID: PAT_MRT3847_69147C.1.pep
MRTLCDACESAAAIVFCAADEAALCRACDEKVHMCNKLASRHVRVGLASPSDVPRCDICENAPAFFYCETDGSSLCLQCDMIVHVGGKRTHGRYLLFRQRVEFPGDKSSHAENPASQPLEPGEAKRGQNPLPKLKMGEKQQNHKMPMVPTPGPDADGHAKMESKMIDLNMKPNRIHEQASNNQKHP

SEQ ID NO: 251518 - protein, 46 aa, Glycine max
  unsure (1)..(46): unsure at all Xaa locations
  Clone ID: PAT_MRT3847_69148C.1.pep
PPPLKQTSRFALNENXMKFTHTSSKFGNGRFQAPQEKQKFFGPLKS

SEQ ID NO: 251519 - protein, 57 aa, Glycine max
  Clone ID: PAT_MRT3847_69149C.1.pep
RCPCLPTVGVRAARRYVRRLAQRPGVAQPRRWILGIYLIPCMRNSSWTRLGSHQRDP

SEQ ID NO: 251520 - protein, 65 aa, Glycine max
  Clone ID: PAT_MRT3847_6914C.1.pep
TVKLTDSALECGCVTDSTYQNILFSQSAERDCLCEHTNVCYAFSCSKPAKSIKEIIKVQENSVHV

SEQ ID NO: 251521 - protein, 173 aa, Glycine max
  unsure (1)..(173): unsure at all Xaa locations
  Clone ID: PAT_MRT3847_69150C.1.pep
QNQSLTTRNPAGSGLGLAICRRFVNLMEGHIWVESEGLXRTVTKGLLMHLGCDVTTASSSEECLRVVSLEHEVVFMDVCAGLDGYELAXRIHEKFTKHQDRPLIVALTGNTKKVTKENCMRVGMDALILKPVSVDKMRGVLSELLERRVLFQSVYPVRLLYIAISNLEKSPNL

SEQ ID NO: 251522 - protein, 739 aa, Glycine max
  unsure (1)..(739): unsure at all Xaa locations
  Clone ID: PAT_MRT3847_69151C.1.pep
MESCNCIDPQVPADDLLMKYQYISDFFIALAYFSIPLELIYFVKKSAVFPYRWVLVQFGAFIVLCGATHLINLWTFRIHSRTVAVVMTTAKVLTAVVSCATALMLVHIIPDLLSVKTRELFLKNKAAELDREMGLIRTQEETGRHVRMLTHEIRSTLDRHTILKTTLVEXGRTLALEECALWMPTRTGLELQLSYTLRQQNPVGYTVPIHLPVINQVFSSNRAVKISPNCPVARLRPYAGKYMPGAVVAVRVPLLHLSNFQIYDWPEVSTRSYALMVLMLPSDSARQWHVHELELVEVVADQVAVALSHAAILEESMRARDQLIEQNVALDLARREAETAIRARNDFLAVMNHEMRTPMHAVIALSSLLQETDLTAEQRLMVETILKSSNLLATLINDVLDLSRLEDGSLQLEAATFNLHSLFREVLNLIKPVASVKKLSLTSHVASDLPMYAIGDEKRLMQTILNVVGNAVKFSKEGCISITAFVAKPESFRDARIPDFLPVPSDNHFYLRVQVKDSGSGINPQDIPKLFTKFAQNQSLTRNPAGSGLGLAICRRFVNLMEGHIWVESEGIGKGCTVTFIVKLGIPDRSNEFKLPFVPKVPGNHGSTNFAGLKVLVMDDNGVSRTVTKGLLMHLGCDVTTASSSEECLRVVSLEHEVVFMDVCTGLDGYELAVRIHEKFTKHQDRPLIVALTGNTKKVTKENCMRVGMDGLILKPVSVDKMRGVLSELLERRVLFESV

SEQ ID NO: 251523 - protein, 99 aa, Glycine max
  Clone ID: PAT_MRT3847_69152C.1.pep
KFTGAFSNPPKIMGFSFFSRFKEGSNFPPFFFFIKILFFETCLKVYAFFIKTFPQTLKLEKGQIHLFPQQAQDLSWGLQFGKSPHQLCLLKRHPLPLCP

SEQ ID NO: 251524 - protein, 107 aa, Glycine max
  Clone ID: PAT_MRT3847_69153C.1.pep
IFNFLTQPNSFLCGLKFKTPYHPRPIISPNFYKHKPHTPIQRGFPQSPLPKKTHPPNPPPLKKKKNPPPTRHHLQPLYNPINNQNPLYFLHVPSEQKKPPYQRGKPN

SEQ ID NO: 251525 - protein, 164 aa, Glycine max
  Clone ID: PAT_MRT3847_69154C.1.pep
LRLMRCAVIECSRPVFSVNVAFGFLILGEENGVRVFGLRRLVKGRSGKRVGNSKQLKNGGGGRGAGLEAVNCNGDLKGKMERYVVATAVKQTNVKLKHDNRDGGSCFVTLKVNEVKTKSPTKVSMSIKAISIQAVSQRMFLILDSHGDLHLLSLSNSGIGVDIT

SEQ ID NO: 251526 - protein, 171 aa, Glycine max
  unsure (1)..(171): unsure at all Xaa locations
  Clone ID: PAT_MRT3847_69155C.1.pep
EVGMTPVLPAFSGNVPAALKHIFPSAKITRLGNWFSVKNDLKWCCTYLLDATDSLFVEIGKAFIEKQLQEYGRTSHIYNCDTFDENTPPVDDPEYISSLSAATFKGMQSGDDDAVWLMQGWLFSYNPFXRPPQMXALLHSIPIRKLVVLNLFTKXKPIXITSKXFYRFPYI

SEQ ID NO: 251527 - protein, 54 aa, Glycine max
  Clone ID: PAT_MRT3847_69156C.1.pep
PQLSIFFYSHQILIHPTYSLTFNLNSKKHTSPTILLHNFYYRLSYLISSYIYFP

SEQ ID NO: 251528 - protein, 165 aa, Glycine max
  unsure (1)..(165): unsure at all Xaa locations
  Clone ID: PAT_MRT3847_69157C.1.pep
LEQQLISGDCVLLYWASTSIWDFMSLLSSAFYAIFLFYVFGLHQFVGXGIFGPTILMLLEYGLVIALLTYCLTFLFFDHTMAHNVALLIHLISGLILMVISYXMGLMPSTMNANSLIKNVLRISPVMCFADGLALLALLRQGMKDKTCDGVIDWNATGAFIWNLA

SEQ ID NO: 251529 - protein, 85 aa, Glycine max
  Clone ID: PAT_MRT3847_69158C.1.pep
GVHTPKKGFRSGVNTGFNPPPPQKPLNNVLFSKDGISGASLVVIKGLQPMGVVLSRWPVPNKSPVHVEGQKKAVLRDAPLVFKAR

SEQ ID NO: 251530 - protein, 55 aa, Glycine max
  Clone ID: PAT_MRT3847_69159C.1.pep
SPMRSLSPKCPVPTFTWEGGNNTRVSHRHVSIQTDEDNQILLSLVVVFSRRTGAW

SEQ ID NO: 251531 - protein, 62 aa, Glycine max
  Clone ID: PAT_MRT3847_6915C.1.pep
KLFGHLNVGPLVGVERTSFSEWVLKGLGMMVCFQQQSLKRCAFFHRKNARYKSVFIRRVILW

SEQ ID NO: 251532 - protein, 139 aa, Glycine max
  Clone ID: PAT_MRT3847_69160C.1.pep
QYNEVHAHMKTNFFKLSLNNLKTPKSSIFDLKISQSKISLPNNTLKITILHNNLLTNVVTTNNFKPSINLHHTHHIIKIIKIIATVNIPNNTPISLALYCEYFFQKHTTSDIYAIYSQYVEVMNPAYTITLTISVNPNP

SEQ ID NO: 251533 - protein, 219 aa, Glycine max
  unsure (1)..(219): unsure at all Xaa locations
  Clone ID: PAT_MRT3847_69161C.1.pep
TTSQFRSGFPGRPTRPKIAKDYVKLLKYGDSLXRCKCLKVACFLGRXCLVNKMVGPSLAXLLNRSDQAHWLRLSLLLDSQNTRTNLDLWTTPNVGKSSFTXQELLEADVDVQPYAFTTKSLXFVGHTDYXKYLRYQVIDTPGILDRPFEDRILXMCSITALAHLRAAIFVFXXTCLGLCCYSIAQQAAXLFHSIKSFVMKQALIIVCNXTDLQPLEGIS

SEQ ID NO: 251534 - protein, 116 aa, Glycine max
  Clone ID: PAT_MRT3847_69162C.1.pep
PKMDRNDTRYSQSSAPVFASDGTVLLLCVSKFQFSHPCSHFTPRIEISLLQLSRSHHPQQQQQQKKKRNYLQILQSQAIHEPPTNFLSDPFPKSEKSFVFSSDLTFSSSFSFTGRD

SEQ ID NO: 251535 - protein, 91 aa, Glycine max
  Clone ID: PAT_MRT3847_69163C.1.pep
PISDCKITMDKTVKDNSGWSDILFHGVIVLEMGLCYFLMHILPNKLWDQLRISNTAHMQVKHQLLQRAQILARSRSCKYKDTFKEEHAQAQ

SEQ ID NO: 251536 - protein, 77 aa, Glycine max
  unsure (1)..(77): unsure at all Xaa locations
  Clone ID: PAT_MRT3847_69164C.1.pep
MKQATKDHRELKQCAEGFEVGRLSRMMGSEAKNYTEGXEELYQKMLVKIENLSGLVEKSSAMVIEQENHNRKLKHIL

SEQ ID NO: 251537 - protein, 108 aa, Glycine max
  Clone ID: PAT_MRT3847_69165C.1.pep
LLKSSLLLSTRVSGHYFTTPPHQILLLSPHITHLLILLILSISSDLIHDSKTIHLTITFPRSMLLSQPIYTSFRRLLLPITFFLLYTAYHVTNTYVDYRATLAIIYKN

SEQ ID NO: 251538 - protein, 61 aa, Glycine max
  Clone ID: PAT_MRT3847_69166C.1.pep
QIHFSLHLTFKNLASLQFSANILQNPNPLSPLIRPVFHFWDDVFTFGSLSVHSFCVLLCDF

SEQ ID NO: 251539 - protein, 102 aa, Glycine max
  unsure (1)..(102): unsure at all Xaa locations
  Clone ID: PAT_MRT3847_69167C.1.pep
XXRNRXXIETXXXGXPXPEXPLXXXPQVXLWFWXQFXHCXXAXXFSVVRAXVXDRXXMXIKAMASAXSSRVESXRXSXFXRFRSIHXSPSXLRLXXMTXXLM

SEQ ID NO: 251540 - protein, 71 aa, Glycine max
  Clone ID: PAT_MRT3847_69168C.1.pep
IRCWGFLTFPALTCRFVHFLRPQNIFNLFAVPPLYNWIFAMGISTPVFRVHENAPPLCPNLCHLTKAVYKY

SEQ ID NO: 251541 - protein, 74 aa, Glycine max
  Clone ID: PAT_MRT3847_69169C.1.pep
GQYPGTQEEPVRRRGLKQRRKKRQLPMLGNSQTSQLYLVVTEDEVGKAKFVLKRADHTGPESVCAKGNKYLQSY

SEQ ID NO: 251542 - protein, 48 aa, Glycine max
  Clone ID: PAT_MRT3847_6916C.1.pep
AWPVELQLHSGGHLFHLGKQDEVIDHGRCSYGYPACQAYLKAPELRRS

SEQ ID NO: 251543 - protein, 152 aa, Glycine max
  Clone ID: PAT_MRT3847_69170C.1.pep
MIGNDNDSEEEAGSKSVKVKRDATKRVLIYKAPPVLTIHLKRFSQDARGRLSKLNGHVNFRETMDIRPYIDPRCINEEKYEYHLVGLVEHSGTMRGGHYVAYVRGGQRNSGKGGDKENEGSTWYQASDAYVREVSLDEVLRCEAYILFYEKI

SEQ ID NO: 251544 - protein, 116 aa, Glycine max
  Clone ID: PAT_MRT3847_69171C.1.pep
PCKAINWSLSLKLTIFLFQSMWFVLKFSTTQPLTQDQRPQEHTSVDTMRGTFVAVVEDDIELLRCCDLQVQGTHQFSCNEIVISPTVNEEKNRITSQLSFQFDGLRMCKVTGLRAQ

SEQ ID NO: 251545 - protein, 55 aa, Glycine max
  Clone ID: PAT_MRT3847_69172C.1.pep
EVLALKEKWRQSTRNAVRVENTYPFGRRTPTLCGRSLDTSPGSKAVIKRTLVFLL

SEQ ID NO: 251546 - protein, 219 aa, Glycine max
  unsure (1)..(219): unsure at all Xaa locations
  Clone ID: PAT_MRT3847_69173C.1.pep
MATQSPSPQNLGGEIEQTENVDQHNRGEELGKQSSDTSVFVNSEPLREEQIQNAVKFLSHPKVRGSPVIHRRSFLEKKGLTKEEIDEAFRRVPDSPPSVQTAGINQDGQLKPSSNIQQQGQPQALQLTVPASTGVTTTLGTLSRRSFHWSHALIAVGLLAASGAGTVIVIKNSILPRLKSWIRNVVLEEDHDQSKRTGSKPTLAERAAQAAKAAAXAAA

SEQ ID NO: 251547 - protein, 135 aa, Glycine max
  Clone ID: PAT_MRT3847_69174C.1.pep
DIKEGAILNLLNCPVDNYTIMYSTQNCGIHLWDTRSNSNTWTLQATPKEGYASSLASGPCGNWFVSGSSRGVITLWDLRFLIPVNSWQYSLACPIEKMCLFLPPSNASVSSAARPLVYVAAGCNEISLWNAENAS

SEQ ID NO: 251548 - protein, 216 aa, Glycine max
  Clone ID: PAT_MRT3847_69175C.1.pep
MVLVIQRNKQLKVLVKLMGMVYSMLKGCNSNDHLVQKENSTNTQLIDKRFLIGKWDGHRHMDRVPEFIAGGSYGTPPYNENFHKYLVSKIPIKPLDLDTTTALLLDYFPEEGQWKLFEQPQNMEIASSHTETSEEAGPKVKAPSSAKSSNAEQYIEPLYVILDTEKQQEPVKEFITTDTENRMTDISDDRSDELMQFVKHRVLHFLRWKLVPAECC

SEQ ID NO: 251549 - protein, 44 aa, Glycine max
  Clone ID: PAT_MRT3847_69176C.1.pep
TREYFFHFFFFGCSFFIQTGTFQAIYFFLNRYEKKQFLNMLVFF

SEQ ID NO: 251550 - protein, 47 aa, Glycine max
  Clone ID: PAT_MRT3847_69177C.1.pep
IFLTQHTNMKTLIIKMERGPKPLSIQYNQSLFNPIMYTPCIQLYHIH

SEQ ID NO: 251551 - protein, 64 aa, Glycine max
  Clone ID: PAT_MRT3847_69178C.1.pep
EKAVVTLKRRLQWGPIQRVPVTNLGPKLISLPIYPSWHTVIDRLHPFLFRRFRPSKCLVLIRTI

SEQ ID NO: 251552 - protein, 134 aa, Glycine max
  Clone ID: PAT_MRT3847_69179C.1.pep
PRKRPPLFKNSKPQKFLFLLLVQQSFSLIWFSPSPPPGFWIQDPQKAKNGGGFFNFSFLREGVTPPFFFFLPPDSDAPHIKDFFFFFFSPRTESQYNFSLFWRPPPFFYIFLMDIFSFYSSLKNIPPFPFIFFF

SEQ ID NO: 251553 - protein, 88 aa, Glycine max
  Clone ID: PAT_MRT3847_6917C.1.pep
QVTGGARDEQESGGHAIENRNSGGEWSAMKSAPESPHRASDAPGRAPGESRESPKTDPPNKTRARQTQLRGERHTKTGNRGGRESRRQ

SEQ ID NO: 251554 - protein, 149 aa, Glycine max
  Clone ID: PAT_MRT3847_69180C.1.pep
SLIQSFVCNIANYAIYIRNKTDRIETFSLSKFRDMHIGQRRIQIQEQVPINDPRQLFNQRMQDSQIEIEIIIKRKSTKRETFLCLALSSLETLALLFMVEEAFRRPTKNESEREERRRSKVNLVFSRSFLSLSVNLLPSPPLLSSSRSR

SEQ ID NO: 251555 - protein, 184 aa, Glycine max
  Clone ID: PAT_MRT3847_69181C.1.pep
FGSSSSRFEKSNVVSPFAMHQQQLAMLAQQQSLLMAGAKSAGGDPKYLASLQQQQSLLMAAAAAKSGGTDSKYLASIQEPGSNIPLQSWLGAGYPMPGAMPMGSQEELQKLMQTVNMNAAHSAGSSVQYPPSSYYAMGQVAPSNGSTPTEASKPQSASPASSNTSKTGNDYDFSSLTQGMFAKH

SEQ ID NO: 251556 - protein, 151 aa, Glycine max
  unsure (1)..(151): unsure at all Xaa locations
  Clone ID: PAT_MRT3847_69182C.1.pep
MKGGKSKTESKRADAKLAVNKKGAATKTRKPAGKGKAAKDPNKPKRPPSAFFVFXEFRKVFNKEHPDNKAVSAVGKAAGAKWKTMSDAEKAPYVAKSEKRKVEYEKNMRAYNKKQAEGPTGGDEEESEKSVSEVNDEDDDEEGSGEEEDDD

SEQ ID NO: 251557 - protein, 481 aa, Glycine max
  Clone ID: PAT_MRT3847_69183C.1.pep
MNSKANVSKELNAKHKKILEGLLKLPENRECADCKAKGPRWASVNLGIFICMQCSGIHRSLGVHISKVRSATLDTWLPEQVAFIQSMGNEKANCFWEAELPPNYDRVGIENFIRAKYDEKRWVPRDGNSKTPSGFREEKSPSHWQRPVERSGYAAVSENKFEERKKIQPSTAISTARINVPAPPTASEQVTPITKPQHVEKVEPVAPQPQAPQPLAETSKQATDTVQNIPPKVDYATDLFNMLSMDGPNENGSEAAGTTTDDNHWAGFQSAAEVSTAEKTSPLKAADSTPGSASGIEDLFKDLHPVTPSLTPEKPQKDVKNDIMSLFEKGNMVSPFSMHQQQLAMLAQQQSLLMASAAKSSGGDPRYPASIQQPRPNVPIQSWPATGYSIPGVMPMGGQGELQKLVQGQTRNMTPAHFAGSSVQYPPSSFYGMGQVPPPVNGMTMGVSKPQSGAPAVSSTTSQSAKDYDFSSLTQGMFMKQ

SEQ ID NO: 251558 - protein, 152 aa, Glycine max
  Clone ID: PAT_MRT3847_69184C.1.pep
MKGGKSKTESKRADPKLAVNKKGAATKARKPAGKGKAAKDPNKPKRPPSAFFVFMEEFRKVFNKEHPENKAVSAVGKAAGAKWKTMSDAEKAPYVAKSEKRKVEYEKNMRAYNKKQAEGPTGGDEEESEKSVSEVNDEDDDEEGSGEEEDDD

SEQ ID NO: 251559 - protein, 370 aa, Glycine max
  Clone ID: PAT_MRT3847_69185C.1.pep
KLAPQRRSQRHASGQMPQGNAAAAAALLDHGGDAGDAIDHRLLPNLLMQGYGAQSTEEKQRLLKLMRNLNFNGESGSEPYTPTTQSLGVAGSDGFYSPEFRGEFGAGLLDLHAMDDTELLSEHVVSEPFEPSPFMPGDTRVFEDDFDPINSKLESGEADTDASISLPMNSTRENNVAKIKVVVRKRPLNKKELAKKEDDVVTVTGNAYLTVHEPKLKVDLTAYVEKHEFCFDAVLDEHVTNDEVYRSTVEPIIPTIFERTKATCFAYGQTGSGKTYTMQPLPLRAAEDLVRQLHQPVYRDQRFKLWLSYFEIYGGKLYDLLSDRKKLCMREDGRQQVCIVGLQEFEVCDVLIVKEFIEKGSAARSTRSTG

SEQ ID NO: 251560 - protein, 149 aa, Glycine max
  unsure (1)..(149): unsure at all Xaa locations
  Clone ID: PAT_MRT3847_69186C.1.pep
KRGKFNTDSNRAYPKLAVNNKGAGTKARIPAGNGKAVKDPNKPNRPASAIFVLMEEFRNVFNKXHPENKALSAVGKAAGAKWKTMSDAEKAPYVAXSEKRKVEYEKNMRAYNKKQAECPTGGDEEXSEKSVSDVNDEHDDEQSDGEEED

SEQ ID NO: 251561 - protein, 84 aa, Glycine max
  Clone ID: PAT_MRT3847_69187C.1.pep
AVLACIDVINDLSLCTLLLYGLMLATIACHTCSGSYSRVNGVQLISSDISASLTSCYAYLCPNLTADSLSESLVLVLHVAQTQQ

SEQ ID NO: 251562 - protein, 85 aa, Glycine max
  Clone ID: PAT_MRT3847_69188C.1.pep
KFWEPKPLLPKSCKSMNFKSETDHLHFFCQRCSIFVSGRHILLILLVSSCTYMLDIVWYGHFLLSYVWCMTSQQNFPNAVSCFLE

SEQ ID NO: 251563 - protein, 95 aa, Glycine max
  unsure (1)..(95): unsure at all Xaa locations
  Clone ID: PAT_MRT3847_69189C.1.pep
MHNLLIQIAKWLCSCAVNRKLCMREDGRQQVCIVGLQEFEVSDVQIVKEFIXKGNAARSTGSTGANEESSRSHAILQLVVKRHNEVKESRRKTDA

SEQ ID NO: 251564 - protein, 301 aa, Glycine max
  Clone ID: PAT_MRT3847_6918C.1.pep
MAKSKNSHALPLLLPTLFFTLLGTSHAGGIAIYWGQNRNEGTLSEACATGKYSHINIAFLNKFGNGKTPEMNLAGHCNPTTNSCTKFSSEIKDCQSKGIKVLLSIGGGIGSYTLASVEDARNVSTFLWNTFLGGKSSSRPLGDAVLDGIDFDIELGSTQNYEHLARFLKAYSGVGNKRVYLGAAPQCPIPDRFLGTALNTGLFDFVWVQFYNNPPCQYANGNINKLVSSWKRWTSTVPAGKIFLGLPAARAAAGSGFVPAEVLTSRILPVIKQSPKYGGVMLWSRFFDVQNGYSTSIVASV

SEQ ID NO: 251565 - protein, 152 aa, Glycine max; identical to SEQ ID NO: 251558
  Clone ID: PAT_MRT3847_69190C.1.pep

SEQ ID NO: 251566 - protein, 147 aa, Glycine max
  Clone ID: PAT_MRT3847_69191C.1.pep
GYGAQSAEEKQRLFKLMRNLNFNGESGSEPYTPTSQNLGGVAVSDGFYSPDFRGDFGAGLLDLHAMDDTELLSEHVISEPFEPSPFMPGGSRGFEDDFNPINRKQERGEADSDASLFLPTNEKDNTRENNVAKIKVVVRKRPLNKKE

SEQ ID NO: 251567 - protein, 361 aa, Glycine max
  unsure (1)..(361): unsure at all Xaa locations
  Clone ID: PAT_MRT3847_69192C.1.pep
KLAPQRRSQRHMGGQMQQSNASATALYDHAGPGSLHNAAGPATDAGDAVMARWLQSAGLQHLASPLASTAIDQRLLPNLLMQGYGAQSAEEKQRLSKLMRNLNFNGESGSEPYTPTSQNLGVVSDGFYSPDFRGDFGAGLLDLHAMDDTELLSEHVISEPFGANSSXKLAPRVFEDDFDPINSKLESGEADTDASISLPMNSTRENNVAKIKVVVRKRPLNKKELAKKEDDVVTVADNAYLTVHEPKLKVDLTAYVEKHEFCFDAVLDEHVTNDEVYRSTVEPIIPTIFEKTKATCFAYGQTGSGKTYTMQPLPLRAAEDLVRQLHRPVYRNQRFKLWLSYFEIYGGKLYDLLSDRRLCMR

SEQ ID NO: 251568 - protein, 838 aa, Glycine max
  unsure (1)..(838): unsure at all Xaa locations
  Clone ID: PAT_MRT3847_69193C.1.pep
KLAPQRRSQRHASGQMPQGNAAAAAALLDHGGDAGDAVMARWLQSAGLQHLASPLASTAIDHRLLPNLLMQGYGAQSTEEKQRLLKLMRNLNFNGESGSEPYTPTTQSLGVAGSDGFYSPDFRGDFGAGLLDLHAMDDTELLSEHVISEPFEPSPFMPGGTRGFVDDFNSISRKQERGEADSDASLFLPTNEKENNTRENNVAKIKVVVRKRPLNKKELAKKEDDIVTVYDNAYLTVHEPKLKVDLTAYVEKHEFCFDAVLDENVTNDEVYRVTVEPIIPTIFEKTKATCFAYGQTGSGKTYTMQPLPLRAAEDLVRQLHRPVYRNQRFKLWLSYFEIYGGKLFDLLSDRKKLCMREDGRQQVCIVGLQEFEVSDVQIVKEFIEKGNAARSTGSTGANEESSRSHAILQLVVKRHSEVKASRRNNNDVNEAXSGLEKECIRALDKRQIHIPFRGSKLTEVLRDSFVGNSKTVMISCISPGAGSCEHTLNTLRYADRVKSLSKSGNPRKDQVPNAVPQTNNKDVSSTSSFPASSGAEDFNDQRQEKTMDMGRKFVEKENSLHSSAAASVDKQPVSYSSNYLSNGRDEKGFPSASVDRERYEVKNSHGDSTSQKMNSYSQSDTDEKVQKVSPPRRKGYSGEKSERPANWMKKDANGSDLFTTSSKQQSTGNYGTVSKDEKSERPANWMKRDANGSDLVTTSSKQSTGSYSTLSKDEKSERPANWIKRDANGSDTFTTSSKQQSTGNYNNITTGSRLNETESSPDGNVSAVLEEEEALIAAHRKRIEDTMEIVREKMKLLAEXHQPGSLIDNYVTKLTLGLLAKQLVLGVFKARLARFHIH

SEQ ID NO: 251569 - protein, 77 aa, Glycine max
  Clone ID: PAT_MRT3847_69194C.1.pep
PIHGALSTNPDWSNEAPSRIGPSQEIDDPPDGAPYPGYNHTSGFRANVANEQLCPRQHRVYAMFLKDLRSISSTWYN

SEQ ID NO: 251570 - protein, 76 aa, Glycine max
  Clone ID: PAT_MRT3847_69195C.1.pep
LLHGYCSSMHLAWSRFMTTVLNFQGLSSSYYLLTLVCAVFVCVGFRKIPKLHWYSLLIYIYIFINLIEEDSQDIYF

SEQ ID NO: 251571 - protein, 171 aa, Glycine max
  Clone ID: PAT_MRT3847_69196C.1.pep
MKQEVVPRSLAPPPPPPPPPLPKFRVFSRPRAEESVTNREIAKFWRQKRIVEEDHLLAAIKAVARLRARTLTEQEYERFELSLKTDNNDYDETEKETVKWIVGTNAYCKTVAKDQEVRIGIKDWWTKSKYAYLNQPAIDSMDPPKKRTTTYVPNFLSYQPKPLYPSAIGVF

SEQ ID NO: 251572 - protein, 185 aa, Glycine max
  Clone ID: PAT_MRT3847_69197C.1.pep
LEADSDSGTPIDTRTCEPATPIYPAGDVSRQDNDPLLFSLSSVELITEPQLNADVAGNTVSGPGLLKLPKRGRENNGSFRGNLHAEFSTSNENEMVSKSVKDLSPVEYGSADCNLLNNSEIVKFDALVDFEPNTYFSLTELLHTDDNSQFEEANASGDLGYLKNSCRLGVPGDCGTVNLASNCGS

SEQ ID NO: 251573 - protein, 60 aa, Glycine max
  Clone ID: PAT_MRT3847_69198C.1.pep
RPIGFSKGLRLPGSAICTLTGFTPMMTGLFLSLGLLIELSPLGMVVGSHEGNEEVKNYET

SEQ ID NO: 251574 - protein, 76 aa, Glycine max
  unsure (1)..(76): unsure at all Xaa locations
  Clone ID: PAT_MRT3847_69199C.1.pep
KGKHAVPDKEDQEKPKKTDARLRQRRDPQYNEAQAQMETNGRKSPLDEAETPKGGKREHKRPQAKKAXTENTRGGT

SEQ ID NO: 251575 - protein, 55 aa, Glycine max
  Clone ID: PAT_MRT3847_6919C.1.pep
PFHHLITTLYIRHQLWCLNSVLGLGLSFPYFREVIKVVQQKKNPRVWYKKKKKKE

SEQ ID NO: 251576 - protein, 103 aa, Glycine max
  Clone ID: PAT_MRT3847_691C.1.pep
GSMRGFPFALGAFLPPPFFWGGAPFFFPPPIHRTHLMTKGDVFPFPLLPSFLQVLSPAIEFSFSSSKCALCPLPGAAFFSQGKHPFPSHPTVIIRLESASNRV

SEQ ID NO: 251577 - protein, 69 aa, Glycine max
  Clone ID: PAT_MRT3847_69200C.1.pep
SYQLPTYCGPSKILFLPAHSLYVIFSTYSSHLVRFSSSSLSFSFHVSIEWSLSFYLPVISISLSSVCNE

SEQ ID NO: 251578 - protein, 99 aa, Glycine max
  unsure (1)..(99): unsure at all Xaa locations
  Clone ID: PAT_MRT3847_69201C.1.pep
RPRVRPHVRSIINRHIFYKTVNDKTITLDVESSDTINNAKAKTQDKEGIPPDQEQLIHARXQLEDGRTLADYNIQKESTVHLALRLRGGIQTCNQTLTG

SEQ ID NO: 251579 - protein, 37 aa, Glycine max
  Clone ID: PAT_MRT3847_69202C.1.pep
EPWPKGMKIPRTLHLQKMANEETKTLGFRGDIMNPPS

SEQ ID NO: 251580 - protein, 94 aa, Glycine max
  Clone ID: PAT_MRT3847_69203C.1.pep
YVIIDMSAVGNIDTSGISMLEEVKKIPERRELHLVLVNPVSEVMKKLNKSKFQNHLGEKWIYLTVEEAVGACNFNLRPSKTNPKKDESEGWNNV

SEQ ID NO: 251581 - protein, 86 aa, Glycine max
  Clone ID: PAT_MRT3847_69204C.1.pep
SVSVPLRVFVAPFEVYVPLQGVVPPAILFGLTVLKGVRFLSLVCYGSCRWVRLLLVVYHECPSFCSSSTSCMGTTVLVVINTTKHI

SEQ ID NO: 251582 - protein, 50 aa, Glycine max
  Clone ID: PAT_MRT3847_69205C.1.pep
SLFGTGYKGVSSVDPQALHQISYDCQPKREGCLDINVGPQHVILTLMCNQ

SEQ ID NO: 251583 - protein, 88 aa, Glycine max
  unsure (1)..(88): unsure at all Xaa locations
  Clone ID: PAT_MRT3847_69206C.1.pep
VSSEPVYRTHKPYXEKMPXETQHVAIVELCVTNTKQGQGNSTTTGSMAINTSGGEGLLLGAMHTPKGALKIKGATQYADRDANGARGS

SEQ ID NO: 251584 - protein, 81 aa, Glycine max
  Clone ID: PAT_MRT3847_69207C.1.pep
LPSNDPSHFDLHYSQFSLQSLDREEKLMDIGSRNFFLCPRKCGGNGDEGSGTTPFGSCSREADKTNKGGAFGWLRFMDFSR

SEQ ID NO: 251585 - protein, 81 aa, Glycine max
  Clone ID: PAT_MRT3847_69208C.1.pep
CQVLFIQVHLMGYLDVLCLTLFSVSSHCDALTARETGVLQPRQHSISTRVSACDLTDRAQHYVRKKTRVDDMHLDHTFIVR

SEQ ID NO: 251586 - protein, 158 aa, Glycine max
  Clone ID: PAT_MRT3847_69209C.1.pep
MMSPNRVSEDRGTPPQHFRHTPFQIIHIVANFMRIWSIYSMYRYFLQTGASVVLFLFACLAPASILFLILQKPWKGRPLSNAQVVPSIINGGITALYLVLWGKGLKSCGPVRAILAEYSGAQLGVLSAVLYGRRVHLRKKIGGIMLMWTSLFPTRPAV

SEQ ID NO: 251587 - protein, 363 aa, Glycine max
  Clone ID: PAT_MRT3847_6920C.1.pep
MGIYLSTPKTEKASEDGENDKLRFGLSSMQGWRASMEDAHAAHPYLDESTSYFGVYDGHGGKAVSKFCAKYLHQQVLKSEAYLAGDLGTSLQKSFLRMDEMMRGQRGWRELAVLGDKIEKLSGMLEGFIWSPRSSEANDRVNDWAFEEGPHSDFTGPNSGSTACVAVIRGNKLVVANAGDSRCVLSRKGQAHNLSKDHKPELEAEKDRILKAGGFIQVGRVNGSLNLARAIGDMEFKQNKYLPVEKQIVTADPDITSVELCDDDEFLVIACDGIWDCMSSQQLVDFIHQQLKTENKLSAVCEKVFDRCLAPTAGGEGCDNMTMILIQFKKPSSSPDASSVTNQPQSSAQPSEADRSSETIESK

SEQ ID NO: 251588 - protein, 119 aa, Glycine max
  unsure (1)..(119): unsure at all Xaa locations
  Clone ID: PAT_MRT3847_69210C.1.pep
MASAVAIASLEVIKNERLVERSGHTQEELTXQLLKIXQQYPYYLKEVHQLGLFIGVELHTIXLIPVSRFILCIXIELYXVLATPTHEAIIRYTPSFCIRVYEIHHGTKVLPVDLQMDLS

SEQ ID NO: 251589 - protein, 102 aa, Glycine max
  Clone ID: PAT_MRT3847_69211C.1.pep
MDETQDHYYSSSLPESSLSHDGGGRSYFNGQINRGTAISGLKKRGHGSRSWIKIGQDGNFQTVTLDKATIMRYCSLPSRDLRLLDPMFIYPSSILGREKAIV

SEQ ID NO: 251590 - protein, 227 aa, Glycine max
  Clone ID: PAT_MRT3847_69212C.1.pep
MDWRRWTKNKKNHHHPSPQLQPRLERLNAKKGINYQSPPSPPSPSSSSSHLDRQTSFRLFGFDGEFDRIFQTLGLSGPEDFSIPTADWEAHKARLSGPTTTPPPHTLPPTSQIQDDDVSVPAAVSSSSPWSSGEHYVGRGSVGRLNLRHGERSVLFTDSDSFTTSHDDDSDVGGERERAGLASNSAAADELVIPFNSSNEWFRQTFASWQKGDVLGNGSFGSTPDRV

SEQ ID NO: 251591 - protein, 75 aa, Glycine max
  Clone ID: PAT_MRT3847_69213C.1.pep
SKGDPRFPAQVRIRVRKLSKALEKNSFGPVLLHFKGPKFLFGLSVPEPVGLWHPCVQVGSAALARLAQGMVVQNR

SEQ ID NO: 251592 - protein, 111 aa, Glycine max
  unsure (1)..(111): unsure at all Xaa locations
  Clone ID: PAT_MRT3847_69214C.1.pep
XXLAXHXKNXVFSXLTVTSXCFQXPXTLXYXNMPCXXTGXXAKXRXRNALHIALFAXXXXXTXXTNSSTSXDSXLXLXHXXXXVSVXXLXRRECLXEXAXXXXXXXXACSN

SEQ ID NO: 251593 - protein, 118 aa, Glycine max
  Clone ID: PAT_MRT3847_69215C.1.pep
MLLRIICSAVFLLPFFVSDSLAKVVSCEGFVKTKIPGIDLSKVQAKLFTNHGNLKYETECNAQNGHFLIPIYNKGHYVIKVSGPTGWIFSEPNSRAVEIADDGTGCSNDIIVELVGFE

SEQ ID NO: 251594 - protein, 151 aa, Glycine max
  unsure (1)..(151): unsure at all Xaa locations
  Clone ID: PAT_MRT3847_69216C.1.pep
KTSSLKAIDESETSPNKHSNQSSYSPRVRFIDKHKPSATTTSTAPSPLTPKDQNMLKLPPPPSPVNTHQPQLPRVLTKPKLQAVVPEQKEFHQNNKFVPKCKKATNEKKFNSRLIKRPPQTSDIIRNKQEEPFIIRPTSPTRASDIXKKPG

SEQ ID NO: 251595 - protein, 261 aa, Glycine max
  Clone ID: PAT_MRT3847_69217C.1.pep
IRLERVFSPPPPNCRRIIVATNIAETSLTVDGVVYVIDSGYVKQRQYNPSSGMYSLDVVQISKVQANQRAGRAGRTRPGKCYRLYPSRIYNDEFLDVTVPEIQRSSLAGSVLYLKSLDLPDIDILKFDFLDPPSSESLQDALKQLFLIDAIDENGAITSIGQKMAELPLEPSLAKTLMEANNYGCLYEALTGAAMLSAETTLLPGQRKTEKKRKHTISNLPDGSGLGDHIQLLQIYECWDQTDFDIGWCKDNGCSARDVVV

SEQ ID NO: 251596 - protein, 87 aa, Glycine max
  Clone ID: PAT_MRT3847_69218C.1.pep
GLPLGRRSRLRALATYIAVVSRLCNLGNGLVMLINAPAHAVIRQAARLVNVYPWAAVFAENWLRCLIAAAVGASVFSTSAPAAVWVA

SEQ ID NO: 251597 - protein, 472 aa, Glycine max
  Clone ID: PAT_MRT3847_69219C.1.pep
MAFFRSVSALSRLRSRVGQQSNLANSVRWLQTPSSSNTDLYSELKELVPEYQERVKKLKKDHGSVELGKITVDMVLGGMRGMTALVWLGSAVDPDEGIRFRGMSIPECQKKLPGAFPGGEPLPEAVLWLLLTGKIPSKAQVDSLSQELRSRATIPDYAYKAIDALPVSAHPMTQFTTGVMALQVQSEFQKAYEGGITKARYWEPTYEDTMNLIARLPAIAAYIYRRKYKDGKIIPLDDSLDYGANYAHMLGFDDPEMLEFMRLYISIHSDHEGGNVSSHTAHLVASPLSDPYLAFAAALNGLAGPLHGLANQEVLRWIRSIVAEFGTPNISTEQLADYINKTLSRGQVVPGYGHGVLRQTDPRYTCQREFALKHLPNDPYFQLVSKIKEVVPPILTKLGKVKNPWPNVDAHSGVLLNYYGLTEENYYTVLFGVSRSFGVGPQLIWDRALGMPLERPKSVTLEKLEQLVAKSS

SEQ ID NO: 251598 - protein, 71 aa, Glycine max
  Clone ID: PAT_MRT3847_6921C.1.pep
VVILTCVCAYDVGFLVETVFNPLKQRPPRVSLGMPPVSLQKYPPPVFFGHLWTNNKNRTSLSAGRPLYPIP

SEQ ID NO: 251599 - protein, 41 aa, Glycine max
  Clone ID: PAT_MRT3847_69220C.1.pep
ASFLVLSITTLSSIKGTHCGNTMSSTSFSNGWKYDVFLNFR

SEQ ID NO: 251600 - protein, 100 aa, Glycine max
  Clone ID: PAT_MRT3847_69221C.1.pep
FFGKAHHLKLKEKKQIFSLAKDNIIPLTNNCFSQDILNTIFPICNWHPIYWSNLKHRPTVDFPKGSDKKLPFYGRWVQRSLNFSSMLGDLEEQIISTLLK

SEQ ID NO: 251601 - protein, 67 aa, Glycine max
  unsure (1)..(67): unsure at all Xaa locations
  Clone ID: PAT_MRT3847_69222C.1.pep
SGGTVDLLNTTTFAPNPDYYSAHYEGFMNEKXILHPQAMDIHPLDSLYAHWTKNRACVTLLLINLDR

SEQ ID NO: 251602 - protein, 145 aa, Glycine max
  Clone ID: PAT_MRT3847_69223C.1.pep
MANLNMLLQQFLHVLLLLLIPVSSQPNQLFYDGFLGSNIMSLRGVAEIESNGILKLTDDSSRVVGQAFYPTGLRFKNSSDGYYTGGDDNSTKQNLTLTSGEPIIAWVDYDASQRVVNVTISESSTKPKRPLLSHHVDLSPISEDL

SEQ ID NO: 251603 - protein, 48 aa, Glycine max
  Clone ID: PAT_MRT3847_69224C.1.pep
YNIFFLILMIDDYYVVLILLRNCDRIFERFILIYLDIYIMITTSIKYL

SEQ ID NO: 251604 - protein, 134 aa, Glycine max
  unsure (1)..(134): unsure at all Xaa locations
  Clone ID: PAT_MRT3847_69225C.1.pep
QGFPITASSSSSLISPFNTKISLSLKHLLHVPNITKNLINVNQFARDKGVFFEFHSNYCAVKSQVTNEVXLKGNVGPDGLYSFSNIQFLLLLPIVNPCNRITSLWHDRLGHPNHHALQLVLQNCKIPTSNKSFD

SEQ ID NO: 251605 - protein, 129 aa, Glycine max
  Clone ID: PAT_MRT3847_69226C.1.pep
HASGFLGLSDNNLTGNLSPNLSTLPCLNALYVSGNNLTGELKFSVEFYGKMRTRFGAWNNPSLCYPLGVISTSHVPYGVKPCQQEIKLLKSNTTDGDVKRTFHSIASLSHTPNSFWWIFLFFLISYLGL

SEQ ID NO: 251606 - protein, 70 aa, Glycine max
  unsure (1)..(70): unsure at all Xaa locations
  Clone ID: PAT_MRT3847_69227C.1.pep
MNSSLQCLAHTPKLVDYFLEDYIREINHDNPLGMNGEIALALXDLLGKLWAPEASXVSPRIFQIKTCLDC

SEQ ID NO: 251607 - protein, 78 aa, Glycine max
  Clone ID: PAT_MRT3847_69228C.1.pep
CFLVVVSLDVSLLSLDVIIIKQFGSRLCYNTNVCLVRNITHLTIVVILKKENTVRKNSNCNFSHILNPRNMEVVIKFY

SEQ ID NO: 251608 - protein, 113 aa, Glycine max
  unsure (1)..(113): unsure at all Xaa locations
  Clone ID: PAT_MRT3847_69229C.1.pep
FAYKSELHLVAAVYNFAHQLVMCNGLPFSLLVFSXHNVRDPHXFMVSLVAGDGTKIXVLAVCHLDTSGMNHYMLYALMGVDLGTNCVCYFFGSKLILWAXNLSMALLYQTNVV

SEQ ID NO: 251609 - protein, 277 aa, Glycine max
  unsure (1)..(277): unsure at all Xaa locations
  Clone ID: PAT_MRT3847_6922C.1.pep
FGTRQRWLPESSVVILRAWLFEHFLHPYPKDSDKIMLAKQTGLTRSQVSNWFINARVRLWKPMIEEMYKQDNCIAGMDSNSSSENVSKVTKSYVKTSNDVGDDSQHCQSPIVADTNHSGGQAKDLRHDQALDTEMMASIGLASPITSIYGAETEHRXVMQRRNLDDCGLFSNDTVVQSDGATNKRFVSVGPTCQMPESERFKSGSGVSLTLGLQHCEGGNFLPGKTHLSLVSMREDDISKATAASTVGVETTELECIGAGNQQQRLNSPHMLHDFEV

SEQ ID NO: 251610 - protein, 79 aa, Glycine max
  Clone ID: PAT_MRT3847_69230C.1.pep
AESYAMKSEFLTQNCTYRNRLIAQAILSIARVVFPQMWVRLVCSTCSLHVQSALLSVASVNETQSLVDHLHSRASRSCR

SEQ ID NO: 251611 - protein, 66 aa, Glycine max
  Clone ID: PAT_MRT3847_69231C.1.pep
DPRVTYGLLRKTTEGYNHQTYDIDSFILTYDIDSFILSRLRFKFWYIMWFRKKKKKKNRINYIKIF

SEQ ID NO: 251612 - protein, 94 aa, Glycine max
  Clone ID: PAT_MRT3847_69232C.1.pep
KWNGGEKPPQFEAFPIKTQILPHQKKKPLFFSFFFPPLKEGLTPKLKPRPFFKKPRGDKPQRKKKNPVPPFFYPTFYPQLTQQRGAQTHPIWGT

SEQ ID NO: 251613 - protein, 112 aa, Glycine max
  unsure (1)..(112): unsure at all Xaa locations
  Clone ID: PAT_MRT3847_69233C.1.pep
LQAEVTLMQPTKGGLAIRNLNFTHCFFKALGWKPVAVKLICSFKPNLKDLVKKCVDATKFAGLALATXVLVVFEAGAKGVPKRLTFDKFQSRTYWKVKGPGPVIKGQTLEGG

SEQ ID NO: 251614 - protein, 54 aa, Glycine max
  Clone ID: PAT_MRT3847_69234C.1.pep
EYEVKVLLEEGKMVRKLISKEGANGNKESKEMSLVKDRQSNIAQLAWIWGWTTR

SEQ ID NO: 251615 - protein, 64 aa, Glycine max
  Clone ID: PAT_MRT3847_69235C.1.pep
FPSPPYLIKKSYPYPYLNPLLLTTRLSPGDEYKPVTLTTKWDHGPYLFLNLLNIVHSRKRLAPT

SEQ ID NO: 251616 - protein, 81 aa, Glycine max
  Clone ID: PAT_MRT3847_69236C.1.pep
FLFVANKGTYATVLVLIRCLMDPFDDILPTAPAARTRLGAKFIPKANRNSFLEREYQHQNIPPHLKMEFWEMNVKMQLLQL

SEQ ID NO: 251617 - protein, 49 aa, Glycine max
  Clone ID: PAT_MRT3847_69237C.1.pep
WALDEFKVLLFSPLKCSRKNGELSFQSLKLPLFPEMIFKNQLVSSGNFS

SEQ ID NO: 251618 - protein, 102 aa, Glycine max
  unsure (1)..(102): unsure at all Xaa locations
  Clone ID: PAT_MRT3847_69238C.1.pep
PAKAXTAXXAXKXAPGXXEKXXXRGXPXXXRNPXXXRGXAXXGKKXKXDKPXGXXXGXXXREGXXAXGRKGKGKGXXQXXDKXXXXXXXXRXXXDTKDXXXT

SEQ ID NO: 251619 - protein, 48 aa, Glycine max
  Clone ID: PAT_MRT3847_69239C.1.pep
FQFTTNSILLQMTQMRLVQSLTSKFKFMPHIIRYDPILWLICSLIFTS

SEQ ID NO: 251620 - protein, 143 aa, Glycine max
  unsure (1)..(143): unsure at all Xaa locations
  Clone ID: PAT_MRT3847_6923C.1.pep
NLNPRVSSSQSKKRKAHVTATSSGRRMIMSAPLSGELRYKENARPIPIQKEEEVQVMRGTYKGREGNETQVYQREREIQSERINRENVNGSTVDIEIHHSEGAMTKLKXDKDRKVILDRKVKDRADADKEKDTKLAHEDIMQN

SEQ ID NO: 251621 - protein, 61 aa, Glycine max
  Clone ID: PAT_MRT3847_69240C.1.pep
SNMFCSIHITVPACHHIMYKPRTLPYQITVRHVWIALSISVVQSVPASVHLCSVRSKSDVY

SEQ ID NO: 251622 - protein, 74 aa, Glycine max
  Clone ID: PAT_MRT3847_69241C.1.pep
VEEEAYEEVEEEAPKDEAEIEVVCLFPQQLLLLVLFYFSYVFVSKCYDTFLLVSLAFVLPQKRCSYRKLIRFNI

SEQ ID NO: 251623 - protein, 256 aa, Glycine max
  Clone ID: PAT_MRT3847_69242C.1.pep
RVHLSKHKGPIFSLKWNKKGDYLLTGSCDQTAIVWDVKAEEWKQQFEFHSGPTLDVDWRNNVSFATSSTDNMIYVCKIGENLPIRTFVGHQSEVNCIKWDPTGSLLASCSDDMTAKIWSMKQDKYLHEFREHSKEIYTIRWSPTGPGTNNPNKNLVLASASFDSTVKLWDVELGKLLYSLNGHRDRVYSVAFSPNGEYIASGSPDRSMLIWSLKEGKIVKTYTGDGGIFEVCWNKEGDKIAACFANNTVCVLDFRM

SEQ ID NO: 251624 - protein, 89 aa, Glycine max
  Clone ID: PAT_MRT3847_69243C.1.pep
LGSSHGLLFGQCDFLRGGFHLHFGLRLSSGLHFLRRGRKSFVPGSSFLCALCSFGLSYRLWGFSPAMEAVSVMIRFTFALRMEFNLIGY

SEQ ID NO: 251625 - protein, 49 aa, Glycine max
  Clone ID: PAT_MRT3847_69244C.1.pep
RVSGSLAILEEMEWMQGPKRFDTKKRSRRHSKQVRRSGRRVHSTPCALK

SEQ ID NO: 251626 - protein, 126 aa, Glycine max
  unsure (1)..(126): unsure at all Xaa locations
  Clone ID: PAT_MRT3847_69245C.1.pep
TIITKAVEGARTCKKWSIKFVEKATSEKPLESEPQAFDPKSIPDSVKNSXDAFYRISRPHTGIGSALSIISVSLLAAEKISDISPLFFTGAEDAVVAALYMNTYIDGKNQLPDVERDKISKPHLPL

SEQ ID NO: 251627 - protein, 156 aa, Glycine max
  Clone ID: PAT_MRT3847_69246C.1.pep
SFGRAHCFFILDRLYIFSGIGRPDPTLDTTYLQQLRQICPQGGPNNLLNFDPTTPDTLDKNYYSNLKVKKGLLQSDQELFSTPGADTISIVNKFSSDQIAFFKSFSASMIKMGNIGVLTGKKGEIRKQCNFVNKKSAELDIGIVASESEEGVVSSI

SEQ ID NO: 251628 - protein, 353 aa, Glycine max
  unsure (1)..(353): unsure at all Xaa locations
  Clone ID: PAT_MRT3847_69247C.1.pep
MGCFHLTVTSLCFVVVVVGVLPLSLDAQLDPSFYRDTCPKVHSIVREVVRNVSKKDPRMLASLIRLHFHDCFVQGCDASVLLNNTATIESEQQALPNNNSLRGLDVVNDIKTAVEQACPGVVSCADILTLASEISSILGGGPDWKVPLGRRDXLTANRTLANQNLPAPFFNLTQPKAAFAVQGLDTTDLVALSGAHSFGRVRCLFILDRLYNFSGTGRPDPTLDTTYLKQLRQICPQGGPPNNLVNFDPTTPDTLDKNYYSNLQVKKGLLQSDQELFSTPGADTISIVNKFSSDQIAFFKSFSASMIKMGNIGVLTGKKGEIRKQCNFVNKKSAELDIGSVASESEEGLVSSI

SEQ ID NO: 251629 - protein, 66 aa, Glycine max
  Clone ID: PAT_MRT3847_69248C.1.pep
VYSPSDFHFGKHHWFGAAYGRQAALYGFRVRQFSTICYWHILVDTNRVFIVGLFYYTFVFTLSLNR

SEQ ID NO: 251630 - protein, 43 aa, Glycine max
  Clone ID: PAT_MRT3847_69249C.1.pep
HASAHASADAWVHFHFKMGYLYFLRVLFALCLSSPNNVWLAQN

SEQ ID NO: 251631 - protein, 81 aa, Glycine max
  Clone ID: PAT_MRT3847_6924C.1.pep
ITKSCPTQISTAVNFIGCFLPIPRLHFFLKTLINKNIFSRKSVPINKYILKSLTNSPGYGNQGHKNITEFLAPDGEGVINT

SEQ ID NO: 251632 - protein, 121 aa, Glycine max
  Clone ID: PAT_MRT3847_69250C.1.pep
KSKSRGGCTTEHPSEQQDYATPKKSKSRGGWTSEHPEEFFPPLSSRSKGYRSPGTPSSRNDRIHSFGGGSHTPSYKSSKVWNGHTGTSMSQGSARSNHHRYSASRFGNSSSDGHGRNYNWW

SEQ ID NO: 251633 - protein, 51 aa, Glycine max
  Clone ID: PAT_MRT3847_69251C.1.pep
RVKASEAGFGNEMYKVLTAAALSIMLNRSLIIGQTRHIGFFSSLSNFSFHF

SEQ ID NO: 251634 - protein, 94 aa, Glycine max
  unsure (1)..(94): unsure at all Xaa locations
  Clone ID: PAT_MRT3847_69252C.1.pep
HLVXTKXXDHPXVAFXXXXXXXXSGXXPSXSXXXXLTLXXXLXXXXLKDHXXAXXXXLDXXISIXKGXXGXXXXXXWTXIGXRXELXDYXXVXK

SEQ ID NO: 251635 - protein, 141 aa, Glycine max
  Clone ID: PAT_MRT3847_69253C.1.pep
MFQPNNPKMDSSTTFLNDLPPLKRLRLLQQQQQQKEEHQYYDSSSPLPAKKRKESRTLSPPSPTTTKTVYNYSLPAKKRVWALQPQSPPSNDVVPAFDLNVEYTPSPNNHGDLEEDHSEDEDGVLCCVCQSTDGDPADPIV

SEQ ID NO: 251636 - protein, 76 aa, Glycine max
  Clone ID: PAT_MRT3847_69254C.1.pep
VTTALLAMVYGARSLGLATEALPASHKAILPDHSMWISSPSTSVMSRAVVFWVRLSNVGVSHHCTSEKVSILKHSW

SEQ ID NO: 251637 - protein, 159 aa, Glycine max
  unsure (1)..(159): unsure at all Xaa locations
  Clone ID: PAT_MRT3847_69255C.1.pep
LFWFSHAFFRSLSLSFFSRVPFGLVSVRAVILLAFTEFSLELQKSPSEVVIIVRVLISPVSHLDVFXASYSILSLFSSLSSSLEEFIYGIVDDDGVYGVYWILPALLKLALDDVLDSLLPLVSLVIRQRLGLDGXKVSXSLGDIAGILYFSRVLSRKHE

SEQ ID NO: 251638 - protein, 54 aa, Glycine max
  unsure (1)..(54): unsure at all Xaa locations
  Clone ID: PAT_MRT3847_69256C.1.pep
FSSRFSIDQRSLQNGFSVLKVSRALLAIVVLSCLTRDELGKKPACHLSTKKKXY

SEQ ID NO: 251639 - protein, 54 aa, Glycine max
  Clone ID: PAT_MRT3847_69257C.1.pep
IARISTMPLIIFPFFVSKPIILNCVTPSKVVITFMDLIWHNFFNYKCPSVVAAV

SEQ ID NO: 251640 - protein, 84 aa, Glycine max
  Clone ID: PAT_MRT3847_69258C.1.pep
PSSNLHPFVITSTMAPVTKQSFLLSALLLTASAQASWWHNDDARMLPRGTLPASRSGCATMASPLLPRSPASSSLSLCKPIGTQ

SEQ ID NO: 251641 - protein, 79 aa, Glycine max
  Clone ID: PAT_MRT3847_69259C.1.pep
YAFLFACSFEFRLRIALGPGGDLMLTSRIRNTNSEGKPFSFTFAYHTYFSVSDIRLVLEICLFHTLSYFSNDFLFLFIN

SEQ ID NO: 251642 - protein, 63 aa, Glycine max
  Clone ID: PAT_MRT3847_6925C.1.pep
FQVFQTKKILSLNTSKRYHVVVLLMYHVVCVFWPAALIDYLISWLMWLADGNIRLLDTCLMAE

SEQ ID NO: 251643 - protein, 65 aa, Glycine max
  Clone ID: PAT_MRT3847_69260C.1.pep
MPLHSPKTFFMGPPNLIPGPVVYNGGSGKTPGFPHLNPLEPIPFFPGWLNWKRPRPIPLPKNWPP

SEQ ID NO: 251644 - protein, 44 aa, Glycine max
  Clone ID: PAT_MRT3847_69261C.1.pep
VQCQGTTTSSRDTNVKWSDRDFDGEYSYSRVLLMKNLVMELVWI

SEQ ID NO: 251645 - protein, 69 aa, Glycine max
  Clone ID: PAT_MRT3847_69262C.1.pep
MGSGKDGPWLWDTWVFWGDPKGWGSQFGEWWLKKPKDRLTPEPQKRTPPGEIFCWTSGLIFGKGKGIIG

SEQ ID NO: 251646 - protein, 85 aa, Glycine max
  Clone ID: PAT_MRT3847_69263C.1.pep
FLLLSSALPPPPQTTKNPEDARPPLASLLEAGGGGKKNTPAGTQKKKKNALGREAPPPPKTTEWGTLKNGAGDGDPNPIKRPALG

SEQ ID NO: 251647 - protein, 139 aa, Glycine max
  unsure (1)..(139): unsure at all Xaa locations
  Clone ID: PAT_MRT3847_69264C.1.pep
FNRGGRGPXXSDDTRGYQILGVSKNPSXEDLXKGYKKAALKNHPXRGGDPEKFKEVGRAYEVLSDPEXREIYDQDGENALKEGXGGGGGHXPFEIFSSFFGGGXPFXWGGRTXXXRXRRGENLGHPLKGSLEDLYLGTS

SEQ ID NO: 251648 - protein, 69 aa, Glycine max
  Clone ID: PAT_MRT3847_69265C.1.pep
TVLIKHTISSNRPSHPSTHPATIQPITHQHPLSTRKICIKREQTPEKFNNQILLENTKTNILLIIINVS

SEQ ID NO: 251649 - protein, 39 aa, Glycine max
  Clone ID: PAT_MRT3847_69266C.1.pep
KLKPLYWDKGRAAPNRTLVWDKLRSSSFELDEEMIETLF

SEQ ID NO: 251650 - protein, 38 aa, Glycine max
  Clone ID: PAT_MRT3847_69267C.1.pep
NAFSPAVMLIHSSRQASVQCRLSLEVDEIHGSRLLVIM

SEQ ID NO: 251651 - protein, 54 aa, Glycine max
  Clone ID: PAT_MRT3847_69268C.1.pep
IRHLTRLGIRNHSLGLRKNVNLGAEGSRIDRLRLGMVSVEPYKEPQHFMREMDP

SEQ ID NO: 251652 - protein, 82 aa, Glycine max
  unsure (1)..(82): unsure at all Xaa locations
  Clone ID: PAT_MRT3847_69269C.1.pep
RALYLXKLQGSSGSLSFPLGXENQKEEFPRLPPVKIKSEDKPFTFNWGEKFECDGLAVXLAGADNTLLIGSYLDVPIGQEIK

SEQ ID NO: 251653 - protein, 48 aa, Glycine max
  Clone ID: PAT_MRT3847_6926C.1.pep
GVTQVGESSKVKARACFVKRPRAVLSSPENYGLIGTINTCNRRDLGLT

SEQ ID NO: 251654 - protein, 42 aa, Glycine max
  Clone ID: PAT_MRT3847_69270C.1.pep
GAASINRKKTALSKLCDIWHAKTRFNRGFIYNLRGSFAPGRS

SEQ ID NO: 251655 - protein, 70 aa, Glycine max
  Clone ID: PAT_MRT3847_69271C.1.pep
RLAWDDELLSWDLSKDADPLGSYARDMSACHSPRTAPPMRRRTSYGGCRTMKASPVAQTHSASLWTGRYC

SEQ ID NO: 251656 - protein, 174 aa, Glycine max
  Clone ID: PAT_MRT3847_69272C.1.pep
MKLMSSSRRNHKCSIYLQMEFLMQVPPTYPYPDPYYRSIFAPYDAQTYPPQPYGGNPMVHLQLMGIQQAGVPLPTDTVEEPVFVNAKQYHGILRRRQSRAKAESEKKAARNRKPYLHESRHLHALRRARGCGGRFLNSKKDENQQDEVASTDESQSTINLNSDKNELAPSDRTS

SEQ ID NO: 251657 - protein, 126 aa, Glycine max
  Clone ID: PAT_MRT3847_69273C.1.pep
RRGSHALTVSSYSFFNLDETSARNKLHPSHIDGPEGNFVADMGTNQTKEHCQISTAPKYFQLFIRYLTQTPCAACLELITTANFISSLIRAKKKTLSFLLLKIHQQYIHAHDPLLSSSRRTCGRTR

SEQ ID NO: 251658 - protein, 85 aa, Glycine max
  Clone ID: PAT_MRT3847_69274C.1.pep
AVFSVFGYLDRAQGPNYVHGIGRYRSCPRFGSTVAATLWRAALFSFFHLGRLTADVEFETHILLERLVAEVRPHRLTGCCLRRMF

SEQ ID NO: 251659 - protein, 115 aa, Glycine max
  Clone ID: PAT_MRT3847_69275C.1.pep
APIVGTPNHPSMQGIHLFGGGTVGPIEGMSQVEALNNINTNRNSLPGFSSGHGRKLCDLSQQLHKLGGYLPEHWNSVQFPDLEVGHDYSFLNPDYDFGLYEEQKLLDICFPHVGS

SEQ ID NO: 251660 - protein, 56 aa, Glycine max
  Clone ID: PAT_MRT3847_69276C.1.pep
NNKVAADVSHINTGSEVVGYQGDEELGKALEGADVVIIPAGVPRKPGMTRDDLFNI

SEQ ID NO: 251661 - protein, 76 aa, Glycine max
  Clone ID: PAT_MRT3847_69277C.1.pep
EQRMDLNGLALNKQHAMRRAQLPHSMGTCWGVNKAELATSCSLFRVHSTVKQPPWLASRGFARPYRRVLALSKDSL

SEQ ID NO: 251662 - protein, 188 aa, Glycine max
  Clone ID: PAT_MRT3847_69278C.1.pep
QFLLREYALVNSREERKNLYSVLFDQVLHQVNENCIATGINEYSDDEIQPLASLLAQTNAAEAFHISVKLGVEGIGELLRRSIASALSRYPNSERLNMLLDFVTEKFDSLISSFTHLDGEFSHMIQITKTHKSLENVELIALRNDIDLQAKHSWATLHSLLHSERIAYRQNGYIWLGDLLISEISGES

SEQ ID NO: 251663 - protein, 66 aa, Glycine max
  Clone ID: PAT_MRT3847_69279C.1.pep
LWVDLCACLCACMVVRRCIEGKANDGDEGRAVLHVLLYLLLLVFLPNDTVLTIFPSPSIAIVAAVL

SEQ ID NO: 251664 - protein, 50 aa, Glycine max
  Clone ID: PAT_MRT3847_6927C.1.pep
GIGIWSNLLKTHYTWVLIDEWQITAYYGRLFSTIRFKQEKDRELSLYAIF

SEQ ID NO: 251665 - protein, 153 aa, Glycine max
  unsure (1)..(153): unsure at all Xaa locations
  Clone ID: PAT_MRT3847_69280C.1.pep
MKRKRKKKRPRNNVDLDDPSRLQRRTRYLLIKMKLKQNLIDAYSGEGWKGQSREXDXXXXXXXXXXXRXXXRLQRARKQILKCRLGIRDAIRQLDSLGSLSSIEDSAIALDGSVCHEHVRKYQHFEYFIAFKCFLYSFHFNTCEPASHLILFC

SEQ ID NO: 251666 - protein, 134 aa, Glycine max
  unsure (1)..(134): unsure at all Xaa locations
  Clone ID: PAT_MRT3847_69281C.1.pep
VPIITPNELTEADGFLFGFPTRFGSMAAQFKAFFDATGGLWRTQALAGKAAGFFYSTSSQGGGQETTPLTSITQLVHHGLIFVPIGYTFGGGMFELEKVKGGSPYGAGTHAGXELELXQGKYFAGIAKKLKGSQ

SEQ ID NO: 251667 - protein, 203 aa, Glycine max
  Clone ID: PAT_MRT3847_69282C.1.pep
MATKVYIVYYSTYGHVEKLAREIEKGAASVEGVEAKLWQVPETLPEEVLAKLGAPPKSDVPIITPNELPEADGFLFGFPTRFGSMAAQFKAFFDATGGLWRTQALAGKAAGFFYSTSSQGGGQETTPLTSITQLVHHGLIFVPIGYTFGGGMFELEKVKGGSPYGAGTYAGDGSRQPSELELAQAFHQGKYFAGIAKKLKGSQ

SEQ ID NO: 251668 - protein, 198 aa, Glycine max
  Clone ID: PAT_MRT3847_69283C.1.pep
MFSYYSTYGHVEKLAREIEKGAASVEGVEAKLWQVPETLPEEVLAKLGAPPKSDVPIITPNELTEADGFLFGFPTRFGSMAAQFKAFFDATGGLWRTQSLAGKPAGFFYSTSSQGGGQETTPLTSITQLVHHGLIFVPIGYTFGGGMFEMEKVKGGSPYGAGTYAGDGSRQPSELELAQAFHQGKYFAGIAKKLKGSQ

SEQ ID NO: 251669 - protein, 58 aa, Glycine max
  unsure (1)..(58): unsure at all Xaa locations
  Clone ID: PAT_MRT3847_69284C.1.pep
HIVSRYQFSLGFYKTDQNAGPRCNYYTREVLFIAEMRNWYNLELNVFILAYSIXYVTI

SEQ ID NO: 251670 - protein, 67 aa, Glycine max
  unsure (1)..(67): unsure at all Xaa locations
  Clone ID: PAT_MRT3847_69285C.1.pep
PXYETXYXSVMXNNKXKYMNETSFGFDGKPDKMNFNTSMTQRMSKXXLRYKLSNIDKTTIMLIYRTQ

SEQ ID NO: 251671 - protein, 78 aa, Glycine max
  unsure (1)..(78): unsure at all Xaa locations
  Clone ID: PAT_MRT3847_69286C.1.pep
DARRSFFFFLAFCPAHTGXINTKGGFRKKRNPPPTKGRXPQNIRESYLKINNNLPLGHTPRHSQTTQTPSTLSQTLET

SEQ ID NO: 251672 - protein, 84 aa, Glycine max
  Clone ID: PAT_MRT3847_69287C.1.pep
AFRALAGREMSVLHIHEPQNMRKNAIAAMHTQPRVHINGAEGRGCSGPNGFCYGVTGGNTVGPEMLQKCSDNNRHGPRQGQVPG

SEQ ID NO: 251673 - protein, 92 aa, Glycine max
  unsure (1)..(92): unsure at all Xaa locations
  Clone ID: PAT_MRT3847_69288C.1.pep
VLSVRXRKWQXLNFEXHFLYTITLLLFIFNLXXSSRTYGASTPVLXXTPXXFKSKVLNXNGXXHXXXXXXWCXNCQGXDSYMGEGXXCXXXC

SEQ ID NO: 251674 - protein, 92 aa, Glycine max
  unsure (1)..(92): unsure at all Xaa locations
  Clone ID: PAT_MRT3847_69289C.1.pep
GSSMEAGKRFAVKTLKKKQEKDNKCTSILVTHQVKGLPLLFIFLMVVFKKQHFFMLYTXCVFSGCWLELTARFSLVRFLVLKFSRSFYGVII

SEQ ID NO: 251675 - protein, 68 aa, Glycine max
  Clone ID: PAT_MRT3847_6928C.1.pep
FSPNFESMGNFYFFGAVPFSIIFTSTFKLPFSTIKIPDYVEGIKKMGLVAVATGLEVPKVLTVSGNRV

SEQ ID NO: 251676 - protein, 66 aa, Glycine max
  Clone ID: PAT_MRT3847_69290C.1.pep
GLSDCVASCRGGILELKVSRNAILVLAFLASSGQPGFEIFVGHKLSCRGVNYLMLILQLLVSEMDL

SEQ ID NO: 251677 - protein, 58 aa, Glycine max
  Clone ID: PAT_MRT3847_69291C.1.pep
KRSRHRKTTPRAGMDSSSRHTAMSGTRPERLNEHGAEVRGCPWAGGKQLGKPFSIPSS

SEQ ID NO: 251678 - protein, 112 aa, Glycine max
  unsure (1)..(112): unsure at all Xaa locations
  Clone ID: PAT_MRT3847_69292C.1.pep
LFALSLSISLSLSRLAPLSFFIVAVLVLSFTCCLFSVSSCPCLVLPVRGAVTASVNNAALGYPTLFTGACTPPGHYNVALVVXPHPPPARLAAFSALCRPVNKSILSYATTA

SEQ ID NO: 251679 - protein, 48 aa, Glycine max
  Clone ID: PAT_MRT3847_69293C.1.pep
AAFKDGLRDDHSNPIVGQLLESCCLVFREILQLSFHVFQVAMSWVKVT

SEQ ID NO: 251680 - protein, 105 aa, Glycine max
  Clone ID: PAT_MRT3847_69294C.1.pep
PLVVLEGPTGNRGTPQGGLGTTRELPKGNLEETKVINDEGVQRLGDHRSTGVTGRKLKPVTMAHLIRARSNMGGARVTQRLTQRKFGGPTAITSWPAGNLRRQAY

SEQ ID NO: 251681 - protein, 90 aa, Glycine max
  Clone ID: PAT_MRT3847_69295C.1.pep
LPFLLSYSLLVPILHPSLKIMSFTSKVIALWCKKHGNDDGVDVYDAPAATACIEGNVCNWHGDFVSFVPVALVEGDDDDDDGGYDYAPAA

SEQ ID NO: 251682 - protein, 70 aa, Glycine max
  Clone ID: PAT_MRT3847_69296C.1.pep
TVHTYPPLSKSPLLPLCTSHSSLPHRTQMLATHVAEESLSLQQVLQIVQRGATVGWHHRPRRRRRHQLRT

SEQ ID NO: 251683 - protein, 37 aa, Glycine max
  Clone ID: PAT_MRT3847_69297C.1.pep
LHVPNMLRLKYGAWILLVFTYWMPFKTKKKKRGRASL

SEQ ID NO: 251684 - protein, 35 aa, Glycine max
  Clone ID: PAT_MRT3847_69298C.1.pep
NFVPPKHLSLNCLRLKLIYDPPPRKTWFKTKSLKV

SEQ ID NO: 251685 - protein, 95 aa, Glycine max
  Clone ID: PAT_MRT3847_69299C.1.pep
PTIFPRSSKCYKSGRIKRLAGTAVIPASLDAQTNVESMEIVLFEENGIYARFMVAKRTTFCPTPQRKLAMLVYTHGGAFCSRTPFSPNYHNLLNK

SEQ ID NO: 251686 - protein, 73 aa, Glycine max
  Clone ID: PAT_MRT3847_6929C.1.pep
RFDCPIKDYITNYMQLIKSSPIRDSSSKTNYCKDNVHSSHFTQVFRRFTSFTSLKCFRIKSFSLNFSMQSVLP

SEQ ID NO: 251687 - protein, 88 aa, Glycine max
  Clone ID: PAT_MRT3847_692C.1.pep
NDNNFIQKFKKNQSNSLNESSSFEKRHFDISSTVSVVSLVPSLFVFNWCWFHTINRKSCSSLDTHGLCSADKTASFNSAAKTFLWLND

SEQ ID NO: 251688 - protein, 232 aa, Glycine max
  Clone ID: PAT_MRT3847_69300C.1.pep
RSAIKLASWVGMLTSLRILTKFFVGKERGFRLEELGPLKLKGDLDIKHLGNVKSVRDSKEANMPSKQLNKLRLSWDKNEDSELQENVEEILEVLQPDTQQLWRLDVEEYKGTHFPKWMSSPSLKYLILLNLLNGENCFQLPPLGKLPSLKILGIMKNNHVEYLYEESYNGEVVFGALEVLTIRHLSNFKRLSREDGKSMFPRLSNLEIDECPKFLGDEELLKGLGVSLGIQL

SEQ ID NO: 251689 - protein, 82 aa, Glycine max
  Clone ID: PAT_MRT3847_69301C.1.pep
GEVEEDVVKPILAVDQVALLMVEEWLVLLVVEEWLVLVMVEEQLVLFVEVLLWLTLGRHRMLLPRQAQKTWMLIHVLENLIC

SEQ ID NO: 251690 - protein, 54 aa, Glycine max
  Clone ID: PAT_MRT3847_69302C.1.pep
YKITFCGSSLSAKFVSQSKLPNTTSSSRAEAPSSTPPELDRYVEVHKKVDDAGG

SEQ ID NO: 251691 - protein, 240 aa, Glycine max
  Clone ID: PAT_MRT3847_69303C.1.pep
GLVGLKRVHVSFYDFLRDNINEFGWDNKHAGLNVLVSKEVIEGNMYSLESYKSSAESFICTLIPESPSSHIEYTPGGLVYRPGGSNLQHATSIAFLELVYANYLTHASQAINCGNVYVSAQTLRQHAKRQVDYILGDNPMGLSYMVGYSNYYPQRIHHRGSSLPSIKDHPQFIACKEGSIYYNSTNPNPNVLVGAIVGGPDENDDYVDDRVDFRKSEPTTYINAPFVGVLAYFAANPNFS

SEQ ID NO: 251692 - protein, 78 aa, Glycine max
  Clone ID: PAT_MRT3847_69304C.1.pep
TKLSFHWFCLINSNKTYKKKKPEWIQSSNIGNNNSLKLLTSCQEVRYDILLAFTAINLTKLRSQLPSLKHMRLSSAFI

SEQ ID NO: 251693 - protein, 75 aa, Glycine max
  unsure (1)..(75): unsure at all Xaa locations
  Clone ID: PAT_MRT3847_69305C.1.pep
KLVKNGSPMAGCDIHSVGMHLSYCVTXRPXLTNFDIHRSSAGVSATYLGENVCTGLEVEDQIAEGTRLVLLVMTG

SEQ ID NO: 251694 - protein, 33 aa, Glycine max
  Clone ID: PAT_MRT3847_69306C.1.pep
FKFSVCYSLIFHSNVRLTTHMNYITSSITRYMY

SEQ ID NO: 251695 - protein, 77 aa, Glycine max
  Clone ID: PAT_MRT3847_69307C.1.pep
KYELHHTHKSLQGYNYYKGVPSMMMTCASNIAQMQSLLLGSGVGDFGWGGVPPLNTDPHSESYSLTNVPQSEPTKGR

SEQ ID NO: 251696 - protein, 72 aa, Glycine max
  Clone ID: PAT_MRT3847_69308C.1.pep
PRVRCDRILWLGKGIKQLQYGRAEIKLSDHRPVSSAFLVEVEVFDHRKLKRALNFTRAAVHPEIFLDEDGEI

SEQ ID NO: 251697 - protein, 49 aa, Glycine max
  Clone ID: PAT_MRT3847_69309C.1.pep
NENAMQFYHSNHPYKSSVLFVRMMSVCTQAIPLQGEKENVIWMLYALWC

SEQ ID NO: 251698 - protein, 244 aa, Glycine max
  Clone ID: PAT_MRT3847_6930C.1.pep
MDQPLDDKTLIKEANWAEQIAHGKPSGIDTQTIVSNKPVWFKQGQAEKLKSLKLNGYMVVIDTGVKGSTKQAVEDVHVLCESDEYMKYIEHIGTLVHSASESIEQHDFHHLADIFNACQEDLRHLTVSHDKIEKLLQIGKEHGAIAGKLTGGGRGGSMLLLAENLKTAKTIVAAVEKAGAAHTWIEHLGVNAKEKEKIQNYMNIVRDLAGNRLHARIESENYVPTAAGLASSASAYAALAAACN

SEQ ID NO: 251699 - protein, 46 aa, Glycine max
  unsure (1)..(46): unsure at all Xaa locations
  Clone ID: PAT_MRT3847_69310C.1.pep
NAPTXXXXRHXSXLXAXXTRNLAILHTHHXNNXFIXLXFFVXIKNT

SEQ ID NO: 251700 - protein, 113 aa, Glycine max
  Clone ID: PAT_MRT3847_69311C.1.pep
MTLGSGGSSVVVPRNFRLLEELERGEKGIGDGTVSYGMDDGDDIYMRSWTGTIIGPHNTVHEGRIYQLKLFCDKDYPEKPPSVRFHSRINMTCVNHETGVVSFIIFHMLLFYK

SEQ ID NO: 251701 - protein, 142 aa, Glycine max
  unsure (1)..(142): unsure at all Xaa locations
  Clone ID: PAT_MRT3847_69312C.1.pep
MPGVVVPRNFRLLEELEXRGEKGIGDGTVSYGMDDGDDIYMRSWTGTIIGPHNTVHEGRIYQXLKLFCDKDYPEKPPSVRFHSRINMTCVNHETGVVEPKKFGLLANWQREYTMXDILTQLKKEMAAPHNRKLVQPPEGTYF

SEQ ID NO: 251702 - protein, 196 aa, Glycine max
  unsure (1)..(196): unsure at all Xaa locations
  Clone ID: PAT_MRT3847_69313C.1.pep
CVQNPQMPLRFIVQAILMEHLNTRRSVTAXATTGAQQQLERTTLREILQRDTADRQTTQIKETMDSTYSRIQSLEKELRGMKKILHEHHQAEGEKIRNNNVLNSERSASFHFDPADAESSKIQRGGRGSVSSSGFGLDNVRRKNKEVAGGMCNLSVGSSCRHDSKTPKMTKFFRHSKFITGLKNAFRISNSTSNPY

SEQ ID NO: 251703 - protein, 104 aa, Glycine max
  Clone ID: PAT_MRT3847_69314C.1.pep
SFSGHSPICSRIQKDGSTKHYTLYIAYSKYAIRSNIYTILGAKSRYLLEVGQASGYEERPFPSSAGSVCPPWCTLFANLQEDQISLVQPVSFKSINLVTQIISY

SEQ ID NO: 251704 - protein, 146 aa, Glycine max
  Clone ID: PAT_MRT3847_69315C.1.pep
MTLGLGGSSVVVPRNFRLLEELERGEKGIGDGTVSYGMDDGDDIYMRSWTGTIIGPHNTVHEGRIYQLKLFCDKDYPEKPPSVRFHSRVNMTCVNHETGVVEPKKFGLLANWQREYTMEDILTQLKKEMAAPHNRKLVQPPEGTYF

SEQ ID NO: 251705 - protein, 48 aa, Glycine max
  unsure (1)..(48): unsure at all Xaa locations
  Clone ID: PAT_MRT3847_69316C.1.pep
XCRXTSXVDFKERESVLVGFASXLXXAAXARLXAGEAXXAVGAGDDGS

SEQ ID NO: 251706 - protein, 90 aa, Glycine max
  Clone ID: PAT_MRT3847_69317C.1.pep
MGFYTTMNPVQKLDYGQQFTHISKTLSYKPLHSTYTLSILSHLLNTLPPYTHLTVYQNPLDSNQNYFLAYQPLPSCSHNEPSQPNLRSSH

SEQ ID NO: 251707 - protein, 45 aa, Glycine max
  Clone ID: PAT_MRT3847_69318C.1.pep
TVLFSPNDCVKSMHINSYLKLYINVTYQTFITWRTWFCSYLLAHG

SEQ ID NO: 251708 - protein, 138 aa, Glycine max
  unsure (1)..(138): unsure at all Xaa locations
  Clone ID: PAT_MRT3847_69319C.1.pep
TTYTKPFSTXSSPPPPPLICETMLRRTSPPPPAPKKNPYYYHSQPTTHPYPHPHPHPYPHPXPNPHAHPHPHADAYTAYVYPXHTSPPKKPYKYQSPPPTAHHYPHPDTPFAHYSPTPSSTRPYKYPSPPPPLHPAYT

SEQ ID NO: 251709 - protein, 491 aa, Glycine max
  unsure (1)..(491): unsure at all Xaa locations
  Clone ID: PAT_MRT3847_6931C.1.pep
PRVRNNTSSMLSSQLETDATLLRTIVVDRSTILLQNIGLVVASFIVAFILNWRITLVVIATYPLIISGHISEKLFMKGYGGNLSKAYLKANMLAGEAVSNIRTVAAFCSEEKVLDLYANELVDPSKRSLHLQQQHQLXAKWKNVPDXRGQIAGIFYGISQFFIFSSYGLALWYGSVLMEKELASFKSIMKAFFVLIVTALAMGETLALAPDLLKGNQMVASVFEVMDRKSGISCEVGEELKTVDGTIELKRINFSYPSRPDVIIFKDFNLRVPAGKSVALVGQSGSGKSSVISLILRFYDPTSGRVLIDGKDITRLNLKSLRRHIGLVQQEPALFATSIYENILYGKEGASDSEVIEAAKLANAHNFISGLPEGYSTKVGERGVQLSGGQRQRVAIARAVLKNPEILLLDEATSALDVESERIVQQALDRLMQNRTTVMVAHRLSTIRNADQISVLQDGKIIDQGTHSSLIENKNGAYYKLVNLQQQQHQL

SEQ ID NO: 251710 - protein, 158 aa, Glycine max
  Clone ID: PAT_MRT3847_69320C.1.pep
MVAPCPTSMMVRTKKTKAMGVPTIDLSMERSKLSELVVKACEEYGFFKVVNHSVQKEVIARLEEEGKEFFSKTSSEKRQAGPANPFGYGCRNIGPNGDMGHLEYLLLHTNPLSISERSKTIANDPTKFSCAVNDYIEAVKELTCEVLDMVEEGLWVQD

SEQ ID NO: 251711 - protein, 109 aa, Glycine max
  Clone ID: PAT_MRT3847_69321C.1.pep
MGLVYEQFIWAFLVGCTFISVLSHPDEAAPKYTFLKEAASAPEILTYDYIVIGGGTCGCPLAATLSQGAGVLVLERGGSPYTNPERINIKNFANSLVDISPSSFSQPFI

SEQ ID NO: 251712 - protein, 52 aa, Glycine max
  Clone ID: PAT_MRT3847_69322C.1.pep
VQFLVIFTPFRISYYHFNDHPTTLSMVFTHRILTITITNMLTWNSTYFTALE

SEQ ID NO: 251713 - protein, 56 aa, Glycine max
  Clone ID: PAT_MRT3847_69323C.1.pep
HLAYALKLVLYCPSWLNALLLYYLCNTPLTPSHCSPPIHTALASPMTSLGLPLGVA

SEQ ID NO: 251714 - protein, 119 aa, Glycine max
  unsure (1)..(119): unsure at all Xaa locations
  Clone ID: PAT_MRT3847_69324C.1.pep
SVSSXAXAFLPXRXFFLXFXPXXXCXXXLFLVLXVLPXXXXXXXLSVSSWAFAXLXPXXLFLXFXPXXXCLXXLFLXXXXLPXXXXXXXPLLVSSXASPGLXXCXFSLXLXLXXXCLXP

SEQ ID NO: 251715 - protein, 43 aa, Glycine max
  unsure (1)..(43): unsure at all Xaa locations
  Clone ID: PAT_MRT3847_69325C.1.pep
FFFFXXXXGNKNPTNKWVSFASLKDLCHPPEGNPSFTLNMSNL

SEQ ID NO: 251716 - protein, 66 aa, Glycine max
  Clone ID: PAT_MRT3847_69326C.1.pep
DSAVVTLLNFILNFFELFKFFRFVVILDFSFNNFLMSWNLEHRERVKCFHTCFFLPIYGCIIEMKC

SEQ ID NO: 251717 - protein, 96 aa, Glycine max
  Clone ID: PAT_MRT3847_69327C.1.pep
RIRPLVRTASKTPHRDYTNSLICGHINMYPSFPFFSLKSHLTEYYMSSPLFYQQDCILSLQNHAPMLHKHLQSFCLNFHILVTIASLKNFHLIASS

SEQ ID NO: 251718 - protein, 49 aa, Glycine max
  Clone ID: PAT_MRT3847_69328C.1.pep
GTPAGAVNNSLIVLWLGSFQSELFFVSHVPLVLSDPPPRLLMVTCIVDG

SEQ ID NO: 251719 - protein, 48 aa, Glycine max
  Clone ID: PAT_MRT3847_69329C.1.pep
YVSFFWKLIQFTLYPKTNVKNYYNDICTLSQNFSLSISKTISFFNHLP

SEQ ID NO: 251720 - protein, 95 aa, Glycine max
  unsure (1)..(95): unsure at all Xaa locations
  Clone ID: PAT_MRT3847_6932C.1.pep
KLIIASLLAALLLLHFTDADQSEHAQTLGSLLHHIHCNRPCAARCRLSSRPRLCQRTCETCCRHCNXMPPGTAGNQKLRPCYASLTTQGGKSKRP

SEQ ID NO: 251721 - protein, 99 aa, Glycine max
  Clone ID: PAT_MRT3847_69330C.1.pep
ATKLGNGSVQKIPQTTRQNTGGAPEGGSGGPPPGEPEKKKRGRARTHGPDGTEGKKLPPTAATGNTTPGSGTNSEKRPRGRPPGRGRKQQTATLGEWRN

SEQ ID NO: 251722 - protein, 61 aa, Glycine max
  Clone ID: PAT_MRT3847_69331C.1.pep
IMPEKNRNEICRYLFQEGVCFAKNDFNLANHPEIDVPNLHVIKLMQSFKSREYARETLAWI

SEQ ID NO: 251723 - protein, 135 aa, Glycine max
  Clone ID: PAT_MRT3847_69332C.1.pep
GPSFFFFFFFSLAFGLCRFPNYPTFGNSSDWLTYRHLHPGSCLLFTANAPFLPSFHKKLRQPINDSTHSARLLADKQRFVRAHHDSSSVVEKPVFSPQPRTILHTTATSSERRRKKKQARTGASRSRPPAPFELL

SEQ ID NO: 251724 - protein, 110 aa, Glycine max
  Clone ID: PAT_MRT3847_69333C.1.pep
GGSHPQNKAMFPFSISNQWDICIQRSQKLAPYFLFRPPQKFFLNPRPGLPSPQPFESFVQRIIFPVTRVFFFVCRPTRILHLPNNIKKGVASFMFRRVESKAVWLEVFLT

SEQ ID NO: 251725 - protein, 48 aa, Glycine max
  Clone ID: PAT_MRT3847_69334C.1.pep
TNSNRSRLTCPKKLYYLLIFLLETTARLVFFSGMRIHIFLYYITHIFN

SEQ ID NO: 251726 - protein, 65 aa, Glycine max
  Clone ID: PAT_MRT3847_69335C.1.pep
NDQYPMTDAQLAVYRSAIAKHLKEWEQHLKRLAIIKETTKKTHHYLDFLQECMVTTNFGPYNIKI

SEQ ID NO: 251727 - protein, 119 aa, Glycine max
  unsure (1)..(119): unsure at all Xaa locations
  Clone ID: PAT_MRT3847_69336C.1.pep
PGKKPQRXATSKAXKARQXXDSXGXPTXEXDXXXSXGSXHRAAXPSXAPTGGXXXXEXRXGGXXHPGKXXXKXXENAXXXTAPXXXGKDPTKQTEXDXXRGQQXXGTXXEXGGGKQKPG

SEQ ID NO: 251728 - protein, 47 aa, Glycine max
  Clone ID: PAT_MRT3847_69337C.1.pep
TTHKKNNKKIKRHAENPKNGSVHTELYLKTLCVRASNYKNLFQIHYP

SEQ ID NO: 251729 - protein, 241 aa, Glycine max
  Clone ID: PAT_MRT3847_69338C.1.pep
MSCKDGSRNGIGMDNGKYVRYTPEQVEALERLYHDCPKPSSIRRQQLIRECPILSNIEPKQIKVWFQNRRCREKQRKEVVTAARRRQKGGIVAISHSCTGVAARACGLVGLEPTRVAEILKDRPLWFQDCRAVDVLNVLPTANGGTIELLYMQLYAPTTLAPARDFWLLRYTSVLEDGSLVICERSLKNTQNGPSMPPVQHFVRAEMLPSGYLIRPCEGGGSIIHIVDHMNLEPWSVPEVL

SEQ ID NO: 251730 - protein, 150 aa, Glycine max
  Clone ID: PAT_MRT3847_69339C.1.pep
MLLHEDAGSADIIIVGAGVAGAALAYTLGKDGRRVHVIERDLSEPDRIVGELLQPGGYLRLIELGLEDCVDEIDSQQVFGYALYMDGKNTKLSYPLEKFSSDISGRSFHNGRFIQRMREKASSLPNVKLEQGTVTSLLEEKGTITGVHYK

SEQ ID NO: 251731 - protein, 38 aa, Glycine max
  Clone ID: PAT_MRT3847_6933C.1.pep
KKDKDQIKKKKKKKKKKKKKKKKKKKKKKMGARHLKKI

SEQ ID NO: 251732 - protein, 77 aa, Glycine max
  Clone ID: PAT_MRT3847_69340C.1.pep
MRRNLLDFWPKPYVKRGMIAIAAEGVKYELYEDDWKNKSTFILQMNRPHKKIPDLIHIGQLIRELLNADQIIQEDWN

SEQ ID NO: 251733 - protein, 98 aa, Glycine max
  Clone ID: PAT_MRT3847_69341C.1.pep
GGGFCGRPFCRLPPQCCFFPRFIPRWTRFPGVFNGAPPAEVPPSRGWNRFLGSHVFLKIFYLFFLKDTPVIPPLYFFVGTIFFFSPTSWKSVSIKIPP

SEQ ID NO: 251734 - protein, 62 aa, Glycine max
  Clone ID: PAT_MRT3847_69343C.1.pep
RLHDDDRGALLITLMTINDYEGPKTDYSPVCGTMDTTLIKMRNLASPSFMLSQQHVFLFNFH

SEQ ID NO: 251735 - protein, 267 aa, Glycine max
  Clone ID: PAT_MRT3847_69344C.1.pep
ELRHAHKTMAEAFPNQAHYMLTDDSQGVESHTPGVPCPNYSESEHAEKADSEVQTLRKALAKIQSDKDAIFLQYQKSMEKLSEMERDLNKAQKDAGGLDERASKAEIETRVLQEALAHLKSDKEASQVQYNQCLESIAKLETLLSLAQLDVKEFDERASKAEIEAKNLKQELGQLEAQKDAGLLRYKQCVEKISVLEAKITLAEENSRMLNEQLERAELEVKALRKDLAELNEEKESLAVLYHQCLEKISKMENEILLAQENSEKLN

SEQ ID NO: 251736 - protein, 96 aa, Glycine max
  Clone ID: PAT_MRT3847_69345C.1.pep
PQFYDEFHIGIYLHNKNSASKIIFHNSERQKCKTGIHSIPLWRSMLSFLEQFSYIQMHCQVYKMARLLPHASTTGFENFAVTSKSMLELTLRNFPG

SEQ ID NO: 251737 - protein, 153 aa, Glycine max
  Clone ID: PAT_MRT3847_69346C.1.pep
VEALEGESHAIEVWANRNSGMVSANAEDACIYKQDVESAICQTQSYKEGKNSTCAGTNDKSNSTILSSSYSHISAELVHSEFHHETFSAPYGTKDCHKDNLNEKDLVMDNKVMVEKGGSVDLNIDVMSGEPENYFLHAADYHHNKGVPYVEKV

SEQ ID NO: 251738 - protein, 72 aa, Glycine max
  Clone ID: PAT_MRT3847_69347C.1.pep
YKFLRSMFIFAPILCNIASSAPQNTLKVMCYPLIIVPLFFPKTLWFLFTLAILSSDCSIIFFFAGMFGFRVG

SEQ ID NO: 251739 - protein, 84 aa, Glycine max
  Clone ID: PAT_MRT3847_69348C.1.pep
PLTLLSSFNSFCLASRRKLQNVSASPENLKKKDKFDASLESRPLRCAIETKFILIKPAMQINSVRLWCSISLRFESSNYYFFLC

SEQ ID NO: 251740 - protein, 122 aa, Glycine max
  Clone ID: PAT_MRT3847_69349C.1.pep
MTQAVEVLNRYGTDLVGEPRDSDSECLAGFECFLNIVRALGMGSCISEVGAGGNSPPLLPYSPESNMDGGKRRMLRGSSSFDFKVPGRMFLNGSSEVASMYCKQGRKGINQDAMLVWENFWS

SEQ ID NO: 251741 - protein, 130 aa, Glycine max
  Clone ID: PAT_MRT3847_6934C.1.pep
RESTEKSTKKHKQKAKKRRGRPWRGQVSNSDPCNTIITLAHIRRKSTNSPPSFLELDRVSFDTTSSCFNTGFAMNKKIPQKMQLTPSNIDSTAMVLKKRCYLLQKRFIGREWWRKWLVVRRERHKGFTIQ

SEQ ID NO: 251742 - protein, 69 aa, Glycine max
  Clone ID: PAT_MRT3847_69350C.1.pep
GPMGGLMEKWVSVSSNFSGALNHFPPKIQKFEFIERPFFFFPTHFERMWGYIKVREAVICYGWNFIPET

SEQ ID NO: 251743 - protein, 45 aa, Glycine max
  Clone ID: PAT_MRT3847_69351C.1.pep
MKFNIISGTSMSCPHITGIATLVKAVHPSWSPSAIKSAIMTTGIT

SEQ ID NO: 251744 - protein, 76 aa, Glycine max
  Clone ID: PAT_MRT3847_69352C.1.pep
QIYCFQGKNYQQQQQYHVRHYVTMLMTLSDAEVYPKSALHHQQNWLVGQLGIGRTKAASVQNFNSIKSCKSCLKLH

SEQ ID NO: 251745 - protein, 86 aa, Glycine max
  Clone ID: PAT_MRT3847_69353C.1.pep
SEGGTGFKSLWAEGSFERNAGRNSGKIPDENQGGVFRSLKPGDDYLNPKAARNKMKEGFNFWEKAAKMGIYWRVHLDTKGQRSLRS

SEQ ID NO: 251746 - protein, 75 aa, Glycine max
  Clone ID: PAT_MRT3847_69354C.1.pep
CCVLGSCVRGFLVVAGPVLSASVFRLCSSSFVRGLSVPPVAPMFFWLFRGGGSSRWSLVRFFPVSLLVLVCCSFS

SEQ ID NO: 251747 - protein, 107 aa, Glycine max
  Clone ID: PAT_MRT3847_69355C.1.pep
MARFLHMLIMLSSLALIISVLPLASASLKVDFYKTTCPSAEAIVKRAVNKAVSLNPGIAAGLIRMHFHDCFVRGCDGSVLLESTQGNPSEREHPANNPSLRGFEVID

SEQ ID NO: 251748 - protein, 50 aa, Glycine max
  Clone ID: PAT_MRT3847_69356C.1.pep
LLLEQPIVSAPTIPFGRALATSGRWIPAHPRARCQGECALCLKSLLDYSL

SEQ ID NO: 251749 - protein, 139 aa, Glycine max
  Clone ID: PAT_MRT3847_69357C.1.pep
MLMILPRQFSEQKVFSNDFTENEKPLSYSPQSIQGGHHSSHAPHVGRSSAGRPSHALVTFGFGGKLIIMKDPNLLSSSYGSQDSVQGSVSVLNLIEVVTGNMDSLSIRHNTSNYFHALSQQSFPGPLVGRSVGSKELYK

SEQ ID NO: 251750 - protein, 87 aa, Glycine max
  Clone ID: PAT_MRT3847_69358C.1.pep
VKHTASHSFTYNMITLNKQGGLLLTPCGTHVYTTTYVLNIKCFHGSYPYICSSHIFLFPLTSGYPPSKGAIDMIILNKSFIADYYFL

SEQ ID NO: 251751 - protein, 510 aa, Glycine max
  Clone ID: PAT_MRT3847_69359C.1.pep
MSNSNITSCDSWSFTTENNNNGEDAAATVKQQLEMLGQLYSPNSNTSTTTNNSNGGSNADSQPPAKKKRNLPGNPDPSAEVIALSPNTLVATNRFICEICNKGFQRDQNLQLHRRGHNLPWKLKLRTTTEVRKRVYVCPEPSCVHHNPARALGDLTGIKKHFSRKHGDKKWKCEKCSKKYAVQSDWKAHSKICGTKEYKCDCGTIFSRRDSFITHRAFCDALSEENNKFNEGQLPKMHGSNLQPPTIIPNLVASLPINGANNHKHPLSLPHDLMTTIPAKPFNNNMAAAFTRSLSSTSQLSSKSPNINMFEENGLLSPHMSATALLQKAAEMGATVNSNSNNNSMMMSGEKSFINVTSMAPPSYGIMNPNMHNGQQDLSQYNFIANGVVDGGSNGMGMGGLDMFNAILDQSKALSKIIEQNNRNSTYNGVLHAMNNGKSSDPIEGGGTKGSEAVNHVMTLDLLGIGGGGGDGNFYGGDQQSEIAAGDGIWGNWSNKNAGLESFSATNSTI

SEQ ID NO: 251752 - protein, 94 aa, Glycine max
  Clone ID: PAT_MRT3847_6935C.1.pep
SSHCFASKLKTQNVVVCLFLTTTGLLKTITTKIEEFNRHAANIRGSGGGCRPWRDPSDRVLPLLGSQPYAYLVFDFLRLQILKTMARIEKCHTA

SEQ ID NO: 251753 - protein, 71 aa, Glycine max
  Clone ID: PAT_MRT3847_69360C.1.pep
PIHPILYISSIFSMIGKTFKAWKHFLCHFRFPANGSFQPFICCHYRRNSTLNQYTCGSLLSKCQTNSHFSR

SEQ ID NO: 251754 - protein, 148 aa, Glycine max
  unsure (1)..(148): unsure at all Xaa locations
  Clone ID: PAT_MRT3847_69361C.1.pep
KIIKGPEAAPPRSKYXKNVFLFTPPPVWGPWWKDPPWGYKWCKQPIPHSFCPGAAGIEAPXAASVLFKANIAPKEAAPNDPAPLEEKNPAPRGADVPHDLVLNEKIPVEPPQKGGPKKKEEKFSSCPLKKRKKPPPWGRLPIFPCGPA

SEQ ID NO: 251755 - protein, 293 aa, Glycine max
  Clone ID: PAT_MRT3847_69362C.1.pep
MPREQTPQSLTAVTRCSGGEFLENHVKPTEKSSAFGSIWSRCKPASAPLVQARKSRFMSTAKVGTEVKRSNEKNVVINKLMPKDLSAVFDEEKEAFILNKENLSPNTYHLQWLEKKDKPEEIKHSISQRSPNLSYFSPRIYLDKRISSVSNKVNQTPKVAQEWKSQRKPLQCHINLVHEQDMMELKKNRVEKVASFPSLMNSGGNHKSVTVSAAKSIDDVPICGQISNKCTKTSQHTSREQKRSWDMVVDTASLLNKESRKALQLLQGLQETRLIIPSLVIRELRSMKQFRIF

SEQ ID NO: 251756 - protein, 70 aa, Glycine max
  Clone ID: PAT_MRT3847_69363C.1.pep
MGFWGTRVMEIVKKHDSGGLVWKRIKLTTTRKANAKKRLLRVWQNEAVLKACSATPNEPQPTPVATPVAS

SEQ ID NO: 251757 - protein, 41 aa, Glycine max
  Clone ID: PAT_MRT3847_69364C.1.pep
LSTCDNLNFIADSYYQSSILIESAKISVIVKGSPSRYECNY

SEQ ID NO: 251758 - protein, 50 aa, Glycine max
  Clone ID: PAT_MRT3847_69365C.1.pep
HGDIAFYLCNLETLHPCNITLSFLSILLHKMWLMYACVTLFCLPLCVLFD

SEQ ID NO: 251759 - protein, 378 aa, Glycine max
  Clone ID: PAT_MRT3847_69366C.1.pep
LLVKFNFDLEAISASSSEVPSILEFLQRRKLEANKAKQLCLGITRTLILEHRPVPVVAKAVNVLVTSYSHSIKTGSYLKGLKPENTSTSVVQNTGAEVSATETNVIGKSIVHESTRRVDSGSLNKASTVSSLDSEDESQSANLKHSSKEAQVEDEVNNEISLSKGAHSAYVMQSSLQSGQEESQLTSAAISPDEMYSFVFSPVDEEMVGDPSYLVAIIIEFLHSANSEKIRILPNVYVLIIQLLARNEHYAELGLFVLNKILEPSKEVALQLLESGRQNAQTRKLGLDMLRQLGLHHDYVLLLVQDGYYLEALRYARKYTVDTIRPSLFLEAAFVSNDSQHLAAVLRFFTDFLPSFKNTFDHNRYCRILNEMNSSTNV

SEQ ID NO: 251760 - protein, 71 aa, Glycine max
  unsure (1)..(71): unsure at all Xaa locations
  Clone ID: PAT_MRT3847_69367C.1.pep
KKLSHLLISLFLVRHSTSYGXEKKFSFKYLTQSMCLVFNKLNSSNLYKLKFFTSEILSLYQLQIFGPKLQH

SEQ ID NO: 251761 - protein, 102 aa, Glycine max
  Clone ID: PAT_MRT3847_69368C.1.pep
DMEAERGGAPNYELQVSFTNTPQALHEMGFVQYEENQVLGFLSPSSQSQSSHLSQSLNSDTGVVAVTATTPTATIGFMSHSGLVTKTWNNDQVGTLDQSLSK

SEQ ID NO: 251762 - protein, 220 aa, Glycine max
  unsure (1)..(220): unsure at all Xaa locations
  Clone ID: PAT_MRT3847_69369C.1.pep
RVRLHLLSPIECHLLKMFNFLLRKDVRKILKRKDSDAGEKGRALEDLRGSLFNEFRSSEGAKRQQQRTCGPAAALSFNFFIAISIIFINKMVLQTVKFKFPILLSLIHYIVSWLLMAVLNAFSLLPASPSKSTKLSALFTLGFVMSLSTGLANVSLKYNSIGFYQMAKIAVTPSIVMAEFVLYKKKVSWPKALALTVDLFGVXAVATVTDXLQFHFFAAC

SEQ ID NO: 251763 - protein, 94 aa, Glycine max
  Clone ID: PAT_MRT3847_6936C.1.pep
LVTYSCEGEYGQATWALQWSAICAHGTGLVLGPRRLSIVGLASHWNGSQARGGTVCSSLSLCGCKAEIMYGSSGAEGYCNLHDVLSPQGLMATV

SEQ ID NO: 251764 - protein, 41 aa, Glycine max
  Clone ID: PAT_MRT3847_69370C.1.pep
KNIPSVVDLRQPHQVVNSSYFQISIFIKLKKYMVKFGFVNG

SEQ ID NO: 251765 - protein, 139 aa, Glycine max
  unsure (1)..(139): unsure at all Xaa locations
  Clone ID: PAT_MRT3847_69371C.1.pep
MSSKGGGEDCLGWAARDASGVLSPYKFSRRALGNEDVHIKITRWGGCVXDGVWARDKHGDSKYPVVPGHEIAGIVTKGGANGHHFKGGDHGGGGTYINSCGGCEYCDEGQXGHCAKGVXYTFNGVEFEGAITKGGDSSY

SEQ ID NO: 251766 - protein, 101 aa, Glycine max
  Clone ID: PAT_MRT3847_69372C.1.pep
ALAGKERERAYQLRQNGLSRGTAYLRPKDGSNRDATLADDGCYRLDSTGFCGAHSATTKACAKLANEVSQLSQEHLKRKYHEDLGNRSSGLKRGERKTWVA

SEQ ID NO: 251767 - protein, 140 aa, Glycine max
  unsure (1)..(140): unsure at all Xaa locations
  Clone ID: PAT_MRT3847_69373C.1.pep
GGPGVRQLMLLFPFDLFKKNPRSFCFEVLTEFVVQPLVEILVGSVLKSELPGGLFCALXCALLNPVDPIKTRVQAXTMSFLEIIFKLPKIERRGXSRGFILAIFDTVXSHGLQTGIFEAGKWGWLKMVPTLPELQVQFVA

SEQ ID NO: 251768 - protein, 49 aa, Glycine max
  Clone ID: PAT_MRT3847_69374C.1.pep
NPLAILSKTHIITLHHIHGDSYKRSQVVLNTCLLTLIRAPVRCDPFVEF

SEQ ID NO: 251769 - protein, 589 aa, Glycine max
  unsure (1)..(589): unsure at all Xaa locations
  Clone ID: PAT_MRT3847_69375C.1.pep
LIEFLIPQKPSTMAAETIPYQNGVVASSNDSTATGKKSRENDRRRRRRKQKKNNKASEAPVPNSSEESDDAKENNDSKQLVEQIEIEYVPEXAELVEGMDEEFRKIFEKFTFTDATALEDTDKKDGSEENAATNKKANSDSEEEENDNEQKEKGISNKKKKLQRRMKIAELKQICLRPDVVEVWDATASDPKXLLVFLKSYRNTVPVPRHXCQKRKFLQGKRGIEKPPFQLPDFIAATGIEKIRQAYIEKEDSKKLKQKQRERMQPKMGKMDIDYQVLHDAFFKYQTKPKLTSLGDLYHEGKEFEVKLREMKPGMLSHELKEALGMPEGSPPPWLINMQRYGPPPSYPHLKIPGLXNAPIPPGASCGYRPRGWXSLGSDEXGRPLYGGVYVVQHQDQPNFEEEPVDKTKHWGDFEEEEEEEEEEEEEEEDEEREEEELEAGIQSVDSLSSTPTGVETPDVIDLRKQQRKVPERPLYLVLEEKEEKIAPGTLLGTTHTYVVGHGTQDKXGAKRVDLLRGQKRDKVDVTLQPEELEAMENVLPAKYGEAREEEKLRSQREDFSDMVAENEKKRKRKMQEKEGKSKNREFKF

SEQ ID NO: 251770 - protein, 117 aa, Glycine max
  unsure (1)..(117): unsure at all Xaa locations
  Clone ID: PAT_MRT3847_69376C.1.pep
DSNPCSDAWSVEFLKRTGFNCDMICVIGWTATPTQDVEVRIDWLIGYKECVLRTXGVXNEEKTFVLIRGMGXLELVEGTLWRVKRMHLSIGRGAGGENVIIMNNGNXVSQGWRFWCG

SEQ ID NO: 251771 - protein, 121 aa, Glycine max
  Clone ID: PAT_MRT3847_69377C.1.pep
AVRCPRRCEKSTEPYHLEEEEEEEEEEEEEMEEEELEAGIQSVDSLSSTPTGVETPDVIDLRKQQRKEPERPLYQVLEEKEEKIAPGTLLGTTHTYVVGTGTQDKSGAKRVDLLRGQKTDK

SEQ ID NO: 251772 - protein, 71 aa, Glycine max
  Clone ID: PAT_MRT3847_69378C.1.pep
QKTDKVDVTLQPEELEAMENVLPAKYEEAREEEKLRSQREDFSDMVAENEKKRKRKMQEKEGKSKKRDFKF

SEQ ID NO: 251773 - protein, 123 aa, Glycine max
  Clone ID: PAT_MRT3847_69379C.1.pep
YYLSQLHSVCPHKVLISHQLFFWQGKRGIEKPPFQLPDFIAATGIEKIRQAYIEKEDSTKLVQKQRERMQPIMGKMDIDYQALHDAFFKYQTKPKLTSLGDLYHERKEFEVKLREMKPGMLSH

SEQ ID NO: 251774 - protein, 198 aa, Glycine max
  unsure (1)..(198): unsure at all Xaa locations
  Clone ID: PAT_MRT3847_6937C.1.pep
GVLYYTPQILEQASVNYLLSTLSLNSTSSSFLISTRTTLLILPYIAITIKLINISSRKTVLLSTIPILIAALLILLLESLVNXQSTTNTSISTISGISYCXFCSINVNQCPNILYTEILPTQMRKLYISISSLTFGIYDIIVTYTLGGILNGXSLRYIDNMYTVIFFIAYVWCVFNIRYTRSIRLKVMMDWLSIGLRR

SEQ ID NO: 251775 - protein, 75 aa, Glycine max
  Clone ID: PAT_MRT3847_69380C.1.pep
YSRTRHSLIISLLVKEVTDEHNDFFQHGQDIHVVPLSTNAAANRHLILQTYKPFNWHMTSSSFPTPIYPMDPVVE

SEQ ID NO: 251776 - protein, 58 aa, Glycine max
  Clone ID: PAT_MRT3847_69381C.1.pep
VYGSTDRCSNACYGARAWIRSLWSIARTDNERESLTHLYGATYRDRVRLPDMPMSEAN

SEQ ID NO: 251777 - protein, 73 aa, Glycine max
  Clone ID: PAT_MRT3847_69382C.1.pep
NFIVILSLYKHLFTLVLQLFHRFGRKLKICCLLHVVFLTFLPPSGQYHNLLGTTRQTGFGNQTLGQLARSSSL

SEQ ID NO: 251778 - protein, 102 aa, Glycine max
  Clone ID: PAT_MRT3847_69383C.1.pep
FVRIVVVDASLFRRVGNRFVYAGVVVFAAPGPFQCLLVCIWFRRSPSWPGFWFVMVFLPRFIFFGGLAFVFFSFPGFMLVGGCFGCLFSFVCRGLFFCLFFA

SEQ ID NO: 251779 - protein, 61 aa, Glycine max
  Clone ID: PAT_MRT3847_69384C.1.pep
SATARKGHYNLTKTSLVLVRKWTIFRKYLLFKSFLKKLKKKRLFIQNKFNQTSNYFRVQTS

SEQ ID NO: 251780 - protein, 59 aa, Glycine max
  Clone ID: PAT_MRT3847_69385C.1.pep
KPGYDPPCQPFLRQIVRGTTSVLLNTDRMHCLDYIVLTGLDYKRQSLLANIGTPDTQQC

SEQ ID NO: 251781 - protein, 72 aa, Glycine max
  Clone ID: PAT_MRT3847_69386C.1.pep
FIFKISFFLFFIFFLVMVFFFFLAPFKGKGQIFICPRVPTAFYLYQGSNSPSIKKWTKPEVPDGGTKLQDQN

SEQ ID NO: 251782 - protein, 120 aa, Glycine max
  unsure (1)..(120): unsure at all Xaa locations
  Clone ID: PAT_MRT3847_69387C.1.pep
GPFPGIKNLGQSKKLRRPPNVPKTGWVWDRIWVXPSKNVXGWGMKNRGVLYPLGGEKGSPFFQEQGPDLGWGGPQGKTPPLGVKGGPGFRGWGGKPLFKTKRLGKGFSFPAILIYHFFPF

SEQ ID NO: 251783 - protein, 62 aa, Glycine max
  unsure (1)..(62): unsure at all Xaa locations
  Clone ID: PAT_MRT3847_69388C.1.pep
TNRTFYVPASGAGDLNSGDDSXISSPTHELMKPVKDSEYVGTCMSYYLHIMPTGWIDTTAAS

SEQ ID NO: 251784 - protein, 41 aa, Glycine max
  Clone ID: PAT_MRT3847_69389C.1.pep
APMEHHQLIHRSLVHLVLGMHLANAIPLMGYRYEAVSTYGR

SEQ ID NO: 251785 - protein, 122 aa, Glycine max
  unsure (1)..(122): unsure at all Xaa locations
  Clone ID: PAT_MRT3847_6938C.1.pep
PSMLRAFYNAIDIFVNPTLRPQGLDLTMMEAMMSGKPLLASRFPSIKGSVVVDDAFGFMFSPNVESLLEALEAVVKEGKERLARRGKACRDHAISMFXATKMALAYERLFLCIKEDRFCNYP

SEQ ID NO: 251786 - protein, 81 aa, Glycine max
  Clone ID: PAT_MRT3847_69390C.1.pep
GPESRPPTPSEYKLNVRPRVRNSMPKKKNKKKKKKKKKGAAAQKRTNQTYPGRRATWLLGSGHLNAIHGPWFYNEGTGKTL

SEQ ID NO: 251787 - protein, 183 aa, Glycine max
  Clone ID: PAT_MRT3847_69391C.1.pep
MNALASQCSSGCESGWTLYLEHSFQLNHNASSHTTSQLFKDKQAKKEEAEEEDLSMVSDASSGPPHLHLPDAQDNGSFYSASKAANLGKRSKKRQKVKENQHLPSLLDDTASSPVFDFSMTNVTVTNQQTSAESMLDYSQGFSATYYEERSSLQDHFGFLQQSQSENGVRNNKWYGEKEMGMI

SEQ ID NO: 251788 - protein, 163 aa, Glycine max
  unsure (1)..(163): unsure at all Xaa locations
  Clone ID: PAT_MRT3847_69392C.1.pep
DQKEGSQNGYVCSGLKKSEEIRWEDELSDSESDEGDFEWEHDDLVEQLKLELKNSRQGGLATILEEVEEANEEEEVVAFEEEERVSPRVVEDPKPMEIEEKLEYKDQIDEIHIVYKSYAEKMKKLDILNYQTMHALGLLQLKDPLKLXSLPKSAFQGAKPVIS

SEQ ID NO: 251789 - protein, 74 aa, Glycine max
  Clone ID: PAT_MRT3847_69393C.1.pep
DLAKYNYKMERVQKSEFLDVTSQEHFFFILFFLFYSYRCTSSFFPTSSPSFSKVLSLTFFCVLCLVSFALSTLL

SEQ ID NO: 251790 - protein, 105 aa, Glycine max
  unsure (1)..(105): unsure at all Xaa locations
  Clone ID: PAT_MRT3847_69394C.1.pep
KALSRIEWLAKADVPTIXQIEEFHSMHKMMNAPDSNDTYRSTGDHRYCGLQGAGEAFSHNIGEDDILEPASTREFFDGNRPVDTGLPIRANSLYPVWEWHSYSVV

SEQ ID NO: 251791 - protein, 149 aa, Glycine max
  Clone ID: PAT_MRT3847_69395C.1.pep
VAEGLPSPGFHDKCNNQKSSDVNFNEQIGRICAALPNEDLKIAEQPVLELNTSISDTSMEDKRETDALELDEMKMEDDSTAAKHLLPDVIMKDKRLSEVSTDFDQFASGGLRVKRRTPQGLPLFPFRRLLNPTPFKKKGKTSKSRTKLK

SEQ ID NO: 251792 - protein, 56 aa, Glycine max
  unsure (1)..(56): unsure at all Xaa locations
  Clone ID: PAT_MRT3847_69396C.1.pep
CSQYPPTAQDAQLVTVCLCETIITYLYNSHSRSSCLRHTSFTHQNSPHFAFPXSHY

SEQ ID NO: 251793 - protein, 194 aa, Glycine max
  unsure (1)..(194): unsure at all Xaa locations
  Clone ID: PAT_MRT3847_69397C.1.pep
NIHEALSHPRWRQAMIDEMQALEQSDTWELVPLPPDKKTEGCRWVYAVKVGPNGEIDRLKARLVAKGYTXIYGLDYCDTFSPVAKITIVRLFLVMAAMRHWPLHQLDIKNVFLHGDLEEEIYMEQPSGFIAQGECGLVGKLRRSLYGLKQSPQAWFGKFSHICQLFELETKRSRIISAFLLGNSSPLGKSVVYF

SEQ ID NO: 251794 - protein, 88 aa, Glycine max
  unsure (1)..(88): unsure at all Xaa locations
  Clone ID: PAT_MRT3847_69398C.1.pep
AISFGWPQQSRLVMNYSGEIQFLEFNGTEWVKKWWKPDHKXDIRDYCGSLPSATKITGFTASXCLDSFPGMKENSRSKGVKENQHYRV

SEQ ID NO: 251795 - protein, 48 aa, Glycine max
  Clone ID: PAT_MRT3847_69399C.1.pep
RFLHIKGNLDGWPILIHHFPHSLNGITLVLAKHYSCFRVRRKIWGGIT

SEQ ID NO: 251796 - protein, 114 aa, Glycine max
  Clone ID: PAT_MRT3847_6939C.1.pep
SDREGGTQRQQKKDTTALEIAANEVLFGQTGSGADEPWVVGLSSTSNAPWGAPDPAAFNWLNNTGDFTRGGGGNHNPRGGKNSGSMQMPHQIPATGHQLPNRMKNSSMSGTNAT

SEQ ID NO: 251797 - protein, 57 aa, Glycine max
  Clone ID: PAT_MRT3847_693C.1.pep
CLQHVLDHRRGRQHELTCALNPGAALCLFQLYGAQVACPCVVDPCNVLKDRHRAHVP

SEQ ID NO: 251798 - protein, 117 aa, Glycine max
  unsure (1)..(117): unsure at all Xaa locations
  Clone ID: PAT_MRT3847_69400C.1.pep
KEEISRETHTPPXXXTLLRFLLIGNLLYVPLKEMKIRYIILWKRVQKLKIKYANLTANIARLRRECMDSDERIKGLRKIVEALRKEAQFKDEVSKAQREELKRLRARNGRYGRRSSL

SEQ ID NO: 251799 - protein, 91 aa, Glycine max
  Clone ID: PAT_MRT3847_69401C.1.pep
GVIRIHRCHWFAVVTLLIASITVIVALFTCIYLFFRLFLLQNNWRKTRRESCGLRMLLTLSHTLGLFMLDHQVNQATSYQSIDPHFLVIGS

SEQ ID NO: 251800 - protein, 54 aa, Glycine max
  Clone ID: PAT_MRT3847_69402C.1.pep
EPGGNWKGGKKKGGQTGKRGLEKKTTSPPPLKGKLFKKKKLKTPLKGNEAGFKF

SEQ ID NO: 251801 - protein, 248 aa, Glycine max
  Clone ID: PAT_MRT3847_69403C.1.pep
MPKLTPLNFTLPLPNSSSYNTKGLEYISNIKIHHNIKMASIVTMATIVTLVLALACCGMSAPTSVPKTTAAAPAPESNGCLMALANMSDCLTYVEDGSKLSKPDKGCCPELAGLVDSNPICLCEMLGKPDSIGIKIDLNKALKLPSVCGVTTPPVSTCSAVGVPVSLPPSMSEGPSIAPGAFSPSNADAANPASSPNSASSPAGGLGPSSEDAAASPSQNKNEVSAIHPSALTNFFFGLFTLFVSVFF

SEQ ID NO: 251802 - protein, 194 aa, Glycine max
  Clone ID: PAT_MRT3847_69404C.1.pep
LKSTENFSQENIIGCGGFGLVYKATLPNGTTLAIKKLSGDLGLMEREFKAEVEALSTAQHENLVALQGYCVHDGFRLLMYNYMENGSLDYWLHEKPDGASQLDWPTRLKIAQGASCGLAYLHQICEPHIVHRDIKSSNILLNEKFEAHVADFGLSRLILAYHTHVTTELVGTLGYIPPEYGQAWVATLRGDVYS

SEQ ID NO: 251803 - protein, 121 aa, Glycine max
  Clone ID: PAT_MRT3847_69405C.1.pep
RKQIEVAMGRYGNGIPYPLNLSPVVGLSGWLPGSRSLRNKIEVSHEARRRAASLPILLCHGISDDVVLYKYGEKSAQSLCSAGFRYVAFKSYDGLGHYTVPREMDEVCTWFSSRLGLDGSS

SEQ ID NO: 251804 - protein, 49 aa, Glycine max
  Clone ID: PAT_MRT3847_69406C.1.pep
KYICWGVKRCVNYMHGWRKKLTYARPKTGGDHAFICEYKHISLLLQGVH

SEQ ID NO: 251805 - protein, 70 aa, Glycine max
  Clone ID: PAT_MRT3847_69407C.1.pep
CFALRSLHKIGRERKGPLTDNRTAGKHILTYLETANNRRGYTACLLRLYTGLNKESVFKSYINTVIRIEN

SEQ ID NO: 251806 - protein, 65 aa, Glycine max
  Clone ID: PAT_MRT3847_69408C.1.pep
CLVYFHKSQLLHKEITANAIPRFKFKHSKQTPITLLPRFKFKHSKHIQLTSVLTKSNIKFHVPSV

SEQ ID NO: 251807 - protein, 67 aa, Glycine max
  unsure (1)..(67): unsure at all Xaa locations
  Clone ID: PAT_MRT3847_69409C.1.pep
MGQETFLYTSELVNEGHPFKLCDQIXMLRLRACLVQDTDSGVGCETCTKTNMVMVFGEITTKANPDY

SEQ ID NO: 251808 - protein, 393 aa, Glycine max
  Clone ID: PAT_MRT3847_6940C.1.pep
ILVVKVVGGALTRDMETQNWFERLKPFAAVVSIQFGYAAMDVLSKAAMNKGMSNYVFVVYRHAVAFFVMAPLAWFFDKKVRPKMTFSIFMKIAVLSWIEPVIDQNLYFLGMKYTTATFAVTITNMLPAITFIFACILRLEKIKIRSIRSQAKVVGTLTTVSGAMVMTLLKGPVLFGSHGSNDHSQHNGTSMRHTITGFILITIGCFSWACFVILQAITLKTYPAELSLSAWICLMGTIEGAAVALIMERGNPSVWSLKLDMKLLCAVYTGIVCSGMGYYLQGVVMKTRGPVFVTAFSPLCMVIVAVMSYFILAEQVFLGRMIGAVIICLGLYVVVWGKSKDYSPPNPNTQEPTLPAKQIVNEDNAKKENYNCTHEVINVNNFENGITRNEELV

SEQ ID NO: 251809 - protein, 76 aa, Glycine max
  unsure (1)..(76): unsure at all Xaa locations
  Clone ID: PAT_MRT3847_69410C.1.pep
PIDTVRKKIMIPFGQAVKSKSSLDAFSQIFKNEGPKSLFKGAGANILRPVPGGGGIXGYTKLQVFVLGKKHAYGGG

SEQ ID NO: 251810 - protein, 142 aa, Glycine max
  unsure (1)..(142): unsure at all Xaa locations
  Clone ID: PAT_MRT3847_69411C.1.pep
RGEAVGNPKGYFXMTIGGQPGGRIVMELYPXTTPRTGENFRALCTGKKGVGRGGKPLHYKGSTFHRVSPNFMCQGGDFTGGNGTGGESIYGAKGADENFIKKHTGPGILSMGNAGPGTNGAQFFICTGKTEWVXGKHVGFGQ

SEQ ID NO: 251811 - protein, 68 aa, Glycine max
  unsure (1)..(68): unsure at all Xaa locations
  Clone ID: PAT_MRT3847_69412C.1.pep
KPKELKFIHLKNKVKIKITCTTSALFLHPSFNTTNCKHSFSSLSVLQHSXYDQCNVCLSMQVGYGGRN

SEQ ID NO: 251812 - protein, 166 aa, Glycine max
  Clone ID: PAT_MRT3847_69413C.1.pep
MPQALLLRHHTERDTYKATGWNRSQGGTRRVTPSVEEDSSLERRLPNGDVYMGSFSGNAPSGSGKYLWRDGCVYEGEWKKGKACGKGKFSWPSGATYEGEFKSGRMDGFGTFTGSDGDTYRGSWSSDKKHGYGQKRYANGDLYEGSWKRNVQEGEGRYVWEDGNEY

SEQ ID NO: 251813 - protein, 220 aa, Glycine max
  Clone ID: PAT_MRT3847_69414C.1.pep
MASYHEEEVRLLGKWASPFSNRVDLALKLKGVPYKYSEEDLANKSADLLKYNPVHKKVPVLVHNGNPLPESLIIVEYIDETWKNNPLLPQDPYERALARFWSKTLDDKILPAIWNACWSDENGREKAVEEALEALKILQETLKDKKFFGGESIGLVDIAANFIGYWVAILQEIAGLELLTIEKFPKLYNWSQDFINHPVIKEGLPPRDELFAFFKASAKK

SEQ ID NO: 251814 - protein, 65 aa, Glycine max
  unsure (1)..(65): unsure at all Xaa locations
  Clone ID: PAT_MRT3847_69415C.1.pep
RYRTCIPERALLASTNHGVPMTLRRNIEKCLXLLFAQTLREKRKVGINESLTMGYYDTEHTKNVR

SEQ ID NO: 251815 - protein, 63 aa, Glycine max
  Clone ID: PAT_MRT3847_69416C.1.pep
ISILYQNLHKTIEINVVNIHQSKLYKYKCRTSHSHVKKKTSKKRKYLSDVFNSTLQPISRAEF

SEQ ID NO: 251816 - protein, 49 aa, Glycine max
  Clone ID: PAT_MRT3847_69417C.1.pep
SSLFIYYLIIPLCFIFLKILRNLFLCISFLLFKIHTSALIVLSSIFLSL

SEQ ID NO: 251817 - protein, 61 aa, Glycine max
  Clone ID: PAT_MRT3847_69418C.1.pep
LPLLRSSKTTQRKISILQNIQIHKNIICHVLVCVRNRLWLSHLLIVWSGCLRKHQLSRFGR

SEQ ID NO: 251818 - protein, 104 aa, Glycine max
  Clone ID: PAT_MRT3847_69419C.1.pep
DYLRFLKKFNSTGYSELFNKGNPPSLSYTLNNYNKLQSLVFNIIFLSIKTLYKHSLTESNLNNAVFHTLEKLILKDPQDPSTSNAISYKTSPKNKLISQLYNIV

SEQ ID NO: 251819 - protein, 75 aa, Glycine max
  unsure (1)..(75): unsure at all Xaa locations
  Clone ID: PAT_MRT3847_6941C.1.pep
KHFPGFVVRADDLIGNGVANMICIMVTDPFVMNXWTXPFPKDNHVMNVVGGAAXYTNALGVELDLSVSEGGVRYE

SEQ ID NO: 251820 - protein, 86 aa, Glycine max
  Clone ID: PAT_MRT3847_69420C.1.pep
SYLVAQVSQSDVSYIGACRPRIFFINGFHCFLEDEWQQNGERKRERRRHFKEKMSLEEAHHHRRPSIRAWRKNEMNEGPFCRFSQP

SEQ ID NO: 251821 - protein, 73 aa, Glycine max
  Clone ID: PAT_MRT3847_69421C.1.pep
KNIFLLILRSKSYLLIRKTLLLKSAYFKIVFKFKQTSLIYHSSLVNKLVPQILFGTTLVLHKDNQCILDLLKD

SEQ ID NO: 251822 - protein, 72 aa, Glycine max
  unsure (1)..(72): unsure at all Xaa locations
  Clone ID: PAT_MRT3847_69422C.1.pep
GSWFIGLDVEHIDDRRLCCGTPPDCEWKAQAGNXCVASFDWSCSGICRSAERIKEVHRRCGEGENVLWSASF

SEQ ID NO: 251823 - protein, 407 aa, Glycine max
  unsure (1)..(407): unsure at all Xaa locations
  Clone ID: PAT_MRT3847_69423C.1.pep
MTWKSRGELPSRSVISQRWVLFLCLGSFCAGMLFTTRIWTIPENNKGLARPTASEAEKLSLVSEGCNSRILQEMEMKRDKDIYGEVFKSHNSIQTLDKAISNLEMELAAARATQESLRSGAPISDDIRLSESSSGKRKYLMVVGINTAFSSRKRRDSVRATWMPQGEKRKKLEEKGIIMRFVIGHSATSGGILDRAIEAEDRKHGDFLRLNHVEGYLELSAKTKTYFATAVNLWDADFYVKVDDDVHVNIATLGQTLVRHRSKPRIYIGCMKSGPVLSQKGVRYHEPEYWKFGEAGNRYFRHATGQLYAISNDLATYISINQNVLHKYSNEDFSLGVEFIGLNEEYRDDXRLCGGTSPDCQWKAQAGNICVASFDWSCSGICRSAERIKEVHRRCGEGENALWSASF

SEQ ID NO: 251824 - protein, 66 aa, Glycine max
  Clone ID: PAT_MRT3847_69424C.1.pep
CDSSRPPYRRTNKCTVRVWIPCDARLTLYLLWSQVLTTHSSDTVRSGSTLKPTPVSSTVQSNTCMI

SEQ ID NO: 251825 - protein, 50 aa, Glycine max
  Clone ID: PAT_MRT3847_69425C.1.pep
IGPAREEMKHVKNFDYVVVNAKGKLDNAVKLMESIIDAEKARVSQRTPHL

SEQ ID NO: 251826 - protein, 36 aa, Glycine max
  Clone ID: PAT_MRT3847_69426C.1.pep
QCQSGYVLKQHSPVQEPLVLHSGKIPPPLFKKRPQV

SEQ ID NO: 251827 - protein, 111 aa, Glycine max
  unsure (1)..(111): unsure at all Xaa locations
  Clone ID: PAT_MRT3847_69427C.1.pep
MATEQLMSGGGSRYVQMKSSPPSSPSAAAAEEMSSVPSFRHSGAEANRIFEELPKAFIVYVSRPDASDISPMQLSYTIQVQYKQFTWELTXKAHQVFILHFSLKKRALIEE

SEQ ID NO: 251828 - protein, 83 aa, Glycine max
  Clone ID: PAT_MRT3847_69428C.1.pep
LYGLEKKKKKKKKKMFNWVPPKKHQSPKTKFQYIVRSTNQRNQELRTKGSLTQQAMSGRRNKIRRQELKRKGNPFSLLKRGME

SEQ ID NO: 251829 - protein, 144 aa, Glycine max
  Clone ID: PAT_MRT3847_69429C.1.pep
MSNSQNPNYDGSSFLIDITTTVNYTISTAKKRWRFAYTAIYSRRVMLSLAKEIISKRNTNTHPYSKLFQTQSTGSGSTLDIIEPLIPQHGTNNHYSLVPDVDKARLASMVKDKNLEAFVEFGRVEGVANTLGTIPAKGISGDHD

SEQ ID NO: 251830 - protein, 79 aa, Glycine max
  unsure (1)..(79): unsure at all Xaa locations
  Clone ID: PAT_MRT3847_6942C.1.pep
MATAGTTQNCKACDKAVYLVDTLTADNRVLHKACFRCHHCQGTLKLSNYDSFEVVLYMXPHFDQLGKRTGSLDKSFEGT

SEQ ID NO: 251831 - protein, 67 aa, Glycine max
  Clone ID: PAT_MRT3847_69430C.1.pep
TNQHRQLRLFIINRISLQGEFFSSKIVDEKNFPFLHKIYYPLPKPYFEGIKKEYPGFTWKIGLLNPN

SEQ ID NO: 251832 - protein, 55 aa, Glycine max
  Clone ID: PAT_MRT3847_69431C.1.pep
PISRPGVAFLAPSWSPSVALFSPFVLGSLLHMSFTQRASLLPFGRSGRAVLFGRV

SEQ ID NO: 251833 - protein, 197 aa, Glycine max
  Clone ID: PAT_MRT3847_69432C.1.pep
MENQFPVISDSYCVPYLINLRINTEKGITYDANNVRHFYIKDKLFTLHKRRVLCDNQGNPIVTLYKKRMTLHGRCQVFRGYKSKDFSQLLFSVKRSAMIPSGMINLEVFLANNQRESACDFRVNVCRDKRSCTVYAGESPRIVATMDNNDGFNVLVYPHADYAFIVALLMIVSEMKHYFDEMVYLAAGMAPLGVGMN

SEQ ID NO: 251834 - protein, 68 aa, Glycine max
  Clone ID: PAT_MRT3847_69433C.1.pep
MENQFPSISDSYCVPYLINLRINTEKGITYDANNVRHFYIKDKLFTLHKRRVLCDNQGNPIVTLYKKV

SEQ ID NO: 251835 - protein, 69 aa, Glycine max
  unsure (1)..(69): unsure at all Xaa locations
  Clone ID: PAT_MRT3847_69434C.1.pep
ATFHVSFSIXDGLEAXGSYELGPKPYTLKGTVVIGGSHYIPEWETFGFDEYIXYGLKHTDMLLLGPEGA

SEQ ID NO: 251836 - protein, 109 aa, Glycine max
  unsure (1)..(109): unsure at all Xaa locations
  Clone ID: PAT_MRT3847_69435C.1.pep
MWKTLYQSRDSSRSPDCNIYGAWLMGGSYHTNTEHANCIVVSWAFTKVKGPFGWYTFTDAIGQIEPDMNSRVKLLGTTTNGDYXQGKYIAXMVKFTEACAAVGLTSSYT

SEQ ID NO: 251837 - protein, 53 aa, Glycine max
  Clone ID: PAT_MRT3847_69436C.1.pep
HNASVEKISECETMNNVPEMPPMICILNVLRYGFSRNMHMTTKHSPSRDSVVN

SEQ ID NO: 251838 - protein, 49 aa, Glycine max
  Clone ID: PAT_MRT3847_69437C.1.pep
KPHQRTTWGGDLYKFRGREQPCITKWPQTMCGWKTNLCSCWEVCMRETI

SEQ ID NO: 251839 - protein, 96 aa, Glycine max
  Clone ID: PAT_MRT3847_69438C.1.pep
MPVPTGSNWDHKASFPSSGEKVKCTFCRKRKKEAISCDDVDCSQDNTSSKKKCGEKQDDHVEPQKSCTMTESSRDSRRLAQVARQLISLSEKKWWQ

SEQ ID NO: 251840 - protein, 157 aa, Glycine max
  Clone ID: PAT_MRT3847_69439C.1.pep
MEPYMNRNIYNLWCTQFYLNCMQRIMDPVPGDGCCSCTQVPVAWLVGKTIGLYFSAEWCVPCAKFTPKLISVYEKIKHELAGKGEEDFEVVLISSDRDQASFDSYYSTMPWLALPFGDPEIKNLVRHYNVQGIPWLVIIGPDGKTITVHGRSLINLY

SEQ ID NO: 251841 - protein, 100 aa, Glycine max
  unsure (1)..(100): unsure at all Xaa locations
  Clone ID: PAT_MRT3847_6943C.1.pep
LTPLVFPFDAYFGFCSLSIFYLFKQLILVVLGSAVTYPXFTQLNATPPFYAISNWWSAMASIARTPRLYFGYGIRSTRTRPPPPPPQRRRTSYSDDRKPS

SEQ ID NO: 251842 - protein, 82 aa, Glycine max
  Clone ID: PAT_MRT3847_69440C.1.pep
KKGTNTPPPPLKSPKQPLPFSPPLKAGEKAPPSLIPGTKKLTPTQKNPGPPLLRKKPNTLPPPPPSNLLPTKGPFPNFQLPF

SEQ ID NO: 251843 - protein, 48 aa, Glycine max
  Clone ID: PAT_MRT3847_69441C.1.pep
VSCYHDSRIVATKDTRTHNIIYSYLDHQNQLCHLCSSFCSCRTCGRPG

SEQ ID NO: 251844 - protein, 51 aa, Glycine max
  unsure (1)..(51): unsure at all Xaa locations
  Clone ID: PAT_MRT3847_69442C.1.pep
SPRLIVWYHXHPNITXMPSHVXDVRTQAMYQLLDYRIIGWIFCCFRENVNK

SEQ ID NO: 251845 - protein, 45 aa, Glycine max
  unsure (1)..(45): unsure at all Xaa locations
  Clone ID: PAT_MRT3847_69443C.1.pep
XXAXRXXAYKLTVHLHVNNIXQLYKQIIXXXTNSAEASXXSYIFX

SEQ ID NO: 251846 - protein, 54 aa, Glycine max
  Clone ID: PAT_MRT3847_69444C.1.pep
DGNGKELTLLWLRQHIQGVRPEEHTVLISIYDKNVQVDLYQVIIFLPCLGNNLC

SEQ ID NO: 251847 - protein, 61 aa, Glycine max
  unsure (1)..(61): unsure at all Xaa locations
  Clone ID: PAT_MRT3847_69445C.1.pep
QGSAPGSGYFYNCTGLPLRKFLGPWDLTLISVVPEIYLKELGLINCLLCKGPFNMISLFXP

SEQ ID NO: 251848 - protein, 84 aa, Glycine max
  unsure (1)..(84): unsure at all Xaa locations
  Clone ID: PAT_MRT3847_69446C.1.pep
TSTLIKLSFFKNNGSSXYNDNEYSEAGCNLYMCTRSIPPQCSYKDIRLNSYHSDCKSYIYTRSQAEHYHXLNTNNFCYEPYKSK

SEQ ID NO: 251849 - protein, 62 aa, Glycine max
  Clone ID: PAT_MRT3847_69447C.1.pep
MDVCVTVGFIIHIVGLESGFGCPSIVKVLGNVDCRDTVLIKKPTIWIFCRSDFLELVKVVLA

SEQ ID NO: 251850 - protein, 48 aa, Glycine max
  Clone ID: PAT_MRT3847_69448C.1.pep
RINLQVQPVKIFLMGGYRKYSGVRNSSLGPITWWGGDSPHPSLPECSP

SEQ ID NO: 251851 - protein, 100 aa, Glycine max
  Clone ID: PAT_MRT3847_69449C.1.pep
GFPPATRALGPPQFLSVCSPFFPPRPPPFCFRLVSCGVLSADFMFSHFSPLPLFLPLFSTPPFRSLWCAPPPPPVPFRSFPRVPSLSLLDFSLERLMDLR

SEQ ID NO: 251852 - protein, 63 aa, Glycine max
  Clone ID: PAT_MRT3847_6944C.1.pep
VGKGDRSGPIRNYGNWLKLDNPQVVSVGQLQGFGHHIRCRLPSREFILLHAIVRKLGFLMYRP

SEQ ID NO: 251853 - protein, 42 aa, Glycine max
  Clone ID: PAT_MRT3847_69450C.1.pep
KAQLGGSRLWILRIRHFCMRKKLDVFLSGTCQFRGGRDRCRP

SEQ ID NO: 251854 - protein, 85 aa, Glycine max
  unsure (1)..(85): unsure at all Xaa locations
  Clone ID: PAT_MRT3847_69451C.1.pep
FHTFFLLLEMALQXASXVACFFAAVLKEGKXXXSLKDFHLFRXLHFAXTYAKXXCRXXXHXGFNRXXEQKHCGCXGXKQXXQAXS

SEQ ID NO: 251855 - protein, 22 aa, Glycine max
  Clone ID: PAT_MRT3847_69452C.1.pep
RKKGPNFARCKLTGRSTDHLLD

SEQ ID NO: 251856 - protein, 61 aa, Glycine max
  Clone ID: PAT_MRT3847_69453C.1.pep
MMLLVTQEATFSLFLLGDVANGLSFQADEDLSSVKNVSSEIGKKISSLAFTLRSDAQGQIL

SEQ ID NO: 251857 - protein, 117 aa, Glycine max
  Clone ID: PAT_MRT3847_69454C.1.pep
YPSSGTAPWPASIAYGYPSIPVPAGVATITFNNDDIAAQQSTGSRGQGKFYTLYGSGHSAGAMTAWAWGVSRIIDALESTAAARIDATRVGVTGCSRNGKGAFVAGALDGRVALTIP

SEQ ID NO: 251858 - protein, 94 aa, Glycine max
  Clone ID: PAT_MRT3847_69455C.1.pep
EPVTLLEYSMNAVTEGIDAIATTRVVIRGESETSTSTTHALTGEAVLRTFSGTGAGMDVVVSSVKAYIAALNKMLGFKETSPSAEKIPVSSLKI

SEQ ID NO: 251859 - protein, 100 aa, Glycine max
  unsure (1)..(100): unsure at all Xaa locations
  Clone ID: PAT_MRT3847_69456C.1.pep
CWLLASEGSFACCNGNICWAELESAPGTFAGRCLPYYGMYLIGNSCPGRNCLAPWLSYTSTTAIRSMAIYXGRCETLNRSCXCCGSILEDEVQSEQCQST

SEQ ID NO: 251860 - protein, 621 aa, Glycine max
  unsure (1)..(621): unsure at all Xaa locations
  Clone ID: PAT_MRT3847_69457C.1.pep
MATVIRNPILFPSTSHRPNQNHTFLTLRFPQTLRSSLHSKSRFAVSCSQSEPPPPYPSSPRRRPPYIPNPIPDPSYVRIFDTTLRDGEQSPGASMTSKEKLEVARQLAKLGVDIIEAGFPAASKDDFEEVKMIAQAVGNAVXNDGYVPVICGLSRCNEKQIRSARDLVRFPQKRRIHSFIXSSPIHMEXVVANTHSSIQPHCPSKWCSXASSLGFDDIEISSLLDVRSDRYLVSXNLAEVITVLAFTLNIPYKNGITMQSXFAKVHIDIKHMRPVIEKDIIXPTCSMKLXLFSTYIIEGGRSGAMQLEVTINGMGERAGNASLEEVVMALRCGAHVNGNLYTGINTKHIFLTSKMVEEYTGLQIQPHKALVGANAFAHESGIHQDGMLKHKGTYEIISPEDIGLERTNEAGIVLGKLSGRHALRKRLEELGYELNDDQVQTLFWCFKPAAEQKKRVTDADLRALVSDEVFQAEPVWKLGDLQVTCGTLGLSTATVKLLSSDGSTHVACSIGTGPVDSAYKAVDLIVKEQVTLLEYSMNAVTEGIDAIATTRVVIRGESETSTITTHALTGETVIRTFSGTGAGMDVVVSSVKAYIAALNKMSGFKESSQSAEKISISSLKI

SEQ ID NO: 251861 - protein, 289 aa, Glycine max
  Clone ID: PAT_MRT3847_69458C.1.pep
MENPCEVLGSKGLIRRHEFVRIIIQCLYSLGYSSSASCLESESGISYKSNEVKLLESLILNGSWDESIDYLNSIKDELGETRESALFLVFRQCVMEYLNCGEYALALGVLRKQVSALDAGKCKVHSFAKCLLSFKDRELGAVDGGDVVVHDLRKKLLADLEKLFPPPISVPEGRLEHLVENTVMSWVDSCMYHSSSSPISLYEDHHCSRDQIPTTTTQILTGHKNEVWFVQFSNNGEYLASSSNDCTAIIWKVLEDGKLTLKHTLYGHQHAVSFVAWSPDDTKLLTCGN

SEQ ID NO: 251862 - protein, 106 aa, Glycine max
  unsure (1)..(106): unsure at all Xaa locations
  Clone ID: PAT_MRT3847_69459C.1.pep
QRTCTRLITVTGYSDAQADVIESDGVSTXDGYQKHLAYLNSNGDAGADMIVTHLFYDTDIFLNYANDCPQIXITSPIVPGNMPIYYYKGFIRMTAFCITNIPADII

SEQ ID NO: 251863 - protein, 100 aa, Glycine max
  unsure (1)..(100): unsure at all Xaa locations
  Clone ID: PAT_MRT3847_6945C.1.pep
MLVYQDLLTGDELLSDXSFRYKEIENGMLREAEGKWVAKGAVDVHIGANPSAEGXGEDEGVAVAVGMDGTINQATKKAMEISHMAIHVRYPTPEGVQDLG

SEQ ID NO: 251864 - protein, 62 aa, Glycine max
  Clone ID: PAT_MRT3847_69460C.1.pep
FLIRGWMCQSFGPFFTQIVISCIKFHGFFLLNFYFRHKRIEVVFSLKLPILDRNLPLVPFPL

SEQ ID NO: 251865 - protein, 58 aa, Glycine max
  Clone ID: PAT_MRT3847_69461C.1.pep
NQELGFSSMDKTYNKIQFNCLSYTTGDGNIDGSIQTMALSNIPALSSPLDCAVSHVMI

SEQ ID NO: 251866 - protein, 88 aa, Glycine max
  unsure (1)..(88): unsure at all Xaa locations
  Clone ID: PAT_MRT3847_69462C.1.pep
FFXSFFXXXXXXDEKPRSLMTRGEGKNNNYQTQKEKNKLHPGRNPSKEKYKGGGRKKLEDKRTGKFTKHGTRTPQEAHKTAGGGLKKR

SEQ ID NO: 251867 - protein, 273 aa, Glycine max
  Clone ID: PAT_MRT3847_69463C.1.pep
KGSRNQLLTEYNDSSEPLLLFRDYENNDNDNDAFSFLLERKRSFQTEPNKAFFSVRENINKPCELSTEVVNCDKLDLESEEFDCESMLDEEIEEGIDGIMRGRTVQKDDTNCTEGHIGLKQRSQSPLYHPSCHCGDGGKFGWVRTLRRVGEDDDTKWWNFCVVDMLQISPRMKHAAAEDLVPATTTTTTKKKAKNKKNKKDLVKELLPEEVAVSQGLLLKLNYDDVRNAWSDRGSPFADGSPGNDVTLSCSSLARDLKSKRKKVYFFVDGGRS

SEQ ID NO: 251868 - protein, 292 aa, Glycine max
  Clone ID: PAT_MRT3847_69464C.1.pep
MGGSSEKNKNAELILIPSPGIGHLTSSLEFAQLLINRDNRLSVTILCIKFPFTPFADSYIRTALASQPKIKLIDLPLVEPPPRELALNSPEHYIWTFMESLKPHVRAIMQNILSHPVVGLVLDIFAMSMVDVGDELGIPSYMFMTSNVAFTAFMLFLLSRRMEDVFSDSDPDLSIPGFPDPVPPSVLPDAAFNKDGGYATYYKLAKRFMDTKGIIVNSFSELEQYAIDALSEEGQSRTPPVYAVGPLIDLKGQPNPNLDQAQHDKVVEWLDEQPGSSVVFLCFGSMGGFGPF

SEQ ID NO: 251869 - protein, 38 aa, Glycine max
  Clone ID: PAT_MRT3847_69465C.1.pep
NLITLKVAHSSPRMYYVRIELRLFFIYSVCPSVVFSQP

SEQ ID NO: 251870 - protein, 172 aa, Glycine max
  unsure (1)..(172): unsure at all Xaa locations
  Clone ID: PAT_MRT3847_69466C.1.pep
LCFRKCLPNSWGVYLLDKPVAKAYYSLIHQARKFSTAVITNYEMIKVDRVGAHLMMYLITLNRPKALNALCIQLMDELLHSLNYLDKDDGVHATRLTDSERAFSFGADIKEMVPKKSDEAFGGGYLENRSPAATVRKPTIAVVIGHSLRGGCELSLMCXITYPGEQAMFGQS

SEQ ID NO: 251871 - protein, 234 aa, Glycine max
  Clone ID: PAT_MRT3847_69467C.1.pep
MSQMSSGIVGVGYIGTNYMVPLLLPPPFSSLCFNTFIKHKGLVLDSNHKGRRRGHGIVASSNVASPSIWDDWKPVKAPSTPSLSDILWPSAGAFAAMAILGKMDQLLAPKGLSIAFAPFGAVSTILFATPTAPTARKYNVFMAQIGCAAIGVLALTIFGPGWLARSASIAASVAYMIITNSVHPPAASMPLLFIDGPKFHHLNFWYALFPGAAACTLLTMVQEVVVYLKKNFKF

SEQ ID NO: 251872 - protein, 157 aa, Glycine max
  Clone ID: PAT_MRT3847_69468C.1.pep
PQLPSLLHAPDPAAPPPHPVHGALSGIKAPKQASGEHKKKKKIKVTFPSGQERNAPSQAIRKCLHCEITKTPQWRAGPMGPKTLCNACGVRYKSGRLFPEYRPAASPTFCAAMHSNSHKKVLEMRNKTGTKSGFATVSAASPELIPNTNSSLTLEYM

SEQ ID NO: 251873 - protein, 178 aa, Glycine max
  unsure (1)..(178): unsure at all Xaa locations
  Clone ID: PAT_MRT3847_69469C.1.pep
MASPPPLSLNVVGSDTDPNTNTFPTVTSSLTPPSPRRSSPLQNLSPSILIIVTVLAVTVIVSLALCFLLRHLNRRCLRRFSSSAPPSAAATPIFASSRRISPEILHSSASASASVIDTLPVFTFSSVTRRSSSVAGDCAVCLSKFHHHDLLRLLPLXCHAFHAECIDTWLQSNLSCPL

SEQ ID NO: 251874 - protein, 67 aa, Glycine max
  Clone ID: PAT_MRT3847_6946C.1.pep
SFSTYIPVHSSTISYDELLHIQSHELQYPFALTKQIFCSFHLVNITHHYMSLNVNTTNSLKYCDLPN

SEQ ID NO: 251875 - protein, 104 aa, Glycine max
  unsure (1)..(104): unsure at all Xaa locations
  Clone ID: PAT_MRT3847_69470C.1.pep
EDGRTLARYNMQMESSLHLLLRLRGGAQKRRKKTSTIPRNIKRTHKKVKLALPEFCRVNDSCKLHRLRKGXPDAECGAWTFLAGHSCRDCCSXCGSSYVYQTCE

SEQ ID NO: 251876 - protein, 166 aa, Glycine max
  Clone ID: PAT_MRT3847_69471C.1.pep
VSGHHNRPLMDCAVRCLHLLYERDCRHPFCPPALWLSPARKSRPPIAVAARTHEVLATNLRSDDSSASLSVGSVVTIVPHVFPFEERVEMFREFIKMDKASRKMAGEISEPGSRAIEIVIRRGHIVEDGFRQLNSLGSRLKSSIHVSFVSECGLLEAGLDYGGLSK

SEQ ID NO: 251877 - protein, 97 aa, Glycine max
  Clone ID: PAT_MRT3847_69472C.1.pep
LPQKGGGGGPHWRPPFLSLTRSPRGFGGWILSPNTPEAGFVLFFPPPPIVHLKGLGVNGRVYCGNPQMGGGPSQNSLPPGSFVCSPRPLFFPMKRQI

SEQ ID NO: 251878 - protein, 43 aa, Glycine max
  Clone ID: PAT_MRT3847_69473C.1.pep
SQYYSNLLSSKKAARGNSCHSSCDDAYTAHKAVDVSPSKGRVP

SEQ ID NO: 251879 - protein, 184 aa, Glycine max
  Clone ID: PAT_MRT3847_69474C.1.pep
MRGVFGPPLPFTIWYLPSHGAVHHGACRGAAAPMLISGKNGYDFKSVRRWTSQKKLGYGLHECDKIFVPIHKEIHWCLAVINKKDKKFQYLDSLRGTDAQVMKVLASYIVDEVKDKTGKDIDVSSWKKEFVEDLPEQQNGYDCGVFMIKYADFYSRNLGLCFNQEHMSYFRRRTAKEILRLKAN

SEQ ID NO: 251880 - protein, 322 aa, Glycine max
  Clone ID: PAT_MRT3847_69475C.1.pep
MAEDASIIPTHTKAWYYSEHGSPGDVLKLDPNWPLPQQLKDDQVLIKVIAASINPVDYKRMHGEFKDTDPHLPIVPGYDVAGIVVKVGGEVKKFKVGDEVYGDINEQGLSNLKIHGTLSEYTIAEERLLAHKPSNLSFIEAASIPLALETANEGFEHAHFSAGKSILVLGGAGGVGNYVIQLAKQVYKASKIAATASTGKLELLRELGVDLPIDYTKENFEDLPEKYDLVYDVVGQGDRAFKAVKEDGKVVTIVPPGHPPAMFFVLTSKGSILENLRPYFESGKLKPILDAKTPVPFSQVIEAISYLETSRATGKVVVYPIP

SEQ ID NO: 251881 - protein, 36 aa, Glycine max
  Clone ID: PAT_MRT3847_69476C.1.pep
RDKVPTVTYLHWFRSIFISLTLSCAFLIAKSCLFLT

SEQ ID NO: 251882 - protein, 51 aa, Glycine max
  unsure (1)..(51): unsure at all Xaa locations
  Clone ID: PAT_MRT3847_69477C.1.pep
XADGPSSLPVYKGRSFDSSNYQTQDDGETIIDPKKIQAPVKEVVSSPRCSY

SEQ ID NO: 251883 - protein, 51 aa, Glycine max
  Clone ID: PAT_MRT3847_69478C.1.pep
GILPQGKKQLVKTRFQNNCCTCNKLMMEETAISRCLVPFLFHDITYRRTMF

SEQ ID NO: 251884 - protein, 37 aa, Glycine max
  Clone ID: PAT_MRT3847_69479C.1.pep
SIQMMVSNFPTLFKKKNPYFKLFFLKLFNTFFFKNNN

SEQ ID NO: 251885 - protein, 49 aa, Glycine max
  Clone ID: PAT_MRT3847_6947C.1.pep
MIDVVRELVHMTKESLDGGIMKGPALEETFSNSSLLQMISMSPDSMNVP

SEQ ID NO: 251886 - protein, 42 aa, Glycine max
  Clone ID: PAT_MRT3847_69480C.1.pep
DYKSRQGCNVISGESIDAVYLPMDLSVADWYSDNHLSKRTSG

SEQ ID NO: 251887 - protein, 47 aa, Glycine max
  Clone ID: PAT_MRT3847_69481C.1.pep
KIHLTIVSLLDSHLTSNVSHKNNPGTDQLVNLAHHHRILHMYLCSCG

SEQ ID NO: 251888 - protein, 100 aa, Glycine max
  Clone ID: PAT_MRT3847_69482C.1.pep
CRFLVWRTIFVILATILAMVMPFFSEVLSLLGAIGFGPLVVFIPIQMHIAQKSIRKLSLRWCGLQFLSCLSFIVSLGAVVGSVHGIIQDFHKSDLFMYKQ

SEQ ID NO: 251889 - protein, 50 aa, Glycine max
  Clone ID: PAT_MRT3847_69483C.1.pep
HTKNINRNLDDKIKQEFIQVHLNKLSKCLHFGGVALVVRVSSREIKFFRV

SEQ ID NO: 251890 - protein, 129 aa, Glycine max
  Clone ID: PAT_MRT3847_69484C.1.pep
LEPIRLEGSVAMGLLFSLFGVFGLIMIAIETRKRRKKKEAALEAYGDGNSHSGPANVSWKHTSTREALSINLATFEKPLRKLTFADLLDATNGFHNDSLIGSGGFGDGTRLLVYEYMKYGSLEDVLHDQ

SEQ ID NO: 251891 - protein, 59 aa, Glycine max
  Clone ID: PAT_MRT3847_69485C.1.pep
IDYLLRRFFFKPFWLWGLVLVGFPPRGTGPKNECWVIRATPMGKEMGKKNGGMATRASL

SEQ ID NO: 251892 - protein, 137 aa, Glycine max
  Clone ID: PAT_MRT3847_69486C.1.pep
TLSFSPNLPLFFPFNFLFTAKMGESNSNKKRKLICREEEHEEEEETKMETFFALVRNFRDTRDRWMGLRSGDRKSKRGKIITAKEENIVWKPTFQLEDFADEQARCRNSLEPSASSQSKNCDKEDAAEKGIDLSLSL

SEQ ID NO: 251893 - protein, 415 aa, Glycine max
  unsure (1)..(415): unsure at all Xaa locations
  Clone ID: PAT_MRT3847_69487C.1.pep
TPRRRNWHRRPLPLDGSVAMGXLFSLGCVFGWIIIAIETRKRRKKKEAALEAYGDGNSHSGPANVSWKHTSTRADSARDLATFEKPLRKLTFADLLDATNGFHNDSLIGSGGFGDVYKAQLKDGSVVAIKKLIHVSGQGDREFTAEMETIGKIKHRNLVPLLGYCKVGEERLLVYEYMKYGSLEDVLHDQKKAGIKLNWAIRRKIAIGAARGLAFLHHNCIPHIIHRDMKSSNVLLDENLEARVSDFGMARLMSAMDTHLSVSTLAGTPGYVPPEYYQSFRCSTKGDVYSYGVVLLELLTGKRPTDSADFGDNNLVGWVKQHAKLKISDIFDPELMKEDPNLEMELLQHLKIAVSCLDDRPWRRPTMIQVMAMFKEIQAGSGIDSQSTIANDEEGFNAVEMVEMSIKEAPELSKH

SEQ ID NO: 251894 - protein, 100 aa, Glycine max
  Clone ID: PAT_MRT3847_69488C.1.pep
KRTFLVNGLMCVTPEFTIYPLCIKRHWIFTFSHTKKNLFLHTRRYQKACIQKPPPQSFFFFQNFYQFYLFFFILFLLHYLFFFFIFFFGRVGGRVGERVG

SEQ ID NO: 251895 - protein, 98 aa, Glycine max
  unsure (1)..(98): unsure at all Xaa locations
  Clone ID: PAT_MRT3847_69489C.1.pep
QQVFKKQFPGFKIPIFAITRPFXTLGKSPSKSGFGRAXEGCWGTGPVKTPSXLLGNSKFPGPGFNAPQYVFWASVLPSRVVNQVLVEALFFQGIFFVP

SEQ ID NO: 251896 - protein, 80 aa, Glycine max
  Clone ID: PAT_MRT3847_6948C.1.pep
LLGVVRRRKFSSKVLNVLGFVGYGDGEACVLWDCSGRCEKWVEVTLVPWRGYPSTRGALWFGLFSGPLGSEAPIEGMSVL

SEQ ID NO: 251897 - protein, 55 aa, Glycine max
  Clone ID: PAT_MRT3847_69490C.1.pep
IRELIRLKKVHIDYIKKAHKYNHSIQFWKMKKIQAIENRAYPINKKTTLRDRNTP

SEQ ID NO: 251898 - protein, 61 aa, Glycine max
  Clone ID: PAT_MRT3847_69491C.1.pep
IGGPTAFFSKGEGGAPILTPLINYKLGGATFIVKRGKNLLDVLQGVKNLKGSFFPFGGPKE

SEQ ID NO: 251899 - protein, 72 aa, Glycine max
  unsure (1)..(72): unsure at all Xaa locations
  Clone ID: PAT_MRT3847_69492C.1.pep
PPYDYISPAPPTTXATPPYHYVRPAPPSTSSTAPYEGAXAAAASAAPAPKYMDKSPPPCGYIYASPHCPVFR

SEQ ID NO: 251900 - protein, 65 aa, Glycine max
  Clone ID: PAT_MRT3847_69493C.1.pep
IGRTLRTLGALGPCGEGAAELFISQGHSSLWDLMQKKMAGRVAKRTYGLEEILPLEEFGWRGREQ

SEQ ID NO: 251901 - protein, 62 aa, Glycine max
  unsure (1)..(62): unsure at all Xaa locations
  Clone ID: PAT_MRT3847_69494C.1.pep
LPIPLCEVNQGPEKRPDHDEWVTCDIDSDETCDDVYNLAXHKYVDEEEXWFGFNYSKEWLRW

SEQ ID NO: 251902 - protein, 77 aa, Glycine max
  unsure (1)..(77): unsure at all Xaa locations
  Clone ID: PAT_MRT3847_69495C.1.pep
GLKTKRKAGRKQGEXGAAKDQLRPACNITGSALINHGRLQQDWKTAYQLMLTHRLRSANSKGRPIDFKMTTKEMDRR

SEQ ID NO: 251903 - protein, 38 aa, Glycine max
  Clone ID: PAT_MRT3847_69496C.1.pep
AYPALHIVILLNMLLSIQPHVFKINPFCPKPVYSINPS

SEQ ID NO: 251904 - protein, 57 aa, Glycine max
  Clone ID: PAT_MRT3847_69497C.1.pep
LADLLSAKNHMGRSMATILDVNEVFLRSVIVSDIWFKSVLVHGVHPQVLIYPFKSPS

SEQ ID NO: 251905 - protein, 104 aa, Glycine max
  Clone ID: PAT_MRT3847_69498C.1.pep
TEKPLMPKGTYVTGMLRDSDSITWSGHYRSNSTARRRTGNHGHSLTGCHCVYLKERYNSEDPHCVLKRGERLLMNLATGGAKPGVVLQCICEYGTYKLANYFGG

SEQ ID NO: 251906 - protein, 83 aa, Glycine max
  Clone ID: PAT_MRT3847_69499C.1.pep
GYAAYFGSPFPFFAPGPSVSVSVGNGCGPNLPFLLLAVFGAVVGTFFGSLFYDFVHWQPETPRFCRVAVSFKVCNFVLSLSFL

SEQ ID NO: 251907 - protein, 91 aa, Glycine max
  unsure (1)..(91): unsure at all Xaa locations
  Clone ID: PAT_MRT3847_6949C.1.pep
ICFVRQMLNVASDCHLHGLLQRDMIPXNGVFNSTNXYSPLKATHFGLSDFIKPAKRFQDIVGTAYYVSPEVLKRKSGPXSHLLSIGVITYI

SEQ ID NO: 251908 - protein, 97 aa, Glycine max
  Clone ID: PAT_MRT3847_694C.1.pep
NIVIKRVLLILAVCLQNSWHTMLALQPIDTQCIVKTFMLARATPCIITSESKSSIRTFDMKKTEVHNMNSLLMLFMLPVEYTQRAFSSLVIPVGKLS

SEQ ID NO: 251909 - protein, 90 aa, Glycine max
  Clone ID: PAT_MRT3847_69500C.1.pep
KATELILHSVPKRTCYDHVEYFTGLVGSRSHMPPSLRDSRILEIQSREVLSLSRGGPRIQDVAGSSYHRWYQGIWGFTLPLFLQRWSRKL

SEQ ID NO: 251910 - protein, 55 aa, Glycine max
  Clone ID: PAT_MRT3847_69501C.1.pep
PCRQVVPSARSTILLLERSSPSSSHGLMIFVSVCLGAPTVSYVKQIYIISYDSAG

SEQ ID NO: 251911 - protein, 66 aa, Glycine max
  Clone ID: PAT_MRT3847_69502C.1.pep
LTLFLQDQFWMVSSTMQSLLGLEVMLEETSHHQTIQQSLQLLQEGFEVRCNLERPLLSSFAAVLEP

SEQ ID NO: 251912 - protein, 92 aa, Glycine max
  Clone ID: PAT_MRT3847_69503C.1.pep
CCLTVRSTALPKMVLIVCYLSIFLGRLLGVLFVCIFLRFAFGFYSVLFRAFLCFRLFVTPSSLTPLRAPPPPPPQRRRTSYSDDGKPSLERN

SEQ ID NO: 251913 - protein, 48 aa, Glycine max
  Clone ID: PAT_MRT3847_69504C.1.pep
VYPLFASVGVAVGICGMQLVRNITTNPEVRYIWIFHICIQQVVGLDFF

SEQ ID NO: 251914 - protein, 130 aa, Glycine max
  Clone ID: PAT_MRT3847_69505C.1.pep
MKKINLLLRKCKSLSRQLGRSSSYSSLRSKSTKEDIWGGGHGMQEDENCETIFVGSTRKRYIISKKYLNHPLLNALINKSKQIKKDSDESSVLVVNCEVVLFDHLLWMLENADPKFSSESLEELAELYVF

SEQ ID NO: 251915 - protein, 396 aa, Glycine max
  unsure (1)..(396): unsure at all Xaa locations
  Clone ID: PAT_MRT3847_69506C.1.pep
RGGRGGVRFGGRGGGRGGGWRCPNQSCGNLNFAKRVECNKCGAPSPNPNSSNGLEGSGSGGGYNRGGGGYGNNRGGRGNDYSSGGGRSGSYDGGRGNEYNSGRGGNSEGRGGSYRGSHGREDGGYGQVPAPTAQSYGGGGGNHPSTYSSYTGGNAIYGTXSNPPPASYTGGPNSYPPSYGGSVGGYGGDNQWDAGCKVPXLSGLLGRRSGGRSGPPTGYDSTYGAGNRGGFGGSSAEPPAAVRQCDENCDDTCDNSRIYISNLPPDVTIEELRELFGGIGQVGRIKQKRGYKDQWPWNIKIYTDDNGNNKGDACLAYEDPSAAHSAGGFYNNYDLRGYKISVAMAEKSAPRAPPAYNQGGNRGGYGGDRRRDNYRDGGGGSGPDRRDHYGNRSRPY

SEQ ID NO: 251916 - protein, 71 aa, Glycine max
  Clone ID: PAT_MRT3847_69507C.1.pep
SHSIQSHLTNPNVHKLTSKMVEINNKQLSITLKSRKLVNNESRQVVCIKIILDITLAIACQHVLEKLRTPS

SEQ ID NO: 251917 - protein, 111 aa, Glycine max
  Clone ID: PAT_MRT3847_69508C.1.pep
WKTLNGKEFVSFLEQILEALNKGEIPSTGSLVEVFNKNILEKCLKLYSEKMAKLVLPLSEKSLQGAHDRSRDEVTKVFYQQHFGRHHAKKSFIQLGEQIQQVYKNAVLQNE

SEQ ID NO: 251918 - protein, 146 aa, Glycine max
  unsure (1)..(146): unsure at all Xaa locations
  Clone ID: PAT_MRT3847_69509C.1.pep
MVLSTTDSEAYDYDNSPFDSKSVLASLSTFKMACASXPMEAESHIINNELMLDGTPRENLXASFVTTYMDPXSDKLIMHDINYIYVDMDEHPDTTELQTLSAIMILHFCNAPPKDTEATHAVRTGGSSEALMSTGLACQRLWQCTT

SEQ ID NO: 251919 - protein, 76 aa, Glycine max
  unsure (1)..(76): unsure at all Xaa locations
  Clone ID: PAT_MRT3847_6950C.1.pep
LFPSESLRPNSAFFGMEGMTKEDAFSMVKQGGLDGDGKLKETEFCPPMGRLTPGIMENAXSWLEKAIYEKLRKSSF

SEQ ID NO: 251920 - protein, 74 aa, Glycine max
  Clone ID: PAT_MRT3847_69510C.1.pep
TFWGKFIPGAVPPKWDKGVLYVFLECPFKKTKGCKKKKRPLIKGIFFLKKKKKKKKKKKKKKKKKKKKKKKPKH

SEQ ID NO: 251921 - protein, 122 aa, Glycine max
  Clone ID: PAT_MRT3847_69511C.1.pep
NTYIRPDLQGYLTYITGQASTAHLNPQPHQPRHYNHPRTTNITHAQATQHPLIWSTFSNMVESHAINLNVLRPCSLNGYKGAAQCLLSYSIVYRLLCFPRRPRAFKYCPLTRAFFVINAAQT

SEQ ID NO: 251922 - protein, 72 aa, Glycine max
  Clone ID: PAT_MRT3847_69512C.1.pep
TCPYGDHSQFAHGIGKLRPVIRHPRYKTEVCRMVLAGVVCPYGHRCHFRHALTEQEKAVVSQPKPRSMKLER

SEQ ID NO: 251923 - protein, 134 aa, Glycine max
  Clone ID: PAT_MRT3847_69513C.1.pep
DVREESFSMLPFASNKSTMEESIEPSFMKGFKAQDTQVALQSQRSFRSDPGPVGKEKDNQAPICPGYEDHISQGHCSNSFGLSTPENRTFEDDEDIFSKMEFSRICRKYQMGLSCSDAEVDYRRGRSFREKKGM

SEQ ID NO: 251924 - protein, 59 aa, Glycine max
  Clone ID: PAT_MRT3847_69514C.1.pep
NFKQQQPNSTTQISKFIERKKKKVKPSKTHQTLLDRRTRNRLNRIKSPITKLIRKRHRL

SEQ ID NO: 251925 - protein, 130 aa, Glycine max
  Clone ID: PAT_MRT3847_69515C.1.pep
VRLQSGPDSGSPRGRRTLVNNKAKRSMGLLWWRKGNKPQPQLQAKSSSIPKSNGTDATKPLTEAPGMNGAVEVPRPPNTTVSIFEFGSVTASNDQVTLAGYCPVSEDLEPCRWEILPAVQSNAPQFRVVF

SEQ ID NO: 251926 - protein, 153 aa, Glycine max
  unsure (1)..(153): unsure at all Xaa locations
  Clone ID: PAT_MRT3847_69516C.1.pep
NFLYQWAFAIAAAGITSGSIAERTQFVAYLIYSSFLTGFVYPVVSHWFWSADGWASAISSADHVFSPGDRLLSTGVIDFAGSGVVHMVGGVAGFWGALIEGPRIGRFDHGGXRAXALRGHSASLVVLGTFMLWFGWYGFNPGSINKILVSYGN

SEQ ID NO: 251927 - protein, 99 aa, Glycine max
  Clone ID: PAT_MRT3847_69517C.1.pep
NFLYQWAFAIAAAGITSGSIAERTQFVAYLIYSSFLTGFVYPVVSHWFWSADGWASAISPGDRLFSTGVIDFAGSGVVHMVGGVAGFWGALIEGPRIGR

SEQ ID NO: 251928 - protein, 57 aa, Glycine max
  Clone ID: PAT_MRT3847_69518C.1.pep
QGKPSYKTTCVVIYNIDRIKARTKQKYNNAFNNSIPINKSIRLISKIDEENTFNKSK

SEQ ID NO: 251929 - protein, 297 aa, Glycine max
  Clone ID: PAT_MRT3847_69519C.1.pep
VQGHFQKVLTSIGNFCICSIAVGMLIELVVMYPIQKRSYRDGIDNLLVLLIGGIPIAMPTVLSVTMAIGSHRLSQQGAITKRMTAIEEMAGMDILCSDKTGTLTLNKLTVDKSLIEVFPTGMDKDTLVLYAARASRTENQDAIDASIVGMLDDRKEARAGITEVHFLPFNPVDKRTAITFIDNNGDWHRSSKGAPEEIIELCGLKGETLKKAHKVIDEFANRGLRSLGVSRQTVSERTKESAGDAWEFLGLLPLFDPSRHDSSETIRRALELGVNVKMITGDQLAIGKETGRRLGMG

SEQ ID NO: 251930 - protein, 103 aa, Glycine max
  Clone ID: PAT_MRT3847_6951C.1.pep
RVYNTHTMVHNSIMRILPSEKIAPMLEADGELFNSRWGFLSRAGLWDKSHLMRQIEKYADIYTCRVSNFLYYTPFMYFRSQEQNLAHDSYTYYCSQLYNENSS

SEQ ID NO: 251931 - protein, 76 aa, Glycine max
  Clone ID: PAT_MRT3847_69520C.1.pep
HASVLFFFICLTTSCIYIYIYIYIYLHCLDTVCIGLINKTNSILKKCINNINYKRIDVVYVVFAFFIFFIIRHRFS

SEQ ID NO: 251932 - protein, 77 aa, Glycine max
  Clone ID: PAT_MRT3847_69521C.1.pep
PLTSGIILTQERPYHGPPNELDETPTATAHLGTSQHRSERKAGGGWGPNAGHCNRLKDMEGTCAGKSRVRPGCHCIL

SEQ ID NO: 251933 - protein, 42 aa, Glycine max
  Clone ID: PAT_MRT3847_69522C.1.pep
HKTVTDCTCQNVAHICGNRWYCLYTISCHIVRRAHFSTGKWI

SEQ ID NO: 251934 - protein, 59 aa, Glycine max
  Clone ID: PAT_MRT3847_69523C.1.pep
LISIYIIPAFDARFHFRFAFKRRALRPGSPTLITPRTCGTLPALHSTPGPALPRCIPLN

SEQ ID NO: 251935 - protein, 48 aa, Glycine max
  Clone ID: PAT_MRT3847_69524C.1.pep
QFPVRQLPKLKEIRSGSSTGSMFSLPPLKISGSEETWKKIPVLEQTAK

SEQ ID NO: 251936 - protein, 72 aa, Glycine max
  unsure (1)..(72): unsure at all Xaa locations
  Clone ID: PAT_MRT3847_69525C.1.pep
VDGVLIRLRETRMHCVFGGXQIPIILRESCWRESTFQALSAKGHPFDSGAYGDPSFISQKLPIIMHKTQKLK

SEQ ID NO: 251937 - protein, 56 aa, Glycine max
  Clone ID: PAT_MRT3847_69526C.1.pep
AIDLVIESSGLGSKTYVELIVAESLYRDGTAHIVLTSTIDRWFVYMEPTVDQILFL

SEQ ID NO: 251938 - protein, 95 aa, Glycine max
  Clone ID: PAT_MRT3847_69527C.1.pep
PKGNRHHTHNNHQIPEHTCSICQTLQKSHDCTLSTVIKQCEYSVNDYHQSHLERLYHTHAAINWSLCRVCTPNFKVTHFILYDIILIINGFNKPS

SEQ ID NO: 251939 - protein, 33 aa, Glycine max
  Clone ID: PAT_MRT3847_69528C.1.pep
MTFRKCFLKDKNESNVTNEKEQVSVFIILTILN

SEQ ID NO: 251940 - protein, 100 aa, Glycine max
  Clone ID: PAT_MRT3847_69529C.1.pep
RFLIGRVNLPLHRCRYPQYHLRPFVLQSVDVLYLAGIIRRNVVPSDAEVSAAVAIIRRIITIAEYESVRETVSYDWNSSVVLHSYQHRFDKHMIGSYSYR

SEQ ID NO: 251941 - protein, 195 aa, Glycine max
  Clone ID: PAT_MRT3847_6952C.1.pep
MAVSVTILVLIIALHLIAFVFAIGAERRRSEAKVVPDEYDDRTFCVYTTDASSVYGLAAVALLLLSHTVLNGVTRCLCCGKGLVSGCSATCAVFSFILSWISFLAAEACLLAGSARNAYHTKYRGYFVKHDLSCATLRKGVFAAGAALTLLSMLTAILYYWAHSKADTGFWEKHRNEGLGLATQHHHQGPDSDKA

SEQ ID NO: 251942 - protein, 162 aa, Glycine max
  unsure (1)..(162): unsure at all Xaa locations
  Clone ID: PAT_MRT3847_69530C.1.pep
MASMAAIGSLNVPCSASSRSSNVGRKSFPRSLSFSASQLCGDKIHTDSVSFAPKIGRNPVIVTPKAVSDSQNSQTCLDPDASRSVLGIILGGGAGTRLYPLTKKRAKPAVPLGANYRLIDIPVSNCLNSNVSKIYVLTQFNSASVNRHLSRAYASXMGGYKN

SEQ ID NO: 251943 - protein, 52 aa, Glycine max
  Clone ID: PAT_MRT3847_69531C.1.pep
GKHQIIIHREASHPYLSSRSTHDQLMKIQEISLSQITLFLLTTCMCSLASCM

SEQ ID NO: 251944 - protein, 515 aa, Glycine max
  Clone ID: PAT_MRT3847_69532C.1.pep
MASMAAIGSLNVPRSASSRSSFVGRKSVPRSLSFSASQLCGDKIPTDSVLLAPKIGRSPVIVTPKAVSDSQNSQTCLDPDASRSVLGIILGGGAGTRLYPLTKKRAKPAVPLGANYRLIDIPVSNCLNSNVSKIYVLTQFNSASLNRHLSRAYASNMGGYKNEGFVEVLAAQQSPENPNWFQGTADAVRQYLWLFEEHNVLEFLVLAGDHLYRMDYEKFIQAHRETDADITVAALPMDEARATAFGLMKIDEEGRIIEFAEKPKGEQLKAMKVDTTILGLDDERAKEMPYIASMGIYVVSKNVMLDLLREKFPGANDFGSEVIPGATSIGMRVQAYLYDGYWEDIGTIEAFYNANLGITKKPVPDFSFYDRSSPIYTQPRYLPPSKMLDADVTDSVIGEGCVIKNCKIHHSVVGLRSCISEGAIIEDTLLMGADYYETEADKRFLAAKGSVPIGIGRNSHIKRAIIDKNARIGENVKIINSDNVQEAARETDGYFIKSGIVTVIKDALIPSGTVI

SEQ ID NO: 251945 - protein, 46 aa, Glycine max
  Clone ID: PAT_MRT3847_69533C.1.pep
DMSALLLLQQPNLPYVHLQIIKWRVLDLENSVQKASLVYEVHQNTG

SEQ ID NO: 251946 - protein, 39 aa, Glycine max
  Clone ID: PAT_MRT3847_69534C.1.pep
GSLGMKEPGLRPRRSCYSSIKSTSYLALAQIPDYERAHA

SEQ ID NO: 251947 - protein, 75 aa, Glycine max
  Clone ID: PAT_MRT3847_69535C.1.pep
MREMRMKKLILILIAASTFVSVARSASDHFFENYGVSLAVAATPGPTPVMEPLTLIHGAAFKGAVCLDGTSPGYH

SEQ ID NO: 251948 - protein, 59 aa, Glycine max
  Clone ID: PAT_MRT3847_69536C.1.pep
VTAVEIANSTVYHLACGWRKKFHGARREQICTPCSLITESTGFLRAQNKDYLIESLPVF

SEQ ID NO: 251949 - protein, 457 aa, Glycine max
  Clone ID: PAT_MRT3847_69537C.1.pep
MQIFVKTLTGKTITLEVESSDTIDNVKSKIQDKEGIPPDQQRLIFAGKQLEDGRTLADYNIQKESTLHLVLRLRGGMQIFVKTLTGKTITLEVESSDTIDNVKAKIQDKEGIPPDQQRLIFAGKQLEDGRTLADYNIQKESTLHLVLRLRGGMQIFVKTLTGKTITLEVESSDTIDNVKAKIQDKEGIPPDQQRLIFAGKQLEDGRTLADYNIQKESTLHLVLRLRGGMQIFVKTLTGKTITLEVESSDTIDNVKAKIQDKEGIPPDQQRLIFAGKQLEDGRTLADYNIQKESTLHLVLRLRGGMQIFVKTLTGKTITLEVESSDTIDNVKAKIQDKEGIPPDQQRLIFAGKQLEDGRTLADYNIQKESTLHLVLRLRGGMQIFVKTLTGKTITLEVESSDTIDNVKAKIQDKEGIPPDQQRLIFAGKQLEDGRTLADYNIQKESTLHLVLRLRGGF

SEQ ID NO: 251950 - protein, 217 aa, Glycine max
  Clone ID: PAT_MRT3847_69538C.1.pep
MAIAWLRNLQNLWPFRVDELRDSKQLVKKLSIPQDTKQFVFALRDPQTQSIIYILSSLNLSERSASDATCLIKEIKPDAVLVQAGVSPFSELQSEEDSVPVPTSSFGVIKRCFLDKIGRDMYENVAGNFVLREIFGTSFHGPLLAAKRAAEDVGSSFLVIESPSCWGNSNSDSNSNNSDSHSDRDSHFRSLVNSLVPKQHAASWAPSAKRFSLDRDL

SEQ ID NO: 251951 - protein, 198 aa, Glycine max
  Clone ID: PAT_MRT3847_69539C.1.pep
KKRDDMLRFKQMDPSISGRGAEPVYRDKVKGVRISKEEYLKSKQKVEEKPKEIEIEWGKGLAQKREAETRLKELELEKEKPFARTRDDPELDKMLKERLRWGDPMAHLVKKKYPEPVLPNLGENEKMKESGFVIPQDIPNHSWLKRGLDAAPNRYGIRPGRPWDGVDRSNGFEKDMFKRTNEKQARDREAYLWSVSDM

SEQ ID NO: 251952 - protein, 128 aa, Glycine max
  unsure (1)..(128): unsure at all Xaa locations
  Clone ID: PAT_MRT3847_6953C.1.pep
MAVSVTILVLIIALHLIAFVFAIGAERRRSEVTLPRLFLSPLALVSAIDLXNLIPFQAKVVPDEYDDRTFCVYTTDASSVYGLAAVALLLLSHTVLNGVTRCLCCGKGLVXGCSVTCAVFSFILSCFL

SEQ ID NO: 251953 - protein, 49 aa, Glycine max
  unsure (1)..(49): unsure at all Xaa locations
  Clone ID: PAT_MRT3847_69540C.1.pep
HSLQLIWLYKKCSFTWYTKCEVSADFTKIEXAVDSLSRKILTIHSTGDY

SEQ ID NO: 251954 - protein, 259 aa, Glycine max
  Clone ID: PAT_MRT3847_69541C.1.pep
KEEMAGESYEEAITSLTKLLSEKAELGGVAAAKIKELTAELDAAGSKPFNPEERIRTGFIHFKNEKFEKNPYLYGELAKGQSPKFMVFACSDSRVCPSHILDFQPGEAFMVRNIANMVPPYDKTKYSGAGAAIEYAVLHLKVENIVVIGHSCCGGIKGLMSIPDDGTTASEFIEQWVQICTPAKSKVKAGKSDLSFSEQCTNCEKEAVNVSLGNLLTYPFVRDGVVNKTLALKGAHYDFVNGNFELWDLNFKLLPTISV

SEQ ID NO: 251955 - protein, 50 aa, Glycine max
  Clone ID: PAT_MRT3847_69542C.1.pep
PSWKSWVQHLYLVGVSLKVYTDSCLVRIDGPFILYMSFKTNLISCDFFCV

SEQ ID NO: 251956 - protein, 102 aa, Glycine max
  Clone ID: PAT_MRT3847_69543C.1.pep
FHSYKQVDRNCFHFFFSSIYPNNTYSLLYFSYIPFFYFIHSHFFSLYFTLNLLTLVMQETKEITWDDSESIFVLFEYSLAIEEEILKSGWDLQIYRSLHTKK

SEQ ID NO: 251957 - protein, 81 aa, Glycine max
  Clone ID: PAT_MRT3847_69544C.1.pep
WDHAENRGRVQHYAAATNWRDHKDISSFYFTRFADDITERELWQHFKKWGDVREIFIPSRRNYNGRRYGFVRFKRLELEPN

SEQ ID NO: 251958 - protein, 122 aa, Glycine max
  unsure (1)..(122): unsure at all Xaa locations
  Clone ID: PAT_MRT3847_69545C.1.pep
KHRGEGGRHTRETRREHTRAEKERREAEERRPVXEATEKRQERREDESRQDSRKKGKGTARHRNHRAQKGHQGKNGKSGKKQREAPXPAGHVEAQKSEEKQQAYQAASADENNKERKRNAGK

SEQ ID NO: 251959 - protein, 73 aa, Glycine max
  unsure (1)..(73): unsure at all Xaa locations
  Clone ID: PAT_MRT3847_69546C.1.pep
PPPPKGGGRGGGGRGEGGGGGXAKKKEEXEEQRETAPGDRSEVQRMAMMRQAVRHAPLPRYAKFAMPRFQNSR

SEQ ID NO: 251960 - protein, 165 aa, Glycine max
  Clone ID: PAT_MRT3847_69547C.1.pep
MMRSKKQSQNKFVRIMASPIRALGKARDMYVRSITNCGQHVSYYGGDPTEGAGRFSRSHSVATSTRSEVVSEDYAELLRAASARTLANRIDMDLVLKQQQHANSSKGNNLPKSSSVGMARIEEDKPYDSEKGVTDSYPRSRSYAVEAKRRPSSAFQIPSSRLVSI

SEQ ID NO: 251961 - protein, 67 aa, Glycine max
  Clone ID: PAT_MRT3847_69548C.1.pep
IVACSNLARKTQGRALRSLGSYRPWSHISPLSLAWTGARCPVLHMICRHVLGFVHSIDGLLLTAASL

SEQ ID NO: 251962 - protein, 120 aa, Glycine max
  Clone ID: PAT_MRT3847_69549C.1.pep
IGMDLWNASSGGAEAAKMRHNQSGAPGVALGDQWVQDERELKRQKRKQSNRESARRSRLRKQAECEELQKRVESLGGENQTLREELQRLSEECEKLTSENNSIKEELERLCGPEAVANLD

SEQ ID NO: 251963 - protein, 196 aa, Glycine max
  Clone ID: PAT_MRT3847_6954C.1.pep
MAVSVTILVLIIALHLIAFVFAVGAERRRSEAKVVPDEYDDQTFCHYTTDASTVYGLSAVALLLLSHTVLNGVTRCLCCGKGLVSGCSATCAVFSFILSWISFLAAEACLLAGSARNAYHTKYRGYFVKHDLSCATLRKGVFAAGAALTLLSMLTAILYYWAHSKADTGFWEKHRNEGLGLATQHHHHQGPDSDKA

SEQ ID NO: 251964 - protein, 36 aa, Glycine max
  Clone ID: PAT_MRT3847_69550C.1.pep
FRRRTSLNTQRVRKTCSRVFAASKTLEKKGCEPEIY

SEQ ID NO: 251965 - protein, 53 aa, Glycine max
  Clone ID: PAT_MRT3847_69551C.1.pep
MTEQTKLSVLCSLFTWTQRSKSAAKKRAKFRKFLDAFCTDHNFFPAVRLLLPN

SEQ ID NO: 251966 - protein, 145 aa, Glycine max
  Clone ID: PAT_MRT3847_69552C.1.pep
YTNNNFLRFLLCFHSHCFVTMNIITLIRNRAMNSARRILIGSRNSSFSGSTPAKSDHTLSIANNSLKPRFYHDHSNHHLFQIHRTKGIAQKFFGLPSSNFAPSPMHFSFSTFNSDVSTFKVRNFSNSVETRINDNNFERIYVQGG

SEQ ID NO: 251967 - protein, 42 aa, Glycine max
  Clone ID: PAT_MRT3847_69553C.1.pep
RDRSNGLAKIQTHTMHSGICHDYSRPTAKAQTIDELNSLQKK

SEQ ID NO: 251968 - protein, 105 aa, Glycine max; identical to SEQ ID NO: 218902
  Clone ID: PAT_MRT3847_69554C.1.pep

SEQ ID NO: 251969 - protein, 131 aa, Glycine max
  unsure (1)..(131): unsure at all Xaa locations
  Clone ID: PAT_MRT3847_69555C.1.pep
STGASAFYFESTRSVFFSLYSYIAYEVVLLDGWPIPFLMMVTIALAEKGIKYVHNEEDLMNMIPLLLQINPFHMKIPILIHNCKPIFESLIACPLHYTSFWIDINXLLPCDPYQRSHSLFWSDYFYINIYY

SEQ ID NO: 251970 - protein, 47 aa, Glycine max
  Clone ID: PAT_MRT3847_69556C.1.pep
ALNFFLVKKVFKIQFWGGKFPLKAPNVVKKKRLKWNFRPFIFSNLGF

SEQ ID NO: 251971 - protein, 255 aa, Glycine max
  Clone ID: PAT_MRT3847_69557C.1.pep
GVTIGGTLFKAFKRIREHPTLDEISSLLAESLPGNATFFLTYVALKFFIGYGLELSRIVPLIIYHLKRKYLCKTEAELKEAWRPGDLGYGTRVPGDMLIVTIVFCYSVIAPVIIPFGALYFGLGWLVLRNQALKVYVPTFESYGRMWPHIHNRILASLILYQITMFGYFGTQKFYYTPLVLPLPILSLIFGFVCAKKFYPAFQHPALEVAANTLKEVPNMELIFRAYIPPSLRSEKIDDDRVEDALSQCSRTAPV

SEQ ID NO: 251972 - protein, 211 aa, Glycine max
  Clone ID: PAT_MRT3847_69558C.1.pep
FLFKFEGIPTESHAVRAASGKYFYFTVLNVFIGVTIGGTLFKAFKRIREHPTLDEISSLLAESLPGNATFFLTYVALKFFIGYGLELSRIVPLIIYHLKRKYLCKTEAELKEAWRPGDLGYGTRVPGDMLIVTIVFCYSVIAPVIIPFGALYFGLGWLVLRNQALKVYVPTFESYGRMWPHIHNRILASLILYQITMVGYFGTQKFYYTPL

SEQ ID NO: 251973 - protein, 54 aa, Glycine max
  Clone ID: PAT_MRT3847_69559C.1.pep
TVNNTCLPIILKKHWNVITHFYHDNSGIVKEINYIYPATFSLWFWIQIFFPGSC

SEQ ID NO: 251974 - protein, 60 aa, Glycine max
  unsure (1)..(60): unsure at all Xaa locations
  Clone ID: PAT_MRT3847_6955C.1.pep
SLRTPTRPAGGTILRRDLSANYXTEGNFRARVDXQRTHXRFKGKIKTVATVGIPEKTGIA

SEQ ID NO: 251975 - protein, 451 aa, Glycine max
  Clone ID: PAT_MRT3847_69560C.1.pep
ADLTPSVHVCYGLSWVCRATYFVFHPTVLSILVALAFISVFFRLLFSINDHGMFQQTTSNGTFSELDKLSMANITAKSSRLWGFFIACYWVSIVTFALLWRAYKHVSWLRAEALKSPDVKPEQFAIVVRDIPHVPQGQTRKEQVDSYFRDIYPETFYRSMIVTDNKVVNKIWESLEKYTKKLARAEAVYAGSKTTAKPEGTRPTNKTGFLGLVGKKVDTIEYCNEKINELEARLESEQKVTLREKQQDAAVVFFSSRVVAASASQSLHAQMVDTWSVFDAPEPNQLIWPNLKIKYFQRELRQYLVYFIVALTIFFYMIPITFISALTTLDNLVKYLPFIKPIVNIKALKTVLEAYLPQLALIIFLALLPKLLLFLSKFEGIPTESHAVRAASGKYFYFTVLNVFIGVTIGGTLFKAFKRIREHPTLDEISSLLAESLPGNATFFLTYVALK

SEQ ID NO: 251976 - protein, 89 aa, Glycine max
  Clone ID: PAT_MRT3847_69561C.1.pep
LNKICFRGGPKQCFTLFYICTRGGFFLLSKVLFVSFLKRISPLNRIVSDKYYNTNMLCKNLFFFFNYKKMDALMAFLFPFHREWPSYGQ

SEQ ID NO: 251977 - protein, 87 aa, Glycine max
  Clone ID: PAT_MRT3847_69562C.1.pep
LLAIIYIDLVHLFLQIFRMFPSGTKIRHISNERNHSAGKDTYKHILSFLLFYFHLLSSLFFLLHHLSYIFIIFLFFLSLFPQPQFFS

SEQ ID NO: 251978 - protein, 97 aa, Glycine max
  Clone ID: PAT_MRT3847_69563C.1.pep
KKHNERGRKKIILLTAAEKIWLQTIHGEEHENRMIPETENPPTCPLLTLGYTLFSSYFTQSLRLLFSVPNELYNTFSLKFWITFQTWTNEPRFPAFS

SEQ ID NO: 251979 - protein, 65 aa, Glycine max
  Clone ID: PAT_MRT3847_69564C.1.pep
YKDDLLVISNKTKNNRLANKGKGSQVNTVDHLSGFCLCLEQALTFRYFSHTNEVSVYNCVHMHFE

SEQ ID NO: 251980 - protein, 100 aa, Glycine max
  Clone ID: PAT_MRT3847_69565C.1.pep
KLGGLWWQLFFSYFKDLVGREVIVELKNDLAIKGTLHSVDQYLNIKLENTSVVDQEKYPHMLSVRNCFIRGSVVRYVQLPPEGVDIELLHDATRREARGG

SEQ ID NO: 251981 - protein, 42 aa, Glycine max
  Clone ID: PAT_MRT3847_69566C.1.pep
FSPQVEPFNNVVDFYKLTCFSRLLVFIFPGGNGVANPTLFYL

SEQ ID NO: 251982 - protein, 82 aa, Glycine max
  Clone ID: PAT_MRT3847_69567C.1.pep
MGSKMAIVIVALFAVLLFISPEVACRDFKEELGEVVKETNEESDARLAGSGGGDLDLSHGPWIGNCRRERHVPDRPSRPRAY

SEQ ID NO: 251983 - protein, 93 aa, Glycine max
  Clone ID: PAT_MRT3847_69568C.1.pep
MLFFSYFKDLVGREVIVELKNDLAIKGTLHSVDQYLNIKLENTSVVNQEKYPHMLSVRNCFIRGSVVRYVQLPPEGVDIELLHDATRREARGG

SEQ ID NO: 251984 - protein, 94 aa, Glycine max
  unsure (1)..(94): unsure at all Xaa locations
  Clone ID: PAT_MRT3847_69569C.1.pep
QRPRHKPSTITTFNSYKLSSTTATKTQHPLILTPFKYFFSNTHHHHTHIYISNAGPERPQTPNSILNCTQQLTXKPQPPLAKTLINHTHPCLQF

SEQ ID NO: 251985 - protein, 50 aa, Glycine max
  Clone ID: PAT_MRT3847_6956C.1.pep
ASLRPVLDRCSSIAIYTSLARVILSFGLVIKSNRRTAILLCLNTTENIEA

SEQ ID NO: 251986 - protein, 109 aa, Glycine max
  Clone ID: PAT_MRT3847_69570C.1.pep
MGSKMAIVIVALFAMLLFISPEVACRNFKEELGEVVKETNEESDARLAGSSGGDLDKSYCPVHLPLMEYRKWIGNCRCGCCQWTTEPEVCLYCCPESHVPDLPSRPRAY

SEQ ID NO: 251987 - protein, 40 aa, Glycine max
  Clone ID: PAT_MRT3847_69571C.1.pep
LNFRDKVGALPRHMHTYLSLDHIERPQLSMLSQGVVCWLG

SEQ ID NO: 251988 - protein, 469 aa, Glycine max
  unsure (1)..(469): unsure at all Xaa locations
  Clone ID: PAT_MRT3847_69572C.1.pep
MTSATSYTPLPENKPQIQHIINIPEQIEPEVHDQCCIYKVPPHLLKLNAEAYTPQFISIGPLHSDKPELKQEKQKQRYFHAFWKRXSQGLALSQYFLXPLENQQRLEKIGNCYSKPELHKEEKFVDLILLDSVFIMELFLRKANKSERKNDHMFTTSWVCKLAQRDLLLLENQIPMFVLEELHTRVILGDNGTKENSVKFVELAFNYFEDYYFSHKPSFEVEMIKKCKSCRHFTDLIRYTFLPTKIQVEGVNNVSVNPSQHFTPCQVECVLRTATKLNEAGVSFEKVQGRSYLDIKFEKTPILSWFLCFGCLPFSKWFKARLQIPHLKVDQVTECVLRNLIALEQCHYSDQPFICNYVTLIDSLIHTQEDVELLVDTEIIEHELGSHTELATMINGLCKHVLVTSNYYGKTPKELNEHYNCCWKHYLGMLISVYFRDPWRFSSTIVGTAVFLFAVVNFLRIIGVFRPNY

SEQ ID NO: 251989 - protein, 556 aa, Glycine max
  unsure (1)..(556): unsure at all Xaa locations
  Clone ID: PAT_MRT3847_69573C.1.pep
SLIKTIHIFTQFLFTFLDIILLPLPMEAFSVQSLTATTIPSSLSRRGATDKPSATSHVNLSHFMRYPCTTRSTKQKILCTRAQASGSTKSSTGSAEGISEKTDSKDDNLVFVAGATGRVGSRTVRELIKLGFRVRAGVRSAQRAGALVQSVEQLKLDGASGGGQAQXVEKLEIVECDLEKPETIGSALGDASTVICSIGASEKEVFDITGPFRIDYQATKNLIDAATVAKVNHFILVTSLGTNKIGFPAAILNLFWGVLVWKRKAEEALLASGLPYTIVRXPGGMERPTDAFKETHNITLSTEDTLFGGLVSNLQIAELLAVMAKNRDLSYCKIVEAIAETTAPLTPMEELLAKIPSQRPYISSPKKPDIAAVSVPDPPANVVTVEPKVATQQETAQPKPVAKQPLSPYIVYDDLKPPSSPSPSQPGGGKPTKISETVPKPSASDTPSSVPGVDGISQTTSSSKVEKPLSPYVAYPDLKPPTSPSPNAPTVSVSTPAAAGVPEIDTISSNGPAQLSAADEPKEEHLPEPKSRPLSPYTMYEDLKPPASPSPSFRNS

SEQ ID NO: 251990 - protein, 46 aa, Glycine max
  Clone ID: PAT_MRT3847_69574C.1.pep
NILIVYFFNKRTFFIIRLLIFYNNYSLRSRLYDILEKNCSKIDSFL

SEQ ID NO: 251991 - protein, 168 aa, Glycine max
  Clone ID: PAT_MRT3847_69575C.1.pep
WGGNGRQISRSDNRQARYKDRHNEKPEGKYRKNIHTIYRIIGKLRAESQISAGTKLGLGVYGPVNRANIAFVVGRVTIVIMLHYVCGVTNVGDDKLCFGTKVGVLIKITMCLHLTGFTGPVAFPGRSPVVQFRRRPYRNSYTAGFPSSLYDVLLSLGGGGGELKQIGE

SEQ ID NO: 251992 - protein, 124 aa, Glycine max
  unsure (1)..(124): unsure at all Xaa locations
  Clone ID: PAT_MRT3847_69576C.1.pep
KISETVPKPSASDTPSSVPGVDGISQTTSSSKVEKPLSPYVAYPDLKPPTSPSXNAPTVSVSTPAAAGVPEIDTISSNGPAQLSAADEPKEEHLPEPKSRPLSPYTMYEDLKPPASPSPSFRNS

SEQ ID NO: 251993 - protein, 90 aa, Glycine max
  Clone ID: PAT_MRT3847_69577C.1.pep
MCTPTITQSFPAINSSLSTIFILQTINIPANQQRGHLPHNNNKYCTLNIKNYQCPSQISMICNQTQYHKPCIVFCQKCCNTFLSFPSGYY

SEQ ID NO: 251994 - protein, 46 aa, Glycine max
  Clone ID: PAT_MRT3847_69578C.1.pep
LILWLKILILWLIASIKKSAKMCDFSMHSQVSFFQLVHQFSLSTQL

SEQ ID NO: 251995 - protein, 62 aa, Glycine max
  Clone ID: PAT_MRT3847_69579C.1.pep
FVECFVPMMLAVCFLCPSMDSLWHKDHSCPKCQGKVPAFEKSDPCSVMDPPPWTQESFAQFG

SEQ ID NO: 251996 - protein, 85 aa, Glycine max
  unsure (1)..(85): unsure at all Xaa locations
  Clone ID: PAT_MRT3847_6957C.1.pep
MHXFXHLAATXXXALFXTNRFXXLXXPSXTXXXVLLPAATXSSGXXHHGTXXDPQHFXXSRXYKKXKXLCXPLRXSVSQESTRDD

SEQ ID NO: 251997 - protein, 64 aa, Glycine max
  Clone ID: PAT_MRT3847_69580C.1.pep
NRLLFWRQLKFQGNTVTTRWSSFTCTFMRSQTTSTLSPNFISMIDALDSSHSETYSITNFHHYA

SEQ ID NO: 251998 - protein, 59 aa, Glycine max
  Clone ID: PAT_MRT3847_69581C.1.pep
RSRGLRVSGVKSDLIPYFSHSLLRLWSRVAMSSSLNLIYPSRHEYGQGERVNPRRLRTK

SEQ ID NO: 251999 - protein, 140 aa, Glycine max
  Clone ID: PAT_MRT3847_69582C.1.pep
NMYPLAQLIDDGVFIKDDTTSMLNLQMQDDDIMPAVQAFRASDNISSTNKYNNPNVVVPPSLSTSVILEGLNNDNDDHSKAALVVYDSNDDLGTEEADNLAIINGGGSLCNVNSLDENNKHCWNNIFNLVNDPLSGSSVF

SEQ ID NO: 252000 - protein, 94 aa, Glycine max
  Clone ID: PAT_MRT3847_69583C.1.pep
LCTQTSPTLRPSMSRVVAMLSGDIEVSTVTSKPGYLSDWKFEDVSSFMTGIEIKGSDTNYQNSSGSTSMMGGVDYYSPRDVSKPILKETLWEGR

SEQ ID NO: 252001 - protein, 41 aa, Glycine max
  Clone ID: PAT_MRT3847_69584C.1.pep
VDHVFYCSIVKLDPYMVGDGCPLPWPVCFWCWPKNQKGRTK

SEQ ID NO: 252002 - protein, 130 aa, Glycine max
  unsure (1)..(130): unsure at all Xaa locations
  Clone ID: PAT_MRT3847_69585C.1.pep
EYTKTYMSGDKXKSYLAGNKKIMTEGIKKSRESEQERKRAEREXVKENVSICIKKGXKEGEDKVSIWTKINDEACNWMDMQEAERVNVINGXREMYIQRREEARRQRMKDIDRVGWLKVTDVRNREEIEE

SEQ ID NO: 252003 - protein, 42 aa, Glycine max
  unsure (1)..(42): unsure at all Xaa locations
  Clone ID: PAT_MRT3847_69586C.1.pep
FXLIXILVLVGXRFXXMXPTKRKXSQAFSVSPICXLRVPLXT

SEQ ID NO: 252004 - protein, 44 aa, Glycine max
  Clone ID: PAT_MRT3847_69587C.1.pep
STAPDIHKSSPPSLKSIILSQSYLTNDVHTLPSNSTMHNKLYHY

SEQ ID NO: 252005 - protein, 40 aa, Glycine max
  Clone ID: PAT_MRT3847_69588C.1.pep
GLSIIHITLYGFLSPTKISQGHDKVASSSSFGLPYTFAIV

SEQ ID NO: 252006 - protein, 132 aa, Glycine max
  unsure (1)..(132): unsure at all Xaa locations
  Clone ID: PAT_MRT3847_69589C.1.pep
MLVLLAFIIXAFHITSAALLFIATVDNAWWVGDEFFADVWRICTNNTNCTVINDSFQEYSTLQAVQATMILYTILCXIDFFIFVLQLFRLKQGERFVLTSIIQLMSCLCVMIADSIYTDRREDIHDXNAKFY

SEQ ID NO: 252007 - protein, 78 aa, Glycine max
  Clone ID: PAT_MRT3847_6958C.1.pep
GFWDGGLFLKGENNSLFVVLPGGSLFKQLFFSMLANGQGKLGPPGVFIKNLEAPPAPSIKFPPVLKIFPLEKKYFLCP

SEQ ID NO: 252008 - protein, 56 aa, Glycine max
  unsure (1)..(56): unsure at all Xaa locations
  Clone ID: PAT_MRT3847_69590C.1.pep
KSKVFQKNLNKHKYHRRTSKNWINLYKEMYMIHWLMLSATFTDFNSIGQAITFXIL

SEQ ID NO: 252009 - protein, 70 aa, Glycine max
  Clone ID: PAT_MRT3847_69591C.1.pep
ILSRSFLYCASTTFDCYYWCSKPQICYRATVSCIYSSSPRNVLHSKIWNLIHWIGYTCHCIHYILVEHYA

SEQ ID NO: 252010 - protein, 63 aa, Glycine max
  Clone ID: PAT_MRT3847_69592C.1.pep
FLVPSVLHHVDFGLMVCTIVNYFVFSPHLSLFFVYRKLSTVNILSLVITRYPQRSHGLLGLRL

SEQ ID NO: 252011 - protein, 42 aa, Glycine max
  Clone ID: PAT_MRT3847_69593C.1.pep
CDFVSNFVVYTSGFTFCFPMCYILFSHSLLFALRLSVVFKIK

SEQ ID NO: 252012 - protein, 34 aa, Glycine max
  Clone ID: PAT_MRT3847_69594C.1.pep
FTRGSMVEGGSVFDVNLVNISPTFNYNVSEHFVL

SEQ ID NO: 252013 - protein, 640 aa, Glycine max
  unsure (1)..(640): unsure at all Xaa locations
  Clone ID: PAT_MRT3847_69595C.1.pep
TDSLGDAGYPGXLPRLGMQFVGWXVAYITEKDFLFWFRSHTAKEIKWGGAKXILRTRMMGXRMHPRSSFKAFLEVVKSRSLPWENAEMDAIHSLQLILRDSFKDAEHRNSKAVVDPHVSEQELQGVDELSSVAREMVRLIETATAPIFAVDVDGHVNGWNAKVSELTGLPVEEAMGKSLVHDLVFKESEETMNKLLSRALKGEEDKNVEIKMRTFGPEHQNKAVFLVVNACSSKDFTNNVVGVCFVGQDVTGQKIVMDKFINIQGDYKAIVHSPNPLIPPIFASDDNTCCLEWNTAMEKLTGWGRVDVIGKMLVGEVFGSCCQLKGSDSITKFMIVLHNALGGQDTDKFPFSFLDRHGKYVQTFLTANKRVNMEGQIIGAFCFLQIMSPELQQALKAQRQQEKNSFGRMKELAYICQGVKNPLSGIRFTNSLLEATSLTNEQKQFLETSVACEKQMLKIIRDVDLESIEDGSLELEKGEFLLGNVINAVVSQVMLLLRERNLQLIRDIPEEIKTLAVYGDQLRIQQVLSDFLLNIVRYAPSPDGWVEIHVRPRIKQISDGLTLLHAEFRMVCPGEGLPPELIQDMFNNSRWGTQEGLGLSMSRKILKLMNGEVQYIREAERCYFYVLLELPVTRRSSKKC

SEQ ID NO: 252014 - protein, 83 aa, Glycine max
  Clone ID: PAT_MRT3847_69596C.1.pep
RKYRSNGTHGGLDNVEYTSDREIRRRLLKLNKKSMDSESETSDDDLDKSYEDGKSDSHTRTSDSESDREVHSESLSRESRGDG

SEQ ID NO: 252015 - protein, 383 aa, Glycine max
  Clone ID: PAT_MRT3847_69597C.1.pep
DKFINIQGDYKAIVHNPNPLIPPIFASDDNTCCLEWNTAMEKLTGWSRADVIGKMLVGEVFGSCCQLKGSDSITKFMIVLHNALGGHDTDRFPFSFLDRYGKHVQAFLTANKRVNMDGQIIGAFCFLQIVSPELQQALKAQRQQEKNSFARMKELAYICQGVKNPLSGIRFTNSLLEATCLSNEQKQFLETSAACEKQMLKIIHDVDIESIEDGSLELEKGEFLLGNVINAVVSQVMLLLRERNLQLIRDIPEEIKTLAVYGDQLRIQQVLSDFLLNIVRYAPSPDGWVEIHVHPRIKQISDGLTLLHAEFRMVCPGEGLPPELIQNMFNNSGWGTQEGLGLSMSRKILKLMNGEVQYIREAQRCYFYVLLELPVTRRSSKKC

SEQ ID NO: 252016 - protein, 322 aa, Glycine max
  Clone ID: PAT_MRT3847_69598C.1.pep
MAGKKIPDVLLNSGHKMPVIGMGTSVENRPSNETLASIYVEAIEVGYRHFDTAAVYGTEEAIGLAVAKAIDKGLIKSRDEVFITSKPWNTDAHRDLIVPALKTTLKKLGTEYVDLYLIHWPVRLRHDLENPTVFTKEDVLPFDIEGTWKAMEECYKLGIAKSIGICNYGIKKLTKLLEIATIPPAVNQVEMNPSWQQGKLREFCKQKGIHVSAWSALGAYKIFWGSGAVMENPILQDIAKAKGKTIAQVALRWVYQQGSSAMAKSTNSERMKQNLDIFDFVLSEEDLERISQVPQRRQYTGDIWLSENGSCKTLEELWDGDV

SEQ ID NO: 252017 - protein, 178 aa, Glycine max
  Clone ID: PAT_MRT3847_69599C.1.pep
GGTPPPPGLMPLQGAPPLPPRGGPPLGEGIGRALLAIFQRGKGGGLLRDLTGGQKGFSPPPVFKGGPRDFTLGAPLKKLAVARTGGVTWNTLKGPPHGVVSLGFFKTAAPLFFFFFFFFFFFFFFFFFFFFFFFFFFFFFFWTNCIRVLCNTQQFNTDLPRLMIPTGRVGERVGGRVG

SEQ ID NO: 252018 - protein, 86 aa, Glycine max
  Clone ID: PAT_MRT3847_6959C.1.pep
FYSTPFSSPSFFGPRFTTPIYFTISFFYRFLFFQACLIAVTSAFPFGSQFLSPQFFFLFSYSTLLTITSPILAPKFLKYPIIFFSN

SEQ ID NO: 252019 - protein, 69 aa, Glycine max
  Clone ID: PAT_MRT3847_695C.1.pep
ALAVSFGKSAGAPPKYTGCADSHATHNSWRREGKSVTNGGEAYIRARGAYALVGIPAEITVTAARKVIT

SEQ ID NO: 252020 - protein, 84 aa, Glycine max
  Clone ID: PAT_MRT3847_69600C.1.pep
NGQLKLGRGPSAVMVVSVGEGCVQTTNQMNQQWAVVDRMRVRGLGGRRGRRESGQRVKRSGPSGGGTQPPQEAKGPRGMNEGIE

SEQ ID NO: 252021 - protein, 43 aa, Glycine max
  Clone ID: PAT_MRT3847_69601C.1.pep
VHTGYIQVTFNLSTAWISCPHIRHVTQWILWLIMLHFVNMSNL

SEQ ID NO: 252022 - protein, 97 aa, Glycine max
  Clone ID: PAT_MRT3847_69602C.1.pep
FGYSRDNVGKFIPIYLAQGILQHDPFEVLDQRGVGELVKLATERGRKARPNLKVGICGEHGGEPSSVAFFAKTGLDYVSCSPFRVPIARLAAAQVLV

SEQ ID NO: 252023 - protein, 84 aa, Glycine max
  Clone ID: PAT_MRT3847_69603C.1.pep
LILKEHVPLWWVKANMINTRILVVCLKPRFFSFSTSIAYLQSLYLGECSILIADIRHIIVGDIAILIRNWNEKCFQPHPGPSQT

SEQ ID NO: 252024 - protein, 60 aa, Glycine max
  unsure (1)..(60): unsure at all Xaa locations
  Clone ID: PAT_MRT3847_69604C.1.pep
SVRLDILVIVGDGGTRKTTFVKRHLTGDFEKKYEPTIGVDVHPFDFFTNCGQXRFYCWDT

SEQ ID NO: 252025 - protein, 155 aa, Glycine max
  Clone ID: PAT_MRT3847_69605C.1.pep
MLVAVGASWDLNWFLQLLLSVIVVAIGVHYFVKVTASKYFLVDANFEGDHHHALATDAMPGALAAADPLCAVCATPAPKKCSRCKAARYCSQACQQSHWMSGHKTVCKDFRETSARSSAHNGVINRGFKATAAAGKSLLTMALIPGCGAGAISRP

SEQ ID NO: 252026 - protein, 64 aa, Glycine max
  Clone ID: PAT_MRT3847_69606C.1.pep
SNFYFKVSNSNPSINCSACLKTNMTLPITHLFPSIIHHIHHSYNKFNLTTKTINDIQHSPQYKE

SEQ ID NO: 252027 - protein, 153 aa, Glycine max
  Clone ID: PAT_MRT3847_69607C.1.pep
LYAPPPSAASGATAFKSKPSLIITSPPFFLGLSSSSAATTSWRWSTVSSAVSRAFRHSLPPLPLSSKYFTATLILLSMAKNSSTSSSVGTPPSLPSSSSTPFSLLFFTLSLSSSSLMTLLFFLFSISITQIQQGQITININSINKDHILYRVS

SEQ ID NO: 252028 - protein, 60 aa, Glycine max
  Clone ID: PAT_MRT3847_69608C.1.pep
MATLIAPSNHSPQEDVEALRDAFEGWGTDENTVIVIFGHRTVYHWQLIRRVYEVIYLEDP

SEQ ID NO: 252029 - protein, 68 aa, Glycine max
  unsure (1)..(68): unsure at all Xaa locations
  Clone ID: PAT_MRT3847_69609C.1.pep
QDAIVNRGGPSHNGKFNYGXANSPGKRSSMGEFXKPGFEGLKGKMVGXFAIFDGMVKPSWPPQLQVGH

SEQ ID NO: 252030 - protein, 60 aa, Glycine max
  Clone ID: PAT_MRT3847_6960C.1.pep
VYSSDFGWGRPNKVEMVSIDRTAAFSLSESKNGDGIEIGFVSKYFTMETFASLFVNGLQS

SEQ ID NO: 252031 - protein, 82 aa, Glycine max
  Clone ID: PAT_MRT3847_69610C.1.pep
CELFLKGDRLGWCFHPDDQLFQCMVCSPGVNLRCFYLTLLAGCSSLLFLRRGSLSLLGILQSEQSGQRSELRPPDVCGKSGC

SEQ ID NO: 252032 - protein, 73 aa, Glycine max
  Clone ID: PAT_MRT3847_69611C.1.pep
LLGVRSSLLLAGVFFFFLCKRCMPLTAVQISTSANLLLRKHVLNNASISTNSLRLLIQKLVNVVCAWVPSEAA

SEQ ID NO: 252033 - protein, 61 aa, Glycine max
  unsure (1)..(61): unsure at all Xaa locations
  Clone ID: PAT_MRT3847_69612C.1.pep
TALNTAAKISNQKSNNASKADHQRAYMEDTCXXXLHKYLEKGKETLLHLXPPKTHVTHHPI

SEQ ID NO: 252034 - protein, 59 aa, Glycine max
  unsure (1)..(59): unsure at all Xaa locations
  Clone ID: PAT_MRT3847_69613C.1.pep
VQIGTRWVQGHRRIPRFRANDVRRRNRPNEXRTSAAIRRGVRISAIVGVHLFRVSKNSQ

SEQ ID NO: 252035 - protein, 59 aa, Glycine max
  unsure (1)..(59): unsure at all Xaa locations
  Clone ID: PAT_MRT3847_69614C.1.pep
EATHPDTXXAALXECSSTFIFVFAXSGSGIXYNXLTXNGXXXPXGLISASIAHXXAXWR

SEQ ID NO: 252036 - protein, 74 aa, Glycine max
  Clone ID: PAT_MRT3847_69615C.1.pep
TTPIHSSRDQIAPVIEVFQTSTIFDLIIVFATMRFYVAHHSTVKVGATSYFVHLITDPNPITFNTDGLLVTQDH

SEQ ID NO: 252037 - protein, 58 aa, Glycine max
  Clone ID: PAT_MRT3847_69616C.1.pep
SLSAPCHTNRADCAAVRGHLSFPVEAAHLPPYYGSTSDTHSKYFPQFCRSRPFMLMAA

SEQ ID NO: 252038 - protein, 121 aa, Glycine max
  unsure (1)..(121): unsure at all Xaa locations
  Clone ID: PAT_MRT3847_69617C.1.pep
MLFIIQHKRGQTDLNHLRELNLKTGGAVPKXALTAPHRKDALDSIRYGPDRPKCLXPFLDHIPSXLNENFPGDYGRDTAGXSLDPKTFDRNRELDVTHRTWAPLGALGXTFSQILDTKGVK

SEQ ID NO: 252039 - protein, 67 aa, Glycine max
  Clone ID: PAT_MRT3847_69618C.1.pep
INFADYCSTLEGDQSYSCWQAYFELKDPEKESPKADIERLILETGGVKTLNGCLPGIQFCTNLRRVT

SEQ ID NO: 252040 - protein, 79 aa, Glycine max
  Clone ID: PAT_MRT3847_69619C.1.pep
PNQSSFYGFGATRRRVGRRRHGRRPRRVLRGLIVLITLRLRERALSLHRCRCDRWRTRFPRFQRRTVAFQFRSSIGAAP

SEQ ID NO: 252041 - protein, 81 aa, Glycine max
  Clone ID: PAT_MRT3847_6961C.1.pep
PSWDSVSYHCHGLHWCPLTSHLRSLLHSALIAGDLVVVDCVSSVCVLPDSASKTRPWVLGFRLVLTVNKLDMCFLELEVDG

SEQ ID NO: 252042 - protein, 42 aa, Glycine max
  Clone ID: PAT_MRT3847_69620C.1.pep
TYGCEKTTLGGFLINYAFLSLLCFTEFGPIDHNQIVFSYIGK

SEQ ID NO: 252043 - protein, 68 aa, Glycine max
  Clone ID: PAT_MRT3847_69621C.1.pep
QNSYNCSTISLLPHKLRLYQYTNYIYIDIMDIIIAPFNTQFSNADTPTIAYNDLPQCVTNCTCNPFTY

SEQ ID NO: 252044 - protein, 42 aa, Glycine max
  Clone ID: PAT_MRT3847_69623C.1.pep
RNAPLEVSLVTGSTLLHVVGGVHHGGGDYSGKDPTGVDSRGA

SEQ ID NO: 252045 - protein, 295 aa, Glycine max
  unsure (1)..(295): unsure at all Xaa locations
  Clone ID: PAT_MRT3847_69624C.1.pep
KLLYSNVNXXEVSHMFSSNTAAFPDSLAIAKEGELTIGTIDDIQKLHIRSIPLGEHARRICHQEQSRTFAICSLKYNPASGEDSEMHFVRLLDDQTFEFISXEYGCFIISCSFSDDNNVYYCVGTAYVLPEENEPTKGRILVFAVEDGKLQLIAEKETKGAVYCLNAFNGKLLAAINQKIQLYKWVLRDDGTHELQSECGHHGHILALYVQTRGDFIVVGDLMKSISLLIYKHEEGAIEERARDYNANWMSAVEIVDDDIYLGAENSFNLFTVRKNSEGATDEERGRLEVVAFPF

SEQ ID NO: 252046 - protein, 116 aa, Glycine max
  unsure (1)..(116): unsure at all Xaa locations
  Clone ID: PAT_MRT3847_69625C.1.pep
RDVLIRTIHAARDTTSSDLSWFSGFCTAYPTCXEKXGRNLDGSFEYEEVNEMRYLQAEISDTMRLYPPVPVDTMDCLYDDILTDGTRVGKACLETYHTYAMGMMNSLSHNDCTELN

SEQ ID NO: 252047 - protein, 30 aa, Glycine max
  Clone ID: PAT_MRT3847_69626C.1.pep
SSAFVVEALHTRTEFRRSRPLLSANHICVG

SEQ ID NO: 252048 - protein, 105 aa, Glycine max
  unsure (1)..(105): unsure at all Xaa locations
  Clone ID: PAT_MRT3847_69627C.1.pep
RGPPFKFLFQAIKEGVNLKGYXAGSFSASFEWDAGYPVRLGVKNVGSKTPLKKTPQFFAFWLQKSPPKGFEFRVPLTSQGFFLFIPPNFFGNPLGGGEPKDPFFQ

SEQ ID NO: 252049 - protein, 66 aa, Glycine max
  Clone ID: PAT_MRT3847_69628C.1.pep
ECLFGHSVNLMGPQYAYTSYSTALRVNFSSSFEPYSGSICCVLATCLPILNSVKSPHAPDPSSSLI

SEQ ID NO: 252050 - protein, 79 aa, Glycine max
  Clone ID: PAT_MRT3847_69629C.1.pep
GLSNFSLFTLELLGFHFFLFLLLLLQEIDLYSLFLCYVKSQHHPILCNFSAFVSLCFIQGHEGHSLLFSHAYTQVVHVM

SEQ ID NO: 252051 - protein, 216 aa, Glycine max
  unsure (1)..(216): unsure at all Xaa locations
  Clone ID: PAT_MRT3847_6962C.1.pep
MATYSWSTEIFSFLVLTLLSTSSHTMVAGARNLLESTLSKPEVPTLPKPHELPPLPEIPXIEKPKVPELPKVSEIPKVPKLPKAPEMFKVSELPKLELPKVAEISKILELSKPELPKIPKLPKIHELSKVPELSNPELSKVSDSSRIGSRPKVPELSKPELPKVPELPKVRELPKPEFSKVPELPKVHELPKPEIPKILEFPKVPQFPKAFSTSNP

SEQ ID NO: 252052 - protein, 46 aa, Glycine max
  Clone ID: PAT_MRT3847_69630C.1.pep
MNISKITIKSHYPSSPWEVFIFLYLMPSTSQFQLSSEENHKIFIGR

SEQ ID NO: 252053 - protein, 62 aa, Glycine max
  Clone ID: PAT_MRT3847_69631C.1.pep
FRSLYLDPLFRVGGFFGPHKFRQLPFASAHESSDHLCVVLQLQRKTSFQGALLGKIFGLLLK

SEQ ID NO: 252054 - protein, 79 aa, Glycine max
  Clone ID: PAT_MRT3847_69632C.1.pep
FLFFFIFWFFIFLFHFFVSIFFFFFFIYLNNISFLFYLFYTSIIYIKKKSINSTSFHFYFKFKIKILRGLTRFSSMHAQ

SEQ ID NO: 252055 - protein, 78 aa, Glycine max
  Clone ID: PAT_MRT3847_69633C.1.pep
FIHLFSCYSSISWGLLFFLTLHTLYININVQNFDQVTEVRRGMLLDLQQLGLRFVYFPLFDHHSYDYHHGRVSPNASP

SEQ ID NO: 252056 - protein, 109 aa, Glycine max
  unsure (1)..(109): unsure at all Xaa locations
  Clone ID: PAT_MRT3847_69634C.1.pep
LCAFXLGXVCSPLWVLSGSGLRWPFXAXWGFLVPSFLRGRSFCXRLPLPLRVXWCCRRLRRVSVPAFRFCSLVVLARXXXAPRVWFCVGSCASGLNISFNAPLXXVSXH

SEQ ID NO: 252057 - protein, 346 aa, Glycine max
  Clone ID: PAT_MRT3847_69635C.1.pep
MSEKNMSWNLKPYARRDDVDAMIRVREWSVKAVNVSQKAPQCTQYHNIPAVLFSTGGYAGNHFHEFTDIVIPLFLTARQFNGEVQFIITDKRPWWISKHKPLLKKLSNYETMDIDGDDEVHCFPRVTVGLKRYQKELSIEPQKYSYSMKDFRDLLRSSYALKRVEAMKIRDGLRGKPRLMILSRKRSRSFTNTDEIAKMAASLGFDVIVKEAGWSMWGFANVVNSCDVLLGVHGAGLTNILFLPENAVFIQVVPYGGFTLDWLATNDFGKPSKDMNLKYLEYKIGLKESTLIQQYPLDHIFIKDPPLVEKIGWEEFKSVYLDKQNVKLDVDRFRPTLQKAFELLHQ

SEQ ID NO: 252058 - protein, 75 aa, Glycine max
  Clone ID: PAT_MRT3847_69636C.1.pep
HPWRCASDMWSHRLWGSPLLTDYYVNKRVSCAISESKEAACENWGVETKKAHSLKAQRAEPYPEMARVVSPSVVF

SEQ ID NO: 252059 - protein, 93 aa, Glycine max
  Clone ID: PAT_MRT3847_69637C.1.pep
LILGIATVTSKLMDRYPKLVTTENEEGLTPLQMLLARCSLVRRDIVSSLFKGMEEEKEPLNSEQLSKVVFDAAKSGNIMILECLLKYHPDLLF

SEQ ID NO: 252060 - protein, 33 aa, Glycine max
  Clone ID: PAT_MRT3847_69638C.1.pep
LTLEQIPPDSFLNYFLALTASLTSSITNVNHFE

SEQ ID NO: 252061 - protein, 59 aa, Glycine max
  Clone ID: PAT_MRT3847_69639C.1.pep
LSQCQTRIAAGCQTGRVLEREASSQPTISAQWAQAIASLFCALEWVFGHYVHISTLRRG

SEQ ID NO: 252062 - protein, 115 aa, Glycine max
  Clone ID: PAT_MRT3847_6963C.1.pep
MEFLPILSSISLLLCLVLWQGSGEPVEDKEALLDFVNKFPPSRPLNWNESSPLCDSWTGVTCNVDKSKVIAIRLPGVGFHGSIPPDTISRLSALQTLSLRSNVITGHFPSDFFNL

SEQ ID NO: 252063 - protein, 74 aa, Glycine max
  unsure (1)..(74): unsure at all Xaa locations
  Clone ID: PAT_MRT3847_69640C.1.pep
SPDPPSERDFGLXYPDERRVYNVPQTGRKSSRTTHHQTXAPVSGGGQQNETPTPVVSGGVPKSTTGNTWCEGEP

SEQ ID NO: 252064 - protein, 55 aa, Glycine max
  Clone ID: PAT_MRT3847_69641C.1.pep
SNSPRGANIKISIIFIKFTIFFFQLLISIPQIILKRQLGHTYQSYNTSSQIHISI

SEQ ID NO: 252065 - protein, 136 aa, Glycine max
  Clone ID: PAT_MRT3847_69642C.1.pep
TQTIKRRHPGPKRDLFFLESRNPKNKRQHRALGPKNKVGLNPGGHRGFPPTRPIKKPKKRGPFATGEKTPFLETYLQRGGGRLQTLTENLPPRVGRHRGTKSPPPLGDPTGPEKPPPPIYSPCRGSSWRPWFREDP

SEQ ID NO: 252066 - protein, 92 aa, Glycine max
  Clone ID: PAT_MRT3847_69643C.1.pep
KLAPRIHKIQASFCPLLSLEKGEFIVAGSEDSNVYFYDLTKPKNTCVNKLQGHRFPVMDIAWNHGENLLASSDFYGVVIVWKRERSHQKRNT

SEQ ID NO: 252067 - protein, 109 aa, Glycine max
  unsure (1)..(109): unsure at all Xaa locations
  Clone ID: PAT_MRT3847_69644C.1.pep
KDLSMRKFDKDHXPAHLQPPSPTSIKLLSVVWDAYDALKDAHGACILTEWDAFKKLDXKKVYDSMQKPTFIFDGRNVVDVKKVREIGFIVYAIGRPLDPWLKDMPSVVA

SEQ ID NO: 252068 - protein, 59 aa, Glycine max
  Clone ID: PAT_MRT3847_69645C.1.pep
IIFMYIFCIDFEHEIILYLIVLFNTDSLIFGGQRVYTMKVCLTILAELSFLVHHFPRLF

SEQ ID NO: 252069 - protein, 326 aa, Glycine max
  Clone ID: PAT_MRT3847_69646C.1.pep
REREMESIEHRTVEVNGIKMHVAEKGEGAVVLFLHGFPELWYSWRHQILALSSLGYRAVAPDLRGYGDTEAPSTVNSYTCFHLVGDIIALIDSLGVDKVFLVAHDWGAIIGWYLCLFRPDRIKAYVCLSVPFRPFLGRNPKQKTVDFFHSLYGDDYYICRFQEPGKMEAEMAGVDTAYLMKNILTTRKTGPPTFPKGEYGTGFNPGTPDTLPSWISQEDLDYYVTKFNKTGFSGGLNYYRNLNLNWELTAPWTGAGIVDVPVKFITGGVDLVYTSPGMKEYIHNGGFKKDVPTLEEVVVQEGVAHFNNQEAAEDVSNHIYDFIKKF

SEQ ID NO: 252070 - protein, 43 aa, Glycine max
  Clone ID: PAT_MRT3847_69647C.1.pep
EEARRQQNHHQLRRASLKGYHLQKAMHHAHRAAKGWCQLRNLS

SEQ ID NO: 252071 - protein, 106 aa, Glycine max
  Clone ID: PAT_MRT3847_69648C.1.pep
CGLICKPPFNFGQSGTQPYLVPREKKTPHTIQNHRGESGENPMCDPSFINGAAPFVKKKVGKSVSPSGGMNPPTNGGPRFFYGAPFRLQKNGVPLFFCLWGQGGKI

SEQ ID NO: 252072 - protein, 80 aa, Glycine max
  Clone ID: PAT_MRT3847_69649C.1.pep
QVMFGAIDQLLAKTGVKAKDIGILVVNCSLFNPTPSLCAMIVNHYKLRGNVFSYNLGGMGCSAGLISIDLAKHLLQVSQI

SEQ ID NO: 252073 - protein, 134 aa, Glycine max
  Clone ID: PAT_MRT3847_6964C.1.pep
MEFLPILSSISLLLCLVLWQGSGEPVEDKEALLDFVNKFPPSRPLNWNESSPLCDSWTGVTCNVDKSKVIAIRLPGVGFHGSIPPDTISRLSALQTLSLRSNVITGHFPSDFFNLKNLSFLYLQFNNISGPLPD

SEQ ID NO: 252074 - protein, 73 aa, Glycine max
  Clone ID: PAT_MRT3847_69650C.1.pep
SKTFLNKLSIIFHLWRTACGRWPFLVFLEASSLFLYLYKMHWKLRRELEQKERKGIYKYMLKMLILESNGASK

SEQ ID NO: 252075 - protein, 45 aa, Glycine max
  Clone ID: PAT_MRT3847_69651C.1.pep
EEHYNLQWVFKKPISGYCTLLILVSCFGLARTLVHFFSELRASLG

SEQ ID NO: 252076 - protein, 45 aa, Glycine max
  unsure (1)..(45): unsure at all Xaa locations
  Clone ID: PAT_MRT3847_69652C.1.pep
RRGNKRTTRTSXPXXXSXRAXRXHGHSCFLCEXVIRSQFHTTYEE

SEQ ID NO: 252077 - protein, 107 aa, Glycine max
  unsure (1)..(107): unsure at all Xaa locations
  Clone ID: PAT_MRT3847_69653C.1.pep
SVRGFESVASCFDPHIPKDGRGSPNLVMYNPLSQNPYRSWSHFFRNALHGIGWNDQRYIGXYPEHGYYLQTPPCLCILXEFXLLWCLRHPVCIYKHGMHELLASDLY

SEQ ID NO: 252078 - protein, 85 aa, Glycine max
  Clone ID: PAT_MRT3847_69654C.1.pep
LFLYSCNSQVELLLGKAYSDWGHVSDAVTVYDQLISTHPNDFRGYLAKGIILKENKNIGDAERMFIQARFFAPDRAKALVDRYSR

SEQ ID NO: 252079 - protein, 73 aa, Glycine max
  Clone ID: PAT_MRT3847_69655C.1.pep
LFSYLQSMLDANMLLRYLFLLGLFSTMTTSSTSAMYMFIVASCSQTKFKQSSTYENTVHSLITSLVKSDAFGT

SEQ ID NO: 252080 - protein, 54 aa, Glycine max
  Clone ID: PAT_MRT3847_69656C.1.pep
CYVVISKEYEHPYVILSFEFDTCDNNNINPSLLLSNKLLRAPFLSFNQQFSKAV

SEQ ID NO: 252081 - protein, 54 aa, Glycine max
  unsure (1)..(54): unsure at all Xaa locations
  Clone ID: PAT_MRT3847_69657C.1.pep
FLVLSVELFPPQISFXLKKESNARVLTXSGAXPYXGXCEPXXPXAXGXXTRXTG

SEQ ID NO: 252082 - protein, 59 aa, Glycine max
  Clone ID: PAT_MRT3847_69658C.1.pep
SPPRGGEKKLGVFPITPPLIKLFPVLERWEKIGQWEGFFKNFGKKKINGGWVFFFLGGC

SEQ ID NO: 252083 - protein, 115 aa, Glycine max
  Clone ID: PAT_MRT3847_69659C.1.pep
YFLATAAHDGVKLWDLRKLKNFRNFAPYDSETPTSSVEFDHSGSYLAVAGSDIRIYQVANVKSEWNCIKTFPDLSGTGKNTCVKFGSDSKYIAVGSMDRNLRIFGLPGEDAPTES

SEQ ID NO: 252084 - protein, 212 aa, Glycine max
  Clone ID: PAT_MRT3847_6965C.1.pep
MKAMKRCSSSSSSSYSSASESTPQSNQNKNSNNFCYKIKGPWSAKEDRILTGLVEAHGPRNWASISRHIKGRSGKSCRLRWCNQLSPTVEHRPFSTREDEVILHAHARFGNKWATIARMLPGRTDNAVKNHWNATLKRRRFGADVVVEDDPLTALTLAPPGSGCCGRGEERRGVSPAGFWDAMRDVVAREVRGYVSSSFSDNLASNEGLSKY

SEQ ID NO: 252085 - protein, 525 aa, Glycine max
  unsure (1)..(525): unsure at all Xaa locations
  Clone ID: PAT_MRT3847_69660C.1.pep
MNCSISGEVPEEPVVSRNSGLLFEKRLIERHISDYGKCPITGEPLTMDDIVPIKTGKIVKPRPVQAASIPGMLGMFQNEWDGLMLSNFALEQQLHTARQELSHAFSTHDAACRVIARLKKERDEARSLLAHSETHLXYGKCPITGEPLTMNDIVPIKKDEDLAPGAKKIHPGISSSIISELTDCNAALSQQRKKRQIPPTLAPVEALEAYTQISSHPFHKTNKQGIISLDILYSKDLIATGGIDTNAVIFDRPSGQILSTLSGHSKKVTSVKFVAQGESFLTASADKTVRLWQGSDDGNYNCRHILKDHSAEVQAVTVHATNNYFVTASLDGSWCFYELSSGTCLTQVYDTSGSSEGYTSAAFHPDGLILGTGTTESLVKIWDVKSQANVARFDGHAGPVTAISFSENGYFLATAAHDGVKLWDLRKXLKNFRNFAPYDSETPTSSVEFDHSGSYLAVAGSDIRIYQVANVKSEWNCIKTFPDLSGTGKNTCVKFGPDSKYIAVGSMDRNLRIFGLPGEDAPTES

SEQ ID NO: 252086 - protein, 120 aa, Glycine max
  Clone ID: PAT_MRT3847_69661C.1.pep
AGEQPEIDNHADEVSSANHPPTPVEENFVTEGSRSASGYSNSPRHATIASATNSYFFDRISATWPEEKLLLATRTQSPRVSMDFSNGVSKKMSAWGMVIVTAGLRGEIRTFQNFGLPLRI

SEQ ID NO: 252087 - protein, 55 aa, Glycine max
  unsure (1)..(55): unsure at all Xaa locations
  Clone ID: PAT_MRT3847_69662C.1.pep
SFSSPKGVDVSXNFFCGPSPTCGPFGGFPLNNLKNNPPLEGPKFFALVSYYPNCS

SEQ ID NO: 252088 - protein, 208 aa, Glycine max
  unsure (1)..(208): unsure at all Xaa locations
  Clone ID: PAT_MRT3847_69663C.1.pep
PAGTGAEVPGGRRGRDLLVFATRGERGSFFLSSFSSQRDKRSSSTTLPNFLFHSSLALRLRPPKLGFFFLLHXXWGGGRRGCFGGRIGGXANGGTGXILLRRGRXLXXPNPLLGGGSQKLLLAGYLFGDAREKXXRHVFPHQRVRGECWVGGMLKGWGGVGGGMGGGKKRAGAVAGGGGWGGGGAGGGGRGEWCAGRRRRGGGGGGGG

SEQ ID NO: 252089 - protein, 77 aa, Glycine max
  Clone ID: PAT_MRT3847_69664C.1.pep
RGAFFLAKQNKITFFFYKTTLTQNFPPFKKTGFFFVGLNPITLKTFLPSKPLGGPSLPFKSLTTFLGGTGFLLRGLG

SEQ ID NO: 252090 - protein, 85 aa, Glycine max
  unsure (1)..(85): unsure at all Xaa locations
  Clone ID: PAT_MRT3847_69665C.1.pep
MHSLSEQLTDPQTYDFTEALLLSYMLDFRCITSKELXTVIRSFGQTPTEAYLHDIINPLDSDENRTLDFTELLTLMAITMNDTDS

SEQ ID NO: 252091 - protein, 54 aa, Glycine max
  Clone ID: PAT_MRT3847_69666C.1.pep
FMRTVFDHQVITHNSMIRLQSSFDQVQFLVVYVRNLRYASISLSHAWHTIRCPS

SEQ ID NO: 252092 - protein, 70 aa, Glycine max
  Clone ID: PAT_MRT3847_69667C.1.pep
KVYRDFSLKKWVRLMKTDLKTCTKWCIKTSVNKNLNQMLNPIGYSSITLAPSIKVTEEQLQHVGLNRSQL

SEQ ID NO: 252093 - protein, 140 aa, Glycine max
  unsure (1)..(140): unsure at all Xaa locations
  Clone ID: PAT_MRT3847_69668C.1.pep
SLVFWVFXAPPPWSGSVPSRLRRWLLCCCXRRCGCSCFCFGLFLLLLRLFAAVLLLVRSXPLPPSRLFSAGCGLVLVVSWXPVWVXGALASVSVLVPVSAFPCCCGFVFVCCCGRLWVGAGGSCELLRRVCCVWRGRVTE

SEQ ID NO: 252094 - protein, 74 aa, Glycine max
  Clone ID: PAT_MRT3847_69669C.1.pep
LCVECMISYTHIYSFISCETHTFFFFFFFFLPPLVSVLELDKCRDLAYNLPFYHLLRTMQADKQAHKHAHQSTQ

SEQ ID NO: 252095 - protein, 103 aa, Glycine max
  Clone ID: PAT_MRT3847_6966C.1.pep
KAPRGGNLKFGFKNKGGGPQKKPWFSAMVFINPGPLWVLPGKVITGVCLKKGIFFFKKLFGPWGRKGPITFFFRGLPVGFYGNIFLFFFPPRFFELKETGAFF

SEQ ID NO: 252096 - protein, 143 aa, Glycine max
  Clone ID: PAT_MRT3847_69670C.1.pep
LIPQKGLPLKGDRRPWVRIRTMVGTNPGEHFPVNVFSCWSQGFDLGLDFYLFIYYYYYYFASKGCFGGAQSLSGEGRLWADFSVSLPCLPHQDHPWCPVVAPGGCPPTGVAFTVGAISAWGSDLPPLLWHLESDTVDRRCVSQ

SEQ ID NO: 252097 - protein, 63 aa, Glycine max
  unsure (1)..(63): unsure at all Xaa locations
  Clone ID: PAT_MRT3847_69671C.1.pep
TLFNTAICPNLQMPSDKTVGGGDDAFNTFFSETGAGKHLPHSFFVDLAPTVIDXVKTGTFPQL

SEQ ID NO: 252098 - protein, 81 aa, Glycine max
  Clone ID: PAT_MRT3847_69672C.1.pep
RAKTLAFFRQARRIRKEGLHAQSIIEEQGRPWVGLGYISEGGFPFPPVTVLVPSPLEPVIVQLLVKKDMRGIDTVVYKLPL

SEQ ID NO: 252099 - protein, 64 aa, Glycine max
  Clone ID: PAT_MRT3847_69673C.1.pep
RIFILAISCSHYIRGRQKRTRTFSASTTYGCIYEYLFFGGSAHIYEDNDPFRFIWIIKNTYLTI

SEQ ID NO: 252100 - protein, 41 aa, Glycine max
  Clone ID: PAT_MRT3847_69674C.1.pep
MEMFGFFRIFCKERTSNGFLAKLVFILIKQKEGLWLPLGFG

SEQ ID NO: 252101 - protein, 64 aa, Glycine max
  Clone ID: PAT_MRT3847_69675C.1.pep
SLITVNIDSTERVSQIMNFHRSNVMLLHPQLWIKKNLFFFTVKNLLTHIDTEILCILFFFPNVY

SEQ ID NO: 252102 - protein, 75 aa, Glycine max
  unsure (1)..(75): unsure at all Xaa locations
  Clone ID: PAT_MRT3847_69676C.1.pep
KIHLLTHNPRPFYLXXYQKFTILQNNNFTTFHIYTTILQPILHTSTHHIKKSPPLFPISTLNHPKTLSIIPPTHY

SEQ ID NO: 252103 - protein, 93 aa, Glycine max
  Clone ID: PAT_MRT3847_69677C.1.pep
LSRSNCPRSCHLSPNFAPHLSPSPSQSPSCSSLDHDLGINVAFHINPSERHVLHRRVASEVIVHLRHKPAKRVVVQGTGVESRIGRPNPPSEA

SEQ ID NO: 252104 - protein, 51 aa, Glycine max
  Clone ID: PAT_MRT3847_69678C.1.pep
GNGVLRLELQATSRCWVSLLIVIIISVKFCLTESRMHHLSSISLSCVSISV

SEQ ID NO: 252105 - protein, 137 aa, Glycine max
  Clone ID: PAT_MRT3847_69679C.1.pep
PTRPYGCEKTTEGDCQMGRQGNDPSPTTVNSSIALLQERFRQLEKVKERREGKQLKLLSFETTSSSSQNSQQQPRLVAPHRPTLHDSLSLGLNFTNKQGDHHNTMNMKPPPSSNLWPQGASTSRNFDTSDVDTSLHL

SEQ ID NO: 252106 - protein, 167 aa, Glycine max
  unsure (1)..(167): unsure at all Xaa locations
  Clone ID: PAT_MRT3847_6967C.1.pep
GSRASVFSCTTACFDTNTVDDRKSSFFEFKPLSRSNMVPADFNNHVSKQSTQVEGPGKTQSFASSPLVESEIAVPSNELSLSSPVQKVSSSASAPVDVDLDDINHIGNTATGLQASHVEVRGXSGLSVAAEKTSDDGYNWRKYGQKLAKEVDFXQLYKCTHPTVSEK

SEQ ID NO: 252107 - protein, 175 aa, Glycine max
  Clone ID: PAT_MRT3847_69680C.1.pep
MSRGREIERKILRLLHGGKTRSHLTEIHGHFLRHGLQQSNQILAHFVSVCASLRRVPYATRLFAHTHNPNILLFNAIIKAHSLHPPFHASFSFFSLMKTRAISPDEYTLAPLFKSASNLRYYVLGGCVHAHVVRLGFTRHASVRVAALEVYASCERMGDASKVFDEMRDPDVVVW

SEQ ID NO: 252108 - protein, 143 aa, Glycine max
  unsure (1)..(143): unsure at all Xaa locations
  Clone ID: PAT_MRT3847_69681C.1.pep
DEMGSPVGSATLYKALVTDADNVLPESLDSFKSVENAEGNTGPQTTSMITVLADGETXTVLRKIEWIDDSQLXGYSCSAVVCAALPDTAXKITFDSRLYAGXPSGGSDWKLTVKYDAKGDPEPLQDELKTGNANADAIFTDLE

SEQ ID NO: 252109 - protein, 364 aa, Glycine max
  Clone ID: PAT_MRT3847_69682C.1.pep
MSIAFSFFTPLSSKSVPSFSLSTPSLCFRLTPLRRPTDRFYPLCSSAGGPGGGSFGGHGGPGHGGHGGGGGGGGHDNDDNERKNEALLVVAEAGRSLESVPADLAAAIKDGKIPASVVSRFLELEKSPFFRWLLQFTGFRERLLADDLFLAKVAMECGVGVFTKTAAEYEKRKENFFNELEIVFADVAMAIIADFMLVYLPAPTVALRPPLALTAGPVAKFFHGCPDNAFQVALSGASYSLIQRVGAIVRNGAKLFAVGTASSLVGTAMTNAFINAKKAVNKTSEGEIENVPVLSTSAAYGVYMAVSSNLRYQVLAGIIEQRLLEPLLHQHKLILSALCFAVRTGNTYLGSLLWVDYARFVGVQ

SEQ ID NO: 252110 - protein, 69 aa, Glycine max
  Clone ID: PAT_MRT3847_69683C.1.pep
SILSPDMHQQLWLLCMYSACTNRPIAPLDCCIRETSSCPLTACITSSSSHQVANCRTLKKCEPIASVVQ

SEQ ID NO: 252111 - protein, 76 aa, Glycine max
  Clone ID: PAT_MRT3847_69684C.1.pep
KGGLPPFGPPKSFFGIRGRVYQNKVEGFKFGGRSLKEKKNPPLLCAFFPRVRPKKPFFTKTKHEPPKKVVYRSQHK

SEQ ID NO: 252112 - protein, 51 aa, Glycine max
  Clone ID: PAT_MRT3847_69685C.1.pep
RSHLFQFHDYTTDFFLIFTLAILRVPPSLLLLLPRFLSPLSTRNHSLRFAL

SEQ ID NO: 252113 - protein, 157 aa, Glycine max
  Clone ID: PAT_MRT3847_69686C.1.pep
MNTKTMRLPPRRVLTPTGTSNKRKERDETFDRPKPIPAPPLNKLPKPDRPISLPLTEAKPSSNQLLAGYLAHEFLTKGTLLGQPWAPPKGKSLSASTEDGGEEGEPTTTAATAAAAEPCRKTPPRRRERYADRAGLLQRGGTHFPGGVSPSQLARFL

SEQ ID NO: 252114 - protein, 99 aa, Glycine max
  unsure (1)..(99): unsure at all Xaa locations
  Clone ID: PAT_MRT3847_69687C.1.pep
ICFGDLLSLPITHRKTFIDGDWKDPXLKNRKSMINPSTQHRIGHIPTNTXENVDLAATGTKDVLXRNKGAKRASATSSCRARYLRAISGMTTQKNPELA

SEQ ID NO: 252115 - protein, 54 aa, Glycine max
  Clone ID: PAT_MRT3847_69688C.1.pep
MCFVARSSQSVNRGWSFRDHLSFSFSIANYDISIEKYQSIRSFAPLNEMIVVSK

SEQ ID NO: 252116 - protein, 131 aa, Glycine max
  unsure (1)..(131): unsure at all Xaa locations
  Clone ID: PAT_MRT3847_69689C.1.pep
MAPLMISSPAATTGNRALAYVGAPFTDLKYMAGLRTRNTNTDITSIASNGGRVQCMQAWPPIGKKKFETLSYLPDLDDAQLTKEVAYLLRNGWIPCLAFELXTGSLYREHITSPGYYDRRYWTCXKLSMFG

SEQ ID NO: 252117 - protein, 70 aa, Glycine max
  unsure (1)..(70): unsure at all Xaa locations
  Clone ID: PAT_MRT3847_6968C.1.pep
MNCHTFFVFWWLLWWRRESCGPIVKKKNCLLQYRNFPQCHCSKSPFFLLVYFFHFQFRKGCVIIQCXWVR

SEQ ID NO: 252118 - protein, 82 aa, Glycine max
  Clone ID: PAT_MRT3847_69690C.1.pep
MVCLACLLPLFLVPIVNILPLLYYFIMGKIYRVFGWEYRKPERAPPVCPYKPPTNRVSKVEADVEPVPADPVKPGSVDVKQD

SEQ ID NO: 252119 - protein, 60 aa, Glycine max
  Clone ID: PAT_MRT3847_69691C.1.pep
RLELEPNRLEYGCEKTTDRRHTKTKKKKKKGGHRLGPSLPGDLFRAGTLRGNKFPLRGSF

SEQ ID NO: 252120 - protein, 34 aa, Glycine max
  Clone ID: PAT_MRT3847_69692C.1.pep
SRNMCHSKGVVHVCTENTFGTVGAVKKLCSVLKK

SEQ ID NO: 252121 - protein, 158 aa, Glycine max
  unsure (1)..(158): unsure at all Xaa locations
  Clone ID: PAT_MRT3847_69693C.1.pep
EVLKRAIHTAVAILTALMAATKATRSSNVILVIVIGALGLFIGWLIEISTKYRSLSFSIGISFNXLSLWLYNLVKTLLRRYHWAFALAGFLALAMAAISWTLETSETYWFWHSIWHITIYTSSFFFLCSKANIEDTENQLPTNGNYELTHQDSLPRTG

SEQ ID NO: 252122 - protein, 43 aa, Glycine max
  unsure (1)..(43): unsure at all Xaa locations
  Clone ID: PAT_MRT3847_69694C.1.pep
XXXFFFFFFFAHACFFLNYLDHRLILLIGGDLLLIKKKFPRKK

SEQ ID NO: 252123 - protein, 65 aa, Glycine max
  unsure (1)..(65): unsure at all Xaa locations
  Clone ID: PAT_MRT3847_69695C.1.pep
FGTRKLFVHTIYPEHEDKSDFDPLDVTKTWPEDMIPXQPDGRWVLNKNIDNFFAENEQLAFCPDI

SEQ ID NO: 252124 - protein, 179 aa, Glycine max
  unsure (1)..(179): unsure at all Xaa locations
  Clone ID: PAT_MRT3847_69696C.1.pep
MDFHQRISGQDEAQCNNXSSDGSIIGRAVLSRGSAEQLDSGNAIKKAHRNQQRWLLFLLHARRCSAPEGRCKERFCSNAQKLCKHLDRCTLRHCQYPRCHHTRVLLHHFINCKDPCCPVCVFVRKYRRAFQLKPQIQPEPESSLPTAVNGSCKPYNIVGTSPRLISKPPLVDRFKDSMH

SEQ ID NO: 252125 - protein, 107 aa, Glycine max
  Clone ID: PAT_MRT3847_69697C.1.pep
LHHFLSYSLLLAKVDYYHGTAHSNLSYSHKSYPFLYLTSYPKPPLLSTHNFHQLFFYSFTHLIISNNSLCYLHNLHQNQSFLLLISIFLLLLHFNNHIHKFSLFNQS

SEQ ID NO: 252126 - protein, 51 aa, Glycine max
  Clone ID: PAT_MRT3847_69698C.1.pep
SSFARHSILSSFISLWLGYYVLANFNEPPVSKMYCEIFLWLVHFLNNVPNY

SEQ ID NO: 252127 - protein, 148 aa, Glycine max
  Clone ID: PAT_MRT3847_69699C.1.pep
WVIIRRQCKCSVISSNLVSGAGRTGSKLIDLGHDKTWFKTDGGDPDTTSGQRNGFNLKRSYSNREAPKLTNLDAHRQPRQSTTDIRNNLMSGNWKTSEEEEFMWGEMNIGLTDHGANVSSNLSTDTWMADDENLEGEDHLQITRPFGA

SEQ ID NO: 252128 - protein, 50 aa, Glycine max
  unsure (1)..(50): unsure at all Xaa locations
  Clone ID: PAT_MRT3847_6969C.1.pep
VSFYGPTPVRERYKRTKLPRILKSALGSFCYMTIKVSVQLIVRVFFXFSH

SEQ ID NO: 252129 - protein, 328 aa, Glycine max
  Clone ID: PAT_MRT3847_696C.1.pep
MTECMTDLAQAAACRNGTTAAHLKVISIFMIFVTSVTGVCAPVTLARYFQGKSLYNIAILLIKCFAAGVILATSLVHVLPDAFAALSDCQVASQHPWKDFPFAGLVTLIGVLMALLVDTVASSHMEHAHYTPVETQEKEGGGGGSTWSIELVGGGAEVQRVEELMRLKQRLVSQVLEIGIIFHSVIIGVTMGMSQNVCTIRPLVVALSFHQIFEGLGLGGCIAQAGFSFGTTAYMCFMFSVTTPMGIILGMVLFSMTGYDDTNPKALIMEGLLGSVSSGILIYMALVDLIAVDFFHNKLMNSNLYLKKVSFIALTLGSASMSVLALWA

SEQ ID NO: 252130 - protein, 304 aa, Glycine max
  Clone ID: PAT_MRT3847_69700C.1.pep
MASHDLRFFELNTGAKIPSVGLGTWLAEPGVVARALATAINVGYRHIDCAQIYGNEKEIGAALKKLFADGVVKREDMFITSKLWCNDHLPENVPEAFDKTLQDLQLDYLDLYLIHWPVSAKNGKLTKPDIPSTWRAMEALYNSGKAQAIGVSNFSVKKLQDLLDVASVPPAVNQVELHPSLQQPELHAFCKSKGVHLSGYSPLGKGYSESNILKNPFLHTTAEKLGKTAAQIALRWGLQMGHSVLPKSTNDARLKENFDLFDWSIPADLLANFSDIKQERIVTGDGFFSKTSPGYKTIEELWDE

SEQ ID NO: 252131 - protein, 64 aa, Glycine max
  Clone ID: PAT_MRT3847_69701C.1.pep
KGHVELPNVKMTQPSKHKTTMLSPTPLVSIYKRLKLPLLSWLQYSNTLGPHPTTTTPGFWITFF

SEQ ID NO: 252132 - protein, 90 aa, Glycine max
  Clone ID: PAT_MRT3847_69702C.1.pep
INARVKTLLHYLNVSLVEMLKTSVQIRLNSMFQDTMHNIRSDDHVGRTSDIGNFHPCPLKPCSKFLIGFVCCAVQCSAADKCHIRCIYLT

SEQ ID NO: 252133 - protein, 68 aa, Glycine max
  Clone ID: PAT_MRT3847_69703C.1.pep
KIRYPAKKLCNARQLTLVTQQIYQPLLCIKPPNKLNLYNPTPIFKLLPSRFRNLFFFYIIPPFFFFFI

SEQ ID NO: 252134 - protein, 103 aa, Glycine max
  Clone ID: PAT_MRT3847_69704C.1.pep
PPGNLLPQEKTHLQGNILVGQTIRSLPPTKGFGQEGSKFLGLETQPQSTLTIFLRGLGASLPKKGKNRLGTPLGLNKTICPSKVVPPALNGGKGTHLMRGPRG

SEQ ID NO: 252135 - protein, 54 aa, Glycine max
  unsure (1)..(54): unsure at all Xaa locations
  Clone ID: PAT_MRT3847_69705C.1.pep
KGLNGKNPAVTKLNRLEENPPSATGRKTKKARTISPSKNLRTLNGNXDPPCNGA

SEQ ID NO: 252136 - protein, 74 aa, Glycine max
  Clone ID: PAT_MRT3847_69706C.1.pep
VDSRVRPRVRGNGKEEEKVLSSSSFIASVFVLFFSLCQTVSLSEFQFFSECPNTPFCLKFLLAFDPPFLSFHVL

SEQ ID NO: 252137 - protein, 55 aa, Glycine max
  Clone ID: PAT_MRT3847_69707C.1.pep
LGIRLELPLPTTLLLCPFYIYSLKWTRQKTFFAAFCEHPLVSLLGFCIAKLRYHF

SEQ ID NO: 252138 - protein, 118 aa, Glycine max
  unsure (1)..(118): unsure at all Xaa locations
  Clone ID: PAT_MRT3847_69708C.1.pep
SFNTLDTSKFIDEIDDVGRLRGTGIVGGNDEREQTLNQLLTEMKKLDKDVSLSVIAMRTPGFSGADLANLMNQAVILAXERGKDKITMEEVDDSVDRIVAGKEGTKMMIKSNFLSTAN

SEQ ID NO: 252139 - protein, 107 aa, Glycine max
  unsure (1)..(107): unsure at all Xaa locations
  Clone ID: PAT_MRT3847_69709C.1.pep
VPXXLXNHXXGXPDXXXXXVPXXSXXXXXXXPXKXXXXXXFXXPXGXXXHFXXXIHGRXVSXFQXVXQLXXXXVPLXXRXXXHPLLXXXXXXXXHPHXAXHXWXXHX

SEQ ID NO: 252140 - protein, 101 aa, Glycine max
  unsure (1)..(101): unsure at all Xaa locations
  Clone ID: PAT_MRT3847_6970C.1.pep
XTXXPXXXXXXXXPXGXXXXPXXXXPGXXXXXXXXPXXGXXXFFFFRXSTXIHXVQXXTXXXLRXXXXSSXNLERXFFXVXSYXXYMXVEPNXEXTXAXXX

SEQ ID NO: 252141 - protein, 59 aa, Glycine max
  Clone ID: PAT_MRT3847_69710C.1.pep
GRRYEACINFQGKQFIRMVLFIKTVISKNVTIAKLHYPTHRSFRCFTRVSDHVVRAFFV

SEQ ID NO: 252142 - protein, 57 aa, Glycine max
  Clone ID: PAT_MRT3847_69711C.1.pep
EGLEIITCVFAAMAKFFAAMILTLYAMSILYTMLMSALEQSRHFVYITSISSLGSVN

SEQ ID NO: 252143 - protein, 98 aa, Glycine max
  unsure (1)..(98): unsure at all Xaa locations
  Clone ID: PAT_MRT3847_69712C.1.pep
MEGGGRRITVSPRPCCGRRVVAKKXGFVNSVKKLQRREISSNRDRAFSMTDAQERFRNIRLQEEYDTHDPKGPSSAVLQFLRKRSKIIEIVAARDIVF

SEQ ID NO: 252144 - protein, 499 aa, Glycine max
  unsure (1)..(499): unsure at all Xaa locations
  Clone ID: PAT_MRT3847_69713C.1.pep
MEGGGRRITVSPRPCCGRRVVAKKRPRLVDGFVNSVKKLQRREISSNRDRAFSMTDAQERFRNIRLQEEYDTHDPKGPSSVVLPFLRKRSKIIEIVAARDIVFALAQSGVCAAFSRETNERICFLNVSPDEVIRSLFYNKNNDSLITVSVYASDNYSSLKCRSTRIEYIRRVKPDAGFALFESESLKWPGFVEFDDVNGKVLTYSAQDSIYKVFDLKNYSMLYSISDKNVQEIKISPGIMLLIFTKSSSHVPLKILSIEDGTVLKSFNHLLHRNKKVDFIEQFNEKLLVNHENENLHILDERNYKLTVIKKSEYMPLFELIILYLKQFFLRFFNQTEAFRSVCGKQLSLIFRNRTVAVWNFRGELVTSFEDHLLWXPDWNINNIYIPSDQDLIISYCKADSDDSLSEGNAGSINVSNILTGKCLAKIRASNGLPMVKECSCSDDNCSSSACNSGKRKRSSRIRSTVAEALEDITALFYDEERNEIYTGNRLGLVHVWSN

SEQ ID NO: 252145 - protein, 246 aa, Glycine max
  unsure (1)..(246): unsure at all Xaa locations
  Clone ID: PAT_MRT3847_69714C.1.pep
RITARPTRPASDNYSSLKCRSTRIEYIRRVKPDAGFALFESESLKWPGFVEFDDVNGKVLTYSAQDSIYKVFELKNYSMLYSMADKNVQEIKISPGIMLLIFAKASSHVPLKILSIEDGTVLKSFNHLLHRNKKVDFIEQFNEKLLVKQENENLQILDVRTFEHTEVCRSEFMTPSAFIFLYENQLFLTFRNRTVAVWNFRGELVTSFEDHLLWHPDCXHNIYITSDQDLXIYCKADSDDSCLKEC

SEQ ID NO: 252146 - protein, 78 aa, Glycine max
  Clone ID: PAT_MRT3847_69715C.1.pep
MLRFCVIVRYIRRGTPDAGFALFESESLKWPGFVEFDDVNGKVLTYSAQDSIYKVFDLKNYTMLYSISDKNVQEIKIR

SEQ ID NO: 252147 - protein, 81 aa, Glycine max
  Clone ID: PAT_MRT3847_69716C.1.pep
HLAHLSKIDKVTPLLCFSTLSLSLSHTHTPLFLFLFCLSVIEVERVENLDGWSSSSGTVYLMVCVVAEKLKKEERSIEKQR

SEQ ID NO: 252148 - protein, 80 aa, Glycine max
  Clone ID: PAT_MRT3847_69717C.1.pep
MEGGGRRITVSPRPCCGRRVVAKKRPRLVDGFVNSVKKLQRREISSNRDRAFSMTDAQERFRNIRLQEEYDTHDPKGPSS

SEQ ID NO: 252149 - protein, 62 aa, Glycine max
  unsure (1)..(62): unsure at all Xaa locations
  Clone ID: PAT_MRT3847_69718C.1.pep
DEYHLSDFHTDYEIAKCYVIXSFNEDDVHKSVKYNVWTSTPNGNKKLNAAFLDAEAKLRQTG

SEQ ID NO: 252150 - protein, 248 aa, Glycine max
  Clone ID: PAT_MRT3847_69719C.1.pep
FYFSPGIMLLIFTKASSHVPLKILSIEDGTVLKSFNHLLHRNKKVDFIEQFNEKLLVKQENENLQILDVRTFELTEVSRSEFMTPSAFIFLYENQLFLTFRNRTVAVWNFRGELVTSFEDHLLWHPDCNTNNIYITSDQDLIISYCKADSDDSLSEGNAGSINVSNILTGKCLAKIRASNGLPMVKECSCSDDNCSSSACNSGKRKRSSRIRSTVAEALEDITALFYDEERNEIYTGNRLGLVHVWSN

SEQ ID NO: 252151 - protein, 119 aa, Glycine max
  Clone ID: PAT_MRT3847_6971C.1.pep
MEIESVKCECCGLKEDCTQEYIRDVKAKFDSKWLCGLCSEAVRDEVNRAKRPFAMEEAVKAHMSFCGKIKSNPAVRVADGMRQMLRRRSTDLSSSSSKYSGRSNTTSQVTDSFTFPLHP

SEQ ID NO: 252152 - protein, 75 aa, Glycine max
  Clone ID: PAT_MRT3847_69720C.1.pep
KNDPKVPHPPQGFALPESDMDTRPRKNQCYSLKDSSAADGSHRSEKSRYYAHSYSSDYSDPRETPHNSRRTSPKY

SEQ ID NO: 252153 - protein, 154 aa, Glycine max
  Clone ID: PAT_MRT3847_69721C.1.pep
MPAKANAIGIDLGTTYSCVGVFQHGKVEIIANDQGNRTTPSYVAFTDTERLIGDAAKNQVAMNPSNTVFDAKRLIGRKFDDPAVQSDMKHWPFKVVQGEGARPKVMVEVKGEDKAFFPEEVSSMVLIKMKETAEAFLGQTVTDAVVTVPAYFND

SEQ ID NO: 252154 - protein, 85 aa, Glycine max
  Clone ID: PAT_MRT3847_69722C.1.pep
SLIFICAPSSIVLEKTLTIYSIVAGYKAGPTNGNITLENPSMDIASLNNAKTSYTAWDNYQHHIYEPGLNDMVKQYHCMNLFYST

SEQ ID NO: 252155 - protein, 90 aa, Glycine max
  unsure (1)..(90): unsure at all Xaa locations
  Clone ID: PAT_MRT3847_69724C.1.pep
LHFPYVFRPYSTQKYIISVEKVNTAKNGELILPPELRFHPTDEELVMQYLERKDFSXPVPACIIPELHVRQCDPWDLPRDLEQERYLFST

SEQ ID NO: 252156 - protein, 138 aa, Glycine max
  unsure (1)..(138): unsure at all Xaa locations
  Clone ID: PAT_MRT3847_69725C.1.pep
PLPMIPSSVENLATDNEKGVVXALALTGTNYRQLGVQAGRKNERVMATERDQVHIPNHLNXATWEDLLDYSGLRPTKPAFNEDGRYHMXAQKKGEIVCTCSFPEKHASIDSDILIKQTKVNAGTGTTGRDEVSILNYA

SEQ ID NO: 252157 - protein, 59 aa, Glycine max
  Clone ID: PAT_MRT3847_69726C.1.pep
ARAQALPAIVNIVFATQHKYWDLGGHGLKNKIVANNIPCLTAGPPVYVTVSSLRSPKPT

SEQ ID NO: 252158 - protein, 228 aa, Glycine max
  Clone ID: PAT_MRT3847_69727C.1.pep
MAESVGVAGFGVSGSFSLTRPTIFSRSSNNISLFRSQSHFPAAAFGSLTRSNPHVHAAVTSDSKAATSLDLTQPDLDNSGGGANGNGGGGGGGGGGGGGGEGGGDNSKGEEGSDGDKRKMALLMSQKFTLAYAALVGVGGVMGYLKSGSNKSLLAGGLSASLLYYVYTELPGSPVFASSVGLGISAALLGVMGSRFKKSGKVFPAGVVSLVSLIMTGGYLHGIMRSAH

SEQ ID NO: 252159 - protein, 222 aa, Glycine max
  Clone ID: PAT_MRT3847_69728C.1.pep
MAECLGVSVSTLGSFSLSRPTIFYRSPINISLFASQSHFPAAAFGYLTPSNPHLYAAVSSDSKAATSLDLTQPDLDNSGGGANGNANGGGGGGGGGGGDDSKGEEGSDGDKRKMALLMSQKFTLAYAALVGVGGVMGYLKSGSNKSLLAGGLSASLLYFVYTELPGRPVFASSVGLGISAALLGVMGSRFKKSGKVFPAGVVSLVSLIMTGGYLHGIMRSAH

SEQ ID NO: 252160 - protein, 83 aa, Glycine max
  Clone ID: PAT_MRT3847_69729C.1.pep
TSPNPYPLAASMSPFSSHPTTKPYFQKTIPLFSKLYSSPNLSSLTLTITISYPYQPSLLTTTTLSLLTHPNPIPFLLLLLISN

SEQ ID NO: 252161 - protein, 78 aa, Glycine max
  unsure (1)..(78): unsure at all Xaa locations
  Clone ID: PAT_MRT3847_6972C.1.pep
ASRKKRPQLFKXCQNALVSMYNSASKPRALNLIWEIVYFLYVMVFVSVQLFPFGACINVEELNMEAPFFSVFFFTSYY

SEQ ID NO: 252162 - protein, 68 aa, Glycine max
  Clone ID: PAT_MRT3847_69730C.1.pep
DATFNITTNTNSTRGSWACKRKNIFKLFSKFQALVFMFFMLLSLSLTHHSLAIEQSPHTLSLFVITLK

SEQ ID NO: 252163 - protein, 47 aa, Glycine max
  unsure (1)..(47): unsure at all Xaa locations
  Clone ID: PAT_MRT3847_69731C.1.pep
RIPGLANPTYFNGTLPGDNGCDPQGLAEDLENXRWDIQASSQNGRWA

SEQ ID NO: 252164 - protein, 66 aa, Glycine max
  Clone ID: PAT_MRT3847_69732C.1.pep
RVSCQLGGSGFLGIRRWICVISCALCGWDRTRSSTLRDVVYVSSNHQATQQHIYIFLPRVASRTRG

SEQ ID NO: 252165 - protein, 43 aa, Glycine max
  Clone ID: PAT_MRT3847_69733C.1.pep
YMPNLARLHQAYPQDVQLVHDDVLVLVLHAQSCTRYARLCFMR

SEQ ID NO: 252166 - protein, 64 aa, Glycine max
  Clone ID: PAT_MRT3847_69734C.1.pep
WLFHLYDLMMEPGYVYKIWLTKFNVVPPSLTFLLWMPTPFVVNAHSKEDNKDCVWNLPNHYVMM

SEQ ID NO: 252167 - protein, 65 aa, Glycine max
  Clone ID: PAT_MRT3847_69735C.1.pep
IRRQCASDPELLRTLLEQRIRHVFVNVLIVCCQPNVSHLCSEPLLLWRRRMCRRFRTTSTNLTLP

SEQ ID NO: 252168 - protein, 145 aa, Glycine max
  unsure (1)..(145): unsure at all Xaa locations
  Clone ID: PAT_MRT3847_69736C.1.pep
KPPQHPGGSGNPGGMLPPRILFAKDPPGFFGRVGMGFFPKLCPKFFNPFFTIAKLWSLLPPGAKDKAPPPKAPLFDVPPFGFFKVLGKGVFPPNPPFFVKAQLFSQFPXKKIKGAGGPLVFPPWFFRGFFFLKNFKICCFFWFLI

SEQ ID NO: 252169 - protein, 39 aa, Glycine max
  Clone ID: PAT_MRT3847_69737C.1.pep
KLVIADLRILKFLKLERFGTSWPSYHYGLHFLLPKSVSV

SEQ ID NO: 252170 - protein, 88 aa, Glycine max
  Clone ID: PAT_MRT3847_69738C.1.pep
RTIGYSFDRELYMSSRHVIVHLSWPAYICNKASEPLHTSLGLGSVSSKLRIGYQSKLLSGFLESIQMEVSSETQPIFSEPTSMGVPVK

SEQ ID NO: 252171 - protein, 70 aa, Glycine max
  Clone ID: PAT_MRT3847_69739C.1.pep
EQTSYYILDQEPDQVHILYQECHMLSRPEEDGTMTMGTTTLEINKQILYMDYTSYRVDILSADTAHFIQG

SEQ ID NO: 252172 - protein, 40 aa, Glycine max
  Clone ID: PAT_MRT3847_6973C.1.pep
YNSVFVKVDRASIRSDVEPCRIRKLSWTRLAEPLASPHKA

SEQ ID NO: 252173 - protein, 114 aa, Glycine max
  Clone ID: PAT_MRT3847_69740C.1.pep
RRGAHVGNDNVGSGASGNVNANAASAVLAGARGESSKKAALGGLRRRGAGNLGKLDLNVEFSNEVEEPSRGVHNREGNAAGHAEDNIEGIGFFEGLDEFLSSLPILNVVADDKA

SEQ ID NO: 252174 - protein, 262 aa, Glycine max
  unsure (1)..(262): unsure at all Xaa locations
  Clone ID: PAT_MRT3847_69741C.1.pep
QGPQLPIEEKQRHWALASPXANGIIQDSLMPKDGNDGFFPTTGNELKPEAITSNRKYRVRVLVCAPSNSALDEIVLRVFNGGLHDENDHVYCPKIVRIGLKAHHSIKAVSLDELMKQKRSSANKSSTNKQSNNGPAGSNDDSLRAAILDEATIVFSTLSFSGSHVFSKLNRSFDVVIIDEAAQAVEPATLVPLANQCKKVFLVGDPAQLPATVISDVAKNHGYGTSLFERLKQAGYPVKMLKTQYRMHPEIRSFPSRSFMKT

SEQ ID NO: 252175 - protein, 63 aa, Glycine max
  Clone ID: PAT_MRT3847_69742C.1.pep
INKYTSFPPFFFTIFPKASSEFRSQFQFLSGTLEVKNKGSVESENFDLYCLVFCLWLRFRFVL

SEQ ID NO: 252176 - protein, 242 aa, Glycine max
  Clone ID: PAT_MRT3847_69743C.1.pep
MNEPTRKYRKKNEEGSRSTQKNNKKKELKSILTSLLFVDAGEKNEEQHKKKEDLMDGYYSEVEESNYPKKRKKLAGGDSGSLRRVWVKERSGAWWEECNKPEFPEQEFKKAFRMGRLTFEAICEELNSVIAKEDTTLRTAIPVKQRVAVCLWRLATGDPLSVVSRRFGLGISTCHKLVLEVCTAIKTVLMPKYLQWPNVVTLRDIKGEFENISGISNVVGSMFTSHVPIIAPKMSVSAYFNK

SEQ ID NO: 252177 - protein, 173 aa, Glycine max
  Clone ID: PAT_MRT3847_69744C.1.pep
MSCFSCFVSRGKDVRRVEIDNGSRSATSSSEGKGKKSVSNKGTSTAAASFGFRELAEATRGFKEVNLLGEGGFGMVYKGRLSTGEYVAVKQLIHDGRQGFHEFVTEVLMLSLLHDSNLVKLIGYCTDGDQRLLVYEYMPMGSLEDHLFDPHPDKEPLSWSTRMKIAVGAARGL

SEQ ID NO: 252178 - protein, 72 aa, Glycine max
  unsure (1)..(72): unsure at all Xaa locations
  Clone ID: PAT_MRT3847_69745C.1.pep
QKKKIKKKTKNLKKTKLKSKHRRLLTTAADXILPMINLLIYILPNYPNSNNPNKTLIISLPYTNYTNITSST

SEQ ID NO: 252179 - protein, 359 aa, Glycine max
  Clone ID: PAT_MRT3847_69746C.1.pep
MSCFSCFVSRRKDVRRVEIDNGSRSATATATSSSESERKRESSEGKGKKSVSSSSNKGSTAAASFGFRELAEATRGFKEVNLLGEGGFGRVYKGRLATGEYVAVKQLSHDGRQGFQEFVTEVLMLSLLHNSNLVKLIGYCTDGDQRLLVYEYMPMGSLEDHLFDPHPDKEPLSWSTRMKIAVGAARGLEYLHCKADPPVIYRDLKSANILLDNEFNPKLSDFGLAKLGPVGDNTHVSTRVMGTYGYCAPEYAMSGKLTLKSDIYSFGVVLLELITGRRAIDTNRRPGEQNLVSWSRQFFSDRKKFVQMVDPLLHENFPVRCLHQAMAITAMCIQEQPKFRPLIGDIVVALEYLASHSNP

SEQ ID NO: 252180 - protein, 407 aa, Glycine max
  Clone ID: PAT_MRT3847_69747C.1.pep
APNSSRAPLLKNAYGDAGGDDIDYDRSQLSSEESLSLGKTEDDSSANRSSVSEFGDDNFAVGSWEQKEVTSRDGHMKLQTQVFFASIDQRTERAAGESACTALVAVIADWFQNNRDLMPIKSQFDSLIREGSLEWRNLCENQTYRERFPDKHFDLETVVQAKIRPLSVVPGKSFIGFFHPEGMDEGRFDFLHGAMSFDNIWDEISHAGRECTNNDEPQLYIISWNDHFFILKVEADAYCIIDTLGERLYEGCNQAYILKFDSDTVIYKMQDVARGSGKKTASDLQTVAEVLEQNERQIQPINGKEMDSSVETEEQLKSDQEEEVVCRGKEACKEYIKSFLAAIPIRELQADVKKGLISSTQTPFHHRLQIEFHYTQLLQSCVAPPVVAEPSMTVPETLALAVTEVSA

SEQ ID NO: 252181 - protein, 96 aa, Glycine max
  Clone ID: PAT_MRT3847_69748C.1.pep
VKSNQAPLSPPLFPRSLRPIFNYDCFLLLFLHFQLPSLSHRSQILHSSHNTDFSLMGSISHVITTTLPHLPSTRSLGFPISHSNSRLLSLPPTRVA

SEQ ID NO: 252182 - protein, 67 aa, Glycine max
  Clone ID: PAT_MRT3847_69749C.1.pep
ARGETSSSLLCFQDQESVPRQDFFFRTCYPPLQRKEELPPGRNYEEDYSLERLEMAADCQGPNGRPK

SEQ ID NO: 252183 - protein, 167 aa, Glycine max
  Clone ID: PAT_MRT3847_6974C.1.pep
FVHVCSSTITIFKKITIYYDEKFIHSKLTGHLYVKSDVYGFGVVLLEMLTGRAALDTNQPAGMQNLVECTMSCLHDKKRLKEIIDPRMNEQYSLRAAFQIAQLVLKCLETDPKKRPSTKEVLGTLEKARAIKYKPKGKKVCQTSQRRSPSIHYNNGYPKSRTNSPPQ

SEQ ID NO: 252184 - protein, 66 aa, Glycine max
  Clone ID: PAT_MRT3847_69750C.1.pep
ICYTENQVNGEIYNHEELRKQLPNHTFRTGSDCDVIAHLYEEHGENFVDMLDGIFSFVLLDTRDNS

SEQ ID NO: 252185 - protein, 87 aa, Glycine max
  unsure (1)..(87): unsure at all Xaa locations
  Clone ID: PAT_MRT3847_69751C.1.pep
FSTCLKVLGMTAHKIITHPDVFLLAFMXFIVVLNYFFNTHIYFFVTCPYIFSDCLXVFTISLHERSRKNIHVLSGCGRFDLLPFMDY

SEQ ID NO: 252186 - protein, 48 aa, Glycine max
  Clone ID: PAT_MRT3847_69752C.1.pep
KNKCFYFSKKKKKKKKKKKKKKKKKKKKKKKKKKKKTKNKKKTNGAAA

SEQ ID NO: 252187 - protein, 130 aa, Glycine max
  Clone ID: PAT_MRT3847_69753C.1.pep
MAELFIFSIAESLITKLASHSFQEASRVVGLYDHLRDLEKTLSLVKAVLLDAEQKQEHNHELQEWLRQLKSVFYDAEDVLDEFECQTLRKQVLKAHGTIKDEVSHFFSSSNPLVFRSKMAQQIKDVSKRL

SEQ ID NO: 252188 - protein, 70 aa, Glycine max
  Clone ID: PAT_MRT3847_69754C.1.pep
NLSNQSSWVVWEQHFINNHPHKNYDFLSGSPKTITVFQYKSWRSVPFPPSCFPGGGGPKPNSFGLGLLNL

SEQ ID NO: 252189 - protein, 440 aa, Glycine max
  Clone ID: PAT_MRT3847_69755C.1.pep
MNENTSHRIARFSCSGSNLEGKFDLADFKSLDRLLTEKVGWQDQAICAISQTLSLCKSGAGKRRGSNGRADIWLAFLGPDRLGKRKIASVLAETIFGNPESLISVDLGFQDSFYPLNSVFEYQKSRCYDVLRRKTILDYIAGELSKKPHSVVFLENVDKADVLVQNSLLQALRTGKFSYSHGRAISINNTIFVVTSTVCKGNDSFVLESAKMFSEERMLEAKRCQMQLLIGRASEDAKRIGGTNVKVVPRKGFSKSSSLNKRKQADISDSKEGATSKMQKQDSEASRSFLDLNMPVEDGEEGVNDNDHESESMSENTDAWLSDFFDQIDEKVVFKPFNFNELAEEVLKRIGMLFQRTFGSELQLEIDHEVIAYILAAAWLSDKKNAVEDWIEHVLGKGFVEAQQKYHPAAQYVVKLVNCESIFVEEQAPDVCLPARINMD

SEQ ID NO: 252190 - protein, 154 aa, Glycine max
  Clone ID: PAT_MRT3847_69756C.1.pep
GSFSILIGSRLERSNAANRNMPGCGPGSSSDRTRTSVVNGLKKKLKDAMESFNEIRQLVSSEYRETVQRRYFTVTGENPDDKTLDLLISTGESETFLQKAIQEQGRGRILDTITEIQERHDAVKEIEKNLKELHQVFLDMTVLVQHQGEQLDDI

SEQ ID NO: 252191 - protein, 333 aa, Glycine max
  Clone ID: PAT_MRT3847_69757C.1.pep
MFWRDRERENKELNGGVLCGLVRVLVVGDSGVGKTSLVNLIVKGSPIARPPQTIGCSVDVKHITYGNSGSSSSSLKGDSERDFFVELWDVSGHERYKDCRSLFYSQINGVIFVHDLSQRRTKTSLQKWAAEIAATGTFSAPLGSGGPGGLPVPYIVIGNKADIAAKDGPRGSSGNLVDVARQWVEKQGLLPSSEELPLTESFPSNGGLIAAAKEARHDKEAVVKFFRKLIRRRYFSDEIQIPSPAWSIPSVQRQAQRIDENFTEDDQSYNTSDPYKYNMLPPLPAQRNLTPPPTLYPQQPVSVSENYSFPRFSLSGSSEISTVARTKRSDINV

SEQ ID NO: 252192 - protein, 106 aa, Glycine max
  unsure (1)..(106): unsure at all Xaa locations
  Clone ID: PAT_MRT3847_69758C.1.pep
MFWRDRERENKELNGGVLCGQVRVLVVGDSGVGKTSLVNLIVKGSSIARPPQTIGCSVDVKHITYGNSGSSSSSPKGDSERDFFAELWDVSGHERYXDCPSLFYSQ

SEQ ID NO: 252193 - protein, 110 aa, Glycine max
  Clone ID: PAT_MRT3847_69759C.1.pep
MKILSRAQALKFRSLPNLTSYNILIDMLCKAGELEAALKVQDSMKEAGLFPNIITVNIMIDRLCKAQRLDEACSIFLGLDHKVCTPDSVTFCSLIDGLGRHGKVNDAYML

SEQ ID NO: 252194 - protein, 88 aa, Glycine max
  unsure (1)..(88): unsure at all Xaa locations
  Clone ID: PAT_MRT3847_6975C.1.pep
QGPTLAPFPIGFTAXLFQLATFPFTGHGIYLACSIGEVIISSKDIGWEAHRLFWEGPFCGQAHXALSLQVVIRAFPLRPKLFHRAVVV

SEQ ID NO: 252195 - protein, 42 aa, Glycine max
  Clone ID: PAT_MRT3847_69760C.1.pep
SHPTIQCPNLTFQTTNPFGSFPCWTSSWGRSLAWGSSFSCSS

SEQ ID NO: 252196 - protein, 55 aa, Glycine max
  Clone ID: PAT_MRT3847_69761C.1.pep
RQRTLSSLIPLLLPNHADADYLIVILNGTAILSLVNNDDRDSYRLQSGDALRVPS

SEQ ID NO: 252197 - protein, 72 aa, Glycine max
  unsure (1)..(72): unsure at all Xaa locations
  Clone ID: PAT_MRT3847_69762C.1.pep
MXSTKXREXFVYTAKLAEQXERXXEXVEAMXNXAXVNVXLTXXEPXLLSXXXKNXVXARXAXWXXXXXXXHX

SEQ ID NO: 252198 - protein, 87 aa, Glycine max
  unsure (1)..(87): unsure at all Xaa locations
  Clone ID: PAT_MRT3847_69763C.1.pep
KGRPRGXTGVKTVFLRLFGTTENGANRGTYPNFLWRLLXXDMQPLVIRFDVLVVLRSTINEVPIRLGNQKETCLRYPGYFLMLANSL

SEQ ID NO: 252199 - protein, 57 aa, Glycine max
  Clone ID: PAT_MRT3847_69764C.1.pep
KQKVIMFTFLKNKIAKNNIQAHFYNAKGLWKDITSFRIKIIGNVIKTNPRLILLYCA

SEQ ID NO: 252200 - protein, 50 aa, Glycine max
  Clone ID: PAT_MRT3847_69765C.1.pep
RRKTRSSSRPIRRVKQRELRRQKLGKRYTRWFQNHILPVPTNEFRLNFYE

SEQ ID NO: 252201 - protein, 70 aa, Glycine max
  Clone ID: PAT_MRT3847_69766C.1.pep
PGDPRQSNNNVQIFSSSSQVMMPHPLIQSLHSTNSTLNRRIPTSFSSKLLDSDNNNDRSQPNKGSSTTRS

SEQ ID NO: 252202 - protein, 314 aa, Glycine max
  Clone ID: PAT_MRT3847_69767C.1.pep
MEKYEKLEKVGEGTYGKVYKAREKASGSLVALKKTRLEMDEEGVPPTALREVSLLQLLSQSIYIVRLLSVEHVDKVPKSQKSSSNPLTKPILYLVFEYLDTDLKKFIDSHRKGPNPRPLPPPLIQSFLFQLCKGVAHCHSHGVLHRDLKPQNLLLDQHKGILKIADLGLGRAFTVPLKSYTHEIVTLWYRAPEVLLGSTHYSTGVDIWSVGCIFAEMVRRQALFPGDSEFQQLIHIFKMLGTPTEENWPGVTSLRDWHVYPGWEPQSLAKNVPSLGPDGVDLLSKMLKYNPSERISAKAALDHPYFDSLDKSQF

SEQ ID NO: 252203 - protein, 151 aa, Glycine max
  unsure (1)..(151): unsure at all Xaa locations
  Clone ID: PAT_MRT3847_69768C.1.pep
LFTLMTSGPFCSPPVTSFSSNALNNPISFFFPNPKISSGMFNIVSDKNKKQSVHTPQTDSHKMKGLAYALXNNYRTSPHRSSPRHSQFQSPADAXTHYSXLRSYQHLTTVLRQDLNDYMDAFYIAPSCNDRLACHIINNILTMSYINVPRI

SEQ ID NO: 252204 - protein, 221 aa, Glycine max
  unsure (1)..(221): unsure at all Xaa locations
  Clone ID: PAT_MRT3847_69769C.1.pep
KQKKKKNKKKNKHKKKKKNKKKNKKKKKTTTNKKKKKQKKKKKKNKKKNKKNQKKKKKKKKKKQSKTKKQKKNKRPPPKKKNKKKTKKKKKKKKKNQHKKKKKTKKKKKKQKKKKKXKKKQKNKKKKKKNKKKQKKKKKKKKKNKKTKKKKKKTKGPKKKQKKKNKTKKKKKKKKKKKKTPHPQTTTKESRTPQDRPENPGDPRDRGREDKTTSAARDLNF

SEQ ID NO: 252205 - protein, 89 aa, Glycine max
  unsure (1)..(89): unsure at all Xaa locations
  Clone ID: PAT_MRT3847_6976C.1.pep
ASNSSSDHTLTFHCTGEWKTHYDACKETYTLIGIDMTAAXWGPCKAIDPXFHSMLXKFTSAGPIKIDEDEFMAVCXEFHVPSMPTFVLV

SEQ ID NO: 252206 - protein, 161 aa, Glycine max
  Clone ID: PAT_MRT3847_69770C.1.pep
KKKKRWEFGIAGERWVGKVKEWCGKYNIVGGPVEKIVEKRFRKNYHPAWAAAFILDPLYLIKDASGKYLPPYKCLTREQEKDVDKLLTRLASREEAHVVLMELMKWRSEGLDPLYAQAVQMKQRDPVTGKMKVANPLSSRLVWETCLTEFKSLGKIAVRLI

SEQ ID NO: 252207 - protein, 65 aa, Glycine max
  Clone ID: PAT_MRT3847_69771C.1.pep
IRNELLDWLSKLGLNQEEENIIYRNFLFELAIANLPYPIRHRYLISCSIGLKNGPLMHAVTFKFG

SEQ ID NO: 252208 - protein, 63 aa, Glycine max
  Clone ID: PAT_MRT3847_69772C.1.pep
NLTSSTGNVDPSAQLPMPVEPVLVYEATGPDFPRRASKVLLAIESTGQNPACWVAAAFLVSCS

SEQ ID NO: 252209 - protein, 51 aa, Glycine max
  Clone ID: PAT_MRT3847_69773C.1.pep
LPPCYFNPTIVFLGSLTLCCNSRLITMIELNGSLGHSTGLNFNTFYILFSP

SEQ ID NO: 252210 - protein, 41 aa, Glycine max
  Clone ID: PAT_MRT3847_69774C.1.pep
HMERSSLCNSKRCIITQCNFSTIALTLKRVRTRELWVVFDA

SEQ ID NO: 252211 - protein, 56 aa, Glycine max
  unsure (1)..(56): unsure at all Xaa locations
  Clone ID: PAT_MRT3847_69775C.1.pep
FFWSXPLXCTRKMXDXTVXILXFRTSXXLYXLXINXLXXXXKHSSRIPELYVRVHA

SEQ ID NO: 252212 - protein, 45 aa, Glycine max
  unsure (1)..(45): unsure at all Xaa locations
  Clone ID: PAT_MRT3847_69776C.1.pep
APHSIWDGPDRPKDCGPCSEQIASYRTGECPDDYRWXTAGLSGDP

SEQ ID NO: 252213 - protein, 149 aa, Glycine max
  Clone ID: PAT_MRT3847_69777C.1.pep
AYVTVLHSSEAYVCGAIALAQSILQHNNNNNNNNNNNNNYTKLDLLLLADESIGYKSIRGLKAAGWKIKRIKRILNPYAQKGSYNEWNYSRLRIWQLTMYDKIIFLDADLLVLKSIDGLFAYPQLSASPNDFSLFKSGLMVIEPSTCMF

SEQ ID NO: 252214 - protein, 165 aa, Glycine max
  unsure (1)..(165): unsure at all Xaa locations
  Clone ID: PAT_MRT3847_69778C.1.pep
FFEDVLVNGKPXWTAGVPEVFSGSHVYGCAHGSRDVRSGVCGQVLIKKLHEEIELRGLKDQMTRKLLMGRRLARSRKTSPLKATNLSSKENVGGCCQGVNGVSCCRSASLEQNKEIEETPETHKKGSKICSNWPQLQQRDIRTAVGVLGAVAVVVVAYKLYRRAA

SEQ ID NO: 252215 - protein, 352 aa, Glycine max
  unsure (1)..(352): unsure at all Xaa locations
  Clone ID: PAT_MRT3847_69779C.1.pep
MASENPTADDAVNGFNRPEMFSENLAGTVDAYDRHVFLCYKSHLSWPPRIEASDADPFPKRVAATFKARKNDLPLKTKITVCEVREEAGFLDGDVLIFPDMIKYRGLEESNVDSFFEDVLVNGKAWTDGMPRWPYGGVXWFTCHGSRDVRCGVCGPVLIKKLHEEIELRGLKDQISVTACSHIGGHKYAGNVIIYSPRADGKIMGHWYGYVTPNDVPDLLDQHIAKGEVIQRLLRGQMGPSVADGKEADDQKVANGEETGKVKKNNHVESDNLSSKENVGGCCQGVNGVSCCRSASLEQNKEIEETPETHKKGSKICSNWPQLQQRDIRTAVGVLGAVAVVVVAYKLYRRAA

SEQ ID NO: 252216 - protein, 126 aa, Glycine max
  unsure (1)..(126): unsure at all Xaa locations
  Clone ID: PAT_MRT3847_6977C.1.pep
SIFAPGESIMGGVFKYVGGLKHIEMPERTGFKFQHMSLKVKGLIDFIPELSEEHNDQEAVEQILRVAFLDPECTWTDLEKLNRQENDAYAALEARKKPAXDAWPKIIPVGLVIDLCKDRRERYLST

SEQ ID NO: 252217 - protein, 236 aa, Glycine max
  unsure (1)..(236): unsure at all Xaa locations
  Clone ID: PAT_MRT3847_69780C.1.pep
MASAAAVAAEDDAVNGSTRSEMYSENLAGTVDAYDRHVFLCYKSYVSWPARIEASDADPFPKRVAATFKARKNDLPLKTKITVCEAREEAGFADGDVLIFPDMIKYRGLEESNVDGFFEDVLVNGKPWTAGVXEVFSGSHVYVCAHGSRDVRCGVCGPVLIKKLHEEIELRGLKDQISVTACSHIGGHKYAGNGIIYSPRADGKIMGSLGMGYVTPNDVPDLLDQHIAKGEVIQRL

SEQ ID NO: 252218 - protein, 104 aa, Glycine max
  Clone ID: PAT_MRT3847_69781C.1.pep
KFPGLFVVPDKNPSPGDCKFKIMIQPDFVGPHGNGRIWSLKKGPFGLLFFPPMGPLKILDLFLEKVPRARFFIFTRGGRAKKCKACLRSQKIFSRVQKLPKLVF

SEQ ID NO: 252219 - protein, 72 aa, Glycine max
  Clone ID: PAT_MRT3847_69782C.1.pep
ENTIRRKTPSLIIIRRSCSPSCKRIRNFVRHVNHDPTSIYMHANLIHVPKHLELGQIHTTYDNHVSKLATWI

SEQ ID NO: 252220 - protein, 97 aa, Glycine max
  unsure (1)..(97): unsure at all Xaa locations
  Clone ID: PAT_MRT3847_69783C.1.pep
LEESLSGAGSEASATPSSGGLTPTAGKTNETEMMWHYQDPSGXVQVPFTIVQLRTWSNTRYLAADXMIWRTTETHDEPMLLTDAHDRECMYGTISGG

SEQ ID NO: 252221 - protein, 195 aa, Glycine max
  unsure (1)..(195): unsure at all Xaa locations
  Clone ID: PAT_MRT3847_69784C.1.pep
GTGFAAAAGKSSGSGGVIAGIAALAAGVWGAKELGYINFGGKEGISLPQISEPKRDYGAVRRAIEGVLDAPEGYDDGSYGPVLVRLAWHASGTYDKATNTGGSNGATMRWAPESEHAANAGLQVARDLLEPIKKQFPWISYADLXTLAGAVAVEAMGGPEIAWRPGRKDHDSGTYCPPDMRLPDAAKGAPHGEGD

SEQ ID NO: 252222 - protein, 112 aa, Glycine max
  unsure (1)..(112): unsure at all Xaa locations
  Clone ID: PAT_MRT3847_69785C.1.pep
RCRLEKESYTKAQRACGKTTKKDMHGDGTQIXENLTEKEDQKKPKKIDATLRQRKETKYNEEKGQTETKXSKMPLDDDETHKGSMRDLKNSQNKTELAKNKGGGTKLSNEPI

SEQ ID NO: 252223 - protein, 132 aa, Glycine max
  unsure (1)..(132): unsure at all Xaa locations
  Clone ID: PAT_MRT3847_69786C.1.pep
FSPPDLFPPNFGALLPRFLFGGGRFFFPFGPQKGFFPKRVPKKGLPKGGLSGFQXFKGFGVFPAPEGSPGVYPPGGFFGGPXSQGRLPPGVSWGFFSSGPPRGGFFLVNGVFFGGNYSGGPLFSWGKPPFCF

SEQ ID NO: 252224 - protein, 131 aa, Glycine max
  Clone ID: PAT_MRT3847_69787C.1.pep
MDKHSHLENAPEAIDIAGFRVFGLYPEDAEFYTNYPEEKRKKVFRKVDVRLVPMLAALYLICHIDRANIGNAKIEGMVEDLGMSGVQYNTVLSIFFIPYVLLEVPSNILLKKFKRPSMYLGILTLGWGIIM

SEQ ID NO: 252225 - protein, 547 aa, Glycine max
  unsure (1)..(547): unsure at all Xaa locations
  Clone ID: PAT_MRT3847_69788C.1.pep
MQASTFGVEGATFGVQERRGLVGFGEFRNGSVLRPRRVCMTKNNTDLCGLRLGSVTMETELTSARIGFGGIFGPSVKPRSVRVMASDGNIEDVVPATPQGKSSGNVLPYVGVACLGAILFGYHLGVVNGALEYLAKDLGITENTVLQGWIVSTLLAGATVGSFTGGSLADQFGRTRTFQLASIPLAIGAFLGATAQSVQPMIIGRLLAGIGIGVTSAIVPLYISEISPTEIRGALGSVNQLFICIGILLALVAGLPLAGNPIWWRSMFGIAIVPSVLLALGMAISPESPRWLVQQGKISEAEKAIKTLYGQERVAAVMNDLTTASQGSSEPEAGWLDLFSSRYWKVVSVGAALFLFQQLAGINAXGYYSTSVXRSAGIASDVAASALVGASNVFGTCIASSLMDKQGRKSLLITSFSGMAASMLLLSLSFTWKVLAPYSGTLAVLGTVLYVLSFSLGAGPVPALLLPEIFASRIRAKAVSLSLGTHWISNFVIGLYFLSVVNKFGISSVYLGFSAVCVLAVLYIAGNVVETKGRSLEEIERALSAST

SEQ ID NO: 252226 - protein, 46 aa, Glycine max
  Clone ID: PAT_MRT3847_69789C.1.pep
YKFFRFILFFDDTYGLDACLISSAASFSHNLFQFTFQQNSFFVAAP

SEQ ID NO: 252227 - protein, 43 aa, Glycine max
  unsure (1)..(43): unsure at all Xaa locations
  Clone ID: PAT_MRT3847_6978C.1.pep
VEATNFLWVGXLFSRLNPLSWHRATSSSLLLILMGAGHHHWSW

SEQ ID NO: 252228 - protein, 256 aa, Glycine max
  Clone ID: PAT_MRT3847_69790C.1.pep
PPKGRERRYEAFNRLRIFQVVSVAFLGGLLWWHTPESHIDDRVALLFFFSVFWGFYPLYNAVFTFPQERRMLIKERSSGMYRLSSYFLARTIEDLPLELALPTAFVFIIYWMGGLKPDPMTFILSLLWILYSFVVSQSLGLAFGAILMEVKQATTLASVTTLVFLIAGGYYIQQIPPFIVWLKYLSYSYYCYKLLLGVQYNENDYYECSTGELCKVADFPPIKSMGLNHLWVDVCIMAMMLVGYRLVAYLALHRVR

SEQ ID NO: 252229 - protein, 138 aa, Glycine max
  Clone ID: PAT_MRT3847_69791C.1.pep
LTAFSLCLTQAASMLLLSLSFTWKVLAPYSGTLAVLGTVLYVLSFSLGAGPVPALLLPEIFASRIRAKAVSLSLGTHWISNFVIGLYFLSVVNKFGISSVYLGFSAVCVLAVLYIAGNVVETKGRSLEEIERALSAST

SEQ ID NO: 252230 - protein, 140 aa, Glycine max
  unsure (1)..(140): unsure at all Xaa locations
  Clone ID: PAT_MRT3847_69792C.1.pep
LFDGNNDAFDDNPXRQIFGLPATMXDSAGLIIPGLTHFLYNYSTTXLHGIFEAASFGGSNIDPSAWEDKKRARESRFPAQVRVITRKTCEPLEEDSFRPILHHYDGPKFRLELNVPEALSLLDIFAEQDTFNDTFKALPA

SEQ ID NO: 252231 - protein, 62 aa, Glycine max
  Clone ID: PAT_MRT3847_69793C.1.pep
LQVRVITRKTCEPLEEDSFRPILHHYDGPKFRLELNVPEALSLLDIFAEQDTFNDTFEALPA

SEQ ID NO: 252232 - protein, 78 aa, Glycine max
  Clone ID: PAT_MRT3847_69794C.1.pep
LNDLTTPSQGSSEPVAGWLDLFSSRYWKVVSVGAALFLFQQLAGINAVVYYSTSVFRSAGIASDVAASALVGASNVFG

SEQ ID NO: 252233 - protein, 45 aa, Glycine max
  Clone ID: PAT_MRT3847_69795C.1.pep
AMTRYCRFLLFGFEEDELGFERGSHKKPKRRLITQDIAETFLTVP

SEQ ID NO: 252234 - protein, 59 aa, Glycine max
  Clone ID: PAT_MRT3847_69796C.1.pep
CTLMKSSVIRPHRSIAVVRLGYALGHDPPRHVLIAAFISEWMVADVQKAESPLQKQHSR

SEQ ID NO: 252235 - protein, 64 aa, Glycine max
  Clone ID: PAT_MRT3847_69797C.1.pep
SRPADKHNTQSKLQAQRLINCTTLYRLIQDLLITFFKKKKKNPTVYQKITIEKSKATSISSKIP

SEQ ID NO: 252236 - protein, 43 aa, Glycine max
  Clone ID: PAT_MRT3847_69798C.1.pep
PTKIHLFFRFERERTCPLCRALVKPADLRTFGDGSTSLFFQLF

SEQ ID NO: 252237 - protein, 180 aa, Glycine max
  Clone ID: PAT_MRT3847_69799C.1.pep
MAFIEKAVFFLMMMMTAFQVSHAAVHKVGDSAGWTIIGNIDYKKWAATKNFQVGDTIIFEYNAKFHNVMRVTHAMYKSCNASSPLTTMSTGNDTIKITNYGHHFFLCGIPGHCQAGQKVDINVVKVSAAAAPSPTSAMASPVPPANVPAPSPNNAAPFIVVKGAGIALMTLLALALSSYA

SEQ ID NO: 252238 - protein, 83 aa, Glycine max
  Clone ID: PAT_MRT3847_6979C.1.pep
LLSSRLIGLSLHSFDIFTRIICEAVLLSLFQCLDIAYSQVQKWDWNTISSPIVRGISLFQLFVLYGLLIFFLTLVEIGYFLKL

SEQ ID NO: 252239 - protein, 72 aa, Glycine max
  Clone ID: PAT_MRT3847_697C.1.pep
ETTASTTTMANAGLSLIVALIACFATQVTNPTLLPFTFVDRVLLGATSNFSFFQNCPSINPISLKNICVKLI

SEQ ID NO: 252240 - protein, 83 aa, Glycine max
  Clone ID: PAT_MRT3847_69800C.1.pep
RKGYFTSTTFRVRACKLLRIPLPLHSFRRRGSRLCTWTMLSTRVHNSQLMAFFCMKFASGTSTCLILCTSADFMIYSGAINVL

SEQ ID NO: 252241 - protein, 94 aa, Glycine max
  Clone ID: PAT_MRT3847_69801C.1.pep
WPSLDPIMHNSPLKSLPLVHRTDAVCFNNLCVYEGVRIMAYIGTFYVQTARSEITFRSLTCRQSHRYVYRVSQVSVEFIGPHGFKHVNMSERCC

SEQ ID NO: 252242 - protein, 62 aa, Glycine max
  unsure (1)..(62): unsure at all Xaa locations
  Clone ID: PAT_MRT3847_69802C.1.pep
PSRFHAPILDALVKSFPRGVFLKVDVDPLKGVFPAWAIQAMPPSVFLKKGXLLNKWVGAKTS

SEQ ID NO: 252243 - protein, 88 aa, Glycine max
  Clone ID: PAT_MRT3847_69803C.1.pep
RHSSLILTILFLHNHNHTKHPSYFKTFFISFFNHLSYFNYSILSILYQLLFNIHSSHISLHNTLPHLYLLFLTQSTTLFTFFFNLYIP

SEQ ID NO: 252244 - protein, 76 aa, Glycine max
  Clone ID: PAT_MRT3847_69804C.1.pep
RPPPAGKVQSFLQISPPGGPPPAGADESSLSLVTPIPPPPWLGAAPAGPTAGPSTPGGLFLPTKMNPKKTGPKPTP

SEQ ID NO: 252245 - protein, 149 aa, Glycine max
  Clone ID: PAT_MRT3847_69805C.1.pep
HPLSIALSNSHTASQALSSSTTLPNLPVAQLQLHITTMAAETENTLQKVDSLTDHQDGAAKKGHRRVSSMAADVYRIEDLEKEGKKIEIAIETQKLNWKLNKSPSTVEDPSVLKMPLTEPKLKSIALHFPLGLACHRTEHEKVSPSRMH

SEQ ID NO: 252246 - protein, 77 aa, Glycine max
  Clone ID: PAT_MRT3847_69806C.1.pep
GTPFSFLTVSSTTHVILEIQCYRVHKFVMAVHYARPIRVVGRYVALPAFWESEYMNIQAAQGRAISRKNTLLYLPSS

SEQ ID NO: 252247 - protein, 89 aa, Glycine max
  Clone ID: PAT_MRT3847_69807C.1.pep
IVASSKMPINNPRELKQIHLKIHDNCQMMKKALPFTLYIYIYIPGTHLDEIIRFNSHCQYHRLHGHDERPLNKQLHHQTTEGDALYRPP

SEQ ID NO: 252248 - protein, 34 aa, Glycine max
  Clone ID: PAT_MRT3847_69808C.1.pep
HMFRCMLIRAPTVVKVRECPGTSLDSIYSGLKYW

SEQ ID NO: 252249 - protein, 121 aa, Glycine max
  Clone ID: PAT_MRT3847_69809C.1.pep
ALTTLFVNVWAIGRDPNYWENPLEFKPERFLNEEGQSPLDLKGQHFELLSFGAGRRSCPGASLALQIIPNTLAGMIQCFEWKVGEEGKGMVDMEEGPGMALPRAHPLQCFPAARLHPFAEV

SEQ ID NO: 252250 - protein, 46 aa, Glycine max
  Clone ID: PAT_MRT3847_6980C.1.pep
VILLGRIIWIWAVSDAKTTLGQKLITVRTPYVDKTNSRSGGYGLTN

SEQ ID NO: 252251 - protein, 155 aa, Glycine max
  Clone ID: PAT_MRT3847_69810C.1.pep
QDLQYAGYQNSLIPSTAVNANGQEYELGLNVNERSFSTSQIGGIPSRISPEADRLLAEPFTGYHPAHLLNLDLRGIVRSNLQALRKEINERRKRGIDADLERRNLLDNIKEAMDEKRSEVEALEHKRRTAEEEYKRLKEVTTTQKLASDAHIRKC

SEQ ID NO: 252252 - protein, 128 aa, Glycine max
  Clone ID: PAT_MRT3847_69811C.1.pep
MNLKDSKLICSFILLNFLFFSCFAADNLPCPPKSTIPPSSSPQKCPKDTLKFGVCGSWLGLVKEVIGTKPSEECCILLKGLADLEAALCLCTAIKANVLGAVKVKVHVAVSLLVNACGKKVPSGFVCA

SEQ ID NO: 252253 - protein, 235 aa, Glycine max
  unsure (1)..(235): unsure at all Xaa locations
  Clone ID: PAT_MRT3847_69812C.1.pep
RIFFREMCXAYHNSPQQHTELWQYFQRATINRGSTTTSTSTAAVFALIRERGGESEXMLKEDEDEDDDSEEFSDEDEEESGEGGSRGMEEDENDVMRRRARNKGGFGVSXSSQMMQQLSGEVSGVLQDGGKSAWEKKQWMKKRVVQLEEQQVSYQMQAFELEKQRLKWARFSSKKEREMEKDKLQNERRRLEIERMVLLLRHKELELVNVQQQQHQQQXFFYLGQKKLLCKFYVW

SEQ ID NO: 252254 - protein, 77 aa, Glycine max
  Clone ID: PAT_MRT3847_69813C.1.pep
MNEGMKMQGSVIIGSNLFKRCDLFFTCTKWKYLYYKYIYSYTSIFLLFGKKSGISIKNAVQTAKFHVKIPHVFLGHG

SEQ ID NO: 252255 - protein, 148 aa, Glycine max
  unsure (1)..(148): unsure at all Xaa locations
  Clone ID: PAT_MRT3847_69814C.1.pep
DDDSDEFSDEDEDESGEGGSRGMEEDENDHVMRKSAWEKKQWMKKKVVQLEEQQVSYQMQAFEMEKQRLKWARFSSKKEREMEKDKLQNERKRLEIERMVLLLRHKELELVNVQQQHQQQXFFYLARXKKLLCKFYVWLIEILRAYVD

SEQ ID NO: 252256 - protein, 134 aa, Glycine max
  Clone ID: PAT_MRT3847_69815C.1.pep
MCGQDWLENGNWVGGSVPGNPSNWRTSENASVFGGDEHCLTERSYCGLLFLVCKLLTSFFKSIRWLWGKAFTVSSREECPSDAEALLAKRGENEASLNESRGEKARRKAEEKRQAMLEKELLEEEEEKTEGGRV

SEQ ID NO: 252257 - protein, 122 aa, Glycine max
  Clone ID: PAT_MRT3847_69816C.1.pep
PPINSASRSSSSSLSVSSISSQSESDSSSSSSVYAAFPSISFVISSSVSIGFPAAYLCTTSFVLSVHCLSIPLLQLCHLPLQLFVSHVSKERVRFLVTCIATKFGVGYCTCTTDDATPGTET

SEQ ID NO: 252258 - protein, 50 aa, Glycine max
  Clone ID: PAT_MRT3847_69817C.1.pep
NEREVQLGLLVTRYSFKTLALSVLSHADHGHSTHPICEISALAIIAHGNH

SEQ ID NO: 252259 - protein, 116 aa, Glycine max
  Clone ID: PAT_MRT3847_69818C.1.pep
LGAKAPPACMGARGNFPGERDVDVSPQGSGGDFWSPPPAYNKGPLFWGGAPQASPQVFSPIKDKKGGGQTPLLMGGGPRGGVFQIFSKFLPRVQKWGIWVYLLKKKTQPPAKKEQH

SEQ ID NO: 252260 - protein, 115 aa, Glycine max
  Clone ID: PAT_MRT3847_69819C.1.pep
QSIGPSKVIKQSPSEIFPGQNYDVKRRETKFPIPIQRQKWRGLENFIYDPGVPPFPFLAFWKAFKKHPLFYIGDNSTNYSKGGLHKLTHSGLGARQFEGCKNPPWLFFTGKKMSR

SEQ ID NO: 252261 - protein, 149 aa, Glycine max
  unsure (1)..(149): unsure at all Xaa locations
  Clone ID: PAT_MRT3847_6981C.1.pep
MAMPVNDDTLVEAETEDQREEMSSSESEQDEDVKLTEPSKNAVYNRDALLDKLGDISWPENVEWIHKLSVDVDQEQEVDVNDDLARELAFYTQALEGTKEAFEKFQSMGLPFLRPADYYAEMVKTDGHMGKXKGRLLAEKRKMEEADER

SEQ ID NO: 252262 - protein, 137 aa, Glycine max
  unsure (1)..(137): unsure at all Xaa locations
  Clone ID: PAT_MRT3847_69820C.1.pep
FPSAAGVVVFFLVPLLLFSSSPGFFPRSSLAACGVSALLPCVSRLLALCVCRLLFLPLSSPAGXLLFLSPGXXAWWCSPRLPXGFSFXXFSWVXPPPXRGNLKSLPLPLLLFLLXSFNSAFXLGCXFSPLFLNSFVS

SEQ ID NO: 252263 - protein, 54 aa, Glycine max
  Clone ID: PAT_MRT3847_69821C.1.pep
LTNPFFSSFSTTFDEVVTKATVLAKLLVLLLVIFYRDGGYNTSTSNSYNNSQKR

SEQ ID NO: 252264 - protein, 86 aa, Glycine max
  Clone ID: PAT_MRT3847_69822C.1.pep
YFFFFFYPSIGIFRANTTNSIMTTNKKNMIGVMGLLLYRNLACKFIYPSFLSKKVSMDALSKQLENMMSVIYPDTVRHIQHYNNGM

SEQ ID NO: 252265 - protein, 495 aa, Glycine max
  Clone ID: PAT_MRT3847_69823C.1.pep
MGFKYLLVVTCVCAWFGSLVVTTSSGDGLMRVSLKRRSLDISSLNSAKIKEVVNHLKADGVYLKNYLDAQYFGEIGIGSPPQSFRVVFDTGSSNLWVPSAKCVLSIACYFHSKYRSKLSNTYTKIGTPCKIPYGRGHIPGFISQDNIRVGDIIIKDQQFAEITKEGPLAFLAMHFDGILGLGFQNKSVGQVTPVWYNMIEQGHVSQKIFSLWLNQDPVAKVGGEIVFGGIDWRHFKGDHTYVPLTQKDYWQIEVGDILIANNPTGLCEGGCAAIIDSGTSLIAGPTKIVTQINRAIGAEGYVSYECKNIIHNYGDSIWEYIISGLKPEIICVDIGLCSRNRTFITNDVIETATHNESWGESRTKESPLCTFCDMIVFWMQVQLKQKNTKEKILKYVDELCEKLPNPVGQTFIDCNDIANMPQITFTIGNKSFPLSPEQYMLRIEEGCNTVCYGGFVPLDVPAPQGPLWVLGDLFLGAYHTVFDYGNLRIGFAEAA

SEQ ID NO: 252266 - protein, 370 aa, Glycine max
  Clone ID: PAT_MRT3847_69824C.1.pep
SFCHCSPSSVSVHTEGSTWDTETYSVLAPSLIDLFATFFDVVRSQLPGVVSVLTGFIRSPVQGPASTGVAGLVRLTGDLGNRLSAEEWKEIFLCLKGAALSTVPGFMKVLRTMNNIEVPHISQSSADLVSSSDHDLNNDEFDDDNLQTATYVVSRMKNHMAMHLLIVQVATDLYKKHQQSLCAASIKVLIELYSSIALHAREMNRESILLKKLQKACSVLEISGPPMVHFENESFQNHLNFLQNIHLHDHFVHDEIELEQELVAVCETVLDIYLNCAGSSSTFHKSDTMPAPHRKLPLSSAKKEEIAARTSLVISALQGLAGLKKDSFRRYIPRFFHLLVDLVRSEHTSGEVQHALSNMFRSSVGQIIMD

SEQ ID NO: 252267 - protein, 84 aa, Glycine max
  Clone ID: PAT_MRT3847_69825C.1.pep
VMSLKSSKRRMRNGFMCHSEASTAVCIAGSVVVPRTRSRRHQRSVSLDGTRLINYAKYSKLVDSSTSSRFNSAHKKCDSDSVSV

SEQ ID NO: 252268 - protein, 259 aa, Glycine max
  Clone ID: PAT_MRT3847_69826C.1.pep
MALAYPNPRVKEQTQNTSKIQSCLEDILSLDRCVPINQFVDQGVIEGNFDASIVDGKGTGLGVIFRNEFGEVKAAATKFLPICVEVHIAEALVFRWAIESAAYLMLNPVVFESDCLRLVSAWSSRNSNSNSYFAGIIKDCAVLLSNSSFKVLTHMNRSANRAADGAKLAFLAFESYWIGDVPPQIGDFVQDGVRPDGHFSFFIYSSHHKGRRESKTEWSGVHGSPGEILAMLGQSGSGKTSLLAALGSQLGEKLKHNLQ

SEQ ID NO: 252269 - protein, 70 aa, Glycine max
  Clone ID: PAT_MRT3847_69827C.1.pep
TKEILATEYCKPYPGRNNNQLALGYIMANPWTHDYRIHNHAYRAEQAHLMLCSTILYSDLYIYNSSLYAL

SEQ ID NO: 252270 - protein, 135 aa, Glycine max
  unsure (1)..(135): unsure at all Xaa locations
  Clone ID: PAT_MRT3847_69828C.1.pep
PGWRPGPRGPXGTPKGRPPPGPRGRGGTEGRSQGLRRGGGPRPGVGRGRPGPPRPGPRGHPGQRAKGGHPQGVQRDRPTNGPPREKAPRGGXERRGRGVPKKKQRGSRPEGPGXXGGERERGRKGGWNREGQKKF

SEQ ID NO: 252271 - protein, 269 aa, Glycine max
  Clone ID: PAT_MRT3847_69829C.1.pep
MAEALHVQNSPSNQGVIEGNFDASIVDGKGTGLGVIFRNEFGEVKAAATKFLPICVEVHIAEALVFRWAIESAAYLMLNPVVFESDCLRLVSAWSSRNSNSNSYFAGIIKDCAVLLSNSSFKVLTHMNRSANRAADGAKLAFLAFESYWIGDVPPQIGDFVQDGVRPDGHFSFFIYSSQGHIFKTLSKGAGGDFKDGAGEAKHRVSNYLQINSAGGNHKGRRESKTEWSGVHGSPGEILAMLGQSGSGKTSLLAALGSQLGEKLKHNLQ

SEQ ID NO: 252272 - protein, 403 aa, Glycine max
  Clone ID: PAT_MRT3847_6982C.1.pep
MASDGFTDKNTVFRKLKAKSENKMCFDCNAKNPTWASVTYGIFLCIDCSAVHRSLGVHISFVRSTNLDSWSPEQLKTMSFGGNNRAHGFFKQHGWTDGGKIEAKYTSRAADLYRQILSKEVAKSMAEDGGLPSSPVASQSAQGVNGLPEVKTNEVPKENTLEKPEKPESTSSPRASHSVISGTVKKPIGAKKAVKSGGLGARKLTKKPSESLYEQKPEEPPAPVPSSTNSMPAGPSPTSRFEYVENVQSSDLNTGGSHFLSHVSPPKSSSFFADFGMDGGFPKKSGPSSSKVQIQETDEARRKFSNAKSISSSQFFGDQNKAADVDSQATLSKFSGSSAISSADLFGDSRDNNIDLTAGDLINRLSFQAQQDLSSLKNIAGETGKKLSSLASTLMTDLQDRIL

SEQ ID NO: 252273 - protein, 47 aa, Glycine max
  Clone ID: PAT_MRT3847_69830C.1.pep
ARQLSVKGYSNFMCNINSAFTYTCLISNGGLIKKYLFSLWDHHPLPK

SEQ ID NO: 252274 - protein, 136 aa, Glycine max
  Clone ID: PAT_MRT3847_69831C.1.pep
MVTSNTNNTILKISKLAILLVLFASVCNVAMSDSTAKPLDQHATTGSDPTAPAVHIVYTERPQNEEPEAYHIRTLTSVLGSEEAAKEALLYSYKSAASGFSAKLTPEQVEQISKLPGVLQVVPSRTYQLHGPNNLQ

SEQ ID NO: 252275 - protein, 113 aa, Glycine max
  unsure (1)..(113): unsure at all Xaa locations
  Clone ID: PAT_MRT3847_69832C.1.pep
PPTTRSNPDLLTVIGKYSKTHVYHSTRIWAIKAKNRGVLPLHDPKPKXPKTPPQTRPRSTPSYDAKNPLENXHKSKPAKLTGSLTPTTVQNPLAPDVKGNIAPFLKPTPSAMV

SEQ ID NO: 252276 - protein, 91 aa, Glycine max
  Clone ID: PAT_MRT3847_69833C.1.pep
KPALMRTSSLPTETEEEWRRRKDMQTLRRMEAKRRRSEKQRGSREVAGAGEEVEAGRSVAMGFNKFGSSAEARCRRRRGGVCQESKLFLVM

SEQ ID NO: 252277 - protein, 49 aa, Glycine max
  Clone ID: PAT_MRT3847_69834C.1.pep
SSEKPVKEAMARFRKNLEAIVSVIAERNKKKQLPYYYLSPDRIPNSVAI

SEQ ID NO: 252278 - protein, 92 aa, Glycine max
  Clone ID: PAT_MRT3847_69835C.1.pep
SVLPLNWILAHDLIHAPNSLMALSGTFVHAHRPVVFGLAGVSCLVCPQSGLGHRTNPLGPVELKVGVREIEPVGLGRLIASWCQRTTIPFPS

SEQ ID NO: 252279 - protein, 63 aa, Glycine max
  Clone ID: PAT_MRT3847_69836C.1.pep
VEALFELIKGLIKDSDGIPNDELDEDDFKEEQNSVSRLIQMLYNDDPEEMFKIIDTVRKPQLT

SEQ ID NO: 252280 - protein, 120 aa, Glycine max
  Clone ID: PAT_MRT3847_69837C.1.pep
QVSGLIYLIFILSLLLSFDTMRLSFTSAAIAAVLGGSQLASAAAVLHLAPAVPPSEIAKFSGPKPLTLDEALRGVKNVKIEQPFDNQPQSQSNEPHGDMRQPQDPRGMGRIPHCRPTSIR

SEQ ID NO: 252281 - protein, 83 aa, Glycine max
  unsure (1)..(83): unsure at all Xaa locations
  Clone ID: PAT_MRT3847_69838C.1.pep
MENALFPTVRQRERLFQLQDLVCSRCPQVKTAPLAXQCVCAGSFRCKEDASEFCXKMPIFFNIAFPQKFPLFEECPSWVLELR

SEQ ID NO: 252282 - protein, 58 aa, Glycine max
  Clone ID: PAT_MRT3847_69839C.1.pep
SHRFMIQKCGICHAVSLDEREDIVLLHVMGTSNYNGEKTVVVLTVINPIIQKLVYIQH

SEQ ID NO: 252283 - protein, 280 aa, Glycine max
  unsure (1)..(280): unsure at all Xaa locations
  Clone ID: PAT_MRT3847_6983C.1.pep
ATKNNELWRKQSCNRFLSRSCKELHRELQSLRDIRSELLTPSKDSRKRRDMTDVRILYSHHLDEDIVKHQKKILARLGVSVASSIADATHFIANQFVRTRNMLEAIAFGKPVVTHLWIESCGQASCFIDERNYILRDVKKEKELGFSMPVSLAHAIQHPLLKGRRVLVTTNTKPSKEIVSNLARAVQGQVVEKVGRSVFKGNTIADNLLILSCEEDYASCVPFLEKGAMVYSSELLLNGIVTQKLEYXRHRLFADNVKKTRSTLWLKRDDRTFIPVTKCN

SEQ ID NO: 252284 - protein, 270 aa, Glycine max
  Clone ID: PAT_MRT3847_69840C.1.pep
RLNFFKSKDLSNRETPGVFKQYKYFLIRVGKQRLREARIQAIDYLILLLAGACLGSLSKSSDQTFGAAGYTHTVIGVSLLCKIAALRSFSLDKLHYWRESDSGMSSLAYFLSKDTIDHFNTLIKPVVYLSMFYFFTNPRSTFADNYVVLLCLVYCVTGIAYALSIFFEPGAAQLWSVLLPVVLTLIATQPKDSKVLKNIANLCYSKWALQALVVANAERYQGVWLITRCGSLLKSGYNLHDWSLCISILILMGVICRAIAFFCMVTFRKK

SEQ ID NO: 252285 - protein, 82 aa, Glycine max
  unsure (1)..(82): unsure at all Xaa locations
  Clone ID: PAT_MRT3847_69841C.1.pep
DKCXXNVTHFIXXQXMCTQCRGLSEXAXIXFYVVRVIDXTIXIDRAXFTINXAXSQXXXFESATLKDNQFGSLFVVXXRVEI

SEQ ID NO: 252286 - protein, 222 aa, Glycine max
  Clone ID: PAT_MRT3847_69842C.1.pep
MVSHNKPYTVATLFFLALFLISIFFFFSTRTTLHPAPSIHSDLYIHLQPLSPPPPLQPLSPPPPPFPSPHSSSATTETQPEPVGDIEDVADNATDAESDAQPVTENIAEDVSLSLKVCDLFTGTWVKDESYPIYQPGSCPYVDEAYDCKVNGRTDTLYTNWRWKPDACDLPRFNATDFLVRLKGKKLMLVGDSMNRNQFESILCILREGLHNKSRMYEVHGH

SEQ ID NO: 252287 - protein, 102 aa, Glycine max
  Clone ID: PAT_MRT3847_69843C.1.pep
PATYQGHRETAVWSPYLYASAVPISSFTLQILQQDRTSGGILVNVKVSGRVKWKVGTWVSGNYHINVNCPAYLRVASDRDDAVGFAGPAIKFQLSQNCIVDV

SEQ ID NO: 252288 - protein, 108 aa, Glycine max
  Clone ID: PAT_MRT3847_69844C.1.pep
ETAFRVSVFGGVVVMADADVDLSELFSGNADEDDDMFYIDIQTVQKVLDEDDDCYFQEVGFLLCQKQRLKFRMLSLCKVSLKTESVIEHMPNEVSCDRRIEASVQWQR

SEQ ID NO: 252289 - protein, 106 aa, Glycine max
  Clone ID: PAT_MRT3847_69845C.1.pep
EESTTETMRAIPVSPESHCVFLFPQPTTPSFSSNSIAITHSFHPFHFKPHHSLSTPKPCSFKFRSLLYCASKSDPTTLEDDEVSEESLVEDGVCIEVMKLEKNSRR

SEQ ID NO: 252290 - protein, 73 aa, Glycine max
  Clone ID: PAT_MRT3847_69846C.1.pep
GGFRCFHALYLWPLSKPHAPFFFFFFLWPALPHVLRSKPRWGKDEVHLSLSLLSLWLYEKMNFLYPQKNPLGP

SEQ ID NO: 252291 - protein, 65 aa, Glycine max
  unsure (1)..(65): unsure at all Xaa locations
  Clone ID: PAT_MRT3847_69847C.1.pep
ATRTGTTSTRKTKETWGKPTGKGYNDLMHGNPHMCRGRRPCLDXPVCTTNGTTDRSGAHHGWIHD

SEQ ID NO: 252292 - protein, 82 aa, Glycine max
  Clone ID: PAT_MRT3847_69848C.1.pep
RIRFGTTSSNGYIGVRSSKHGFWCYHYNRKMKQKGRPMKRSKNVRKMKAIAKALSANEKSIAKLSKNESKKSRVQSAKTLYE

SEQ ID NO: 252293 - protein, 48 aa, Glycine max
  Clone ID: PAT_MRT3847_69849C.1.pep
RGILFKIRFPSGLKEEIHPTFQQNNTFLLKGGIKKNPQIFCFTIMLVS

SEQ ID NO: 252294 - protein, 243 aa, Glycine max
  unsure (1)..(243): unsure at all Xaa locations
  Clone ID: PAT_MRT3847_6984C.1.pep
PDYPKREDRLIIHPSSSLLASQDDAKLPKIDFFDYSKLTPLDQRCFIQAADLLMADFKMLSSQDIKWALHELKGHYAITRKAFSDAIKKWQELSPETSGKRKKRKEMNQYSFIDFKFEQGNIKIEKRMFFLENKRRHCRYYDHQALLPAVKQEQEFYEQKIKEMAEHEDFLLALQMNEEQYQKDGQLIECRCCYGEFPFEELTQCADAHLFCKECLIRYAQEAVFGXSGKSELSCMEGSCTCS

SEQ ID NO: 252295 - protein, 117 aa, Glycine max
  Clone ID: PAT_MRT3847_69850C.1.pep
AQLFFKPTFSSPNRVKFRSILFGGFSSYTKHISLHQQFLKIPNLPLLLLLLRLLVFFFFMRHFLILSAKLLIPSCGWFGRGELSQWWFAVHGCRRCGYCGAMAEEVSFFCLQVGPVM

SEQ ID NO: 252296 - protein, 47 aa, Glycine max
  Clone ID: PAT_MRT3847_69852C.1.pep
EQGKPQSSNHDQLHITQWLQDIQHQVSSDMQTNSCTTDMITTMLHTK

SEQ ID NO: 252297 - protein, 89 aa, Glycine max
  Clone ID: PAT_MRT3847_69853C.1.pep
MGLSSKQVSSSGLDWKQTLLEAQNLELPKPNLMRKQQQQQQQQQQQTQPNSESLKCPRCDSTNTKFCYYNNYNKSQPRHFCRACKTHWY

SEQ ID NO: 252298 - protein, 229 aa, Glycine max
  unsure (1)..(229): unsure at all Xaa locations
  Clone ID: PAT_MRT3847_69854C.1.pep
LRESGDESEGKSIHKIIPKAEAWIQRKTLSWPWRTKDREGSDAMNVRVAGSWRQNDQENESVNQKILSSGLKQESQAGESNRPTNNEASGSWSSFNVNSTSSASSCGSAGSGAVNNKGDVDTDCLDYEILWEDLTIGEQIGQGSCGTVYHALWYGSDVAVKVFSKHEYTDDVILSFNQEXSVMKRLRHPNILLYMEAVTSPQRLCIVTEFLPRGSLCRLLHRNTSKLDW

SEQ ID NO: 252299 - protein, 225 aa, Glycine max
  Clone ID: PAT_MRT3847_69855C.1.pep
MGVEENTPNSISTSQCHEEQSNNKINTHVLLNVYDLTPVNNYVYWFGFGIFHSGIEVHGKEYGFGAHDFPASGVFEVEPRKCPGFIYRCSISLGQTNMNPSEFRTFIENMASEYHGDTYHLITKNCNHFTDDLSYRLTGKQIPGWVNRLAKLGALCSCLLPESLQVTSVKQLPEYHECSEDEFVESLSPATPRESTEIDEEQEKHLLLPSDRTEDVHFVKETQVK

SEQ ID NO: 252300 - protein, 304 aa, Glycine max
  Clone ID: PAT_MRT3847_69856C.1.pep
MRKQQQQQQQQTQPNSESLKCPRCDSTNTKFCYYNNYNKSQPRHFCRACKRHWTKGGTLRNVPVGGGRKNKRVRKSITTPITTSSTTTSITTTTSTCTATVTTSIGNNNNNMDAMLGCNSHMTIQTPLADDHKNMSSSLYQALIRPPPLLLQQQNLMNNTRDLEGKDFGIGIGNGNNGIFPSLTLPFPIHHQSQSLLFPFSTSSSSFDTNPCSVVSTSLRSSNVYNYGEDQFKAIEEPTINSTITTTTIVPSTNNTHHPWEIAAATSGVGLGTSSNSNYWNWEDFDSLVSTDLKDPWDGSDIKP

SEQ ID NO: 252301 - protein, 47 aa, Glycine max
  Clone ID: PAT_MRT3847_69857C.1.pep
NHRVAVASDVQCFQNKRFPILIADSTLLIFNWSLHMSLQWEQFNTGP

SEQ ID NO: 252302 - protein, 76 aa, Glycine max
  Clone ID: PAT_MRT3847_69858C.1.pep
VRPRVRPPSKRSNSADDGSDGDYDYDDGDGGGGGGSVRHMKEHHHGPNKVVLGVAIALSSIVFLVVFLILCSKCCR

SEQ ID NO: 252303 - protein, 53 aa, Glycine max
  Clone ID: PAT_MRT3847_69859C.1.pep
LTLGVLEIKNPFYLIATYQVETLFSTGKGCYPLFRSLSCSPGTFMFCTLVNGH

SEQ ID NO: 252304 - protein, 44 aa, Glycine max
  Clone ID: PAT_MRT3847_6985C.1.pep
VKEITKKGLNFTQLLGIDISENNFTVRNSPGLGHNLYQDVLDGH

SEQ ID NO: 252305 - protein, 144 aa, Glycine max
  Clone ID: PAT_MRT3847_69860C.1.pep
MGATAGQSALTLFKSTEPPQTDQNLLYGILQRDQLVLSDEFEIWTAALRRADEECRQNSIERSAANRRAALGPALCKTRVPLITLKTFAKEIVPSGILTLEEVISVYQNHSHPDHLCGVPELYPMKFPSHGRSDWNIAKGNRGT

SEQ ID NO: 252306 - protein, 81 aa, Glycine max
  Clone ID: PAT_MRT3847_69861C.1.pep
FTFFGKLYFFGGEQLGSPEKINRILQKINIGVSPQLKGNPQSNQKISPPPCVKTSHRFEIFSIPILGGWLKFPPKPNQKMP

SEQ ID NO: 252307 - protein, 55 aa, Glycine max
  Clone ID: PAT_MRT3847_69862C.1.pep
IFFLIKSFHFCIFIRSTIRFDNTRKQIVEKGCRYNIYVSIYQVYNTFTKYVPFPS

SEQ ID NO: 252308 - protein, 175 aa, Glycine max
  Clone ID: PAT_MRT3847_69863C.1.pep
MSSDKRSTLSADINMPTVPAAGKQVPRAGNIGHITRIVNKLVHLAHNRNLILTCLQENSEWNEWQASVLQERNVVENVHRWACGRPTALQDRMRDSDDDELHDRDYDVAALANNLNQAFRYKIYGNEDNEEERGNLDRDDEDVYFDNDSAQVVISSLRLSDDQGSSLFTNSNWFE

SEQ ID NO: 252309 - protein, 109 aa, Glycine max
  unsure (1)..(109): unsure at all Xaa locations
  Clone ID: PAT_MRT3847_69864C.1.pep
ISTEKASTAVFQVNGSALVEHTCLCVNALQGFIGFHIKWFPXKSGYEGFTHLLMVYDDKLAYVLCVFFLAVGLDSESIIFSGKTLGKIVFYRGSNDFGWDIIFESDGYD

SEQ ID NO: 252310 - protein, 47 aa, Glycine max
  Clone ID: PAT_MRT3847_69865C.1.pep
KFFSVQKARTLFSRKAFFFFNLMLKSWEWVITTYKKRPVSKVQKCVF

SEQ ID NO: 252311 - protein, 178 aa, Glycine max
  unsure (1)..(178): unsure at all Xaa locations
  Clone ID: PAT_MRT3847_69866C.1.pep
PRQQCEVYAFCGGFGSCTENAMPYCNCLNGYEPKSQSDWNLTDYSGGCVKKTKFQCENPNSSDKEKDRFLPILNMKLPNHSQSIGAGTVGECEAKCLSNCSCTAYAHDNSGCSIWHGDLLNLQQLTQDDNSGQTLFLRLAASEFDDSNSNKGTVIGAVAGAXGGVEALLIXFVFVMLR

SEQ ID NO: 252312 - protein, 93 aa, Glycine max
  Clone ID: PAT_MRT3847_69867C.1.pep
QSGGSLIDIIVQFVLNTPQKVLHCCCTMKLCIDLDPMDPKPNLNPVLTDATPLTRSRLGVPSGLSPYSPKGATFPHGTMLAIPRKKTGILDDF

SEQ ID NO: 252313 - protein, 49 aa, Glycine max
  Clone ID: PAT_MRT3847_69868C.1.pep
PHCKHSYQYYKSFNILLPLLSSTAGNLNKHLRLYHFSLLYHNPYLLQQL

SEQ ID NO: 252314 - protein, 76 aa, Glycine max
  Clone ID: PAT_MRT3847_69869C.1.pep
LPRRLLIRRENKHVHRSLHVLSHDLKDKDTNIITRLTCIRSIKLVLSLSKYKKEHRSILFRLRVTWNRSISQAVCE

SEQ ID NO: 252315 - protein, 100 aa, Glycine max
  unsure (1)..(100): unsure at all Xaa locations
  Clone ID: PAT_MRT3847_6986C.1.pep
FLHRSTLLLLNMGIVFKSFTTNTITLYVESSVTIYHXTLTFTTTKDILPDHHILICASKLLEDFLTLTYYHIQTESTIHIXLLLILDMQIFVKTFTDITI

SEQ ID NO: 252316 - protein, 216 aa, Glycine max
  unsure (1)..(216): unsure at all Xaa locations
  Clone ID: PAT_MRT3847_69870C.1.pep
MAAEPVSDGGAAAEKLISGREEFGDSSNLFSAILAMVLWLGAIHFNIALILLAVFFLPLSKSLLVFGFLFGFMVLPINEKSRFGRRLSRFICKHACNYFPITLHVEDMKAFDPNRAYVFGYEPHSVLPIGIVALADHTGFMPLPKVKVLASSTVFYTPFLRHLWTWLGLTPATKKNXICLLASGHRCILIPGGVQEAFDMQDGTEIALLEARRGFV

SEQ ID NO: 252317 - protein, 117 aa, Glycine max
  Clone ID: PAT_MRT3847_69871C.1.pep
DDFRHTLHIHKKTETNPIISIRPLVNSTYFPQNGPPLDLQMKNPAAAFRWIRKITTGRPKNLKQIRHWNLNTQLSPLSSSALLNPLITVWIKCFKMSKILKCQTIEFLLKQSNSIQL

SEQ ID NO: 252318 - protein, 43 aa, Glycine max
  Clone ID: PAT_MRT3847_69872C.1.pep
IIIGEYGTETVVSESIIIDTFLDLHLWFLFWYHVVVIQKTEAN

SEQ ID NO: 252319 - protein, 65 aa, Glycine max
  Clone ID: PAT_MRT3847_69873C.1.pep
IRCSHISSTLTSHTLLILLSQYYILIRLSLIDLIIKSYTLPYHLSIPFKPSQNLTYYFSTTRQSP

SEQ ID NO: 252320 - protein, 50 aa, Glycine max
  Clone ID: PAT_MRT3847_69874C.1.pep
RVGRNFTGRFSGRRPAGLLNWRGRITMTGTTLLGVSADENGLCHRRLQLL

SEQ ID NO: 252321 - protein, 89 aa, Glycine max
  Clone ID: PAT_MRT3847_69875C.1.pep
RMEKANIYPKTWTMQGEVTAAKRPKNRALEVDLDFEHNVRPAPVMTEEVTASIEDIIKKRIMEGHFNDVQRLPKLTSKVPKDVKELGDN

SEQ ID NO: 252322 - protein, 132 aa, Glycine max
  Clone ID: PAT_MRT3847_69876C.1.pep
MAGKDDSGIKRMNLIARAAESIADGDIVNVQIRRYRQWQLSQTSSVATSIIPASLLHGQREILEQGERNFNRFGGCLGKNSTMGKNLRLLDDLHVHILASRESSSGRDTIRMEYLTLLKEMTEPLPTLPKVV

SEQ ID NO: 252323 - protein, 52 aa, Glycine max
  unsure (1)..(52): unsure at all Xaa locations
  Clone ID: PAT_MRT3847_69877C.1.pep
LKTNLYIYIPFPHFFHPQTRNYYFELRHGXHHRHRHVILVFAPPHQPDNLKQ

SEQ ID NO: 252324 - protein, 37 aa, Glycine max
  Clone ID: PAT_MRT3847_69878C.1.pep
QQQEFSLILLGGGYRNQSELLGYSVTTIEQQITFIRY

SEQ ID NO: 252325 - protein, 141 aa, Glycine max
  unsure (1)..(141): unsure at all Xaa locations
  Clone ID: PAT_MRT3847_69879C.1.pep
MTSVTSVELNLLVFRYFQESGFTHAAFAFGNEASINKSPIDGKLIPPGALITLVQKGLQYLEMEANLSNCDADLDEDFSFLQPLDLITKDVHELRKMVNERRKILQKNRNKESEKENEGGRGXVKEKGRHEREKECERDGK

SEQ ID NO: 252326 - protein, 113 aa, Glycine max
  unsure (1)..(113): unsure at all Xaa locations
  Clone ID: PAT_MRT3847_6987C.1.pep
DPFIELIQNLATHILPGGDDSLGTDVRVMAEDCFDRVDQEDYTSXVSTSASLTGLXGDDYNARIAIASSDEYTYDHSHTNGQNVHKRLVSADDNNMTHVPATNLKRRLQRSNT

SEQ ID NO: 252327 - protein, 151 aa, Glycine max
  Clone ID: PAT_MRT3847_69880C.1.pep
FQLFCCSLRKNSFLRSIGPVCLLFFCFKTNKKTRFIVTCFQTQFYKLKNMIELFLFCFIPFCSQSKEKHGEQRIGILYFGFSSTPSLSLEPDIYHLLVATFVLLNTILLGMLQVSVRAWLCWQCWFVAAVLCLHFAGFKNLIVGWCMTFGL

SEQ ID NO: 252328 - protein, 91 aa, Glycine max
  Clone ID: PAT_MRT3847_69881C.1.pep
TASSMVIIEHGQVRLWALVIKPSLFICEANNYPWILLIHLTGFSYVRPSHERQVLAASPAVLQTSYRLDECHVKAPAGQSGEQAVPGTQSP

SEQ ID NO: 252329 - protein, 48 aa, Glycine max
  Clone ID: PAT_MRT3847_69882C.1.pep
FLSLMTPQNILPLKNYICLTTFFIIWRIIKEKNFLLIILNALQKTLLL

SEQ ID NO: 252330 - protein, 347 aa, Glycine max
  Clone ID: PAT_MRT3847_69883C.1.pep
MDHRLRCFVTIPKIPFLLLLSLILVFSYVNAAFDLATIPFNDGYSPLFGDSNVVRSEDGNGVQLRLDRYTGSGFISSSMYQYGFFSSRIKLPSNYTAGICVAFYTSNGDVFEKSHDELDFEFLGNVAGKPWRFQTNLYGNGSTKRGREERYRLWFDPTKEFHRYSILWTAKNVIFYIDEVPIREVLRSEEMGGDYPSKPMSLYATIWDASNWATSGGKYKVNYKYAPFVTEFKDLVLKGCSADPIQEVSGTESCSDQHADLEAQDYAAVTPMRRLAMQRFRQRYMYYSYCYDTLRYPVPQPECVIVPSEKQRFKETGRLKFGGSHRRQSRRRGRTTTPVDDTDQGDM

SEQ ID NO: 252331 - protein, 348 aa, Glycine max
  Clone ID: PAT_MRT3847_69884C.1.pep
MDHIHRLRCFGTIPKIPFLLLLSLLLFSFVNASFDLATIPFNDGYSPLFGASNVVRSEDGYGVQLRLDRYTGSGFISSSMYQYGFFSARIKLPSNYSAGICVAFYTSNGDVFEKSHDELDFEFLGNVAGKPWRFQTNLYGNGSTNRGREERYRLWFDPTKEFHRYSILWTAKNVIFYIDEVPIREVLQSEEMGGDYPSKPMSLYATIWDASNWATSGGKYKVNYKYAPFVTEFKDLVLKGCSADPIQEVTGTKSCSDQHADLEAQDYAGVTPMRRLTMRRFRQRYMYYSYCYDTLRYPVPQPECVIVPSEKQRFKETGRLKFGGSHHRQSRRRGRTTTPVDHTDQGDM

SEQ ID NO: 252332 - protein, 107 aa, Glycine max
  Clone ID: PAT_MRT3847_69885C.1.pep
NEATQLRSDAGGEVANQPVHMPLILPKVPGRFYYYFGKPLETEGRKQELRDDKQKSHELYLQVKSEVERCIAYLKVKRESDPYRGIGPRLLYQATHGFESEVPTFEI

SEQ ID NO: 252333 - protein, 79 aa, Glycine max
  Clone ID: PAT_MRT3847_69886C.1.pep
YGDNHADCIIIQHHPFCGKLTSRIPTEEKPAFFGNPLVTTPARKRSDCASLVQVFLTHSDSTQHFDACNWTLSEPHSWE

SEQ ID NO: 252334 - protein, 108 aa, Glycine max
  Clone ID: PAT_MRT3847_69887C.1.pep
NKPPGGGFIRGTHKARKSGVAQNLRPLGGIRPLVGLKGGKRLNKGFPPSWGGLTGEGHPLIKGGVGSPVNPGPITFAQANLQICGGKVFFPFQTPFFFSPKKKIEIWA

SEQ ID NO: 252335 - protein, 614 aa, Glycine max
  unsure (1)..(614): unsure at all Xaa locations
  Clone ID: PAT_MRT3847_69888C.1.pep
MNGWNEYLERSKELIKPDGGPPRWFSPLECASRLDNSPLLLFLPGIDGVALGLILHHQKLGRIFDIWCLHIPVADRTPFTDLVRIDEGTVRSEYKRSPXDPNXLVGESLGACLALAVAALNPDIDLVLILANPATSFSRSNLLLLTPLLEALPDPISPALPNILRSTTGESLRMVLDNVVQGAPSTKYSXELVKDFTTFSLSLHVLADILPKETLVWKLKMLSRGSTSHDXMRSKNGRLPDLSSFDKFRVMGAVPVAPTNLFKLFSSKSHVLLYPGGMREALHRKGEEYKLFWPEQSEFVRMAARFGAKIVPFDPFRSQKSNEXYCLLNLFSTFMLLSLEDRTFLIGLGSIRVMAGGEVVNQPVHMPLILPNVPGRFYYDFGKPLEMXAHPMIFMRTKKGKLPDLSYFDGLRIMGAVPVAPTNLYKLFSSKSHVLLYPGGIREAFHRKGEEYKLFWPEQSEFVRMAARFGAKIVPFGVVGEDDIGQVVFDYDDLVKIPYFRSEIESLTNEATQLRSDAGGEVANQPVHMPLILPKVPGRFYYYFGKPLEMKGREQELRDKQKSHELYLQVKSEVEKCIAYLKEKRESDPYRGLGPRLLYQASHGFESDVPTFEI

SEQ ID NO: 252336 - protein, 105 aa, Glycine max
  unsure (1)..(105): unsure at all Xaa locations
  Clone ID: PAT_MRT3847_69889C.1.pep
NLGAVSMQYCMLPTRPLLSCYKDSWTSLKXVAAHASGNXAXQWLSNHADXDRVFISGDSARGIIAHTLITVDGKIRLSGATVAIADLVHPYIRPHKGRRNVDVHV

SEQ ID NO: 252337 - protein, 70 aa, Glycine max
  Clone ID: PAT_MRT3847_6988C.1.pep
AVSYQKDGNGMVSSSCIISENDDVKIASDLRFRQQSLIISATATVKWHWNIELRKPLLATNFTPFLIPVP

SEQ ID NO: 252338 - protein, 430 aa, Glycine max
  Clone ID: PAT_MRT3847_69890C.1.pep
MASTVGSHTGPIAGFQAIFPNQHVSVQPPPPRQILQYSHMTQTSPLGHIGPLRNPVQNLSTPNSSFSFPVTLSQAMPIGQHQTSVSSMHLPISGISSPPIPNQPLTHLGVSSGLNEAPVTVKMSVGPSNMGPVVPPARPVSLHQQPDVAFKPPQSNMSMITRSATFLPHQVGISPGQPSSLRSMPVPIRAPTHLSANHLSGPVSFPSRGISPSLPLPQQAGIPNLASGVAPYHTHVKPPVLGTSKSGNFTFQSHLPNADYGQVFSGPNSQSGATQEPPSGPRPPPFGFAVPDQPRQIFPRTQFPGQVDQAVPFGVRLGSISNSIPPPRHAVFPYAGQPAPRSSVPQMGMKNFISAPQMPNLTNAGAQRGMPIRQSYPPQMARPDIPMPLNQKFVNNPPMASGKIAYAADQIYDPFSPTSAPPQQKGNPGK

SEQ ID NO: 252339 - protein, 49 aa, Glycine max
  unsure (1)..(49): unsure at all Xaa locations
  Clone ID: PAT_MRT3847_69891C.1.pep
LRARRPMKEWSKRGKRKCSTRVRPSLPXSTLHTMCSTSHFIYHTLLTIY

SEQ ID NO: 252340 - protein, 95 aa, Glycine max
  unsure (1)..(95): unsure at all Xaa locations
  Clone ID: PAT_MRT3847_69892C.1.pep
KSKRLSMKYKRYFSRSVRPIHXWGDHLVYKNGVNIAIYIREQGNILSXREYKWPLKHHQXITFVIKQARILFLLPFFNNEKQFEKSKSTAKTTTS

SEQ ID NO: 252341 - protein, 47 aa, Glycine max
  Clone ID: PAT_MRT3847_69893C.1.pep
IIPVEFLRVCHYLSPLDLSPCHLQASHGNPWAINYKVKLSKCRYSIK

SEQ ID NO: 252342 - protein, 98 aa, Glycine max
  unsure (1)..(98): unsure at all Xaa locations
  Clone ID: PAT_MRT3847_69894C.1.pep
GDEVQDLGEGTFPSAPGIETISSSPKNXARLISAGXETELLAGVKKDGDSSLKVIAIXASVLLPFDHRMLVHNVTAQGLNYGSSSSLAHASVPFYLQS

SEQ ID NO: 252343 - protein, 46 aa, Glycine max
  Clone ID: PAT_MRT3847_69895C.1.pep
IIIPLLWTSGQPDSKVQVPALVGLHINNRHYICPVIIKHVKWMDVG

SEQ ID NO: 252344 - protein, 146 aa, Glycine max
  unsure (1)..(146): unsure at all Xaa locations
  Clone ID: PAT_MRT3847_69896C.1.pep
MRKRPDQMEKGAAAKNQNSRLCCLASLSAFFWFLLLYFHFVVLSGDDTNANSSRKNSYNNHVDLDHSTLSTTPVSVGYEPPPIHQVQASPRKIGLPDPDVRRSDADTDTPRAEPIFPFMRAMRASEMXNRSDPCGGRYSDGHALPS

SEQ ID NO: 252345 - protein, 31 aa, Glycine max
  Clone ID: PAT_MRT3847_69897C.1.pep
NIIAEAFICGSKVVFWIRPTCHSFIDFKIDE

SEQ ID NO: 252346 - protein, 74 aa, Glycine max
  Clone ID: PAT_MRT3847_69898C.1.pep
TGNDFTPLYKKRATFFFFFFSPENFLFPTLLFCGFGPPSPMFFFQFLSTPLLIPGPAKNLLLTFKNRFPLFQFF

SEQ ID NO: 252347 - protein, 51 aa, Glycine max
  unsure (1)..(51): unsure at all Xaa locations
  Clone ID: PAT_MRT3847_69899C.1.pep
MADTFLFTLESVYEGHSDKFXDQISDAXVLTLCLEQDPDSKVACETCTITN

SEQ ID NO: 252348 - protein, 59 aa, Glycine max
  Clone ID: PAT_MRT3847_6989C.1.pep
KRVTLNKGFGTPTHIPPFFVAPPPEKGGDHNSVFRRWGVGYAKFLSFLIPSRKKGEEGI

SEQ ID NO: 252349 - protein, 97 aa, Glycine max
  unsure (1)..(97): unsure at all Xaa locations
  Clone ID: PAT_MRT3847_698C.1.pep
MTLRDTMEHITQGVINLHVSDSHRDDXLLVSNTNKPLFFYINLPYRYMQHDDEVHLSTLGMAMATARTGAPILKXSHFAAKEKMMTNSVAINDHFIR

SEQ ID NO: 252350 - protein, 78 aa, Glycine max
  unsure (1)..(78): unsure at all Xaa locations
  Clone ID: PAT_MRT3847_69900C.1.pep
KQFLNMGLNLINTRNTREIRVYTGEWLLGAALTLPKDRKIGGMDINKENDEXSVPSVKIAGVDHIMGCRESPGLPRVD

SEQ ID NO: 252351 - protein, 145 aa, Glycine max
  Clone ID: PAT_MRT3847_69901C.1.pep
MVMTWLVNSMEEDISKNYMCYSTAKELWDSVTEMYSDLGNKSQIYELTLQAKEIRQGGNNVTKYFHSLKQVWQDLDLFNTYKWNSAKDAKHHQQTMEEGGIFQFLAGLNEELDEGRGRIIGRATLPLLGEGFAEVRREETRRTVM

SEQ ID NO: 252352 - protein, 71 aa, Glycine max
  Clone ID: PAT_MRT3847_69902C.1.pep
SACFSRTKLAVLSRGRSPSKRGLRSLRTGCSKIYSHKTGSDLLATFTNIRGYRLNVFWPWTGSWCESPFRP

SEQ ID NO: 252353 - protein, 37 aa, Glycine max
  Clone ID: PAT_MRT3847_69903C.1.pep
VKDKATHVRYAKIRLSVCMSSRSNIADIIAPCKDHRL

SEQ ID NO: 252354 - protein, 40 aa, Glycine max
  unsure (1)..(40): unsure at all Xaa locations
  Clone ID: PAT_MRT3847_69904C.1.pep
SDLIYSESASAETMVMGEAPVKAQFESAXMGVCSEIHDSE

SEQ ID NO: 252355 - protein, 98 aa, Glycine max
  unsure (1)..(98): unsure at all Xaa locations
  Clone ID: PAT_MRT3847_69905C.1.pep
CAGGRVGDNRLTEKTISTCRDLDILAVYYTKATQFRKCPPNYIRRHPQTXLIEHIPTQHTAEIKYKRNPRKIHITGPFYDGRHKHRTKHEKKHALTEE

SEQ ID NO: 252356 - protein, 58 aa, Glycine max
  Clone ID: PAT_MRT3847_69906C.1.pep
GSRLYTASRENVCLPITCRWESVPPACQRTPIPHRSLPTDSCLMSILAYFMSFQSLTY

SEQ ID NO: 252357 - protein, 241 aa, Glycine max
  Clone ID: PAT_MRT3847_69907C.1.pep
MLGKECYTNPPSILNSSSAVGHVINIGGVNSYVTGSPLSILAIILVSDIFGFKPPLLRNIADKVAATGYYVVVPDFFNGEPYDPENVKRPKDVWLKDHNPEKGIEVAKPVIEALKSKGVSAIGAAGFCWGAKTVTNLGKSKHIQVSVLLHPSYIIVDDIRGVEIPIAILGAENDRVAFPPKLAEQFRQALKAKPQIDSYVKIFPNVSHGWTVRYDPKDPKAVEAADKAHQIMIGWFHKHLK

SEQ ID NO: 252358 - protein, 74 aa, Glycine max
  Clone ID: PAT_MRT3847_69908C.1.pep
QKKRLELRAGFKGAPKIDKNGSQKIFRAGTTIGGPPNFCQISKPRIGKKSCLGVRVNLPFRLIGPPLIPQPKMA

SEQ ID NO: 252359 - protein, 111 aa, Glycine max
  Clone ID: PAT_MRT3847_69909C.1.pep
MIRIPLKLVRENSKHALNFFFIKKTVFFVCADSWFQVAFILTTGINSAFVLGYPGTVMVPLGWFGGVIGLILATAVSLYANALVAYLHELGGQRHIRYRDLAGFIYGKPHY

SEQ ID NO: 252360 - protein, 99 aa, Glycine max
  Clone ID: PAT_MRT3847_6990C.1.pep
VGVAAASAVPLGFLRGKAPQWGGRDKPPLFRALVLPFSFQWQPHPLPSPLPWVIARFSGGGGGLRGKPLVPQAPAVDDDDVPRPWVVWEDLGAADTVPL

SEQ ID NO: 252361 - protein, 180 aa, Glycine max
  Clone ID: PAT_MRT3847_69910C.1.pep
KSSKTAEKCCVLIESLVDYDEGRTAFTSEEGGVLAVVEVLEPRVRQSREHAVGALLTMCQSDRCKYREPILREGVIPGLLELTVQGTPKSQSKARTLLQLLRESPYPRSEIQPDTLENIVCNIISQIDGDDQSGKAKKMLAEMVQVSMEQSLRHLQQRALVCTPSDLPIAGCAASEVSSK

SEQ ID NO: 252362 - protein, 68 aa, Glycine max
  Clone ID: PAT_MRT3847_69911C.1.pep
IPIFADLLMGFSSFLFLEQVKNFISLGGPHSGTASVPICGVSTIVAFQHGALYRFWKYHMLYYQFSLC

SEQ ID NO: 252363 - protein, 384 aa, Glycine max
  Clone ID: PAT_MRT3847_69912C.1.pep
MESPHSLSPSSSSDGVGFETEEPRTPLAVRRALQLLNSGDPDLRLQAARDIRRLTKTSQRCRRQLSQAVGPLVSMLRVDSPESHEPALLALLNLAVKDGKNKINIVEAGALEPIISFLKSQNPNMQESATASLLTLSASSTNKPIISACGVIPLLVQILRDGSHQAKADAVMALSNLSTHTNNLSIILETNPIPYIVDLLKTCKKSSKTAEKCCALIESLVDYDEGRTALTSEEGGVLAVVEVLESGTLQSREHAVGALLTMCQSDRCKYREPILREGVIPGLLELTVQGTPKSQSKARTLLQLLRESPYPRSEIQPDTLENIVCNIISQIDGDDQSGKAKKMLAEMVQVSMEQSLRHLQQRALVCTPSDLPIAGCAASEVSSK

SEQ ID NO: 252364 - protein, 79 aa, Glycine max
  Clone ID: PAT_MRT3847_69913C.1.pep
DPRLKKEQHGVILIRCLHSVLAHMSCYVSIRSRSTSSSTTHGDMVTPSCIETSYCGQQRTRRTYSDHDISLHHVATLPN

SEQ ID NO: 252365 - protein, 64 aa, Glycine max
  Clone ID: PAT_MRT3847_69914C.1.pep
RFYRLKKLFFFFCTWVFFKSIKGLFVLSKSYFICECLVFSPVGFYKKRFSLCLGNRENKCEPIP

SEQ ID NO: 252366 - protein, 56 aa, Glycine max
  Clone ID: PAT_MRT3847_69915C.1.pep
SPPLYQEPTACVILSRIYFSSPRQGLYSRCAIMLTTCVVMCSSVPGSYVCCISLPL

SEQ ID NO: 252367 - protein, 86 aa, Glycine max
  unsure (1)..(86): unsure at all Xaa locations
  Clone ID: PAT_MRT3847_69916C.1.pep
AYFLADMVAALILIPNGLGTXLKPTETQPVYWLTSLQRTLCKPQWYAPTATGHKPXPACYKPPYQKPPCTRRPYGKYPPDDDNTHA

SEQ ID NO: 252368 - protein, 98 aa, Glycine max
  unsure (1)..(98): unsure at all Xaa locations
  Clone ID: PAT_MRT3847_69917C.1.pep
IAXTSXSXYXXLEKTXTXXLLKXXXXXQGXIXXQXMXPGLXXXGXIXRSXVTRNRXSXXPXSXLXXXXXWVXQXPRXXEXXXTXSXFVPXRTVXXGXK

SEQ ID NO: 252369 - protein, 133 aa, Glycine max
  Clone ID: PAT_MRT3847_69918C.1.pep
GVRSYFPRYHPTHTFLPCLSLLSCSSLIWPIIMQQFNVILCHTMLSYIWYGFKETNSGPYLNTLTLEPLSMGLVQMCKQFGDHGFQESTTIGVYYFILLFFLYIYIFILVRNQSSSCSSMALKVCMVSCKEWP

SEQ ID NO: 252370 - protein, 53 aa, Glycine max
  Clone ID: PAT_MRT3847_69919C.1.pep
IVYTSTKWQMFDSNIVYIAYDCTFRGRKEIFCGYPPFIFKSPRQSVITLSKRH

SEQ ID NO: 252371 - protein, 60 aa, Glycine max
  Clone ID: PAT_MRT3847_6991C.1.pep
RAEVYMESVTEEPVSHSGESSDSSSGELRVGFTVVPGFKIGKTVIQSQVYLSLVGSPATS

SEQ ID NO: 252372 - protein, 139 aa, Glycine max
  Clone ID: PAT_MRT3847_69920C.1.pep
TNAEVPNSQSKENGGSDIATDGAQGSGDARNQAQLYQDSSILYHFRDMQRRQVEFIKKRVLLLEKGLNAEYQKEYFGDPKSNEASNEELKSETKATNFPSDKLGDSDTKMIDQLPQVETIASKEIVAACDSDPNQLELA

SEQ ID NO: 252373 - protein, 162 aa, Glycine max
  unsure (1)..(162): unsure at all Xaa locations
  Clone ID: PAT_MRT3847_69921C.1.pep
RADGAQGSGDARNQAQLYQDSSILYHFRDMQRRQVEFIKKRVLLLEKGLNAEYQKEYFIIDLSWLNQRSLFFTNEVTNEELKSETKATNFPGDKLGDTDTQMIDQLPQVQTIASEEISAECDSDPTRLELVRXFNEMCKAVEEDSMDLVXTSLAREPAELNV

SEQ ID NO: 252374 - protein, 137 aa, Glycine max
  Clone ID: PAT_MRT3847_69922C.1.pep
HTPPSTRTENTKTLESKNTSIESAVNMLQKLCTKHILLREITVKKAHSIIITKMTRFTRHYTINMVLQFQYAAPYNSCLGADSGFFINLILFQCYHDMVPHWGLNLFFGLKGRKLISFIICILFMLFAFLNPRTYEF

SEQ ID NO: 252375 - protein, 119 aa, Glycine max
  unsure (1)..(119): unsure at all Xaa locations
  Clone ID: PAT_MRT3847_69923C.1.pep
AGDSSSRVQSLMLDRSRSHRTPLCALSSALFSAERLVEAYFGSNPLGSTQRHHRPAVDNRYFFSSIGSVINSESQLDTSXEIDSMVSSVSHRSXRRRNYASRAFNVESADFGVLNEYES

SEQ ID NO: 252376 - protein, 97 aa, Glycine max
  Clone ID: PAT_MRT3847_69924C.1.pep
IHTSKLRPPTRNENSKTKILLANLKKWTTTWFWIKRTLKVFVLSIGKTFHLIPISLKVSLPAPKLHLPGAMKKLGKNQSKKNFKTPPFCRLLARPNS

SEQ ID NO: 252377 - protein, 57 aa, Glycine max
  Clone ID: PAT_MRT3847_69925C.1.pep
EYDCTRLSDFIILVIHYSWGSESFCKARPLPSLRHSTMCTTSPYEHRYIADLVLIAY

SEQ ID NO: 252378 - protein, 104 aa, Glycine max
  Clone ID: PAT_MRT3847_69926C.1.pep
KYFLRAEPSVSFPSYNLEVGTKKSCNGGMFLNCIIEDPKKLSDYDELADFLECKTGKNYSKWLNAREIYRNRRYQKKIDLRKNKKKTFWNFTKHKKIGKSLKRP

SEQ ID NO: 252379 - protein, 70 aa, Glycine max
  Clone ID: PAT_MRT3847_69927C.1.pep
PHVVSSLSVAPSRLNMSSCNCSLGVLRLEFQLEHETSWIQSGCFKTKELVRLALLQLSQMMGCYVHLPTP

SEQ ID NO: 252380 - protein, 154 aa, Glycine max
  unsure (1)..(154): unsure at all Xaa locations
  Clone ID: PAT_MRT3847_69928C.1.pep
MKFSTSERVLREIVSESIPATALTFQEFTEEVITSIKEYLKGLIEMPEKKGELESLQNRLCRKSDLTRETLSKCHKQQLEILAAIKKGLGSFLYGXFQFAETVDVFLYMRCKNVNRKILLPIDDCDCQMCLRNKGLXKSCMFAPGVSFDCARDT

SEQ ID NO: 252381 - protein, 198 aa, Glycine max
  unsure (1)..(198): unsure at all Xaa locations
  Clone ID: PAT_MRT3847_69929C.1.pep
MVDKPMSIHRTRFPFSITKLLFWSLILLSFIVLFFLGSPPSSASPSHRRRSLRGGDWETSVRESAKSKSLRVLVTGAAGFVGTHVFIALKRRGDGVVGIDNFNRYYEASLKRARSNLLAQHKIFVVEGDINDGSLLKSLFKLGKFTHVMHLAGQAGVRYAMKNPKSYVHSNIAGLVSVLEXCKNANPQPAVLGLSVYG

SEQ ID NO: 252382 - protein, 359 aa, Glycine max
  unsure (1)..(359): unsure at all Xaa locations
  Clone ID: PAT_MRT3847_6992C.1.pep
MGKAKGKHRLDKYYHLAKEHGYRSRASWKLVQLNSKFGFLESARAVLDLCAAPGGWMQXGWVKSVPVDHLVIGVDLAPIAPVRGAIAIQEDITRPECKSRIKKLMNDHGCRAFDVILHDGSPNVGGAWAQEAMSQNALVIDAVKLATQFLAPKGKFVTKIFRSQDYSSVVYCLKQLFEKVEVDKPAASRSESAEIYVLGLKYKAPAKIRSGLLDVKHLFQGSVEPQPKVVDVLRDTKQKRHRDGYEDGNTTLRKLSSAANFIWSNSPLEILGSVTSITFTDPADSPIKDHDLTTEEVKSLCDDLRVLGKQDFKHLLKWRIQIRKALSPTQKPDSTTTEQWGTERVSEWSSRREEGSVCI

SEQ ID NO: 252383 - protein, 124 aa, Glycine max
  Clone ID: PAT_MRT3847_69930C.1.pep
PRLQFESSCGRKGPSSVCNASTTTAPTTSRRKRPSRPRRARSTTIRRRIRSDWRRCGARVWAAASSYSSSCSLSSGPCCRRLASFYGRIFEVGGSSWLAKSIYLRRRIWYTKFFLEPLEPNRLE

SEQ ID NO: 252384 - protein, 114 aa, Glycine max
  unsure (1)..(114): unsure at all Xaa locations
  Clone ID: PAT_MRT3847_69931C.1.pep
ACVPGDLNCSCIRRNEGDFPYTGNGILVSRKPLVHECGPTCQCFPNCKNRVSQTGLKHPMEVFRTKDRGWGLRSLDPIRAGTFICEYAGEVVDRGKVSQLVKEGNEYVFDXPVF

SEQ ID NO: 252385 - protein, 54 aa, Glycine max
  Clone ID: PAT_MRT3847_69932C.1.pep
KAMTFMPSIGCLQCWNYLTKVCVRLSFQTFKQVGSWSSSSPEWASVWCMCKRGQ

SEQ ID NO: 252386 - protein, 128 aa, Glycine max
  Clone ID: PAT_MRT3847_69933C.1.pep
KVICHFYHREFSRCKIMDKHLKTLAPVYLGTKFIKLDAENAPFFVTKLGIKTLPCVILFKKGIAVDRLVGFQDLGSKDDFSTRALENILKMKGIIDEKKKDEDDEDDETDMSMNRRIRSSTAQDSDSE

SEQ ID NO: 252387 - protein, 57 aa, Glycine max
  Clone ID: PAT_MRT3847_69934C.1.pep
TKKFVMQRHLLDREIFLRPKVSLKKTKHLPSLKNSIFCVTFLVDWLYNYLNLHSSGF

SEQ ID NO: 252388 - protein, 107 aa, Glycine max
  Clone ID: PAT_MRT3847_69935C.1.pep
IIRRGTILNKFIDMSIGQYGPTTKILLWTSTMFGFEHPTHFDNIYPEFQLRCNTPGLTVAVTARTPCNQRNTLFNPKRSLNCNPFFTISASQYYWTNNQTNHTGTPL

SEQ ID NO: 252389 - protein, 53 aa, Glycine max
  unsure (1)..(53): unsure at all Xaa locations
  Clone ID: PAT_MRT3847_69936C.1.pep
IXIIPLXXFSFTFCYXXQXXXXXKPLRLHXSALXPICDGDSPXPAXXRXXLXT

SEQ ID NO: 252390 - protein, 105 aa, Glycine max
  Clone ID: PAT_MRT3847_69937C.1.pep
MITMDVKGIKWVGNMYQKFENMFLEVEDVMYEDTVKYIENQMQAVGESVKKLYSEIVGDLLPPEKVGIELPIDKRADAGLCRKPFHVYKERHAQADSFLRTEDSR

SEQ ID NO: 252391 - protein, 137 aa, Glycine max
  Clone ID: PAT_MRT3847_69938C.1.pep
MITMDVKGIKWVGNMYQKFENMFLEVEDVMYEDTVKYIENQMQAVGESVKKLYSEIVGDLLPPEKVGIELPIDKRADAGLCKPFHVYKERHAKADTKQRTEDSRIVHGVDNVATLAALYDGTSKADASSMLSLKKFC

SEQ ID NO: 252392 - protein, 245 aa, Glycine max
  Clone ID: PAT_MRT3847_69939C.1.pep
CFIHVIFEKFLSKKAKFSSPSRQYVRRMDVKSNVGIDENPVNKKMDATKIINKTNLAETDACRTSQSYEISNKNQNQNHGVTIAKPASAKVARLASDTDCSNEIENASTKQFPNVPQLVKAAEEKPVDKSSSSCVPFGEPVEQGHETMQEDHLKLEEACVMVNGDEIQLPPKEGGNLNTKKKKARQTFSLSKKSARKQEYKELAAWHMNSEKVKGDCMENLDPTLPQDNKKLLLPSMSEPEWELL

SEQ ID NO: 252393 - protein, 319 aa, Glycine max
  unsure (1)..(319): unsure at all Xaa locations
  Clone ID: PAT_MRT3847_6993C.1.pep
MGSRFPSTYSSSNGLYVSGRPEQPKEKTPTMSSVAMPYTGGDIKXSGELGKMFDIPMDGSKSRKSGPISNAPSRTGSFAGAASHSGPIMQNAAARSIYITSGNVSSGGMSASVSMKKTNSGPLNKHGEPVKKSSGPQSGGVTRQNSGPIPPVLPTTXLITSGPLNSSGAPRKVSGPLEFTGSMKSHSSVTHNPAMTTLSLDDEYSFRRNFPKPILWSVILIFIMGFIAGAFILGAVHNAILLVVVVVLFGAVAALFTWNSCCGRTAIVGFISRYPDAELRTAKNGQFVKVSGVVTCGNVPLESSFQKVPRCVYTSTSLV

SEQ ID NO: 252394 - protein, 71 aa, Glycine max
  Clone ID: PAT_MRT3847_69940C.1.pep
LVGPSPPGGGFFAPGFSPGQKDFWGAGLSWGVLGFLKRIFGGPGRGFFSKVFFFLSPLGFWGKKGVPWGAN

SEQ ID NO: 252395 - protein, 74 aa, Glycine max
  unsure (1)..(74): unsure at all Xaa locations
  Clone ID: PAT_MRT3847_69941C.1.pep
GNSGRGSASKRGNGRGGRKRXPDESNTEKTTTENKDKGEANDYYQFEGAEMGGAAENEGRKRGPNCAGKHCTSK

SEQ ID NO: 252396 - protein, 105 aa, Glycine max
  unsure (1)..(105): unsure at all Xaa locations
  Clone ID: PAT_MRT3847_69942C.1.pep
MIITQFFFSIPLYKQDLRTEGGGALFNPSLKTPAAIMYNILXNXDGCLLFQLSHQLIKMSFTIPXATVHIYNKPNIIKQLKIGHITIVEPPLINIESNLPIFLET

SEQ ID NO: 252397 - protein, 67 aa, Glycine max
  Clone ID: PAT_MRT3847_69943C.1.pep
LEIHAKPTVEHINEDTQYKICGRTRSLKLRAYFYIKIKSVFRKLFFYQFHAKKHLCSPNMQLFKICI

SEQ ID NO: 252398 - protein, 66 aa, Glycine max
  Clone ID: PAT_MRT3847_69944C.1.pep
TATPIVSQNLSLIFCALNSVKKNSHHSCWENITIHKLVRPIKIFRSLHSRGLHDDGFGLLCELNGL

SEQ ID NO: 252399 - protein, 40 aa, Glycine max
  Clone ID: PAT_MRT3847_69945C.1.pep
MARGPKKHLKRVAAPKHWMLDKLTGVFAPRPSTGPHKLRE

SEQ ID NO: 252400 - protein, 51 aa, Glycine max
  Clone ID: PAT_MRT3847_69946C.1.pep
LLHFKVKTSFQTQNFMQILSLSIGSSSPTFKLLTMASYGSELLFDSSYSMK

SEQ ID NO: 252401 - protein, 98 aa, Glycine max
  Clone ID: PAT_MRT3847_69947C.1.pep
RLVLQDPVSWTVHEGRIYQLKLFCDKDYPEKPPSVRFHSRINMTCVNHETGVVESKKFGLLANWQQRFTMEDILTQLKKEMAASHNRKLVQPPEGTHY

SEQ ID NO: 252402 - protein, 146 aa, Glycine max
  Clone ID: PAT_MRT3847_69948C.1.pep
MTLGSSGSSVVVPRNFRLLEELEKGEKGIGDGTVSYGMDDGDDIYMRSWTGTIIGPYNTVHEGRIYQLKLFCDKDYPEKPPSVRFHSRINMTCVNHETGVVESKKFGLLANWQQRFTMEDILTQLKKEMAASHNRKLVQPPEGTHY

SEQ ID NO: 252403 - protein, 50 aa, Glycine max
  Clone ID: PAT_MRT3847_69949C.1.pep
AFSGSPFKGQKKIPPFPPINKPPLAPGWQIAFPGGLAVFLIQKGALVSRL

SEQ ID NO: 252404 - protein, 192 aa, Glycine max
  Clone ID: PAT_MRT3847_6994C.1.pep
TISELLKNPRVMKKLQRELETVVGMKRKVGESDLDKLKYWEMVVKEGLRLHPVAPLLLPHHSREDCMVGEYFIPKNSRVIVNAWTIMRDPSAWDEAEKFWPERFEGSNIDVRGKDFRFLPFGSGRRVCPGLQLGLNTVLLTVAQLVHCFDWKLPNNMLPCELDMTEEFGLSMPRANHLLVIPTYYRLHDQSC

SEQ ID NO: 252405 - protein, 198 aa, Glycine max
  unsure (1)..(198): unsure at all Xaa locations
  Clone ID: PAT_MRT3847_69950C.1.pep
MGCFHSKSARQFPAQENTVNLAAETAFTVSEVEALFELFRSISSSVVDDGLISKEEFQLAIFKNKKKDNLFANRIFDLFDVKKKGVIDFEDFVRSLNVFHPNASLEDKIAFSFRLYDLHNTGFIERPEVKQMLIALLFESDMKLADDVIETILDKTFXWXADLNQDGKIDTXEWETFVXKNPSLLKIMTLPYLXDIQH

SEQ ID NO: 252406 - protein, 146 aa, Glycine max
  Clone ID: PAT_MRT3847_69951C.1.pep
MTLGSSGSSVVVPRNFRLLEELEKGEKGIGDGTVSYGMDDGDDIYMRSWTGTIIGPYNTVHEGRIYQLKLFCDKDYPEKPPSVRFHSRINMTCVNHETGVVESKKFGLLANWQRRFTMEDILTQLKKEMAASHNRKLVQPPEGTHY

SEQ ID NO: 252407 - protein, 145 aa, Glycine max
  unsure (1)..(145): unsure at all Xaa locations
  Clone ID: PAT_MRT3847_69952C.1.pep
HAPLAPHEDSLTHRAAFGEMXYILDPSTRSEAVKLIEGSANNLVPRNGALGPIREWTLKDCISVHXLLAAVRGDQDAASRWKMRCAELFPYSTYGEGICSSASPNSAFNQIRKSTETGSSNHWVGDHNAESTSNGKLEAFKDLTI

SEQ ID NO: 252408 - protein, 85 aa, Glycine max
  Clone ID: PAT_MRT3847_69953C.1.pep
SEEEEFMWDEIDNGLIDHGPNVSKTLSTDTWMADVENLEGEDHLQITRPFGAKVNREISTVKNQLPGLGGHPPSSWQLQNLKPGY

SEQ ID NO: 252409 - protein, 72 aa, Glycine max
  Clone ID: PAT_MRT3847_69954C.1.pep
TPPFCIYPPNPPIFFKGGAPPTKTKALKPPIKKEFPNFKPVLPKGVQTPGNGLGFFFVKVSLLLLLLAGWRY

SEQ ID NO: 252410 - protein, 103 aa, Glycine max
  unsure (1)..(103): unsure at all Xaa locations
  Clone ID: PAT_MRT3847_69955C.1.pep
FGVKHTINLDDIKESQPTCSTDYCVLSYLLADHKDTXGAPLCPCRHYDDXVAXVAQGFWKGPCVPMRERKECHCMLFLTPDNDFAGNEQTITLDEIKESTANM

SEQ ID NO: 252411 - protein, 60 aa, Glycine max
  Clone ID: PAT_MRT3847_69956C.1.pep
TLRLLFLLISFSLFPSQNLLFYMHTLKPVLVKRHDHMTTDWGLNSLALTGREYVPLVGSS

SEQ ID NO: 252412 - protein, 77 aa, Glycine max
  Clone ID: PAT_MRT3847_69957C.1.pep
VIVFFFFFFFFFFFFFFLKKRFWPNFYTPKQKTFINKQTFFTRGTQKTPPGKGGAKNPLRGQTENGFYLGGGGGQDF

SEQ ID NO: 252413 - protein, 67 aa, Glycine max
  Clone ID: PAT_MRT3847_69958C.1.pep
AIVICTANVYNGFSLRGSTEALNSTRSQECALGVWTEPCIRHRIGSTQATCSRRAWPTAAILTRIRD

SEQ ID NO: 252414 - protein, 47 aa, Glycine max
  Clone ID: PAT_MRT3847_69959C.1.pep
LTTTLYKSTNYKYHTTSSLMLSKPSRVLKTLKVTVPLQPSLTSLSFN

SEQ ID NO: 252415 - protein, 471 aa, Glycine max
  unsure (1)..(471): unsure at all Xaa locations
  Clone ID: PAT_MRT3847_6995C.1.pep
MATKVKRKTFSIAAATWMVLCIITMICNVSLADRILKEKELGNDVPKERQGILKAIVNFLWEEGKSSYEPVWPNMKFGWRIIVGSIIGFLGAALGSVXGGVGGGGIFVPMLALIIGFDPKSSTAISKCMIMGASISTVYYNLRLRHPTLDMPLIDYDLALIFQPMLMLGISIGVICNVMFADWMVTVLLIILFIATSTKATYKGIDTWKKETIAKKEASKLLEAEPKSGDDYKSLPSGPTESLFEEAPLLKNIYWKELSLLAYVWVAFFIVQIVKEYTKPCSIQFWLLNFLQVPVAVSVTLFEAIGLYKGTRVIASKGKEVTNWKIHQICLYCSTGIMAGMVGGLLGLGGGFILGPLFLELGIPPQVASATSTFAMVFSSSMSVVQYYLLDRFPVPYASYFALVATIAAFTGQHVVRKVIVVLGRASIIIFILALTIFISAISLGGVGIENIIEKIENHEYMGFEDLCALS

SEQ ID NO: 252416 - protein, 84 aa, Glycine max
  Clone ID: PAT_MRT3847_69960C.1.pep
KIPVRSITFGSMCRRFLSRAQFRSFSVSSMAGAVCGVRNAVVQDLERGSRAQYPGMHESHELTLSFIRLVDSIVTIELLVTIRR

SEQ ID NO: 252417 - protein, 134 aa, Glycine max
  unsure (1)..(134): unsure at all Xaa locations
  Clone ID: PAT_MRT3847_69961C.1.pep
SXXXWVFXFXFXXXWXRXXXXXSXXXXXXXXLXXXXPVXGWXXSXFPXXXXXXAXCXXPFSXXXXXRXLASGRXXXXXXXXXPPPPLVXXXXXXLVHSXXLXXVLLXXXXAXXXXCXLPXVLFAPFXLLLXPLP

SEQ ID NO: 252418 - protein, 61 aa, Glycine max
  unsure (1)..(61): unsure at all Xaa locations
  Clone ID: PAT_MRT3847_69962C.1.pep
LNVLGHNGPEYVTECPIPFGSXYTYTANLSVQEGTLWWRTHSXFVRATLYGALLMPPLLGH

SEQ ID NO: 252419 - protein, 95 aa, Glycine max
  Clone ID: PAT_MRT3847_69963C.1.pep
KGCVRTIHEKRLKLRPPTVCTVYTLTSGDGNRHEINRCNLTIHKVLIPSHTQDRGRFFPTPNKCYRGENWGNFLTIFWDPGDIIFKNMVEGPPPL

SEQ ID NO: 252420 - protein, 47 aa, Glycine max
  Clone ID: PAT_MRT3847_69964C.1.pep
FWRCWCSHLTGEKSHSLVRARTRRRWSSHSGSTDVHGVIQAIMTCQA

SEQ ID NO: 252421 - protein, 68 aa, Glycine max
  Clone ID: PAT_MRT3847_69965C.1.pep
MAALGTWLSIGVRRLHSSAVARAGSQWRLQQGLAANPSGYGPLTELPDWSFADGRSAPPMKGQLRREA

SEQ ID NO: 252422 - protein, 140 aa, Glycine max
  Clone ID: PAT_MRT3847_69966C.1.pep
GPTHTSGHMVTHRRPQTHCHHLIRLIQLGHLAWSSIYSTWFASRRPTTGGRCRPMSVSTSSASVCRDRVSLLLRALLQISLGLRLHGPEIGLRPRQGRRPQRLPAPRRRPVWMRRRQIYSISWEGAEPHDQRTPRFIFSF

SEQ ID NO: 252423 - protein, 58 aa, Glycine max
  Clone ID: PAT_MRT3847_69967C.1.pep
QLLFFKTFRAPIIKMGTIEVLPGFQEEFSHQGIFINGNLVEWALLPPKDSSNGMVSSF

SEQ ID NO: 252424 - protein, 79 aa, Glycine max
  Clone ID: PAT_MRT3847_69968C.1.pep
RVLHGQFGYLYFNHIKIRDLEKLITSIVFPVYRDLEELSINPPRPSSVSNLEKVAPRSPKNGKKRSKSDKVYSAPIFED

SEQ ID NO: 252425 - protein, 31 aa, Glycine max
  Clone ID: PAT_MRT3847_69969C.1.pep
VTSLYNSKDLLDKIYYDLDVGLRIINEEEFN

SEQ ID NO: 252426 - protein, 56 aa, Glycine max
  Clone ID: PAT_MRT3847_6996C.1.pep
LSPLKKSLCTPLNQQTKTPSYSITNPFPKNIIYQDSYLGILEVKVVFAPRRPPNIK

SEQ ID NO: 252427 - protein, 105 aa, Glycine max
  Clone ID: PAT_MRT3847_69970C.1.pep
PPTMATFLRSSTLSRSRRYKYETLGGVPSSGRDHILKSISYRRRRAKQRKIFLTTYKLDSFTEPESPKLNNVALKFKKIVASVLKLVQTKAGSFRFKSSLSTTDL

SEQ ID NO: 252428 - protein, 36 aa, Glycine max
  Clone ID: PAT_MRT3847_69971C.1.pep
QDQLGDVLHWIRQVLGLACGFLWGSIPLVGGIWFIL

SEQ ID NO: 252429 - protein, 129 aa, Glycine max
  unsure (1)..(129): unsure at all Xaa locations
  Clone ID: PAT_MRT3847_69972C.1.pep
PPLFREPKKGASPFKFHPHRFLFGGGGAYLSGGNGGKKKPFGFGGKICPGLAMAPGHIPLLLAQGGLGFXRGVSPPKKKLDFPGQWGFPGVFKKFFRAPPKPKGGGGEKGPLEKFGAPPPFWVFVSPNP

SEQ ID NO: 252430 - protein, 307 aa, Glycine max
  Clone ID: PAT_MRT3847_69973C.1.pep
SRAIELENLPYGLSQKPAVLKVRDWYVDSFRDLRAFPNIKNVNDEQDFTEMIKAIKVRHNNVVPTMALGVQQLKKRMDPKIVYEDLVEIHQFLDRFYMSRIGIRMLIGQHVELHNPNPSPHVVGYIHTKMSPVEVARNASEDARAICCREYGSAPDVHIYGDPDFTFPYVPAHLHLMVFELVKNSLRAVQERFMDSDKVAPPIRIIVADGIEDVTIKVSDEGGGIARSGLPKIFTYLYSTARNPLDEHSDLGIGDNVTMAGYGYGLPISRLYARYFGGDLQIISMEGYGTDAYLHLSRLGDSQEPLP

SEQ ID NO: 252431 - protein, 385 aa, Glycine max
  unsure (1)..(385): unsure at all Xaa locations
  Clone ID: PAT_MRT3847_69974C.1.pep
MANRPDPDIDDDFRELYKEYTGPLGTATTNMQERAKSNKRSNAGSDEEEEARDPNAVPTDFTSREAKVWEAKSKATERNWKKRKEEEMICKLCGESGHFTQGCPSTLGANRKSQDFFERIPARDKNVRALFTEKVLSKIEKDVGCKIKMDEKFIIVSGKDRLILAKGVDAVHKIREEGDQRGSSSSQMTQSRSPERSPVSARFQRSEPQRSHSGPRNTSQFQQRFGRQERAVEDRIRRDEGSQARWKPNAKGRMIFLVNFIGVEILQTLTTDIKLMYIXSSAYGNSGARGRSSQSRSPRHAPYTGNSYNSFEGRNQNMGAYRNDGWDSHRREICIRPGHQFDYSASPQTLEELELEYKNEAAELMKIRDREEDEENFKHREISSY

SEQ ID NO: 252432 - protein, 51 aa, Glycine max
  unsure (1)..(51): unsure at all Xaa locations
  Clone ID: PAT_MRT3847_69975C.1.pep
ARYSGGDLQXIFMEGYGTDAYLHLSRLGDSQEPLPESTFQSVTVSNSVTLC

SEQ ID NO: 252433 - protein, 93 aa, Glycine max
  Clone ID: PAT_MRT3847_69976C.1.pep
MAMVGMDYKECAISLEKWDPLYPQQPPLYLLAAERNEIVNLTAEGMKAKIREWAKAVASSSKQQRVTNDKGKVHENSQKTFTYKLLNGRLGLH

SEQ ID NO: 252434 - protein, 157 aa, Glycine max
  Clone ID: PAT_MRT3847_69977C.1.pep
AAEVRIYGDPDFTFPYVPAHLHLMVFELVKNSLRAVQERFMDSDEVAPPIRIIIADGIEDVTIKVSDEGGGIPRSGLPRIFTYLYSTAKNSSSVEHEPSDIGTMENVTMAGYGYGLPICRLYARYFGGDLQVISMEGYGTDAYLHLSRLGDSQEPLP

SEQ ID NO: 252435 - protein, 48 aa, Glycine max
  Clone ID: PAT_MRT3847_69978C.1.pep
RKWGLTLLLSMLCLSENFHTSSNCRTDLIRECSFQNLETDADWKRAVF

SEQ ID NO: 252436 - protein, 136 aa, Glycine max
  Clone ID: PAT_MRT3847_69979C.1.pep
MSIEAMAMVGMDYKECAISLEKWDPLYPQQPPLYLLAAERNEIVNLTAEGMKAKIREWAKAVASSSKQQRVTNDKGKVHEQNKCCLSFTQKLNTMFNSPASHAMPISAIHTNLTSSFENSQKTFTYKLLNGRLGLH

SEQ ID NO: 252437 - protein, 109 aa, Glycine max
  Clone ID: PAT_MRT3847_6997C.1.pep
VPSIVKESGRAQVVGADGSRFLEPTLKAGNLFIVPRFFVVSKIAASDGLEWFSIIPTPNPVFTHPAGSIGAWKALSPPVLQASFNVDAGLEQLFRSKKNADAIFFPPPN

SEQ ID NO: 252438 - protein, 48 aa, Glycine max
  Clone ID: PAT_MRT3847_69980C.1.pep
LSWYTYHTNPERGVRSIFGAPFIGARSIHVVTFFTTTTQIEHNMNLTI

SEQ ID NO: 252439 - protein, 85 aa, Glycine max
  Clone ID: PAT_MRT3847_69981C.1.pep
IENMSIEAMAMVGMDYKECAISLEKWDPLYPQQPPLYLLAAERNEIVNLTAEGMKAKIREWAKAVASSSKQQRVTNDKGKVHVFS

SEQ ID NO: 252440 - protein, 75 aa, Glycine max
  Clone ID: PAT_MRT3847_69982C.1.pep
DACLQQPSLVHLYLQRIAAQQLQQQLLPTINQVVAANLAAYLQQQQFLPFNQLAGVNPAIYLQAQQLLPFNQLVG

SEQ ID NO: 252441 - protein, 84 aa, Glycine max
  Clone ID: PAT_MRT3847_69983C.1.pep
VPRDANMRAHAFISLNNARGLRYVHWRAYYTCMRCADMESSLVVWASQTKAQNASRLTLTLHLKQFNYYRALPPSNRGQHSLYI

SEQ ID NO: 252442 - protein, 57 aa, Glycine max
  unsure (1)..(57): unsure at all Xaa locations
  Clone ID: PAT_MRT3847_69984C.1.pep
PXXPPPXPXTLVPSVLRVLRFTQALSKHMKNTPSRRFMGPNYHNYSIRARPGMLPTY

SEQ ID NO: 252443 - protein, 119 aa, Glycine max
  unsure (1)..(119): unsure at all Xaa locations
  Clone ID: PAT_MRT3847_69985C.1.pep
VLWVSPEDNASLXHELYYLTCHNLAMQDAYLVDLVNVXRELYLHSPQEARQLRRKALSRIEWLQKADVPTIAQIEEFHSTQTMMNAPDSXNDHIDLLLSIDLLGLQGAGXAISNKIVFD

SEQ ID NO: 252444 - protein, 168 aa, Glycine max
  Clone ID: PAT_MRT3847_69986C.1.pep
MEGATMLLLSPISSCNVRSKHLNYSLRRRSCYSSPRALKIVSMAKEGSDTGNGVVEKAAIAGGLISTPVIAWSLYTLKTTGCGLPPGPGGSIGALEGVSYLVVVGIVGWSLYTKAKTGSGLPNGPFGLLGAVEGFSYLALVAIVVVFGLQFLDKGYIPGPLPADQCFG

SEQ ID NO: 252445 - protein, 105 aa, Glycine max
  Clone ID: PAT_MRT3847_69987C.1.pep
MSSSFSPLAIFLLLLLVRYTCEAREPFACDPKNGGTKKMAFCKVSLAIAERVKDLIGRLTLEEKVRLLVNNAAAVPRLGMKGYEWWSEALHGVSNLGPAVKFNAQ

SEQ ID NO: 252446 - protein, 74 aa, Glycine max
  Clone ID: PAT_MRT3847_69988C.1.pep
RSAELWAVRTISKGVKGTAEGETQGCERMLCDRPHGQIHQDIDSSVLGQGSHVKNRVSREGWRWLREIFSLSFL

SEQ ID NO: 252447 - protein, 62 aa, Glycine max
  Clone ID: PAT_MRT3847_69989C.1.pep
AVSCVCIDSNIHPDRTWTPPHSVYRSRACINRTEWSTDLRLGFSICSSCQTGLRLNSTPREE

SEQ ID NO: 252448 - protein, 95 aa, Glycine max
  Clone ID: PAT_MRT3847_6998C.1.pep
TTPKLSTFFKNKYTTGIPQHISKRFLKTKETSFSLIPSAFFFLGKGNGFSHCYNGGIYWEIHAFGAGDVWRVFHSGFFLGKNLSFSFLTLNGVYF

SEQ ID NO: 252449 - protein, 32 aa, Glycine max
  unsure (1)..(32): unsure at all Xaa locations
  Clone ID: PAT_MRT3847_69990C.1.pep
QXPGAFSVXXSSTSLMSFSHSSSLVSNVKAGC

SEQ ID NO: 252450 - protein, 53 aa, Glycine max
  Clone ID: PAT_MRT3847_69991C.1.pep
FYTSSLYKSNHKSLYLLILNNYYNNQPLSFNYTINIPSHIYLYFSIPPPIFIF

SEQ ID NO: 252451 - protein, 44 aa, Glycine max
  Clone ID: PAT_MRT3847_69992C.1.pep
QSRSVQHEPPPGRLSTCPAPVIYVVLQQPTSVPISKPSLTRTLM

SEQ ID NO: 252452 - protein, 54 aa, Glycine max
  unsure (1)..(54): unsure at all Xaa locations
  Clone ID: PAT_MRT3847_69993C.1.pep
LASFPARPPGDPNIVAFPRPRNIVPFSPRGRRSKXDNHCTDAGTLWRRIPLSPL

SEQ ID NO: 252453 - protein, 54 aa, Glycine max
  Clone ID: PAT_MRT3847_69994C.1.pep
KPIFFFLLAFLTERIHGGKQEYSKLARCIHKAGSQAHTLIVEYVTAKSFERAPI

SEQ ID NO: 252454 - protein, 47 aa, Glycine max
  Clone ID: PAT_MRT3847_69995C.1.pep
KLKKQCDHEILDIQMSAEKERARRSIYKVMNHGSPCSSKHMLSCRKE

SEQ ID NO: 252455 - protein, 188 aa, Glycine max
  unsure (1)..(188): unsure at all Xaa locations
  Clone ID: PAT_MRT3847_69996C.1.pep
MSNITSCDSGSFSTENTREDAAVKQQQSEMLGQFHSPHSHTSTTTTNNSNGSNTNSQPPAPVKKKRSLPGNPDPSAEVIALSPTTLMATNRFICEICNKGFQRDQNLQLHRRGHNLPWKLKQRTSTEIRKMIYXVCPDXPCVHHNPARALXGDLTGIKKHFCRKHGEKNWICDKCSKXYAVQSDWKAH

SEQ ID NO: 252456 - protein, 58 aa, Glycine max
  Clone ID: PAT_MRT3847_69997C.1.pep
VEKANKNKQNHRHRTKKKLILNVTLFGFCLSQKGLNTMTHRNSPINSGKKWPKLGTWK

SEQ ID NO: 252457 - protein, 87 aa, Glycine max
  unsure (1)..(87): unsure at all Xaa locations
  Clone ID: PAT_MRT3847_69998C.1.pep
FQQIXTLAGNXTPSYXXXEGIXTMAIIGSGLXXXALLIGNIQNXLQAXGRRKLEMXXXRXDXEQXMSHRRXAEEXXRRXRQAERYNW

SEQ ID NO: 252458 - protein, 84 aa, Glycine max
  Clone ID: PAT_MRT3847_69999C.1.pep
PQKSTGSICKPLDMNNKNNFPGKTYGFELYTSPTPRNNPHFKTFFFFKNRIGCPSFFSPKVKIRKFNPPGGKLNQGLMGVLEPL

SEQ ID NO: 252459 - protein, 113 aa, Glycine max
  unsure (1)..(113): unsure at all Xaa locations
  Clone ID: PAT_MRT3847_6999C.1.pep
CKANKIQDKVTIKGXETLIMSXESTXSXTDQXFLISFLEQPIIVFFDAKDFHLYTGGGDDGENCPSPFGINHFVLLVGFGSTRRXXXWIXKNSWGXDGGXDGYLLXXXXXGXL

SEQ ID NO: 252460 - protein, 231 aa, Glycine max
  Clone ID: PAT_MRT3847_699C.1.pep
PRVRGNNGLNRQSRINVAKSNSRNIGHKCSERFYGSNSWMNDRYDFHSCNCSPNNRTNRVSWETKPASKSESTVDTSKQFYRGSKYNHVDFMHESNGRTKGRVISGNYSSRDLPQSKKVWEPMESHKYARSNLDSDVTLGSTGHGFQFNTVRFSVDEVGGSGEIDEGDSNLKRSGMGEGCQNDLDAEVGGSCSSTEIASEAGMCVMGGSALNNSSDPNQGNTSSSDNCSSC

SEQ ID NO: 252461 - protein, 106 aa, Glycine max
  Clone ID: PAT_MRT3847_69C.1.pep
RSYVQNVYSFSNGVTFRSDLQPRKLRNCISINIGQAGFQVGNACWELYCLEHGVQPDGQMPCDKTVGGGDDAFTTFFSDTAAGKHVPGAIFADLEPTVIDEVRTVT

SEQ ID NO: 252462 - protein, 56 aa, Glycine max
  Clone ID: PAT_MRT3847_6C.1.pep
GQLDTSCCISFFLWAISAIITTCAVGTENGAAMAHHMKTQSCHDLWYLIGALSCHT

SEQ ID NO: 252463 - protein, 57 aa, Glycine max
  Clone ID: PAT_MRT3847_70000C.1.pep
SFLYWVVSITVCGKFRCSSMLWEHLILPQPLTPYFSQLLFSLMNVVSLRLCRNPLLI

SEQ ID NO: 252464 - protein, 72 aa, Glycine max
  Clone ID: PAT_MRT3847_70001C.1.pep
MGFWGTRVMEIVKKHDSGGLVWKRIKLTTTRKANAKKRLLRVWQNEAVLKACSATPNEPQPTPVAIPVARYI

SEQ ID NO: 252465 - protein, 265 aa, Glycine max
  Clone ID: PAT_MRT3847_70002C.1.pep
MAIGKNKKLGKKKGAKKKVQDPFLRKEWYDVKAPAPFTNRVVGKTCVTRTTGTKIATDALKGRVVESSLADLNNNQDAWRKVKLSIEDIQGKTCLTNFHAMDMTRDKLCQFIRKWQTLIDAHCEVKTQDGYVLRVFVVAFTGKQPTQARKTSYAQHQQIKAIRKKIVEIITKEASSSNLADLVAKLNHVDQFPKLITKACQFIYPLSGALIKKVKTLKKPKFDIVRLNELYKESAVKPAPEKRGGKGKAADPPAEGTDTTNLLAQ

SEQ ID NO: 252466 - protein, 57 aa, Glycine max
  Clone ID: PAT_MRT3847_70003C.1.pep
RFCVRYNLTPHFSSLYEHINSYTQSYLRVERQRSHASNSDHQMCQPQNMAYQLCHLV

SEQ ID NO: 252467 - protein, 131 aa, Glycine max
  Clone ID: PAT_MRT3847_70004C.1.pep
MSRSLGIPVKLLHEASGHVVTVELKSGELYRGSMIECEDNWNCQLESITYTAKDGKTSQLEHVFIRGSKVRFMVIPDMLKNAPMFKRLDARIKGKGASLGVGRGRAVAMRAKAQAAGRGAAPGRGVPPVRR

SEQ ID NO: 252468 - protein, 64 aa, Glycine max
  unsure (1)..(64): unsure at all Xaa locations
  Clone ID: PAT_MRT3847_70005C.1.pep
SRELFYAWAKRNAKELNHQKKELIXVETLGQSXGGFYVDPEDRHLVHCSHSMIHAMVPQSPLIL

SEQ ID NO: 252469 - protein, 121 aa, Glycine max
  unsure (1)..(121): unsure at all Xaa locations
  Clone ID: PAT_MRT3847_70006C.1.pep
MSRSLGIPVKLLHEASGHVVTVELKSGELYRGSMIECEDNWNCQLESITYTAKDGKTSQLEHVFIRGSKVRFMVIPDMLKNAPMFKRLDARIKGQSSCNASKGXAAGRGAAPGRGVPPVRR

SEQ ID NO: 252470 - protein, 41 aa, Glycine max
  Clone ID: PAT_MRT3847_70007C.1.pep
APFFQEFFKKLFRAPHRGVNMKVNVGGRQIGHGTSLLHVLA

SEQ ID NO: 252471 - protein, 57 aa, Glycine max
  Clone ID: PAT_MRT3847_70008C.1.pep
PELDNFHLNFLKNTSCILLHHWPKSIISCFNETSGSSSCGSSVCLNILIRKEITQMY

SEQ ID NO: 252472 - protein, 79 aa, Glycine max
  Clone ID: PAT_MRT3847_70009C.1.pep
HFRYSTNGKEVRVEKITWVKMLIPNPSYGYKCLYTCHVVKVNWWNGFYIKLVFIHYYMFNYNSFTWNPSKTTTMKPDSL

SEQ ID NO: 252473 - protein, 60 aa, Glycine max
  Clone ID: PAT_MRT3847_7000C.1.pep
IVKSSKSTRSPGCLDLVATFCGVVPISVLCDIASRFTFFYLSLFRSYIGILALLSSSRSR

SEQ ID NO: 252474 - protein, 139 aa, Glycine max
  unsure (1)..(139): unsure at all Xaa locations
  Clone ID: PAT_MRT3847_70010C.1.pep
RGDPRVRDYSLXATGARGGRRKRRGIIVPSFLETPNGGSRSSEFRVSLSQMGLLTXPWXGXGEEGGGVXGIIRQGVRGIGGVGVGGRDNRDSNSNNPPSRRRWGGSLSHNMGEEELAHHGGGGGPLGNVGFQAGRAMRS

SEQ ID NO: 252475 - protein, 78 aa, Glycine max
  unsure (1)..(78): unsure at all Xaa locations
  Clone ID: PAT_MRT3847_70011C.1.pep
MDCQRGLRMDLWRQRFYVEEFMSKDELIARLRLLGEQMNWDIRLWGTKEXLVVCAVEEKEEFDDTWSKMDTGSSLTIG

SEQ ID NO: 252476 - protein, 49 aa, Glycine max
  Clone ID: PAT_MRT3847_70012C.1.pep
LLGEFCGLCPVVSEIYGKKIWAPDPLEASYFFDLKCGYNREWTLNIKRH

SEQ ID NO: 252477 - protein, 39 aa, Glycine max
  Clone ID: PAT_MRT3847_70013C.1.pep
FFTVLVLTRSNPSVFSSYGRCGPLMFLITRTLKMSRITC

SEQ ID NO: 252478 - protein, 134 aa, Glycine max
  unsure (1)..(134): unsure at all Xaa locations
  Clone ID: PAT_MRT3847_70014C.1.pep
MDELANKIPGDFYAVDEAFEQPYSLQGFSTKENDVQEISLQALTDIDHRLAYFSEKLVNLHVLYVYLLGEESDLEAMDSTNNCILENLFEKAXTXFDLLSGILDSEVRELDSFMDTXQEEIVDARHKXFSCKHL

SEQ ID NO: 252479 - protein, 57 aa, Glycine max
  Clone ID: PAT_MRT3847_70015C.1.pep
SVHLYIRTQPAQRHFMQEIVHPWSHEWSTHSFVGKPISRQDGISRSRPINFIHSLGT

SEQ ID NO: 252480 - protein, 142 aa, Glycine max
  Clone ID: PAT_MRT3847_70016C.1.pep
MSNKPVYQRFFIQEFFFLQGTHQINQSLDHFTIFDLSNHEVQVRWVAPNHGWVCLNFDGATRSSQNMTGCGALLRDHNGNWLKLLLFDWQVQIVHIFMEGNRCDDALANLAFETSFSSCFMFVHITTLIIFFIPWIFIYVYL

SEQ ID NO: 252481 - protein, 43 aa, Glycine max
  Clone ID: PAT_MRT3847_70017C.1.pep
RYNFDKQYVSPHLYKRNRRLLFTPHLFRLILYLIKFIGNYKIR

SEQ ID NO: 252482 - protein, 45 aa, Glycine max
  unsure (1)..(45): unsure at all Xaa locations
  Clone ID: PAT_MRT3847_70018C.1.pep
RAAFKFFFLHQIIKLKFYSKXXQWNGGYIILVTPKIIHIMNSHQN

SEQ ID NO: 252483 - protein, 60 aa, Glycine max
  Clone ID: PAT_MRT3847_70019C.1.pep
KKKKILPPTTKLINPITNLPTHPPLNTPALPHNQYIKTYHNHLHTFFLYQILIHSQFHTT

SEQ ID NO: 252484 - protein, 73 aa, Glycine max
  Clone ID: PAT_MRT3847_7001C.1.pep
SLPLLILHSLTLLCIRLYHKLNLITFCCSYSRPLIFWRSLCENPIDFYTATPFLVVWVSPPPPQRRRTSYSDD

SEQ ID NO: 252485 - protein, 147 aa, Glycine max
  unsure (1)..(147): unsure at all Xaa locations
  Clone ID: PAT_MRT3847_70020C.1.pep
APKAEKNPADKKPAEEKKSTVGDNAPAXKKPKAXKKLPNDGCAGGXWKKKKKNKKSVETYKIYIFKVLXXVNPDIDISSKAMGIINSFINDIFEKLSPKSSILAHYNNKPTITSKKIQTTIMLMLPNKLTXHTISKGTKAITKFTXS

SEQ ID NO: 252486 - protein, 97 aa, Glycine max
  Clone ID: PAT_MRT3847_70021C.1.pep
QFSTGEPNKPVLQDFQQQMPLKKTARHKPRRSKRSDLKFAGADERLPGEHRRFLLPLGSKFYASQCFFFFFSFLPFSVQLPKHRRRRVCVVCGYLFI

SEQ ID NO: 252487 - protein, 68 aa, Glycine max
  Clone ID: PAT_MRT3847_70022C.1.pep
HCQTSKTARAPVTPRTPLGISTLTPKFITPYGSPMRKVLTFTQLEPPDAWLALTESRNGHTYYAAIDT

SEQ ID NO: 252488 - protein, 74 aa, Glycine max
  Clone ID: PAT_MRT3847_70023C.1.pep
FAFVFGFGQRHWYLHSMSGRYSRGDASFSFMIPRFQARTAKKLGRSLELSWCSGFDSKVSRSSMRYACISVRDI

SEQ ID NO: 252489 - protein, 78 aa, Glycine max
  unsure (1)..(78): unsure at all Xaa locations
  Clone ID: PAT_MRT3847_70024C.1.pep
SAPFAVVGASFALLXSFVPVVPASAXPVGAVGGFPSLXLSVPVVGPPVLVLSFCCSASFLRWWRRFVFVSRVAFLLFV

SEQ ID NO: 252490 - protein, 139 aa, Glycine max
  unsure (1)..(139): unsure at all Xaa locations
  Clone ID: PAT_MRT3847_70025C.1.pep
MNLTKKGPLTDAKLLSPNKATTLNPLEFLASLFPGFAAESLAEAYFAXCDLHLTTEMLNQLELQVDGGFNQNLNSKTLSAPNLSAMDYPALTSPDGQTAXSRYVVDNVQQSGNPYRSYDSDVLLSNLSPVIGRFSASLW

SEQ ID NO: 252491 - protein, 46 aa, Glycine max
  Clone ID: PAT_MRT3847_70026C.1.pep
PLFYLFSLFLLCSKQLERGEMTYSAFLFHQVCNACWSDRLRGLSFV

SEQ ID NO: 252492 - protein, 94 aa, Glycine max
  Clone ID: PAT_MRT3847_70027C.1.pep
SLGCTGCCYQHTLIGFVEASTDDIHTRRYRERPPPYEGKKASPDPLSPVMCFEADPPNLSGSRGPLLGMSRNMLKCQVLHSVLKSGFGGELECR

SEQ ID NO: 252493 - protein, 46 aa, Glycine max
  Clone ID: PAT_MRT3847_70028C.1.pep
TTRPDDRTVLHHHTIITTKFPIKYWYVEWTLISYYFLINYQLLRAI

SEQ ID NO: 252494 - protein, 155 aa, Glycine max
  Clone ID: PAT_MRT3847_70029C.1.pep
MSSLDLFAPSAETRRLSVKLTNDQLEKIGMTKQEAADFQRLRNRFLDKPLMEWERVKPLPDDFCKSAEDLPEPSPEKAKELLNKLVFVQLNGGLGTAMGLKSTKSGLQILKQGGSAYTILDCKILQLEALNNQYGVDIPLVLMNSPKTNEETLKL

SEQ ID NO: 252495 - protein, 109 aa, Glycine max
  Clone ID: PAT_MRT3847_7002C.1.pep
NKLDRFSGGEHSSLYTTHMKNILNILSIMSNSIKSIPPWATFIIEQLRPLVTVHLHPLSQRSFPIVCIQFLIGIVPVLHLPIWLEDKYWTRLIQRSTAVWMLRPEISEA

SEQ ID NO: 252496 - protein, 246 aa, Glycine max
  Clone ID: PAT_MRT3847_70030C.1.pep
MKKKEIMVMVPYPAQGHVSPMQKLGWEFVRQGFEAVIVIPKFIHRQIAELQKNDENEMIKWVALPDHEEEEGSNPPEDFFAIESAMENSSITTHLEALLHSLAAEGGHVACLVVDLLASWAIQVSDRLAIPCAGFWPAMFATYLFISAIPHFLQTRLISNSGLPQHEGKFSLEPELPVISTEDLPWLVGTDAARKARFKFWKRTLERSSALKWLLVNSFPDESKLELGKQQEVCWNSIFVALRPYL

SEQ ID NO: 252497 - protein, 123 aa, Glycine max
  unsure (1)..(123): unsure at all Xaa locations
  Clone ID: PAT_MRT3847_70031C.1.pep
KWESFSYDFIFCPPFYAPQSAQKACXWGDKNAPEGSGLGEEYFLFRFPIVHLGVGQGGGGLGATFFCFFFPPFPGAMYFFLKRNMSPISLFFKKKRGRLIWGAISPPKSPWGGAWDWGFFLLF

SEQ ID NO: 252498 - protein, 107 aa, Glycine max
  unsure (1)..(107): unsure at all Xaa locations
  Clone ID: PAT_MRT3847_70032C.1.pep
NRAGLALSITKPIGAQGANAIAVPETDCVLVATGKLDGVLTFQITACLLHRSGSRLHESGPCGXLLINRPLHKTIIVMPGTNHERATTYYECCPHWSGPIEASMDAM

SEQ ID NO: 252499 - protein, 54 aa, Glycine max
  Clone ID: PAT_MRT3847_70033C.1.pep
KVSLKNCDSKFQLNLEDSTEEGAICKSLLKRLKTPEDKTFNGLYFPPMLIWQDI

SEQ ID NO: 252500 - protein, 73 aa, Glycine max
  Clone ID: PAT_MRT3847_70034C.1.pep
IFILNAKLCPASWDIVILVIYSALPMLNLYSLMVGFNLFHSAYQALTFKKRSQLSSASFSSGHLQHEFLYIIL

SEQ ID NO: 252501 - protein, 62 aa, Glycine max
  Clone ID: PAT_MRT3847_70035C.1.pep
VLFFMTLAKWLKIRLLSLCIYISIRFSKYIHRRFCLYQFNYINYFKILLVLVVVPHIIVTRQ

SEQ ID NO: 252502 - protein, 101 aa, Glycine max
  Clone ID: PAT_MRT3847_70036C.1.pep
YVLQTLMMLGPFGVRLCGWSPKKPPLLAKMEAALLCIVMLFRYYDLLGSITLMMLASTLPKMLIVTPHIMSSQASNHSIREHLQLGKYVRRIDGSSCDQAP

SEQ ID NO: 252503 - protein, 127 aa, Glycine max
  Clone ID: PAT_MRT3847_70037C.1.pep
PPCSRGSPPGNFPSPLPLKMPSPPRKKRNFFGKTNGPLNFFFGPLKFESKFSPGGFCYACLFFKDFPGRFAFALSLLVFFLRLFLLSKFFSFLNLKALLPFSFFFFGGGVFFSPGVFWLNTPPLLAP

SEQ ID NO: 252504 - protein, 116 aa, Glycine max
  unsure (1)..(116): unsure at all Xaa locations
  Clone ID: PAT_MRT3847_70038C.1.pep
IITPLFDVFLISKRKKPCCALYNWVSYKTFSNDIFYLYIPHLFSSINSPHNDPTYSILERSNDXTIIFQVFHKQTYHFFXYLFQRISYTFTLSYFPSTVFRFRFLTLTDIHSNFPL

SEQ ID NO: 252505 - protein, 58 aa, Glycine max
  Clone ID: PAT_MRT3847_70039C.1.pep
PVIEHVIPTMLGRGREIPLKTKPNFAFSNPLIYFFRQWWGGFVFFFRGGNPPGLKIKV

SEQ ID NO: 252506 - protein, 79 aa, Glycine max
  unsure (1)..(79): unsure at all Xaa locations
  Clone ID: PAT_MRT3847_7003C.1.pep
HHHXLKAKISTHPLYKQLLTXHITYLHITTPINQLPLINTQLSXSHHLLHSYISHNTLSLSPHHHQELNSFLPQYLIIL

SEQ ID NO: 252507 - protein, 84 aa, Glycine max
  Clone ID: PAT_MRT3847_70040C.1.pep
YYCLYVRLCVRCIRKCAVISSVNMRSVGIMLVFIGAGGCRNSELSFGAALIVLLFLRECLSSLHRMRAAIIVVNYLGGVGRAGS

SEQ ID NO: 252508 - protein, 206 aa, Glycine max
  unsure (1)..(206): unsure at all Xaa locations
  Clone ID: PAT_MRT3847_70041C.1.pep
MGVTPKIAPSMLSSDFANLASEAQRMLHFGADWLHMDIMDGHFVPNLTIGAPVIESLRKHTKGYLDCHLMVTNPLDYVEPLAKAGASGFTFHVETSKDNWEELIQRIKSHGMTPGVALKXMTVEPGFGGQKFMPEMMDKVRILRKKYPSLDIEVDGGLGPSTIDVAASAGANCIVAGSSVFGAPEPVQVISLLRNSVEKAQQTLIQ

SEQ ID NO: 252509 - protein, 228 aa, Glycine max
  Clone ID: PAT_MRT3847_70042C.1.pep
MGVTPKIAPSMLSSDFANLASEAQRMLHFGADWLHMDIMDGHFVPNLTIGAPVIESLRKHTKGYLDCHLMVTNPLDYVEPLAKAGASGFTFHVETSKDNWEELIQRIKSHGMTPGVALKPGTPIEEVYPLVEAGNPVEMVLVMTVEPGFGGQKFMPEMMDKVRILRKKYPSLDIEVDGGLGPSTIDVAASAGANCIVAGSSVFGAPEPVQVISLLRNSVEKAQQTLIQ

SEQ ID NO: 252510 - protein, 89 aa, Glycine max
  unsure (1)..(89): unsure at all Xaa locations
  Clone ID: PAT_MRT3847_70043C.1.pep
LHCGAVLVYITNCLFWCIDPMMMGTSQNIMGWVIELXVMIVGLFDKVVWAPLPXKYAGLSLHRITNASFNRNDKALSPLRFPLPTSTLP

SEQ ID NO: 252511 - protein, 48 aa, Glycine max
  Clone ID: PAT_MRT3847_70044C.1.pep
NQNFDWHFIDYPVDPTAELGIRRGWVLLFSFKKQILQQFQFTKNTPMK

SEQ ID NO: 252512 - protein, 462 aa, Glycine max
  unsure (1)..(462): unsure at all Xaa locations
  Clone ID: PAT_MRT3847_70045C.1.pep
MPELYRGYCDQSSASVSSGKLFTWGDGDKNRLGHGDKDARLEPTCVPSLIEDNFHRIACGHSLTVGLTTSGRVFTMGSTVYGQLGNPQSDGKLPCLVEDKFAGESVEEIACGAYHVAVLTSKNEVFTWGKGANGRLGHGDVEDRKSPTLVEALKDRHVKYIACGSNYSSAICLHKWVSGAEQSQCSACRRVLGFTRKRHNCYNCGLVHCHSCSSRKALRAALAPNPGKPYRVCDSCFVKLNKVAELGNNNRRNAMPRLSGENKDRLDKSDLRLSKAVIHSNMDLIKQLDSKAAKQGKKGDTFSLVHPSQPPSLLQLKDVVLSSALDLRRTVPRPVVAPSGVSSRSVSPFSRRPSPPRSATPIPTTSGLAFSKSISDSLKKTNELLNQEVQKLHAQVESLRQRCELQELELQRSAKNTQEAMALAAEESAKCKAAKEVIKSLTAQLKNLAEKLXXGVYDAEKR

SEQ ID NO: 252513 - protein, 45 aa, Glycine max
  Clone ID: PAT_MRT3847_70046C.1.pep
NKLALKETCFSEKSSICYVTRKYWYWACFNLFNLFARLVASNLIR

SEQ ID NO: 252514 - protein, 76 aa, Glycine max
  Clone ID: PAT_MRT3847_70047C.1.pep
LGSNPLCHPCSYLGKTASVDDLTLEDIVRLLAKSGMSKGRIRHPPKQKRRQEQGKRRKQRNIIKNVTGMFSPTYQQ

SEQ ID NO: 252515 - protein, 74 aa, Glycine max
  Clone ID: PAT_MRT3847_70048C.1.pep
VFGLLSVHVSQCHLKIAYHNAFISKLFVIICSSSSLSRCLSSPLILHVFDFKKKIICPYIRIIGVYQYVKCFWS

SEQ ID NO: 252516 - protein, 49 aa, Glycine max
  Clone ID: PAT_MRT3847_70049C.1.pep
TFLPPYFFKMRNCNSSRNSYPISQVYRIGLIIACIVASKVPARHPARPP

SEQ ID NO: 252517 - protein, 107 aa, Glycine max
  Clone ID: PAT_MRT3847_7004C.1.pep
RGRFLRGPPRSRGWGFPSPPETRLKPLIFVGPKSTLRPGNFLGVGKGTLIPPRTNSIQFRLLRPGKKIWGLGCCLAQIKNKILFDGPPLGFKNFPPLRKKPFGGISF

SEQ ID NO: 252518 - protein, 98 aa, Glycine max
  Clone ID: PAT_MRT3847_70050C.1.pep
RFTVQSSHAILPHQNVFACTGSLLRPCMRPSALLTLVTKCITPLFSTFSRWLTPLSHLPIPRKRSTTLHPAYSFIPQSTCYVIANYLLSAFFFKFNSF

SEQ ID NO: 252519 - protein, 75 aa, Glycine max
  Clone ID: PAT_MRT3847_70051C.1.pep
CHLDPRHYHHLDLYYLYMSPNNVIQVCSPNLYMLYDFDLLFQKLALGVEKDWFRRCRKWSMNFSFRKKFPKIAVC

SEQ ID NO: 252520 - protein, 50 aa, Glycine max
  Clone ID: PAT_MRT3847_70052C.1.pep
FPLREHTYHSIGNGLDNKAYFPLTRGSIITAHKSQACKNHMGTGFERNYY

SEQ ID NO: 252521 - protein, 64 aa, Glycine max
  Clone ID: PAT_MRT3847_70053C.1.pep
ARILLKSGPPSSAECRLICICVVFGSSSSSVGSRDIFMEPLCFPARPALVCYTGALLYFEKLFQ

SEQ ID NO: 252522 - protein, 47 aa, Glycine max
  Clone ID: PAT_MRT3847_70054C.1.pep
TALSGHCSLILTVWGLPPCLYLGHSDVSLMNDRFMPAPRSIHMGPQH

SEQ ID NO: 252523 - protein, 95 aa, Glycine max
  Clone ID: PAT_MRT3847_70055C.1.pep
YGCEKTTEGGVWLWEGSGEFSVRSAYQARFDDGVIHEEDQVFQHVWKLKIPPKAMFFIWRLVVDRLPTCDNLIRRNIILPDIYNDSQTYINLKFS

SEQ ID NO: 252524 - protein, 304 aa, Glycine max
  unsure (1)..(304): unsure at all Xaa locations
  Clone ID: PAT_MRT3847_70056C.1.pep
MPQRHSKNNNDLAFFTYDEKRKLGYGTQKERLGKDSIKPFDACSLCLKSLIDPMSCQKGHLFCKECILQCLLSQKKDIQRKLAAHAAQQKQEKEEEEEKLKLQKAKELDAFDQQNHGAVPQYSDRNYSRDKNGFHGANSVKVTSYEEEALRTMKAFWLPSATPEASIKVDAPSNSTICPEGNEKLKLKTLFPVQFTEDTTEQKKXKALDKTYICPSCKVTLTNTMSLVALSTCGHVFCKKCADRFMAVDKVCLVCNKACKERNLVNLEKGGTGFAGHGDHLEARDFKHLGSGSGLGLVRPAMKT

SEQ ID NO: 252525 - protein, 111 aa, Glycine max
  Clone ID: PAT_MRT3847_70057C.1.pep
QFTEDTSELKKFKALDKTYICPSCKVTLTNTMSLVALSTCGHVFCKKCADRFMAVDKVCLVCNKACKERNLVNLEKGGTGFAGHGDHLEATDFKHLGSGSGLGLVRPAMKT

SEQ ID NO: 252526 - protein, 59 aa, Glycine max
  Clone ID: PAT_MRT3847_70058C.1.pep
YQIVIVCRILGVSPVSTSFVAVPIDIGFLKWILLLLLVSAVVSTIFGPGPQWFFSVSAL

SEQ ID NO: 252527 - protein, 65 aa, Glycine max
  Clone ID: PAT_MRT3847_70059C.1.pep
PARCLRPLIASGLRQKRSSVYQPRSRVRFWIRVTVHRLEHDSCLQDIEVAISHCTRCILRHVTSS

SEQ ID NO: 252528 - protein, 98 aa, Glycine max
  unsure (1)..(98): unsure at all Xaa locations
  Clone ID: PAT_MRT3847_7005C.1.pep
XSXXXXXXXXXXLXXXXXLVFXXXPCFXXXFXSXLSFCXXXXSXSXXXXXXLXXWXXPFLXFLXXXCXXXLXLSXXTXLXXXVXXXXXIXXLRTXXXV

SEQ ID NO: 252529 - protein, 311 aa, Glycine max
  Clone ID: PAT_MRT3847_70060C.1.pep
MVDDGATSAATSRRKPSWRERENNRRRERRRRAIAAKIYSGLRAQGNFNLPKHCDNNEVLKALCAEAGWCVEEDGTTYRKGCKPPLANGAGSSMRNITFSSSQNPSPLSSSFPSPIPSYQVSPSSSSFPSPFRLDVDKDNVSHLIPYIRNASLSLPPLRISNSAPVTPPLSSPTSRNPKPIPTWESIAKESMASFSYPFFAASAPASPTHRHLYTPPTIPECDESDTSTGESGQWVKFQAFAPSSSVLPISPTFNLVKPVVPPGMPDNSIQEMRTSSDEFGVQVKPWVGEKIHEVALDDLELTLGSGKVRS

SEQ ID NO: 252530 - protein, 98 aa, Glycine max
  unsure (1)..(98): unsure at all Xaa locations
  Clone ID: PAT_MRT3847_70061C.1.pep
VIGVIENQASGKIIAAGRVFIEKKFFRKFGKIGQIXEGVVDFSIRGKHLGKKIIKFLPEQGGSMGCYKVIFYCRVENKAFFQKSGFQQKSVQKGMDFP

SEQ ID NO: 252531 - protein, 77 aa, Glycine max
  unsure (1)..(77): unsure at all Xaa locations
  Clone ID: PAT_MRT3847_70062C.1.pep
RALLFXXDXXLXXXRXXPFXXLXWXNXGRXSXXXWRXWXVXKCFWXLXLVXDSSADTKXTXTNQVTSSXNIXKPQXK

SEQ ID NO: 252532 - protein, 64 aa, Glycine max
  Clone ID: PAT_MRT3847_70063C.1.pep
AQYRLFMLFLDQHALFGDVAVGGHMMLEGVGHMKEGGLGPTADLFPQGMPVGTMDKMFGGVLVP

SEQ ID NO: 252533 - protein, 73 aa, Glycine max
  Clone ID: PAT_MRT3847_70064C.1.pep
KKCFLRPRLILATLYVMYRVSSMRRFNKRWVASYQFPSHGCQSAFKYFSVSTMDRLLITIVAILVLFRDMHTW

SEQ ID NO: 252534 - protein, 73 aa, Glycine max
  Clone ID: PAT_MRT3847_70065C.1.pep
HTYSYLVSFLPWLLKHRLGFTLVRTTLTSTATRPSIHLSHDYAYREQSPGHTPAINLAITLEIPIQAQISIHT

SEQ ID NO: 252535 - protein, 330 aa, Glycine max
  Clone ID: PAT_MRT3847_70066C.1.pep
MNQKFIGKPPATVDLDRMPERGSHHRRSHSDTSFRFAANFDDLLLFDPSDFDISGLPSPLPLPSPVSAGLVPMSVDSDESGKQPRPAGASAGGHLRSLSVDSDFFDGLGFGGDERGAGKGGGGERRVGHHRHSNSMDGSSTTSFEADSAMIMDGVKKAMAPDKLAELALMDPKRAKRILANRQSAARSKERKIRYTSELERKVQTLQTEATNLSAQLTMLQRDTTDLTTENKELKLRLEALEQEAQLREDLNEALKEELQRLRAQSTRLGAIGGNPSFGGIFNQLASQLAMQQLSNSAPHQQTQHQPQVGMPPPPSGQNHPNFMDFNQQK

SEQ ID NO: 252536 - protein, 94 aa, Glycine max
  Clone ID: PAT_MRT3847_70067C.1.pep
RLLSKKHSLEKISNEALKKELQRLRVQSACWGAMTGGNPSFGGIFNQLASQLAMQQLSNSVSHQHQTQHQPQVGMPPPPSGQKHPKFMDFNQQK

SEQ ID NO: 252537 - protein, 43 aa, Glycine max
  Clone ID: PAT_MRT3847_70068C.1.pep
CTLQCCRLWYRISMELSTVLHIILLWVDSRRGRKHNLLSLSNK

SEQ ID NO: 252538 - protein, 144 aa, Glycine max
  unsure (1)..(144): unsure at all Xaa locations
  Clone ID: PAT_MRT3847_70069C.1.pep
VVVEVGIRQQNVGSHVAGSNGXLGYASWTPHTVPDVHAKSXAERYFDFLLGEGDSQKGDAHIGELNIEWFVSVTTKTXSGVTPNEWHLVLPCDKISGVLXTIDQRLGWAEHEGYDPFLGGIXNMLAPMKPLDDEILSKVEKDLV

SEQ ID NO: 252539 - protein, 136 aa, Glycine max; identical to SEQ ID NO: 143601
  Clone ID: PAT_MRT3847_7006C.1.pep

SEQ ID NO: 252540 - protein, 105 aa, Glycine max
  Clone ID: PAT_MRT3847_70070C.1.pep
NTTDYNARCPRAVPVQRSRFVPLVRPHIKMSLIAHHISESTLPGHSKHDTQLTVMNQTPTLYPKIEGPDHELKMLISLAIGHDHMVLRPIFVSPANPMVAAAGAP

SEQ ID NO: 252541 - protein, 55 aa, Glycine max
  Clone ID: PAT_MRT3847_70071C.1.pep
FLGPTSPKNLRMLCLMVQKENLKVPEAPKKRMLGPKRVPLLPALVKPLRARLPIL

SEQ ID NO: 252542 - protein, 63 aa, Glycine max
  Clone ID: PAT_MRT3847_70072C.1.pep
AEFQGLILHQTQAEAFRRRRHDGGLRPQQVCPSRHHCFIATPDAARHVFLLAHCLQGNLTKSI

SEQ ID NO: 252543 - protein, 35 aa, Glycine max
  Clone ID: PAT_MRT3847_70073C.1.pep
KLPFSLIYAQEKKNGQVGEFKFLERTINMAKILGG

SEQ ID NO: 252544 - protein, 53 aa, Glycine max
  Clone ID: PAT_MRT3847_70074C.1.pep
IGASNAQHRSPASVWIAAHPPYPFSWVPIPTSCSYRIYFDSYFSSVLVVVRLE

SEQ ID NO: 252545 - protein, 96 aa, Glycine max
  Clone ID: PAT_MRT3847_70075C.1.pep
YAALERYKWIINRVRSYGMKVMLTLFHHSLPPWAGEYGGWKLEKTVDYFMDFTRLVFHLVSVVCMLWPIITLLAVDDSQVSSEISCYPVLAYGCNL

SEQ ID NO: 252546 - protein, 192 aa, Glycine max
  unsure (1)..(192): unsure at all Xaa locations
  Clone ID: PAT_MRT3847_70076C.1.pep
SNICTNGLEFISRGGAVKYXASVFLYFWVFPPPVVSLGFGSYLYIGINGVPLHFDEAFWFFXIVNFKSFPGFPINSEGDFEVYTLAVEKVPKEWKLVPVWEGEPKHPHELGLLRRFPSKWGAAIAPQDPVCRVKIVAHLVIGGTNKNDCVITAPKGPVQRLVDWVGFIRLGPLFRKQFEEMKKKKKKNSGSP

SEQ ID NO: 252547 - protein, 62 aa, Glycine max
  Clone ID: PAT_MRT3847_70077C.1.pep
YARVRKLGIRLEGPRYRELAKNWIPTAGMWGTVGAVGLVWVTDWRLILDWVPYINGKFKKDD

SEQ ID NO: 252548 - protein, 41 aa, Glycine max
  Clone ID: PAT_MRT3847_70078C.1.pep
RHSQHPLQAISSNYGLLILFPQFLKEINAQYIFRSNLRFLG

SEQ ID NO: 252549 - protein, 39 aa, Glycine max
  Clone ID: PAT_MRT3847_70079C.1.pep
LNYAAFERLAVSVLLSTGMVSLACQSSINLWCVESTLIQ

SEQ ID NO: 252550 - protein, 89 aa, Glycine max
  unsure (1)..(89): unsure at all Xaa locations
  Clone ID: PAT_MRT3847_7007C.1.pep
ITXSLASXLXSPXASTISAXXMINAXCVNPKFPXXTKLAPSKPCASDQXXKGRHSXTRXHKLSPATXSXEQYSQPSELXKPHSCSXKAX

SEQ ID NO: 252551 - protein, 65 aa, Glycine max
  Clone ID: PAT_MRT3847_70080C.1.pep
LGDFHMVSSHDVIPKMLYPSANLKGIRGCMGINRDGRTEKMKEIKRHELNSLTTVVHCHIQIREM

SEQ ID NO: 252552 - protein, 82 aa, Glycine max
  Clone ID: PAT_MRT3847_70081C.1.pep
SIFPSFFIYQTHSLLPFSHPTISLPLSSTPTQSTHFINHSNCCPTLSHCYYYSFNSSPLFPNIIPKITSFCFRFQRHIHDKP

SEQ ID NO: 252553 - protein, 133 aa, Glycine max
  unsure (1)..(133): unsure at all Xaa locations
  Clone ID: PAT_MRT3847_70082C.1.pep
PQAFSDLIERTNWRYSEYLNADNKGEVYRDMLSNTXSVLQLTDIDGRXAYDISPNDLDLICILAMNCGTIYADDXKSPNSWCNIIRSSLLPLLSSSGLLFIFHTTQXEPTRPSALAWAMDLLRNKVHIQDAPL

SEQ ID NO: 252554 - protein, 79 aa, Glycine max
  unsure (1)..(79): unsure at all Xaa locations
  Clone ID: PAT_MRT3847_70083C.1.pep
LEVCIRRTTQCDIGLTNFIYWGFWPDAIPGYAIVERTSFEISTETHDELLYDKVKLLXEMGYGCXTDISENLRSESLYR

SEQ ID NO: 252555 - protein, 148 aa, Glycine max
  Clone ID: PAT_MRT3847_70084C.1.pep
FLKLTPYMIGDNILLSTHYSGQISILPSICLSSLISFDFVPWQIKLPSSAHPTRFLRWVYLSSSCIADISETPGILKPKDSSEFDQNLNFLKNKLAPDNLIRVLDRTSDLNSAVRIFKWASRQKSFHHTYNTYFRIILNWVWPGKFWP

SEQ ID NO: 252556 - protein, 76 aa, Glycine max
  Clone ID: PAT_MRT3847_70085C.1.pep
YDYSGHYRRGDSDEIYMNISWTNILIPSHITPCQENSPTVPQLKHRRSRLNAMLILTEDRGAVHTPDLDLHRMIAL

SEQ ID NO: 252557 - protein, 67 aa, Glycine max
  Clone ID: PAT_MRT3847_70086C.1.pep
PRVRAKPSPRKKKKKKKKKKKKKKKKKKKKKKKKKKKKKKKKKKKKKKKKKGGRFKRTQVNDPGQEI

SEQ ID NO: 252558 - protein, 51 aa, Glycine max
  Clone ID: PAT_MRT3847_70087C.1.pep
GHMSLETHIHSHADTTVSICTAITRRIPRKRLTHEGNGFSGSLIMTSLSPR

SEQ ID NO: 252559 - protein, 152 aa, Glycine max
  Clone ID: PAT_MRT3847_70088C.1.pep
MSHGLEMLWANIKDGYLEAVLRGHRSGLLTVADYNNLCQCETLEDIKLNLTASDYGPYLANEPSPLHTTTIVEKCTEKLVDDWNRMRCQADEALGRFMDYCTYGHMIDNVVLIVTGTLHERDVQELLDKCHPLGMFDSIATLAVAHNMRELY

SEQ ID NO: 252560 - protein, 66 aa, Glycine max
  Clone ID: PAT_MRT3847_70089C.1.pep
QMLISGKESEAYRGIDTLEASVDHSKVSCEVGSIKEPNPSYSEGRIHIDHVNGDIHDITPVTFSTS

SEQ ID NO: 252561 - protein, 38 aa, Glycine max
  Clone ID: PAT_MRT3847_7008C.1.pep
FAETAKIHQIKTSRGAGLILKLHCAEKWKTATQTFQPC

SEQ ID NO: 252562 - protein, 175 aa, Glycine max
  unsure (1)..(175): unsure at all Xaa locations
  Clone ID: PAT_MRT3847_70090C.1.pep
CCFNIRFCLIYRRRHKEKKEEATEPEADPERDQRTVFAYQISLKADERDVYEFFSRAGKVRDVRLIMDRNSRRSKGVGYIEFYDVMSVPMAIALSGQPLLGQPVMVKPSEAEKNLVQSTTSVANGLTGLIGPYSGGARKLYXGNLHVSITEADIRRVFEASGQGELVQLPLDESG

SEQ ID NO: 252563 - protein, 64 aa, Glycine max
  Clone ID: PAT_MRT3847_70091C.1.pep
ISAQAVVCTPIAPKSCKQAWKNDACAREYRLMVSINGVKSVSMEPPVEVCPYRWTLRSVAVKPA

SEQ ID NO: 252564 - protein, 141 aa, Glycine max
  Clone ID: PAT_MRT3847_70092C.1.pep
GCDREYRDIERSRDKDYKDRGRVRESKERDRQDRRYKEKKEEATEPEADPERDQRTVFAYQISLKADERDVYEFFSRAVKVRDVRLIMDRNSRRSKGVVYIEYYDVMSVPMAIALSGQPLIDQPEMVKPSEAEKNLVKSTT

SEQ ID NO: 252565 - protein, 269 aa, Glycine max
  unsure (1)..(269): unsure at all Xaa locations
  Clone ID: PAT_MRT3847_70093C.1.pep
MASLHSITFSTKTVLYVFVLASSIAASAGNFYQDFDVTWGDGRAKILNNGDLLTLSLDKASGSGFQSKNEYLFGKIDMQLKLVPGNSAGTVTAYYLSSKGSNWDEIDFEFLGNLSGDPYILHTNVFSQGKGSREQQFYLWFDPTADFHTYSILWNPQRIIFSVDGTPIREFKNMESKGVAFPKEQPMRIYSSLWNADDWATRGGLVKTDWTQAPFTASYRNFNANACPNCGSQXSNNILTWVQKNYIIXNYCTDTKRFPQGLPPECQTS

SEQ ID NO: 252566 - protein, 164 aa, Glycine max
  Clone ID: PAT_MRT3847_70094C.1.pep
AILMQKLDRSGTASSMVGSIGNSGVNNTGLNLPATGNILAAAPVGGLAGGGLQIPTATIPSIDPIGVPSECLMLKNMFDPKDETEPDFDLDIKEDVEAECSKFGALKHIYVDKKSAGFVYLRFEDTQSAISAQQALHGRWFAGKMITASFMVPQSYEDKFPDSR

SEQ ID NO: 252567 - protein, 309 aa, Glycine max
  unsure (1)..(309): unsure at all Xaa locations
  Clone ID: PAT_MRT3847_70095C.1.pep
MASLHSITLSTKTVLYVFVLASSIAASTGNFYQDFDVTWGDGRAKILNNGXLLTLSLDKASGSGFXSKNEYLFGKIDMQLKLVPENSAGTVTAYYLSSKGSNWDEIDFEFLGNLSGDPYILHTNVFSQGKSSREHQFYLWFDPTADFHTYSILWNPQRIILSYINQSMVVHMYVCFSFSVDGTPIREFKNMESKGVAFPKEQPMRIYSSLWNADDWATRGGLVKTDWTQAPFTASYRNFNANACVHSGSSSSSSSCTANSSSSNAWFSQQLDSTSQDRLSWVQKNYMIYNYCTDTKRFPQGLPPECQTS

SEQ ID NO: 252568 - protein, 395 aa, Glycine max
  Clone ID: PAT_MRT3847_70096C.1.pep
RHKEKKEEATEPEADPERDQRTVFAYQISLKADERDVYEFFSRAGKVRDVRLIMDRNSRRSKGVGYIEFYDVMSVPMAIALSGQPLLGQPVMVKPSEAEKNLVQSTTSVANGLTGLIGPYSGGARKLYVGNLHVSITEADIRRVFEAFGQVELVQLPLDESGHCKGFGFVQFARLEDARNAQSLNGQLEIGGRTIKVSAVTDQSGMQEVGGNTGDFDDDEGGGMSLNACSRAMLMQKLDRSGTASSMVGSLGNSVVNNTGLNLPATGNILAAAPVGELAGGGLQIPTATIPSIDTIGVASECLMLKNMFDPKDEIEPDFDLDIKEDVEAECSKLGTLKHIYVDKKSAGFVYLRFEDTQSAISAQQALHGRWFAGKMITASFMVPQSYEDKFPDSR

SEQ ID NO: 252569 - protein, 137 aa, Glycine max
  unsure (1)..(137): unsure at all Xaa locations
  Clone ID: PAT_MRT3847_70097C.1.pep
MFNKNRPLCIGIVGLFHGNFYQDFDITWGDGRAKILNNGDLLTLSLDKASGSGFQSKNEYLFGKIDMQLKLVPGNSAGTVTAYXFSVDGTPIREFKNMESKRVSFPKEQPMRIYSSLWNADDWATRGGIVKTDWSQA

SEQ ID NO: 252570 - protein, 277 aa, Glycine max
  Clone ID: PAT_MRT3847_70098C.1.pep
MFNKNRPLCIGIVGLFHGNFYQDFDITWGDGRAKILNNGDLLTLSLDKASGSGFQSKNEYLFGKIDMQLKLVPGNLRLREDDRRVSSKGSNWDEIDFEFLGNLSGDPYILHTNVFSQGKGSREQQFYLWFDPTADFHTYSILWNPQRIIFSVDGTPIREFKNMESKGVAFPKEQPMRIYSSLWNADDWATRGGIVKTDWSQAPFTASYRNFNANACVHSGASSCTSNSASSNAWFNQQLDSTSQDRLSWVQKNYMIYNYCTDTNRFPQGLPPECQAS

SEQ ID NO: 252571 - protein, 68 aa, Glycine max
  Clone ID: PAT_MRT3847_70099C.1.pep
TAELYELLTDTVYIIDRYPDGEGDDTTCVILKLKSLCLHVDAYGICGLLSAKKKELDRLRAEMPVAMA

SEQ ID NO: 252572 - protein, 58 aa, Glycine max
  Clone ID: PAT_MRT3847_7009C.1.pep
AKRTRARRYPVTSIPHSAGLRDVFLSPVTARTISHDVVIANKLGVASCWKLRPPRRLL

SEQ ID NO: 252573 - protein, 101 aa, Glycine max
  Clone ID: PAT_MRT3847_700C.1.pep
MSVDLNKTASNGHDKMVISQEHQAKITKVRGLIGPLSDKESVYCSDASISRYLRSRNWNVKKAAQMLKQSLKWRKEYKPEEIRWFKRQCMVGMCPFSIKLG

SEQ ID NO: 252574 - protein, 103 aa, Glycine max
  Clone ID: PAT_MRT3847_70100C.1.pep
MPAGCIFAELLLRRPFLQGTSDIDQLGKIFSAFGIPTAPQWPDMVYLPDYVEYQYVLAPPLRSLFPMATDDALDLLSKMFTYDPKTRISVHQALEHRYLPASH

SEQ ID NO: 252575 - protein, 99 aa, Glycine max
  Clone ID: PAT_MRT3847_70101C.1.pep
YVNFIRNLSHAHCIPGADSRAHQANSVVHTRSTRRLVLNHHYSSITSCSPQSPMQSLHLLNLLLDTPARAPANPLLPSLPHSRSSACRFMWRSRHCEDP

SEQ ID NO: 252576 - protein, 50 aa, Glycine max
  Clone ID: PAT_MRT3847_70102C.1.pep
STREMTNPTNGTKAKHYSKYQVKKAQANIKNEKERSDIHKQGPQEWWTYN

SEQ ID NO: 252577 - protein, 111 aa, Glycine max
  Clone ID: PAT_MRT3847_70103C.1.pep
RNTTMSLNCLACGQILQRVNSDRDDECLPPQETKTHKRKVAMQVDRSWSRNMTPPKCARSGPLAKVKTQEHHRRTNSEGNVGPRLVRSSGMRRDWSFEDLAGQQDKGVRCH

SEQ ID NO: 252578 - protein, 47 aa, Glycine max
  Clone ID: PAT_MRT3847_70104C.1.pep
WFIHLKSINMLSLRKYIFFLFFFLIFINNCKITAFFSLNVSCIIIKN

SEQ ID NO: 252579 - protein, 53 aa, Glycine max
  unsure (1)..(53): unsure at all Xaa locations
  Clone ID: PAT_MRT3847_70105C.1.pep
MNMSGGDPMLXIKIGPCLTXRVRSNGSXSMXXFFTLXKEWSLCLCEKGLSWWQ

SEQ ID NO: 252580 - protein, 261 aa, Glycine max
  unsure (1)..(261): unsure at all Xaa locations
  Clone ID: PAT_MRT3847_70106C.1.pep
MLVIDGPPRLPFFPSLTAPGSPFASLLSASAGAVLLGPLVMEFIQSRVEPWVRDQRARLLGLKEKVSWGPLQWRMKWPWASHREHKKRIQEEYQRFRSLCRALKAESVSDLQDLLCCMVLSECVYKRPAAEMIRAVNKFKDDFGGQVVALERVQPSSDHVPHRYVVADAGDTLFASFIGTKQYIDVIADAYILLGAIFHDDAFEESDKHDATDSDGMKTQTDRLYVEFSTIKPKKLKENXKPAVHRGFMARAKGIPALELY

SEQ ID NO: 252581 - protein, 266 aa, Glycine max
  Clone ID: PAT_MRT3847_70107C.1.pep
QCAKSTTVAEFEGHMAHLKTINCQAWEYLNKWPKQAWTKAHFSTIPKVDNICNNTCEVFNFRILQYRCKPIITMLEEIRSYIMRTMAARKVKLSGKPGPLCLVQYKRLEKEFHFANQWTPIWCGDNMGLRYEVHMWGNKVEVNLGEWTCTCGVWQLTGMPCRHAIATITHKGGKPEDMCHEWLSIEAYNKTYQHFIEPVQGPQYWAQTQYTHPVPPHKKVQRGRPKKNRKRSVDEDNVTGHKLKRKLAEFTCGRCGQTNHNIRSCK

SEQ ID NO: 252582 - protein, 96 aa, Glycine max
  Clone ID: PAT_MRT3847_70108C.1.pep
SCAYVDELLVRNRFTVLAWMKVGFGIGHHLPWLYRTLTVFVNDYPYDQNPTGLGGESLDEEDSLLAEQAGTGFFEANSELMIPPKSTLGAARLALH

SEQ ID NO: 252583 - protein, 52 aa, Glycine max
  unsure (1)..(52): unsure at all Xaa locations
  Clone ID: PAT_MRT3847_70109C.1.pep
FFFFWLKRNIXFTYISKGFESDSMFSEYNSKPLLKYHIHIYPAASSSXXECD

SEQ ID NO: 252584 - protein, 80 aa, Glycine max
  Clone ID: PAT_MRT3847_7010C.1.pep
KVGASPAGLFTKKMWVPWGEGNLILKPLPFRGDWPKPTYTDHLRVGPAGTTFIGPRLTSFIIWIFVSAITLVLAFHGGNF

SEQ ID NO: 252585 - protein, 56 aa, Glycine max
  Clone ID: PAT_MRT3847_70110C.1.pep
PFLFFFFFFSIQSVYFYHIHKLISNSSLIDGTLVFNSYQAYFQRALQDPLHITFCS

SEQ ID NO: 252586 - protein, 318 aa, Glycine max
  unsure (1)..(318): unsure at all Xaa locations
  Clone ID: PAT_MRT3847_70111C.1.pep
MSQNHAHSEISFRRIIARISTYPETKPPLHREVHAPCRPRKFDSPAFNRSAHYYRKEEISHDVGNLLSKNYQRAKNSALASIRFGEKGKEVIEVDADSSKDMVSEEDSSVEEVRLCGXDGRQVRSVVTEHKWQEGDLVVTEVNDLDAKDMCGGPQQRSTSSEVSELTNGDLNEANADKMVDILSLTPDHDLSSVQAYKKLLDALGQRTDTLNRLEAEIKVNEKRMSTFELLRPKKELVEEVPLEPFIPLTKEEEVEVAHAFSTNRKKILVSHEKSGIEISGEKFQCLRPGAWLNDEVINVYLELLKERERREPQKFLN

SEQ ID NO: 252587 - protein, 279 aa, Glycine max
  Clone ID: PAT_MRT3847_70112C.1.pep
AVPPAVYEENVSVDKKKTYLMMVGDGINKTIITGNRSVVDGWTTFSSATLAVVGQGFVGVNMTIRNTAGAVKHQAVAPDSGALLSTFYSFCFERYSVTLYVHSLRQFYSECDMNITVDFIFVDAKVVFQNCKMYPRLPMSGQFNAITAQGRTDPNQDTGISIHNCTIRAADDLAASNGVATYLGRPWKEYSRTVYMQTVMDSVIHAKGWREWDGDFALSTLYYAEYSNSGPGSGTDNRVTWPGYHVINATDAANFTVSNFLLGDDWLPQTGVSYTNNLI

SEQ ID NO: 252588 - protein, 154 aa, Glycine max
  unsure (1)..(154): unsure at all Xaa locations
  Clone ID: PAT_MRT3847_70113C.1.pep
PPPPELPFSPEPLKALRPGVPLVLVSPPPLARGPVPPRVGVPRPVCFPPPPVXWPARGFGFQNFSRGPKTSGSRLSVTTPPLSSSRTSSPXVPPPPQKGADQCPGQHCPGPNDEKLGLPPPPVPQGPGERKGLLPPGVRVPVQKNPGRPRFGLF

SEQ ID NO: 252589 - protein, 77 aa, Glycine max
  Clone ID: PAT_MRT3847_70114C.1.pep
KPKVAEMRATYNGDYPLTLSRAFFFPGASLSGEEIIIGRLRFDYVALGGFFIKNSEFVKHQSSASYKYYSLGPSDLE

SEQ ID NO: 252590 - protein, 91 aa, Glycine max
  Clone ID: PAT_MRT3847_70115C.1.pep
RRGAAAPCVTVNYKVLTRPGNKTKDSLAFTVLVRGEGSHKREPLLHPLIMPSSSLLMETTLTPQYQHTQLSFSSHFPALPPLGMNSFKSVA

SEQ ID NO: 252591 - protein, 43 aa, Glycine max
  Clone ID: PAT_MRT3847_70116C.1.pep
DWMSGMHSKGVIGLLVRFNTHSQHLMHVRQNDPFGMTSMRLWS

SEQ ID NO: 252592 - protein, 42 aa, Glycine max
  Clone ID: PAT_MRT3847_70117C.1.pep
PRVRPHIRPRFRKKMLTDAMGHKTRMSKKSQYPSFNIDCYFT

SEQ ID NO: 252593 - protein, 450 aa, Glycine max
  unsure (1)..(450): unsure at all Xaa locations
  Clone ID: PAT_MRT3847_70118C.1.pep
MTHINLHVIKVTVEQENRPKYEGDVLVGADGIWSKVRKQLFGLTEAVYSGYTCYTGIADFVPADIETVGYRVLLAYKHLFVSSDVGAGKMQWYAFHKEPPGGVDEPNGKKERLLRIFEGWCDNAVDLILATEEEAIVRRDIYDRIPTLTWXKGRVTLLGDSVHAMQPNMGQGGCMAIEDSYQLAWELANAWEQSIKSGSPIDIDSSLRSYERERRLRVAIIHGMARMAALMASTYKAYLGVGLGPLEFLTKFRIPHPGRVGGRFFVDIMMPSMLSWVLGGNSDKLEGRPLSCRLTDKANDQLRRWFEDDEALERAINGEWILLPHGDGTGLSKPISLSRNEMKPFIIGSAPMQDNSGSSVTISSPQVSPTHARINYKDGAFFLIDLRSEHGTWIIDNEGKQYRVPPNYPARIRPSDVIQFGSEKVSFRVKVTSSVPRVSENESTLALQGV

SEQ ID NO: 252594 - protein, 412 aa, Glycine max
  unsure (1)..(412): unsure at all Xaa locations
  Clone ID: PAT_MRT3847_70119C.1.pep
EAYLNFFAGRYRVFLGHKQYFVSSDVGAGKMQWYAFHKEPPGGVDEPNGKKERLLRIFEGWCDNAVDLILATEEEAILRRDIYDRIPTLTWGKGRVTLLGDSVHAMQPNMGQGGCMAIEDSYQLAWELENAWEQSIKSGSPIDIDSSLRSYERERRLRVAIIQKNMVKXTSFEIIKCQXFILASLTLQFLTKFRIPHPGRVGGRFFVDIMMPSMLSWVLGGNSDKLEGRPLSCRLTDKVRCSNKVSFVLCCXEDIVYLANDQLRRWFEDDEALEXRAINGEWILLPHGDGTGLSKPISLSRNEMKPFIIGSAPMQDNSGSSVTISSPQVSPTHARINYKDGAFFLIDLRSEHGTWIIDNEGKQYRVPPNYPARIRPSDVIQFGSEKVSFRVKVTSSVPRVSENESTLALQGV

SEQ ID NO: 252595 - protein, 85 aa, Glycine max
  unsure (1)..(85): unsure at all Xaa locations
  Clone ID: PAT_MRT3847_7011C.1.pep
VNKVQRXACTVLCDHGENSALPTLWDSVTDIDVIRGQYSXKYLVLDSTVLKYFLRCGSSLVALQPFVLQMNMIYWGSNVYAELLH

SEQ ID NO: 252596 - protein, 173 aa, Glycine max
  unsure (1)..(173): unsure at all Xaa locations
  Clone ID: PAT_MRT3847_70120C.1.pep
VISYQVLETTLQDNFVPNDTNMHADGEYCQIVTGPNMGGKSCYIRQVALIVIMAQXSSAKLHVLDRIYTRMGASDSIQLGRSTFLEELSETSHILNSCTEHSLVIIDELGRGTSTHDGMAIAHATLHYLLKQKRSMVLFVTHYPKIASLATEFPGSVAAYHVSHLISHDASKN

SEQ ID NO: 252597 - protein, 107 aa, Glycine max
  unsure (1)..(107): unsure at all Xaa locations
  Clone ID: PAT_MRT3847_70121C.1.pep
LGESEKCVEDDESRVPIHIVTAASQLPVDFLEPSPQSKLVIDFDCEGVDLCRKGTLCVMQLAFSDAVYLVDAIEGGEELSIACXLYFQFGIKLNNVVDTQELMKHWV

SEQ ID NO: 252598 - protein, 82 aa, Glycine max
  unsure (1)..(82): unsure at all Xaa locations
  Clone ID: PAT_MRT3847_70122C.1.pep
MAGGFAGPPDANANETWIYHAGIRSAEVVARIVEGPKKALWARDQTQDRYARGLSDGLLKTVRSEGTLXGVNKGLVPLWGQQ

SEQ ID NO: 252599 - protein, 118 aa, Glycine max
  Clone ID: PAT_MRT3847_70123C.1.pep
EEQALVIEEQLRRAAYLNMSEDPSHPSMALNTRFAEVECLAESHQHLSKESMAGNKPANAVLHKVLKQLEELLSDMKADVTRLPATIARIPPVAVRLQMSERNILSRLANRAPEPPPQ

SEQ ID NO: 252600 - protein, 55 aa, Glycine max
  Clone ID: PAT_MRT3847_70124C.1.pep
QHQGSSLGSLFDYSFLVLVSLSLSLSLLLSPIFVFSFRLFLDTFLFCNSSFDFSF

SEQ ID NO: 252601 - protein, 128 aa, Glycine max
  Clone ID: PAT_MRT3847_70125C.1.pep
LGESEKCVEDDESRVPIHIVTAASQLPVDFLEPSPQSKLVIDFDCEGVDLCRKGTLCVMQLAFSDAVYLVDAIEGGEELSIACKLALESNYITKVIHDCKRDSEALYFQFGIKLNNVVDTQELMKHWV

SEQ ID NO: 252602 - protein, 46 aa, Glycine max
  Clone ID: PAT_MRT3847_70126C.1.pep
HTCIVTNLHITISSQPMAPSKSDSAFIITRIHSNKPYHTWRGHCFL

SEQ ID NO: 252603 - protein, 79 aa, Glycine max
  unsure (1)..(79): unsure at all Xaa locations
  Clone ID: PAT_MRT3847_70127C.1.pep
MSIFYLIILSLLLATFLATASSFSSLFFFYLGKCYFHLILSSNYHIHIFIDXPNQLFSILSITLSLLHFYLFNQQLYLI

SEQ ID NO: 252604 - protein, 55 aa, Glycine max
  Clone ID: PAT_MRT3847_70128C.1.pep
HIDWEEGGWLVWQRRQRHQLQGNQVASIFRSYLVNFLILHLSLSEELKYVIFRGI

SEQ ID NO: 252605 - protein, 57 aa, Glycine max
  Clone ID: PAT_MRT3847_70129C.1.pep
MQQKQITKEPQKVRLLTTTSQPHHTHHTKSQANRKIRHRNREPEWKKKTNQRFQDEF

SEQ ID NO: 252606 - protein, 34 aa, Glycine max
  Clone ID: PAT_MRT3847_7012C.1.pep
IYSPFSGLRRPPTCYTFNLTAVYVLLYLEKKEIY

SEQ ID NO: 252607 - protein, 147 aa, Glycine max
  unsure (1)..(147): unsure at all Xaa locations
  Clone ID: PAT_MRT3847_70130C.1.pep
RGQNHHDWYKYMTQGANTIHDINPDFIVIISGLAFDNDLSFLKKKPLDLNFPHKIVYESHIYSVSGDTHRWRVQPVNWICNATIQLLHQQSSFLLSXLWAFQGSYYYRQGKVGLGQSYAVMDDXLESYRDPNFTSKFELLQRMVQDP

SEQ ID NO: 252608 - protein, 51 aa, Glycine max
  Clone ID: PAT_MRT3847_70131C.1.pep
EQVIQFPNNVIVASIYKSYQKLWSNKKQINLTTAARYAFSHRFNKSSHYNQ

SEQ ID NO: 252609 - protein, 44 aa, Glycine max
  Clone ID: PAT_MRT3847_70132C.1.pep
VYLSSSPCSKMTKISENPVISSVRVRSSAIREVSHDPSKVSYNV

SEQ ID NO: 252610 - protein, 166 aa, Glycine max
  Clone ID: PAT_MRT3847_70133C.1.pep
FGSRSDFHFRFGSDKLRHHCRRQWRRSLRLRPRPLLPDQSLSSIPPNQRMTEDQSVVGRRRIYYDQNGGEALICSDSEEETMDDEEEKREFIESEDYILRMTVKEFGLTDIVLESLAQCFSRNISEIKAKYETLSIHDNAGGCSQAGDSEENSQSGNFFLGKGLEA

SEQ ID NO: 252611 - protein, 109 aa, Glycine max
  unsure (1)..(109): unsure at all Xaa locations
  Clone ID: PAT_MRT3847_70134C.1.pep
LGCYTQDFFEGNFPVDSGLPILGNCLYPVSQXPSKAVVVNVTCGRGRGGLPTTAWISSAVNNRSSNITKKIRPALGKGKKIVFLTKVDPFPEALLAVLFGVKNEILSFN

SEQ ID NO: 252612 - protein, 50 aa, Glycine max
  unsure (1)..(50): unsure at all Xaa locations
  Clone ID: PAT_MRT3847_70135C.1.pep
KGSDGHQRILNIQPPEIDQRVPLHIRSVETVXKGEKFLGFNDEPMQEVLL

SEQ ID NO: 252613 - protein, 123 aa, Glycine max
  Clone ID: PAT_MRT3847_70136C.1.pep
GFQLGPGPGEKAFFRFLGGGQETKKFRFRLEGGAKGGQLLWPGISRSLWGSHKKVLNSPKGLFIQRDPAPFFFGGEKPKFKFRIPGWLWRKKLDPLKKCFLKKGPLFLNFAFWQKKKPRICLR

SEQ ID NO: 252614 - protein, 79 aa, Glycine max
  Clone ID: PAT_MRT3847_70137C.1.pep
DSPHRKCRDTWIAFPAFRESRQSFSCALASSHHPAPWENSSFSNTRASDALSHSPRFAPPEVWKYLDRVQLFSNHMTIF

SEQ ID NO: 252615 - protein, 88 aa, Glycine max
  Clone ID: PAT_MRT3847_70138C.1.pep
LLWKSDFNAFEQNTQKAGAGPAAKGTLTRSTDGRTSRNGLALVTKLRGEHRDKRLQGTVQGEVGEKNPTQHHPLPQHPRREEPAPELG

SEQ ID NO: 252616 - protein, 55 aa, Glycine max
  unsure (1)..(55): unsure at all Xaa locations
  Clone ID: PAT_MRT3847_70139C.1.pep
SRTXFPRGPSTSXXXAXTLXLXPSXXFXVSDDXIVXXLRLCFXLXGLLPQCLLST

SEQ ID NO: 252617 - protein, 49 aa, Glycine max
  Clone ID: PAT_MRT3847_7013C.1.pep
NLFFFQSFSFLNLRGIRINSKGTGGFLFLKILKAFRLALNPLLMTLGGC

SEQ ID NO: 252618 - protein, 43 aa, Glycine max
  Clone ID: PAT_MRT3847_70140C.1.pep
AYKIVSVNKILKEKNSDYQKYGIKDRKKVCMEKGEDERQLNLL

SEQ ID NO: 252619 - protein, 336 aa, Glycine max
  Clone ID: PAT_MRT3847_70141C.1.pep
MADEASGDVDLRLGEPKGPKEEPETEEGSAIRVMPVAVHVPAGMSMSMSKALAQAQAQAQPQKRASTKDRHTKVEGRGRRIRMPATCAARIFQLTRELGHKSDGETIRWLLEHAEPAIIAATGTGTVPAIAMSVNGTLKIPTTSPSDQEPGEPPERKKRKRPANSAYVDINGAAVSVSAGLASSIINNNNQNAATTMTTTMAIPQHTAIPLPQGMVPVWAIPSNAVVPAAGAFFVVPQTASFQHQPQFFTIARPISEFVSSMVTPVVQLQPTSINSSTNTNSNASSTAPSSKSPARATVMAPTTTTTTTRQMLRDFSLEIYDKQELQFMSRASSKH

SEQ ID NO: 252620 - protein, 91 aa, Glycine max
  Clone ID: PAT_MRT3847_70142C.1.pep
GSGSTDRFVSLPLKLPHPSVLFLDVIRHKLGTENLRDLSIQYPLIPTSNLILRNDHRFISHLSIGVISVSKHFFSFLMIDKHIFPTNNHSL

SEQ ID NO: 252621 - protein, 98 aa, Glycine max
  Clone ID: PAT_MRT3847_70143C.1.pep
MSLVSSMFGCGVVMAASQAMGIGRRSDGGLTIVCSSRPQKKATAHHMKTRPRKTQAWDRNRKPTVYDPLPPLPPDWTLVIPADASSAPVTPPPPTPSA

SEQ ID NO: 252622 - protein, 47 aa, Glycine max
  Clone ID: PAT_MRT3847_70144C.1.pep
ENLTLPSLPKGSFYVLKKQTYRLIGIPLNNGTGTPRAYNSYHICEEA

SEQ ID NO: 252623 - protein, 66 aa, Glycine max
  Clone ID: PAT_MRT3847_70145C.1.pep
SIYITELQAYFDYERTLEERIYAKIYLILCSPEESHAMIIPATWHWVDILHYGTRTGSMIHTLSAI

SEQ ID NO: 252624 - protein, 54 aa, Glycine max
  Clone ID: PAT_MRT3847_70146C.1.pep
GEVIFFKLKKNIIDQNISYLISKFYYKAPFKNLTLNFNLKASFKKKNPPPIPVI

SEQ ID NO: 252625 - protein, 123 aa, Glycine max
  Clone ID: PAT_MRT3847_70147C.1.pep
RVRAPQGIRTDWVMHEYRLDDKECEDTTGLQDTYALCRVFKKNGICSDIEEQGQCNISLIESSQTIINECETMSPDIPGASSSCLEEEDKDDSWMQFITEDAWYSSNAAMVGSEEVSHVTFTN

SEQ ID NO: 252626 - protein, 77 aa, Glycine max
  Clone ID: PAT_MRT3847_70148C.1.pep
RKKYPEFFPSTKGPIFFSLEPREQIFARLIRRFFFFFPFPINKIWFLGGPPVPIKRLKFYPVQHSIFELSPGSSPKV

SEQ ID NO: 252627 - protein, 52 aa, Glycine max
  unsure (1)..(52): unsure at all Xaa locations
  Clone ID: PAT_MRT3847_70149C.1.pep
SQCCVLMIVCGRDRVNSTSHFTCGHGSPICVLSSCWYSKPNXRGLRYGGAMR

SEQ ID NO: 252628 - protein, 77 aa, Glycine max
  Clone ID: PAT_MRT3847_7014C.1.pep
RHQDRSRFNDITRYVWGRDNSKWRSKRIIREGWKGMLIIWKSGFGTIIVVELVDAYNFWWYLNMVVGKLVVNEYVSS

SEQ ID NO: 252629 - protein, 82 aa, Glycine max
  Clone ID: PAT_MRT3847_70150C.1.pep
WNSARGSVYLGVLEDGTQLAVKKLEGVGQGAKEFKAEVSIVGSIHHVHLVKLSVIVQVEEIFPHMTELTSFCSSHLCNKDIL

SEQ ID NO: 252630 - protein, 504 aa, Glycine max
  unsure (1)..(504): unsure at all Xaa locations
  Clone ID: PAT_MRT3847_70151C.1.pep
MRLMFDTMNETADEAAIGAKKYATKQANISGFQTLYCLVQCTPDLSTQGCRSCLSDAIGLLPWCCEGKQGGRILNPSCNVRYDLYPFYRTNVSAPPASVPPTDSSNSGGGGSEISPGTIVAIVVPITVAVLLFIVGIWLLSKRAAKKRNSAQDPKTETEISARSLXFDFSTIEAATEKFSEANKLGEGGFGEVYKGLLPSGQEVAVKRLSKISGQGGEEFKNEVEIVAKLQHKNLVRLLGFCLEGEEKILVYEFVVNKSLDYILFDPEKQKSLDWTRRYKIVEGIARGIQYLHEDSRLKIIHRDLKASNVLLDGDMNPKISDFGMARIFGVDQTQANTNRIVGTYGYMSPEYAMHGEYSAKSDVYSFGVLILEIISGKRNSSFYETDVAEDLLSYAWKLWKDEAPLELMDQSLRESYTRNEVIRCIHIGLLCVQEDPIDRPTMASVVLMLDSYSVTLQVPNQPAFYINSRTEPNMPKGLKIDQSTTNSTSKSVNDMSVSEVDPR

SEQ ID NO: 252631 - protein, 51 aa, Glycine max
  Clone ID: PAT_MRT3847_70152C.1.pep
VCNLFYNLNQELYTVVCTFSLDTFFDFIGIKFRIVILTRRPMFKNGWPYPI

SEQ ID NO: 252632 - protein, 54 aa, Glycine max
  Clone ID: PAT_MRT3847_70153C.1.pep
PQFFFWLLCLGLSPQFSFGVLVKQIIVQLIKIYIFSPKKKKKKKKKKKKKPPPP

SEQ ID NO: 252633 - protein, 327 aa, Glycine max
  Clone ID: PAT_MRT3847_70154C.1.pep
KFSEANKLGEGGFGEVYKGLLPSGQEVAVKRLSKISGQGGEEFKNDVQIVAKLQHRNLVRLLGFCLEGEEKILVYEFVVNKSLDYILFDPEKQKSLDWTRRYKIVEGIARGIQYLHEDSRLKIIHRDLKASNVLLDGDMNPKISDFGMARIFGVDQTQANTNRIVGTYGYMSPEYAMHGEYSAKSDVYSFGVLVLEILSGKKNSSFYETDVAEDLLSYAWKFWKDETPLELLEHSLRESYTPNEVIRSIHIGLLCVQEDPADRPTMASVVLMLSSYSVTLPVPNQPALFMHSRTESNMLKWVQIDQSITKSTTKSVNEMSLSGDIPR

SEQ ID NO: 252634 - protein, 379 aa, Glycine max
  Clone ID: PAT_MRT3847_70155C.1.pep
VKGLSPWSVAPVDGIPSLNSDLFYDIFRRLDGATLASAACTCAALCSISKEESLWENVCSSMWPSTNREDVKSLISSVGGFRKFYADCFPLIVNKEVVGYQPNNYLEYPDNWTEAEYYGDMNESESISPSDFVSIVDIRFKGKPICSKVLWGIPNANGYDGWFYNCPFRIDILTYADRDDNNDGAVHLSVSDGLPPITSLERERKDGKLWRELREGLQLSWIIVNRKIKQAANLASWSPLGGQRHWPTDKDFVIRFGSVLPARDILPCQVAECILIMKFRVNDEEEVGFQTTLKLTELSMQLEDMEGAHVNGRNSLLILKEALSSRRSKNYGEVLESCHMYSKVQNELKEEKMRNESRLDRLCILSGIAAFMTFWYCVL

SEQ ID NO: 252635 - protein, 125 aa, Glycine max
  Clone ID: PAT_MRT3847_70156C.1.pep
MAKFNVVQKKRRALIAEKKRQLHGDPLTGKLKIKDQPLSLSGKRKRKLFKKWRRDQKDALQNGLVTMEDVQMAVAEGDTKDAPRPSAKIHLKKKTLKLKQLKRKGKNKRKSDVPAADVSADAMVE

SEQ ID NO: 252636 - protein, 125 aa, Glycine max
  Clone ID: PAT_MRT3847_70157C.1.pep
MAKFNVVQKRRRALIAEKKRQLHGDPLTGKLKIKDQPLSLSGKRKRKLFKKWRRDQKDALQNGLVTMEDVQMAVAEAGDTKDTPRPSPKIHLKKKALKLKQLKRKGKNKRKSDVPADVSADAMVE

SEQ ID NO: 252637 - protein, 82 aa, Glycine max
  Clone ID: PAT_MRT3847_70158C.1.pep
SISHLHACTLNYAQTYLLLSPYTSCLTIIYLDSFFLTYQNLFLFLATPIPSTTVIFAPQYYSTNSTITTLFHYYKPIQFSKV

SEQ ID NO: 252638 - protein, 71 aa, Glycine max
  unsure (1)..(71): unsure at all Xaa locations
  Clone ID: PAT_MRT3847_70159C.1.pep
XXNSDRATKRLARMQQQRQHVLRSAATIIYDVGYDSHVTSSPFSHITTSTQHMPAIYMIKERRNLTVQREE

SEQ ID NO: 252639 - protein, 82 aa, Glycine max
  unsure (1)..(82): unsure at all Xaa locations
  Clone ID: PAT_MRT3847_7015C.1.pep
TSVXNSAGAGRKPHSLKGRSLRTRGVFAHKFLNALNASMLLALYPQSAFLTLRQALSFGLSLLTQPLCKGCRLINSSAXRND

SEQ ID NO: 252640 - protein, 57 aa, Glycine max
  Clone ID: PAT_MRT3847_70160C.1.pep
LSDQLLGYVPCSDALVFSGDCVRSKLLPRFCKSYFQPLFRVFGPTFSFKVDILCNLS

SEQ ID NO: 252641 - protein, 81 aa, Glycine max
  Clone ID: PAT_MRT3847_70161C.1.pep
GCLRLSFSHSATVVLNLAGKLPYAGRNLQIFRFEIRIVILFFLFFLPVFESLETAKNKKRICFSSFYPGVRLQGKQCGERR

SEQ ID NO: 252642 - protein, 58 aa, Glycine max
  Clone ID: PAT_MRT3847_70162C.1.pep
VHPDLLLIIRYDSSFIYKWKSLVIIMWFQVRKNGRGLAFTPIILSSWEALFGWRITLY

SEQ ID NO: 252643 - protein, 65 aa, Glycine max
  Clone ID: PAT_MRT3847_70163C.1.pep
DLIYIHNTGRLLPVLWGMPKTFDCINPCLTWAGADYRALPPRYSFRTETCTRTYSPYCETNYSMA

SEQ ID NO: 252644 - protein, 86 aa, Glycine max
  unsure (1)..(86): unsure at all Xaa locations
  Clone ID: PAT_MRT3847_70164C.1.pep
LQEDEVEDHNGQWLNCCHDSCTSPDSPNFACLRRHVSXGALETICGQISKTEQFMSCNXSVPVDALQLIMTRPTQLSELGIGSLVH

SEQ ID NO: 252645 - protein, 67 aa, Glycine max
  Clone ID: PAT_MRT3847_70165C.1.pep
GPNKKQLDLKHLKYWQQWAQIMHLRRPYYIKGGRIHRVHDDTCTIQNEIFMHTETDLFMAKSKVVFP

SEQ ID NO: 252646 - protein, 113 aa, Glycine max
  Clone ID: PAT_MRT3847_70166C.1.pep
FCSVSQSQTATLVYAATAFSERNRLSIHPSSHTSHTSSDTGQTAHIIFFPVYHPKRLKFWQRISESATIPSNAIQRNPFISAFFSYRLHYTRAAFIPHLITHHCIHLNRVFVI

SEQ ID NO: 252647 - protein, 251 aa, Glycine max
  unsure (1)..(251): unsure at all Xaa locations
  Clone ID: PAT_MRT3847_70167C.1.pep
RVNAIEAQDVIRSDRNRLPEVFVKAQMGSQVLRTKICPTRTTXPLWNEDLVFVAAEPFEEQLTITVEDRVHPSRDEVLGKIILPLTLFEKRLDHRPVHSRWFNLEKFGFGMMEADRRNELKFSSRIHLRISLEGGYHVLDESTLYSSDQRPTARQLWKQPIGVLEVGILGAQGLLPMKMRDGRGTTDAYCVAKYGQKWVRTRTILDNFSPKWNEQYTWEIYDPCTVITLGVFDNCHLGGGEKATAARRQQA

SEQ ID NO: 252648 - protein, 99 aa, Glycine max
  unsure (1)..(99): unsure at all Xaa locations
  Clone ID: PAT_MRT3847_70168C.1.pep
LILRHQNTVWXFFLRDIRSTPSXXSVSGVXSFDLIRAFXPRDRHIYILFFKLXVFGHRRNELITSPGNDYDGALRXCLLAFLAHLKGSCRNPIVPPHSS

SEQ ID NO: 252649 - protein, 101 aa, Glycine max
  Clone ID: PAT_MRT3847_70169C.1.pep
RGSWGVIHELRKRERVVQLKPILFLPSGGVVVGLWGPYKRFKNGFGSVFKRSLRHVWKDRMFVHGLREDAFHDDKSGSIPYLMMLHTPSSLYLSNQSQIWI

SEQ ID NO: 252650 - protein, 58 aa, Glycine max
  Clone ID: PAT_MRT3847_7016C.1.pep
SEKLKQLKRSNSTTAEQKIKLQTYSRRLCQDQDLKNYELCSESQKFASRRSVEIATNF

SEQ ID NO: 252651 - protein, 280 aa, Glycine max
  unsure (1)..(280): unsure at all Xaa locations
  Clone ID: PAT_MRT3847_70170C.1.pep
MKGSKRPIHAVTTWVRRQPPKMKAFLAVLSGLAALLFLRIFVHDHDSLFVAAELVHALGISVLIYKLTREKTCAGLSLKSQELFRLFRRXLTAMFLGVRLYCSFVMEYDIHTLLDMATLATTLWVIYMIRFKLKPSYMDDKDNLAIYYVVIPCAVLSLLIHPTTRHHPLNRILWAFCVYLEAVSVLPQLRVMQNTKIVEPFTAHYVFALGVARFLSCAHWVLQVLDTRGRLLTALGYGLWPSMVLLSEIVQTFILADFCYYYVKSLVGGQLVLRLPSGVV

SEQ ID NO: 252652 - protein, 75 aa, Glycine max
  Clone ID: PAT_MRT3847_70171C.1.pep
VFALGVARSQRRVMQNAKVLDTRGHLLTALGYGLWPFMVLLSEIVQTFILADFCYYYVKSLVGGQLVLRLPSGVV

SEQ ID NO: 252653 - protein, 201 aa, Glycine max
  unsure (1)..(201): unsure at all Xaa locations
  Clone ID: PAT_MRT3847_70172C.1.pep
MASSSTTMRFSAASTGAAAALPRRSSVAGFIGVAARSSAKSRLRFIGRNANLSLRMRRMSSFSVVKCVSGSEAKVQDTVAKQQEATTSLSSFTPDASSIASSIKYHAEFTPLFSPENFDLPQAFLATAQSVRDSLIINWNATYDYYEKLNVKQAYYLSMEFLQGRALLNAIGNLELTGPYAEALSKLGHXVSYVAYQEPDA

SEQ ID NO: 252654 - protein, 162 aa, Glycine max
  unsure (1)..(162): unsure at all Xaa locations
  Clone ID: PAT_MRT3847_70173C.1.pep
EFPKLYWSPCATQCINLMLDDIMKLEEVSEIVSLASKITKYIYNHYYSLYLMRKYTGGKDILGPAPTQSATNFIALQSILAHKDALRAMVTSRDWTSSAYAKESKAKXIVEQILDSRFWKKCADIVKLTEPLVHVLQIVDSKDKPAMGFLYQAMYKAKEEMI

SEQ ID NO: 252655 - protein, 221 aa, Glycine max
  unsure (1)..(221): unsure at all Xaa locations
  Clone ID: PAT_MRT3847_70174C.1.pep
MASSATMRFSATSTGAEAALPRRNSVAGFIGVAARSSAKSRLRFIGRNANLSLRRRMSSFPVVKCVSGSEAKAQDPVAKQQEATTSLSSFSPDASSIASSIKYHAEFTPLFSPENFDLPQAFLATAQSVRDALIINWNATYDYYEKLNVKQAYYLSMEFLQGRALLNAIGNLELTGPHAEAXSKLGHKLENVAYXEPDAALGNGGLGRLASCFWNSLATLT

SEQ ID NO: 252656 - protein, 135 aa, Glycine max
  Clone ID: PAT_MRT3847_70175C.1.pep
KNQTPAQSGPPGKFFLQKSSPPEFWVFSQSGYSSRFPGAPLEFPPWSKKPRHFWIKKGPPLKNPVFFVRVHRARLLGLFPGFFQEKVFQGFGPFTKKKGCFLGEPNGFSPRAKTKKTNKKKKKKKKKKKTKKPIP

SEQ ID NO: 252657 - protein, 78 aa, Glycine max
  unsure (1)..(78): unsure at all Xaa locations
  Clone ID: PAT_MRT3847_70176C.1.pep
SSQDLDLVFXIHTNNEAGTPLXSSLPPPDPGPCTLRLALANYADLLNPPRKLCFSFXASLVALAAHTSEPSEADRLTF

SEQ ID NO: 252658 - protein, 75 aa, Glycine max
  unsure (1)..(75): unsure at all Xaa locations
  Clone ID: PAT_MRT3847_70177C.1.pep
XXTXPQRRHPTXQKXSWLTIYXNYLFSQLQNDTVRXXTTRPQXTLATKHGTSPSEIKEXKKVARNGEAETXXPXP

SEQ ID NO: 252659 - protein, 121 aa, Glycine max
  unsure (1)..(121): unsure at all Xaa locations
  Clone ID: PAT_MRT3847_70178C.1.pep
NIKVILLSTAKLELQMLNLFNSFTSNWMNRSNRFHVPMFQGNASSKGGADFFFFSTKQGANIPTGGGQAPPRRKARDGXXNXXSQQDKENTQKPRXXRPXQKEXXKEXAQGGXRXKXXGKR

SEQ ID NO: 252660 - protein, 71 aa, Glycine max
  Clone ID: PAT_MRT3847_70179C.1.pep
IGGPYGPASAAVRERLPSCFRGGWENDETVEQAAVREAVEEAGVRGDIMDFLGHYEFRSKTHQDEFSPEGL

SEQ ID NO: 252661 - protein, 108 aa, Glycine max
  unsure (1)..(108): unsure at all Xaa locations
  Clone ID: PAT_MRT3847_7017C.1.pep
IRLELLPNIVQSSLSVIYNPQAGSVTNASSHDFPALXGLKPTAEIXSIRKNALLVPHYNLNANRMIYALKGRAMIHGALSTKRAGRMRAARGTCADRTTKLCGGCWST

SEQ ID NO: 252662 - protein, 57 aa, Glycine max
  Clone ID: PAT_MRT3847_70180C.1.pep
NSARAAYECVSMLRRNVSRRGGYLGCMANHGYEHGLNSIVCKRCVIEHTMKMSTQST

SEQ ID NO: 252663 - protein, 175 aa, Glycine max
  Clone ID: PAT_MRT3847_70181C.1.pep
MSELVARTGRHQQRYENGYRLVSGCVPFRYKSSNDCGDPSSEKIVEVLMINSPSGPGLLFPKGGWENDETVEQAAVREAVEEAGVRGDIMDFLGHYEFRSKTHQDEFSPEGLCKAAMFALFVKEELELWPEQSTRNRRWLDVSEALGSLRHAWMRDALECFCKWQEDKLANGTKE

SEQ ID NO: 252664 - protein, 44 aa, Glycine max
  Clone ID: PAT_MRT3847_70182C.1.pep
FLPHKKDLVIRQQKEYMPSKMPNLPSINTLCSRAALNGGRYKLE

SEQ ID NO: 252665 - protein, 110 aa, Glycine max
  unsure (1)..(110): unsure at all Xaa locations
  Clone ID: PAT_MRT3847_70183C.1.pep
AAKHTFTASRLSNPPSAPRAPSRRPKXTTDKIEKSDGAKDAGAGGXAPPPPQGPDPGNVAKEDPTKIITDNRQTRGANTAREESLKKEEEAGKLKYVCQSNEGVEEHKVR

SEQ ID NO: 252666 - protein, 505 aa, Glycine max
  unsure (1)..(505): unsure at all Xaa locations
  Clone ID: PAT_MRT3847_70184C.1.pep
MAVVSRSATTYTRHYLIRHEFDRKTKTCVANNSLCYSAKKAPPPQRIVGGRRVIVAASPPTEDAVVATDPLTKQDLVDYLASGCKPKDKWRIGTEHEKXGFEIGSLRPMKYDQIAELLNGIAERFDWDKVMEGDKIIGLKQGKQSISLEPGGQFELSGAPLETLHQTCAEVNSHLYQVKAVAEEMGIGFLGIGFQPKWGIKDIPIMPKGRYDIMRNYMPKVGSLGLDMMFRTCTVQVNLDFSSEADMIKKFRAGLALQPIATALFANSPFKEGKPNGFVSMRSHIWTDTDKDRTGMLPFVFDDSFGFEQYVDYAXLDVPMYYVFRKHRYIDCTGKTFRDFLAGRLPCIPGELPTLNDWENHLTTIFALPAFRVELLNDEADGGPWRRLCALPAFWVGLLYDELSLKSVLDMTADWTPEERQMLRNKVPVTGLKTPFRDGLLKHVAEDVLKLAKDGLERRGFKESGFLNEVAEVVRTGVTPAERLLELYHGKWEQSVDHVFEELLY

SEQ ID NO: 252667 - protein, 200 aa, Glycine max
  unsure (1)..(200): unsure at all Xaa locations
  Clone ID: PAT_MRT3847_70185C.1.pep
MVVFSRSATTTTTTTTTYTRHNLIRQTKTCVGNNNSLCYSATKKAPPQRILGGARGSRVILAASPPTEDALVATDPLTKQDLVDYLASGCKPKDKWRIGTEHEKFGFEFGTLRPMKYDQIAELLNGIAERFDWDKVMEGDKIIGLKQGKQSISLEPGGQFELSGAPLETLHQTCAEVNLHLYXVKAVAEEMGIGFLGIGF

SEQ ID NO: 252668 - protein, 133 aa, Glycine max
  Clone ID: PAT_MRT3847_70186C.1.pep
LAGRLPCIPGELPTLNDWENHLTTIFPEVRLKRYLEMRGADGGPWRRLCALPAFWVGLLYDEVSLQSVLDMTADWTPEERQMLRNKVPVTGLKTPFRDGLLKHVAEDVLKLAKDGLERRGFKESGFLNEVGEV

SEQ ID NO: 252669 - protein, 54 aa, Glycine max
  Clone ID: PAT_MRT3847_70187C.1.pep
SVAIFIAMVIVKEPAVAILVTFLGIIGTPLLSRWGFHQGSTHSGLVIYRWSVDP

SEQ ID NO: 252670 - protein, 190 aa, Glycine max
  Clone ID: PAT_MRT3847_70188C.1.pep
MAQTVLFLSSSTVPGSANYSIDLKKDSLIHLQNQGLRPKISHLFFIPLPSASYSFSSSSSRTFITALAFFKTKTPSKVVKSKPKPKVEDAIFGSSGGFGFTKVNELFVGRVAMLGFSAPSLGEAITGKGIIAQLNLEPAMPIYEALLLFTLLGAIGALVYRGRFLYDLPTELNKTVIPPGKGLSEGQGGN

SEQ ID NO: 252671 - protein, 39 aa, Glycine max
  Clone ID: PAT_MRT3847_70189C.1.pep
LNARKITDLCIVSEVSIIKVFTVFSLLDYKTIPLLLTPP

SEQ ID NO: 252672 - protein, 148 aa, Glycine max
  Clone ID: PAT_MRT3847_7018C.1.pep
MGISRDSWLKRRKTGGKTKPYHKKRKYELGRPAANTKIGPRRIHAVRVRGGNKKYRALRLDVGNFSWGSECCTRKTRIIDVVYNASNCELVRSKTLVKNCIVLIDCTPYRQWYESHYALPLGRKKGAKLTPEEEEILNKKRSKKIQKK

SEQ ID NO: 252673 - protein, 263 aa, Glycine max
  Clone ID: PAT_MRT3847_70190C.1.pep
TQLIKHTRTITYLYLNITSLMEAERDKYKMINFEETELRLGLPLSGNETLKTTCSTGKRVFSDTAVDLKLNLSSTSNSASSDLTKEKNITAAAPPANDPAKPPAKAQVVGWPPVRSFRKNIVQRSNNNEGEKAATSSSNNVNTGAAFVKVSMDGAPYLRKVDLKLYKSYQELLDALAKMFSSFTIDKCGSQGMKDFMNESKLIDLLNGSDYVPTYEDKDADWMLVGDVPWEMFVESCKRLRIMKGSEAIGLAPRAVEKCKNRS

SEQ ID NO: 252674 - protein, 44 aa, Glycine max
  Clone ID: PAT_MRT3847_70191C.1.pep
IVLEVRVTQQSWLCCGITLEKFREVCYWNLSDNKRSSLKMFLAK

SEQ ID NO: 252675 - protein, 116 aa, Glycine max
  Clone ID: PAT_MRT3847_70192C.1.pep
GKKKNILNFFGPLKKPGWGPKHGNFKFFFEKKGPPQGAKNWGGQNAFPFPLCLSNFYNPFGSGLIFFSPQRNNVSGVFFLIPPLFLQTSPFFLVVENKKYPLGVPGAEFPAFRPGA

SEQ ID NO: 252676 - protein, 154 aa, Glycine max
  Clone ID: PAT_MRT3847_70193C.1.pep
DIEEILLTGCKSLTEVYSSGFLNKLNFLCLNQCVELRSLSIPSNILWRSSGLILVSGCDKLETFSMSNRTEVVQLSGCSHHDTFPTGKGSYCQEYPRVWLGGIVEGGLECSHAGPSRVMRTFNPVVNIDRHEVEDKEVEKALNLLYLDILDSTI

SEQ ID NO: 252677 - protein, 128 aa, Glycine max
  Clone ID: PAT_MRT3847_70194C.1.pep
EDIAASYNGSIWKDGESAQGSSDSLCTIEIKDALLPPWIICGICALMASEGRSFEASFVTEPSSIGLNVALKSTCEKSESKAAGSESLQDQGSTFGIPEVVVTSRLCSCSLKGVRYSDESYTASLSPV

SEQ ID NO: 252678 - protein, 248 aa, Glycine max
  unsure (1)..(248): unsure at all Xaa locations
  Clone ID: PAT_MRT3847_70195C.1.pep
FRLDALQRDARNLATDLFKAKTVQDELAEALEGTLRENKSLAQEIKDLTDQLSEGGRSVHELQKIVRRLEVEKEEIHHALDEAEAVLEAVESKVLRAQVEVSQIRSEIEKRIQEKEEEFENTRKNHQRALESMQATLEAESRGKQEALRIKKKLESDINELEIALDHANKAYADAQKTIKKHQEQIRELQLQVEDEQRQRDELREQFLNSEKRNQILQSEKXELMHQAEQAERARRAAEADLIELREA

SEQ ID NO: 252679 - protein, 153 aa, Glycine max
  unsure (1)..(153): unsure at all Xaa locations
  Clone ID: PAT_MRT3847_70196C.1.pep
LSRLSNCDFITRNFKLMSNVLRVAPEDKASIWSQXHYRFCVSILSKCNECLMLXTMLXKMSSTSNXVCCHXPEDARQLXRKALSRIEWLQKADVPTIAQIEEFHSMQKMMNAPESNDNIDLLVSIDILGIQGALXAILNTIVFDDKLAMPNTQ

SEQ ID NO: 252680 - protein, 115 aa, Glycine max
  Clone ID: PAT_MRT3847_70197C.1.pep
FTCLHIFFFFFIFFFFFKTKKNHGRPEFFKPPKEKNVLTPMAKGATPQPLALFIPPPPPIYNALQKLGRPKHWGGQNFLASPIFEGGGPPPPSRKFHQTKIRGCFKIRGGNSWGT

SEQ ID NO: 252681 - protein, 312 aa, Glycine max
  Clone ID: PAT_MRT3847_70198C.1.pep
MDCSSWINTSLDLNINPRRVHEEVPKEVESELFSLGMTKFNVEEESTSDLEEELKRVTAENKKLAEMLSVVCENYNTLRNHLMECMRKNGEKEVSPTSKKRKSESSNNNNSNLMGTNNGNSESSSTDEESCKKPREETIKAKISRVYVRTESSDTSLIVKDGYQWRKYGQKVTRDNPYPRAYFKCSFAPSCPVKKKVQRSVDDQSVLVATYEGEHNHPQFSSQMEATSGSGRSVTLGSVPCTASLSTSTPTLVTLDLTKSQGSNDSKSTKPKGDSPKVPQVLVEQMATSLTTDPNFRAALVAAISGRLLHNN

SEQ ID NO: 252682 - protein, 80 aa, Glycine max
  Clone ID: PAT_MRT3847_70199C.1.pep
GRDFPFPPRGRGVHFFHNLSGGGSSRAIFPPFRVFPWVGSPKTEPPGGWVSVFTFVRVLGHRSLVGVEAAFPLTFLTGSF

SEQ ID NO: 252683 - protein, 40 aa, Glycine max
  Clone ID: PAT_MRT3847_7019C.1.pep
FLFFKGTHTSHIIYGYNKRCGNLRIGRAFSPKGSCHVFHY

SEQ ID NO: 252684 - protein, 69 aa, Glycine max
  Clone ID: PAT_MRT3847_701C.1.pep
MPSTPTTTMTPTTATTPGSARTADNVWRSVLHPGSNSATKTIGAQMFDKPLSNTPTVYDLLYRGETRSR

SEQ ID NO: 252685 - protein, 82 aa, Glycine max
  Clone ID: PAT_MRT3847_70200C.1.pep
SSIEARDPLLARRTQLRKSYTAKQKIQLFRKRTRIANLPKSESFWRRPIFQIAEKIKWGAFVFRFSFFFSTFVERRTEKHGT

SEQ ID NO: 252686 - protein, 425 aa, Glycine max
  unsure (1)..(425): unsure at all Xaa locations
  Clone ID: PAT_MRT3847_70201C.1.pep
HSFPENFSTHQIPNIPPIPIPSQKTQHKHEDSHLCQNWIPIFSVFSFIIGMLXTSRMWDPPEXSNGLLIAQHQRDQQQLQVISGDCATKKMLPKDAVSELQKTHEAIQALDKQVSMLQMELAAARSSRESGISDSNSSTTTSGEGAPKNKAFMVIGLYTDXINTAFSSRKRRDSVRETWMPQGEQLLQLEREKGIVIRFMIGHSATSNSILDRAIDSEEAQHKDFLRLEHLEGYHELSAKTKIFFSTAVSMWDADFYVKVDDDVHVNLGVLATTLARHLSKPRVYIGCMKSGPVLSRKDVKYHEPEFWKFGEEGNKYFRHATGQIYAISKDLATYISINKPILHKYANEDVSLGAWFIGLEVEHIDDRNMCCGTPPDCEWKAQAGNVCVASFDWSCSGICKSVEKIKYVHSKCGEGDEAVWSALF

SEQ ID NO: 252687 - protein, 403 aa, Glycine max
  unsure (1)..(403): unsure at all Xaa locations
  Clone ID: PAT_MRT3847_70202C.1.pep
MKTRTSTKISATWIPIFSVFSFIIGMLVTSRMWDPPESNGLLTAQHQRDQQQLQVISGDCATKKMQPKDAVSELQKTHEAIQHARALDKQVSMLQMELAAARSSRESGISDSNASTTTSGEGAPRKKAFIVIGINTAFSSRKRRDSVRETWMPQGEQLLQLEREKGIVIRFMIGHSATSNSILDRAIDSEEAQHXDFLRLEHAEGYHELSAKTKTFFSTAVAKWDAEFYVKVDDDVHVNLGVLATTLARHRSKPRVYVGCMKSGPVLSRKDVKYHEPEFWKFGEEGNKYFRHATGQIYAISKDLATYISINQPILHKYANEDVSLGAWFIGLEVEHIDDRSMCCGTPPMDSENXDCEWKAQAGNICVASFDWSCSGICKSVEKIKYVHSKCGEGNGAVWSALF

SEQ ID NO: 252688 - protein, 192 aa, Glycine max
  Clone ID: PAT_MRT3847_70203C.1.pep
SSSVSESASMKMKVLCSFGGKILPRPSDGKRLYVGGETRIISIRRDIRFHELMLKTSSIYNETHVIKYQLPGEDLDALVSVSSDEDLRNMMEECHDLQGGRESNKLRIFLLSMNDLDDTQFGIGSMDGDSEIQYVVAVNGMGMGSRNNSILRGESGSTNNLHELNGHNNERETNRVLMDTFGVSSSSLTDNV

SEQ ID NO: 252689 - protein, 63 aa, Glycine max
  Clone ID: PAT_MRT3847_70204C.1.pep
QRVLGLMTPAALSKVAELKVIDQIDTSIIGEFVMIDRHYKDSEVCLSEEDRECIKPSIMNLYT

SEQ ID NO: 252690 - protein, 76 aa, Glycine max
  Clone ID: PAT_MRT3847_70205C.1.pep
SDASTMSPDISDRMSKEIVALAPSSIKIKVVAPPKRKTSVWIGGSILDSHSTFPQMWISKAQYNECGPSIAPRKCF

SEQ ID NO: 252691 - protein, 99 aa, Glycine max
  Clone ID: PAT_MRT3847_70206C.1.pep
SNEATKASISLTRSPRSFQIHRERWPNIRIRPESNNPTRDLTTQTKFQKDRTQIKHDSKIINPKSQKTGRDDKDPEPKSNKKCPLPDPVSGKTDPRRKP

SEQ ID NO: 252692 - protein, 84 aa, Glycine max
  unsure (1)..(84): unsure at all Xaa locations
  Clone ID: PAT_MRT3847_70207C.1.pep
VAECRVLQKLGADAVGMSTVPEVIVARHCGLRVXGFSLITNKVIMDYESLEKANHEEVLAAGKQAAQKLEQFVSILMASIPLPD

SEQ ID NO: 252693 - protein, 207 aa, Glycine max
  Clone ID: PAT_MRT3847_70208C.1.pep
MSSRTLRRRLYHGDVDGKRQEHLETSGLDSLSEPLLADDDYIENKKICTLEDLWDDEKKKAQFHWTFIFSNLIVQWAQWLANLVLGSGSILGRLLSFPSAALNMQNNRMFPPSLSPLQEERLRNLRQRLEVPFDGSKAEHQDALKQLWKLAYPDRELPSLKSDLWKEMGWQGSDPSTDFRGGGFISLENLIFFAMKYPIFPNIHSFL

SEQ ID NO: 252694 - protein, 80 aa, Glycine max
  Clone ID: PAT_MRT3847_70209C.1.pep
GNRYIEKRINVRIEHVRHSRSREEFLVRVKENAARRKAAKAEGKSVQLKRQPALPREARTVSMNDNIPETITPIPYETTI

SEQ ID NO: 252695 - protein, 54 aa, Glycine max
  Clone ID: PAT_MRT3847_7020C.1.pep
MYQFLWGKNTVSKTGDLLFLMGGPPKPILYNTKMGSAPRFLTALDTHEKPLGLW

SEQ ID NO: 252696 - protein, 318 aa, Glycine max
  Clone ID: PAT_MRT3847_70210C.1.pep
MSSRTLRRRLHHGDVDGKRQEHLETSGLDSLSEPLLADDDYIENKKICTLEDLWDDERKKAQFHWTFIFSNLIAQWAQWLANVVLGSGSILGRLLSFPSAALNMQNNRMLPPSLSPLQEDRLRNLRQRLEVPFDGSKAEHQDALKLLWKLAYPDRELPSLKSDLWKEMGWQGSDPSTDFRGGGFISLENLIFFAMKYPDSFQRLLHKQDGTRAEWEYPFAVAGINISFMLAQMLDLQAGLPSSSSGIHFLKLLEEDEMAFDILFCVAFQMMDAQWLAKRATYMEFNDVLKSTRTQLERELALEDISSVKDLPAYNMLR

SEQ ID NO: 252697 - protein, 201 aa, Glycine max
  unsure (1)..(201): unsure at all Xaa locations
  Clone ID: PAT_MRT3847_70211C.1.pep
KIYDNGHEGLIDGTKAEHQDALKPIVGNWLSPDRELPSLKSDLWKEIGWQGXGPLQQDFRGWRIFISLENXIFFSDEVXPDSFQRLLHKQDGTRAEWEYPXFAVAGINISFMLAQMLDLQAGLPSSLSGIRFLKLLEEDEMAFDILFCVAFQMMDAQWLAKRASYMEFNDVLRSTRTQLERELGLEDIFSVKDLPAYNMLR

SEQ ID NO: 252698 - protein, 67 aa, Glycine max
  unsure (1)..(67): unsure at all Xaa locations
  Clone ID: PAT_MRT3847_70212C.1.pep
FLFWCLGDNIKKIIREMVVWFDDEIQELIKCFLXCRVRFKINKPCFSVVRTKKVKLCFEFFFSPPSF

SEQ ID NO: 252699 - protein, 95 aa, Glycine max
  Clone ID: PAT_MRT3847_70213C.1.pep
ELPCCRGNKPLLGQFELLTPPRAGVSFDLGRFSFPGGIQFWGQLPLGEVGGRVVPPPCWLLQAISTSSLGDALEGVLSNIAQCGLESTQMEMKFS

SEQ ID NO: 252700 - protein, 360 aa, Glycine max
  Clone ID: PAT_MRT3847_70214C.1.pep
MGGEELCLMENSGKGKRLWKKVKYQLVEYHSLPGYLRDNEYILGHYRSEWPIRQVLLSAFTIHNETLNVWTHLIGFFIFLALTIYTAMNLNSLQQFPDMLKKADLHKLQSEILTCLPSMPDLHILREGISSWHIKEYLYNCLPHSVKDDLANIIAPLMIRPITRWPFFAFLGGAMFCLLASSICHLLSCHSARMAYIMLRLDYAGIAALISTSFYPPVYYSFMCDPFFCNLYLGFITVLGISTILFSLLPVFQNPEFRTIRASLFFGMGLSGAAPILHKLYLFWGQPEVFHTTGYEILMGVLYGIGALVYATRIPERWMPGKFDIAGHSHQLFHILVVAGAYAHYRAGLVYLRWRDLQGC

SEQ ID NO: 252701 - protein, 251 aa, Glycine max
  Clone ID: PAT_MRT3847_70215C.1.pep
MGGEELCLMENSGKWKRLWKKVKYQLVEYHSLPGYLRDNEYILGHYRSEWPIRQVLLSAFTIHNETLNVWTHLIGFFIFLALTIYTAMNLNSLQQFPDMLKKADLHKLQSEILTCLPSMPDLHILREGISSWHIKEYLYNCLPVRFSSSNHTDACVLHSVKDDLANIIAPLMIRPITRWPFFAFLGGAMFCLLASSICHLLSCHSARMAYIMLRLDYAGIAALISTSFYPPVYYSFMCYPFFCNLYLGFIT

SEQ ID NO: 252702 - protein, 171 aa, Glycine max
  Clone ID: PAT_MRT3847_70216C.1.pep
PTRPPTRPYGCEKTTEGHCTDLKVRFGINSKFFDSAGRPRLSFVVDPSPSLCNVLDACDRVAQKLTVDSGSSSDWRPVVIRKEGFFNYPTIRLHIPTAVVADIAIYATEIYQRESSGTVQRLLFSKFDAAELGSLFMPGTFVDAFLSLDPYDYQQNAGIKLVSKKLIIHGK

SEQ ID NO: 252703 - protein, 72 aa, Glycine max
  Clone ID: PAT_MRT3847_70217C.1.pep
NIILKPHPWQFSTGVRKHQKAIRKRGMLRLINGGSLKSRESEVQYVSGCVRSICSDFRGNVYGYNSSHIMIF

SEQ ID NO: 252704 - protein, 87 aa, Glycine max
  Clone ID: PAT_MRT3847_70218C.1.pep
NTAPPQKYNPQINIPRIYTHPIFVTLKQKIIRLKTFHLLSSIHKSSRYPSRLSLSKPLINICPPPPPKEGGRHTVMTGKPFLGTESV

SEQ ID NO: 252705 - protein, 526 aa, Glycine max
  unsure (1)..(526): unsure at all Xaa locations
  Clone ID: PAT_MRT3847_70219C.1.pep
MGEERSEIVFFDVETSVPTRAGQGFALLEFGAILVCPRTLTELRDYSTLVRPANLSVITPLSERCQGINAETVSASPTSADIAHPVYELLHGSSPHPSPSLSLYCTTSFALDFDCFGRIWASHIIILFDCVRIRDAHAEIHQRPPDPKLTIHSRVLLTLMICRGPRDMNMVALATQILGGGLTHRGFVEVXINMEEFKYCESMLFLXLTSHRYSLQIAGFNNMLLQEAAVMGNLHHSGAYXNINKDSVLSSPATESKDKNRPIISFALSSPKGNVSNIADPNMDQSDPFNLSTLEAEIKRESIKSDVALEEKPMQESTDLASSSSVSQPCSSSIAVLEPDGICIPSIDASLVPSFRGSQRIELLHEGFLFQLHCTDLKVRFGINSKFFDSAGRPRLSFVVDPSPSLCNVLDACDRVAQKLTVDSGSSSDWRPVVIRKEGFFNYPTVRLHIPTAVVADIAIYATEIYQRESSGTVQRLLFSKFDAAELGSLFMPGTFVDAVFSLDPYDYQQNAGIKLVAKKLIIHSK

SEQ ID NO: 252706 - protein, 96 aa, Glycine max
  Clone ID: PAT_MRT3847_7021C.1.pep
QGGVVSVDRNILLCDELCYTDCLFLLPKCLTLNIRYNSLDSHGCHESVLDPTTPSRGEKKAFLTPVGITLSDDPYLKGTLLKENILCYYSIKETLS

SEQ ID NO: 252707 - protein, 131 aa, Glycine max
  Clone ID: PAT_MRT3847_70220C.1.pep
KWYASVVVGVICVYVSGYAWSWGPLGWLVPSEIFPLEIRPAAQSVTVCVNMISTFIVAQFFTTMLCHMKFGLFIFFGCFVVIMTIFIYKLLPETKGIPIEEMTMVWQKHPIWSKFLDSNKSVQISNQDSKC

SEQ ID NO: 252708 - protein, 55 aa, Glycine max
  Clone ID: PAT_MRT3847_70221C.1.pep
DWRVKNATKEDFQRFAKAQLDVFGRATFGWAYWALKNANKYWNLEWMIENGYVKI

SEQ ID NO: 252709 - protein, 68 aa, Glycine max
  Clone ID: PAT_MRT3847_70222C.1.pep
SLSLSVSRSEQRGRQQSIKNREPHKLTVLGRRGVQTLYNFKNSLFLSISVCLCLCLSVPVCLSLTPSI

SEQ ID NO: 252710 - protein, 55 aa, Glycine max
  Clone ID: PAT_MRT3847_70223C.1.pep
EPNPSFNLKAPHRPNPKREKFPPFCPFPLFKNPPLKKGGGVAQNFAPYSFPQGQH

SEQ ID NO: 252711 - protein, 48 aa, Glycine max
  unsure (1)..(48): unsure at all Xaa locations
  Clone ID: PAT_MRT3847_70224C.1.pep
XXCHLXXXPGIWQHHHXSPSXXRSTXRXHVTLSXIGYXLXLXXGKSLX

SEQ ID NO: 252712 - protein, 58 aa, Glycine max
  Clone ID: PAT_MRT3847_70225C.1.pep
QPGSPFLCYYRMRRGIYPSNKPKINYFEKWLFMLPNESFSLLELDCSWQWKQTISVGI

SEQ ID NO: 252713 - protein, 78 aa, Glycine max
  Clone ID: PAT_MRT3847_70226C.1.pep
GVRTQDSEIKLRSAFATLSSSSSMVSIYNKNGFHISNLSVTTHTFNVFTTTFMHRTFSASHPCECIFTPKRVSYLKFE

SEQ ID NO: 252714 - protein, 83 aa, Glycine max
  Clone ID: PAT_MRT3847_70227C.1.pep
FAFRSFIFSVPHTLFQSLQAILIYYIYHLLFLAPHKFCCIRRSFGNILAVLRYSTLPFIYPYYPPPPPKEGGRHTVMTGNLPG

SEQ ID NO: 252715 - protein, 63 aa, Glycine max
  Clone ID: PAT_MRT3847_70228C.1.pep
RIAQYWLYMVKIFEQEGGHRKRDGEGGNRKKKKKGITCQKATLMTNVAIYLEYNKGHTYDHWV

SEQ ID NO: 252716 - protein, 142 aa, Glycine max
  unsure (1)..(142): unsure at all Xaa locations
  Clone ID: PAT_MRT3847_70229C.1.pep
ARAEERMEKGVSVWDDIYRNAGKSEKLKFEVNERDEGELERTGQSLXFYEIYNGAXVWPFLHHGSLYRGLSLSRRAQRQTSDDVDADGRLPLLNDTYYRDILCEMGGMFAIANREDSIHRRPWIGFQSWRAAGWKVALSAIA

SEQ ID NO: 252717 - protein, 44 aa, Glycine max
  Clone ID: PAT_MRT3847_7022C.1.pep
SIRKSRNPKEKNVTLGPTIIHNKHRFSSAHILASFNNTFIHITN

SEQ ID NO: 252718 - protein, 72 aa, Glycine max
  Clone ID: PAT_MRT3847_70230C.1.pep
RPLRRRADSHILLVPSSHNLHSTHHHSHRDHRMVGAKSLLPHTAHIPCEAVGAGGAVRSYGRRSWIMLSSDA

SEQ ID NO: 252719 - protein, 85 aa, Glycine max
  Clone ID: PAT_MRT3847_70231C.1.pep
NFSSNPTDPSSDHDESSPGVSPQNDAVKGSVTPRNELVAFCEKMDGVGLMNYVNDNFQDRARIQAEFPARFDTRRTPARWFWELW

SEQ ID NO: 252720 - protein, 94 aa, Glycine max
  Clone ID: PAT_MRT3847_70232C.1.pep
ILGVLLGFVIYRPPRIPTYLRGGTKKRPNLNTTPAPMFHKTTYFEEAILLLPHPLENNGNFPGPPHFKKKTAHEQNPSKATNKAGNHDTTPGEK

SEQ ID NO: 252721 - protein, 98 aa, Glycine max
  Clone ID: PAT_MRT3847_70233C.1.pep
MAAPPPPPPSTPSFLSPTQRYAAGALFGLALHEAHLNQTNPLPLPASEDSLSEEQRTSSSSGSSSDSVSEDPDLWVHSNSGLLRPGFKFLDIDSAARS

SEQ ID NO: 252722 - protein, 110 aa, Glycine max
  Clone ID: PAT_MRT3847_70234C.1.pep
MVSSMRGGRVLSAYRALLKAARKSFSGDTMMLKESALEVRNKFEENKSVSSQAEIQKLLLEAEEASHFITTMIVQAQLNPDSGTYLVKPGKEHAGATLELPSEEIIRKSG

SEQ ID NO: 252723 - protein, 292 aa, Glycine max
  Clone ID: PAT_MRT3847_70235C.1.pep
MEAMKGARVGVGEDHDMPDGMQCSDHPYRNNPGGICAFCLQDKLGKLVSSSFPLPILPPSSPSFRSHLPPSSLTPAASSAPAPSSSSSSSLPINNPTDYQYYPRRTRLPFLLPKKKKKKPPSATSDNIVLKRSKSTATPRRNHSLVVDDDDDDEFAIGGFSPRKRNGFWSFLYLSSKSSKKLNSKSFRDHNPPRISTINSAPGSSSSVKLKDKRCSGSSLKTDIVVEQDNTNSPNTASASASSFERKVSRSRSVGCGSRSFSGDFFERISTGFGDCTLRRVESQREGKPKGI

SEQ ID NO: 252724 - protein, 284 aa, Glycine max
  Clone ID: PAT_MRT3847_70236C.1.pep
RGEVKMMSGKYTSIDAQQLQGSVPAVPDSRPATVNFADSNLQTFPPSGAQGKITAASGPPRDADDSFSKPVSGSDEPQQGGWFQTFTIAAYKPYFDVDTSDVLERIIDSLFPFRGSFNEKTATNPDLYGPFWICTTLIFVAASIGTFVTYIAHKLKSKEWDYDINLVTWSAGLFYGYVTIVPLCLYVILKYFSAPAGLVQLFCLYGYSLFVFIPALCMSVVPLDIFRWVVAGVAGFMSATFVALNLRAHIKSAGERWFLIVAGIFLLQLALAVVLKLYLFTVSV

SEQ ID NO: 252725 - protein, 171 aa, Glycine max
  Clone ID: PAT_MRT3847_70237C.1.pep
MESQTLYEKEEEALVLKTTKVVEYLVPKMSIELLCKFPDNSAYDFDYSQSTIWSPLLPRPYSPMDLDLITPKKLSYDMGLGAKCSVKKVGSKLRKKFTASAFNLNLDFIKKNSKSKNKKLPSDFSPTPFKGACNPILNKRWARALKAASKQFKKWKVKRRDPIAHVMLPRL

SEQ ID NO: 252726 - protein, 318 aa, Glycine max
  Clone ID: PAT_MRT3847_70238C.1.pep
LEANSLLRHIGSIDSDGLPIGLSSDTIGKKFATQSNARVLKIVVFVHGFQGHHLDLRLVRNQWLLIDPKVEFLMSEANEDKTFGDFREMGHRLAKEVIAFLKSKMDKASRYGSLGDIRLSFVGHSIGNLIIRTAIADSIMEPFLCHLHTYVSVSGPHLGYLYSSNSLFNSGLWFLKKLKGTQCIHQLTFTDDPDFQNTFLYKLCKQKTLEHFRNIILLSSPQDGYVPYHSARIESCQAASRDTSKKGKLFLEMLNACLDQIRANSMQHRVFMRCDVNFDASTQGKNLDSIIGRAAHIEFLDSDIFARFIMWSFPDLFR

SEQ ID NO: 252727 - protein, 161 aa, Glycine max
  unsure (1)..(161): unsure at all Xaa locations
  Clone ID: PAT_MRT3847_70239C.1.pep
CSRLWPRKSWWRVSSPATLTLLLLTCSFLTLILLALHILSTPHANANSSVSRNTHIEAEEDDQVALRMEVIXSWXPTAFLYHTFLTKEECEYLINIATPHMQKSTVADNQSGQSVVHDVRKSTGAFLDRGQDEIVRNIEKRIADVTFIPIENGEPIYVIHY

SEQ ID NO: 252728 - protein, 165 aa, Glycine max
  unsure (1)..(165): unsure at all Xaa locations
  Clone ID: PAT_MRT3847_7023C.1.pep
MDKVSSDCPYPGCFFCVMKEGNPSKRRASVLKFFRELPCQDDDGQVLPISGLWNTAMAHPNDPEFLELGIFECMSALIWKGLKNRRWLSHDQNIYIPYYAAHIIGSYTMNMEEFAESAVHAGVIPLLVELLRGRLTWVEQRGAGRALGHFGTMPXPFPAIAGHGE

SEQ ID NO: 252729 - protein, 59 aa, Glycine max
  Clone ID: PAT_MRT3847_70240C.1.pep
SRLSSIGLKWTRREEKRSVWKQDCDVNSHISLQIGQSLKPDPISDVHIMGNEISLLVDV

SEQ ID NO: 252730 - protein, 264 aa, Glycine max
  unsure (1)..(264): unsure at all Xaa locations
  Clone ID: PAT_MRT3847_70241C.1.pep
MNDLLTDSFVGEASNGQPSRQSDIEMGQVPRSNSDMGMEAFNKQIHEADKQIDKLSVLLQKLKEANEESKAVTKASFMKAIKKRMEKDIDEVGKIAHGVKTKIDAISXRNYTLDQYREVVERRVITVTGTRPDDETIDRLIETGNSEQIFQRAILEAGRGQVVNTVXEIQERHDAVKEFDKKLLDXHPSDRVLALLVDARGDILLYMESQVNNVVDHVQRGTSALQNAKKLQKNSRKWMCIAIIILLIIVAIIVVGVLKPWKSS

SEQ ID NO: 252731 - protein, 102 aa, Glycine max
  Clone ID: PAT_MRT3847_70242C.1.pep
WIRKKKRENESQILGTLKSLPGTPREFRYQELKKATNNFDDKHKLGQGGYGVVYRGTLLPKENLQVAVKMFSRDKMKSTDDFLAELTIINRLRHKNLVRLLD

SEQ ID NO: 252732 - protein, 237 aa, Glycine max
  unsure (1)..(237): unsure at all Xaa locations
  Clone ID: PAT_MRT3847_70243C.1.pep
MNDLLTDSFVGEASNGQPARQSDVEMGQVPRSNSDMGMEAFNKQIHEADKQIDKLSVLLQKLKEANEESKAVTKASAMKAIKKRMEKDIDEVGKIAHGVKTKIEAISRDNLSNRXSPGCEKGTGIDRARMNMTNALTKKFKDLMTEFQTLRQRIQDEYREVVERRVITVTGTRPDDETIDRLIETGNSEQIFQRAILEAGRGQVVNTVEEIXERHDAVKEIEKKLLDLHQIYLDMAV

SEQ ID NO: 252733 - protein, 61 aa, Glycine max
  Clone ID: PAT_MRT3847_70244C.1.pep
RINDQNLHLRNITVYVTQSRTGCRRLRGPRQRLSAEPCYCSWCTRPPYQKTCRYCAGDQRY

SEQ ID NO: 252734 - protein, 56 aa, Glycine max
  Clone ID: PAT_MRT3847_70245C.1.pep
FPFLFWMATRGSSVLGLLPTCFGGSFLYFDVKVWGVSPTWVLPVFPGCFWRLSLQF

SEQ ID NO: 252735 - protein, 198 aa, Glycine max
  unsure (1)..(198): unsure at all Xaa locations
  Clone ID: PAT_MRT3847_70246C.1.pep
MSMETMRSVLKKYFRFSDFRPYQREVIEKIIEKRDCLVVMATGSGKSLXVPPLVVKKTGIVVSPLISLMRDQVMALKQRGIKAEYLGSAQKDFTVHSKAEHGQFDILFMTPEKACTVPSSFWSNLLKAGISLFAVDEAHCISEWGHDFRVEYKHLDKLREVXLDVPFVGSNCTATEKVQYDIXRSLKLIILLRLVQLI

SEQ ID NO: 252736 - protein, 116 aa, Glycine max
  unsure (1)..(116): unsure at all Xaa locations
  Clone ID: PAT_MRT3847_70247C.1.pep
HSSVHACADARATRQAMSPMAKTINSLCGGDDNLLLERTHLLVTGRTRTVCGEKEVRRAVCGTLYGYSLTIILNGIGNEMLIKLCLEKLLRQAXVPGMAGQTLKKWVHLRVCGENN

SEQ ID NO: 252737 - protein, 157 aa, Glycine max
  Clone ID: PAT_MRT3847_70248C.1.pep
VSTCLSRKKRLVAVGLAITSESGQNNGKITLYVVLSCMMAAMGGVIFGYDIGITGGVTSMEPFLKKFFHKVYLKMKLADDKVSNYCVFDSQLLTSFTFSLYVAGLVTSFFASYITKAFGRKPSIVVGGAAFLAGTGLGGAAFNVYMLIVGRLLLGVG

SEQ ID NO: 252738 - protein, 98 aa, Glycine max
  Clone ID: PAT_MRT3847_70249C.1.pep
AASFYLELQISFISEELLKGKVTELTGVCKRLDDESAGKGLVIEQMIERIGLLEKEIRGLKGQLSAYTPTITSLKEDFASLEHTYFLLTNKTFAVGNI

SEQ ID NO: 252739 - protein, 242 aa, Glycine max
  unsure (1)..(242): unsure at all Xaa locations
  Clone ID: PAT_MRT3847_7024C.1.pep
CGGPRGAGGLCALSCEWPGWGRCFLGSSGSLDSSLTLTSXNIESLEVQGCSWNRVPETKHLRNLSISNSAGRVYMVDFGNLSALEYLCMRGIQWCWDAICKMLRLASKVKHLYMKVEFTGDYDALQPFPEIDFVDFFNSHQKLQKFDIHGAMFAALCQKNSLKHVDSGFGIPFLEEVVITVRSPLNAEQKMSTLESLLKYGKNLRRMVIKILEMKSCHSSADDFFDEICRFRYMNHSIVRIE

SEQ ID NO: 252740 - protein, 102 aa, Glycine max
  Clone ID: PAT_MRT3847_70250C.1.pep
LAPLFKWSLLRRTGSLWGPGLVFPGGPLGPPRGAGIFVFQAPPPVFFCCSCPPLPPSWFSFFPIFVFFCLPPPPRRNLKFACPLCWVLFFSPPTELKFEIVV

SEQ ID NO: 252741 - protein, 66 aa, Glycine max
  Clone ID: PAT_MRT3847_70251C.1.pep
IPEYLTPEVPGDYGYEPIGLSKKPEDFSKYQAFELIHARWANAGAAGFIISEAFNKYGTKCGPEVV

SEQ ID NO: 252742 - protein, 93 aa, Glycine max
  Clone ID: PAT_MRT3847_70252C.1.pep
AVPTCVPPESLRMNRQVRLLGGAEVDLSLHSVNPGPRRRCDRQYFCWCSSTPPSPSPLYLGLVLQDEKAWRKLPPPPLIVERELQVGAGDVKE

SEQ ID NO: 252743 - protein, 87 aa, Glycine max
  Clone ID: PAT_MRT3847_70253C.1.pep
TAPQKLINLKPAKSNRANRDILPHPSSLACRLRCDERTISQTGADPPEFGVVFDENESKFGTLGRKFDRFIDFVTAIAKEVAKMKSK

SEQ ID NO: 252744 - protein, 35 aa, Glycine max
  Clone ID: PAT_MRT3847_70254C.1.pep
VSLSHMGSKCCITRSARCKDGPFTSQFQCIRYLKS

SEQ ID NO: 252745 - protein, 88 aa, Glycine max
  Clone ID: PAT_MRT3847_70255C.1.pep
IIQPLCSLSTLCLHHLIPTWPATVRAHTIGITSHQWHISIVPVIYEWAVNINHSPAIDIALSLLCYLPVCPILGLNYSLYLHFILFLS

SEQ ID NO: 252746 - protein, 96 aa, Glycine max
  unsure (1)..(96): unsure at all Xaa locations
  Clone ID: PAT_MRT3847_70256C.1.pep
MHDVHIEYDARTLPTDGKSYEGKHVGESQTNCWXHDAGHIPXLAHDEIMPYSARNCTTSKGEKKTQASCLLXHVAAIKIILDRIASPDCYIIGAML

SEQ ID NO: 252747 - protein, 54 aa, Glycine max
  Clone ID: PAT_MRT3847_70257C.1.pep
MAGKGGKGLLAGKTRAANKDKARVKKRLVSGSPRAGIHFPGGRIHRHLNQRVQA

SEQ ID NO: 252748 - protein, 50 aa, Glycine max
  Clone ID: PAT_MRT3847_70258C.1.pep
ARAHLHLTYFTIIIATHDIRVLVPLNHKQHLSTFTTVLTITYLIFAKTLK

SEQ ID NO: 252749 - protein, 109 aa, Glycine max
  unsure (1)..(109): unsure at all Xaa locations
  Clone ID: PAT_MRT3847_70259C.1.pep
FAFDEEYFDFLPVEADRQEGVSHIVELXPAVYVTLTTXTNSSETAKVWQLYLPCDKIPRVLTTTDXRLERTDHPGYRSFLXGGIQKYAPAMMPVYEKIRPKVVHDMIDE

SEQ ID NO: 252750 - protein, 63 aa, Glycine max
  Clone ID: PAT_MRT3847_7025C.1.pep
NFYCNFREQDCHKVVFTVNPSGAYAGLPRHFWGYHAKSLLSGASTVGSNLSPSPLITIIGRNL

SEQ ID NO: 252751 - protein, 122 aa, Glycine max
  Clone ID: PAT_MRT3847_70260C.1.pep
SSIKDMTNSLLSDWAFHLYLQQEAAASSSNYHHDDDHHDADLKTASSTNIHATLHADLQDYHAIFKTNLNLACTDRAMTRGSLVTSSNPYSGPQAFNYPEVASHATLKGSGPFGNDDPSNLH

SEQ ID NO: 252752 - protein, 182 aa, Glycine max
  Clone ID: PAT_MRT3847_70261C.1.pep
QNAVVSLLTSSPSLLLDPTFLKTFQSHFPEIQSRFPKISPSTLVNLLLCSRKFDLNPLDLPRKLDLLKTRFAFSAATVAKVLEGFPDVLITSETEITNVVDFLVEFGIPGDEIDLVVGLFPRVLGIGVEDRLRPLVREIKELGFTNRELRREISRDPKILGMEIGEFSRCLRLLESLKCREA

SEQ ID NO: 252753 - protein, 56 aa, Glycine max
  Clone ID: PAT_MRT3847_70262C.1.pep
QRIFSQNLEPVKINLKQEVYKCVSIQVVYADLVLCSSISPMSFSPLFSRVYISLCK

SEQ ID NO: 252754 - protein, 129 aa, Glycine max
  Clone ID: PAT_MRT3847_70263C.1.pep
HGTKEKLSEDAAIFHSKLMVPGLAEKTFVDGANAKVKSSKHEKAGDSFNSSLSGCDLNMNVTCEESIRDSPDFEQYFQEGYCKASVDCHESTEVITDVDCSSPCGRGKSDEDGDNDDMLGDVFDFSEEG

SEQ ID NO: 252755 - protein, 58 aa, Glycine max
  Clone ID: PAT_MRT3847_70264C.1.pep
GSWKTKLKLFCLTLAKNFVKRFPISTWRVPEKPGAPLFKMDPYLKGKKSFQPGPGKYL

SEQ ID NO: 252756 - protein, 148 aa, Glycine max
  Clone ID: PAT_MRT3847_70265C.1.pep
PFVRSHLLGPRDDIPSAPSSSQSRHEPLPTRARPTVCSHLSWSAAVPAKPTIMPQDALNSFRCLLDKIPDWIAGLDAILDNATQRQTELMSANQPADFDRTLVRKSSRSSSLRSKRSKHDDMPEQTLLPETINQMATPVPTVLRPQLP

SEQ ID NO: 252757 - protein, 81 aa, Glycine max
  unsure (1)..(81): unsure at all Xaa locations
  Clone ID: PAT_MRT3847_70266C.1.pep
APRSSIKDTQNLFQALXSTYTTTPTNLRIINLYIIYTVFTTFIQIIYITCIKSFPFNSFLSGILSYSKTTILTIYLRIQVN

SEQ ID NO: 252758 - protein, 155 aa, Glycine max
  unsure (1)..(155): unsure at all Xaa locations
  Clone ID: PAT_MRT3847_70267C.1.pep
LRVRPRVRQNGEIEVAEGLMEWNTATKEIEESKTFRGAMGMLLSIGNALNGTDIKAFQLDYLSRASEAKDPAHKYPLTHHLSEYMIDHYSDWTDLYXNLAQCRESTRFDFDSVFDNLKKMDTDCKACCDYVAKISPKDNNSSTKNRVNAFLAEVA

SEQ ID NO: 252759 - protein, 174 aa, Glycine max
  Clone ID: PAT_MRT3847_70268C.1.pep
LQFQTVSKKKKKKMALGVPALPLTYVAHVLALVASILVVLWVLNFRGGLAWDSDNKALIFNAAIISYKALPLKKEVKKLIHLVFHAIALILGIVGIYTAFKYHNESGIANLYSLHSWLGIGVIVLYGIQWIYGFVIFFFPGGTPDIRRASLPWHALFGLFVFVLAVGTAALGFL

SEQ ID NO: 252760 - protein, 94 aa, Glycine max
  Clone ID: PAT_MRT3847_70269C.1.pep
MGCVISREVSSGIVSEVKEEKNLSVGSNKKVDEASTSGADENAVVAQNGEKDKEENGGGDDRVLRPKGERRRSKPNPRLSHPPKHLHGEQVASG

SEQ ID NO: 252761 - protein, 43 aa, Glycine max
  Clone ID: PAT_MRT3847_7026C.1.pep
LHEVHAKKEVLAVFHVALQCTEVDPEVRPRMITVSENLERIAY

SEQ ID NO: 252762 - protein, 231 aa, Glycine max
  unsure (1)..(231): unsure at all Xaa locations
  Clone ID: PAT_MRT3847_70270C.1.pep
STQAPSHKIQVSKKKMALGVPALPLTYVAHVLAVVASVLVVVWVVNFRGGLAWDSDNKSLIFNIHPVLIVIGLLVHGGEAIISYKAFPLKKEVKKLIHLVFHAIALILGIVGIYTAFKFHNESGIANLYSLHSWLGIGVIVLYGIQTLDAXSLPWHALFGLFVFVLAVGTAALGFLEKLTFLENSGLDKYGSEALLVNFTAIITVLFGAFVVLSALADAPPAPAADDYEAI

SEQ ID NO: 252763 - protein, 244 aa, Glycine max
  Clone ID: PAT_MRT3847_70271C.1.pep
LQFQTVSKKKKKKMALGVPALPLTYVAHVLALVASILVVLWVLNFRGGLAWDSDNKALIFNLHPVLIVIGLLVLGGEAIISYKALPLKKEVKKLIHLVFHAIALILGIVGIYTAFKYHNESGIANLYSLHSWLGIGVIVLYGIQWIYGFVIFFFPGGTPDIRRASLPWHALFGLFVFVLAVGTAALGFLEKLTFLENSGLDKYGSEALLVNFTAIITVLFGAFVVLSALADAPPAPAADDYEAI

SEQ ID NO: 252764 - protein, 191 aa, Glycine max
  Clone ID: PAT_MRT3847_70272C.1.pep
FACNVKRKDKKVDLLLAMKLLEKSTDSVPLIFLVTDGAVEDERDICNFVKSYVSSGQSFRTPRIYTFGIGLYCNHYFLQMLAQIGRGHYDSAHDLHSIDFRMQRLFSSASSVMVADITIKSLEGLDSLELFPTHIQDISFESPLILSGRYSGTFPELVKVPGTLANKTNFVVGLKVKEEKDMQLSNVISPS

SEQ ID NO: 252765 - protein, 231 aa, Glycine max
  Clone ID: PAT_MRT3847_70273C.1.pep
MALGVPALPLTYVAHVLAVVASVLVVVWVVNFRGGLAWDSDNKSLIFNIHPVLIVIGLLVHGGEAIISYKAFPLKKEVKKLIHLVFHAIALILGIVGIYTAFKFHNESGIANLYSLHSWLGIGVIVLYGIQWIYGFVIFFFPGGTPDIRRASLPWHALFGLFVFVLAVGTAALGFLEKLTFLENSGLDKYGSEALLVNFTAIITILFGAFVVLSALADAPPAPAADDYEAI

SEQ ID NO: 252766 - protein, 59 aa, Glycine max
  Clone ID: PAT_MRT3847_70274C.1.pep
LREDDRRGFVHLYLEISNAIGLEKFEALHEIVTWPSMVVLNVRYTDRMFMDSLAVEPSI

SEQ ID NO: 252767 - protein, 39 aa, Glycine max
  Clone ID: PAT_MRT3847_70275C.1.pep
MRLMYKSLVHSFVLYVGEHAGLVVISLSVILFSGFGSHQ

SEQ ID NO: 252768 - protein, 64 aa, Glycine max
  unsure (1)..(64): unsure at all Xaa locations
  Clone ID: PAT_MRT3847_70276C.1.pep
XXHXXALXXLXPXTXIALVVIHVAXXHXRLXLFEYGXGKMPRSXAXKGTYPLXLNTXXXSXXPS

SEQ ID NO: 252769 - protein, 90 aa, Glycine max
  Clone ID: PAT_MRT3847_70277C.1.pep
VMASAEGKAPYTANCFTQDFRIPLSSLDHPSSVSKKLVSDWVPNNSINDQILSNSVFVPHNLNSDKLPEMKWWLHVKSDLGDEAIIHVNS

SEQ ID NO: 252770 - protein, 81 aa, Glycine max
  Clone ID: PAT_MRT3847_70278C.1.pep
KELQQRGSQSHITLSSDGNLGLRKQRCQRERSFSSTYRYWLIQIRWKELMGYSFTSFSSCACFCRCVVSVECPMFMLFLYF

SEQ ID NO: 252771 - protein, 120 aa, Glycine max
  unsure (1)..(120): unsure at all Xaa locations
  Clone ID: PAT_MRT3847_70279C.1.pep
VLTGDXITLIQNSPISHSLRAAAWKKGCLTAKTAMPGNAAAKRSDWASLVQVFLTNSNSTEHFDACKWTKSEPHSWELIFPIEARGPNNGSEMRSSEWANQTSWHLSFLIDNPKQSTSFD

SEQ ID NO: 252772 - protein, 104 aa, Glycine max
  Clone ID: PAT_MRT3847_7027C.1.pep
VKRLNTRPFSTHSWLIIESSFISPFDCATKKIRSIGSTPSKKPCSSLRSGDWPTPGWPMIECLIRASLCPHLQFCWPSSANSRNRPSVSKQQRPFYSVVSKALP

SEQ ID NO: 252773 - protein, 75 aa, Glycine max
  Clone ID: PAT_MRT3847_70280C.1.pep
GDSCDSFFTDIIFFFCLMSVGFLGNLRRSNCSCNMLVDDAPVRAATDQGAARWTLTRATPNQHFTETLVMGMCPR

SEQ ID NO: 252774 - protein, 51 aa, Glycine max
  Clone ID: PAT_MRT3847_70281C.1.pep
PRVRPRVREDQLEYLEERRLTDLIKKHSEFISYPICLCIEKTTENEISDDE

SEQ ID NO: 252775 - protein, 53 aa, Glycine max
  Clone ID: PAT_MRT3847_70282C.1.pep
DQQLLSYTIQSPFLINHRPLDNPTRAPSILPQITFSSTIHCNFDRISNHQYLF

SEQ ID NO: 252776 - protein, 48 aa, Glycine max
  Clone ID: PAT_MRT3847_70283C.1.pep
YCHCLTIRACNDLGPVTSGTVRAYNCTLRGVVLPVNAHSHARRSHLSS

SEQ ID NO: 252777 - protein, 87 aa, Glycine max
  Clone ID: PAT_MRT3847_70284C.1.pep
VSALRLEQSQDTGVWKCPVTSFQGCNPKMSLYNLISLYGKVLIKFGQFLQKKLFLCSFSPVYLEICKTGFFFFKVLCDQSSFFPPKV

SEQ ID NO: 252778 - protein, 75 aa, Glycine max
  unsure (1)..(75): unsure at all Xaa locations
  Clone ID: PAT_MRT3847_70285C.1.pep
CCPCSCXRWWPFLFWLRGLLFVVGLXLFVVVPPSAWARLCVAALXSFLVPFVARPFXPRPXCFFSFLLPPLRWSF

SEQ ID NO: 252779 - protein, 246 aa, Glycine max
  unsure (1)..(246): unsure at all Xaa locations
  Clone ID: PAT_MRT3847_70286C.1.pep
MESSEEEDDFPSIESIIPQSKVDSLYQSHTEKGIRKLCCELLDLKDSVENLCGNMHSKFLAFLRISEEAVEVKHELIELQKHISAQGILVQDLMTGVCRELEEWNQSSNDVAEIQQEPELPELLEPLPNERNDQKILFLETIDVLLAEHKFEEALEALDAEEINSAELKGSGNNSSDDVSLYKSSLLERKAMLEDQLAGIAEQPSVSFPELKTALNGLIKLGKGPLAHQLWLKXYQSHLQKRMEAL

SEQ ID NO: 252780 - protein, 277 aa, Glycine max
  Clone ID: PAT_MRT3847_70287C.1.pep
MASSASLINSLTCSSPAPTQHCFAFTRTTATATATSLRQFNSHRPPPLTTRISSSPSTVVCKAVSVKPQTETEGLNIADDVTQLIGKTPMVYLNNIVKGSVANIAAKLEIMEPCCSVKDRIGFSMINDAEQRGAITPGKSILVEPTSGNTGIGLAFIAASRGYKLILTMPASMSLERRVLLKAFGAELVLTDAAKGMNGAVQKAEEILKSTPNSYMLQQFDNPSNPKVHYETTGPEKWEYTRGNTDTLFVGSGTGGTVFGAGHLLKPKMPKPQAIGV

SEQ ID NO: 252781 - protein, 85 aa, Glycine max
  Clone ID: PAT_MRT3847_70288C.1.pep
MSRLGALGGARAGLGLLLGTAAGLGFLCLLYSQRWKRTQRHGRSQSLPNSLDYTQTSDPGRHVMLLRAVPGGAGDASVLPSLPRE

SEQ ID NO: 252782 - protein, 63 aa, Glycine max
  Clone ID: PAT_MRT3847_70289C.1.pep
FYSLKEYDLGHSGDYRLTADIDRERFPGPQGYEPHDHMREPYAWEPHKKPSSHLSKTTHRRSD

SEQ ID NO: 252783 - protein, 78 aa, Glycine max
  Clone ID: PAT_MRT3847_7028C.1.pep
RAIAGFPRKQHKYCSPFYQRKISWGTTGGVTKTTAFQKTHTTKVSCPKNCNRKPLKDVRSPLFRIRQGEHNERFTEVL

SEQ ID NO: 252784 - protein, 88 aa, Glycine max
  unsure (1)..(88): unsure at all Xaa locations
  Clone ID: PAT_MRT3847_70290C.1.pep
PILVAGAQAYFLRGGPKTPRNEFPLLHMNSRQDPDMEYVTWFNKIGVXGFFTTFTGSLRRKQEWPSPHKDDDDKNLQHNMPVLVSSHE

SEQ ID NO: 252785 - protein, 83 aa, Glycine max
  Clone ID: PAT_MRT3847_70291C.1.pep
DDHGSWKPNILNWHLVELAILLCHGSFESFFCFRTGQGEQCKNKFLLPRKPARQPNPIIYRKLRRGSAAGRFPEKQIEYPTNK

SEQ ID NO: 252786 - protein, 72 aa, Glycine max
  unsure (1)..(72): unsure at all Xaa locations
  Clone ID: PAT_MRT3847_70292C.1.pep
LSQKGIKYYYKEXYFRNKSPLLLQMNPVHKKIPFLIHNGKPIFXSLIAVQYIYDVWNDKNPLXLPSDPYPKT

SEQ ID NO: 252787 - protein, 70 aa, Glycine max
  Clone ID: PAT_MRT3847_70293C.1.pep
NKIPNTQSVAKLKAEGIGTVSANRDVGTGARIIALELVDTTGAGDAFIAAVIYAISAKFTPETMLFFAAN

SEQ ID NO: 252788 - protein, 51 aa, Glycine max
  unsure (1)..(51): unsure at all Xaa locations
  Clone ID: PAT_MRT3847_70294C.1.pep
FCSPSFTPISILVNSHIWSPSFINPFINSAKFHYGRNGISISKQNXMXIXX

SEQ ID NO: 252789 - protein, 205 aa, Glycine max
  Clone ID: PAT_MRT3847_70295C.1.pep
MANNTEEQQNNSIRSSIMEWKQMHPLHQIAETPTHKLLLKQWLKEEELINNRIALKETQIDSTRKEITTLYIFFFLFHSTTLMLLFNSSSPSSCHRSWVPSLCSLLFSLGLIWALRYKSDVEAHVEKMLQREKEDKGLLGKCVEELKKKGLEFDLLKEVDALRRAKSLRVENKEVRKWSSRDFVSLFFFSMACFSLALMRVILCT

SEQ ID NO: 252790 - protein, 51 aa, Glycine max
  unsure (1)..(51): unsure at all Xaa locations
  Clone ID: PAT_MRT3847_70296C.1.pep
SRXRHQIFXLRRXXLRPNXIQSQTLXHQXPRLVXETLIRXTXXSXXEXXMW

SEQ ID NO: 252791 - protein, 141 aa, Glycine max
  unsure (1)..(141): unsure at all Xaa locations
  Clone ID: PAT_MRT3847_70297C.1.pep
MRRLFLELYNKKIFSSTPITSFSLFLSYIVVTLLILGFEKDFLCHFYLGLIWISLLFSFLSAPFFRNEKEDGTLELYYLSAYCLPKILLLQLVGHWVIQISCVFCGFPMLQLLYQFGRSGMDWLNILLXGSLVFTLLGGIH

SEQ ID NO: 252792 - protein, 162 aa, Glycine max
  Clone ID: PAT_MRT3847_70298C.1.pep
MMSLCSSKGTCSGDTNAHVSSSTVGNYSSDKKRHNNKFITFLRKTMWEYALACVGVVPCGGNNDLNGQRKTTLEHNKAWLLADSGAELASADPRSVHSSFRFSFCSQVEVESFNMSYSASAAAAATFLMVNLDYESQVKELKWRRIQSLEKSLSPVANTLIR

SEQ ID NO: 252793 - protein, 194 aa, Glycine max
  unsure (1)..(194): unsure at all Xaa locations
  Clone ID: PAT_MRT3847_70299C.1.pep
SSEFGSSESIRNAIIVLQDIGALSNDEKLTQLGEKLGSLPVHPLICRMLFFAILMNCLDPALTLACASDYRDPFTLPMLPEEKKRASAAKYELASLYGGCSDQFAILAAFECWNNAKKMGLEARFCSQYFVSSSTMNMLSGMRRQLQAELIRLGFIHEDVSGYSVNTHDPGVLNAXLVAGSYPRVARFLTNISV

SEQ ID NO: 252794 - protein, 80 aa, Glycine max
  Clone ID: PAT_MRT3847_7029C.1.pep
KFIYKTTTKTTRQGRRKHIYLRVLVITFKGSVYTTLPLHMQRGCFGIQTHDQLVPKAQLYCCARACNQAHYNYEVKKTFR

SEQ ID NO: 252795 - protein, 57 aa, Glycine max
  unsure (1)..(57): unsure at all Xaa locations
  Clone ID: PAT_MRT3847_702C.1.pep
VVVWVGIPPPPPPPPPGGPPGPPPPPPPPPPPXTKKTRPFPDSKFYPIPITKPPIPI

SEQ ID NO: 252796 - protein, 68 aa, Glycine max
  Clone ID: PAT_MRT3847_70300C.1.pep
FSPLKLSLLNIFLMILFSFRLKPYFLHSNVNMLCPCQWFLTTILPKIRSGISIIKQEKSQKRKRLYQM

SEQ ID NO: 252797 - protein, 96 aa, Glycine max
  unsure (1)..(96): unsure at all Xaa locations
  Clone ID: PAT_MRT3847_70301C.1.pep
GKLQSWHAGGQERLRTITSSYYRGAHGIIIVYDVTNEDCXDDGKGWLREIDRYGRDDVDKLWDGNRGDLTGEGVVGCDTVLEGGDQMGVPWMGNGG

SEQ ID NO: 252798 - protein, 42 aa, Glycine max
  Clone ID: PAT_MRT3847_70302C.1.pep
SPTSTIIHPAMFSGRSMSINGATDGEWCRLSRERRTRLLLSA

SEQ ID NO: 252799 - protein, 53 aa, Glycine max
  Clone ID: PAT_MRT3847_70303C.1.pep
NKPNINTKSFTFPTFYIILANPHGPFKNPPGRLSTPPHLLPHFLITKSIISKH

SEQ ID NO: 252800 - protein, 66 aa, Glycine max
  Clone ID: PAT_MRT3847_70304C.1.pep
NAYMFRQYDNMTNTKIHFETTGPEIWEDTMGNVDVLVAGIGTGGTVTGTGRYLKMMNKNIKVGFFI

SEQ ID NO: 252801 - protein, 71 aa, Glycine max
  unsure (1)..(71): unsure at all Xaa locations
  Clone ID: PAT_MRT3847_70305C.1.pep
MGAWFXRFYPGLGPIDILVGRLADPGQSTIFAAFPPKLQGLDHLYKCKPWRYVGKLVSISCKALMSLGGSF

SEQ ID NO: 252802 - protein, 119 aa, Glycine max
  Clone ID: PAT_MRT3847_70306C.1.pep
NVWTCVCVCEGNVRRHYRGVRQRPWGKWASEIRDPKKAARVWLGTFETAEAAALAYDEAALRFKGTKAKLNFPERVHFSKEFGYLTNRPSLFHASATPLSDQHSQVFGGTATNNDAMPR

SEQ ID NO: 252803 - protein, 253 aa, Glycine max
  Clone ID: PAT_MRT3847_70307C.1.pep
METPSSTRRVTRSQALSASNDALITVSRKIEDSEKNASKSKSRVQQQDQSALIDITNDSPIVGLANGVILGTPLAKQRGSRIKNTPGSGEALLRGQVKTLLLKVEEEIELSKFSLESTELVAPMPVNTPQIQNLSGLASVTTPSVVLQQPLIPQVVNHVFDGSESEKSVISRSLLFDFSEKSQLSNASEECFSELSYEEVVQAEREIRSCFIEDDDASMSSIWSMQVNASTHDEDDEEIAEDEEGCYSENVEE

SEQ ID NO: 252804 - protein, 60 aa, Glycine max
  Clone ID: PAT_MRT3847_70308C.1.pep
LIKMSIIDVLTGSLGEIRKHSNFVKGDSCNQASVAPKKVLEDRDGELNLDELTKDMLKQK

SEQ ID NO: 252805 - protein, 47 aa, Glycine max
  Clone ID: PAT_MRT3847_70309C.1.pep
NDSYHPYYLNFINAFKEYYENLKVKYQIDSLFYRNKNIHLIFYDQNV

SEQ ID NO: 252806 - protein, 55 aa, Glycine max
  Clone ID: PAT_MRT3847_7030C.1.pep
ISFTTSYAWQCHNHGAWHLSLKALSLSFSLSYSENSSFFVSLPPLKVLAFAIMNS

SEQ ID NO: 252807 - protein, 103 aa, Glycine max
  Clone ID: PAT_MRT3847_70310C.1.pep
MVSSNGLATTQPLFSFGLISDVQYADIPDGRSFLGVPRYYKHSILVLRRAVKEWNTHQKHKFAINFGDIVDGFCPKDQSLGTIKKLVDEFEMFRGGPVHHIIG

SEQ ID NO: 252808 - protein, 166 aa, Glycine max
  Clone ID: PAT_MRT3847_70311C.1.pep
MVSSNGLATSQPLFSFGLISDVQYADIPDGRSFLGVPRYYRHSLLILQRAVKEWNSHQRHKFVINFGDIVDGFCPKDQSLDTVKKVVDEFEMFTGGPVYHMIGNHCLYNLPRSKLLSLLKIHTLDGRAYYDFSPVPEYRFVVLDAYDISAIGWPQDHPKTLEALEI

SEQ ID NO: 252809 - protein, 320 aa, Glycine max
  Clone ID: PAT_MRT3847_70312C.1.pep
MVSSNGLATTQPLFSFGLISDVQYADIPDGRSFLGVPRYYKHSILMLRRAVKEWNTHQKHMFAINDGDIVDGFCPKDQSLGTIKKVVDEFEMFTGGPVYHMIGNHCLYNLPRSKLLSLLKIHTLDGRAYYDFSPVPEYRFVVLDAYDISAIGWPQDHPKTLEALKILREKNPNEDKNSPTNLEGPERRFVMFNGAVGKEQVEWLDGVLLESTNLKQKVVVCCHLPLHPGAATEETLLWNYDEVMNLIHRYNCVKVCLAGHDHKGGYSIDSHGIHHRVFEAALECPPGTDAFGYIDVYDDRISLVGTDRMKSTEMDFTPPS

SEQ ID NO: 252810 - protein, 68 aa, Glycine max
  Clone ID: PAT_MRT3847_70313C.1.pep
WELVKILIFIIVFSKLIYYQFYLRGIYDSRKHIFLESYRADRSHTHTIIFPIQNDSHKSEISTFHEQL

SEQ ID NO: 252811 - protein, 91 aa, Glycine max
  Clone ID: PAT_MRT3847_70314C.1.pep
LVNQEIHIRRLHSSLNFPCVSPLMMDQLLPPSKPFQYMSRLLGEPLAFDFVMSMHESSTMEPRQKGCIEAVMMIQVIRSPLSPHHHRNCWT

SEQ ID NO: 252812 - protein, 214 aa, Glycine max
  unsure (1)..(214): unsure at all Xaa locations
  Clone ID: PAT_MRT3847_70315C.1.pep
MRDDGRETPEPPAEPQRAGNMLXGCRSVDEFERVNKRDEGAYGGWYRGRGKKSGERVALKKGKMEKEKEGFPLTSLRGINILLSFHHPSIGDVKEVVVGRSLDRIFMGGGYMGHGLKGVMEAMKQPFXQSEVKWLVIQLLEGGKDLHDNWVRYRGLKTSNLVLNNRGELKICDXGLAPQDGSPLKXYTHLGGTLWXRGPELFWGETGLTGIGLG

SEQ ID NO: 252813 - protein, 64 aa, Glycine max
  Clone ID: PAT_MRT3847_70316C.1.pep
SIQISSSIPLTLFQPSQISLAIPQIIHSPSLSKPLFPNQGATGPAEDDSRIIVFRVFFFSLCFC

SEQ ID NO: 252814 - protein, 136 aa, Glycine max
  Clone ID: PAT_MRT3847_70317C.1.pep
MSSSGFPGGGGASEFFAGVGGFGGRSIPATSMNNPNAAASATNNNLHPLYRTQQQQQQQQQQNLPAMFLDPSSQIAQRQTPTLIGKRTLTEFQAYNQTNNNPNHVLSNLLLRTVKPRTTFSHNHMDFSVPEIASQN

SEQ ID NO: 252815 - protein, 117 aa, Glycine max
  Clone ID: PAT_MRT3847_70318C.1.pep
MPLNYSKWDNLELSDDSDIEEHPNVDKKSMIRWKQRDIHEKREQRKLQIAKLHSEIALNAVLRPRIQTVLDGTRSKGLDHYRAVQRRVKESPSDEKPNTGAPNQPTYDMMLAQLLGD

SEQ ID NO: 252816 - protein, 46 aa, Glycine max
  Clone ID: PAT_MRT3847_70319C.1.pep
PWIVEENRSNVAATGLIILLFFNIFLSRTLVKCVYFIDLVPTCTFY

SEQ ID NO: 252817 - protein, 164 aa, Glycine max
  Clone ID: PAT_MRT3847_7031C.1.pep
DFLVAAVIAFDDYWGEEESGYLTNRERRDYADYIERFLAGASYTSLFLTLPPMDEETRSYFRLCFLAMLNYYDFYEALQEEQVANDRFASFINSLEEHDFDREMEINTAQIIPNYRQILGDSKRAGQYLKNSRREDARILADRKIGQLFDMMQEMLRRTKKEEF

SEQ ID NO: 252818 - protein, 54 aa, Glycine max
  unsure (1)..(54): unsure at all Xaa locations
  Clone ID: PAT_MRT3847_70320C.1.pep
LEPNPLEVVSTDRMSALDKNIKNPKPLTDGEAVGTFTRHRRRXRRLHQRPQLFF

SEQ ID NO: 252819 - protein, 79 aa, Glycine max
  Clone ID: PAT_MRT3847_70321C.1.pep
QDHKIRVWKTTDQPGNNNNNPNYYKCVASLPTLHDRFSKLFSSENYVEIRRHKKRTWVHHVDTVSALALSQDGSLLYSA

SEQ ID NO: 252820 - protein, 81 aa, Glycine max
  Clone ID: PAT_MRT3847_70322C.1.pep
SLMLHSFKPSHKYILQVRRTLVAVHSGVAHSSHKTYPLENSVSLVSISELDKSLQRNLSIASRWCPFFIGMHPFIVPYPRK

SEQ ID NO: 252821 - protein, 54 aa, Glycine max
  Clone ID: PAT_MRT3847_70323C.1.pep
TTALRFAIQLLNSVLTDMIKNLLNSLHASLWLWVGPLIPKSRLIILKDTLLSSS

SEQ ID NO: 252822 - protein, 100 aa, Glycine max
  Clone ID: PAT_MRT3847_70324C.1.pep
RGVPRPLIIRLLKEPPGPVIALGPLGIPPQAPHVRGPLGFAPWLAPQAPLVISIVGRVASHETPPPGAIRKKGVFNFGARRPFFYPFSGVKTGGPQKSSF

SEQ ID NO: 252823 - protein, 87 aa, Glycine max
  Clone ID: PAT_MRT3847_70325C.1.pep
VSSLCPLWPFPWWCCPAPVVLVFVPSCCVPVACLPLRFAVVASVFAASLGCLCLRLFLVVPFFLFLLVPVLCFPLPPRSVAFPWGSR

SEQ ID NO: 252824 - protein, 44 aa, Glycine max
  Clone ID: PAT_MRT3847_70326C.1.pep
RFLFFYGEELLTRMYTRILCILFFFSNLYKVRATRNILKNISLM

SEQ ID NO: 252825 - protein, 58 aa, Glycine max
  Clone ID: PAT_MRT3847_70327C.1.pep
LKCILVCIGHILMTEMRLVLYIFIKRCHKKIHLKACSISCFNSSSNGIFAKNNYIAPN

SEQ ID NO: 252826 - protein, 110 aa, Glycine max
  Clone ID: PAT_MRT3847_70328C.1.pep
TISLSSLIAIGMFPTYQYIIYILGNTLSSTVCRCSLGIMFSTMASQCRTVSSSDWKQWQMSLTANGSPSTMLLSSNSSPYPSDQIPTRLCVELAPLSQPGCLPDACSLPA

SEQ ID NO: 252827 - protein, 38 aa, Glycine max
  Clone ID: PAT_MRT3847_70329C.1.pep
VELLPKPSSIRRPKTYASWFQFHLEHLRYDHVRHDDAA

SEQ ID NO: 252828 - protein, 45 aa, Glycine max
  Clone ID: PAT_MRT3847_7032C.1.pep
AGRPFFFFFFLQNSYQGGTGALLTTVYLTLLVPTIPCCCRLRSLK

SEQ ID NO: 252829 - protein, 127 aa, Glycine max
  Clone ID: PAT_MRT3847_70330C.1.pep
VLDWVFADGPPKKAVVYDKNRKQDCHAIVPGAIPDEQYWVEEEQLIYRKFQEERRLREDAIRAKAEKTAQMKAETKERTLKGFLLSQKHIVFTDPLDVQARSTVTIFYNPSNTNLNGKPDVWYICTF

SEQ ID NO: 252830 - protein, 58 aa, Glycine max
  Clone ID: PAT_MRT3847_70331C.1.pep
SLQLQKQILYPTNFSLLPNIPPLNGSINFFNHIFTPIILFFIHFSTTNYIYILSFNPL

SEQ ID NO: 252831 - protein, 143 aa, Glycine max
  Clone ID: PAT_MRT3847_70332C.1.pep
ALLSENPASVDEPPSPIKRHVKWKVARTRAVGNMTSDSAQEIADKIDSLEEQVTQDSFVPHGRQDILNTAIGRPDHGGRVRATGSGVTITQYYGRASRTCSSSSTSISQQQLDEVVARLRENMTGQIREELRPQIKEELRTQV

SEQ ID NO: 252832 - protein, 91 aa, Glycine max
  Clone ID: PAT_MRT3847_70333C.1.pep
PWPYTFFSRVVCFALFFPDFYFPPHRDMWVPSPGSVRIPGWFPRSAYIFPGGFPGPFLVSLKIFLSVFSLLKWFCSPFSFPFFPSKKESNP

SEQ ID NO: 252833 - protein, 70 aa, Glycine max
  Clone ID: PAT_MRT3847_70334C.1.pep
GGPPGWPPRFSAVSSPPFLWVSSLLSPPLPQRIYFSGSYAVFYCAPLSVSLGGPPVSVLFFPGQPLPLWN

SEQ ID NO: 252834 - protein, 68 aa, Glycine max
  Clone ID: PAT_MRT3847_70335C.1.pep
LHHRQSLRGHSTFCLLHRTLMDICANAPGDDEDAYDAHTDSVSGDIQLPRGSPIWYLHDMRGQCCTHM

SEQ ID NO: 252835 - protein, 140 aa, Glycine max
  unsure (1)..(140): unsure at all Xaa locations
  Clone ID: PAT_MRT3847_70336C.1.pep
PTHAHTQTVKHAHNKNGHLSCNMYGNISGPIYPRPYEXXSTDQPTLAIGEETTLDIRGGCTLYATPLDLAEARLLSLEEADHQYWEAEDDGDAACHASGAALRGPVALMQTALVPXRDALDDTDTDAEDDPPTACGLFLP

SEQ ID NO: 252836 - protein, 82 aa, Glycine max
  Clone ID: PAT_MRT3847_70337C.1.pep
LPKLRRRDISKYICYYCALSYTCLTCLVMGHLTLNSISRGTAMIVNIIYNKELRPICKSLPAHKGTCKKITRAQVNGTPNSF

SEQ ID NO: 252837 - protein, 450 aa, Glycine max
  Clone ID: PAT_MRT3847_70338C.1.pep
CFIDGTWSTVEKSCMVVRDVKDVCFHSYFSVMDDLRQKGPPDAKYYEIRLLYIPGALIASVIGIIVDVPVISFVALCKGPYMLFKGWHRLFHDLIGREGPFLETICVPFAGLAILLWPLAVAGAILASMLASFFLGAYAGVVAYQESSFLFGLSYVVAALAIYDEYSNDILDMPEGSCFPRPQFRKEVDTSQRTSNSNSVLRPSSFRKAPSRTSSMKNNNIAELKSFELLDALFKECFHVGEKLVSEGIITRKDIEEAKSGNGSRVISIGLPAYCLVQGLLRSAKLNSVGIMISDETELTITNRPRETFFDWFVNPLLIIKEQIKAENLSASEEDYLCKLVLLGGDAERLKKSSVGPATESDVKRAELEALARRLQGITKSMSRFPTFKRRFNDLVRSLSDDLKEKSGGPIMTRSKSAFARLISLKSFKGTRANGSAQGSQHVARDLENS

SEQ ID NO: 252838 - protein, 209 aa, Glycine max
  Clone ID: PAT_MRT3847_70339C.1.pep
LVLVSEGIITRKDIKEANSGNGSRVISIGLPAYCLVQGLLRSAKLNSVGIMISDETELTTSNRPRETFFDWFVNPLLIIKEQIKAENLSVSEEDYLCKLVLLSGDADRLKNSSVGPAPESEVKRAELEALARRLQGITKSMSRFPTFKRRFDDLVRSLSDDLTEIHGGPIMTRSKSAFARLISLKSFKGTRANGSAQGSQHVAKDLENS

SEQ ID NO: 252839 - protein, 110 aa, Glycine max
  Clone ID: PAT_MRT3847_7033C.1.pep
HLLCASSYPVVWLRLCLPCLTARILHLPRVVVPGSTLATPSVPHFLSLCLACPSPALSALAPPSPPPSPPGRLPLAEFFSTPILVKVPYLPVFLYKFSLTLISTLFTPVG

SEQ ID NO: 252840 - protein, 117 aa, Glycine max
  Clone ID: PAT_MRT3847_70340C.1.pep
MASKSVSAVALILVSLNLLFFSMVSSNPLMTPALVSSIISNKKCPELHVCATILPPHHKPDKGCCPLIAGLIDLEAAVCLCAVLKLDLGGIISIPLDIFVNLLLNMCGRKSTTYTCN

SEQ ID NO: 252841 - protein, 84 aa, Glycine max
  Clone ID: PAT_MRT3847_70341C.1.pep
SLSAIESLMSTYIGIDISLFRMHDSVTYVVLNLEGDLVSILEIKILSPIWFEKTLFFLSSFPVLINNYRNVTLFPVSKDLCKKL

SEQ ID NO: 252842 - protein, 92 aa, Glycine max
  Clone ID: PAT_MRT3847_70342C.1.pep
MALPPFVHVFGAKELEVEGRTFALIPMLQEETGSLDPYLPYTDDKCPLMHLPDIRTNFICKDYAHIFKATIYSDGNKFATWMNRVQLVYGDL

SEQ ID NO: 252843 - protein, 138 aa, Glycine max
  unsure (1)..(138): unsure at all Xaa locations
  Clone ID: PAT_MRT3847_70343C.1.pep
PAPPVSPPPSFEPKPHPVFFLFPKVGPKFFFVLAFRGPPPXRIKGRLAPIGFLAPMPVEVPQGQGVFKQKSHGGPPWFLGAKGGPPPASFFPLFQGVRGGFYSKGFFSPNPKLWKGGFSFLGLIALAFSEFFKGGPLV

SEQ ID NO: 252844 - protein, 143 aa, Glycine max
  unsure (1)..(143): unsure at all Xaa locations
  Clone ID: PAT_MRT3847_70344C.1.pep
YLLRVAAWKKGCLMVKIVMFGNAAVKRSDWALLVQVXFLTNINHYNVFLTPFKWTKSGTTFPGKWIFPNRRLCGPNNGXELWESXMCANQTSWHFEFSLLTILKQSYSFSTFFLGISPRFLKLLGNTFYAKFFLFHKASVTSF

SEQ ID NO: 252845 - protein, 76 aa, Glycine max
  Clone ID: PAT_MRT3847_70345C.1.pep
GSVFIAPCKSRPFPDSRSHLTAFGWSLLFDRVLCLSEEFNQMSLTMIDLGISFMRLVTSPDAFRASIFGWLVTGSF

SEQ ID NO: 252846 - protein, 129 aa, Glycine max
  Clone ID: PAT_MRT3847_70346C.1.pep
NFGFIRNDRAPDFRGVFSPNALSFVGGWTGAWSIKGGFKEAPQRFAPAPLGGFFRAPFGWAFWSPQGGFMEWGPQSMFETGSIKLLILGKTHLEGGGGPKRGFPLARAFPRGVPFLYSGFLSPVWLVGG

SEQ ID NO: 252847 - protein, 70 aa, Glycine max
  unsure (1)..(70): unsure at all Xaa locations
  Clone ID: PAT_MRT3847_70347C.1.pep
SFPFLWRPNGCCCSRDAIQAQHVYVDXPKTFFHMQAVALSKLKVNKDAADMMIEADAHEKKMQREITIGS

SEQ ID NO: 252848 - protein, 59 aa, Glycine max
  Clone ID: PAT_MRT3847_70348C.1.pep
RSSCQWQRNHMFYKSFVFPFFLIFFFRFSTCYFQLCLCTLLTGFFSSPFIKGDENLTKC

SEQ ID NO: 252849 - protein, 76 aa, Glycine max
  unsure (1)..(76): unsure at all Xaa locations
  Clone ID: PAT_MRT3847_70349C.1.pep
TLAMTFEPHIREAMTNISEKHQALLRRGTMHCEIEEVSKECLSNPVQVNVCNXNSHTPQISHTLAKISEKEKIDRI

SEQ ID NO: 252850 - protein, 62 aa, Glycine max
  Clone ID: PAT_MRT3847_7034C.1.pep
MAFKLCDTCRWDTDTLFWRPDAVFLWGACDFKVHAANKLASRHPHVLLCEVCKQAPTHVIWK

SEQ ID NO: 252851 - protein, 79 aa, Glycine max
  unsure (1)..(79): unsure at all Xaa locations
  Clone ID: PAT_MRT3847_70350C.1.pep
SRXXSFCXPFXXXCVLPLPXXPXPLWSVSPPXXLXCGCXACVPAXXAPAXIKXXVGXAFFLVPWLLXXVLGAFLWXVRW

SEQ ID NO: 252852 - protein, 40 aa, Glycine max
  Clone ID: PAT_MRT3847_70351C.1.pep
FRFLLFYGKPKQVHLGLNFFFIRGALWLFNNSTSVMLEAT

SEQ ID NO: 252853 - protein, 86 aa, Glycine max
  Clone ID: PAT_MRT3847_70352C.1.pep
ARVRSFIMATQPLPFSSASSIVPSSNNPHNDELRFLSDPKFERHGEILLLVFVLLFSVFLLVIAMLMYLKRIRSNLQQNEGSKLEA

SEQ ID NO: 252854 - protein, 44 aa, Glycine max
  Clone ID: PAT_MRT3847_70353C.1.pep
PSRYRGLQNKLWITEKNIEGDLIWLTRSPVYLIRETFDLYIKTR

SEQ ID NO: 252855 - protein, 80 aa, Glycine max
  Clone ID: PAT_MRT3847_70354C.1.pep
RLIFHPQYREVSELNRNALTFLSVGVHYILSPHLYGLVVPGSPSPWSSTYDNLLRVVHVLTFHISPQCQYQGSTRYHVFA

SEQ ID NO: 252856 - protein, 142 aa, Glycine max
  Clone ID: PAT_MRT3847_70355C.1.pep
MGYYLVFVGVFLWCAMASHINGLAMMDGKLMSSSANNYDYGDALGKAILFFEGQRSGNLPATQRVKWRGDSALSDGKLQNVDLIGGYYDAGDNVKFGWPMAFTTSLLSWAAVEYESEISSVNQLGYLHSAIHWGADFILRAH

SEQ ID NO: 252857 - protein, 41 aa, Glycine max
  Clone ID: PAT_MRT3847_70356C.1.pep
LALKRGGHRFLNPAVYGPFGRVTPDFPWEVVSPLKFLNPQA

SEQ ID NO: 252858 - protein, 83 aa, Glycine max
  Clone ID: PAT_MRT3847_70357C.1.pep
DNTDSHKELQEKSSWDHHQLCMRSYLLLQLPTSTQGWSCLTSITILLGLLYRHQISLQQLHPPAPHPHLKLKLNHNHDLLASP

SEQ ID NO: 252859 - protein, 44 aa, Glycine max
  Clone ID: PAT_MRT3847_70358C.1.pep
DLKKHSANSQMASSDSNMLLKNDAVYEMLPLGVAHADSVDEDPD

SEQ ID NO: 252860 - protein, 57 aa, Glycine max
  unsure (1)..(57): unsure at all Xaa locations
  Clone ID: PAT_MRT3847_70359C.1.pep
SDXXXXLLLVXTAWQXXXGXFSVFAPKMXDDXSAICXANCPTGTSRFVMXRLRXSCX

SEQ ID NO: 252861 - protein, 102 aa, Glycine max
  Clone ID: PAT_MRT3847_7035C.1.pep
EITRNILFKMKVLLNGQVTNMVGWQCHAYDMFPLLMNTVYCARTPEVKCASCRLAVESHNIFGLYTIPEECVVATNVYIHFEQYISYSITVNQQAYSYARYL

SEQ ID NO: 252862 - protein, 31 aa, Glycine max
  Clone ID: PAT_MRT3847_70360C.1.pep
MRLTDEQISEFKEAFSLRDKDGDGCIGKKDL

SEQ ID NO: 252863 - protein, 74 aa, Glycine max
  Clone ID: PAT_MRT3847_70361C.1.pep
ISCSSNAHNSKSRQEIKNLPSETNLMNYPNSTDHTNETKTQNYANGHPENYKKHRTLIHFTSLTPQKHGIWQWE

SEQ ID NO: 252864 - protein, 120 aa, Glycine max
  Clone ID: PAT_MRT3847_70362C.1.pep
YCFFFFLFFSWCSEDTGKRRSQRIKDFKDVEKALHIPFQDRIITCRPNWKLVLVIIVLGTLVTIFHPPAVYNTDHLSNSLSRYVCFSFSMLSHVASLYFSFGSFLLSYREIIIVQQIVLF

SEQ ID NO: 252865 - protein, 69 aa, Glycine max
  Clone ID: PAT_MRT3847_70363C.1.pep
MESIKQGANYIAETVQQATAGASKETNKEVAKDSNASIGTRATAAKDALSDKANEKSHEGKAEVHKEAA

SEQ ID NO: 252866 - protein, 147 aa, Glycine max
  Clone ID: PAT_MRT3847_70364C.1.pep
GFLRINSTQSIPWTKTNRTVDARDDVVDTKVYLDGNANQRNDLIVLECKKNSTDHDEETNVVTVAHYFADSRGRAFNIDDELGIGLSVVAKVRVSNGQLNITVEGPEHPPASALFCMFDQVNKTGFWKPPMCPHCAQPRFFAFAPAA

SEQ ID NO: 252867 - protein, 49 aa, Glycine max
  Clone ID: PAT_MRT3847_70365C.1.pep
KRGQTREPKERSGPARETRPNRRTPKGNQAPQGEQEHEREGNLVTAKVS

SEQ ID NO: 252868 - protein, 226 aa, Glycine max
  Clone ID: PAT_MRT3847_70366C.1.pep
RSGTIQLWDRMSGLCERRFQHPEGVVTKMQWLPCGNQFVSGSADKSLVLWNASEGSTAYQWSGRRVLDIAVHPHDSKVFVLTSGYEIRVYDITLKSDQLFLQAEHLVSCLSISPSGKFLLVNFVKQEQIACVEIVTGFVIAKYRGFREQRYILRPCFGGDHSELVLSGSEDGAVYLWQRDSGKQVGKLDGHSSVVNVVVRHPIHSNVIASASDDKTVRLWSLKSLE

SEQ ID NO: 252869 - protein, 172 aa, Glycine max
  unsure (1)..(172): unsure at all Xaa locations
  Clone ID: PAT_MRT3847_70367C.1.pep
GKLEXAVXNYGTKALSKLVSVCXPYHRMTAGAYSLLAVVLYHTGDFNQATIYQQKALDINERELGLDHPDTMKSYGDLAVFYYRLQHTELALKYVNRALYLLHLTCGPSHPNTAATYINVAMMEEGLGNVHVALRYLHEALKCNKRLLGADHIQTAASYHAIAIGLSLMEAY

SEQ ID NO: 252870 - protein, 126 aa, Glycine max
  Clone ID: PAT_MRT3847_70368C.1.pep
FYPPYLESGYDDVRPRIVFPESKARTKVTYGKKVKVRVQVAGGSLVRSLVRVTVSAPPFNTHSFSMNQRMLVLDPINVTNIVGGPTPTYEIEVTTPGSPVLAPPGYYLLFVVHQEIPSQGIWIQIL

SEQ ID NO: 252871 - protein, 54 aa, Glycine max
  Clone ID: PAT_MRT3847_70369C.1.pep
STKCSMMKDMYNGTLTNTTTMYIIVINERNKRILNYTLVANDVAYNSIFSCSFH

SEQ ID NO: 252872 - protein, 117 aa, Glycine max
  Clone ID: PAT_MRT3847_7036C.1.pep
GFDSPQTLNFELLLNFKLPTFLFLFLSFGFGVFKIMGWYRRGKLALDHFRRLASRVTPQNPIFQRGARICSSGYLDSGSKVASFNGFSSFCSTSQRLGTRGVVGVNRNFHNSVLFGA

SEQ ID NO: 252873 - protein, 67 aa, Glycine max
  Clone ID: PAT_MRT3847_70370C.1.pep
RKHVYRHNSRARLCLKYLRSRNRSLILDQNRILSRRPCHPSGRTLLLSLTYKKLLPIFPNAIPPRTS

SEQ ID NO: 252874 - protein, 74 aa, Glycine max
  Clone ID: PAT_MRT3847_70371C.1.pep
LKSAVLGDLVFAKPTPLNVGKPIQVWEVRLWKLDPSTKQKKTLISSSRVTLLCNMPVPDNAKAAGAKLRKHARL

SEQ ID NO: 252875 - protein, 124 aa, Glycine max
  Clone ID: PAT_MRT3847_70372C.1.pep
GGNPNLLFKKKSYKKSFYGEAKVFFGKQKKISKGKKGAPPRGLTGENRILKLAKVRGKWLERLKRSLFRKNPPPKPPNSLKSQSFFPRGLWPQPFNFNLKKFSTGKGGGGTPPPPEKKEPPPFR

SEQ ID NO: 252876 - protein, 84 aa, Glycine max
  unsure (1)..(84): unsure at all Xaa locations
  Clone ID: PAT_MRT3847_70373C.1.pep
MVYVKXQKSQAXFKXXQVKFKXXRXGXTDYRXRIRLXNQXKNRXXTPKXRFVXRFSXKDIVAXXISXSIARRFSLQIHMSCLRG

SEQ ID NO: 252877 - protein, 195 aa, Glycine max
  unsure (1)..(195): unsure at all Xaa locations
  Clone ID: PAT_MRT3847_70374C.1.pep
MAAEAALFFSVASVVEDVLQQHGPRLKDLDLESRKAEEAASRRYEAAGWLRKMVGVVAAKDLPAEPSEEEFRLGLRSGIILCNVINKVQSGAVPKVVESPVDSALIPDGAPLTAYQYFENVRNFLVAVQEIGIPIFEASDLEXGGKSSRIXNCVLALNSYSEWKMSXSMVVXKFGGISTHCDFKIFVRKNSDPFT

SEQ ID NO: 252878 - protein, 65 aa, Glycine max
  Clone ID: PAT_MRT3847_70375C.1.pep
NLCSDVSRTMTRIIKHFSSSSMMQRITYHIAHHMYPMYLLEFGYVTHFHNALGKILSQIMPGHDV

SEQ ID NO: 252879 - protein, 74 aa, Glycine max
  Clone ID: PAT_MRT3847_70376C.1.pep
SIKASFIFSLAFFHFSPCAHPDIKPLLLYPYRCPLLLPLRILTGHPAHSVPHYFYIFVIPPPPPPPPPPPPPPQ

SEQ ID NO: 252880 - protein, 50 aa, Glycine max
  Clone ID: PAT_MRT3847_70377C.1.pep
KTASSSKAAPPVPARPTHPCGCPKHRTGRRRRHTVPTLTILEGSRILPYL

SEQ ID NO: 252881 - protein, 115 aa, Glycine max
  Clone ID: PAT_MRT3847_70378C.1.pep
CLWRFFFCVFVGIMTVVWCVFFFFAVEKKRFGWLLGEKEDGLFPRPPKKSLPTSRGPRIFPRGALGLTGGPNCQKRWGDLILPPREKIFFIFGAPRTLLSPGWKGGKYQPSPKQV

SEQ ID NO: 252882 - protein, 107 aa, Glycine max
  unsure (1)..(107): unsure at all Xaa locations
  Clone ID: PAT_MRT3847_70379C.1.pep
MVNIVCIVAGYVGGPTMAVIALKCPSIEVADVDISKSRIAACNSDHLPIYEPXLDGVVKQYRGKNXLYFSTDVENHVLEADIMFVSVNTPTKTHDLGAVKAAHLTYW

SEQ ID NO: 252883 - protein, 58 aa, Glycine max
  Clone ID: PAT_MRT3847_7037C.1.pep
GSVEQGTRITKKWSAVCDELWIRVRNHRSPCRKIDSWIRRRTVRRSRSIEHRKCAHRE

SEQ ID NO: 252884 - protein, 62 aa, Glycine max
  Clone ID: PAT_MRT3847_70380C.1.pep
LLKEAFQGSFSRKPHEKACQGSCLGKSALLHSLTVGIVSKFSLKVQRTDVHDLTVAICDMSS

SEQ ID NO: 252885 - protein, 102 aa, Glycine max
  Clone ID: PAT_MRT3847_70381C.1.pep
MGSAARILQKGSFARRLQNGTAARRRQKGTAARRLQKGTAARRRQKGTAARRLQKGTAARRRQMGTAARRLQKGTVDRRPHKGTVSIRLLNVSVLLSLQIGF

SEQ ID NO: 252886 - protein, 71 aa, Glycine max
  Clone ID: PAT_MRT3847_70382C.1.pep
VKTQSHTLLIQYLTSNNRNTNKTLSNNFPHYSIFTNTLWEEKSQEFSKLQVAHTYPVILFYRGCNSNSNFE

SEQ ID NO: 252887 - protein, 56 aa, Glycine max
  Clone ID: PAT_MRT3847_70383C.1.pep
WHSQGQRIYKESVADPFSHINGVLSRRLYDFCPISFLSAMKCHPKRSRADSARARA

SEQ ID NO: 252888 - protein, 197 aa, Glycine max
  Clone ID: PAT_MRT3847_70384C.1.pep
MGIYYGCPSSPPHTVRAGWSEMRMASALSLHLSTPFSQLHPSLKPKKLHDFPTLSLSKPRKLSVNSVDISKEDTPVKPESELENLGPRRLEEKFAVLNTGIYECRSCGYKYDEAVGDPSYPLPPGYQFEKLPDDWRCPTCGAAQSFFQSKSVQIAGFAQNQQYGLGGNSLTSGQKTILIYGTLLLFFALFLSGYFLQ

SEQ ID NO: 252889 - protein, 80 aa, Glycine max
  unsure (1)..(80): unsure at all Xaa locations
  Clone ID: PAT_MRT3847_70385C.1.pep
ATLATLAAVQSTTINGLAGRSFSGTKLSFKPSRHSAKSKNFTSGARVTXYGDXSEFFDFXDLGYTTGQWDXYGSYAPSPL

SEQ ID NO: 252890 - protein, 59 aa, Glycine max
  Clone ID: PAT_MRT3847_70386C.1.pep
MEASKMKFFLVLVVSVLAMAATGVSAAEAPAPGPSSDATTLFVPTAFASLFVLAFGFLF

SEQ ID NO: 252891 - protein, 91 aa, Glycine max
  Clone ID: PAT_MRT3847_70387C.1.pep
LRKEKEDRPKTAPPRAGGCSINQSMAFASRGKAERHFPPPHGAEPIPLWYGRAAHRKKSRRGGENPNATGPASGFFFSFRGGKKKFFLFCG

SEQ ID NO: 252892 - protein, 137 aa, Glycine max
  Clone ID: PAT_MRT3847_70388C.1.pep
MDSQVLLGVALSSVGGFSTSIGALVVILSKAGSLKVLGLLQGFAAGLMLSISFFDLTHNALNSLGFLRGNLWFFAGVIFFAVVAKFIPEPTVAPPTSDEKKVGKQGNKDIMKRRRRQVLISGVVTAIGISLHNFQKE

SEQ ID NO: 252893 - protein, 86 aa, Glycine max
  Clone ID: PAT_MRT3847_70389C.1.pep
GLCHCVFYGECLLDHLTLGGTLGDIITLPSFTPRTPANSILSPFFLPPYIIPLTSLRLSKSDTHRKDAAMLVNEIALPPIPLLPPL

SEQ ID NO: 252894 - protein, 60 aa, Glycine max
  Clone ID: PAT_MRT3847_7038C.1.pep
ARDRESFNLTRSPISNRRVFSKLTNSGKENDSRSLWPAQRVIFFPLINRTQNSRKKFRDS

SEQ ID NO: 252895 - protein, 89 aa, Glycine max
  Clone ID: PAT_MRT3847_70390C.1.pep
LIEYNRFFIFLLCFLFIIDQRISLFFITCDLASYIYVAFAIVLASLIRTSILISFSVFPIYTIFVFVAAVFDNHHYIRTINHILLRSTT

SEQ ID NO: 252896 - protein, 138 aa, Glycine max
  Clone ID: PAT_MRT3847_70391C.1.pep
MNVPTRKRRKKNEEGSRSIQKNNTQKKELNSILTSLLFVDAKEKKKEDMLDGYYSEVEESNNPKKRKKLAGAGGNSVSHRRVWVKERSGAWWEECNKPEFPEQEFKKAFRMGRLTFEAICQELNSVIAKEDTTLRTAI

SEQ ID NO: 252897 - protein, 96 aa, Glycine max
  Clone ID: PAT_MRT3847_70392C.1.pep
VTQPFCFFGQLPFSSINLCIVFHIQYKQEFSFFAVNYHFIFQNSCILCEESAIICYRVKVYIRAETFAYYTQELPCLRAVIIIFLFWVFNEVVSVT

SEQ ID NO: 252898 - protein, 384 aa, Glycine max
  unsure (1)..(384): unsure at all Xaa locations
  Clone ID: PAT_MRT3847_70393C.1.pep
MPVTNTTTPTVAEHIKWRRPRNQFNHHQHPISETDPNPQIPSIIQSTRCKSTISSLLLSTFSNNTSSNNDTPTTFNATAHSKKKSNFSASTFRGLGCTAGASQQVSVPAVIRSSAVQSKTPQNWKAKKTSKKKHKRSSSSSKHKTFHPLGXGSTNSSVRVFSSCFVRPSQQFLLHHPSIPLLIXEENKHFVSSARGKIDVDKITHRERSSYVGRRTETFTFLDSTDPDIFTPRSASDSYGTATYYRHVRDPSSDGFAEIMMLQGSLLMGGQLNSHDHFKDWRLDVDNMSYEQLLELGERIGHVNTGLKEDEMGRNIRKTRLQFWDDTSKHQVDKECSICQEEYEAGNELGRLNCEHIYHFQCIKQWAAQKNFCPVCKQQVAARH

SEQ ID NO: 252899 - protein, 48 aa, Glycine max
  Clone ID: PAT_MRT3847_70394C.1.pep
KKKEREKMELWKTIKRLKTKLVRINLGNNLILSELLIYYISKDQQTQF

SEQ ID NO: 252900 - protein, 241 aa, Glycine max
  unsure (1)..(241): unsure at all Xaa locations
  Clone ID: PAT_MRT3847_70395C.1.pep
MSFGNGKSLKLLRVLNLRENNLGKDDVESLRYALQHVPNLEELDISGNSIEDEGIRNLIPYFVGASETCPHITCLKLENCDLSCVGVNNLLHNLSTFKGPLKSLSIAENYLGRQVVEALGNFFHTPIEVLDIAGIGLGSDGFQELQSLIKEEIKLVKINIXAPQLVDVNAACNLMPIESLAIICCALKFAKGNVQQVDLTGHIWDYKPEHVSPYAEFVHNGLPILVLPSPSVSAAPHDHDP

SEQ ID NO: 252901 - protein, 137 aa, Glycine max
  unsure (1)..(137): unsure at all Xaa locations
  Clone ID: PAT_MRT3847_70396C.1.pep
FSTPIEVLDMQGIGLGSYGFXELQSLIKEKVKLVXINISKNRGGIATAKFLSKLLSQAPQLVDVNAASNLMPIESLAIICSALKFAKGNVQQVDLTGHIWDYKPEHVSPYTEFVHNGLPILILPSSSASAAPHDHDP

SEQ ID NO: 252902 - protein, 141 aa, Glycine max
  unsure (1)..(141): unsure at all Xaa locations
  Clone ID: PAT_MRT3847_70397C.1.pep
ADVHSIYAAHLPTYLPSFAPQPLLESLPQWKAPPVVHAMAXLLIETLCAANHFADRTDILTXWRQHNLIKSSDVGSRYFVASLGGKDFTMVIEKEADYCGDITIGPYLDLYDLVAVTTIACTDHGIRSKTPNFTILGDMDT

SEQ ID NO: 252903 - protein, 65 aa, Glycine max
  Clone ID: PAT_MRT3847_70398C.1.pep
LKSLKPPKSGGPRGKGKKCPPRGGKIGGAKKLGKISLPRGEGGWGAPPQKTYPPPSYWGLKRPAV

SEQ ID NO: 252904 - protein, 46 aa, Glycine max
  Clone ID: PAT_MRT3847_70399C.1.pep
KARMVPLTFKNKKFLFNVYIPLCLLYINVIMIRSPSPINKIILFFL

SEQ ID NO: 252905 - protein, 99 aa, Glycine max
  unsure (1)..(99): unsure at all Xaa locations
  Clone ID: PAT_MRT3847_7039C.1.pep
AKVYFLYPCPFLCDHIVYHLTSGFYSMYDMHISISLSSLLTRSFVCITIDTYLLNIILWGGFNIPIIILPPLITASVVRFYPSLVPLSPSRPIPALVLX

SEQ ID NO: 252906 - protein, 74 aa, Glycine max
  unsure (1)..(74): unsure at all Xaa locations
  Clone ID: PAT_MRT3847_703C.1.pep
KSQDWLFTRKKNYRNVKISQDDSNALIKRIKNDYERLXRIRNHRGFRQHXGIRVHGQHTKITDSKGKAVGVSKK

SEQ ID NO: 252907 - protein, 76 aa, Glycine max
  Clone ID: PAT_MRT3847_70400C.1.pep
RLVPEYRPAASPTFMSTKHSNSHRKVLELRRQKELQRQQHQQLMSQSSIFGVSNGGDEFLIHHHHQHCGPDFRHVI

SEQ ID NO: 252908 - protein, 45 aa, Glycine max
  Clone ID: PAT_MRT3847_70401C.1.pep
QQCCLNKRMLMMLLLLFKGVNRHWRICSFPSAGNVQAKWVWSSLR

SEQ ID NO: 252909 - protein, 62 aa, Glycine max
  unsure (1)..(62): unsure at all Xaa locations
  Clone ID: PAT_MRT3847_70402C.1.pep
HDLGDISPGGFRSCLHNNITVXSVNSALHEAGAKVXIIILGNPNDGVLTKMPFVPTKYYKPS

SEQ ID NO: 252910 - protein, 46 aa, Glycine max
  Clone ID: PAT_MRT3847_70403C.1.pep
TTVTVIVSLLLPQSLGLCSTAPSFSISLLITRISNFISEKGIHRRS

SEQ ID NO: 252911 - protein, 90 aa, Glycine max
  unsure (1)..(90): unsure at all Xaa locations
  Clone ID: PAT_MRT3847_70404C.1.pep
RFTGGIPENTRIALACAMNSSCRGRARSDTYTICSQDCESWTPAVAKPMTSGIYPHPCADAWSLESMRATGVHXRITGVTGGTATPMHGG

SEQ ID NO: 252912 - protein, 83 aa, Glycine max
  unsure (1)..(83): unsure at all Xaa locations
  Clone ID: PAT_MRT3847_70405C.1.pep
DPLVRARQAWLLVHEKTTRGLEYELRDTVQADFQRXLEIYLADVETPWLNVCLTELLPFQSFKGARITCCLHMTIYTGRLIET

SEQ ID NO: 252913 - protein, 70 aa, Glycine max
  Clone ID: PAT_MRT3847_70406C.1.pep
MKSVGRVGGGESEQRGHFQMPLHYPRYTQADYETMPEWRLDSLLKEYGLPIIGDLHQKRNFAIGAFLWPH

SEQ ID NO: 252914 - protein, 105 aa, Glycine max
  Clone ID: PAT_MRT3847_70407C.1.pep
VKNPVNETEHIFRSNISYPRNVNQHRIIKTNDDIQSQNTVSNPICAKQPFFLSEARIQQTAAAESSQTATIKQKIRTRALNKLSLISHKNRNDSSFYQKKKNRRD

SEQ ID NO: 252915 - protein, 94 aa, Glycine max
  Clone ID: PAT_MRT3847_70408C.1.pep
MSYYNQQQPPVGVPPPQGYPPPESYGKDAYPPPGYPPQGGYPPQAYPAQGYPPPYAPPQYAQPPPQQHQNSSGPGCLEGCLAALCCCCLLDACF

SEQ ID NO: 252916 - protein, 56 aa, Glycine max
  Clone ID: PAT_MRT3847_70409C.1.pep
TQHYKNLWFTYLGYAGVLSNPPSLLTIPKISFSNPISHSLSFPYLTFAQFINEFQL

SEQ ID NO: 252917 - protein, 64 aa, Glycine max
  unsure (1)..(64): unsure at all Xaa locations
  Clone ID: PAT_MRT3847_7040C.1.pep
YFSYAAIQMRFFPMYHEIVQWIRYEGKIKDPEXCAMVRLKSLQPTTVGSTARLAAKSHHARDKC

SEQ ID NO: 252918 - protein, 76 aa, Glycine max
  unsure (1)..(76): unsure at all Xaa locations
  Clone ID: PAT_MRT3847_70410C.1.pep
PKCEDCQSLVKPDIVFFGESLPARFFSCMQSDFLKVDLLLVMGTSLQVQPFASLXISKAPLSTPRLLINKEKAGQS

SEQ ID NO: 252919 - protein, 96 aa, Glycine max
  unsure (1)..(96): unsure at all Xaa locations
  Clone ID: PAT_MRT3847_70411C.1.pep
MSYYNQQQPPVGVPPPQGYPPPDSYGKDAYPPPGYPPQGGYPPQAYPAQGYPPPYAPPQYAQPPPQQHQNSSGPGCLEGXLDLAALCCCCLLDACF

SEQ ID NO: 252920 - protein, 81 aa, Glycine max
  Clone ID: PAT_MRT3847_70412C.1.pep
YQKKQIRELSKHAKSSSRKTISSEDKPFNLRSRDPIYSNKLGKLFEITPEKNPQLRDLDVFLSVVDMNEVALPVAASVVVL

SEQ ID NO: 252921 - protein, 67 aa, Glycine max
  Clone ID: PAT_MRT3847_70413C.1.pep
SRLGTKREPEEGHNSQTHEYWKSLGDGTKGGRAERCCSAFSLTPSALPSSTYVRVSLASGRVNLNCT

SEQ ID NO: 252922 - protein, 264 aa, Glycine max
  Clone ID: PAT_MRT3847_70414C.1.pep
MKKENSVMLKAGELPGRLTRARAAAALRAYGQLPPLKERAQQNQNQLSRVNSKRAVSDNTCLQRKRKAVLQEVTNVCRENAYKGCFNSTKIQAKKSKLAKAGQINVSKVAPSVTVDSKAKETALQSEDTMCSINLENNEFLRLSANDCRLPESQMSGISAHPLISQKKDKKDNLPKLLTALKDPDITNIDDDDLEDPQSCSLYAADIYDTMRVAELARRPHPNFMETVQRDITQSMRGILVDWLVEVSEEYKLVTNTLYLTCVF

SEQ ID NO: 252923 - protein, 41 aa, Glycine max
  Clone ID: PAT_MRT3847_70415C.1.pep
IQSIRLIMKVKLNELAGLVTISYWMDYESSNIFCNPLDLVV

SEQ ID NO: 252924 - protein, 108 aa, Glycine max
  unsure (1)..(108): unsure at all Xaa locations
  Clone ID: PAT_MRT3847_70416C.1.pep
IGNRAELTGELARALGGAKETTNLMGVXVEDVNTFFNALRDXPSSIRDANGCAILRCTTAEGMDLXETLVPSAVGDVALQQILNCVADDTRETNAIGESAKLAHDDDS

SEQ ID NO: 252925 - protein, 72 aa, Glycine max
  unsure (1)..(72): unsure at all Xaa locations
  Clone ID: PAT_MRT3847_70417C.1.pep
LCNLRESPSSVNPIDTTVVLAFXVYYDLSSIDXLSGEKKDLHVVELSSSHEPSEPTGANKDIGTSELTPEVS

SEQ ID NO: 252926 - protein, 50 aa, Glycine max
  Clone ID: PAT_MRT3847_70418C.1.pep
KHSCRTFVFPNGSFHTPFWKPFSLLHRILWLLEPVNPNNSNQPWQFFESE

SEQ ID NO: 252927 - protein, 72 aa, Glycine max
  Clone ID: PAT_MRT3847_70419C.1.pep
MSDLEAPLRPKTYKVWVDYVVQFRSILVMDVVVPISFAICFRAYVGGVRSERRSYDARRIEHDDSVMRAIER

SEQ ID NO: 252928 - protein, 158 aa, Glycine max
  unsure (1)..(158): unsure at all Xaa locations
  Clone ID: PAT_MRT3847_7041C.1.pep
VSASQPLSILFVGGGGADPRLATWSIGSSVTVYQCLDEGDIAVLQSYADEDKNESFYTVGWACNVDGTPLVVAGGLNGVIRVIDAGSEKIHKSFVGHGDSINEVKAQILNPSLVVSASKDESIRLWNAHTGICIXIFAGGGGHRNEVLSVDFHPSDMY

SEQ ID NO: 252929 - protein, 53 aa, Glycine max
  Clone ID: PAT_MRT3847_70420C.1.pep
FIRIKADHNTVANNMLFLVLLIFLLFQPQSDEKFPTKCNKGIIEEFLKESDKS

SEQ ID NO: 252930 - protein, 43 aa, Glycine max
  unsure (1)..(43): unsure at all Xaa locations
  Clone ID: PAT_MRT3847_70421C.1.pep
VDPSMYXQXFXSMXTKFMAXEXCHVMHXIXXAXXLXIKLAVXL

SEQ ID NO: 252931 - protein, 106 aa, Glycine max
  Clone ID: PAT_MRT3847_70422C.1.pep
GTKKEGRGPGPGGGFPPPLLLGKERVPFCRFYRFRSVRGAWSIPVPFFGVLVSLFCCRGPFGVWLSVLFAQGLMQGVPYSGSVSAGVGFFGVNVLVGVIVDKKPPK

SEQ ID NO: 252932 - protein, 71 aa, Glycine max
  Clone ID: PAT_MRT3847_70423C.1.pep
FTYIFQPVSTHPIFPFYIRSIYKQFDQYNYLLLPQLLTSIFKSNPQHSFNIKIHHNITSSIPNINLQYYIA

SEQ ID NO: 252933 - protein, 55 aa, Glycine max
  Clone ID: PAT_MRT3847_70424C.1.pep
RVGKSHIRELCKNYYCRSPFIAEKLRKQIKYMFYGLIHSKNRKSNLLGDFNTICG

SEQ ID NO: 252934 - protein, 89 aa, Glycine max
  Clone ID: PAT_MRT3847_70425C.1.pep
ALARALPCIIIIFFLTICIFIQHWPTRETLHLPPSWLAPSTRLFRSPFPLPLLVVCFRWWKSTRLACLISTTNLAAAGPYMDLTAGPFN

SEQ ID NO: 252935 - protein, 47 aa, Glycine max
  Clone ID: PAT_MRT3847_70426C.1.pep
PQASLNGRLVKLTPSLITLTNQLFSGSHFSDTLPHSPIVGIKNNSIC

SEQ ID NO: 252936 - protein, 66 aa, Glycine max
  Clone ID: PAT_MRT3847_70427C.1.pep
TETWMTPTQTCLYAHQIASEQLGEGHHARLPCRLLDGLGSYEQRLTDRPNDGIHRRALHVEKAPPG

SEQ ID NO: 252937 - protein, 58 aa, Glycine max
  Clone ID: PAT_MRT3847_70428C.1.pep
GSGDTCIPLFSIFAFYVMAKTRERINLLLGKAQTPPHMLKKTPTLKYPRALLFPPPLK

SEQ ID NO: 252938 - protein, 589 aa, Glycine max
  Clone ID: PAT_MRT3847_70429C.1.pep
MSHSDSSKKKKQQQRSKHEGGGGEEESKDEGGLMIKPQSFTPPIDTSQWPILLKNYERLNVRTGHYTPIPSGYSPLKRPLAEYLKYGVLNLDKPANPSSHEVVAWIKRLLRVEKTGHSGTLDPKVTGNLIVCIDRATRLVKSQQGAGKEYVCIARLHSDVPDVSKVARALETLTGAVFQRPPLISAVKRQLRIRTIYESKLLEYDPDRHLVVFWISCEAGTYVRTMCVHLGLLLGVGSHMQELRRVRSGIMGEKDNMVSMHDVMDAQWVYDNYRDETYLRRVVMPLEILLTSYKRLVVKDSAVNAICYGAKFMIPGLLRFENDIDVGEEVVLMTTKGEAIALGIAEMTTAVMATCDHGVVAKIKRVVMDRDTYPRKWGLGPRASMKKRLISEGKLDKHGKPNEKTPQEWLRNLVLPTGGDSVIAGLAAAPEPEDDKIQKKEGDGEGKKRKKHESTDSPVAVPAKKVKVDEVEEVEKQEKVKVKKVDEETVEVEVEKKEKKKKKKKDKENSEAASSDEEKTEKKKKKHKNKVEDSSPELDKSEKKKKKKKDKEAAAATAEISNGKEDDSNADKSEKKKNKKKKNKDADEE

SEQ ID NO: 252939 - protein, 58 aa, Glycine max
  Clone ID: PAT_MRT3847_7042C.1.pep
QQPIALDYIYHRIGSTIQKHTYIFTQISIYIYIYIVLYGNDHGGACLEHVCSDECKCL

SEQ ID NO: 252940 - protein, 52 aa, Glycine max
  Clone ID: PAT_MRT3847_70430C.1.pep
VVHYLLSAPLKPITFVNNSGGLIDMLQTCHGANYVAVDYYKAGLRHIFLLCL

SEQ ID NO: 252941 - protein, 103 aa, Glycine max
  unsure (1)..(103): unsure at all Xaa locations
  Clone ID: PAT_MRT3847_70431C.1.pep
MFKVPRHFRYFFSELMLXVGGHLVMMKENDYHHDDYXDDDGPXKQIHRGEYXKYIIVKVKVLFTVQGDTHSIKHFSGGQKTVFSLTLIIAIHLFNPFPFYIFY

SEQ ID NO: 252942 - protein, 178 aa, Glycine max
  Clone ID: PAT_MRT3847_70432C.1.pep
GPEFPGRPTRPKMANEIARLKEEADMMKLNNSSDGLASMSPGARNSRIYALEKMIATSSTTLLSMASQLSEAEERERIFSGKGRWNQVRSLPEAKNLMNHLFNLASSSRCLLRDKEVTCREKGMEIRDLKEKVVRLSCSLRQLEMQKSELIHQLKLLSAKRYSESLGGFGVSRHKWRT

SEQ ID NO: 252943 - protein, 56 aa, Glycine max
  unsure (1)..(56): unsure at all Xaa locations
  Clone ID: PAT_MRT3847_70433C.1.pep
PFSIRNQRFMRCISYFFPLLETQFGDLLRWIMTYVKKSNAHLPMKTLNMPXXSSAG

SEQ ID NO: 252944 - protein, 165 aa, Glycine max
  Clone ID: PAT_MRT3847_70434C.1.pep
KTLKSRWLTKGGLPFGGFLAQKILGLIGELLPLFLGFIGGPFLAPITGQWAHRVFFGTLWFFFLGKKPKLGGFAPFKWVQIKNPLWGKKRLGQTWVFKFISFCLRLGFPSGRGFELLGLWPWNRVFLSRAFFFPFGFGSPKKKKKKKKKKKKKKKKKKKKKKKKK

SEQ ID NO: 252945 - protein, 267 aa, Glycine max
  Clone ID: PAT_MRT3847_70435C.1.pep
MGYAQLVIGPAGSGKSTYCSSLYEHCVAARRSIHVVNLDPAAENFDYPVAMDIRELISLDDVMEELGLGPNGGLVYCMEHLEDNLDDWLTEELDNYLDDDYLVFDCPGQIELYSHVPVLKNFVEHLKRKNFSVCAVYLLDSQFMTDVTKFISGCMACLSAMVQLELPHVNILSKMDLVTKKKDLEDFLDPEPTFLLSELNQRMGPQYAKLNKALIELVNNYSMVSFIPLDLRKEKSIQYVLAQIDNCIQYGEDADVKVKDFDPEDDE

SEQ ID NO: 252946 - protein, 100 aa, Glycine max
  unsure (1)..(100): unsure at all Xaa locations
  Clone ID: PAT_MRT3847_70436C.1.pep
LNTGISRSRIWRTITXNIQQLTVWNQMATVRTPLNFEFSKQSLCQLYRDLIRGGILVDKTGDXLTVIQKCAMNQLLRVAGWHKGMLMGKIVMCVQCPVKM

SEQ ID NO: 252947 - protein, 211 aa, Glycine max
  Clone ID: PAT_MRT3847_70437C.1.pep
MRRGRATAAVVDPTAEQAKETRFRGVRKRPWGRFAAEIRDPWKKQRVWLGTFDSAEDAARAYDKAARSFRGPKAKTNFPSFPGPTDHHSSQQIPPLYQAHGLSTKFEPAQVNRPTTSGMSSTVESFSGPRVPPSSSSSRKPLVVVNPIIPLDDDDDDCHSDCDSSSSVVDDQDCVLTSSFRQPLPFDLNLPPPDAAYDDDDDDVPATALCL

SEQ ID NO: 252948 - protein, 30 aa, Glycine max
  Clone ID: PAT_MRT3847_70438C.1.pep
DSSTELTFIPKLMHQDILLTLPKELTDQII

SEQ ID NO: 252949 - protein, 70 aa, Glycine max
  Clone ID: PAT_MRT3847_70439C.1.pep
EMNGTARATLLMMHSMHLLYTKTAAAIIALLLVRIQNQDDAMNSGRASETYNTIIACGDASTNDAAEIPL

SEQ ID NO: 252950 - protein, 75 aa, Glycine max
  Clone ID: PAT_MRT3847_7043C.1.pep
KKSSPSSLFRFFPFPLFLIFLTHRGFLILAYFYILNYSLFISSCSFRRSKTKRIVYMQQIITLFQRENMFPLRRR

SEQ ID NO: 252951 - protein, 130 aa, Glycine max
  Clone ID: PAT_MRT3847_70440C.1.pep
MENNNQSFWQFSDQLRLQASNLANLSLNDSIWSNSYISKRRDERINFDIKVGGEINSFKSKEPACDYNENMNGSLLAVPYNNNNILGVGGVGLNGGFNKGIYSKPGFANLNNNINLDINKGHKFKDEDEL

SEQ ID NO: 252952 - protein, 139 aa, Glycine max
  Clone ID: PAT_MRT3847_70441C.1.pep
MENNNQSFWQFSDQLRLQASNLANLSLNDSIWSNNYISKRRDERINFDIKVGGEINSFKSKDPACDYNDNVNGSLLAMPYNNNNNNNIILGVGGVGLNGHKGIYSVSTTIFLNINSWSQWRLQQGNLLQACLCQSQQQY

SEQ ID NO: 252953 - protein, 58 aa, Glycine max
  Clone ID: PAT_MRT3847_70442C.1.pep
DQLPWESSPLRRNPAQWTQQHSRHQLALTTLKKLGTVSRDSRGQPLFRSLLVVQDRGG

SEQ ID NO: 252954 - protein, 64 aa, Glycine max
  Clone ID: PAT_MRT3847_70443C.1.pep
ILFQCNRLTIFMSNVHNRFMDDYSTSKGNDSMYGFLEPQSIHNAKDRRQQCQHYIETWVKESQR

SEQ ID NO: 252955 - protein, 61 aa, Glycine max
  Clone ID: PAT_MRT3847_70444C.1.pep
HQRNNGVLQHFIFKTNFSNAMTCPTFLTKFPKRPCLIGAKIQPMLTFSNSWDPNPLIYFGG

SEQ ID NO: 252956 - protein, 41 aa, Glycine max
  Clone ID: PAT_MRT3847_70445C.1.pep
ARQLEDNRVVSNLSRSRVGLSTSSGHSHGVKCADPLFFANA

SEQ ID NO: 252957 - protein, 49 aa, Glycine max
  Clone ID: PAT_MRT3847_70446C.1.pep
LELKPNGLECGQHIKLVFLKEGTIAFYYSANSDHWCRLMRETNNVANSD

SEQ ID NO: 252958 - protein, 140 aa, Glycine max
  Clone ID: PAT_MRT3847_70447C.1.pep
QSSFVQFTPYGSRMDEISESEIPFPHRAGNIFHIQYGVSWQEEGDEEAQRHINWIRRMYSYMETYVSKSPRAAYLNYRDLDIGVNNNKGYTSYSQASVWGLKYFKNNFNRLARVKTNVDPLNFFRNEQSIPSLVSKGRKL

SEQ ID NO: 252959 - protein, 120 aa, Glycine max
  unsure (1)..(120): unsure at all Xaa locations
  Clone ID: PAT_MRT3847_70448C.1.pep
GKDKKDTSESFLLHKASPLSEIEFLNSTKHXITRASDKPRDFGRGVGVIGWLPEQMEAAEETLMRAAEMWRERAMRGDPDAPHSRVLRAFCGXXYENFRIKSNQCTIVLLINNNNRVERK

SEQ ID NO: 252960 - protein, 115 aa, Glycine max
  unsure (1)..(115): unsure at all Xaa locations
  Clone ID: PAT_MRT3847_70449C.1.pep
EGRKCVGCIGLPIDEAKRGSLGKCSRLLKRLLNHLEVRQVMKAERFCEVNQLPPEYVCVNGNELGSEELVTLQSXANPPKNLKPGNYWYDKVSGFCGKEGQMPCKHFNTNFTFVG

SEQ ID NO: 252961 - protein, 75 aa, Glycine max
  Clone ID: PAT_MRT3847_7044C.1.pep
SIQIIFLTKLGLCSLQQSLQGSLVSAQSMITISKEVHIFSFFTTPDSEGLNKGDETDHLPHKTWSPIPSIELKAL

SEQ ID NO: 252962 - protein, 73 aa, Glycine max
  Clone ID: PAT_MRT3847_70450C.1.pep
GTSQWGEGMPFYLRRGAAAKTDFIMNLPHASFSLGLFYDADHYRKTSTRTAACIKRPPYCYLSFLTRPHHTIN

SEQ ID NO: 252963 - protein, 84 aa, Glycine max
  Clone ID: PAT_MRT3847_70451C.1.pep
WRCGTTKDCILSVNQQGFLDSTVKKKQEEEGGKRKIASQKVKIEKNVILKIEQCKIQQQENWVKLRICLALITFFSQTKQVFCD

SEQ ID NO: 252964 - protein, 357 aa, Glycine max
  Clone ID: PAT_MRT3847_70452C.1.pep
MKNLKWHKQISNSGNKLGRRLSLGEYNRAVSWSKYLVSPGAEIKGEGEEEWSADMSQLLIGSKFASGRHSRIYRGVYKQKDVAIKLISQPEEDEDLAAFLEKQFTSEVSLLLRLGHPNIITFIAACKKPPVFCIITEYLAGGSLGKFLHHQQPNILPLKLVLKLALDIARGMKYLHSQGILHRDLKSENLLLGEDMCVKVADFGISCLESQCGSAKGFTGTYRWMAPEMIKEKHHTKKVDVYSFGIVLWELLTGKTPFDNMTPEQAAYAVSHKNARPPLPSECPWAFSDLINRCWSSNPDERPHFDEIVSILEYYTESLQQDPEFFSTYKPSPSSSNTILGCFPKCNARHKFGACKA

SEQ ID NO: 252965 - protein, 76 aa, Glycine max
  Clone ID: PAT_MRT3847_70453C.1.pep
PVKTNEDLPLIPLFLSDHHNRCYTTNFISNRSNPIQNIITSSKHKRLWRVESQEYMQMPAPFQNCRFLELRSITRS

SEQ ID NO: 252966 - protein, 39 aa, Glycine max
  Clone ID: PAT_MRT3847_70454C.1.pep
SESDSSYILYYFFPTIIPCSSVYPTYTTPTIQVSQNTHN

SEQ ID NO: 252967 - protein, 173 aa, Glycine max
  unsure (1)..(173): unsure at all Xaa locations
  Clone ID: PAT_MRT3847_70455C.1.pep
MNDLMTKSFTSYVDLKKAAMKEDVDLEAGVVVSSATPRNVELTSSTTHLDTDMGLFLEEAEKVKAEMGSLRDILGRLQQANEESKSLHKPEALKVLRARINADIVAVLKKARAIRAQLEEMDRANAANRRLSGLKEGTPAIYRTPIAVTNGLRKKLKELMMEFQGLXAEMMSE

SEQ ID NO: 252968 - protein, 161 aa, Glycine max
  Clone ID: PAT_MRT3847_70456C.1.pep
MLCYPPIHLIYNPHDLHNPFALTSLITLNHTSIKIFSFTQQDPSMFRSMTTRRGYERLGKESATTALLHEGFKRSTSLPSWGSNSSRKMALGSTYGEINLKRNPTKKGNNSDKKSHPLLSFLALRRKKKTTARPEFARYLEYLKEGGMWDLNSNKPVMYYK

SEQ ID NO: 252969 - protein, 63 aa, Glycine max
  Clone ID: PAT_MRT3847_70457C.1.pep
TKTFSLEQHILIRNVLNQYLVAQVLENDETNGSVLGQRALLYDSVGKVRLGAEDLKTVLKIDP

SEQ ID NO: 252970 - protein, 213 aa, Glycine max
  Clone ID: PAT_MRT3847_70458C.1.pep
MGGCCCCCCSAKETVLSAPPAYYYYPRASEEHVPLSSHQGAASAFSGRLLVDTNLDTSSPDTYRPPPAPIPFNVTLGTTQTPPAAQEIRSDKNNTSLHSTNSNAIQEPVAGDNHGTSAKLEELKESDCKVQTDLELDSAKGSEIELAKSGKPIDVVEEEDTCPICLEEYDAENPKLATNCDHHFHLACILEWMERSETCPVCDQDLVFDPPIE

SEQ ID NO: 252971 - protein, 161 aa, Glycine max
  Clone ID: PAT_MRT3847_70459C.1.pep
SPRFGFYPSQTVPASYPPPNPEFSSSTKHLKSQSQNSLTPANGAHDAKELHMFVWSSSASPVSENAGLNVFGNTELGTSQQPDQGGAKEIRMLVADNHAHLQNGEANNKGGLEAGLDVEEFKFPVNGGEQVEEEKEKEKEGLNNGLNKLGSSSTAELHPKA

SEQ ID NO: 252972 - protein, 74 aa, Glycine max
  unsure (1)..(74): unsure at all Xaa locations
  Clone ID: PAT_MRT3847_7045C.1.pep
SDTLKQSFLSAFEILLDIIFDNCLLQVFMLPYNLKNKNXXTVXDLAXKXQPXRLALRWYHFMELADSVFLFILS

SEQ ID NO: 252973 - protein, 34 aa, Glycine max
  Clone ID: PAT_MRT3847_70460C.1.pep
FGLETESEPWLVICSPVRTQSEPLRVHTVPLVHT

SEQ ID NO: 252974 - protein, 48 aa, Glycine max
  Clone ID: PAT_MRT3847_70461C.1.pep
AVVPVTDGYVIGSSIKSIPIVGKDITLFVQQLMRGFEGSVITSKTKIP

SEQ ID NO: 252975 - protein, 108 aa, Glycine max
  Clone ID: PAT_MRT3847_70462C.1.pep
KKPLLFNPQKWKWEKKNIFHPSTKKGSLLKKTGPQRGPKKHLIPNLNFNPGANPPETNLGGAFSPKQIYAPKHKGGKGPKFFINTSKGPHVLFKQPKNENPKGLFKPP

SEQ ID NO: 252976 - protein, 120 aa, Glycine max
  Clone ID: PAT_MRT3847_70463C.1.pep
FSMLGLGDIVIPGVFVALCLKYDVHKTIVNQLQGQVEKLDFKMVKTTYFYSCLVGYALGIIATFYAMTIFNHAQPALLFLVPGCTGAVMLCALFQNEIKAVFEYSDDQEKENEAVEKKKE

SEQ ID NO: 252977 - protein, 111 aa, Glycine max
  Clone ID: PAT_MRT3847_70464C.1.pep
QSKGPSRGKKKSPSEIFPGKNSKGKRGETKYPIPIQREKWGGLENFFYKPGVPPFPFPAFGKAFKKHPLFKIGDNSTNQSKGGVHKLTHSGWGARQFEGGKNPPWLFFTGK

SEQ ID NO: 252978 - protein, 221 aa, Glycine max
  Clone ID: PAT_MRT3847_70465C.1.pep
REAERRKAALEKATARRMAKESMELIEDEQLEMMELAASSKGFSSIVHLDFDTLQHIESFRDSLCVFPPKSVKLRKPFAIKPWINSENNVGNLLMVWRFLINFADVLELWSFTLDEFVQAFHDYDSRLLGEIHVSLLKVIIKDIEDVARTPSTGLGANQNGAANTGGGHPEIVAGAYAWGFDIRNWHKHLNLLTWPEIFRQLALSAGYGPQLKKRSISWSY

SEQ ID NO: 252979 - protein, 71 aa, Glycine max
  unsure (1)..(71): unsure at all Xaa locations
  Clone ID: PAT_MRT3847_70466C.1.pep
LNQLSVKSSGGETDSFCFRPNELVDLTNMCRDLRHMVPEILEVEADPIGGPRIQEAXLSLYVFKSAVRDGS

SEQ ID NO: 252980 - protein, 67 aa, Glycine max
  Clone ID: PAT_MRT3847_70467C.1.pep
ERQREVGLCFTISTNLLNNLAQHLDYISLTYLHSSSHWRAPNANAAMTSRDYKTELSYHRPKWGSYA

SEQ ID NO: 252981 - protein, 152 aa, Glycine max
  Clone ID: PAT_MRT3847_70468C.1.pep
PLVLPFSEQLLFFATLVWRHLFGSKNGGNSPSMKKPYIPDYKLAFEHFCVHAASKTILDELQRNLELSDKNIEASRMTLHRFGNTSSSSIWYELAYMEAKESVRRGDRVWQLAFGSGFKCNSVVWRAMRRVTKPSRNPWLDCINRYPAPLNN

SEQ ID NO: 252982 - protein, 535 aa, Glycine max
  Clone ID: PAT_MRT3847_70469C.1.pep
MANERDLFSAEIVNRGIESSGPNAGSLTFSVRVRRRLPDFLQSVNLKYVKLGYHYLINHGIYLFTIPVLLVVFSAEVGSLSKEDLWKKLWEDARYDLATVLASFGVFVFTLSVYFMSRPRPIYLIDFACYKPDDELKVSREQLMEVARKSGKFDEASLEFQKRMLMSSGIGDETYIPKAVIASTENTATMKEGRAEASMVMFGALDELFEKTRVRPKDVGVLVVNCSIFNPTPSLSAMIINHYKMRGNILSYNLGGMGCSAGIIGVDLAKDILQANPNNYAVVVSTEMVGYNWYQGKDRSMLIPNSFFRMGCSAVLLSNRRRDYSRAKYRLEHIVRTHKGADDRSFRCVYQEEDEQKLKGLKISKDLIEIGGDALKTNITTLGPLVLPFSEQLLFFSTLVWRHLFGSKNDGNSPSMKKPYIPDYKLAFEHFCVHAASKTILDELQRNLELSDKNIEASRMTLHRFGNTSSSSIWYELAYMEAKESVRRGDRVWQLAFGSGFKCNSVVWRAMRRVTKPSRNPWLDCINRYPAPLNN

SEQ ID NO: 252983 - protein, 61 aa, Glycine max
  Clone ID: PAT_MRT3847_7046C.1.pep
PGTFTIRGKSCPLKTAATPNIVRPRCTNTTFTLPTLIAPCNSNHIHFFCAIRRLSSYPILT

SEQ ID NO: 252984 - protein, 103 aa, Glycine max
  Clone ID: PAT_MRT3847_70470C.1.pep
KKQNFFFFNFQLYRRERTPPPWRKGGIFFFESRPLGKGPLKTNNGFFLFFLKSRLYGPFFFFFCKRLANLQVCPTFPPSSWFFLGSPKAVLFGGLRGNQGLAP

SEQ ID NO: 252985 - protein, 180 aa, Glycine max
  Clone ID: PAT_MRT3847_70471C.1.pep
MERALTKVSSLKVGLGSSWISKKAKEEFSNISEDISSFSNTVEEKAKWIFNKLKGKPQKSLPDLLRDYNLPPGLFPQNIICYEFDETKGKLIVYLPSACEVSFKDSSVLRYATRVKGVLTRGKLSAIDGMKTKVLVWVKVTNVAVEGYKSDKLWFTAGVKKSRTKDAYDTPCGAVRVSEF

SEQ ID NO: 252986 - protein, 82 aa, Glycine max
  unsure (1)..(82): unsure at all Xaa locations
  Clone ID: PAT_MRT3847_70472C.1.pep
XNTTFXXYIINXIMCXLCIVXXCCNWXNIXRXXXGXMASXKVQCTWXXDSETHSLAXXAXXEPHXXXGVXAGASLIXLDHPX

SEQ ID NO: 252987 - protein, 143 aa, Glycine max
  Clone ID: PAT_MRT3847_70473C.1.pep
GGLEECPGGRCGLFNAARSRWRNHMVPLAVEGPSFQKLELEHVALSRTKRVSYRAGSGGVRKQNIPGRNTSGCRCGIKVGPATGGCCCGVGCAATVLGISWLDSAFLFSVESAAPSAWIAPALGGPCVGGDGAAPCPWSGSWG

SEQ ID NO: 252988 - protein, 89 aa, Glycine max
  Clone ID: PAT_MRT3847_70474C.1.pep
RGIVCSLKIVGKIMSISRTQMGCLLVLILILLSSSCLNHGALGARYGKKVEHTHKFRVWWKSFSHETARGSYKTVNKEVPSSPDPLHNR

SEQ ID NO: 252989 - protein, 110 aa, Glycine max
  Clone ID: PAT_MRT3847_70475C.1.pep
MPSLGVQLTIQDNHVAMENGMLKVTLSNPEGIVTGIQYNDIDNLLEVLNDESNRGYWDLVWSSPTSTGTSGTFDVIKGTTFKVMVENEDQVELSFTRTCDVSLEGKLVPL

SEQ ID NO: 252990 - protein, 68 aa, Glycine max
  Clone ID: PAT_MRT3847_70476C.1.pep
NMFHNLLNVSPWNFQKVQNLDAISYVLSVLFSNQNWISHLDDSCNNGFYKPITWVKCNQSKILIGEHR

SEQ ID NO: 252991 - protein, 102 aa, Glycine max
  Clone ID: PAT_MRT3847_70477C.1.pep
IMHCAALIQSEGFKNVNTLTPDEHPLDTSAIQRTSNRFFNVYYALLKCKYDLEGMRHGLRDTLLSDTFLPMAAIVTRTHTATIAGAIIHWTIVMFTDVLANS

SEQ ID NO: 252992 - protein, 99 aa, Glycine max
  Clone ID: PAT_MRT3847_70478C.1.pep
LKKLEMVPRSLVPPPPPLPKFSRPKAEESVTNREIAKFWRQKRIVEEDHLLAAIKAAARLRARTLTEQEYQRFELSLKTDNDNDETQKEMVRWIVGKNV

SEQ ID NO: 252993 - protein, 90 aa, Glycine max
  unsure (1)..(90): unsure at all Xaa locations
  Clone ID: PAT_MRT3847_70479C.1.pep
VVKVCVPPYESPDRVLGCLMQNEIEGGTDPVDPFKGXSKEPAYLTLHPXGSLRVIQDRDYTLYESRALPPSLADKYQDQGTDLLGKTTEE

SEQ ID NO: 252994 - protein, 67 aa, Glycine max
  Clone ID: PAT_MRT3847_7047C.1.pep
MTTSAPFLYSQAVHGGLAVSSEGEATRSGSYTPLRALFSKDSSTACHGCQKCIRSVIHLAIRVSFAP

SEQ ID NO: 252995 - protein, 76 aa, Glycine max
  unsure (1)..(76): unsure at all Xaa locations
  Clone ID: PAT_MRT3847_70480C.1.pep
MKLTRTTVQGTILRIDFWDNRLTEKTIRTCGDLHITHGNYTMTTQLSTVVPHDITGHVXTWAINSLPWVLTAENKY

SEQ ID NO: 252996 - protein, 42 aa, Glycine max
  unsure (1)..(42): unsure at all Xaa locations
  Clone ID: PAT_MRT3847_70481C.1.pep
TLVLGQALLCVNEISADLLVAKAFCDLXPIYTYERAYDINTL

SEQ ID NO: 252997 - protein, 77 aa, Glycine max
  Clone ID: PAT_MRT3847_70482C.1.pep
SFIQFFAMTGILLLSMRSLSQKYKIHGLQEDIHALRVEHDSLTDRINNIKNDLLREASHDPTGLFASRLRHLFAEQH

SEQ ID NO: 252998 - protein, 48 aa, Glycine max
  unsure (1)..(48): unsure at all Xaa locations
  Clone ID: PAT_MRT3847_70483C.1.pep
LLVETEGSYXTVQQKXTNXDIHVGQSYSFLVTMDQNGQHDYYIVXSPV

SEQ ID NO: 252999 - protein, 45 aa, Glycine max
  unsure (1)..(45): unsure at all Xaa locations
  Clone ID: PAT_MRT3847_70484C.1.pep
MGEQTFMAMRPDRVQRGLSGEIIATLXKKGFYVRGLELVTVDRPF

SEQ ID NO: 253000 - protein, 302 aa, Glycine max
  Clone ID: PAT_MRT3847_70485C.1.pep
FSMMHMGFNNFSGKFPPEIASIPIVVLNITSNQFSGEIPEEIGNLKCLMNLDLSCNNFSGTFPTSLNNLTELTKFNISYNPLISGVGPSTRQFATFEQNSYLGNPLLILPEFIDNVTNHTNTTSPKEHKKSTRLSVFLVCIVITLVFAVFGLLTILVCVSVKSPSEEPRYLLRDTKQWHDSSSSGSSSWMSDTVKVIRLNKTVFTHADILKATSSFSEDRVIGKGGFGTVYKGVFSDGRQVAVKKLQREGLEGEKEFKAEMEVLSGHGFGWPHPNLVTLYGWCLNGSEKILIYEYIEGGSLE

SEQ ID NO: 253001 - protein, 80 aa, Glycine max
  Clone ID: PAT_MRT3847_70486C.1.pep
TPFKGLFNIEGLALLLIGCFSTIHQENELKNDIHTLVGCLLPSVSPGQELETNFLRYGDPTKGLISQHMFFHTQTRESNS

SEQ ID NO: 253002 - protein, 59 aa, Glycine max
  unsure (1)..(59): unsure at all Xaa locations
  Clone ID: PAT_MRT3847_70487C.1.pep
RNGRAGPGVXTLKGFGRRDFLKVVVRRRAFVYIGPPSSGTYPWFQKLRQGLVAYALAIG

SEQ ID NO: 253003 - protein, 54 aa, Glycine max
  Clone ID: PAT_MRT3847_70488C.1.pep
KPRCMFQNSPANFVFRDKRPGTLPFFFPKVWGLKNALFLLGNGGHRNRGWGFFF

SEQ ID NO: 253004 - protein, 160 aa, Glycine max
  Clone ID: PAT_MRT3847_70489C.1.pep
FVIDVSDGTSDINSEDGCLKSVRNDYDEHEGDDDFYISEVLKENVNGSMVDDEVEADFEDDIEGSDVHIEGETNNSSLLLGMNGSVTSHILQTKDTKKATHVTSGENKWIQVRKGTKVIVQVVKEDLGTKGPTLTAYPKLKSRFWVLIACCDKIGVSKKI

SEQ ID NO: 253005 - protein, 76 aa, Glycine max
  Clone ID: PAT_MRT3847_7048C.1.pep
LRVLNFCLLLCVRLLKGLKTTLCAGHRLRESLSVPLLVNLLNTLRFDVGLRVRLKLLLSLAQFSVQAEDQAGEILD

SEQ ID NO: 253006 - protein, 69 aa, Glycine max
  Clone ID: PAT_MRT3847_70490C.1.pep
NYIKHSLSLYKTLLLHVMGYMIYWLTKPIRGKFTILYNINQCNMAHHLCETRTPFLNVAHHHHCKKLNL

SEQ ID NO: 253007 - protein, 175 aa, Glycine max
  unsure (1)..(175): unsure at all Xaa locations
  Clone ID: PAT_MRT3847_70491C.1.pep
RDSKLVISAESINYGHKILQGIQNDNKNMKKSLEDLITKNEFDKKLLTNGIPPTDIKITFNNIESLENFKETLEKWVILPLRKPKLFNKKHLTKPYRGILLFNPPNTKKTILTKSVTTEAKPNSINISVSSITSKXCSKEEKYVKXVFSLTIEITPSMIVINESNNILQGHQNPT

SEQ ID NO: 253008 - protein, 70 aa, Glycine max
  Clone ID: PAT_MRT3847_70492C.1.pep
SQIGEQDAEFPVRDEKNFASEKPQCQQMQICQLEQESTHATSECASEIHADEPSSFYSFPQSSRFVNNAA

SEQ ID NO: 253009 - protein, 65 aa, Glycine max
  Clone ID: PAT_MRT3847_70493C.1.pep
GKQIQQFYKRYLLCIFSYLSSVITGLIVVHVHPRCPSLENEKKNHFKNIFIYQKGKKILMQNHLW

SEQ ID NO: 253010 - protein, 51 aa, Glycine max
  unsure (1)..(51): unsure at all Xaa locations
  Clone ID: PAT_MRT3847_70494C.1.pep
LSMPLLPQXKVXXFVSFTSXQGREXKEIWPNXATATTLTVPXTVSGLGPVQ

SEQ ID NO: 253011 - protein, 49 aa, Glycine max
  Clone ID: PAT_MRT3847_70495C.1.pep
NTSANGEVVNVRMLNTPFFVNNGHSYQCNSQPVCCLIAAGPFPRLLTAV

SEQ ID NO: 253012 - protein, 136 aa, Glycine max
  unsure (1)..(136): unsure at all Xaa locations
  Clone ID: PAT_MRT3847_70496C.1.pep
MLHTLDLASSSSSASTSFFISQNDVASSFKTWFASARQQQLPFDPLLNRIHQILSSPDDEDFSDELSALRLPLSERLVLRVLCHGAARRDILPCLKFFDWAGRQPHXHHTRATLXCIFKILARADLKPLVLEFLDA

SEQ ID NO: 253013 - protein, 43 aa, Glycine max
  Clone ID: PAT_MRT3847_70497C.1.pep
ARGREQTILFYQILSYPDFISCRFYFVQILFYFVYGLRLKIDL

SEQ ID NO: 253014 - protein, 251 aa, Glycine max
  Clone ID: PAT_MRT3847_70498C.1.pep
MSFLAGRLAGKEAAYFFQESKQAVGKLAQKNPLPKTNNNNLNFHEGYDHADVLPEVLRHSLPSKVFRNDEATSFSFSASKWVLHSDPKTQSSVSPDALNPLRAYLSLPQVTFGPKRWQLPEAANTVSASTANESRLDRYATHVNPEKLKAAGEGLAHVGKAFAVATAFVFGGAALVFGMVASKLELQNMSDIKTKGKDYVEPKLENIKEQFVPLKIWAENMSRKWHVERDDVKQKTIIKELSKIWGEKRTD

SEQ ID NO: 253015 - protein, 223 aa, Glycine max
  unsure (1)..(223): unsure at all Xaa locations
  Clone ID: PAT_MRT3847_70499C.1.pep
KRLRHPNIILFMGARGSFVFYDFSGSLXLLHRNTSKLDWRRRVHMALDIARGVNYLHHCNPPIIHRDLKSSNILVDKNWTVKVGDFGLSRLKHETYLTTKTGRGTPQWMAPEVLRNEPSDEKSDVYSFGVILWEIATEKIPWDTLNSMXRLLASVDXPDQRLEIPKNVDPRWASIIESCWHSDPACRPTFPELLDKLKELQKQYVIQFQAARSTAKESTQKES

SEQ ID NO: 253016 - protein, 162 aa, Glycine max
  Clone ID: PAT_MRT3847_7049C.1.pep
RTIADNLCPKYNEQYTWEVFDHATVLTVGVFDNSQLGEKGNGSSKDLKIGKVRIRISTLETGRIYTHSYPLLVLHPTGVKKMGELHLAIRFSCTSLANMLYLYSRPLLPKMHYVRPFSVTQLDMLRHQAMNIVAARLGRAEPPLRKEVVEYMSDVDSHLLSM

SEQ ID NO: 253017 - protein, 72 aa, Glycine max
  Clone ID: PAT_MRT3847_704C.1.pep
TRNVLPQHLRGLSNPKFFCSTLIRFSSCSNKKPRGKTLLSNFIFNQYPPCYLRPSFIHPGHLLRGEVLSSTK

SEQ ID NO: 253018 - protein, 63 aa, Glycine max
  Clone ID: PAT_MRT3847_70500C.1.pep
KSGPLPYLKPKAFIQYLGQNMGSKGHWFGASKKYKSYGIQEEALNPGKLELNTKISFFIKQNT

SEQ ID NO: 253019 - protein, 141 aa, Glycine max
  unsure (1)..(141): unsure at all Xaa locations
  Clone ID: PAT_MRT3847_70501C.1.pep
KAFAVATAFVFGGAALVFGMVASKLELQNMSDIKTKGKDYVEPKLENIKEQFVPLKIWASFKLYFFNLLNVSIHKPNSKLGFAXENMSRKWHVERDDGGQKTIIKELSKIWGEKRTARDLQFYLFSSYFSCFGNSGMDIQT

SEQ ID NO: 253020 - protein, 162 aa, Glycine max
  Clone ID: PAT_MRT3847_70502C.1.pep
MPKGGRKGGHKGRVRQYTSPEEIDAQLQAEKQKANEEDEQEEGGDGASGDPKKEKKSLDSDESEDEDDDYQQKRKGVEGLIDIENPNRVAQTTKKVTQLDLDGPKELSRREREEIEKQKAKERYMKMHLAGKTEQAKADLARLAIIRKQREEAARKKEEERK

SEQ ID NO: 253021 - protein, 156 aa, Glycine max
  Clone ID: PAT_MRT3847_70503C.1.pep
MNNSTNNKGNNGFDPSEFTYGVAFVIGLIFLLVSIALACVRLRMARGPNMLNILAGIPPSRHARSSEEDNSAEQGLHHIDKSFERYPKLLYSQVEKGSSSSSVVSSSCSICLGDYKESDTLRLLPHCDHLFHLACVDPWLRLHSTCPICRKSSIHA

SEQ ID NO: 253022 - protein, 176 aa, Glycine max
  unsure (1)..(176): unsure at all Xaa locations
  Clone ID: PAT_MRT3847_70504C.1.pep
PIEWTASANRLLSKGIDILCCEHPNLDGWITKHDISMMXEMINSLCGGDEKXMRERTHLLPAWSTRMAIRMNDDRRVECAIHTGFPITAICYSIINEMLIRYSYAKLLSQAKAPCMLLQTFKNGDSLRVYGDDNLSRAHEYVKPYCSGSKSKSYVARHRYTITDGIDKTSATLQFR

SEQ ID NO: 253023 - protein, 69 aa, Glycine max
  Clone ID: PAT_MRT3847_70505C.1.pep
MKFYVSAKGIKRVVAGKGSAKTTAPAYTVAARRISNRMVVVLGIVLLLSFVRVAVLVLESSAVCSTFDC

SEQ ID NO: 253024 - protein, 34 aa, Glycine max
  Clone ID: PAT_MRT3847_70506C.1.pep
NSIHTHSLTFEFSQVARCSTVSAPVPSRLETVRP

SEQ ID NO: 253025 - protein, 58 aa, Glycine max
  Clone ID: PAT_MRT3847_70507C.1.pep
KTNLNPTEVACNFLNKCFETLPAENRRLQKELQNLKPLKLAQPLSMPIPSATLTICPS

SEQ ID NO: 253026 - protein, 85 aa, Glycine max
  unsure (1)..(85): unsure at all Xaa locations
  Clone ID: PAT_MRT3847_70508C.1.pep
MPKVRRLKSPYTDCNRPYPYPSNSKNIELHKPMNLLASADEMKEWEQATCTICMETPHNGVLLKCSFYEKGXIPYMCNTSYRHSN

SEQ ID NO: 253027 - protein, 73 aa, Glycine max
  Clone ID: PAT_MRT3847_70509C.1.pep
TILLFFPYLYHLTYRSLTIYKNGPKRGGRKVYTIWQKKTKWKGVPVIITTNCLMKKKIRGQFFFMRTPTFDFL

SEQ ID NO: 253028 - protein, 68 aa, Glycine max
  Clone ID: PAT_MRT3847_7050C.1.pep
TLSMESYYVDVMMFIHACLDQHQKLALNHRKNHSNKTNHLEIIQALDCCQFSVVKTIIACHDLVGKDF

SEQ ID NO: 253029 - protein, 146 aa, Glycine max
  Clone ID: PAT_MRT3847_70510C.1.pep
ARSEIFKNMLECDECKAAPSNAITIPDLNHEELESLLEFLYSGTLNVEKLEKHVYALSQAADKYVIPHLLKHFERYMLSSISTSNGLEALGIADTCSNLKVKEPTLNFLVKNIEHMVSSPKFEAFVHRSPHLNVELVARAFVNGAK

SEQ ID NO: 253030 - protein, 83 aa, Glycine max
  Clone ID: PAT_MRT3847_70511C.1.pep
YTSMKRQGDTEVRQYRSSKLRSQCLGSFSNSHWYCPDATVCGNSLLWEGVERRLEHREMCTTQSDLNFALTQVPSWECLATHY

SEQ ID NO: 253031 - protein, 36 aa, Glycine max
  Clone ID: PAT_MRT3847_70512C.1.pep
MLLSSSDDRSRKLFWTEKSGSKERRCISESRPPLEP

SEQ ID NO: 253032 - protein, 79 aa, Glycine max
  Clone ID: PAT_MRT3847_70513C.1.pep
NHNSTPFSTKKNIFVPAYISLNLHYIISLSQTLKNLFNKSIPSHLLTTRRMRQSNQTNTFSPLDFTLRIIYMNHSNIFP

SEQ ID NO: 253033 - protein, 50 aa, Glycine max
  Clone ID: PAT_MRT3847_70514C.1.pep
VLHHFLGPPPSPHSGLQPSKALSFLSNELPIISRLAIVVAPSKLLPVSFI

SEQ ID NO: 253034 - protein, 88 aa, Glycine max
  Clone ID: PAT_MRT3847_70515C.1.pep
ALAISQYVLGPFTYCRLVVHHILVSRHLHHLPIIIFHAPHFIIITGSIFLFILVISEPFLNVPAVTKCIGSLIFSQHRNKNPHNNAYS

SEQ ID NO: 253035 - protein, 50 aa, Glycine max
  Clone ID: PAT_MRT3847_70516C.1.pep
EEVHSKLPAVTVQGESDQNLQQQTLDDDESEAINNAKRCIPEKELDRIVH

SEQ ID NO: 253036 - protein, 65 aa, Glycine max
  unsure (1)..(65): unsure at all Xaa locations
  Clone ID: PAT_MRT3847_70517C.1.pep
DKRSFRPTKVDNLKGASSKPKKVLGXKPKVGFEQLVKIMVDQAIXMAKKKKVFVDAGTINAHHPP

SEQ ID NO: 253037 - protein, 103 aa, Glycine max
  unsure (1)..(103): unsure at all Xaa locations
  Clone ID: PAT_MRT3847_70518C.1.pep
RPATVYFSLLMHVFNFLGYAPTSYTGLHKMVXWTLTTACLMFFAYLKNXFFIXILLLLCLSTLALLYLKDMQEEAHTLDDATQPSRFFQVFKALKELMTPTQI

SEQ ID NO: 253038 - protein, 43 aa, Glycine max
  Clone ID: PAT_MRT3847_70519C.1.pep
ATLILSNVGDSKRLQLCKSKPNSNKLKVMVKSRRCSTTHTLCQ

SEQ ID NO: 253039 - protein, 79 aa, Glycine max
  unsure (1)..(79): unsure at all Xaa locations
  Clone ID: PAT_MRT3847_7051C.1.pep
WRLHNPAICRRAKHHQLEHSQHSTAAIAHPHIATQLMHTNTHPPPYASTTHLLITIDYLPLFVKSGCIWGTXRRQKLVA

SEQ ID NO: 253040 - protein, 57 aa, Glycine max
  Clone ID: PAT_MRT3847_70520C.1.pep
SRNLLIQFSKRDLFLLFDDRKVNVGFSNNISITPSGYFAGKHSLRAGTVNDVSNVCT

SEQ ID NO: 253041 - protein, 58 aa, Glycine max
  Clone ID: PAT_MRT3847_70521C.1.pep
MILICYTYMFSTSWVIGIALKWIQFCFGRMENNLIGGLLFFLLGLMEKEIYNILHLLL

SEQ ID NO: 253042 - protein, 124 aa, Glycine max
  unsure (1)..(124): unsure at all Xaa locations
  Clone ID: PAT_MRT3847_70522C.1.pep
QACWWKKACLPGKASARLRRPLAAKKVPLEGRGGDNLNKMAMRSEKTNKIDIFKVLKGEHPDVGXSSAALGTRSSFLNYVFGKLAQEAGRLGRDNKRPTNSTXEIQTXGRLLLPGELAMRAVSV

SEQ ID NO: 253043 - protein, 40 aa, Glycine max
  unsure (1)..(40): unsure at all Xaa locations
  Clone ID: PAT_MRT3847_70523C.1.pep
MQGGKKAGESIKETATNIGASAKAGMEKTXATVXEQAEDS

SEQ ID NO: 253044 - protein, 72 aa, Glycine max
  Clone ID: PAT_MRT3847_70524C.1.pep
RIILLLYISRLEMGLYEHFHGFQWGAHLLDGDPAYIPGCYSSIILKGVIECDHEETDGMDTRKLQEEFSQLG

SEQ ID NO: 253045 - protein, 110 aa, Glycine max
  Clone ID: PAT_MRT3847_70525C.1.pep
GSTRVCIRYPYHQLDKHEFTITPLVIRLKLVSFSLSPRIALRSALSPSLEVTPTRAVPDNGGSRIVFSRPTLEPCEPHPPSVRYTPVLLGGINFSACGGALLTTARDGST

SEQ ID NO: 253046 - protein, 68 aa, Glycine max
  Clone ID: PAT_MRT3847_70526C.1.pep
DALVKHDRLNIQLCIHNAVANVLFLESPARVGFSYSNTTSDYDHSGDKPTAKDEYVFMINWLERFPDP

SEQ ID NO: 253047 - protein, 104 aa, Glycine max
  Clone ID: PAT_MRT3847_70527C.1.pep
MFLGMHLNLWILIIGHCFVHIYSRRALRLREEDAEGRHFISSVKEERRKMRKFDPWPVFFKREWKRNWPFLVGFAVTGALITKLSLGLTEEDAKNSKFVKAHKR

SEQ ID NO: 253048 - protein, 86 aa, Glycine max
  unsure (1)..(86): unsure at all Xaa locations
  Clone ID: PAT_MRT3847_70528C.1.pep
MRAPVVRRISECFDKPQLPNQVSDQICSLTHWDIAMLPTNYIQKGLLFKKPAATLVDQHHFMENLXEKLKHSLSLTLLHCYPLAAR

SEQ ID NO: 253049 - protein, 59 aa, Glycine max
  unsure (1)..(59): unsure at all Xaa locations
  Clone ID: PAT_MRT3847_70529C.1.pep
LIRARLTSFCLSDLAQGHLFWGHFLVFPFFRPLQCAPVRKFELSCFXPGVGGNKSGGAR

SEQ ID NO: 253050 - protein, 62 aa, Glycine max
  Clone ID: PAT_MRT3847_7052C.1.pep
SSLPLNRCSHNQSHVLHICQCHNSLTIFFSDITNGIYCISDGHDQRLMLDPKCYESDQAITF

SEQ ID NO: 253051 - protein, 47 aa, Glycine max
  unsure (1)..(47): unsure at all Xaa locations
  Clone ID: PAT_MRT3847_70530C.1.pep
AHKVNLLTHPTAKTLGEWAGLXNIDSHAEARKVTGFSCVNVKDLGEE

SEQ ID NO: 253052 - protein, 131 aa, Glycine max
  Clone ID: PAT_MRT3847_70531C.1.pep
MSAPAVRRISECFVKPQLPNQVSNQICNLTHWDIAMLSTNYIQKGLLFKKPATTLVDQHHFMENLLEKLKHSLSLTLFHFYPLAGRLVTHQTHDPPSYSVSVDCKNSDGARFIYATFDITISDILAPIDVP

SEQ ID NO: 253053 - protein, 48 aa, Glycine max
  unsure (1)..(48): unsure at all Xaa locations
  Clone ID: PAT_MRT3847_70532C.1.pep
LXKRRLRKCISSHLFKQLGTKLHSIYHITLDNIQNTGRFEFHWTIWRF

SEQ ID NO: 253054 - protein, 77 aa, Glycine max
  Clone ID: PAT_MRT3847_70533C.1.pep
RITLTQSYVKGHNKMMDIDLSVSKSKTFNQTNKKVSRSGLREVGKVHPIYGVLISIRAYFASCVFYSFCCILDPHYG

SEQ ID NO: 253055 - protein, 73 aa, Glycine max
  Clone ID: PAT_MRT3847_70534C.1.pep
PTRPATRPKKTLIYAYVSVSVTVPALISSNGLILLLFSFPFLRQNQTLFFSFPIIPLTLQFQCPTSSFFPLTT

SEQ ID NO: 253056 - protein, 65 aa, Glycine max
  unsure (1)..(65): unsure at all Xaa locations
  Clone ID: PAT_MRT3847_70535C.1.pep
TAXENXXTVXXXXXXRTXXFXXXGGXXXEXXRXQXWXKPXXKESFXVXCKLHADSHKSECNMYCL

SEQ ID NO: 253057 - protein, 53 aa, Glycine max
  Clone ID: PAT_MRT3847_70536C.1.pep
TNKYEDVISLYNVNYLHVYILGICTCYFQKDIFRKEEGLQGFTPLSKKSIMSN

SEQ ID NO: 253058 - protein, 123 aa, Glycine max
  unsure (1)..(123): unsure at all Xaa locations
  Clone ID: PAT_MRT3847_70537C.1.pep
DAGPKAYWDTRQLTIDEVEQAIQRTANMTXITPEVLKAHPRTLASLRMSTAPPNAWDRVVRLSHGSKXSRDTRDKGKLPPRIKGDVLHTHYTXMCAVLTDILDLDLVYMCLTGESADSRHREL

SEQ ID NO: 253059 - protein, 74 aa, Glycine max
  unsure (1)..(74): unsure at all Xaa locations
  Clone ID: PAT_MRT3847_70538C.1.pep
XYVVVGIVEAXXTXXHTXXTAMXPWNLTXKAPNXXLHXREXLXTPAXXPGSGKFXFXGXERSFHLGWRXXXRGS

SEQ ID NO: 253060 - protein, 80 aa, Glycine max
  Clone ID: PAT_MRT3847_70539C.1.pep
MRKRPDQMEKGAAAKNQNSRICFLASLSAFFWFLLLYFHFVVLAGDNSNRKISYNNQVDLDHSTLSTTPVSVSYEPPPTQ

SEQ ID NO: 253061 - protein, 371 aa, Glycine max
  Clone ID: PAT_MRT3847_7053C.1.pep
MEGMGCSYIRSPGSTHASGSSAVPQSSNSNVICRPNSKIQAEAKSPQLSGHSPMTQSFNNPIHFGLPSPFNISSYPIGSTGSSQGFSPAIEPLYSPVENMSHDFRHEEQELFEDHCYIPDPVSLLGPVSESLDNFQLNSGSGFLKELYTPSSTALKNSAASSDINQTSQIESALSRAQFIYMLVFPLDNAAANDKLTWQVWNTLPLGQEGLDTLQLQNISQVFRHEEQAHLEDPCYIPDPVSLLGPVSEALVISSIHSAQHFVLPNGQSGGTFSPVTGSNGYDPWSQGALFPSLSGGLKAQESATQNEMIYASQSGSASNHVHECSKANSWTKNEWPVKTTVEGLGKSSVARPHNGSQHPTSDVQSFWSFD

SEQ ID NO: 253062 - protein, 81 aa, Glycine max
  Clone ID: PAT_MRT3847_70540C.1.pep
GAAALKRALGFIPFMVRCTHTQPVFFRFKEELVSKVPPGITRKGAQKMAYNMVVHRQRGGSLRIQSDQMGIYHSPPFIVLA

SEQ ID NO: 253063 - protein, 42 aa, Glycine max
  Clone ID: PAT_MRT3847_70541C.1.pep
VKLNVRRSHGVSSDRDMTALAQHDVVIVGGTSDPFCGLVAAV

SEQ ID NO: 253064 - protein, 101 aa, Glycine max
  unsure (1)..(101): unsure at all Xaa locations
  Clone ID: PAT_MRT3847_70542C.1.pep
FLQSFKNLLTVRVYSDDDXISDHEYVKPYXNGCKKKRYLTRHNITITDGVDKARATSXFRKCAYWDLIKRNFKQQSNVLWVAPXDTASPWSQLHYAIRYNL

SEQ ID NO: 253065 - protein, 147 aa, Glycine max
  unsure (1)..(147): unsure at all Xaa locations
  Clone ID: PAT_MRT3847_70543C.1.pep
SLSGKGEGPAIGIDLGTTYSSVGGWQHHXCEIIGNDHGNRTTPSYEAFTDTKRLICDADNNQAAMNPTNTRLDANRLRGKRXSYASGQGDMNLRAVKESSGPAEKPMVAVNYKGGEKQRSAEHISCMALMKMQGIAEAYLGSTINNA

SEQ ID NO: 253066 - protein, 84 aa, Glycine max
  unsure (1)..(84): unsure at all Xaa locations
  Clone ID: PAT_MRT3847_70544C.1.pep
VLKPDIAAPGVNILAAWSPAFSARLVSDAANEDESDLHPLNFNIESGTSIXPCPHITGIVALIKTIHPTWSPAALAFYLTKGMD

SEQ ID NO: 253067 - protein, 49 aa, Glycine max
  Clone ID: PAT_MRT3847_70545C.1.pep
KISSSCSRCSPICLSISESHCLAAFHLNHLPKFDLLISHGMAFPYTITQ

SEQ ID NO: 253068 - protein, 61 aa, Glycine max
  Clone ID: PAT_MRT3847_70546C.1.pep
QQSTRFVVRFERALEKPCSSLCSPTLSSPRTHRSYAGVLQSFAPEMWERNSGKEMNSCGAA

SEQ ID NO: 253069 - protein, 69 aa, Glycine max
  unsure (1)..(69): unsure at all Xaa locations
  Clone ID: PAT_MRT3847_70547C.1.pep
GVKFCEAVWFKAGAQIFSEGGLDYLRNTDLMHAQSILAIWAAHDELMAIVEGYRVGXGPHCERXDTIYP

SEQ ID NO: 253070 - protein, 53 aa, Glycine max
  Clone ID: PAT_MRT3847_70548C.1.pep
YSNQDQTVFNLSDKRFEIMPHLSRGGILYIVYVREGECLRNSSVKFSTETREN

SEQ ID NO: 253071 - protein, 50 aa, Glycine max
  Clone ID: PAT_MRT3847_70549C.1.pep
KIRTCQFITCFTSHASRSPTSVLMTHWAVCVHVKYYKSKMILKKGTVNNK

SEQ ID NO: 253072 - protein, 86 aa, Glycine max
  Clone ID: PAT_MRT3847_7054C.1.pep
LERGLAGESVISSKDVVMVLFETAILTTELSLDDPNTFCNRTHRMLKLGLSIDEEAAEAHADMPTVEDADADADADGSKMEAADTV

SEQ ID NO: 253073 - protein, 102 aa, Glycine max
  unsure (1)..(102): unsure at all Xaa locations
  Clone ID: PAT_MRT3847_70550C.1.pep
GXTXXVXNXKXXQXXXATXXENDXACXXPXXXYAYXXXXVXTIIXXHXVXXSXYXXALGHXXPXRXNXDXAXXXTGTXPXXXTXXXXSXSSSXIPSLRTRAC

SEQ ID NO: 253074 - protein, 301 aa, Glycine max
  Clone ID: PAT_MRT3847_70551C.1.pep
LDEKERFRDLRAQKSLNTIRPSSEEVRTYFRKEEVLRYSIPDRAFSYTAADGKKSIVAPLRRCGGKPTSKARDHFMLKRDRPPHVTILCLVRDAAARLPGSIGTRADVCTLIRDSQYIVEDVSDAQINQVVSGALDRLHYERDPCVQFDGERKLWVYLHREREEEDFEDDGTSSTKKWKRQKKDAADQSDQGTVTVACPGTGEQSGYDLCSDLNVDPPPCIDDDKGMEPLSTDTRPNAEAHVDVNRASEEGNVCDGNSMAWEALDLNPTRELCQENSTNEDFDEESFGRERPVGLLSASLL

SEQ ID NO: 253075 - protein, 130 aa, Glycine max
  Clone ID: PAT_MRT3847_70552C.1.pep
QDFFFSLLFSGDNAIDPSIQLVVHLVFQSIYRQQAFKIEHYFVFLENMHKHRKGYETMIQTCTIRTLISTPISSILIQLHKCRVNKKKEIVPNSRLKPTSLHLFIRYFSLVNSEGGGLSLQLANHFHSHR

SEQ ID NO: 253076 - protein, 50 aa, Glycine max
  Clone ID: PAT_MRT3847_70553C.1.pep
SRGGDPKIGVDRLPKIFVPVRTCFSPRSSLRNFVKAFEFLNHLWIFGVKN

SEQ ID NO: 253077 - protein, 77 aa, Glycine max
  Clone ID: PAT_MRT3847_70554C.1.pep
TIFSLIALEDEVVEVTCLGGKNKRTFFHKRGGKKNLKEPRPGTVLIGENMGFLTAHPKGGGKKPGFGGGSNLNPSYF

SEQ ID NO: 253078 - protein, 57 aa, Glycine max
  Clone ID: PAT_MRT3847_70555C.1.pep
CIPISFFNMITNSSFLFLAISINLYYITYSLLLISPEYITKYSNITYIIYSPTINKS

SEQ ID NO: 253079 - protein, 471 aa, Glycine max
  Clone ID: PAT_MRT3847_70556C.1.pep
LRVRGISKEEKYMLRRIGLMMKPFLLLGRRGVFDGTVENMHLHWKYRELVKIICNGSLEEVHQIALTLEAESGGILVAVERVRKGFAIIVYRGKNYSVPVCLRPQTLLNKRQALKRSIEAQRRESLKLRILTLDKEINELKLQIVEDEEANSKQMAEASRLDMATDEHEACSNFINWHSPKEASGDNQQAIQEEPVELIDSGGAHQGEPENSISWNSSIEASIDNQQAIQEHPVELIDGGATHQDEPESWPSLIHKETQSDEVSDSVTDTELHISNRKGMESSNSLSKNDREPLAPVIYMSLPSRSVHLSTKERLLLRKQALKIKQPVLAIGKSNIVSGVVQTIKAHFEKHPLAVVNVKGRAKGTSVQELVFKLEQETGALLVSREPSNIILYRGWPSERRSRPAMHVNKVRNEEGTEPSVSPAYAHRIRIRNRNRKIRISMIGKRRIDRTGSRPNFNFRRDSTPIFSTSS

SEQ ID NO: 253080 - protein, 61 aa, Glycine max
  Clone ID: PAT_MRT3847_70557C.1.pep
PFSYSFIIQRRERKTNFTIAFEGPVFVILSQLIGAYRSSVSRLDCSYFMQFSFVPYDYLSL

SEQ ID NO: 253081 - protein, 151 aa, Glycine max
  Clone ID: PAT_MRT3847_70558C.1.pep
MSEGIEAAQPSPAHEQIQQQSVDRQSEDNEHQPSDVSQAPQQLFDARLPFPPHQMRAGFHPRFPPFPPNGMGGPPMRAPFRPPPNFSQQPGGTQPDNFPPFFNSPAHRMGAPGGPAPPRGPPHMNMGVPRSPFPPNFGPTGFSTFAGMAGP

SEQ ID NO: 253082 - protein, 54 aa, Glycine max
  Clone ID: PAT_MRT3847_70559C.1.pep
INYSHYLTLPHQQFQYQNTLKLLTNPKLYHFITQLSPLPHPLPINLIEHFKIHH

SEQ ID NO: 253083 - protein, 89 aa, Glycine max
  unsure (1)..(89): unsure at all Xaa locations
  Clone ID: PAT_MRT3847_7055C.1.pep
TTAEPXXSXRSXXXEXRRSLDCHVXXVSXXHXXTEXFXXEECAVXXXXXXPXXXXXVXVPAAWXXVXIXXSVLRXTXRXRAEFXAXVXA

SEQ ID NO: 253084 - protein, 110 aa, Glycine max
  Clone ID: PAT_MRT3847_70560C.1.pep
QDVEENICKFAKKGLTPSQIGVILRDSHGIAQVNSVTGSKILRILKAHGLAPEIPEDLYHLIKKAVSIRKHLERNRKDKDSKFRLILVESRIHRLARYYKKTKRLPLNNC

SEQ ID NO: 253085 - protein, 151 aa, Glycine max
  Clone ID: PAT_MRT3847_70561C.1.pep
MGRMHSRGKGISSSALPYKRTPPSWLKISSQDVEENICKFAKKGLTPSQIGVILRDSHGIAQVNSVTGSKILRILKAHGLAPEIPEDLYHLIKKAVSIRKHLERNRKDKDSKFRLILVESRIHRLARYYKKTKKLPPVWKYESTTASTLVA

SEQ ID NO: 253086 - protein, 151 aa, Glycine max; identical to SEQ ID NO: 253085
  Clone ID: PAT_MRT3847_70562C.1.pep

SEQ ID NO: 253087 - protein, 53 aa, Glycine max
  Clone ID: PAT_MRT3847_70563C.1.pep
EGSFNRKERRKAKAKFRLIFVESRIPRLARYPRRKKLPPVWKCESTTASPLVA

SEQ ID NO: 253088 - protein, 59 aa, Glycine max
  Clone ID: PAT_MRT3847_70564C.1.pep
FKKHIVGATKYPLSKIKGFQVFDGESMNDDACLVFAYYKDGAADPTFLYFAYALKEVKS

SEQ ID NO: 253089 - protein, 216 aa, Glycine max
  unsure (1)..(216): unsure at all Xaa locations
  Clone ID: PAT_MRT3847_70565C.1.pep
QLFLNYFACSRLCEGGELLDRILSRGGKYTEEDAKAVLRQILNVVAFCHLQGVVHRDLKPENFLFASKDESSKLKAIDFGLSDFVKLDERLNDIVGSAYYVAPEVLHRAYSTEADVWSIGVIAYILLCGSRPFWARTESGIFRAVLKADPIFDEPPWPSLSDEATNFVKRLLNKDPTERMSAAQAXLSHPWIRNKDVKLPLDILLFKLMKAYMCSS

SEQ ID NO: 253090 - protein, 151 aa, Glycine max; identical to SEQ ID NO: 253085
  Clone ID: PAT_MRT3847_70566C.1.pep

SEQ ID NO: 253091 - protein, 151 aa, Glycine max
  unsure (1)..(151): unsure at all Xaa locations
  Clone ID: PAT_MRT3847_70567C.1.pep
MGRMHSRGEGISSSALPYKRDXPSWLKISSQDVEENICXFAKKGLTPSQIGVILRDSHGIAQVNSVTGSKILRILKAHGLAPEISEGLYHXIKKAVSIRKHLERNRKDKDSKFRLILVESRIHRLARYYKKTKKLPPVWKYESTTASTLVA

SEQ ID NO: 253092 - protein, 107 aa, Glycine max
  Clone ID: PAT_MRT3847_70568C.1.pep
RPLGRLCDPPKPQKFRPGENPPGGFKQQKSSPFFHPREKNYPYFSPPFLGTGGNPLPKGEVKKPPLNPWEVFPFFPGRPFQKKKREKKGPKPLGNPQKKQNLTRWGS

SEQ ID NO: 253093 - protein, 148 aa, Glycine max
  Clone ID: PAT_MRT3847_70569C.1.pep
GPFQFCPHWERRSPFPADSIGSPRGFPRAHVLNPRPRAFFSVTPYESFSVAFPGRHLCISAQFFSFFFFAPFFFSPPLFPPWVYTNLSFFSGPTQIPSGPQKGFFVAPKSGGVFTPWRLLPFFSQKKKKKKPKNHKKKKKKKKKKKKT

SEQ ID NO: 253094 - protein, 91 aa, Glycine max
  Clone ID: PAT_MRT3847_7056C.1.pep
KGEGLFKIMEKIQGSLRAPNQTQIKPSSKNPLLRAGDGKGKKNYFFRGHPLLKGGQKAPENRAEKKKKFQRGVPKRGTKQKFPLGGIPEQF

SEQ ID NO: 253095 - protein, 46 aa, Glycine max
  Clone ID: PAT_MRT3847_70570C.1.pep
DKKFQANTIANQQHHLKIFNNSKFHPLVLTQLHPHIILKSEPSPTR

SEQ ID NO: 253096 - protein, 150 aa, Glycine max
  Clone ID: PAT_MRT3847_70571C.1.pep
SSEFGSRRNASEDKHAHVNDGANFDKGRKQDKFGKDVKYSNSHARLGEQEQEEWLNNEKLSIESKRRESPFLTRRDKFKKEFMRRIIPWEMINISWDTFPYHIHENTKNLLVECAASHLRHNKLASSFGSRLSSSSGRILLQSIPGTELY

SEQ ID NO: 253097 - protein, 78 aa, Glycine max
  Clone ID: PAT_MRT3847_70572C.1.pep
RKVDLSNIMESNYMFFVITFFGIYIYKGMALSYMKALLIPDILRSRIHKIKFLLKTKKWIQKDLKMFTTIYICNLQSN

SEQ ID NO: 253098 - protein, 56 aa, Glycine max
  Clone ID: PAT_MRT3847_70573C.1.pep
LFNCLLQLKNPQSPDVELQVYNRCFIFHQYQLKKERKENYQLQQQMVRTTNRQQHT

SEQ ID NO: 253099 - protein, 180 aa, Glycine max
  Clone ID: PAT_MRT3847_70574C.1.pep
IGGKPSGSAVIISGDGTTTVSHYYRNSTQPCRFDLPYDAGKVLDASILPSADDYEEGAWVVLTEKAGIWAIPEKAVILGGVEPPERSLSRKGSSNERSAQEEIRNLTFAGNFAPRRASSEAWNAGDKQRTVLSGIARRTALDEESEALLNNLFNDFLSSGQIDRSLEKLETSGSFERDGE

SEQ ID NO: 253100 - protein, 27 aa, Glycine max
  Clone ID: PAT_MRT3847_70575C.1.pep
RRKIFTNNIIDKLMNSFASITFIYTIN

SEQ ID NO: 253101 - protein, 54 aa, Glycine max
  Clone ID: PAT_MRT3847_70576C.1.pep
DRYNLCFLSHYSLFGFEESRVLGKEKKLTVILSDTKIQKNVFCSCTLCLLLESI

SEQ ID NO: 253102 - protein, 55 aa, Glycine max
  Clone ID: PAT_MRT3847_70577C.1.pep
FMATYNAKLERVIPTILILEDEGVFTSANDHGVMNHSHKLCVTINGLNINRTSQS

SEQ ID NO: 253103 - protein, 65 aa, Glycine max
  Clone ID: PAT_MRT3847_70578C.1.pep
LLKESADPFRVKPPNFLISAVSPVFCLDAFAADFNKSTGAASSPFCRLLAAVPFCRLLAAVRTRG

SEQ ID NO: 253104 - protein, 40 aa, Glycine max
  Clone ID: PAT_MRT3847_70579C.1.pep
QLEQLMETLHIFKHLDFNFVIAYSRLKYGDCKIHNENYTI

SEQ ID NO: 253105 - protein, 111 aa, Glycine max
  Clone ID: PAT_MRT3847_7057C.1.pep
ITSCMCLNVTDASAITVINVVVIANHFFFKSINLFSDVLYIGHQIWTYLVVVHIIQCMMKNFGFLHKAFSSCNWDCFKASQNGRVLKESRIEGERESSSFLCNSNRLLKNK

SEQ ID NO: 253106 - protein, 249 aa, Glycine max
  Clone ID: PAT_MRT3847_70580C.1.pep
KKVQQDWSILQNNLPEEIYVRVYEDRMDLLRAVIVGPYGTPYQDGLFFFDFHLPPEYPDVPPSAYYHSGGWRINPNLYEEGKVCLSLLNTWTGRGNEVWDPKSSSILQVLVSLQGLVLNSKPYFNEAGYDKQVGTAEGEKNSLSYNENTFLLNCKTMMYLMRKPPKDFEVLIKEHFRRRGHNILKACDAYMKGYLIGSLTRDASVSEKSSQNSTSVGFKLMLAKIVPKLFLSLSEVGADCEEFKHLKDL

SEQ ID NO: 253107 - protein, 184 aa, Glycine max
  Clone ID: PAT_MRT3847_70581C.1.pep
MLFIWFCLFSYMTSTSTSLDSLAVSQSIRDGETLVSAGGITELGFFIPGNSARRYLGIWFRNVSPFTVVWVANRNTPLDNKSGVLKLNENGILVLLNATNSTIWSSSNISSKTENDPIARLLDSGNFVVKNGEQTNENGVLWQSFDHPSDILIPGMKIGGNLETGEDRFITSWKSADDPAVGEY

SEQ ID NO: 253108 - protein, 330 aa, Glycine max
  Clone ID: PAT_MRT3847_70582C.1.pep
FFAIDADNSGNKNERYDEVVSEATETLEASAALCSLGNEDAPATASCDNDTCSLKHFDITKDPSDHYFIGANGQSNNRKWFKKVQQDWSILQNNLPEEIYVRVYEDRMDLLRAVIVGPYGTPYQDGLFFFDFHLPPEYPDVPPSAYYHSGGWRINPNLYEEGKVCLSLLNTWTGRGNEVWDPKSSSILQVLVSLQGLVLNSKPYFNEAGYDKQVGTAEGEKNSLSYNENTFLLNCKTMMYLMRKPPKDFGVLIIEHFRRRGHNILKACDAYMKGYLIGSLTRDASVSEKSSQNSTSVGFKLMLAKIVPKLFLSLSEVGADCEEFKHLKDL

SEQ ID NO: 253109 - protein, 49 aa, Glycine max
  Clone ID: PAT_MRT3847_70583C.1.pep
LSVFVEIRGLLLLGMGCIFVLKRSHSLILTPTMEDFFLAEPSESIPHSC

SEQ ID NO: 253110 - protein, 137 aa, Glycine max
  Clone ID: PAT_MRT3847_70584C.1.pep
LYCDHIRLGCNQTRQRVFGPRHRLDKIGSPLIIRSCCKYALFLATYSASSCRSQACSNKRFLPDDNTKHSSFRITGLGGRSLEPFPDGHGRHTRDWIPHGRNQGLGFDDGVSSCIVRIRGRLRNPMTVSFCICPAAY

SEQ ID NO: 253111 - protein, 67 aa, Glycine max
  Clone ID: PAT_MRT3847_70585C.1.pep
KPNFFTTERKIQDLSIKSRCVHLLLEHNNLVLRPKIFFFLYFIKGLFLEGFFKAHQKQMAKGRIYIR

SEQ ID NO: 253112 - protein, 79 aa, Glycine max
  Clone ID: PAT_MRT3847_70586C.1.pep
LRDNETVNYRRQKARPKWLNKSLQRGHHEGLSENRFIIDVNRSLPHWSFTLHQAPRGISTDMVQVKPLYVAACPNRHYT

SEQ ID NO: 253113 - protein, 60 aa, Glycine max
  unsure (1)..(60): unsure at all Xaa locations
  Clone ID: PAT_MRT3847_70587C.1.pep
FFNSXLLLXNXXPXXYHVSPNPTIITMRQXQSXPSPCSCHQXITXQFKXWNXTXGSNXST

SEQ ID NO: 253114 - protein, 61 aa, Glycine max
  unsure (1)..(61): unsure at all Xaa locations
  Clone ID: PAT_MRT3847_70588C.1.pep
DNHSINLLFYQLMXLLLCIGFQDLHFRHVLDSSILGEMKGSXVETIPRWPLVVFLAGGMGC

SEQ ID NO: 253115 - protein, 100 aa, Glycine max
  unsure (1)..(100): unsure at all Xaa locations
  Clone ID: PAT_MRT3847_70589C.1.pep
AGLGGFSWPCAVFFGASGCAFGVGCPFLCCVGGGFSGVSQLVGGGGDPVIGHVGXCPVFFSFRGGSSAAVVKSRLCIEFHAGGGCKFGGSCSFAHGEWVL

SEQ ID NO: 253116 - protein, 151 aa, Glycine max
  Clone ID: PAT_MRT3847_7058C.1.pep
MKPIDDKQETVTIRAVSHDEEGRKRVEKIELNTHNIHTIKYVEKKLINKGVQRKDRHPADGIRIGRPPPKSGHGGKFTWEGPASVEDNELMTEPAAMDEGDPNYLDWEERGEETSELVVGEVEVAKVAEEHDGVARVEVDPRLRVIMSDLC

SEQ ID NO: 253117 - protein, 40 aa, Glycine max
  Clone ID: PAT_MRT3847_70590C.1.pep
MKLLCTKTLTFTNYQLFSVLADTHNCLSAIRQIHLALSNV

SEQ ID NO: 253118 - protein, 556 aa, Glycine max
  unsure (1)..(556): unsure at all Xaa locations
  Clone ID: PAT_MRT3847_70591C.1.pep
MSSADHDSDPPTRLRLPPLSPSLFDSAPPELSHGSSARPSSDPSSPTSSGYAAQRGGSSTATSVSQVDDVLHHEIQQITIHDSQPSSHSSWLPGKRHGDEVDASISWRKRTKHFFVLSHSGKPIYSRFGDEHKLAGFSATXKQAFSFLENGAAHFKLVRAXKDNGGDHVKLVMDGKHQVVFLVKGPIYLVCISCTEEPYESLRGQLELIHGQMIVILTKSVNRCFEKNPKFDMTPLLGGTDIVFSSLIHSFSWNPATFLHAYTCLPLAYATRQAAGAILQDVADSGVLFAILMCRHKVISLVGAQKASLHPDDMLLLANFVMSSESFRTSEAFSPVCLPRYNGLAFLYAYIHFFDDDTYLMLLTTSSDAFYHLKDCRIRIETVLLKSNVLSEVQRSLLDGGMHVEDVPPLPSSGSSPHLSQHRLPSDSPEREPNCHIGGVAGLWHFIYRSIYLDQYISSEFSSPINTPKQQKRLYRAYQKLFASMHDKGIGPHKTQFRRDENYVLLCWVTQDFELYAAFDPLADKALAIKTCNRVCQWVKDVENEIFLLGASPFSW

SEQ ID NO: 253119 - protein, 169 aa, Glycine max
  unsure (1)..(169): unsure at all Xaa locations
  Clone ID: PAT_MRT3847_70592C.1.pep
MSSADHDSDPPIRLHLPPLSPSLFDSEPPELSHGSSARPSSDPSSPTSSGYAAERGGSSTATSVSQVDDVLHHEIQEITIHDSQPSSHSSWLPGKRHGDEDDASISWRKRKKHFFVLSHSGQPIYSRYGDEHKLAGFSEPLQAIIXSFGENGGDHVKLGRAGKHQVGFL

SEQ ID NO: 253120 - protein, 143 aa, Glycine max
  Clone ID: PAT_MRT3847_70593C.1.pep
RSEFGSRFYPRWVAKILHSIPVFFFLVMPFTHGRTHSWSAALCDFIKGFLFHAVGIIFAVVVPVAFSMLRLLFSSQTMNWFAHPYLAFAMFIPCALVGLLIPRIIWRHFPLSQDISIVKISKEALSDEARFWGALGFYAVLTL

SEQ ID NO: 253121 - protein, 286 aa, Glycine max
  unsure (1)..(286): unsure at all Xaa locations
  Clone ID: PAT_MRT3847_70594C.1.pep
MSSADHDSDPPIRLDLPPLSPSLFDSEPPSELQQQSNGSAARPSSYPSSPTSSGYAAERGSSSTASSISQVDDVLHHEIQEITIHDSQPQPPSHSSWLPGKRHADEDDASISWRKRKKHFFVLSNSGKPIYSRYGDEHKLAGFSATLQAIISFVEKXGDHVKLVRAGKIRWXFLVKGPIYLVCISCTEEPYESLRGQLELYYGQMIVILTKSVNRCFEKNPKFDMTPLLGGTDIVFSSLIHSFSWNPATFLHAYTCLPLAYAIRQAAGAILQDVVDSGVLFAFLIC

SEQ ID NO: 253122 - protein, 191 aa, Glycine max
  unsure (1)..(191): unsure at all Xaa locations
  Clone ID: PAT_MRT3847_70595C.1.pep
PTRPHTPTVIDLYSVKSRILKHAGDLVAAAAFADEARCMDLADRYVNSECVKRMLQADQVALAEKXTAVLFTKDGDQHNNLHDMQCMWYELAGAESYFRQGNLGMALKKFLSVEKHYADITEDQFDFHSYCLRKMTLHTYVEMLKFQDQLHSHAYFHKAAAGAIRCYIELHDSPPKLTTEEDNDLSKLLPS

SEQ ID NO: 253123 - protein, 239 aa, Glycine max
  Clone ID: PAT_MRT3847_70596C.1.pep
HKVWVLLSGCWEENKPFTRMMVFEYAPNGTLFEHLHIREAEQLDWGMRMRIAMGIAYCLEHLHQLTPPIAYRNILSSSIYLTEDYAAKLSDLSFWTDIVSTKKGSEAPQLLETPSAYIKANVYSFGVLLFELITGRIPFAVENGLFEDWAAEYMKGQPLKDLVDTSLNSLQANEIEKWEEVIKSCVHPDPEKRPTMREVTAKLKEITAMGPDGATPKASPLWWAEIEIMPSDLSSDVKP

SEQ ID NO: 253124 - protein, 111 aa, Glycine max
  unsure (1)..(111): unsure at all Xaa locations
  Clone ID: PAT_MRT3847_70597C.1.pep
ERTRVNGWTGTPRHGEXVTDHWGGGFQECKTRNCCTLIQQNPIGIXEESGGTEYRXGTVKSVKRMNVSIRGGDGAXNAHVMNMSQAVTLQRIYIDGNVQNEDHMMGNCYIK

SEQ ID NO: 253125 - protein, 80 aa, Glycine max
  Clone ID: PAT_MRT3847_70598C.1.pep
NGKIFFPNKIKSTPPVFNRAREQFGGYTYPHFFLELKPFSQIIAPHNFFLPVFKTAFFFTLLKGTDPTPPVNKICSWPLA

SEQ ID NO: 253126 - protein, 209 aa, Glycine max
  Clone ID: PAT_MRT3847_70599C.1.pep
MILRLQMPLMNSLAKNNLWPDKRGANDPRYVKMIEKPIAVEKLDEEPSHESSKCSESYEVKEKKLPKTPRSVDGLHYLHKRESVADDSVDGSVASEVECGDPVLTINLLKTALKTERRALSAVYQELEEERSASAVAANQTMAMITRLQEEKAAMQMEALQYQRMMEEQSEYDQEALQLLNELMMKREKEKQELEEELEEYRQKVMEYE

SEQ ID NO: 253127 - protein, 63 aa, Glycine max
  unsure (1)..(63): unsure at all Xaa locations
  Clone ID: PAT_MRT3847_7059C.1.pep
LCLGSVLQTERERESVFQNLEREFYFVFLVIFFXXSYSVFVGTEGRKFWQNNFVGENKIQARR

SEQ ID NO: 253128 - protein, 40 aa, Glycine max
  Clone ID: PAT_MRT3847_705C.1.pep
FGVSMCTLYKYIRVSSVTVMHMYVRQNNLEMLVMKNVSSK

SEQ ID NO: 253129 - protein, 71 aa, Glycine max
  Clone ID: PAT_MRT3847_70600C.1.pep
HVLTPVAEPYNSVLSTDAPLEHTNVAVMLDDEALIDMLMRSVDIERPSYTSLNRIVPSVISSLNASLTFDG

SEQ ID NO: 253130 - protein, 235 aa, Glycine max
  Clone ID: PAT_MRT3847_70601C.1.pep
QKLANLHLSIQKKKKLKAMLKRVVHSLGLVDKNPRRKSKVRGTKTIPDFGLRSKDLYVKGDSSGWTTRCISGIQVDSEVSRDVCCKSMAPHHSVLRPEEHLLLGHKYVIISCKDVEKLKRKHPQQCKTKEHNGVVTLEANIIRSPSGHKPKENDKLSVPNEMINSRTTLSPSECKIHENCEVKEPNILGKEKVNEEMDVCQGGEDIEVHCSAKDFYVGNVGKTRTFPLREVKIGT

SEQ ID NO: 253131 - protein, 62 aa, Glycine max
  Clone ID: PAT_MRT3847_70602C.1.pep
TKIIAASSGSMKADEVAQKALDGIKCGNFIVSCNFEGIALSLATAGLSPQRSFLMAFLRSSL

SEQ ID NO: 253132 - protein, 128 aa, Glycine max
  Clone ID: PAT_MRT3847_70603C.1.pep
MATKCLPLELLYEIVPLIPAENATPNALSSCRLLHKLLLPRVIKWKEIMSENTGFQKQLLEMVKALHEKVAVIEKSVAIIEKNVAVIEKKATVIEKNVTVIEKDVTVIEKNVTVIEKEVTVIKKTIGI

SEQ ID NO: 253133 - protein, 46 aa, Glycine max
  Clone ID: PAT_MRT3847_70604C.1.pep
AGLINSSLHQRLVYVKQAPTFKSSRAMLTWVRSAYPGCNQYGSSGT

SEQ ID NO: 253134 - protein, 190 aa, Glycine max
  Clone ID: PAT_MRT3847_70605C.1.pep
DRVPHTATYHHEPVFDTDRTESSKTNAELEPLLVADPDSGARHMEVTYQEMVTEPTSKTAYQHFFAHLLATPSDGAVLFHCTAGKDRTGVGAFLLLSALGVDAKTIEQDYLLTNQVNEAFVNELLQRFASAGKNKTYVHNFRSLATVSPRYLNATKQAIATHYGTVNDFLTTGLGLSAGDLADLKQLYLV

SEQ ID NO: 253135 - protein, 58 aa, Glycine max
  Clone ID: PAT_MRT3847_70606C.1.pep
FILSLYLSFLFSPPSFSCPSLLHDNLKFHYFCVFFSNSPIFPFSFSSSFLDFHNSFFS

SEQ ID NO: 253136 - protein, 92 aa, Glycine max
  Clone ID: PAT_MRT3847_70607C.1.pep
SHFKGKYHDELIVNAAYIGTPGKAILAADESTGTLAKPLASISVENVESNMCALRDLLFTAPVSLKYQGGGGVFNHTLYHSTAAGKPLCGRL

SEQ ID NO: 253137 - protein, 60 aa, Glycine max
  Clone ID: PAT_MRT3847_70608C.1.pep
VLQELVRRGQEIVVQSWVRYEYGDVFRSAGVGAHSEGGGAVPPEAGLNGVVSKVSKLAPC

SEQ ID NO: 253138 - protein, 50 aa, Glycine max
  unsure (1)..(50): unsure at all Xaa locations
  Clone ID: PAT_MRT3847_70609C.1.pep
TRNXRLLVEEEKRSLVGIIDCFYKNWTTCWIVFSLSRGDYSESNPWFNSS

SEQ ID NO: 253139 - protein, 51 aa, Glycine max
  Clone ID: PAT_MRT3847_7060C.1.pep
RKKYYSINTPIERRDPDVLPTKLLFMNGNEDEDVEMTRTVFILMLYCSSST

SEQ ID NO: 253140 - protein, 64 aa, Glycine max
  Clone ID: PAT_MRT3847_70610C.1.pep
CSWWTKGTYHGLLMSEKDGEFEKRRVVRPSRFRCSGYVVPFCRLLAAVRTRGRTRGRTRGRTRG

SEQ ID NO: 253141 - protein, 38 aa, Glycine max
  Clone ID: PAT_MRT3847_70611C.1.pep
KAAVDQCSTLCNVGWLPSVVIVGSTLSPLLSSSLRVGR

SEQ ID NO: 253142 - protein, 118 aa, Glycine max
  Clone ID: PAT_MRT3847_70612C.1.pep
TPRSTQDGERRDSQAPDYLELGKTAEELSTTRHPRLSAITPGRILSLLHAGEASFPDDYQYTWRERESILRYAAGRQVAQGVDEPLALVPAPSIVGDEIWLLRGCPAPVVLRRDTRTV

SEQ ID NO: 253143 - protein, 40 aa, Glycine max
  Clone ID: PAT_MRT3847_70613C.1.pep
VMPCTASYPGSSPPGVCCASVMCLTCDKAKSSSMMVNHTN

SEQ ID NO: 253144 - protein, 99 aa, Glycine max
  Clone ID: PAT_MRT3847_70614C.1.pep
IAAGRSRVAPIRDGHMCSGAVLGRGGAVRVAERFFAPLLRSTGGSEWVRWFCFVVLLLLCSSQREREERGREREREGSMLRRGFNISLGDSAKKKHIYH

SEQ ID NO: 253145 - protein, 164 aa, Glycine max
  Clone ID: PAT_MRT3847_70615C.1.pep
MAAKKACETFSKSLIEEVNRWGCLKQTGVSLRYMMEFGSKPTNKNLLISAQFLHKELAIRIARRAVELENLPYGLSQKPAVLKVRDWYVDSFRDVRAFPDIKNVNDEREFTEMIKAIKVRHNNVVPTMAMGVQQLKKGMDPKIVYEDLVEIHQFLDRFYMSRIG

SEQ ID NO: 253146 - protein, 56 aa, Glycine max
  Clone ID: PAT_MRT3847_70616C.1.pep
PRAPLFFFFWQKHHKESSLKEIKQPNRSNTSDIFLYSCLEQMKISLVFFLYSCLEQ

SEQ ID NO: 253147 - protein, 133 aa, Glycine max
  unsure (1)..(133): unsure at all Xaa locations
  Clone ID: PAT_MRT3847_70617C.1.pep
MAAKKACETFSKSLIEEVNRWGCLKQTGVSLRYMMEFGSKPTNKNLLISAQFLHKELAIRIARRAVELENLPYGLSQKPAVLKVRDWYVDSFRDVRAFPDIKNVNDEREFTELIXAIKVRHNNVVPTMAMGVQ

SEQ ID NO: 253148 - protein, 282 aa, Glycine max
  Clone ID: PAT_MRT3847_70618C.1.pep
EIILEGYLIDYYSCTFSQPTSYLRARGARAEIGEFVEYDLDNEDEDWLFEFNEERNILTPEMFESLLFKLEVLDHKARERAGLITPTLGSPIPVQLRLDTAIEALQAQGFKYSIIQSIYDYWKEKRERWQKPVLRRLQPPPPVNDTNPYNVFRPREKAHRLHTRRMQRRENNVQSFEKLRQVRRNLDQAKSLLEALIKREEKKREVMESEVMLQRMQMKYKHETEFLEDNIALSGFTPFTSKFVSSEEEYFDSDDVMINRLPRTRSTAVQYPSHETTFHGFL

SEQ ID NO: 253149 - protein, 71 aa, Glycine max
  Clone ID: PAT_MRT3847_70619C.1.pep
VGVLCVHQPPENRPNMSSVVLMMNGEKMLPDPSHPGFYTGTIQYPIQLESSLRSVGACSQNEAPVSLLEAR

SEQ ID NO: 253150 - protein, 85 aa, Glycine max
  Clone ID: PAT_MRT3847_7061C.1.pep
TSGFFQIWRASGITSELQLYCTAIGALVFAALMLFAGWFHYHKAAPKLAWFQDVESMLNHHLTGLLGLDSLSWAGHQIHVSLPIN

SEQ ID NO: 253151 - protein, 396 aa, Glycine max
  unsure (1)..(396): unsure at all Xaa locations
  Clone ID: PAT_MRT3847_70620C.1.pep
VSVIPTPQLVVVDRYKCESFCXNFNSFTVYLPVIVARAVIGEFVXDLNNEMKDRICYFNVVRNGLTSQLIELLVFFSSREVLDIHVRERVRTVTLRPRSTALQSDPLHEPNIPVVPAASTKQEFWRRYVPHGWPHKLXSNPGLLCLQQPPPLNDTNPYNVFRPREKAHRLHTRRMQRRENNVQSFEKLRQVRRNLDQAKSLLEALIKREEKKREVMESEVMLQRMQMKYKHETEFLEDNIALSGFTPFTSKFVSSEEEYFDSDDVMINRLPRTRSTAVQYLPSHETNVPMVPAVSTKQEFRRRYVPHGWPHKLDPLEPVLLFTKPLLPDKLAMAGIMPPDSITPNGGVSPPPYRFRGRMGRGGRIIFDRWNPLMQTPIDCGNSYYMPPKPRPSTCN

SEQ ID NO: 253152 - protein, 304 aa, Glycine max
  Clone ID: PAT_MRT3847_70621C.1.pep
MEAVEAKASSGYGKPPWVFRGSAWYQLHLVKAEKARAYIPKEFKLVEAFGYTLGGFFLASYEDSPVGVFDELVVIAGLVWNRPTSCAWATRVYVNNDEACYHGRKEVGLPSQMARFSKTITAISRQQREIKSGFLNRIGIGAKYSTPKDPLNVQVTKIKCLDAEDTCNINISLTSPVSALGIGHWMGPTTRMSLPSFSGATEYNPNLLKYSCQIECRVQALKPLKVSGAFPSTNDDTELSLEDYGSSSHVAKDHKNDAQNFSTCVMLSKPILALKFNQMMMQVEAPLVLSQCSNSLETTVSSVP

SEQ ID NO: 253153 - protein, 311 aa, Glycine max
  unsure (1)..(311): unsure at all Xaa locations
  Clone ID: PAT_MRT3847_70622C.1.pep
VLSFRPRPLDIHKKLPIVKSIKDFDDDEAPASTTRNSQLLRAVPEIENEVPQTPSKKLASEIPTPQFVVVDTYERDYLALSSCTFSQPTSYLRARGTRAEIGEFVEYDLDNEDEDWLFEFNEERKILTPETFESLLFKLXEVLDHKARERAGLITPTLGSXIPVLLRLDTAIEALQAQGFKYSIIQSIYDYWKEKFLGXRERWQKPVLRRLQPPPPVNDTNPYNVFRPREKAHRLHTRRMQRRENNVQSFEKLRQVRRNLDQAKSLLEALIKREEKKREVMESEVMLRLMSMKYMQETEILDSSIALSGFI

SEQ ID NO: 253154 - protein, 72 aa, Glycine max
  Clone ID: PAT_MRT3847_70623C.1.pep
RYEHNYRKIPVKIGHKETFCSITARSGRWEKGGTSALQITHSPTRRETGGDLQSKYSTMGDPLKKNLPRQDI

SEQ ID NO: 253155 - protein, 57 aa, Glycine max
  unsure (1)..(57): unsure at all Xaa locations
  Clone ID: PAT_MRT3847_70624C.1.pep
EDVRVGATKFSEXXTNWYXXFXGXXVTRNNPKNXGXSLXXXXHXPSKELELXSLWPI

SEQ ID NO: 253156 - protein, 97 aa, Glycine max
  Clone ID: PAT_MRT3847_70625C.1.pep
PPFSTGSEVYTFYLAERPRVFCSCGHAQRIEWIHIIMLLDLTFSLNKMCFPLGMHCMQHLLFHPIHIQQIHSLCNKHPPLVIPQILWPNKLSGNIFF

SEQ ID NO: 253157 - protein, 83 aa, Glycine max
  Clone ID: PAT_MRT3847_70626C.1.pep
MLSGEDGVTAVQPAAAAAIIPDELVDIMTVLHLVIRTSLDYGGLSRRHHGGAIINEHHAAHRCLPAEYCDHADDVQLNNALCA

SEQ ID NO: 253158 - protein, 162 aa, Glycine max
  Clone ID: PAT_MRT3847_70627C.1.pep
IVGMQFDNEKYVETDPCIKWHSKGYIYAIFCDLIAKDFEVGCEVKLVAPTSLWGLDTYTQMHRALIYGFELSWMNLACEDYCGNPSCTFNSSSQMLECSSLRVCRNFVVGWQYLTQCGIWSKLQSYAVEAGTNVLRGLFEIIRGPNPELEHKLDAYVSLFVI

SEQ ID NO: 253159 - protein, 58 aa, Glycine max
  unsure (1)..(58): unsure at all Xaa locations
  Clone ID: PAT_MRT3847_70628C.1.pep
SGSSFGDRXSGKNYGDAGASEPMLPXNMVXDQVAXXGQQLCXQLWXGGGYNGXERVTQ

SEQ ID NO: 253160 - protein, 97 aa, Glycine max
  Clone ID: PAT_MRT3847_70629C.1.pep
MSMLKGGEMGGEGGREGDWECSSCNNRNYAFRSFCNRCKQPRLLVDSKTPADSKWLPRIGDWICTGCPTTIEERCVRTNNNYASREKCKKCGQPKEV

SEQ ID NO: 253161 - protein, 31 aa, Glycine max
  Clone ID: PAT_MRT3847_7062C.1.pep
KQKRMPSPGWFCTKINLSCTNQRSVIATVKN

SEQ ID NO: 253162 - protein, 67 aa, Glycine max
  unsure (1)..(67): unsure at all Xaa locations
  Clone ID: PAT_MRT3847_70630C.1.pep
EIDWITATGAVIQKVRSDTSMTITEDNTKVCGFGGWFDVHFRGRXKDPAEQGLASTTELSVPVFNTL

SEQ ID NO: 253163 - protein, 211 aa, Glycine max
  Clone ID: PAT_MRT3847_70631C.1.pep
LEVENGKLDERKLAKSVISRTNYKFWKRFAKEFEGIDHMWKEKKIHKLAECLTNILVHYDFSWQISHNEYKRTTMISMPRDPISVAKRRRISAQKREERRKNDEEPPERTALLIATKTGIVEIVEKFLDVNPEAIFHVTENNQNILTMAVKYRQKKIVRIIQRKGAIESLVGQISDKGRTILHEVARMDYYKGEHLAGVAFQLQDELRWYD

SEQ ID NO: 253164 - protein, 126 aa, Glycine max
  unsure (1)..(126): unsure at all Xaa locations
  Clone ID: PAT_MRT3847_70632C.1.pep
RPGHPPQGPSCPEQQGPRXRGCQTRDGFEETFYSLMSHENLARPXHADLYAPPAGHINTLNSFTRCDPTALGLTAQYGVLYRSGIYCAHWNLHANSVIYVTRGNGPVREVNCQGNAPFDGALPRGQ

SEQ ID NO: 253165 - protein, 156 aa, Glycine max
  unsure (1)..(156): unsure at all Xaa locations
  Clone ID: PAT_MRT3847_70633C.1.pep
FRSRVRSNILLTGTISESGQFDTSPAAKSQNNXGLCGVPLGPCGLEPANNGNAQHMKSHRRQACLAGSVAMGMLYPLFGLFGLIIIAIETSMWRTTKDAASRAXYVTGISHLGPANVSWKHTSTWEAXSISLCXLDKPVRKLTFGGLVFSSNGFHN

SEQ ID NO: 253166 - protein, 76 aa, Glycine max
  unsure (1)..(76): unsure at all Xaa locations
  Clone ID: PAT_MRT3847_70634C.1.pep
HXGGXXGGQGGGAGGGYGAGAEHGGGYGGGEGGGAGRGYXAXXEHGGGYXGGQGGRSGGXYGAXGDHGAAGYXGXA

SEQ ID NO: 253167 - protein, 72 aa, Glycine max
  Clone ID: PAT_MRT3847_70635C.1.pep
ISCPSASPNISQYFPYALSVNTHSAVKTMHCHRDSKAQGISWKCCMLCKCCERIGKETFKETSQNRQRSNIE

SEQ ID NO: 253168 - protein, 100 aa, Glycine max
  unsure (1)..(100): unsure at all Xaa locations
  Clone ID: PAT_MRT3847_70636C.1.pep
FAPGHTPTPGGESGRQKGRRPTEEEHGRMPHAAHNENEPQEKEGQEGKPPCEKKHRSRQEKRAXTQAQRGSGKTVKDDTQGAGTHSAEETAEKEEQQKPQ

SEQ ID NO: 253169 - protein, 150 aa, Glycine max
  Clone ID: PAT_MRT3847_70637C.1.pep
QCKHHWFSRKKSRRHRQRSVPFLAFTHSFIDTTRLSYINNSTSTYSKHKQFFTCCSGCSQYSLLLPDFLSLQIQFFVALQDMCPLRFILIFFSTMLAAYIAWTTMTSSPEIDFTTQDRENKASSNKDHFNFIKVPSVPYSLYNSPSFLIF

SEQ ID NO: 253170 - protein, 104 aa, Glycine max
  Clone ID: PAT_MRT3847_70638C.1.pep
KRTIRPNAKKLSALFMSRHEMDWDTFASKVKACQRGFMGEPDEMRPGRGEFHEYPSTCVCEKPFMDDLSQDGFRPPKLAANNVTVNGGGNEESVRKRSGRMAST

SEQ ID NO: 253171 - protein, 82 aa, Glycine max
  unsure (1)..(82): unsure at all Xaa locations
  Clone ID: PAT_MRT3847_70639C.1.pep
NDVGXXXVRXDIRXELXXXXDXLDXXXKXLEIGXXXEWXEEKRXXWVLXELSGKRXXFXXXXXXXSXXLXVLXXXXXIXEXY

SEQ ID NO: 253172 - protein, 37 aa, Glycine max
  Clone ID: PAT_MRT3847_7063C.1.pep
LPIQLLQLSLCLSQCKNKSAFFGWFLILPFHSTQMLS

SEQ ID NO: 253173 - protein, 125 aa, Glycine max
  Clone ID: PAT_MRT3847_70640C.1.pep
PKVDVPSRFVGLVLENCPCANHSHLILGDPSPVVFYPISSSEVRCLVDVPGQKVPSISNGEMAKYLKTVIAPQIPLELHDAFIAAVDKGNIRTMRNRSKPAASYPTPGAQLDGDAFNMGWNDRGI

SEQ ID NO: 253174 - protein, 53 aa, Glycine max
  Clone ID: PAT_MRT3847_70641C.1.pep
SIPPSPRKNRNSFFSGWGGREGIMGHGNSSYISSIFVMINFVFKLGKSPLAAK

SEQ ID NO: 253175 - protein, 98 aa, Glycine max
  Clone ID: PAT_MRT3847_70642C.1.pep
PIRHIAFGRPEKATHPNTLMAVLADYISTLILEFAGTGFGFFYYTLRYPGCCTLLSRISVYMAHAFDLFVSAYGGSDISGGLVIPVNSVRSLFGVNIL

SEQ ID NO: 253176 - protein, 65 aa, Glycine max
  Clone ID: PAT_MRT3847_70643C.1.pep
VKGYCRLQSHIIYVNDKFKINLIFKKNYYEKKNFDSFLVVYLFWLIDLSLNFLAPFYVCVYKNVS

SEQ ID NO: 253177 - protein, 121 aa, Glycine max
  Clone ID: PAT_MRT3847_70644C.1.pep
VPTTLSHFQQKRRPHSSQNQARPTQPSSSSLPSKPFSSETLVSETLLFPISTTPPSPEPWFPWPEKPTPFSEAPFFKAHRASLSSFLSFSGEGDEHPDGSFDRASTVPITQRNFLFSRKST

SEQ ID NO: 253178 - protein, 127 aa, Glycine max
  unsure (1)..(127): unsure at all Xaa locations
  Clone ID: PAT_MRT3847_70645C.1.pep
GSSSPLIKLLFVEMGVGSDPHGQDITVATIRACRDAISFNSNPAFPKGSIPGVSFDQMKFPIKLGVPPSPQNSLDIXKVKSVFPYGKIFNVEVVEGGFICPNGGLVKKMGDKNDDCYIVNAAVYVGY

SEQ ID NO: 253179 - protein, 71 aa, Glycine max
  unsure (1)..(71): unsure at all Xaa locations
  Clone ID: PAT_MRT3847_70646C.1.pep
MKITERIAKLAAPRLTLHSVIVIGDSNRTVILTAXLTRSVGCHRSVKPTPPTETMCYAHATRKPLERSAKR

SEQ ID NO: 253180 - protein, 67 aa, Glycine max
  Clone ID: PAT_MRT3847_70647C.1.pep
MAGTSWLVDKSRIATKIKCASGACDHGKVIWKSNPTKACPNCQHAIDNGDVAQEWPGLPKGVKFDPS

SEQ ID NO: 253181 - protein, 59 aa, Glycine max
  Clone ID: PAT_MRT3847_70648C.1.pep
LYKESYKLFQHSLIKITLGSLFIKLEKERTASKMLRYGRAVILGRNMQLVLSSNSARGL

SEQ ID NO: 253182 - protein, 147 aa, Glycine max
  Clone ID: PAT_MRT3847_70649C.1.pep
LSKMTFVGINTPPTCNLSFLEKVYVDASGYNEDSSEHLSWLQLVTNIKEMILSADTISFIRKGLEVLDSVRIQPPGFVNLESLVVKRDSFDFISDEEVNCVVRFLLQNSIQTLDEEKTVNITYTNSLFKYLGKTVLEYDNLETLTNL

SEQ ID NO: 253183 - protein, 50 aa, Glycine max
  Clone ID: PAT_MRT3847_7064C.1.pep
NFFGKVTFGFLITGGSWLSQVEQESLVDSHTRMGLGLPRMEGGGHFYTIL

SEQ ID NO: 253184 - protein, 53 aa, Glycine max
  Clone ID: PAT_MRT3847_70650C.1.pep
NLMISYPIFKQKDILFIKQIHTTIYLFIFIFFITLILSHTFSFFLSYFCLSLL

SEQ ID NO: 253185 - protein, 198 aa, Glycine max
  Clone ID: PAT_MRT3847_70651C.1.pep
VVGIIGNIIAGCLFLSPVPTFVRIWKKGSVEQYSAVPYLATLMNCMVWTLYGLPMVHPHSLLVVTINGAGCVIEIIYVTLFLLYSDRTKRLKVFLWLFLELVFIAVLTFVTFTLIHSVKKRSAVVGTICMLFNVAMYASPLSVMKLVITTKSVEYMPFFLSLASFGNGVSWTTYALIPFDPFIAIPNGIGTTLSVAQL

SEQ ID NO: 253186 - protein, 48 aa, Glycine max
  unsure (1)..(48): unsure at all Xaa locations
  Clone ID: PAT_MRT3847_70652C.1.pep
LXIYHXISLQEPTKTFEGKFYXXTSNLLHAQSMRDNTEKIEEISNSIV

SEQ ID NO: 253187 - protein, 156 aa, Glycine max
  Clone ID: PAT_MRT3847_70653C.1.pep
FSGYRTIVSSSDFYYLDCGHGDFVGNNSIYDQQNGDNKDNGGSWCGPFKTWQTIYNYDIAYGLSEEEAKLVLGGEVALWTEQADSTVLDGRIWPRTSALAESLWSGNRVEKGMKRYAEATDRLNEWRSRMVSRGIGAEPIQPLWCVRNPGMCNTVQ

SEQ ID NO: 253188 - protein, 185 aa, Glycine max
  Clone ID: PAT_MRT3847_70654C.1.pep
ANCFLLLSLLPNPSLSHSSAPFNLFPLLAISITTESYYPYTAQDGTCDASKANDLAVSIDGHENVPGNDENALLKAVANQPVSVAIDAGGSDFQFYSEGVFTGDCSTELNHGVAIVGYGATVDGTSYWIVRNSWGPEWGELGYIRMQRNISKKEGLCGIAMLASYPIKNSSNNPTGPSSSPKDEL

SEQ ID NO: 253189 - protein, 88 aa, Glycine max
  Clone ID: PAT_MRT3847_70655C.1.pep
IDHSQSLNIHMDQPNFGKLTSLHFYAWSKGLKTGMYYLRSRAAADAIKFTVDTSALKEKSNVEYDDNTKMAQMVCSLTNREECLACGS

SEQ ID NO: 253190 - protein, 127 aa, Glycine max
  unsure (1)..(127): unsure at all Xaa locations
  Clone ID: PAT_MRT3847_70656C.1.pep
EKPADRRVRTRQFSSSSSFLTSIITTSAAFFDKIELPFTKIEPPKKDPLSQLTLPPCXPFYPTDNELLVQHLCPKVASHHFSLTIITQIDLYKFNPPNLTIKTNFNEKKXYFFSPKHMKFPNRFSPN

SEQ ID NO: 253191 - protein, 335 aa, Glycine max
  unsure (1)..(335): unsure at all Xaa locations
  Clone ID: PAT_MRT3847_70657C.1.pep
MAMKKLLWVVLSLSLVLGVANSFDFHDKDLASEESFWDLYERWRSHHTVSRSLGDKHKRFNVFKANVMHVHNTNKMDKPYKLKLNKFADMTNHEFRSTYAGSKVNHHRMFQGTPRGNGTFMYEKVGSVPPSVDWRKNGAVTGVKDQGQCGSCWAFSTVVAVEGINQIKTNKLVSLSEQELVDCDTKKNAGCNGGLMESAFALVKSKGGNANVPANDENALLKAVGTQPVAVAIDAGGSDFQFYXSNFEELLTGDCMAELNHGVAIVGYGATVDGTSYWIVRNSWGPEWGEQGYIRMQRNISKKEGLCGIAMLASYPIKNSSNNPTGPSSSPKDEL

SEQ ID NO: 253192 - protein, 158 aa, Glycine max
  Clone ID: PAT_MRT3847_70658C.1.pep
ARALIQVCSWGRNRVKAVEAGAVPVLVELLLECNERKPIEMVLVLLEILCQSADGRAGLLAHAAGVVIVAKKILRVSTMANDRAAKILLSVCRFSPTHGLVQEMLQLGVVAKLCLVLQVDSGNKAKEKAREILKLHARAWRNSPCIPHNLLASFPMSS

SEQ ID NO: 253193 - protein, 84 aa, Glycine max
  unsure (1)..(84): unsure at all Xaa locations
  Clone ID: PAT_MRT3847_70659C.1.pep
FDMPLDSVFLSLCVLSRGHAAGVSLVVVVIVKQFCVNVMGRGIFERAFFGILICWGSMSIPSPWAWSLGXNKKSLKVKVRGAPA

SEQ ID NO: 253194 - protein, 103 aa, Glycine max
  unsure (1)..(103): unsure at all Xaa locations
  Clone ID: PAT_MRT3847_7065C.1.pep
FEAKLLTMRSKFPREENWLDQISKRKWTQAYDEGKRYGHMTTNLAEYMNFVLKGAXALPIIVIVKETFNKINDSFVTNGMKIMNMIKAGHRYSEEVYVMMQEN

SEQ ID NO: 253195 - protein, 82 aa, Glycine max
  Clone ID: PAT_MRT3847_70660C.1.pep
EKYQIWSRTIAMGAIACVQLSRAASADDVDVLSDDKFEKEVGQDRGALVEFYAPWCGHCKKLAPEYEKLGSSFKKAKSVLIG

SEQ ID NO: 253196 - protein, 64 aa, Glycine max
  unsure (1)..(64): unsure at all Xaa locations
  Clone ID: PAT_MRT3847_70661C.1.pep
KDPTTYCIAXPVGDHMFHWQVTKMDPPYIPYVEGDYLDTIHYAPDYALNPPNGGSGTPYAGYNN

SEQ ID NO: 253197 - protein, 58 aa, Glycine max
  Clone ID: PAT_MRT3847_70662C.1.pep
TCSSNFPFAFEAVIFFFFGCRLKLMPILVDTYKQRLFWSFTSRPVFWVQKRLKSFNYH

SEQ ID NO: 253198 - protein, 110 aa, Glycine max
  Clone ID: PAT_MRT3847_70663C.1.pep
TGVMKIFAPRPINPHGLVITTFRLVETFRPPPYNFIPPPTTCGPEYTVYSPIRLAPASQPIFVSSFLLLTPCYTYDTRPLLRAFATTSDYIYILLIIPQLCPDPYALVLS

SEQ ID NO: 253199 - protein, 86 aa, Glycine max
  Clone ID: PAT_MRT3847_70664C.1.pep
ASGPYLAKQVFKVGLKIKKIKTTSSYPQFSEPAGLLFLICASIGLFPAVGILPFSPIPLLLLLSYICSSSLPLGHLSFGSINMCYE

SEQ ID NO: 253200 - protein, 106 aa, Glycine max
  Clone ID: PAT_MRT3847_70665C.1.pep
NSARALRQILCKCLDVNPGNRPDVVDVRKCIQNMLVKPQFDFLGNLEVTISRDYTGICLVLGELCLLPKQSSNELIEHELWEPEIGGQPNVVQDGKGKSDEDFALA

SEQ ID NO: 253201 - protein, 72 aa, Glycine max
  Clone ID: PAT_MRT3847_70666C.1.pep
SRPDHVRWYAEINYGHFAPCVNQEERIRQYQDDVGRSVLIIFKIFASSAGGEIDRPNGVSLERNSVLSLLSF

SEQ ID NO: 253202 - protein, 74 aa, Glycine max
  unsure (1)..(74): unsure at all Xaa locations
  Clone ID: PAT_MRT3847_70667C.1.pep
LEPNXXXYSFIXLMXXMSXXFXXXFFILPLNXPFLSLLLSSIXSXHQQITXLYSFXLSKTPQQXCTTLQWHWNS

SEQ ID NO: 253203 - protein, 549 aa, Glycine max
  unsure (1)..(549): unsure at all Xaa locations
  Clone ID: PAT_MRT3847_70668C.1.pep
MEASSPHSLALQNPSAYLSCFLILLIILFPTHARADLPGTWELLVPDAGIASXMHTAVTRFNTXVLLDRTNIGPSRKLLPKGHXRSDKNDAVLKLDCYAHSVHLDLATNQIRPLKILTDTWCSSGQFLPDGALXLQTGGDLDGLKKIRKFSPCDDASCDWEELNDVVLAEGRWYATNQILPDGSVIIIGGRGSNTVEFFPPKQNVAVSFPFLSETEDTQMDNLYPYVHLLPNGHLFVFANTRSVMYDFNRHVIVKEYPKLHGGPRNYPSAGSSAMLALEGDYSKAEIVVCGGAKYGAFLLRSTDTPAHGSCGRILAMEEKPRWEMEDMPYGRIMGDMVMLPTGDVLVINGAMSGTQGFEMASDPCLNPVLYRPDQPVGLRFMVLNPGTVPRMYHATANLLPDARVLLAGSNPHVLYRFDDVEFPTELRLEAFSPEYLSADRANLRPVIEEVPQTVRFGGKFDVVVSVDLPVVGIVEVNLASAPFATHSFSQGQRLVKLTVSSAVPDGSDGRYRIGVTAPPSGAVAPPGYYMAFAVNQGVPSIAKWIHVS

SEQ ID NO: 253204 - protein, 76 aa, Glycine max
  unsure (1)..(76): unsure at all Xaa locations
  Clone ID: PAT_MRT3847_70669C.1.pep
AFRESADNELKGIRYECDEPLVCIDYRCTAVXKPLTTSXRMAMGDDMENVIAWYDNEWSYYQRVAEFADIGVNKWN

SEQ ID NO: 253205 - protein, 90 aa, Glycine max
  Clone ID: PAT_MRT3847_7066C.1.pep
KGQRGIPCQQPPPGFRPKRPRVQFCGEKNPNHPPERKGPLMPPPALKFAPPPPPQLEKSWPGGNLCPWFTPFKPPYGLIFKRNNQGFLLL

SEQ ID NO: 253206 - protein, 230 aa, Glycine max
  unsure (1)..(230): unsure at all Xaa locations
  Clone ID: PAT_MRT3847_70670C.1.pep
MENLSYFLFLLFLFATHARADLPGTWELLVPDAGIASMHTAVTRFNTVVLLDRTNIGPSRKLLPKGHCRSDKNDAVLKLDCYAHSVHLDLATNQIRPLKILTDTWCSSGQFLPDGTLLQTGGDLDGLKKIRKFSPCDVSSSSSLHSPCDWEELDDIELAEGRWYATNQILPDGSVIIIGGRGSNTVEFFPPXETGAVSFPFLSETGDTQMDNLYPXYVHLLPNGHLFCFR

SEQ ID NO: 253207 - protein, 228 aa, Glycine max
  Clone ID: PAT_MRT3847_70671C.1.pep
SGTSMACPHVSGIAALIRSVHPRWSPAAIKSAIMTTAEVTDHTGRPILDEDQPAGVFDMGAGHVNPQRALNPGLVYDIRPDDYITHLCSLGYTKSEIFSITHRNVSCNAIMKMNRGFSLNYPSFSVIFKGGVRRKMFSRRLTNVGSANSIYSMEVKAPEGVKVIVKPKRLVFKQVNQSLSYRVWFISRKRVKRGDDLVNYAEGSLTWVHSQNGSYRVKSPVAVPWKSK

SEQ ID NO: 253208 - protein, 52 aa, Glycine max
  Clone ID: PAT_MRT3847_70672C.1.pep
DHLGDIDFKIAGTRKGVTAIQLDIKPAGIPLDIVCECLEPAHKARPQILAHM

SEQ ID NO: 253209 - protein, 106 aa, Glycine max
  Clone ID: PAT_MRT3847_70673C.1.pep
KTFFFFFFPPLFFFLGGFLPVFFFGSACVFFQGGAPPFPSGFFFAPVCGGPFFFRTNKNPPPPPRFLFFFPRVFFILKRGCFWCVFLPLARARKKVVSSDQSRQMT

SEQ ID NO: 253210 - protein, 87 aa, Glycine max
  Clone ID: PAT_MRT3847_70674C.1.pep
WRFKNSMNGIFCMCYAIYVDHFLSYFCCSLYICRLAELGIEARSGFKSHGEGSTQLSGSIQLSSKESFFGKAEAKTIADINTISEIM

SEQ ID NO: 253211 - protein, 58 aa, Glycine max
  Clone ID: PAT_MRT3847_70675C.1.pep
VPFVGEAIQFTHLAREYSTTNCVSQGVDQLSGRIDDHRPDNPIYYLRFGYGPMIVIRS

SEQ ID NO: 253212 - protein, 448 aa, Glycine max
  unsure (1)..(448): unsure at all Xaa locations
  Clone ID: PAT_MRT3847_70676C.1.pep
PQKKPFFYVPELTCWMVTGERQATRIRGLYLKTILRQDVTFFDKETRTGEVVGRMSGDTVLIQDAMGEKVGQFLQFIATFIGSFAVAFIKGWLLTVVMLSCIPPLALVGAVLGQVISKASSRGQEAYSIAATVAEQTIGSIRTVASFTGEKQAIANYNQSLTKAYKAGVQGPLASGLGFGSLYFVFNCSNSWATWFGXKMVIEEGYTGGEVVTVIMAVLTGSLSLGQASPSLSAFAAGQAAAFKMFETIKRKPEIDAYDITGRQLDDIREDIELREVCFSYPTRLDELIFNGFSLSIPSGTTAALVGESGSGKSTVVSLIERFYDPQAGAVLIDSINLKEFQLKGIQXKIGLVSQEPVLFTCSIKENIAYGKDGATDEEIRAAAELANAAKFIDKLPQGLDTMVGEHGTQLSGGQKQRVAIARAILKDPRNRRLGDARRAAGREPGRN

SEQ ID NO: 253213 - protein, 87 aa, Glycine max
  Clone ID: PAT_MRT3847_70677C.1.pep
RCFTKKIRGILCFRPNYYYKPLPDKKRGLVSQSKNFFKWVGGTLSFKFFWGEKKGVVSLRPPLLGRLTGRKKKSPPQGFPPGEAPKE

SEQ ID NO: 253214 - protein, 62 aa, Glycine max
  Clone ID: PAT_MRT3847_70678C.1.pep
KSRREVFEMLSHLLLVLCPTLPLCLLSFFRYRTTVNNPPLPPHLIGLPIIRNLHQLDIPSLQ

SEQ ID NO: 253215 - protein, 46 aa, Glycine max
  Clone ID: PAT_MRT3847_70679C.1.pep
TQIAFQLPFRNIFWTLKATFLFHEKLQLFLLRFNRANTAPLGWRLC

SEQ ID NO: 253216 - protein, 79 aa, Glycine max
  Clone ID: PAT_MRT3847_7067C.1.pep
QPSRPEAIVAELDFEKFCPRSSFHQMFSFSNCFPSNVVELDPNEASLEFLWCSLPRAATAIRPTAVGRPVLVGVSETVN

SEQ ID NO: 253217 - protein, 34 aa, Glycine max
  Clone ID: PAT_MRT3847_70680C.1.pep
IGTQYLSPASICIRADVEKAYSHRSKENANGSER

SEQ ID NO: 253218 - protein, 174 aa, Glycine max
  Clone ID: PAT_MRT3847_70681C.1.pep
MERKGKKPVKMSVPQFGGWEHKPAGVPTDYSMVFNQAREKKKTQMNDLTEVKRLSLGNERDALKPNHRRGHGQGHGHGHGHGHGHGHGHGHGLDHEDPPVMKKPVKMSVPQFGGWEHMPAGVPTDYSMGFNQACERMMTQMNESTEVKRVRLGNERDALKPNHRRGHGHDMGMG

SEQ ID NO: 253219 - protein, 98 aa, Glycine max
  Clone ID: PAT_MRT3847_70682C.1.pep
KKGTIVHFSIRKFCCAFSLFSRMFCTDLLFRIVNIIRNSLLRFSLLEQFRIFWSEFFSFHYNRILEFLQPSFGDVDHRLPRINCMIIKLIDDNGLVLY

SEQ ID NO: 253220 - protein, 72 aa, Glycine max
  unsure (1)..(72): unsure at all Xaa locations
  Clone ID: PAT_MRT3847_70683C.1.pep
MGKVKIGINGFGRIGRLVARXALQRDXXELVAVNDPFITXDYMXYMFKYDXXHGXWKXXXVTXXDEXTXXXX

SEQ ID NO: 253221 - protein, 84 aa, Glycine max
  Clone ID: PAT_MRT3847_70684C.1.pep
NALAAAKEAEALAEARANNEARTELESRLREAEERESMLVQALEELRQTLSRKEQQAVFKEDMLRRDIEDLQKRYQASERRVRN

SEQ ID NO: 253222 - protein, 61 aa, Glycine max
  Clone ID: PAT_MRT3847_70685C.1.pep
TWSLVVYLYCDYQLKQFIICFLCFQAYLILQRISIPCRILNRYRQTVSMNPCFLIGFLVPP

SEQ ID NO: 253223 - protein, 78 aa, Glycine max
  unsure (1)..(78): unsure at all Xaa locations
  Clone ID: PAT_MRT3847_70686C.1.pep
AYXLPNALSXXLSVVVTIIXFNMLQRLSXTTTRXXSVSAXLRYGGGALRRDVLXPISSPHLAKVGENDSKAARWFLYE

SEQ ID NO: 253224 - protein, 51 aa, Glycine max
  unsure (1)..(51): unsure at all Xaa locations
  Clone ID: PAT_MRT3847_70687C.1.pep
AGGVSKVKTYVPYLIIALSSPVNELIGCFSHTLIVPPNLPFXYTINYLTIY

SEQ ID NO: 253225 - protein, 65 aa, Glycine max
  unsure (1)..(65): unsure at all Xaa locations
  Clone ID: PAT_MRT3847_70688C.1.pep
LGPKGRNDVIESKYGSSKIVNDGDSVTKEAELEDTNENIGAEXARQEADNTHDLTGDSFTTSVVL

SEQ ID NO: 253226 - protein, 254 aa, Glycine max
  Clone ID: PAT_MRT3847_70689C.1.pep
MSEDGIDYGGIVTAVIAAAAVVTIVRCLFAAMVAIARCLYAAMIAIARSLYGNTKRQQESFDEHEETEDDEESEEADNGKWKKPESGWVKLNVDGSRIHEEPASAGCGGVIRDEWGTWCVGFDQKLDPNICRQAHYTELQAILTGLKVAREDMINVEKLVVESDSEPAVNMVKSRLGYKYHRPEYKVVQDINRLLKDPKWLARLDYVPRKANRVANYLAKRVCKSSSPHDHHHFSKYPCPPDYDCEKIFLEDNN

SEQ ID NO: 253227 - protein, 47 aa, Glycine max
  Clone ID: PAT_MRT3847_7068C.1.pep
EQSHKTTKEEHNRRNTNTTVKEKSLKISLGSPIEATKQNTKPHSYML

SEQ ID NO: 253228 - protein, 170 aa, Glycine max
  unsure (1)..(170): unsure at all Xaa locations
  Clone ID: PAT_MRT3847_70690C.1.pep
HGPVLKESKNQGMSEEQEWDLSDVKPHEFVRYGLSCLEMLAGLGDSCAKETRERIRVMVAGGDGTVGWVLGCLTELRAQGREPVPPVGIVPLGTGNDLSRSFHWGGXSFPFAWRSAIKRTLQRASNGTVNRLDSWRVSLSMPEGTPVDLPHCLKHTQEFCLDHGFEIDGE

SEQ ID NO: 253229 - protein, 93 aa, Glycine max
  Clone ID: PAT_MRT3847_70691C.1.pep
PAAKITDPWAARKPVKPPGLTKRPTPLYRREAYWAPWMKKTAPARRKTDDCPAPPGADIFTRSRARWFVPLSEKPKKRCPTAGTPESPKTGKP

SEQ ID NO: 253230 - protein, 61 aa, Glycine max
  Clone ID: PAT_MRT3847_70692C.1.pep
LYSTQHSNPIFYITNFIYCAWVFFHTGCGLPPSIYNSHSHINNINNLPIPQQPQSISHSPP

SEQ ID NO: 253231 - protein, 193 aa, Glycine max
  Clone ID: PAT_MRT3847_70693C.1.pep
MAGATATTTALINLTRPSHSSKHRHFSSNNAPFSIQPFHSGFYHNRRLKPIITNCHGKLNSSGGGYAMDEAGFDEYDGVEDESDDEDDAESSVDLLIRFLQSMFKKVSKRAKKASRSVLPTVISPQLVSFAVDGTLLLASLSVVKALLEIICTLGGTVFAAILVLRVIWAAVSYFQSSGNSFNQGGNSFGAVA

SEQ ID NO: 253232 - protein, 576 aa, Glycine max
  Clone ID: PAT_MRT3847_70694C.1.pep
MSAATSSTLSTVTDANLHSRFHSRLVPFTHHFSLSQPKRISSIRCQSINTDKKKSSRNLLDNASNLLTDLLSGGSIGSMPIAEGAVSDLLGRPLFFSLYDWFLEHGAVYKLAFGPKAFVVVSDPIVARHILRENAFSYDKGVLADILEPIMGKGLIPADLDTWKQRRRVIAPAFHNSYLEAMVKIFTTCSERTILKFNKLLEGEGYDGPDSIELDLEAEFSSLALDIIGLGVFNYDFGSVTKESPVIKAVYGTLFEAEHRSTFYIPYWKIPLARWIVPRQRKFQDDLKVINTCLDGLIRNAKESRQETDVEKLQQRDYLNLKDASLLRFLVDMRGADVDDRQLRDDLMTMLIAGHETTAAVLTWAVFLLAQNPSKMKKAQAEVDLVLGTGRPTFESLKELQYIRLIVVEALRLYPQPPLLIRRSLKSDVLPGGHKGEKDGYAIPAGTDVFISVYNLHRSPYFWDRPDDFEPERFLVQNKNEEIEGWAGLDPSRSPGALYPNEVISDFAFLPFGGGPRKCVGDQFALMESTVALTMLLQNFDVELKGTPESVELVTGATIHTKNGMWCRLKKRSNLR

SEQ ID NO: 253233 - protein, 76 aa, Glycine max
  unsure (1)..(76): unsure at all Xaa locations
  Clone ID: PAT_MRT3847_70695C.1.pep
KKNNPVNMNKAPKLNHLVVAISHSKNWNIPESLTHVPNYNKLLFSRESFXKTNPPKVKYVISGRAPKENASSNSKL

SEQ ID NO: 253234 - protein, 330 aa, Glycine max
  Clone ID: PAT_MRT3847_70696C.1.pep
VVPLDVDFLESKCTNHVAGSTYTSNLLYELQVEEPSSSPTLVPPTVQPPPTPELKPLPANLKYAYLEDKEKFPVIIYTSLAAEQEEKILLEDGAKQVRHPQQRLNPVILDVVKKKVTKLLQAGIIYPISDNQWVSPVQVVPKKTSLTVIKNEKDELIPTRVQNSWRVYIDYKRLNQATRKDHFPLPFIDQMLEHLAGFYRHFIKDFSKVALPLSNLLQKKVEFGFNGWCKEAFDCLKCALTTTPIIQAPDWTAPFELMCDASNYALGVVLAQKIDKLPRVIYYASRPLDAAQANFTAAEKQLLAIVFGLEKFPSYLIGHHAIVYTDHAAY

SEQ ID NO: 253235 - protein, 155 aa, Glycine max
  Clone ID: PAT_MRT3847_70697C.1.pep
MKSAICGRILSPNHVFKPGDTHSICKGPYSNLCVPMVVLATGPGIGGGVLEKPVIEKVTPGRESEFDLKKSRKSAPPYRVILHNDNFNKREYVVQVLMKVIPGMTLDNAVNIMQEAHYNGLSVVIICDQADAEDHCMQLRGNGLLSSIEPASGGC

SEQ ID NO: 253236 - protein, 47 aa, Glycine max
  Clone ID: PAT_MRT3847_70698C.1.pep
NNLVHKQELEKTPEGGSNENLWIGTYPCLLMRSKPLVLHDSVLSRAI

SEQ ID NO: 253237 - protein, 90 aa, Glycine max
  Clone ID: PAT_MRT3847_70699C.1.pep
SNRIESKGKCRMDDMPLPALFEQARKIHAAATDSGADQEVVKKGCEALHRCEDMVNNLGLFSPNETKEDISTTNLKYILVRMFEFSYFYF

SEQ ID NO: 253238 - protein, 162 aa, Glycine max
  Clone ID: PAT_MRT3847_7069C.1.pep
LSLRKSRKSRWSCVLPSVNAYCEIHEGYCFVNSTFCLVKAGAVSPLIQLLEDTEREVVEAALHALSTLLQDEIWEGGVNSIAKLSGVQAIIKSLQVEDAKVQEKAIWMLERIFKVAEHRLKYGESAQVVLIDLAQKSDSRLKSTVAKVLAELELLQSQSSYF

SEQ ID NO: 253239 - protein, 52 aa, Glycine max
  Clone ID: PAT_MRT3847_706C.1.pep
RQRFHNFNILSSLTMETLGKSMVPSARFWSFKLVKFFLGDLLQLWRKGGSDR

SEQ ID NO: 253240 - protein, 65 aa, Glycine max
  unsure (1)..(65): unsure at all Xaa locations
  Clone ID: PAT_MRT3847_70700C.1.pep
MKKXXKXAQGEYIAPEKIENVYAKCKFVAQCFVYGDSLNASLVAVVSVDHDNLKAWAASEGIMVV

SEQ ID NO: 253241 - protein, 98 aa, Glycine max
  Clone ID: PAT_MRT3847_70701C.1.pep
SMSQCRSRLSHSPSQSNYASFATVHGHHYIPISAQRYTLAKYSVLNNALTMCSLSSFGMVGFIVRSGSAVRSDALTMQFATTFLLFVGHPPYALSDAW

SEQ ID NO: 253242 - protein, 48 aa, Glycine max
  Clone ID: PAT_MRT3847_70702C.1.pep
INGSVRAGSSGCCICVDHVYSTADCSNVIIAYITSSKDKGLWMDPAIT

SEQ ID NO: 253243 - protein, 157 aa, Glycine max
  unsure (1)..(157): unsure at all Xaa locations
  Clone ID: PAT_MRT3847_70703C.1.pep
MSKLLLIRVAGFVATFVTMVMMMVPKNVSAQNIGDDIVTQDFFNSIISQADDGCAGKNFYSRDAFLNAHNSYNEFGRLGNQDDSKREVXFCYIEEINGASGDYCDESNTEYPCAPNKAYYGRGPIQLSWNFNYGPAGQSIGFDGLNAPETVANDPVV

SEQ ID NO: 253244 - protein, 235 aa, Glycine max
  Clone ID: PAT_MRT3847_70704C.1.pep
MSKLLLIRVAGFVATFVTMVMMMVPKNVSAQNIGDDIVTQDFFNSIISQADDGCAGKNFYSRDAFLNAHNSYNEFGRLGNQDDSKREVAAAFAHFTHETGHFCYIEEINGASGDYCDESNTEYPCAPNKAYYGRGPIQLSWNFNYGPAGQSIGFDGLNAPETVANDPVVSFKTALWYWMEHVRPVINQGFGATIRAINGRLECDGANPSTVQARVNYYTQYCSQLGVSPGDNLTC

SEQ ID NO: 253245 - protein, 43 aa, Glycine max
  Clone ID: PAT_MRT3847_70705C.1.pep
QIKINRSIEYRSNTIIVPLTYTATGVSHLDIEAHILRNIHTVY

SEQ ID NO: 253246 - protein, 48 aa, Glycine max
  unsure (1)..(48): unsure at all Xaa locations
  Clone ID: PAT_MRT3847_70706C.1.pep
SLAKTYHLDLSYILSNVGLPKWSNTXIMNXEPHTNGSVLDVCFAKQTS

SEQ ID NO: 253247 - protein, 50 aa, Glycine max
  Clone ID: PAT_MRT3847_70707C.1.pep
RSLNKLKEGFKTGLLVIYCYCLPRNDLYLYISDILGVKPSSCSKAQPLND

SEQ ID NO: 253248 - protein, 43 aa, Glycine max
  Clone ID: PAT_MRT3847_70708C.1.pep
VFLYTTYSRHGYTAMVKDELKGNVSHPNGLYLLKFVLRQNRSL

SEQ ID NO: 253249 - protein, 35 aa, Glycine max
  Clone ID: PAT_MRT3847_70709C.1.pep
LKETSSIFQGFSRDVHFARKGSLENFPRKHSVLHF

SEQ ID NO: 253250 - protein, 71 aa, Glycine max
  Clone ID: PAT_MRT3847_7070C.1.pep
PRVRSLLIHGKGRFNCSKSPSVSTDVCDTSNPQCSPFVQTVIPGKTYRLRIASLTALSALSFKIEVIKCSL

SEQ ID NO: 253251 - protein, 112 aa, Glycine max
  Clone ID: PAT_MRT3847_70710C.1.pep
IITVQSVSLIGVTTCVISVPLPLTRGVVPLHVFVVNLISPLAPPIIFPAGHVGALRSFYWRHVWPIYILSIEIFVSGLCTLSTMVNGGVTELGTRINPHQTLPPFVVLLQPV

SEQ ID NO: 253252 - protein, 82 aa, Glycine max
  Clone ID: PAT_MRT3847_70711C.1.pep
ISGNLITSCTKVKDVLSANWMDQYSLYDPTVTIEWSKPDCKHCETQNQKCKWKNSTKVETECFVCSTNTTPHQLLYSLLQEE

SEQ ID NO: 253253 - protein, 104 aa, Glycine max
  Clone ID: PAT_MRT3847_70712C.1.pep
MGNVNVTPEEEEVSASARATDENAMPQSPATSPTAIHFPLIFAPQVPVVPLQRPDEMHVPSCSWMDTTSGYEDVYREVGIPTVITWSYDGKEVAVEGSWDNRKT

SEQ ID NO: 253254 - protein, 87 aa, Glycine max
  Clone ID: PAT_MRT3847_70713C.1.pep
VMFLFYIFGLGNSHSFTNHHISPTKIFIFLPTFFLPALWTPTRTTTSNSKSLISPVFISHYHECQTKTQSWTYLKSHPSFIIERTRK

SEQ ID NO: 253255 - protein, 77 aa, Glycine max
  Clone ID: PAT_MRT3847_70714C.1.pep
LEPVYLLGLCIKLHLTSSCLHPSLPQLRRGPSQPWGPHEVVSRICSSLFVKPGRRVGPSHRYTPVKHSWAPPEPKAA

SEQ ID NO: 253256 - protein, 60 aa, Glycine max
  Clone ID: PAT_MRT3847_70715C.1.pep
HKYFLFLYKPLFKPKPRSAFGFYKTFIGKLIFLQHLTFLWGGDPIRLTKHLSTKPTEKQG

SEQ ID NO: 253257 - protein, 71 aa, Glycine max
  Clone ID: PAT_MRT3847_70716C.1.pep
SLLGAAPIHKVDTPENNFGTGPRGHPTLRQSVSIITLRKHCTGFAPGETIYPPPFRPYLRSENLRGPPPGP

SEQ ID NO: 253258 - protein, 35 aa, Glycine max
  Clone ID: PAT_MRT3847_70717C.1.pep
CVKCSLYHFVSQCKLQAIILMRNNKNVPATQAPGS

SEQ ID NO: 253259 - protein, 62 aa, Glycine max
  Clone ID: PAT_MRT3847_70718C.1.pep
GLVGKTVVGVLVVSCRVLLMWTLLGLSLRDKGHISYPSSLLSSKQSLSVYTCALTAILLFVT

SEQ ID NO: 253260 - protein, 75 aa, Glycine max
  unsure (1)..(75): unsure at all Xaa locations
  Clone ID: PAT_MRT3847_70719C.1.pep
GEEDLSAHSPVVAAPSGVKVSVTPNKRRLPKSSIXLGFRVFISWTLSSFKEGLFGSSSWRTVIYMVRSPFVLSTS

SEQ ID NO: 253261 - protein, 196 aa, Glycine max
  Clone ID: PAT_MRT3847_7071C.1.pep
MMNEFRYSCKSAHQTLQWINEIIHFLTPYSSLINAHVVNFFKDRLWENVDAEWIECLRRESVQNLLLIPSGAVQDQWPTSLKEFILKIRSMVFCQEQADINMALPGLQTISLNTVLAQGMNVKKKHEVEILSAVTNTVANSIRADAILDVGAGQGYLAQVLAFQYQHPVIAIDACSHHGRGTDARAERIKNTIHHR

SEQ ID NO: 253262 - protein, 38 aa, Glycine max
  Clone ID: PAT_MRT3847_70720C.1.pep
MNLASSSINFFTRRIMKCNLKNKRISSRIHIVLEAPPN

SEQ ID NO: 253263 - protein, 136 aa, Glycine max
  Clone ID: PAT_MRT3847_70721C.1.pep
KKKKKLGFFIWKNHSNQILEENWIWSLQRGNPISYFPSPWKTPGGWRWVVFMPPSPQRARFFGGGKPPVLVASPRTPGKPAKKGDFGGFFKNPKRFGGKNPSFGAGTGPREIPFRGTFPKTFFSLTQGWFFQPRLG

SEQ ID NO: 253264 - protein, 51 aa, Glycine max
  Clone ID: PAT_MRT3847_70722C.1.pep
IFVFNALVILYITAPLLFALQLSAMIVLKFFRIHQTSSLYINYSTTSTFNL

SEQ ID NO: 253265 - protein, 216 aa, Glycine max
  Clone ID: PAT_MRT3847_70723C.1.pep
MPRPGSKPYDCVKRAWHSEIHQPIRGTLIQEIFRVVNEIHGSSTKKNKEYQEKLPVVVLRAEEIIYSKANSEAEYMDLTTLLERTNDAIDTIIRRDEHTETGEYLRPCIEAALSLGCSLTKATRSQRNNQRCYLSRSTEEVPKLSYGTLHNTANTKDHNNTRSQCVSENVPSASKKQCVEHQPPPKLFSVYPLYYGNNNNIQLGNSQHHHGFKVSH

SEQ ID NO: 253266 - protein, 303 aa, Glycine max
  Clone ID: PAT_MRT3847_70724C.1.pep
METISKFPCSHQPVRSISFPPRVHPVSQRVEALLNHLKPHHSQPISITTCLEAETIQSDLVVLAELYNCMEELFHSPQTKQTLLRYQDGKLVEEALRGSVTLLDACESARDLLLVLKEHMQTLHSAVRRRKGDSNIESIISAYESFKKKAKKTIAKQLGQLKRMKNKANSFSLLDQDQQLVFLARVIKEASTITISILHSLLVFMSMPTFGTKGSSLISKLKPTVLFSSLKEQKNTNGVADLNNVLCSLLRREKNGDSSGEFQRALTVLETLNVNIGGLEGGLDCIFRCLVKNRVSFLNMLAH

SEQ ID NO: 253267 - protein, 45 aa, Glycine max
  Clone ID: PAT_MRT3847_70725C.1.pep
CTSSWLVAISVRFKLRSYDAIVKRRSFSDRTNSVSSRFHLVMMCA

SEQ ID NO: 253268 - protein, 86 aa, Glycine max
  Clone ID: PAT_MRT3847_70726C.1.pep
RQFNLGKGRDKVACLQVDCRGSLREIPIPLLKEISRHQCSYMIWNYMFSSKADLKAKGNGIGILRGIPIPLFQEISRQQCSYKMEM

SEQ ID NO: 253269 - protein, 48 aa, Glycine max
  Clone ID: PAT_MRT3847_70727C.1.pep
EVKMGVTRTLARVTVPLRGASQSPVRSGQFWGGSPLPAWLGKCRVGKT

SEQ ID NO: 253270 - protein, 412 aa, Glycine max
  unsure (1)..(412): unsure at all Xaa locations
  Clone ID: PAT_MRT3847_70728C.1.pep
EHACEAAASVESNNLKSKPEADRVNVEKLADKDPPVPNDSKHLVDLFSFLPELIASVKKAALEDAEELKAAADEPANSQNHNSDTKDETTNEVEPTNAHGDLELDSENDHVDTNKIESTRAEEEAFANGLQTINNDDLEEIRELGSGTYGAVYHGKWKGSDVAIKRIKASCFAGRPSERARLITDFWKEALMLSSLHHPNVVSFYGIVRDGPDGSLATVTEFMINGSLKQFLHKKDRTIDRRKRLIIAMDAAFGMEYLHGKXNIVHFDLKCENLLVNMRDPQRPICKIGDLGLSKVKQHTLVSGGVRGTLPWMAPELLSGKSNMVSEKIDVYSFGIVLXVFPTWNEPYADMHCASIIGGIVNNTLRPQIPTWCDPEWKSLMESCWASDPVERPSFSEISKKLRSMAASMNLK

SEQ ID NO: 253271 - protein, 255 aa, Glycine max
  unsure (1)..(255): unsure at all Xaa locations
  Clone ID: PAT_MRT3847_70729C.1.pep
MTSRKKFGIPWPECNDGLSYDDVVRASDAGATLIEFYSTKYKSSAPLQGWLQRIKSGQITVDGGVVTDSNTVLRVGSKLIYHRLPWKEPDAPHMIDVLYEDDDMIALNKPSGLQVLPGGLYQQRTILTQLQWEANNQGTCEMHKRLHPVPVHRLGRGTSGILLCAXTKLARARLASHFADGTSHVGGKRDTKQELGKIAKMYRALVSGIVENDKVTINQPIGIVKYPGVAKGLYVASESGKPALSVVDILETNIQ

SEQ ID NO: 253272 - protein, 101 aa, Glycine max
  Clone ID: PAT_MRT3847_7072C.1.pep
NKHCDGFTFNAPKSSSSWYARTKSTMTPSSLKPRSTTLDSSRSTFVSIPYCFSLFVYVFIFPTRSLVELYVCVYLTLLRLLISRSKLSIAKFLLTMCSLSA

SEQ ID NO: 253273 - protein, 118 aa, Glycine max
  unsure (1)..(118): unsure at all Xaa locations
  Clone ID: PAT_MRT3847_70730C.1.pep
WPECNDGLSYDDVVRASDAGATGIEFYSTKCESSAPLQGWLQRIKSGQITVDGGVVTDSNTVLRVGSKLIYHRLPWKEPDAPHMIDVLYEDDDMIALNKPSXLQVLPGGLYQQRTILT

SEQ ID NO: 253274 - protein, 74 aa, Glycine max
  unsure (1)..(74): unsure at all Xaa locations
  Clone ID: PAT_MRT3847_70731C.1.pep
GDNRLGTIEGTWLIGNAFQSFLQSCGAFKVXIYREVVFSSLEDERFREEIQLKILIAKRMTNFSRGKGVTKWSY

SEQ ID NO: 253275 - protein, 73 aa, Glycine max
  Clone ID: PAT_MRT3847_70732C.1.pep
LDDEVEHWRQVADICVKNYCKCEILKRVVKEFQDNESNFLDMLEELEEHIYLCFLTVNRFRRLVMEEIMGKQR

SEQ ID NO: 253276 - protein, 46 aa, Glycine max
  Clone ID: PAT_MRT3847_70733C.1.pep
EPILVTQLAENIIEEVFSRYQNLLADGMSKEQTKFNNITISLTRKA

SEQ ID NO: 253277 - protein, 37 aa, Glycine max
  Clone ID: PAT_MRT3847_70734C.1.pep
QLECFPFGIASLLCSSHWTDALPFDSVTWNRAHVFYL

SEQ ID NO: 253278 - protein, 70 aa, Glycine max
  unsure (1)..(70): unsure at all Xaa locations
  Clone ID: PAT_MRT3847_70735C.1.pep
PPSPVIPPSVSDYYYSCGDTATCRSIFTVXNARLERGSCPLEGATRSPELFSICSIYYAFSCFYASPRLQ

SEQ ID NO: 253279 - protein, 90 aa, Glycine max
  Clone ID: PAT_MRT3847_70736C.1.pep
FRSFGTYPTQGCSNLSLRVQLYFNSCNNAFFSSLGTLTLLLPFPHLHAFHCPISIAFPPFEPYTIQLSSCILVETFFKIKNNSFLLSDSC

SEQ ID NO: 253280 - protein, 159 aa, Glycine max
  Clone ID: PAT_MRT3847_70737C.1.pep
GNLVGAQAAANMGWKESAVCLFSLGMVHYLVLFVTLYQRLSGGDRLPVLLRPVFFLFFAAPSVASLAWESIVGTFDTASKMLFFLSLFLFTSLICRPTLFRRSMRRFNVAWWAYSFPITALALVSADYAQEVKGTFSHILLLFLLALSVLVSLALTLFT

SEQ ID NO: 253281 - protein, 96 aa, Glycine max
  Clone ID: PAT_MRT3847_70738C.1.pep
LGRIFFALLFHPWGFQPVIWRKSLCSYFVVGPIGKHPNESMRPSEGGDQFILMFSQKKKGRMFFSQILMLENLPCLVWELFDSLQTGSSFCSLGPS

SEQ ID NO: 253282 - protein, 83 aa, Glycine max
  Clone ID: PAT_MRT3847_70739C.1.pep
IKGGFNNTPLLKPSIFHQKLSCQPTTKTLNKKSSTNTPAPYEYCHTDQHPFQRGELILTPIPIKPLLPKAHFMPLKPPSFELL

SEQ ID NO: 253283 - protein, 100 aa, Glycine max
  unsure (1)..(100): unsure at all Xaa locations
  Clone ID: PAT_MRT3847_7073C.1.pep
GALVGSPSKTQKRVVPVRGINSFGGLKATHGVVFLGXPLSPXKCFVKVVGSVKAAPSNGKGKGGGFFSPGNPAGEIFPIAAIPKGLVFVGGAVGFGVFRV

SEQ ID NO: 253284 - protein, 160 aa, Glycine max
  Clone ID: PAT_MRT3847_70740C.1.pep
QKKNTKLEQKATLACAVSLILVPGAALRGAADVSTNNSGSDNSESNDSGQVSTHTKAVQAVCQNSDDKKFCSDTLSSVNTSDPTAYVKTVLKKTMDGVIKAFNLSDTLTVEHSKTNSSVKMALEDCKDLLDFPIDELQASQVLVKDNNVYNINDGVCDLK

SEQ ID NO: 253285 - protein, 377 aa, Glycine max
  Clone ID: PAT_MRT3847_70741C.1.pep
MLSDGPPNSFHCMDSTGMKKITVEKCTGMKTIIPSCVLFQFLAELIVFSCHTLLNIIRPSTTTSLPKLRILRIRGCNELEEICGSSNEGDGAVLDEIAFMKLEELTLNNLPRLTSFCQGSYDFRFPSLQIVRLENCPMMETFCQGNITTPSLTKVEYESYDFRHTSEDHRRMLSDGRPHMMRQYNWYGDLNTTVRTVFTKKYRDMEKLVIRRDNCNWKFIWPNQVTPNSFPNLTQIDISSCEGQYVFPIHVAKVLRKLQVLEISCCTIENIVEESDSTCDMTVVYLQVRYCHNMMTIVPSSVQFYSLDELHVTKCRGLVNIIMPSTIANLPNLRILSIKYCFELEEIYGSNNESDEPLGEIAFMKLEELTLKSLRSL

SEQ ID NO: 253286 - protein, 33 aa, Glycine max
  Clone ID: PAT_MRT3847_70742C.1.pep
CNFPSKIKHFLFIDYFLIYINPHIVASCYSSIT

SEQ ID NO: 253287 - protein, 63 aa, Glycine max
  Clone ID: PAT_MRT3847_70743C.1.pep
AVQRITLSKAIFNNNRFSTKTLTLTLGGATRTYKVHAYVYNTIFEITEIVSSCRLRTIICIPS

SEQ ID NO: 253288 - protein, 213 aa, Glycine max
  Clone ID: PAT_MRT3847_70744C.1.pep
MEKEGDALVDPLASYWGLSLFPQPSLPPSKPYNSDQDLHIIHTHLRSMALRSPAKLMQQAKSIVDGNPQLFNTENLNDPTSQNTNVAEEDGEFRRNPRPGLGLKRPRFSMKPTKKPSVESLLPTLDLDSLKDPADFFMAHERLENAKREIQKQLGGASFESDQDKAAARPRQRRPGLLGNDQLSIKYKHRYPKETSDDVLSSQETLGSRSLVL

SEQ ID NO: 253289 - protein, 63 aa, Glycine max
  Clone ID: PAT_MRT3847_70745C.1.pep
SYCCGQEGIGSKSAFRSPAVGSLVELSASSSWEGPFKCRPVSVPSSAANRYSAGMGSSFTVSS

SEQ ID NO: 253290 - protein, 52 aa, Glycine max
  Clone ID: PAT_MRT3847_70746C.1.pep
TRGIWIYIVSPTLGAVAGTWVYNTIRYTDKPLREITKSTSFLKGVGRSGSSR

SEQ ID NO: 253291 - protein, 208 aa, Glycine max
  unsure (1)..(208): unsure at all Xaa locations
  Clone ID: PAT_MRT3847_70747C.1.pep
GWKDSIVTLQTTKALPLWSEDLAISSRCIEAIASKALSHPSKVSLSHSHSRRLRNDVSSYNETESLRHKSTSKGWWAEDLADLSIDLYWRTMMAIKSGGKTPSNLIGDALKIYASRWLPNIRKNVHNVKRETESDSDSDSASEVNSKHRLLLESIVSLLPAEKGXAVSCSFLLKLLKAANILNASASSKVELATRVGLQLEEATVNDL

SEQ ID NO: 253292 - protein, 143 aa, Glycine max
  unsure (1)..(143): unsure at all Xaa locations
  Clone ID: PAT_MRT3847_70748C.1.pep
MGLTKIKKGLKTLYNKLKFKKIDKXNENNKDSTIYKNNPMITETTIXIQSINSVNRSLKKKKLNNLTAKXNAFIKIIQKIKKMLVISXTNILSNKTTYDSKRLQFQNIKLLILQRTRNARLTLKXHSFLKFFMKTIYINIFLY

SEQ ID NO: 253293 - protein, 73 aa, Glycine max
  Clone ID: PAT_MRT3847_70749C.1.pep
LKALIIETQSSTTSQSGLKERNNINMQFHKEYLDLILVPSGLLIMFVYHLFLLCKYVNQPHTTVMGFEDNDKR

SEQ ID NO: 253294 - protein, 147 aa, Glycine max
  Clone ID: PAT_MRT3847_7074C.1.pep
MGFSKEQLLARLKELLINFSQYEHPAILTVEEGEKYVGHLGGGVSKNLFLKDKKQRFYLVSALKDTKVDIKVLSQRLGLRKGGLRMVPSEALGEILHVSLRCVTPFAVENESAQDVSLLLDQGFKTQEFCFLHPLSHDMTISINSND

SEQ ID NO: 253295 - protein, 439 aa, Glycine max
  Clone ID: PAT_MRT3847_70750C.1.pep
MEDTVSALRSLMVSHSPPLDALVVPSEDYHLSEYVSARDKRREFVSGFTGSAGLALITKKEALLWTDGRYFLQAEKELSAGWKLMRIGEDPAVDIWMADNLPKEASVGVDPWCISIDTAQRWERAFAEKQQKLVPTSKNLVDEVWINRPPAEINAVIVHPVKFAGRSVADKLKDLRKKLVHEQTRGIIFTALDEVAWLYNIRGSDVAYCPVVHAFAIVTSNSAFIYVDKQKVSVEVQTHLVENGIEIQEYTAVSSDATLLATDELDAVSTAKAALAETEARKIPSEIDKSVNGEHQAEENSNDLIWADPVSCCYALYAKLNPDTVLLQQSPLALAKALKNSVELDGLKKAHIRDGAAVVQYLVWLDKKMQDIYGASGYFLEKDSVKKEKHLQSLKLTEVTVSDQLEGFRASKEVELTEQLSIYLDMLFLEKILLKKKKW

SEQ ID NO: 253296 - protein, 172 aa, Glycine max
  Clone ID: PAT_MRT3847_70751C.1.pep
MVLIIDMNMQIGPSSMTSTMSIIKTILPQRNSSKNIKRMPICHGIGSYSNVHEGPHLISFRPQARNVPLQSSMTVTDEPGYYEDGEFGIRLENVLIVKEADTTFNFGDRGYLSFEHITWAPYQTKLIDLNLLSPEEINWLNSYHATCRNILAPYLDEVENAWLKKATEPVGA

SEQ ID NO: 253297 - protein, 172 aa, Glycine max
  Clone ID: PAT_MRT3847_70752C.1.pep
MVLIIDMNIQIGPNSMTSTMSIIKTILPQRNSSKNIKRMPICHGIGSYLNVHEGPHLISFRPQARNVPLQSSMTVTDEPGYYEDGEFGIRLENVLIVKEAGTNFNFGDRGYLSFEHITWAPYQTKLIDLNLLCPEEIDWLNSYHSTCRDILAPYLNEVENAWLKKATEPVGA

SEQ ID NO: 253298 - protein, 89 aa, Glycine max
  Clone ID: PAT_MRT3847_70753C.1.pep
KSEVLLNGIPQAEENRTEKVISQSNQQMLSQILANASEPTFHLRHALGPYGSTFDRRTHKCCVYIAGSSKYCARLNSIQAYTDINRDVS

SEQ ID NO: 253299 - protein, 475 aa, Glycine max
  unsure (1)..(475): unsure at all Xaa locations
  Clone ID: PAT_MRT3847_70754C.1.pep
MAVSLAMRLVRRRSPPLLWRRSFSMSAVDAEKEVVVVPELPPFDYSPPPYVGPTAEEILAKRREYLSPSILHSYKNPVNIVEGKKQYLFDEKGRRYVDAFGGIATVCCGHCHHDVVEAIVNQTKKLQHSTVLYLNHVITDCAQAVASKLSQDLKVVFFTNSGTEAXEFGHVIGKVSNGCHDNISLRNAYHGNATGTMAATAQSIWKFNVVQSGVHHAVNPDPYRGIFGSDGEKYARDVQDIINFGTSGNVAAFISEAIQGVGGIIELAPGYLPVVYNAIKKAGGLFIADEVQAGFGRTGSHFWGFEAHNVVPDIVTIAKGIGNGIPLGAVVTTPEIAEVLTRRSYFNTFGGNPVCTAAGLAVLKVIEKEQLQQNAFVVGSHLKERLTALKDKYELIGDVRGRGLMLGVELVTDRELKTPAKNETLHVMDQMKELGVLIGKGGYYGNVFRITPPLCFTKEDADFVADAMDLTLSRM

SEQ ID NO: 253300 - protein, 361 aa, Glycine max
  Clone ID: PAT_MRT3847_70755C.1.pep
VENGIEIREYTAVSSDTTLLATDELDSVSTAKVALAETEVRKIPSEIDKSVNGEHQAEENSNDLIWADPVSCCYALYAKLNPDTVLLQQSPLALAKALTILVELDGLYEAHIRDGAAVVQYLVWLDKKMQDIYGASGYFLEKDSVKKEKHLQSLKLTEVTVSDQLEGFRASKEHFKGLSFPTISSVGSNAAIIHYLPKAETCAELDPDKIYLFDSGAQYLDGTTDITRTVHFGKPSTHEKACYTAVLKGHIALGNARFPNGTNGHSLDILARIPLWKDGLDYRHGTGHGIGSYLNVHEGPHLISFRPQARNVPLQSSMTVTDEPGYYEDGEFGIRLENVLIVKEADTTFNFGDRGYLSFEH

SEQ ID NO: 253301 - protein, 72 aa, Glycine max
  Clone ID: PAT_MRT3847_70756C.1.pep
FGVFFFFFFFQNKSTINFFLYLSFTFTLIKQNKIHHMGFFSLLLSFLSSKFQTYQAQSSFYTRKTKLSPPPS

SEQ ID NO: 253302 - protein, 52 aa, Glycine max
  Clone ID: PAT_MRT3847_70757C.1.pep
DTGQVSLTIPLQYCYSVQCQRVLKLYHMCRFRFLILKGVPWVTRCWNRAFVA

SEQ ID NO: 253303 - protein, 78 aa, Glycine max
  Clone ID: PAT_MRT3847_70758C.1.pep
PEILVTTVCRRGDEEEAALETEDEARMLDLLDDLMDEIDVDCAILLHAEAIADEIRSEEDPEQCKRGFRVLLFRKGLF

SEQ ID NO: 253304 - protein, 475 aa, Glycine max
  Clone ID: PAT_MRT3847_70759C.1.pep
MTVFLATRLVFRRSPPLLWRRSFSRAAVEAEKDTVAVPSLPLFDYSPPPYAGPTADEILAKRREYLSPSILHFYKNPVNIVEGKKQYLFDEKGRRYVDAFGGIATVCCGHCHPDVVEAIVNQTKKLQHSTVLYLNNAIADFAQALTSKLPGNLKVVFFTNSGTEANELAILIARLYTGCHDIISLRNAYHGNAAGTMGATAQSIWKFNVVQSGVHHAVNPDPYRGIFGSDGEKYARDVQDIINFGTSGNVAAFISEAIQGVGGIIELAPGYLPAVYNTIKKAGGLFIADEVQAGFGRTGSHFWGFEAHNVVPDIVTMAKGIGNGIPLGAVVTTPEIAEVLTRRSYFNTFGGNPVCTAAGLAVLKVIEKEQLQQNAFVVGSYLKERLTALKDKYELIGDVRGRGLMLGVELVTDRELKIPAKGETLHVMDQMKELGVLIGKGGYYGNVFRITPPLCFTKEDADFVADAMDLTLSRM

SEQ ID NO: 253305 - protein, 105 aa, Glycine max
  unsure (1)..(105): unsure at all Xaa locations
  Clone ID: PAT_MRT3847_7075C.1.pep
LAALMIASYAQLTPNDYAIVCPRAXQSYXSIIMHALILEXRIGTSLLRLHLHDCYANGXEGLVLLDHTTFLLRDKTALPCCKPVRGLLAVDDIRATRDKAGNLAA

SEQ ID NO: 253306 - protein, 61 aa, Glycine max
  Clone ID: PAT_MRT3847_70760C.1.pep
TPRLSNPRFPGPLKILQSLLIFKSPPYPRPPKAGPVKGPSPKIIGNPKLVGPGVQRPINLK

SEQ ID NO: 253307 - protein, 64 aa, Glycine max
  unsure (1)..(64): unsure at all Xaa locations
  Clone ID: PAT_MRT3847_70761C.1.pep
MSNTYGNCDXADKTICTKGNSYGVIVETDKSYIETVVMEVPPAEHDAKCKFGTHCTCTDCTCCH

SEQ ID NO: 253308 - protein, 118 aa, Glycine max
  Clone ID: PAT_MRT3847_70762C.1.pep
RIARASTMHIYPSHNLKTLFHRIRLGVNTLFLRAHCTLHNLQRLFLFLSLAWLNHVISIISLTVGWSILQAISDNSLKLLIYLLVDMIINLYKFNYSSLCYIAFYTLLGTYITGIEQI

SEQ ID NO: 253309 - protein, 55 aa, Glycine max
  Clone ID: PAT_MRT3847_70763C.1.pep
NDSLSRHLPSYIRKPRFYITEHVCNTRISCTNFCCSYNYNLNKYFPKSIKQISSR

SEQ ID NO: 253310 - protein, 202 aa, Glycine max
  Clone ID: PAT_MRT3847_70764C.1.pep
LPPSIVGVTHSDLTLAESWFASDTSTGYLEDAIAGWGIWCKQHNIPSYSQDQKKSQYLVDQEDLLPTFSSTSQILHDHKNFSTATRDLSSSQNDTHAAAIKHDSSQRSYASTESDERGHWKRIAYPFELVKPGGVEGETTLKDINHQMLMSPSKPIPHPVGDSLTHSCISNRAFGISGKAVAALTRIHTQGRGSITIIRTKG

SEQ ID NO: 253311 - protein, 124 aa, Glycine max
  unsure (1)..(124): unsure at all Xaa locations
  Clone ID: PAT_MRT3847_70765C.1.pep
KKYPLFSPRRAWERTFIELEVNFACICPXECTSLPYKQDALYIIDNIGNAFFATDIMLTRCDAYLXDYHHYLFGADPMSTGLRSICTPHRLNVCSTXPFNSMRLLLTPYRSVTGLLVLNLLLLW

SEQ ID NO: 253312 - protein, 39 aa, Glycine max
  unsure (1)..(39): unsure at all Xaa locations
  Clone ID: PAT_MRT3847_70766C.1.pep
XILIHSXXPXISFSQELTGHYTGSKGAPGSRAFSFDSXW

SEQ ID NO: 253313 - protein, 78 aa, Glycine max
  Clone ID: PAT_MRT3847_70767C.1.pep
FHCMKELCSWICVACTPSCRVQRISCSKPWRMYRGNSVLFLVRETDTRTLTFFCFIKLQKLVGTTIYNIIILFSNNRI

SEQ ID NO: 253314 - protein, 38 aa, Glycine max
  Clone ID: PAT_MRT3847_70768C.1.pep
DSVCTCVHVNFYFLYICQYFFIILFNYLSITNIYHSYI

SEQ ID NO: 253315 - protein, 116 aa, Glycine max
  Clone ID: PAT_MRT3847_70769C.1.pep
KNVKKRLIYALTKKNIKNPVLGGPHPFFFLLVKNKQGNNSLLKKANSKVESLTFRAASLLKKGLKKMLPLFPQNNINTFLVLPLNSKTSSRASSIPPQNYGKGEKHLFKKQKAPLS

SEQ ID NO: 253316 - protein, 49 aa, Glycine max
  Clone ID: PAT_MRT3847_7076C.1.pep
FSHQGKDSDAVKEALNQLSEVGWAKKWSSQPYVSCRTVSLQLKMWQSDN

SEQ ID NO: 253317 - protein, 675 aa, Glycine max
  Clone ID: PAT_MRT3847_70770C.1.pep
IPERGSSPSTTTTTTILAIATSYLFLLITPTQKSTYHSLFIYDSRLDNASIYNHLKTLTRRPHVAGSKANAEAASYVVSVFTSSYIPSHIVSYEVSLTYPLSRSLVLITNPSTTFTLHQETYEGDPYADVADEVVPTFHAYAKSGTVAAPVCYVNYGRVEDYLTLKDKNGVNVSGTVVLARHGKIYRGDIVKNAYEEGAVGVVIYSDRKDYGGEEKWFPDEKWLPPSGVQVGTVYGGLGDMMTHTRVWGLVALWLADEEFLPFDYLSYANELQLSVENLEDEISNKDINLSPIFKSIKGLEKAAIKIDSQRKEIEAGKGWITGKKDHLRVRELNDRLMMAERAFTDRDGLFGMSWYKHLIYGPSKHNDYGSQSFPGIDDAVKMAKNLHTAESWHRVQHEVWRVSRVIKQASLDFVFPRFSHLSNSSIYESWTSSGSSPLFGRLGGGGSDYASFLQHVGIPAADIAFGGDVAGYPVYHSLYDDFVWMEKFGDPMFQRHVAAASVWGLVALWLADEEFLPFDYLSYAKELQLSVENLEDEISNKDINLSPIFKSIKGLEKAAIKIDSQRKEIEAGKGWITGKKDHLRVRELNDRLMMAERAFTDRDGLFGMSWYKHLIYGPSKHNDYGSQSFPGIDDAVKMAKNLHTAESWHRVQHEVWRVSRVIKQASLVLFGLLS

SEQ ID NO: 253318 - protein, 54 aa, Glycine max
  Clone ID: PAT_MRT3847_70771C.1.pep
KNYNATGFINLPSNNTSAFAKGGKGFTKEHPTKPPEKMPLIRPFAGENPPETPP

SEQ ID NO: 253319 - protein, 80 aa, Glycine max
  unsure (1)..(80): unsure at all Xaa locations
  Clone ID: PAT_MRT3847_70772C.1.pep
GIYRSIEHKATVNPEKERILVATFHSPRLXAVIGPAQSLITLERPATFNSISVEDFFKGYFSRELQGKSYIDVMRIQNGL

SEQ ID NO: 253320 - protein, 55 aa, Glycine max
  Clone ID: PAT_MRT3847_70773C.1.pep
PLDFHCLINTITRYWARSIFIKSTFSYSTTVFFSKINNLWIHLILKASSLKLPFK

SEQ ID NO: 253321 - protein, 421 aa, Glycine max
  Clone ID: PAT_MRT3847_70774C.1.pep
MEHWSQTVVNGEPIESVSFWCEHKEVFWGRPISMDVVRSQRGSSRDTSPDRAKICRMNQKVKPFRKVQVVYYLSRNGLLEHPHFMELTLLPNQPLRLKDVFDRLMALRGTGMPLQYSWSSKRNYKSGYVWYDLGLKDIIHPAEGGEYVLKGSELVEGCSEAERFNVRNKQQGIHQQAEANYNYSYDSRSKALGVCNKQQQQRESEELEEYEEQEKEYEEGEKTSYTSSTTTPHSGCSRGVSTEEVVYEEEESKKKKKGGGGAGGNNKKHLSGEKEKVKRRVVDGDGSGSSRYSGLLQLIACGGGAGEYMKGKQGPRLSDVGTKERDKKALFWEEAETEMSENPRLLGNLQTEEKEYFSGSLVDSIKAHREGEPVLNKSNSYNELRRSRLGMVTEEDKKKVVKGGMKDKCIPLIKSPKTSRK

SEQ ID NO: 253322 - protein, 364 aa, Glycine max
  Clone ID: PAT_MRT3847_70775C.1.pep
MGFRVTTTLSLLSLFWLLSLHQARAAKFHNVSGLRGKKPVVANGCNLFLGSWVVDTSYPLYDSSTCPFIDPEFDCQKYGRPDKQYLKYAWKPDSCAIPRFDGAAFLNSWRGKKIMFVGDSLSLNMWESLSCMIHASVPNAKTGFLRKESLSTVTFQDYGVTIQLYRTPYLVDIIRENVGRVLTLDSIVAGNAWKGMDMLIFNSWHWWTHTGKSQGWDYIRDGPNLVKNMDRLEAYNKGLTTWANWVDQNVDPSKTKVFFQGISPTHYQGKDWNQPKRSCSGELQPLSGSTYPAGLPPATTILNNVLRKMSTPVYLLDITLLSQLRKDAHPSAYSGDHAGNDCSHWCLPGLPDTWNQLLYAALTK

SEQ ID NO: 253323 - protein, 44 aa, Glycine max
  Clone ID: PAT_MRT3847_70776C.1.pep
CITASLKDVRHAVDDTAASAALASNAMAIVLMLSVDDRSLAFGP

SEQ ID NO: 253324 - protein, 167 aa, Glycine max
  unsure (1)..(167): unsure at all Xaa locations
  Clone ID: PAT_MRT3847_70777C.1.pep
GRPVFRKDLAERSARLLDFHLDLVSLEASTKIQXKPLAEEMQAIIKGLEKVKQEFAASANDGPVSEVFHKTLKEFIAVTEACVTSLTDLSSAPGRRPDALALELDWDPARCLLLRPATTPPNFIRLFRKAHEENIKQAELEKKKAEKEAEMEKAKGINLTKKGAKDS

SEQ ID NO: 253325 - protein, 129 aa, Glycine max
  Clone ID: PAT_MRT3847_70778C.1.pep
ACCMFKTPQDAGIRYSPPIYQLERLIATSSSSSSSSSWKGRLLNWSQKHSPYTGTFLLFGKSVMLMQRSRKRSCQLSFAPFFVKLMPLAFSISASFSAFFFSNSACLIFSSCAFRNNRIKFSRVVVTNR

SEQ ID NO: 253326 - protein, 427 aa, Glycine max
  unsure (1)..(427): unsure at all Xaa locations
  Clone ID: PAT_MRT3847_70779C.1.pep
MTNEMKEASALGARTARACESCLKVRARWXCAADDAFLHHGCDNMVNSANQLVGGQKRLKLQTPSSMCNNTLTPKLVXPNCMRTKSKISLQYQSRSPSFVTKGESVCLDLTXRSQKRAFNYNISHRPLVPELGKEEPMLNDETEEQLQCRVPLFDAGFSRIYNEVKDXVVAFCEEALDLENFSSEFLPSDTDLAEFTADVKSFLGNGADEDSPDDDEHVKESELLILDCKEEEGDEEMDECFDVVLIEAKEGMVKVKDEEKLDADDDTACHLDSILDMNGEAFNWNIVESESPAQAQEDEVSKVGTKKDIFLRLNYEEVITAWASQGSPWTNGTPPKFFNSDDCWLDFLGSNGGNVQCCYGAVGSLRVHADGGREARVSRYREKRRTRLFAKKIRYEVRKLNAEKRPRMKGRFVKRTPFVGATALPA

SEQ ID NO: 253327 - protein, 84 aa, Glycine max
  Clone ID: PAT_MRT3847_7077C.1.pep
QSMSFLLVCNKPCLSKLPNGTSNARAGGLPHAQANSLLLTIRENADIPWNAKNVNPFQTMQNSPETREGVPSQPRDPTAQSQQP

SEQ ID NO: 253328 - protein, 90 aa, Glycine max
  unsure (1)..(90): unsure at all Xaa locations
  Clone ID: PAT_MRT3847_70780C.1.pep
QRGYGSSWRSAQEDSTRPXYSLNDSLAEFHDPAKADKFMNIQRVLAASTIILXHKPTDSVLVTGALLDSLVDASTDLTTASQMIYRQSSS

SEQ ID NO: 253329 - protein, 29 aa, Glycine max
  Clone ID: PAT_MRT3847_70781C.1.pep
YTRILILGHRTVSQKQHIRILMRNSPRGS

SEQ ID NO: 253330 - protein, 38 aa, Glycine max
  Clone ID: PAT_MRT3847_70782C.1.pep
MLFCEMTQQSAHHSLLSISEMSACFVKRCHLFDLFIFT

SEQ ID NO: 253331 - protein, 158 aa, Glycine max
  Clone ID: PAT_MRT3847_70783C.1.pep
MNSEAFNWNIAESESPAQAQEDEVSKVRTNKKDIFLRLNYEEVITAWASQGSPWTTGTPPKFFNSDDCWLDLGSNGGGVQCYYGEVRSLRVHADGGREARVSRYREKRRTRLFAKKIRYEVRKLNAEKRPRMKGRFVKSVPLLEPLLCQLNYQSSPLT

SEQ ID NO: 253332 - protein, 125 aa, Glycine max
  Clone ID: PAT_MRT3847_70784C.1.pep
MTNEMKEASALGARTARACESCLKVRARWYCAADDAFLCHGCDNMVHSANQLASRHERVKLQTASSKVNYSVTPKVAWHSGFTRKARTPRHNNNRHSSLKQQQQKKPLHEERGEEEVFFNNTISL

SEQ ID NO: 253333 - protein, 146 aa, Glycine max
  Clone ID: PAT_MRT3847_70785C.1.pep
MGEVEEVKEQMKADTKALKEQMVTMMSIKEIMEVNAAAITATSIIAEVDLTPLYGLNQINHPTSDMVGLEGKELGGTGGPHLVQKTSMPSHHIACLPTIHHPMWQTLPVRMSITPLPYSLKVDNLKLIMYMSLKPWGRHMKFSTTI

SEQ ID NO: 253334 - protein, 75 aa, Glycine max
  Clone ID: PAT_MRT3847_70786C.1.pep
VSPGFYPGGGTRGPKTGGRKGIFFFKTRGFKGGAKICFKKKKKKKKKKKKKKKKKKKKKKKKKKKKKGGFPQRHL

SEQ ID NO: 253335 - protein, 291 aa, Glycine max
  Clone ID: PAT_MRT3847_70787C.1.pep
MATLFNFNSTLRPSCYLPFSPSSSYPHFSNTLSTTFLGHTVTLKYAATSTSNRGRSLSTRMSWDGPLSSVKLIIQGKNLELTDAVKQHVEDKVGKAVQKHSHLVREVDVRLSIRGGGEFGRGPRTRRCEVTLFTKRHGVVRAEEDAESTYGSIDLVSSIIQRKLRKIKEKVSDHGRHMKGFNRLKVREPVEQLPMEEDEILSPREEEESIDEVVRTKYFDMPPLTVAEAIEQLENVDHDFYGFRNEETGEINIVYKRKEGGYGLIIPKGDGEAEKLESVVLEPAIESSLKE

SEQ ID NO: 253336 - protein, 89 aa, Glycine max
  Clone ID: PAT_MRT3847_70788C.1.pep
SLSLSSTSQKKKKKPQNQTLIPRNLIPFRKFLPKSRPPADPYRFPSPFKSSATNFGIFLGLRIMEKEEKEPQVQKSGGESEDAEPIGLV

SEQ ID NO: 253337 - protein, 160 aa, Glycine max
  Clone ID: PAT_MRT3847_70789C.1.pep
MSEAKVQDLKKEEEVADDSPKNEVDSGKSVDDLKDSDNDKSDGNAMPSSHQEEAAVKKKYGGVLPKKPPLISKDHERAYFDSADWALGKQGAQKPKGPLEALRPKLQPTQQHARSRRSAYAPADDNEVDGCSSDSSAEHQSATEEVGGDKSDTAQDQSCH

SEQ ID NO: 253338 - protein, 49 aa, Glycine max
  unsure (1)..(49): unsure at all Xaa locations
  Clone ID: PAT_MRT3847_7078C.1.pep
XXRXHMGHXGXRXXPXXLLXPXPXXXRFRYXXDRVEXRNPXLDKAEVKL

SEQ ID NO: 253339 - protein, 109 aa, Glycine max
  Clone ID: PAT_MRT3847_70790C.1.pep
WNRAHQGIPPFPRVPMWLKWPIAGRGPPLAGGFPLTPGGIPTGAKVRFIAFGGIAKAGFPGVIPRGIPIPFILKTNKEGMGQTKEARRKRRKGIKVQEGNSPARVFPPH

SEQ ID NO: 253340 - protein, 67 aa, Glycine max
  Clone ID: PAT_MRT3847_70791C.1.pep
GDIIYLAQHHYWFLEPKQRRRCVADSILKGPETSTSEFQLLIYHVYEPSLFFRVLCGYVVWESSFTS

SEQ ID NO: 253341 - protein, 143 aa, Glycine max
  Clone ID: PAT_MRT3847_70792C.1.pep
MSDAKVEDLKKEEEVGDDSPRNEVDSEKSADDLKDSDNDKSDGNPMPSSQQEEAAVKKKYGGMLPKKPPLISKDHERAYFDSADWALGKQGAQKPKGPLEALRPKLQPTQQHARSRRSAYAPADVNEVDGCSSDSSAEHQSAT

SEQ ID NO: 253342 - protein, 91 aa, Glycine max
  Clone ID: PAT_MRT3847_70793C.1.pep
LAFCYPQQLPNPQQMSERGEDTVHSPSERKRSLPSDDEEDDLSSDERGGRFKRPALNTSGGEDDNSSELDYTDEPPAEERPVTPSETGDVM

SEQ ID NO: 253343 - protein, 557 aa, Glycine max
  Clone ID: PAT_MRT3847_70794C.1.pep
METKENGPSKKVSNGGIDGPTNPMVTPLLNDLYQFTMAYAYWKAGKHQERAVFDLYFRRNPFGGEYTVFAGLEECIRFIANFTLAEEEIDFVRECLSSSCEDGFFDYLRGLDCSDVEVYAIPEGTVVFPKVPLMRVEGPVAVVQLLETPFVNLINYASLVSTNAARHRNVAGKSKTLLEFGLRRAHGPDGGVGASKYCYIGGFDATSNVAAGKLFGIPLRGTHSHAFVSSYMSLDEITDKSLRGKDGSSRCDDFVSLVQTWLNKIQLSNGVFGETNQSELAAFTSYALAFPDGFLALVDTYDVMRSGIPNFRAVALALSDLGYKAVGIRLDSGDLAYLSCEVRNFFRSIEKEFGVPEFGKLQITASNDLNEETLDALNKQGHEVDAFGIGTYLVTCYAQAALGVVFKLVEINNQPRIKLSEDVSKVSIPCKKRCYRLYGKEGYPLVDIMTGENEPSPKVGERILCRHPFQESKRAYVVPQRVEELLRCYWSGSTDIKKDTLPALRDIRERCINQLEQMRPDHMRRLNPTPYKVSVSAKLYDFIHFLWLNEAPVGELQ

SEQ ID NO: 253344 - protein, 79 aa, Glycine max
  Clone ID: PAT_MRT3847_70795C.1.pep
LLLWPYEQNILQAANELIAMCKLKTISSDPAAYICIDYHFTEEASIAVAPLSVVISTAQTWARHCAIKLHQLDSTSTYL

SEQ ID NO: 253345 - protein, 64 aa, Glycine max
  Clone ID: PAT_MRT3847_70796C.1.pep
GSVVAFSHQAYSKDFNLVCCQPVPSSLLETNRSPSPPHSFGSIIHVCGTAPYNFSSPRTSAAVP

SEQ ID NO: 253346 - protein, 423 aa, Glycine max
  Clone ID: PAT_MRT3847_70797C.1.pep
TRPLKRARRSEREGITSSTIPCAFACFDPHHWTLYSLHFPHNATMPRKVNYGLDYDDDFYDDDYDDYAYDDADAEDYAEGPDTKQETIKPGLWQCSICTYDNDESMTFCDICGVVRRSLVNTGTSNSNKTDPFKFDVPSPDDVVYTGLRSSKTGLKDKATNTKSSQLSSSIREKNELSVQSNAESSDNLSSLTRKSKQDSSAKSKLSKNVAIDLQTSGKTSNSLPESLSKDKGNNINKINSLKNGTIDIQSSKEKSGSLSALSKVKESDNISFSSIKDGKPESISSSFNNMALNVRSGNSSGNSDNTNAKGTRSHVSYKPEKWMLPQQAEDTLTQLNLAIVGHVDSGKSTLSGRLLHLLGRISQKEMHKYEKEAKLQGKGSCAYAWALDESSEERERGITMTVAVAYCDTKRYHVVVLDSAGH

SEQ ID NO: 253347 - protein, 138 aa, Glycine max
  Clone ID: PAT_MRT3847_70798C.1.pep
SAYFDRYGGGANSLACGYSRGTGLGAEIIGTFELGYTGFSATDPKRNARDSHVPVVAPLPIGFGGFMVHLATIPVTGTGINPARSLGAVVIYNKDKPWDDHWILWVGPIVGAGIGGFYHQYMLRAGASKAHGYFKSNA

SEQ ID NO: 253348 - protein, 54 aa, Glycine max
  Clone ID: PAT_MRT3847_70799C.1.pep
MGLCRESIISPSGSLHFRVHRQCGPVIQSSGSENVNLHQAYNNGDRSGHINGTS

SEQ ID NO: 253349 - protein, 104 aa, Glycine max
  Clone ID: PAT_MRT3847_7079C.1.pep
KKFLRIVNPYDSYELSILFKEKVKDILVLSPMLLGVSTKNVGCLEQFPRLYYIAIYLLFCSSLCHRPRRFSTTVFQFFLSLFCSFSFPNTPVQPPTPSTIMHHH

SEQ ID NO: 253350 - protein, 265 aa, Glycine max
  unsure (1)..(265): unsure at all Xaa locations
  Clone ID: PAT_MRT3847_707C.1.pep
MTRLLCYALIIPSFLFGAXLALHARHSLLKVSLARSYIIISNNLCLCLVTLLNLAWCFLQAWECTSGRELTWNLLSLFTTSGMLFLEVSLLAFLLQGNNAGGLEAMKRTFGISTLVVGLDILLKAIYLFVFGIPLFVDSNDHTHHGKWNLWVVHKLLLTAVYGFIMFMYHSGWKETLPAKIAFYKYVAIMFIFNAIATLACGLAGTHAAFAFWLYRVTVVFYHAFYLPFLYTTFLADFFQEENFHLENVYYSEMKDAGFFDTDWE

SEQ ID NO: 253351 - protein, 61 aa, Glycine max
  Clone ID: PAT_MRT3847_70800C.1.pep
LLNSSLLGLGPHQAHTSAPDRCIEMRLFIDLLTPNGASTLEKELHVLRLGTHGLLLPYLLL

SEQ ID NO: 253352 - protein, 37 aa, Glycine max
  Clone ID: PAT_MRT3847_70801C.1.pep
QKFFYFNTNHLTEGEKDSPIPKVHGKCGLTKLSLLTQ

SEQ ID NO: 253353 - protein, 80 aa, Glycine max
  unsure (1)..(80): unsure at all Xaa locations
  Clone ID: PAT_MRT3847_70802C.1.pep
PXTEIACPLKPLLSELVVQLVIIEPIELYRKKSNARQSSETAFYLIHYLIYSEMSPIVNDYVPYQPTQASILRENPVTYS

SEQ ID NO: 253354 - protein, 49 aa, Glycine max
  Clone ID: PAT_MRT3847_70803C.1.pep
IIHKNPFLLPKPKLTTFNTPATIIFHNYNKISSSNKITELKTENKTISF

SEQ ID NO: 253355 - protein, 173 aa, Glycine max
  unsure (1)..(173): unsure at all Xaa locations
  Clone ID: PAT_MRT3847_70804C.1.pep
YRAGMPIFFVVGSQVKTHTFYWASNDXGPSKHNLLFPGVVSVFRAAFAKAFPAXTTEKTIKFALQHAQFQGFFPHGGLGVALYCVGPGFVLKILAVERSPPFRGFFFWFWPNFLMGPKRARFTSLYFPWVPTSIQSLFQGGVPVFSQFYNTGFFFFWYHCPILVGSNPPLSFV

SEQ ID NO: 253356 - protein, 84 aa, Glycine max
  Clone ID: PAT_MRT3847_70805C.1.pep
EIMDFQPKPPFKVFIQNAFASLFGTRKFAAEEFKVPPQTSAIITNDGVGINPQQSAGNVFLKHGSELRLIPRDRVGAYEMFRDI

SEQ ID NO: 253357 - protein, 50 aa, Glycine max
  Clone ID: PAT_MRT3847_70806C.1.pep
FVSFLEFFYRCYPFIFFYYFFLSFFSFFISYPFFLFLQFELIFKISAHES

SEQ ID NO: 253358 - protein, 120 aa, Glycine max
  unsure (1)..(120): unsure at all Xaa locations
  Clone ID: PAT_MRT3847_70807C.1.pep
FGRVMGKLTVPQGTFRRVKRTPFSIXGSELVANECXLVIRMPEAALLMRRXFEYIFLTEXAKTTNAYIKCTGSFFIAYGNLADDTIRHEAYXTSWCTFGEMHEKTLFSKLXQDEFITVWP

SEQ ID NO: 253359 - protein, 476 aa, Glycine max
  unsure (1)..(476): unsure at all Xaa locations
  Clone ID: PAT_MRT3847_70808C.1.pep
LDYDTKPLHEDPVPDSAVPENQVSEVNPSLGSQVKSDSISTDSLSINQKNELKDTIITDNVKLEQDIVKPEMVEEPSSRNDVPVSYDESHSMDVGGLHEKKASVEENINNVSSPDLNKTNSSDDVGYSEKLNLDRSSGDDSMEEDLPETKQIDSKFNVDELKDKVEIEKPIVKEESSTIAVGDSLSAGKDDTHQDIDISPAALTEKRKFNEVGNSEPAKRQRRWNTETVKGPDAQSTTPRPATTPRDEPITLKRSFSRSDSSATDDTPKEHIVPPSQRSPTNSLRIDRFLRPFTLKAVQELLGKTGNVSSFWMDQIKTHCYVTYSSVEEAIETRNAVYNLQWPPNGGAXLVAEYVDPEEVKMKLEPPPTQAASDSTDRAVPPAPPFSQPEPSPHLHREQHPVPVILPPPPPLSKPPPVARERLPSPPPLPEKVDPPIVTLDDLFRKTTATPRIYYLPLSEEQVAAKLSTQGKSGRQ

SEQ ID NO: 253360 - protein, 708 aa, Glycine max
  Clone ID: PAT_MRT3847_70809C.1.pep
MSSKYQILDNRPINQWKVTELKDELKRRKLSIKGLKDDLVKRLDEVLRLEREADEASEKDEANGFDGHVDGEKDSEAVTVDAEMVDSTDRDNAKTFETAEKGKSGVVDPVEIENVEKIPEVVDHDSNKNDKQDGVTNQVDINNSVSAIDQEVEPKGLPAGGDSANVGQEAIAHGSTVEKTTITVNESVVTEVVASAEDSYRAEKNNEDSAAKLENEESKAQLDGEDSKPQLDCDIKPLHEDPVPDSSVPENQVSEVNPSLGSQVKSDSISTDSLSINQKNELKDTIITDNVKLEQDIVKPEMVEEPSSRNDVPVSYDESHSMDVGGLHEKKASVEENFNNVLSPDMNKTNSSDDVGYPEELNLDRSSGDDSMEEDLPETKQIDSKFNVDELKDKIEIEEPIVKEESSTIAVGDGLSAGESDIHQDIDISPVAPTEKRKFNEQASVGNNEPAKRQRRWNTETVKGPDAQSTTPRPATTPRDEPIALKRNFSRSDSSATDDTPKERIVPPPQRSPTNSLRIDRFLRPFTLKAVQELLGKTGNVSSFWMDQIKTHCYVTYSSVDEAIETRNAVYNLQWPPNGGRLLVAEYVDPEEVKMKLEPPPTQAASVSTVPAVPPAPPSQPEPSPRLHREPHPVPATLPPPPPLSKPPPVARERLPSPPPLPEKVDPPIVTLDDLFRKTTATPRIYYLPLSEEQVASKLTAQGKSARQ

SEQ ID NO: 253361 - protein, 67 aa, Glycine max
  unsure (1)..(67): unsure at all Xaa locations
  Clone ID: PAT_MRT3847_7080C.1.pep
YPFLVGRFQIPQISXFIRYLLPKPLIRTRKDPLHSFSSSHPFLYASNIYXNKTLQLAKKISFCSLTH

SEQ ID NO: 253362 - protein, 81 aa, Glycine max
  Clone ID: PAT_MRT3847_70810C.1.pep
AARGGPPASRKIEIHLLSIRYISRNDEGYYCFLLTLGLCFFPSQFNSCSTTTAERRGDWMYIEPEYTLLSATKTSMSYIYS

SEQ ID NO: 253363 - protein, 85 aa, Glycine max
  Clone ID: PAT_MRT3847_70811C.1.pep
MVSWSVPRPPCPIASGIPAIYVVLSQAQLYLDQLQELDQPEGAWVKSLSGSKLNPCIVRWSNCLETVAIPKKRGAFVEVRRRRNE

SEQ ID NO: 253364 - protein, 134 aa, Glycine max
  unsure (1)..(134): unsure at all Xaa locations
  Clone ID: PAT_MRT3847_70812C.1.pep
EMHRGICGMHSKSQLMTTRVLRVGYYXXTMRKYCTEYVKKCEECXKFGNISHLLVEELHNIVAPWPFAIXGVDILRPFPLSKRQVKYLLVGIDQFTKWIETEHIAIISIANVRKFVXRNIVCXFGIPNTLISDN

SEQ ID NO: 253365 - protein, 33 aa, Glycine max
  unsure (1)..(33): unsure at all Xaa locations
  Clone ID: PAT_MRT3847_70813C.1.pep
KLVDLPXKGKVSGPPINAQKGYPPQPPRRIARV

SEQ ID NO: 253366 - protein, 79 aa, Glycine max
  Clone ID: PAT_MRT3847_70814C.1.pep
LREDDRRVPLQCHYLSLQLNPTVKQLQEHKISSLQIILLQPNSHQFQLVSIPCNIINMLLLSHPVKQSKYERMALKFEV

SEQ ID NO: 253367 - protein, 85 aa, Glycine max
  Clone ID: PAT_MRT3847_70815C.1.pep
YASPFYYGQDKNGNQRGQAHWVPTTSLPKPKNTLTKARPQAHLFVREPLRLPQWLRPTLQRPHRLWFMLRHHLINLLPGPVALPG

SEQ ID NO: 253368 - protein, 49 aa, Glycine max
  Clone ID: PAT_MRT3847_70816C.1.pep
GLVFKTLERSAFNYSKAKFAFCSRRAQWNFFLHPSPDIAEACLQYPPAS

SEQ ID NO: 253369 - protein, 129 aa, Glycine max
  Clone ID: PAT_MRT3847_70817C.1.pep
MKWVCFFFRFCYLGIVFSSDGIEGGGEGEHYHEVLPWKTRRSMAEEEATSNASLILAQKRTTRKDPLDNFNRYTGGWNISNRHYIAVSSYLTFYNHSSLFFFFSFFSFNKNQTSNVVLVICWFHLIVNK

SEQ ID NO: 253370 - protein, 84 aa, Glycine max
  Clone ID: PAT_MRT3847_70818C.1.pep
ARAVIRLLDYRCNDEASNVEAIICKRDNALIRTVSIRVLRRSRLSEQPHWDLCQLSMICFYIASVAGETFRLNEPVCRMSIKTQ

SEQ ID NO: 253371 - protein, 99 aa, Glycine max
  Clone ID: PAT_MRT3847_70819C.1.pep
RTYESRLHQSSYAACPARWGLQGSRPFAIDVHQFHGSMHSLSVSQSCTQLSLSESLRETTVTRTPPIGTFSVKAACCVPTMLFSRNVHGETWSNQPRLE

SEQ ID NO: 253372 - protein, 617 aa, Glycine max
  Clone ID: PAT_MRT3847_7081C.1.pep
TGESGRRTQKGTLVFIVSIVFLLSFIIINLQSHEPSFENNITTVPLLPIARGVAEGVSAKSNPYLSQKASYNWTNAMLSWQRTAFHFQPQRNCACLLVLSASDPNGPLFYMGWYHVFYQYNPDSAVWGNITWGHAVSRDLIHWLYLPIALFPDKWFDVNGVWSGSATLLPDGKILMLYTGSTDQNVQVQNLAYPANLSDPLLLDWVKYADNPVLVPPPGIGPKDFRDPTTAWIGPDEKWRITIGSKLNKTGLSLLYKTQDFIHYEQSDRYLHQVPGTGMWECVDFYPVSVNGPNGLDTSENGPDVKHVLKASLDDTKVDHYAIGTYFIENDTWVPDNPNEDVGIGLKLDYGRYYASKTFYDQQKQRRILWGWINESDSETADLKKGWASLQTIPRTVVFDKKTRTNLLHWPVEEVESLRLSNSEFEGVVVKPGSVVPLDIGPATQLDIFAEFEIEDLASKGIGKDNVDCGNGAVDRSAFGPFGILAIADDQLSELTPIYFHLSSTTKDGSLTTSFCVDETRSSKAPDVSKLIFGSKAPVLSDEKLSMRVLVDHSIIESFAQGGRTVITSRVYPTEAIYGAARLFLFNNATDINIKASLKIWQLNSAFIRPFPFDQKL

SEQ ID NO: 253373 - protein, 168 aa, Glycine max
  Clone ID: PAT_MRT3847_70820C.1.pep
MTSASPGHRRKFSGNDPPSSGRKLQPEKHSGRRFAPAPLTLKLPLQNSEYSLLRPSKLLLNVTIENCLGAVQVLLSPEDTVADLIKAALAFYEREKRRPFLKNTDPKCYDLHFSSFTLESLKPDDKLVNLGSRNFFLCCKAPAATCFEKKNMATDSAFPWMVFVPLLL

SEQ ID NO: 253374 - protein, 352 aa, Glycine max
  Clone ID: PAT_MRT3847_70821C.1.pep
CLGETHRPNPTVHVPPWAPEIFSPYTGNADYSPYSMQEALSALQHYESTDAESDSEVPSREPEVPVDAYSCDHFRMFEFKVRRCARCRSHDWTDCPYAHPGEKARRRDPRKYHYSGTACPDFRKGSCKKGDACEYAHGVFECWLHPARYRTQPCKDGTSCRRRVCFFAHTPDQLRVLPQQSPRSADSYDGSPLRHAIESSCAKSHPFVASPGSASSPVESPPMSPMTVSVNEMVASLRNLQLGKVKSLPSSWNVMGSSGFGSPRGPMIRPGFFSLPTTPTQAPTRGGVNYFDQWDQSCCEEEPVMERVESGRSIRARMFEKLSKENHLDGSGSESGQIGVPDVGWVSELVSR

SEQ ID NO: 253375 - protein, 355 aa, Glycine max
  Clone ID: PAT_MRT3847_70822C.1.pep
MMLGETHRANPTVHVPPWTPEIFSPYTGNADYSPYSLQEALSALQHYESTDAESDSEFPSREPEVPVDAYSCDHFRMFEFKVRRCARGRSHDWTECPYAHPGEKARRRDPRKYHYSGTACPDFRKGSCKKGDACEYAHGVFECWLHPARYRTQPCKDGTSCRRRVCFFAHTPEQLRVLPQQSPRSADSYDGSPLRHAIESSCAKTLAPAPFVSSPGSVSPPLESPPMSPMTVSVNEMVASLRNLQLGKVKSLPSSWNVMGPSGFGSPRGPMIRPGFFSLPTTPTQAPTRGGVNYFDKWDQSCEEEPVMERVESGRNIRARMFAKLSKENHLDGSDSGSGQIGDPDVGWVSELVSR

SEQ ID NO: 253376 - protein, 47 aa, Glycine max
  Clone ID: PAT_MRT3847_70823C.1.pep
KKEVYPKEKNLAPNLVSLTHNIFRLKSWVLKRKNCAFFNHQPLNFVM

SEQ ID NO: 253377 - protein, 85 aa, Glycine max
  Clone ID: PAT_MRT3847_70824C.1.pep
TTNSLFLLTLWGALVGPQITGYNNFLLSMPNQLPILKNLLGGPKKRGKNNFKKTSLDQQLFGKEGVFVRPLCQCLHLTKVTCPAK

SEQ ID NO: 253378 - protein, 54 aa, Glycine max
  Clone ID: PAT_MRT3847_70825C.1.pep
LGLRVLPSNPTGLLCTLFLGASVNRVSPCLVSLHSHIYFLGITMNPKQLDAFVF

SEQ ID NO: 253379 - protein, 89 aa, Glycine max
  Clone ID: PAT_MRT3847_70826C.1.pep
YSDEPGSQVAGPYIRKQKHSFLDSKNLPSFFLLVGARLLKGKKITLCAGHRLRESFSFTLLADLLNTLLLDIGLRVRFKLCLFLSQLSA

SEQ ID NO: 253380 - protein, 106 aa, Glycine max
  Clone ID: PAT_MRT3847_70827C.1.pep
LFFTFSAVLSLLPRTSLFFRHFPLVRAPGKPRSLSPGDRTHSGGRGTGNGVRPTRDSSKSNSWTRTPGKKVLTAREADSRFRTLGDGPDVLLRQQRLTADVIGREP

SEQ ID NO: 253381 - protein, 171 aa, Glycine max
  Clone ID: PAT_MRT3847_70828C.1.pep
MRCKKQSQNKLVRIMASPIRALGKARDMYVRSITNCGQHVSYYGGGDPTEGAGRFSRSHSVATSTTTRYEVVSEDYAELLRAASARTLANRIDMDLVLKQQQHANSLKGNNLPKSSSVGMARIDEDKPYDSEGGVAFVTDPYPRSRSYAVAKRGPAFEIHSSRLVSVEARK

SEQ ID NO: 253382 - protein, 86 aa, Glycine max
  Clone ID: PAT_MRT3847_70829C.1.pep
MLVWPLSAIPGAIGGSSQIFSQRCSQSSIPRGWVLFVPNVCPLFHYKIFAPGGGFSWYYLGPTPRDLIIFSFGGKKFSFFRFDPGD

SEQ ID NO: 253383 - protein, 621 aa, Glycine max
  Clone ID: PAT_MRT3847_7082C.1.pep
MNPDLEHAPQIPLLNPPTGESGRRTQKGTLVFIVLMSLFALIIVNLQSHEPSLENNITLIPKARGVAEGVSAKSNQYLSHKASYNWTNAMLSWQRTAFHFQPQRNCACLLVLSASDPNGPLFYMGWYHVFYQYNPDSAVWGNITWGHAVSRDLIHWLYLPIALFPDKWFDVNGVWSGSATLLPDGKILMLYTGSTDQNVQVQNLAYPANLSDPLLLDWVKYADNPVLAPPPGIGPKDFRDPTTAWFGPDEKWRITIGSKLNGTGLSLVYKTQDFIHYEQNDHYLHQVPGTGMWECVDFYPVSVNGPNDVKHVLKASLDDTKVDHYAIGTYFIENDTWVPDNPHEDVGIGFKLDYGRYYASKTFYDQHKNRRILWGWINESDSETADLKKGWASLQTIPRTVVFDKKTRTNLVHWPVEEVESLRLGSSEFEGVVVKPGSVVPLDIGPATQLDVFAEFEIEFLASKGSGKDNIGCGNGAVDRSALGPFGILAIADDHLSELTPIYFHLSSTTKDGSSTTSFCVDETRSSKAPDVSKLVFGSKVPVLSDEKLSMRVLVDHSIIESFAQGGRTVISSRVYPTEAIYGAARLFLFNNATDINIKVSLKIWQLNSAFIRPFPFDQKL

SEQ ID NO: 253384 - protein, 132 aa, Glycine max
  unsure (1)..(132): unsure at all Xaa locations
  Clone ID: PAT_MRT3847_70830C.1.pep
KEQPEPPTKGPLAQGPKGSEPLKKGVGKTKGLNGPKYRGPAGGPTQWNWPHKNRPESKGPGTPIPLISNTSXLQEVVNGEKERPPPLTSEKGTLAEPGVPPPGEKYAFEQEGLXADNPKVTQNFPNLGLAEP

SEQ ID NO: 253385 - protein, 64 aa, Glycine max
  Clone ID: PAT_MRT3847_70831C.1.pep
IIICFVCSFQTSLLCTIYYVALWCFVSSLPPLEYQWSFLALEQVRLFCTCYGCYKVKAALFLER

SEQ ID NO: 253386 - protein, 68 aa, Glycine max
  Clone ID: PAT_MRT3847_70832C.1.pep
QAFPSKPGAINGQWCHHRRPNMRHSSAQERGPNKGAPKTTSHIFIFFFLFFFFFFFFFFSDAWRGREG

SEQ ID NO: 253387 - protein, 104 aa, Glycine max
  Clone ID: PAT_MRT3847_70833C.1.pep
VLEPTSPAIHRVYACSTLPQELISVKSSRTPSFALVIFVISTISLPSLYVQWSTVPKASSSNFVVWKTVIWCQFQFTIRNLPRILQRVSIISTRYMGVSFALID

SEQ ID NO: 253388 - protein, 51 aa, Glycine max
  Clone ID: PAT_MRT3847_70834C.1.pep
CSLALTDLRNQPSLYQRCCLTLIKWPSTLFSNRELAEHAELLLEVATPCPK

SEQ ID NO: 253389 - protein, 396 aa, Glycine max
  Clone ID: PAT_MRT3847_70835C.1.pep
MPIFSNSSPCCTAAAAAVVNSSNRKTRFVSPSWRNCKVTSPILRLSENDKFNVSRLAPSHSRRSVKDRNISMALVGETVGVGQKGQVAGSSSILAYDLIQGALVRWSSVMDRSLPEPPTAVFLHGILGCRKNWGTFARRLAQEFPTWQFLLVDLRCHGDSASIQKKDPHTVASAAMDVLKLVRELRITPRVLVGHSFGGKVVLSMVDQAAKPLARPVRAWILDATPGKVRAGGDGEDHPEELISFLSTLPKEVPSKWHVLRALIQHGFSNDVAQWVVTNLRPSSSPGSQSSSFSWVFDLRGIAEMYQSYEETNLWKIVEDVPRGVHVNFLKAERSLHRWALEDLQRIHAAEELAVEEGGGVEMHVLEDAGHWVHTDNPDGLFRILSSSFQFQGGKI

SEQ ID NO: 253390 - protein, 42 aa, Glycine max
  Clone ID: PAT_MRT3847_70836C.1.pep
PKCWLLRSILQPPCLTHPKAKFILRPQLQKELPHSPYLSFIP

SEQ ID NO: 253391 - protein, 269 aa, Glycine max
  Clone ID: PAT_MRT3847_70837C.1.pep
FSSLLFTIATLSFSMAAKISLAIGLRTLFTVLGLLMLAVFLYTAFTDGLCVRFLKELVRPWMVATLVCFYINIVAFAVWIAYKESNLISSILWIVLIALLGSIFTSAYIVVQFLKLSSQESSQDPMYYVLLRHPNKNGTAPQRQRSSVVTLRIIFSILGVVMLGTLVYTLVTNGSPFRKGVLTPWLATTLVDIYFHIVIYAVWVAYKESSWISAVFWIILLICFSSMATCLYITWQLFQISCQDPAYLVLVHHGDRAENEYTGISGEAT

SEQ ID NO: 253392 - protein, 64 aa, Glycine max
  Clone ID: PAT_MRT3847_70838C.1.pep
HTGVIDVVWRSLSLQILLQKNDVIPQAVIVLLSCVMNAQFFPLYNPPVIDYKVPTLESEKMFRS

SEQ ID NO: 253393 - protein, 569 aa, Glycine max
  Clone ID: PAT_MRT3847_70839C.1.pep
HWTCLRLENARLREEIDRISAIAAKYVGKPVVSYPLVSPSSVPPRPLELGVSGGFGGQPGGIGGDMYGGAAGDLLRSISGPTEADKPIIIELAVAAMEELIGMAQMGEPLWLTTLDGTTVLNEDEYIRSFPRGIGPKPVGFKCEASRETAVVIMNHVNLVEILMDVNQWSTVFSGIVSRAMTLEVLSTGVAGNYNGALQVMTAEVQVPSPLVPTRESYFVRYCKQHGDGTWAVVDVSLDNLRPSPSARCRRRPSGCLIQEMPNGYSKVIWVEHVEVDDRGVHNLYKQLVSSGHAFGAKRWIANLDRQCERLASAMATNIPTVDVGVITNPDGRKSMLKLAERMVISFCAGVSASTAHTWTTLSGTGADDVRVMTRKSVDDPGRPPGIVLSAATSFWLPVSPKRVFEFLRDENSRSEWDILSNGGVVQEMAHIANGRDTGNCVSLLRVNSANSSQSNMLILQESCADSTGSFVIYAPVDIVAMNVVLNGGDPDYVALLPSGFAILPDGTTAHGGGIGDTGHGGSLLTVAFQILVDSVPTAKLSLGSVATVNNLIACTVERIKAALSGEVA

SEQ ID NO: 253394 - protein, 85 aa, Glycine max
  Clone ID: PAT_MRT3847_7083C.1.pep
SRRSRPSPRVSWWHDTHRNRGWSFSSLMELRGSWALSKSVEEEDVAQHLRESLHMRRVGLAAPSRARDVMFGPLSISAPRKVRDN

SEQ ID NO: 253395 - protein, 70 aa, Glycine max
  unsure (1)..(70): unsure at all Xaa locations
  Clone ID: PAT_MRT3847_70840C.1.pep
VQRLGCSFPRLGIMCRFKFVSKCIEEQKGXYVCILFWDVIWVSVPGGGNRKXRRFCAQISRKILIALIEC

SEQ ID NO: 253396 - protein, 60 aa, Glycine max
  Clone ID: PAT_MRT3847_70841C.1.pep
PLYEWMDKALVPRFPQLKKNLDSPTHGHNFLMLFRLKNNGYSHRWGSQKWFPAPVKVVGE

SEQ ID NO: 253397 - protein, 44 aa, Glycine max
  Clone ID: PAT_MRT3847_70842C.1.pep
LERVSTIDVGVTHSETDRFANTQRTATSGYFPTFLSFTAGFPRQ

SEQ ID NO: 253398 - protein, 49 aa, Glycine max
  Clone ID: PAT_MRT3847_70843C.1.pep
ESVAKLMLKKSNQLKAFDFANKHGPMKKQLNPGIRGNLYALQMNRRILP

SEQ ID NO: 253399 - protein, 215 aa, Glycine max
  Clone ID: PAT_MRT3847_70844C.1.pep
MGVAQNIPDAEEGTLEIGMEYRTVSGVAGPLVILDKVKGPKFQEIVNIRLGDGTTRRGQVLEVDGEKAVVQVFEGTSGIDNKFTTVQFTGEVLKTPVSLDMLGRIFNGSGKPIDNGPPILPEAYLDISGSSINPSERTYPEEMIQTGISTIDVMNSIARGQKIPLFSAAGLPHNEIAAQICRQAGLVKRLEKSDNLLRGGGKKGQFCPSVFAAIG

SEQ ID NO: 253400 - protein, 93 aa, Glycine max
  Clone ID: PAT_MRT3847_70845C.1.pep
FGGEKQLFGTVFKNKNNVGLKGPTPPPFFFFQGDFFGFNFGETRNRVKNPSPESPPLNPGRPKKKALAGMETKPPLFFKKKKFHKGLEKPNPH

SEQ ID NO: 253401 - protein, 115 aa, Glycine max
  Clone ID: PAT_MRT3847_70846C.1.pep
MATFPSPPSPSSSSSIPSPRSRMFYYAGSEDHYEEPHFLQACFLCRKPLGQNRDIFMYRGNTPFCSKECRQEQIEIDEAKEKSWKLSSKRGVRQSETNQNSTPNKAVRTGTVAVA

SEQ ID NO: 253402 - protein, 152 aa, Glycine max
  unsure (1)..(152): unsure at all Xaa locations
  Clone ID: PAT_MRT3847_70847C.1.pep
HGKLTINLQLLNLLDEGQIYPVSQLYNRQIYPPINEIPSXSRFLLSAIGEGMTRKDHQAVSNQLYANYAIGKDVQAMKAVVGEEALSSEDLLYLEFLEKFERKFVAQGAYDTRNIFQSLDLAWTLLRIFPRELLHRIPAKTLDQFYSRDASN

SEQ ID NO: 253403 - protein, 90 aa, Glycine max
  Clone ID: PAT_MRT3847_70848C.1.pep
PFSMWDPLKKKDAKFKIFFFPYGKKLYLCPLFVGLLKPKLLMVISKNVESFVVFFKPLAPSGFFFLLGKKIPPFFAPRENVLIHVYKKGI

SEQ ID NO: 253404 - protein, 294 aa, Glycine max
  unsure (1)..(294): unsure at all Xaa locations
  Clone ID: PAT_MRT3847_70849C.1.pep
MGVAENIPDMEEGTLEIGMEYRTVSGVAGPLVILDKVKGPKFQEIVNIRLGDGTTRRGQVLEVDGEKAVVQVFEGTSGIDNKFTTVQFTGEVLKTPVSLDMLGRIFNGSGKPIDNGPPILPEAYLDISGSSINPSERTYPEEMIQTGISTIDVMNSIARGQKIPLFSAAGLPHNEIAAQICRQAGLVKRLEKSDNLLEGGEEDNFAIVFAAMGVNMETAXFFKRDFEENGSMERVTLFLNLANDPTIERIITPRIALTTAEYLAYECGKHVLVILTDMSSYADALREVMYLKLL

SEQ ID NO: 253405 - protein, 71 aa, Glycine max
  Clone ID: PAT_MRT3847_7084C.1.pep
MASMPSKNICIRRQQCPCGDWKCYITYEGDAEEGSAAPELVKAEKASSGAMVTPYVGMVFKSDDDAFEYYG

SEQ ID NO: 253406 - protein, 170 aa, Glycine max
  unsure (1)..(170): unsure at all Xaa locations
  Clone ID: PAT_MRT3847_70850C.1.pep
MSSPAEFYHSLPPITKAYGTVCLLATATYHLGLDHPAYIALLYDKVFYGFQAWRLFTNLFFLGPFSINFGIRLLMIVRYGVQLEKGPFDRRTADFLWMMIFGAFALLRISECPNQHIXXLVALKAFYLPWAMLALDIIFGSPLIPDLLXIIAGHLYYFLTVXHPLXGGKN

SEQ ID NO: 253407 - protein, 276 aa, Glycine max
  Clone ID: PAT_MRT3847_70851C.1.pep
GVTWRTAQFFKRDFEENGSMERVTLFLNLANDPTIERIITPRIALTTAEYLAYECGKHVLVILTDMSSYADALREVSAAREEVPGRRGYPGYMYTDLATIYERAGRIEGRKGSITQIPILTMPNDDITHPTPDLTGYITEGQIYIDRQLYNRQIYPPINVLPSLSRLMKSAIGEGMTRKDHSDVSNQLYANYAIGKDVQAMKAVVGEEALSSEDLLYLEFLEKFERKFVAQGAYDTRNIFQSLDLAWTLLRIFPRELLHRIPAKTLDQFYSRDAGN

SEQ ID NO: 253408 - protein, 57 aa, Glycine max
  Clone ID: PAT_MRT3847_70852C.1.pep
RHKKCKTAERGTNWGLNGTKNPPYSRKTAVDRALNKTQSAQMPSNLSKQKPWTAKSV

SEQ ID NO: 253409 - protein, 246 aa, Glycine max
  Clone ID: PAT_MRT3847_70853C.1.pep
MSSPAEFYHSLPPITKAYGTVCLLATATYHLGLYHPAYIALFYDKVFYGFQVWRLFTNLFFLGPFSINFGIRLLMIVRYGVQLEKGPFDRRTADFLWMMIFGAFALLVLSAIPIFWSPFLAVPLVFMLLYVWSREFPNAQINIYGLVALKAFYLPWAMLALDVIFGSPLIPDLLGIIAGHLYYFFTVLHPLAGGKNILKTPMWVHKLIARWRIGVQPISRGPAANNPQQERGSGVAFRGRSYRLGG

SEQ ID NO: 253410 - protein, 416 aa, Glycine max
  unsure (1)..(416): unsure at all Xaa locations
  Clone ID: PAT_MRT3847_70854C.1.pep
MILDDTLAMFFSSGIMGVAQNIPDAEEGTLEIGMEYRTVSGVAGPLVILDKVKGPKFQEIVNIRLGDGTTRRGQVLEVDGEKAVVQVFEGTSGIDNKFTTVQFTGEVLKTPVSLDMLGRIFNGSGKPIDNGPPILPEAYLDISGSSINPSERTYPEEMIQTGISTIDVMNSIARGQKIPLFSAAGLPXHMELLHRICRQAGLVKRLEKSDNLLEGGGEEDNFAIVFAAMGVNMETAQFFKRDFEENGSMERVTLFLNLANDPTIERIITPRIALTTAEYLAYECGKHVLVILTDMSSYADALREVSAAREEVPGRRGYPXGYMYTDLATIYERAXGRIEGRKGSITQIPIXLTMPNDDITHPTPDLTGYITEGQIYIDRQLYNRQIYSPINVLSSLSRLMKSAIGEGMTRKDHFDV

SEQ ID NO: 253411 - protein, 225 aa, Glycine max
  unsure (1)..(225): unsure at all Xaa locations
  Clone ID: PAT_MRT3847_70855C.1.pep
MQRSLNFGIHDILGNWLPARYISNESVELKTDNDVVRFSLDKSDDINYGKKSQLNKRVKMSRKAKLNELRFYRLKAKKKMISPNPEVRITYKLEKAKQKETWXFRXLRKFDVPKFTPVIIDLVDLAXGIVVDIKPHYTIIFYRGKNYVKPEVMSPPNTLSKAKALEKYRYEQSLEHTSQFIEKLEKELEEYHQHLAKFKKGKEDTAKDGLGKRDSIYAGHKMSHT

SEQ ID NO: 253412 - protein, 134 aa, Glycine max
  Clone ID: PAT_MRT3847_70856C.1.pep
MDPGRYALHQGWDNNSALEGYSTVHDPNFRVGGSYDERRFIDERYPRDAVYQRNNFPRDILDREAYLPPGPPVGHWSQAKRRGYDEDYALDRESRRFQRPYHESYNQIDGFRDREIDTYPEYERFRDGYTGIEN

SEQ ID NO: 253413 - protein, 89 aa, Glycine max
  unsure (1)..(89): unsure at all Xaa locations
  Clone ID: PAT_MRT3847_70857C.1.pep
LPCFCVNRTMEKLTLPQGTSRTVDRMPLSIXGGGAGANNAILINMPNAGLSMWRYYXGDLIFQVPKITSPYIKRTGSFFIAFRHLADDT

SEQ ID NO: 253414 - protein, 175 aa, Glycine max
  Clone ID: PAT_MRT3847_70858C.1.pep
TRPSVSANVEVLNVANNSISGTISPFLCGKPNATNKLSVLDFSNNVLSGDLGHCWVHWQALVHVNLGSNNMSGEIPNSLGYLSQLESLLLDDNRFSGYIPSTLQNCSTMKFIDMVNNQLSDTIPDWMWEMQYLMVLRLRSNNFNGSITQKMCQLSYLIVLDHGNNSLSRSISNRL

SEQ ID NO: 253415 - protein, 30 aa, Glycine max
  Clone ID: PAT_MRT3847_70859C.1.pep
EVGSHIIRLVKLINVVLSSCICIFKENKLT

SEQ ID NO: 253416 - protein, 45 aa, Glycine max
  Clone ID: PAT_MRT3847_7085C.1.pep
LLDFVWTRGRATLGFLEKLTFLENSGLPTYGFKALLGIFSAIFKF

SEQ ID NO: 253417 - protein, 68 aa, Glycine max
  Clone ID: PAT_MRT3847_70860C.1.pep
HALESVSTDTAHRLCYRDHGVKQMRGQFSFRHLCQIISGFISRKSYASKLASLVSWLVSYNTKESFHC

SEQ ID NO: 253418 - protein, 66 aa, Glycine max
  unsure (1)..(66): unsure at all Xaa locations
  Clone ID: PAT_MRT3847_70861C.1.pep
RGFKQKERAHNFGDNPILQKDGVPHKAPANPKGKRGRNYPHHPLXGKDELGLLPPAFKANQPPLFL

SEQ ID NO: 253419 - protein, 95 aa, Glycine max
  Clone ID: PAT_MRT3847_70862C.1.pep
PLLECDVSCSVYQDGIRVGWLERLLEYENLISDHVVILYHDISEFDKISEVHDHFFSNITFIFENNEDRITEFGVFPVYASESGLKLVGSKEIFE

SEQ ID NO: 253420 - protein, 129 aa, Glycine max
  Clone ID: PAT_MRT3847_70863C.1.pep
SFFFIFFFFFCFNCVLWGGLKKRKKFLLFPLNLALFETISFLKDILCACFLLKLWSLFISLYFLPLFFLKPGVIFIYPPPIKIPPPQIGGETKSPDFAFSNHHFLISIPACPQAFKKHSMLFDPLWPGL

SEQ ID NO: 253421 - protein, 519 aa, Glycine max
  Clone ID: PAT_MRT3847_70864C.1.pep
MTRVLVQRGSSGGGSSSNPNRSGGGGGSSSNSSVRAEPQVPVLPENSDEVVVVSDEVLESGDKGKSEEGVHFEQGDGSCEDDVAAVVVESDVREEIVKGLSGLRVGERVVSESEGSSGDSSSLLVGGGSCPPPPPVPPPKPSVTGNLNSRRSVAGSLNSGSVGSSRRAVTWPVVSARTSPAGSRPSSPRSHNESEGYNSADEQKPCLVSSYDDFERERQFEIDIRRAKGYEVKKMMEDGNCLFRAVADQVYGDSEVYDLIRQMCIDYMERERDHFSQFITEGFTSYCKRKRRDKVYGNNVEIQAMCEMYNRPIHIYSYTTEPINIFHGSYNTDMPPIRLSYHHGNHYNSLVDPRRLTIGAGLGFSSLRGTNVDKDQVKAAIKAQQDKQINNALLAEGRFYSDLELTEKEIERMVIEVSRAEYLADSTFKQQLGNRESSTSNAEPSSSGATGSSGTDRKTEHGKEHGSDLSSGMQMLLSMGFSYMQAIEAYSIFGDDVDSMVCYLLETGSSSRRKGKATE

SEQ ID NO: 253422 - protein, 84 aa, Glycine max
  Clone ID: PAT_MRT3847_70865C.1.pep
TICPIALELLLSLWVFQEEALYSARLFFFRLRQIVFSRNINGTRLERAFRLMLQTLTSTTTASTTQQEEQLNQDTFNTPLTLTL

SEQ ID NO: 253423 - protein, 85 aa, Glycine max
  unsure (1)..(85): unsure at all Xaa locations
  Clone ID: PAT_MRT3847_70866C.1.pep
MSPRPXGMXDDWEENLAVITANXXXSXELXIIXLGDCLWXXRSEIXXAXICYXVAEXXAXHTXDSXXXGLIGADHWXXPXSYASP

SEQ ID NO: 253424 - protein, 102 aa, Glycine max
  unsure (1)..(102): unsure at all Xaa locations
  Clone ID: PAT_MRT3847_70867C.1.pep
LGLHGAGNAFPNKIAFNDKLELANTQEFFDGNIAVDTWLPTVGNRLYPASQSPSEAAVVNVTCDSGLGGSPTTAWISWXDNNRSSDINNTFRTALAIGETTD

SEQ ID NO: 253425 - protein, 64 aa, Glycine max
  Clone ID: PAT_MRT3847_70868C.1.pep
SSVLVWYGRTVLIGEHPRMLIISTNGAVYISSEFTKMVESILLKGQIGSFSGTIGTPSRIEVIT

SEQ ID NO: 253426 - protein, 77 aa, Glycine max
  Clone ID: PAT_MRT3847_70869C.1.pep
MEMGTVAWIFLVIMVTFFCPSSLALTQDGMALLEIKSTLNDTKNVLSNWQEFDESPCAWTGISCHPCDEQRVRSINL

SEQ ID NO: 253427 - protein, 143 aa, Glycine max
  unsure (1)..(143): unsure at all Xaa locations
  Clone ID: PAT_MRT3847_7086C.1.pep
MWRPWGKSTVRIHSASSSPSSTFSCSSFKDIQTLCLDEPPQQNQHHQQLPSPSPTRKPSVFHRVRLANSLLRTWSTHLHPQPQPPKLPEPPESEPDVVVSKPEPQQPAIYYFPGAEQRVXVYYTSLRGVRPTFEACKSGLSIL

SEQ ID NO: 253428 - protein, 92 aa, Glycine max
  Clone ID: PAT_MRT3847_70870C.1.pep
TTRAYEINYNIKRQVLNSAPNKADHDCGWRKPRHRCKSKGRDPWLGWMSLYLTSYCILRRDTLRIDVCLLTTYFTMRGRLILSLVSVVACTI

SEQ ID NO: 253429 - protein, 57 aa, Glycine max
  Clone ID: PAT_MRT3847_70871C.1.pep
RGWGRLIKRVNSLSLFYRGLPRNPTVSTYVYCSCPIIVRTCPLVNVAGRFTFVTQKE

SEQ ID NO: 253430 - protein, 206 aa, Glycine max
  Clone ID: PAT_MRT3847_70872C.1.pep
MEVRKGARVGVGEDHDMGDGMQCSDHPYRNNPGGICAFCLQDKLGKLVSSSFPLPLLPPSSPSSSSTLPSISSLPPSSAPAPSSSTAVSHFNHPYYPRRTRLPFLLPKKKSKKPTSAPTSDNILLKRSKSTATPRRNRSLVDDDDNDDDLVIGPFSPRKRNGFWSFLYLSSKSSKKLNSKSFRDNNINNTPRISSINLAPASTSFC

SEQ ID NO: 253431 - protein, 114 aa, Glycine max
  unsure (1)..(114): unsure at all Xaa locations
  Clone ID: PAT_MRT3847_70873C.1.pep
PPPKEVPGIFQKTLHRPFFXAFTPLNIFDFNPLFWVAPPGGPAIFVQVEQKLGFHPXKIKAPKNVLSEYGTMSRACVFFFLDEMRRKFVENGLKPPGEGLXWGVLFGFGPGLPL

SEQ ID NO: 253432 - protein, 195 aa, Glycine max
  Clone ID: PAT_MRT3847_70874C.1.pep
GIGVRLFIYELYNEDAKAGPLSEKNWGLFDANGKPVYVLHLTESGGVLANDTTNQTYCVAKDGADPKMLQAGIDWACGPGKVDCSPLLQGQPCYEPDNVVAHANYAFDTYYHQMGKSTQSCDFNDMATISTTNPSHGSCVFPGSLGINGSFPNVTLSSLNSTNSVSSASNLHSGELGIRSLLMVIVLLLWGVVLL

SEQ ID NO: 253433 - protein, 98 aa, Glycine max
  Clone ID: PAT_MRT3847_70875C.1.pep
MDIASCALLIVLTCAIVHALLGSFLAMATKANHKLPPGPSRVPIIGNLLELGEKPHKSLAKLAKIHGPIMSLKLGQITTVVVSSAQMAKEVLLTNDQF

SEQ ID NO: 253434 - protein, 192 aa, Glycine max
  Clone ID: PAT_MRT3847_70876C.1.pep
MASGGTEAFPDLGKHCQHRDCNQLDFLPFTCDGCQQIFCLEHRSYKSHACLKSDHNSRKVVVCEACSMSIETTGHVGQDEEAILQKHLKSGNCDPTKKKKPICPVKRCREVLTFSNTSTCKTCHIKVCLKHRFPADHACSRGASASSSACVSNGLWNNRFLTAFAKRTGQECAKNGATCSTSPPSTPSVKAY

SEQ ID NO: 253435 - protein, 449 aa, Glycine max
  Clone ID: PAT_MRT3847_70877C.1.pep
MREILHVQGGQCGNQIGSKFWEVICDEHGIDPTGKYNEEGNSSIQLERINVYYNEASGGRYVPRAVLMDLEPGTMDSIRSGPYGKIFRPDNFVFGQSGAGNNWAKGHYTEGAELIDSVLDVVRKEAENCDCLQGFQVCHSLGGGTGSGMGTLLISKIREEYPDRMMLTFSVFPSPKVSDTVVEPYNATLSVHQLVENADECMVLDNEALYDICFRTLKLSTPSFGDLNHLISATMSGVTCCLRFPGQLNSDLRKLAVNLIPFPRLHFFMVGFAPLTSRGSQQYVSLTVPELTQQMWDAKNMMCAADPRHGRYLTASAMFRGKMSTKEVDEQMINVQNKNSSYFVEWIPNNVKSSVCDIPPRNLKMSSTFIGNSTSIQEMFRRVSEQFTAMYRRKAFLHWYTGEGMDEMEFTEAESNMNDLVAEYQQYQDATAEEDEYEDDGDEQQYDDQ

SEQ ID NO: 253436 - protein, 74 aa, Glycine max
  Clone ID: PAT_MRT3847_70878C.1.pep
WRAHWVDHPFKQRVTFIYHICIGGDPRDKIHDAKGSQIRGIFSPLAGIGIPRIKTIIQSSLASGARDPPVAAPA

SEQ ID NO: 253437 - protein, 65 aa, Glycine max
  Clone ID: PAT_MRT3847_70879C.1.pep
FLRLVDAKVGNHKHIVGYHVAGNKGRLEYASLLPYVEPTVQANSDKCYLEFLPVEGVRSKGVRDI

SEQ ID NO: 253438 - protein, 87 aa, Glycine max
  unsure (1)..(87): unsure at all Xaa locations
  Clone ID: PAT_MRT3847_7087C.1.pep
NHNRFPERSHIDLPQAFIPRTYHLYTSREILTTEWIDRHNLIQSTHSDYPKLAKVXDILFLKPLLYASFCHTYTPPFNFIHTSDRKF

SEQ ID NO: 253439 - protein, 448 aa, Glycine max
  Clone ID: PAT_MRT3847_70880C.1.pep
MREILHVQGGQCGNQIGSKFWEVICDEHGIDPTGKYNDEGNSGIQLERINVYYNEASGGRYVPRAVLMDLEPGTMDSIRSGPYGKIFRPDNFVFGQSGAGNNWAKGHYTEGAELIDSVLDVVRKEAENCDCLQGFQVCHSLGGGTGSGMGTLLISKIREEYPDRMMLTFSVFPSPKVSDTVVEPYNATLSVHQLVENADECMVLDNEALYDICFRTLKLSTPSFGDLNHLISATMSGVTCCLRFPGQLNSDLRKLAVNLIPFPRLHFFMVGFAPLTSRGSQQYVSLTVPELTQQMWDAKNMMCAADPRHGRYLTASAMFRGKMSTKEVDEQMINVQNKNSSYFVEWIPNNVKSSVCDIPPRNLKMSSTFIGNSTSIQEMFRRVSEQFTAMYRRKAFLHWYTGEGMDEMEFTEAESNMNDLVAEYQQYQDATAEEDDEYEDEGEEQYVE

SEQ ID NO: 253440 - protein, 65 aa, Glycine max
  Clone ID: PAT_MRT3847_70881C.1.pep
MALNNGISATGTGLIFSFGEMLIDWIPTISGVSLAEAPGFLKAPGGPPDNVAISATRLGGKAVFC

SEQ ID NO: 253441 - protein, 77 aa, Glycine max
  Clone ID: PAT_MRT3847_70882C.1.pep
GGGSKYSALPTRRPKNSSALLLVETLTQFHYVPVMNKHVKQIHSLTHLKIHTAQVIYFLMQYDLGDAQAQHLFEAFI

SEQ ID NO: 253442 - protein, 70 aa, Glycine max
  Clone ID: PAT_MRT3847_70883C.1.pep
CLFSLMIFPLANNDSGWRTSACDVTLLIYTKQMHGLSSGEKVDQRKCRFGVRNETFQKHVTNQHHRLNLN

SEQ ID NO: 253443 - protein, 60 aa, Glycine max
  Clone ID: PAT_MRT3847_70884C.1.pep
NEYLYIPRCHKFGTGAILCVQYVPSPNVSRQRCMYFGRVMLKLARLLCYYTLSLDMGLFL

SEQ ID NO: 253444 - protein, 72 aa, Glycine max
  Clone ID: PAT_MRT3847_70885C.1.pep
NRRQRNFLWCPYKRSILSPALGRMLCFCLEAAPPVKSVSPPSLLVFFFSLNIKIKSFYGFLRINLLFYLSSI

SEQ ID NO: 253445 - protein, 51 aa, Glycine max
  Clone ID: PAT_MRT3847_70886C.1.pep
FRYGVKAKDAVNLHSMPPTYAYHSQCTFRVGTVHSVSHRMAMIPKLCARNM

SEQ ID NO: 253446 - protein, 83 aa, Glycine max
  Clone ID: PAT_MRT3847_70887C.1.pep
SGVPINIPNFIVIVKYFNNYSDVVSMYRVKDHNVFSRMVLYYSGHVAKSTLQAHENTWFQRWDAPTDDSDNFRWFGSSTNCDP

SEQ ID NO: 253447 - protein, 105 aa, Glycine max
  unsure (1)..(105): unsure at all Xaa locations
  Clone ID: PAT_MRT3847_70888C.1.pep
ERGGVRYFRLHGSLCHSGDYVKADGRGGVERTRGEQITLYGSPYYADGFNASRLMYLAXSDPHQRNRVSSVFKQALNHGQNIARTXAQSDGRYEPLQHSPGSYKN

SEQ ID NO: 253448 - protein, 125 aa, Glycine max
  unsure (1)..(125): unsure at all Xaa locations
  Clone ID: PAT_MRT3847_70889C.1.pep
PGPRFFFWAGFRPFPHGFFQGPPTAPFKAVLAPRGCFRNGLPPGFLGRVLLAXATGVSFYAHGSLGSRSLLPPFWGLQPLPWCALVLSPPRGSVVCLLLLLAHGNGPRAWLLRGGVGLGRTPGGV

SEQ ID NO: 253449 - protein, 169 aa, Glycine max
  Clone ID: PAT_MRT3847_7088C.1.pep
GEDILMRVVAQNLSPELTLVEKVMTPNPDCASVDTTILDSLHMMHDGKFLHLPVVDKDGYVVACMDVLQITHAAISMVESSSGAVNDVANTIMQKFWDSAFNLEPPEDSDTHSEISGLMTSDGADTSKSAYQSVGFGNSFAFKFKDLSGRVHRFNCGTEHIDELVSTIM

SEQ ID NO: 253450 - protein, 55 aa, Glycine max
  Clone ID: PAT_MRT3847_70890C.1.pep
KQKCPPIQEKKSFLTYKIFLQPGIPPNKNPKKRRILGFWKSQPQKGRFFFPSIKN

SEQ ID NO: 253451 - protein, 89 aa, Glycine max
  Clone ID: PAT_MRT3847_70891C.1.pep
PENYISSRRSLNLTRSPISNRKVFSKLSKYGKEIDSESLWPAQRIFFFPLINRPQSSRKILRDSWNQVTIAFVSGFKVRQPMISDNQNR

SEQ ID NO: 253452 - protein, 90 aa, Glycine max
  Clone ID: PAT_MRT3847_70892C.1.pep
ANCALSLLDGTALVASCWASCYCGDWRPSSSTMLYGLHGQVGFVTGGFQLRVNVFPPTYTLVDQLVANHSIVSKSCPSAPPPPPPAPPKQ

SEQ ID NO: 253453 - protein, 122 aa, Glycine max
  Clone ID: PAT_MRT3847_70893C.1.pep
MARSSPYGNKTDKSLNLGARYSERVPPMMDTGGGGGASSPTATMSRWKFAAWRQFQHLLDKSTPHVGRRWLGFAAVALLYALRVYLVQGFYVVSYGLGIYILNLLIGFLSPQVDPETVILDA

SEQ ID NO: 253454 - protein, 62 aa, Glycine max
  unsure (1)..(62): unsure at all Xaa locations
  Clone ID: PAT_MRT3847_70894C.1.pep
GFRSLTQPWPYQTLNLGISPNNLVGITFGPRESSFMSGLDDQIPTAFDXFADANADDSGAGS

SEQ ID NO: 253455 - protein, 106 aa, Glycine max
  Clone ID: PAT_MRT3847_70895C.1.pep
LHKMKRQAMQEIVTVAAFDQNVLTSASPTGQAVDPRIINLMEVQKKLLKECLQYEKAEEELNLKVTPLRRKTQEGKPEYDTLMAEVKSPGLYLWEENGSVAVPLVF

SEQ ID NO: 253456 - protein, 43 aa, Glycine max
  Clone ID: PAT_MRT3847_70896C.1.pep
PCPQPVIPRKGLDESKTPYECSRFFSRGHLYGTGIYEDVLYHE

SEQ ID NO: 253457 - protein, 246 aa, Glycine max
  Clone ID: PAT_MRT3847_70897C.1.pep
MESKYFDSNGEVSLKQKSKSISAEPTISTSEYDCFDCNICMESAHDPVVTLCGHLYCWPCIYKWLDVQSSSVEPYQQQTCPVCKSEISHTSVVPLYGCGTSNSESNAKKLQMSLGIPHRQPPCSLNAMLTSPRSRISHPSQQLHPSYFQTQSRPFHYQQFYGSYGTNGLPYLGGASMTSFFNTVIDMFGEMVLTRIFGISDANLFANPLNGSGSSRMRRQEMQIDKSLNRLSIFLLCCIMLCLLLF

SEQ ID NO: 253458 - protein, 49 aa, Glycine max
  Clone ID: PAT_MRT3847_70898C.1.pep
LAAPVYKPRYFPFARTNLVALNEACLLFAPNQALPMIYINVPGPCFVSK

SEQ ID NO: 253459 - protein, 100 aa, Glycine max
  Clone ID: PAT_MRT3847_70899C.1.pep
RCKRTSGMLLYMPFLYIKILVFLIYCMQSFILLLFSSESILYHAIINPNLEPPYNFKYLRPVASETITDLFGIPFPLCALQTPLPLPLSPPHTIPPAVPH

SEQ ID NO: 253460 - protein, 104 aa, Glycine max
  unsure (1)..(104): unsure at all Xaa locations
  Clone ID: PAT_MRT3847_7089C.1.pep
VESSSGAVNDVANTIMQKFWDSAFNLEPPEDSDTHSEISGLMTSDGADTSKSAYQSVGXGNSFAFKFKDLSGRVHRFNCGTEHIDELVSTIMQRLDVNDVERPM

SEQ ID NO: 253461 - protein, 129 aa, Glycine max
  Clone ID: PAT_MRT3847_708C.1.pep
HCLEKKKKKKKKKKKKKKKKKKKKKKIKKKKKKGALDPHFLFLLGGVNGPLGEKRAKGVPGGKLFSVKNSQKKKTGKQKGKTRGGLRGGLTHFIGGGPMARFQGGKLGGPVDLKNGPTPGKRGLGFGPL

SEQ ID NO: 253462 - protein, 85 aa, Glycine max
  Clone ID: PAT_MRT3847_70900C.1.pep
LHFSLQKPKNTPGFHTAVVHRGTEQNQGYFLVSAFFFAKLVECLTRRHWFFRLQQVGLRIRALLVTMIYNKALTLSCQSKQGHTS

SEQ ID NO: 253463 - protein, 99 aa, Glycine max
  Clone ID: PAT_MRT3847_70901C.1.pep
MGCRWIYTMKIRPSEPYSDQYYHLVDKGYTQIFGPDYRDTFSPMATIAHVHPLLAMAAIQHWSLHQLGIKNAFLHGELQEFYMSQTPGFIVSGDSRLIC

SEQ ID NO: 253464 - protein, 51 aa, Glycine max
  Clone ID: PAT_MRT3847_70902C.1.pep
IEPCYERKRSYFENITPNIYLVGLTNEISYTSTMKAFVPLPQSKWKSNISS

SEQ ID NO: 253465 - protein, 66 aa, Glycine max
  Clone ID: PAT_MRT3847_70903C.1.pep
STGHLSLGIDPSMSSTWVDEEGNVPLLHSTAKKLASTLCALEFFLYISYRAPSSQLVGSRFVFRQI

SEQ ID NO: 253466 - protein, 66 aa, Glycine max
  unsure (1)..(66): unsure at all Xaa locations
  Clone ID: PAT_MRT3847_70904C.1.pep
SDHRFDACLGEXHFIANGNXQSQQHSSQXSSSXRTMSKXLGGTXEDEDEEEQQLLEQDXDCSXTXT

SEQ ID NO: 253467 - protein, 149 aa, Glycine max
  unsure (1)..(149): unsure at all Xaa locations
  Clone ID: PAT_MRT3847_70905C.1.pep
MSSGVTVSTEAKTVYEEVKKDRKYRYIIYHIKDERVIDVESTGPRDATYADFLEELNKFKTECRYCVFDFPANIPVEGSQDTQSMSVNRLILMRWCPXGARVKQKMLYSSSYEALKRALVGIYKYIQACEFEEASQAAIDDAFRKSGGK

SEQ ID NO: 253468 - protein, 239 aa, Glycine max
  unsure (1)..(239): unsure at all Xaa locations
  Clone ID: PAT_MRT3847_70906C.1.pep
SFYPSQEIIDMCDYCVGLSRQLNGSIIPSERPDHMMFEVWNPLGIVGVITAFNFPCAVLGXGAPTTPLITIAVTKLVAEVLERNKLPGAIFTSFCGGADIGQAIAKDTRIPLVSFTGSSKVGLMVQQTVNERFGKCLLELSGNNAIIVMDDADIKLAVRSILFAAVGTAGQRCTTCRRLFLHESIYADVLDQLIGVYKQVKIGNPLEKGTLVGPLHTPTSVENFQKGISVIKSQGINFG

SEQ ID NO: 253469 - protein, 157 aa, Glycine max
  unsure (1)..(157): unsure at all Xaa locations
  Clone ID: PAT_MRT3847_70907C.1.pep
QKKSGDNKSPPPFPFSPPLPPPPRTPPFHFWFEHCLXSFPAPFFLHACWAPFLSFSPPKTFSPPTLNRFSSPHPPXLFCSPIKRPPPHPIFFPPQTFPSPRILYPYPLPPFPPFXKPYPFFSFSPPPPVPFSPPLLHYHPPKNXLSSHPPNHYYPNN

SEQ ID NO: 253470 - protein, 508 aa, Glycine max
  Clone ID: PAT_MRT3847_70908C.1.pep
MGSDNTNLEFLKEIGLGSSNIGSYINGQWKATGSSVTSVNPSNNQSIAQVTEATLQDYEEGLQACSEAAKTWMTIPAPKRGEIVRQIGEALRAKLDPLGRLVSLEMGKILPEGIGEVQEIIDMCDYCVGLSRQLNGSIIPSERPDHMMFEVWNPLGIVGVITAFNFPCAVLGWNACIALVCGNCVVWKGAPTTPLITIAVTKLVAEVLERNKLPGAIFTSFCGGADIGQAIAKDTRIPLVSFTGSSKVGLMVQQTVNERFGKCLLELSGNNAIIVMDDADIKLAVRSILFAAVGTAGQRCTTCRRLFLHESIYADVLDQLIGVYKQVKIGNPLEKGTLVGSLHTPTSVENFQKGISVIKSQGGKILTGGSVLESAGNFVQPTIVEISPDAPVVKEELFGPVLYVMKFQTLEEAIALNNSVPQGLSSSIFTQRPGTIFKWIGPRGSDCGIVNANIPTNGAEIGGAFGGEKATGGGREAGSDSWKQYMRRSTCTINYGSELPLAQGINFG

SEQ ID NO: 253471 - protein, 509 aa, Glycine max
  Clone ID: PAT_MRT3847_70909C.1.pep
MGSDNHQNLEFLKEIGLGSSNIGSYINGQWKATGSSVTSVNPSNNQSIAQVTEATLQDFEEGLRACSEAAKTWMTIPAPKRGEIVRQIGEALRAKLDPLGRLVSLEMGKILPEGIGEVQEIIDMCDYCVGLSRQLNGSIIPSERPDHMMFEVWNPLGIVGVISAFNFPCAVLGWNACIALVCGNCVVWKGAPTTPLITIAVTKLVAEVLERNKLPGAIFTSFCGGADIGQAIAKDTRIPLVSFTGSSKVGLMVQQTVNERFGKCLLELSGNNAIIVMDDADIKLAVRSILFAAVGTTGQRCTTCRRLFLHESIYTDVLDQLVEVYKQVKIGNPLEKGTLVGPLHTRTSVENFQKGISVIKSQGGKILTGGSVLESGGNFVQPTIVEISPDAPVVKEELFGPVLYVMKFQTLEEAIALNNSVPQGLSSSIFTQRPGTIFKWIGPRGSDCGIVNANIPTNGAEIGGAFGGEKATGGGREAGSDSWKQYMRRSTCTINYGSELPLAQGINFG

SEQ ID NO: 253472 - protein, 77 aa, Glycine max
  Clone ID: PAT_MRT3847_7090C.1.pep
PSIDSQIHDISYPKHILEIRAPLSIMYCTMRLTFSEPRPQQYQSRLIFNQPCLFIFMLPICNFIRSNQHELVKINLL

SEQ ID NO: 253473 - protein, 82 aa, Glycine max
  Clone ID: PAT_MRT3847_70910C.1.pep
IHKAKVYYFPKNIFFLFFIKRAPPTLIKSWCNLWGDQKGGGFFILFFKHFLLCPGGRNGKNTLRGWPQHTLYLSGPRPLGCF

SEQ ID NO: 253474 - protein, 70 aa, Glycine max
  Clone ID: PAT_MRT3847_70911C.1.pep
MTYQILLQRLFNLQCFGRLESLKVKMHPHVNISKEEVSRTLEHLLVNSPPPTRVYLINVSLSHQELVRYA

SEQ ID NO: 253475 - protein, 45 aa, Glycine max
  Clone ID: PAT_MRT3847_70912C.1.pep
TLPVILKRGNNPLPSEKSHPTVHKQDSWSVNEVQLGWEDSMKRIT

SEQ ID NO: 253476 - protein, 65 aa, Glycine max
  Clone ID: PAT_MRT3847_70913C.1.pep
YQELRYTHLIHHKLLGPSPGMLKKLTTRMHLNRRLSGGSADEEPTHNLFGLIDRTLEGTKIRRNC

SEQ ID NO: 253477 - protein, 34 aa, Glycine max
  Clone ID: PAT_MRT3847_70914C.1.pep
RKNNGGHSRSETYEALQFLENELKDKKFFGGEEF

SEQ ID NO: 253478 - protein, 43 aa, Glycine max
  Clone ID: PAT_MRT3847_70915C.1.pep
SNFNDIIHSIINMDANVITIENSRSNEKLLSVYRESVKSGAGI

SEQ ID NO: 253479 - protein, 68 aa, Glycine max
  Clone ID: PAT_MRT3847_70916C.1.pep
EWGISTYFWLPWCQSPRVIGRNHRRSYRSLALTLSILNSPISLHLRRPICTHALGTIAILTHVLFGET

SEQ ID NO: 253480 - protein, 221 aa, Glycine max
  unsure (1)..(221): unsure at all Xaa locations
  Clone ID: PAT_MRT3847_70917C.1.pep
MGRGKRGKSRTQRKHFQQNRENVWTSSKRSKSDPSSENPIPICNPYATQNLAFDHYYKEQGIVSSEEWDAFVQVLRTPLPAAFRINSTSRFSADIRSQLENDFVHSLQAEVAEGEDTEAIIPLPWYPENLAWHSNFSRKQLRKNQTLGRFHEFLKLENEIGNITRQEVVSMAPPLFLDVHSNHFVLDMCAAPGSKTFQLLEIXHKLTKAGSLPDGMVIAND

SEQ ID NO: 253481 - protein, 91 aa, Glycine max
  unsure (1)..(91): unsure at all Xaa locations
  Clone ID: PAT_MRT3847_70918C.1.pep
MRAIFEKGQERAXTFLNYNSDGDPLXSCPKDHNPTIWFADNGERLGTDLGRNGTEWTCDGSSHVFLLITGSADQTAKLXDLHHGRPLHTFN

SEQ ID NO: 253482 - protein, 184 aa, Glycine max
  unsure (1)..(184): unsure at all Xaa locations
  Clone ID: PAT_MRT3847_70919C.1.pep
RPMVFYEKQKIVGCQYCXLENVTHLSWHYGYKKAFGTTFKAIINLENFKGVTFLRTFAPSHFENGVWDKGGNCVRTKPFKSNETRLEGNNLELHTIQLEQFKIAEKEARKKGLKFMLLDTTQAMLLRPDGHPNKYGHWPHENVTLFNDCVHWCLPGPIDTWSDFLLEMLKMEDVRSTSKERFHL

SEQ ID NO: 253483 - protein, 203 aa, Glycine max
  unsure (1)..(203): unsure at all Xaa locations
  Clone ID: PAT_MRT3847_7091C.1.pep
MKLSSSGFNPPAEEEGEKKCLNSELWHACAGPLVSLPLVGSRVVYFPQGHSEQVAASTNREVDAHIPNYPNLPPQLICQLHNVTMHADAETDEVYAQMTLQPLSPXQKEVYLLPAELGTPSKQPTNYFCKTLTASDTSTHGGFSVPRRAAEKVFPPLDYSQQPPAQELIARDLHDNEWKFRHIFRGQPKRHLLTTGWSVFVSA

SEQ ID NO: 253484 - protein, 49 aa, Glycine max
  Clone ID: PAT_MRT3847_70920C.1.pep
MFSHSLFVCLHELNEKPRAHTGFFIHAPHTIQSDGVHLGVKGKKLCRWV

SEQ ID NO: 253485 - protein, 452 aa, Glycine max
  Clone ID: PAT_MRT3847_70921C.1.pep
LIAILVFLLVLLLLCARKRGNSNQRGNGVGPAPVGSSPPNPGVPIDFPNVGDSFTYHQLLQATGDFNDANLIKHGHTGDFFNGVLESGIPIVIKRIDTRSAKKEAYLSELDFFNKVSHQRFVPLLGKNFKNENEKFLVYKRTTNGDLSNCLYYKNTSEDGTSQSLDWITRLKIATGAAEALSYLHHECVPPIVHRDIQASSILLDDKYELRLGSLSEVCAQEADIHQSKITRFLRLPQSSEQGTSGSSTSICAYDVYCFGKVLLELVTGKLGMSAASEAEVKEWFDQILPCISMYDKELVTKIVDPSMVVDEDFLEEIWAISIVARSCLNPKPSRRPPMRYVLKALENPLKVVREENSSSARLRATSSRGSWNATLFGSWRQSSSDVTVTPAASGTKLERASSLKLSGTTGSQSQGSFHNGGGEISSSRRRHSKEIFPEPSGVHDVKRLELE

SEQ ID NO: 253486 - protein, 110 aa, Glycine max
  Clone ID: PAT_MRT3847_70922C.1.pep
VGIDMHHDGPVTRLPPHKRPIYGSLSHSEACVPRLSRPQRPPSAPALSRPSVNIAPSPSIKARTNGVLSACWRVMASTLLASPNCCCQYLRACASFSTSPHCPSRYHCFS

SEQ ID NO: 253487 - protein, 92 aa, Glycine max
  unsure (1)..(92): unsure at all Xaa locations
  Clone ID: PAT_MRT3847_70923C.1.pep
TARLAVAGRRLQDQHLLKNDXINKAFYNAFQMASKNVEAEQRITNDMLKPTTDMTRLVTGMVKTSCGLTHETWTMKLGTGLKGNTILGAYMP

SEQ ID NO: 253488 - protein, 91 aa, Glycine max
  unsure (1)..(91): unsure at all Xaa locations
  Clone ID: PAT_MRT3847_70924C.1.pep
AWGGAXAHTGWGRGFILLSLVPARSPPLLETLEAVLLSGSSSEPGSKDTIGSLFXGTPLRWGAPLLSAGGCGGPRCGWPPAGGGDGGGVGC

SEQ ID NO: 253489 - protein, 57 aa, Glycine max
  Clone ID: PAT_MRT3847_70925C.1.pep
YKSLFWPTEKKSDITYASQMIQHRIPKANRKNICSRENLINICQSTLTANTSGKQVV

SEQ ID NO: 253490 - protein, 147 aa, Glycine max
  unsure (1)..(147): unsure at all Xaa locations
  Clone ID: PAT_MRT3847_70926C.1.pep
PRSGRGGPLFPKAPFFGGPLEEGLFFFGPKKGCFCGYGVGKNGVXFRKLLRAFFFGPKKILVFPLKWLKGIFLGLGIFGFFPGFLGGGRAPFKIXIRAGFWPVAPFNPNLVWLGSFGNFWLLDKVFGLLSPRKVLFLGLKVVSPPKN

SEQ ID NO: 253491 - protein, 73 aa, Glycine max
  Clone ID: PAT_MRT3847_70927C.1.pep
GVPTNGFEKWSSEWANQTSWPLGFLIATPHQSAVFDILLGISQDFEIPGNTLIPAFSVPQAPARSSENAESPP

SEQ ID NO: 253492 - protein, 124 aa, Glycine max
  unsure (1)..(124): unsure at all Xaa locations
  Clone ID: PAT_MRT3847_70928C.1.pep
LKSVVCWKGMSKDVXAFVQKCSVCQKCKYETKASPGLLQPLPIPDLIWQHITMDFIEGMPSSFGKXVIFVVVDRLSKAAHFMALSHPYSAADVAQSFLDHVFKLHGFSDSITSDRDSIFLNQFW

SEQ ID NO: 253493 - protein, 71 aa, Glycine max
  unsure (1)..(71): unsure at all Xaa locations
  Clone ID: PAT_MRT3847_70929C.1.pep
ESVQIAIRPKVSWSGSSVAGTVQIQCSDLCCTSGDXSLLLRRVVPILGVPDALVPVDLPVSQINLFSWGDD

SEQ ID NO: 253494 - protein, 73 aa, Glycine max
  Clone ID: PAT_MRT3847_7092C.1.pep
LSLHKHNHIYEEKTSVHNPLKAFSLASIATVLPNSITYSIKYTILLIPRNSIIADGHMLLLSPSRNQKPQKAK

SEQ ID NO: 253495 - protein, 211 aa, Glycine max
  Clone ID: PAT_MRT3847_70930C.1.pep
MALILAANMCSITNSKTVEVIKRIDIEDKMQSRSNIALPPSEASSSRRHLLIGVGPSLLTLTCGLSPPTVWAEKKSGEKEEEDKGVIGAIKSLFDPTRPRIYHTNFQSVLTKSYLRSAREVVKTMRESLNEVTDDNAKFRRTADSAKESIREYLGSWRGNQIVAQEESYVILEKVIRSLANFYSKAGPSAPLSQEVKSEILDYLNTAEEFL

SEQ ID NO: 253496 - protein, 85 aa, Glycine max
  unsure (1)..(85): unsure at all Xaa locations
  Clone ID: PAT_MRT3847_70931C.1.pep
QKEEXEKXXEKAKTXPPTQTNENRRSHNGWNKQATXGPGNTSXPGTXNTRFFFLWXARKDXEGKFNDQPMGEYMIKVKQLLEAAG

SEQ ID NO: 253497 - protein, 142 aa, Glycine max
  Clone ID: PAT_MRT3847_70932C.1.pep
MASFWPFLAMFMALMACNCSSLASASRQSMHVSTISAAPTTLPGAPLYFSPTISPDIEPLFPTPGRAAFSPSESSIPTIPSSPSPPNPDVTNSPGSVLGFSTFRVYASYGPIFPWCIPATLFSFASCHSGNLHNAASWHVNR

SEQ ID NO: 253498 - protein, 53 aa, Glycine max
  Clone ID: PAT_MRT3847_70933C.1.pep
EMVGLAELKNQLLFFSLIEKLNKKLTNKKFKKCDNFFLVCGRICDFHHSALAI

SEQ ID NO: 253499 - protein, 72 aa, Glycine max
  Clone ID: PAT_MRT3847_70934C.1.pep
PHILHTNLFIPQPPNLKDPFFFTRSFHFISLLYHHLNSIHSPSFYNNITHKTLSLPILIPFQHIPLSSFLFI

SEQ ID NO: 253500 - protein, 44 aa, Glycine max
  unsure (1)..(44): unsure at all Xaa locations
  Clone ID: PAT_MRT3847_70935C.1.pep
TSHLVDSVXANTXTPIKIXGMAPTXXHXPPTLSXXPXXKIXSLK

SEQ ID NO: 253501 - protein, 56 aa, Glycine max
  Clone ID: PAT_MRT3847_70936C.1.pep
RKEHDNANIPVNIGPKEAFCSSQPGAADARKGGHRATKSHTQPLCEKPEGTFKVNI

SEQ ID NO: 253502 - protein, 106 aa, Glycine max
  unsure (1)..(106): unsure at all Xaa locations
  Clone ID: PAT_MRT3847_70937C.1.pep
WRECLSFAFQTALAYTIMGCVTLVAFLAFSXIINDAALGDAFHVYATLQSIGPTILSLWVVGLGPLSKVTTAVAVALAAFVVVLSWPQSTNLIAKRISLGQIVPPC

SEQ ID NO: 253503 - protein, 66 aa, Glycine max
  Clone ID: PAT_MRT3847_70938C.1.pep
GFNPCKYICRSVSLLITEGRLASDQNPWVPLSTEFGAVIKQMQYVAVFLLKTTKNVVKTCNYTLNK

SEQ ID NO: 253504 - protein, 49 aa, Glycine max
  Clone ID: PAT_MRT3847_70939C.1.pep
CDIHLARVSKCHWDPLQGIWPSRRLLISNLSGLANFRMHPILATTHYIA

SEQ ID NO: 253505 - protein, 73 aa, Glycine max
  Clone ID: PAT_MRT3847_7093C.1.pep
AAGLRQGANSSHGTCGFNLYHGEHNAQVQSLACPLSLPYFPVPQDLPNICGRIMCYAFPQPIIQPFPISPARA

SEQ ID NO: 253506 - protein, 43 aa, Glycine max
  Clone ID: PAT_MRT3847_70940C.1.pep
MDTYIHTQRRQTGLLLNGGTLNVLHYSRLFTFGLTTKSLVLPG

SEQ ID NO: 253507 - protein, 50 aa, Glycine max
  Clone ID: PAT_MRT3847_70941C.1.pep
KINDILKYYLYNFCQNLKPLTKQFTPTHSTHSLLVTIIFSHFWLQHVLLC

SEQ ID NO: 253508 - protein, 53 aa, Glycine max
  Clone ID: PAT_MRT3847_70942C.1.pep
RRFLSLSASLWCSESQIGLGLRGSLRVGRDSSVCSAVRRFFRLSLLSYDGSAK

SEQ ID NO: 253509 - protein, 85 aa, Glycine max
  unsure (1)..(85): unsure at all Xaa locations
  Clone ID: PAT_MRT3847_70943C.1.pep
HSPLQNDAVLREQALPTSNPDLTLNPHMAFQXPLSPXLLXQIXPXLTLRTTPPPATINRYFLNLNYLRKLLQKPIESRSSTVIVE

SEQ ID NO: 253510 - protein, 122 aa, Glycine max
  unsure (1)..(122): unsure at all Xaa locations
  Clone ID: PAT_MRT3847_70944C.1.pep
GTILRSDLXATFLTEGNYRASVDXQRTYRIRGMTNMAATLGTPENTVLSLTCAMNRSFTGRASSDIYTICSKNCXSWNPACTKCMTMSLNPNPCFEAXACDFLSRXALHCDDICVIGWSDTP

SEQ ID NO: 253511 - protein, 51 aa, Glycine max
  Clone ID: PAT_MRT3847_70945C.1.pep
NVFCNKDQISILISGWSRDFATIVKCDWCCCNCGCRDLKSLTGAIVVAKGK

SEQ ID NO: 253512 - protein, 409 aa, Glycine max
  Clone ID: PAT_MRT3847_70946C.1.pep
QLPQQENSYDCGLFLLHYLELFLVEAPLNFNPFKLTKFSNFLNVDWFLPAEAFLKRTLIQKLIFELVENHGSHEISSSDCSGDDECLENNDNRTGIDHPEVNKEPTTSHAGQGIEITLLSGSSSLDPQSFNNSGLVLKELFDPGATAGAMLGQCQSFDQRSSDYRFSGSIFSIEEDTDLGNQFMYLPTDPNFQQVTGITPPTCSLPYLPRDCGDETCHRPQISPLVDRDVVQPSLDTSNGVLDDSEDVTVTKSCLVLNVPGSSNEPEQGEKTCSAMENAEHVIDISNSVVGNSLDSITKCDDNKNGDLHYTGQETTTISVQQFPDALDDEEAPTIPLQQVSDAVDDEEAPTTPLKQVSDAVDDEAGCDDGQMIDSMEPDNCEEQAAKRRRLMPLPLRCRSGGIGTESDL

SEQ ID NO: 253513 - protein, 210 aa, Glycine max
  Clone ID: PAT_MRT3847_70947C.1.pep
SRPQISPLVDRDVVQPSLDTSNGVLDDSEDVTVTKSCLVLNVPGSSNEPEQGEKTWSAMENAEHVIDISNSVVGNSLDSITKCDDNKNGDLHYTGQETLTIPVQQVSDAVDDEETPIPLQQVSDAVHDEETPIPVQVSDAVNNEETPTVSLQQVSDAVDDEEAPTTPSQVSDEAGCDDGQMIDDMEPDNCEEQAAKRRRLMPLQCRSEAL

SEQ ID NO: 253514 - protein, 79 aa, Glycine max
  Clone ID: PAT_MRT3847_70948C.1.pep
FFFFNWEAFFAFKIKTYRPGFCLNDANSLLKNLIKSHPTPRVSTQNATEDTVHNPCYICEHFIETIPLLNLHKCNRHEA

SEQ ID NO: 253515 - protein, 115 aa, Glycine max
  unsure (1)..(115): unsure at all Xaa locations
  Clone ID: PAT_MRT3847_70949C.1.pep
KAPVKPLLQMMEEDVIPSLKAIFXAQKDFSNIKLVFKDNKLEGLFFKKGNPYSFWAFFPPGNLIGPKGFFLSSYNSKASPVEPFFVYEKKIPAKPIIFWVXKRLAAQGIIPVWKN

SEQ ID NO: 253516 - protein, 46 aa, Glycine max
  Clone ID: PAT_MRT3847_7094C.1.pep
ECKVHAPIDLNIKFIMQQKLFSIYCTNFAYSDIITTLRQNLLFFKT

SEQ ID NO: 253517 - protein, 59 aa, Glycine max
  Clone ID: PAT_MRT3847_70950C.1.pep
WLTLLTLRHSREVARESHAHRRRNLASLKYPNADVTRTKPEHVKTMPAREEIADHTMHT

SEQ ID NO: 253518 - protein, 57 aa, Glycine max
  Clone ID: PAT_MRT3847_70951C.1.pep
VCCRRGETTVLGIFYTGPTLTIGSCGTSVWELYTRALTQIMIDPALRRLRLRTLFPY

SEQ ID NO: 253519 - protein, 248 aa, Glycine max
  unsure (1)..(248): unsure at all Xaa locations
  Clone ID: PAT_MRT3847_70952C.1.pep
GSFSYWIWHELGIMPSSIFPSVRCGLEMAILNAIADAKGSNMLNILYPSINGNNKCERSLNVQICALIDSNGSPTEVANVAAKLTEEGFSAIKLKVARGGDPMHDAALIQEVRKKVGCQIIIRADANRTWTYEEAMKFSSLVKDCNLQYIEEPVQDEDDILKFCEESGLPIALDETIDNIQENPMEKLAKFTHPAIAAVVIKPSVVGGFENAALIAQWAHQMGKMAVVSAAFESSLSLSAYTQXSSYL

SEQ ID NO: 253520 - protein, 106 aa, Glycine max
  unsure (1)..(106): unsure at all Xaa locations
  Clone ID: PAT_MRT3847_70953C.1.pep
YASDHSKEFAGGLTNRSVPFLRIKRPDLDMGASTHLPQDFLDEAKDRGYITWWSPQEHALSHPSIGVFLTNWGWNSTLXGLSGGVPMMRWPLFAEQHTNRLSIFTT

SEQ ID NO: 253521 - protein, 69 aa, Glycine max
  Clone ID: PAT_MRT3847_70954C.1.pep
PYAIYFLSTTLFMGGWSWFGSDENDTQAWKGNRLLYVNVIIMNFIHSSPSLSCSMIKLTPIFYHFWLKD

SEQ ID NO: 253522 - protein, 92 aa, Glycine max
  unsure (1)..(92): unsure at all Xaa locations
  Clone ID: PAT_MRT3847_70955C.1.pep
FGSREELYEIDIPLRFIASVGTIVRGWACXCGVLFNGCTVLRCLTTASGLPTTYWFQLYXVLSHPFYVMVGQEITGRLYLIAHIALNLFIFT

SEQ ID NO: 253523 - protein, 72 aa, Glycine max
  Clone ID: PAT_MRT3847_70956C.1.pep
SLLRCDTFRDSKRTSRCGTRRNGSNSTRPILYPAMETATRAPSLIPRVAIGISVTIVTYHRLSFLPVPVSTS

SEQ ID NO: 253524 - protein, 61 aa, Glycine max
  Clone ID: PAT_MRT3847_70957C.1.pep
DEGISLVHIAYYQVNLAFGYSLFDFVNHANFDDTKIIYLITRIKKGENVNVCIRPFCGVLE

SEQ ID NO: 253525 - protein, 43 aa, Glycine max
  Clone ID: PAT_MRT3847_70958C.1.pep
LIVKHVSKVVFTRQLLWFRGLGSCATQYISCLSNVRASIQSSC

SEQ ID NO: 253526 - protein, 66 aa, Glycine max
  unsure (1)..(66): unsure at all Xaa locations
  Clone ID: PAT_MRT3847_70959C.1.pep
XMXXXXXXEXGSSKNXNSXXSXLXXXXQXXXINXXIVFXYEXGXFXVXMXAXRNQGHSCFLXEIVX

SEQ ID NO: 253527 - protein, 1229 aa, Glycine max
  unsure (1)..(1229): unsure at all Xaa locations
  Clone ID: PAT_MRT3847_7095C.1.pep
MLETWEKLKRVLRRRYVPSHYHRELLDKLQRMTQGSKSVDEFYKDLKXALIRANVEEDREATMARFLNGMNGDIRDVVELQNYVEIEDIVHHAMKMEQQLKKKSVRKSSSNFDNSRWREGFKKEGTSSNRTPRAAPQPTQNRGKEVANNSWSRDIKCFKCLGRGHIASECPTKKVMILKDYGEITSESSHSEPSSEEKSAEEEEILEXDLFIVRRMLGGIAKESKESQRENIFHTRCLIQGRVCSLITDGGSCTNVASARLVKKMNLETKPHPRPYKLQWLSEEGGLRVDKQVEIQFSIGKYKEKILCDVVPMEASHVLLGRPWQFDQKARHDGHKNKYIFYHDNRKVTLVSLCPKEVCDDQSIMREKKEXERKENEKEKKEKKERDPQDKEKEKKEKRKSGEKKVRKNGLFVKSGEVRSFNGKEXMYILYNKEIATLDSDLELPSGVKSILQEFQDMFSKEMPQGLPPLRGIEHQIDLVLGAVLPNRPTCRSNPQETXKRSKSKSLIXMTKGWVEESLSPCIVPIILVPKKDESWRMCSNCRAVNNITIKYMHPIPRLDDLLDELYGSCYFSKIDLKSGYNQIRIREGDEWKTAFKTKYGLYEWKVMPFGLTNAPSTFMRLMNHVLREFLGKFVVVYFDDILVYRKNLDEHLQHLKSILHVLRKQRLYANLEKCTFCKDHVVFLGFVVNSSRVHVDKEKIKAIQEWPIPKNVSEVRSFHGLASFYRRFVKDISTIVAPLNELVMKHARFKWGEEQEKTFFVLKEKLTNAPILALPNFAKSFELECDASEVVADALSRSYALLYTLEAKFLGFECIKELYEHDADFSHIYQTCYPIAFDGYFKHDGYLVKDKRLCVPKSSIKEVLIKEAHXGGLMGHFGVQKIYDILHEHFYWPHMKSDVHSLCNKCLVSKKAKSKVKPHGLYTSLPIPEHPWIDISMDFVFGLPRSKGGKDSIFVVVDRFSKMAHFISCKKVDDACHVVDLFFKEVVRLHGLPRSIVSDRDSKFLNHFWRTLWGKIGTKLLFSTTCHPQTYGKTEVVNINLSTLLRAVIKKNIKTWEECLPHVEFACNRVVHSTTQLSPFEIVYGFNPLTPLDLLPLPXFHNLKISLGRXKAEYVKKMHEKVKSQIEKKMEGYAKYANKGRKKVTFERSDWVWVHFRKEWFPSQRKSKLMPRGDGPFQVLARINDNAYKIDLPREYGVSATFNVVDLTLFDAGDDFRDLRANACQEGG

SEQ ID NO: 253528 - protein, 108 aa, Glycine max
  Clone ID: PAT_MRT3847_70960C.1.pep
DVRWWGEKQTVPQDLRGNPSGAGAPIPVSFIIVRQPVMTSAKFSPRARQSATYEVPTSAVVLHSIAVTFATTHVVLQSLGDLQHTLQMFHTKGCFFDNAIDCPVLTCF

SEQ ID NO: 253529 - protein, 108 aa, Glycine max
  Clone ID: PAT_MRT3847_70961C.1.pep
PFRGGLPFPFPPPFPRGGLFPPLQGIPKFLPKRGIPLNQKFKEKMVFCPFLPQGKKKPLKKKKTFLKNTPFLSPPQGEFCPQVLRAPKSPMFLFSPRQMAQPFFFGLC

SEQ ID NO: 253530 - protein, 85 aa, Glycine max
  Clone ID: PAT_MRT3847_70962C.1.pep
LRCITIEPNPFTSISHEMIGCLNWPRLMPICRSLNHFFFNLCYIYSYCCSLDSGILSFITFSLLVYAQVGKCVTSLPIFQPPTSI

SEQ ID NO: 253531 - protein, 95 aa, Glycine max
  Clone ID: PAT_MRT3847_70963C.1.pep
SPSPQIPPPTPNFFPPLSTKTLGQTTPPLLLIPHILPTLPIFPSYPTTTSPHTFFSLPATKPYPRPTHSPGFPSHGKQFPLQTRQTQTNPPTTPY

SEQ ID NO: 253532 - protein, 102 aa, Glycine max
  unsure (1)..(102): unsure at all Xaa locations
  Clone ID: PAT_MRT3847_70964C.1.pep
XXXXXXXXXXXXXXXXXXNXXXXXRSYXXXTXXTXXXINSSTXXAXLXXXXXLHPPRXXPXNXXKXTPEXLXEXXXQEXXXQKLRTXXITQAEXRAYIXXXX

SEQ ID NO: 253533 - protein, 99 aa, Glycine max
  unsure (1)..(99): unsure at all Xaa locations
  Clone ID: PAT_MRT3847_70965C.1.pep
QPPSCLADRFSSLNQVASALREAALECSNLIIDIGFTKSSEXTGMYSFNHRSVHCTGNTANPDEHGICIIERALYISDEDHLIPCVGSGDASTHDQNEF

SEQ ID NO: 253534 - protein, 195 aa, Glycine max
  Clone ID: PAT_MRT3847_70966C.1.pep
MLNHGAETENPKGIPIHGGKYVRYNILGSHFQVYSKYAPPLQPVGRGAYDVVCCGTNSETKEGVAIKKIGNAFDNRIDAKRTLREIKLLCHMEHDNIIKIKDIIRPAERENFNDVYIVYELMDTDLHQIIQSNQALTDEHCQYFLYQLLRGLKYIHSANVLHRDLKPSNLLLNANCDLKICDFGLARTTSETDFM

SEQ ID NO: 253535 - protein, 241 aa, Glycine max
  unsure (1)..(241): unsure at all Xaa locations
  Clone ID: PAT_MRT3847_70967C.1.pep
MRICSVFDLHSQHSTTRRTRSLFLQIHQEYLKMGLSYHEVFLAGFFAKKEMRILMVGLDAAGKTTILYKLKLGEIVTTIPTIGFNVETVEYKNISFTVWDVGGQDKIRXLWRHYFQKYPKGLIFVVDSNDRDRVVEAXRDELHRMLNEDELXRDDCATELLQIKQDLPNXAMNAVGITVKLGLRSLRQRHWYIQSTCDTSGEGLYESLDWLSNNIANKALSLLVKGCMKDLLSLSINISNL

SEQ ID NO: 253536 - protein, 139 aa, Glycine max
  Clone ID: PAT_MRT3847_70968C.1.pep
MSSNKDKKAMEVVGGSYYDDKQQDDQLWSEFLSACNNNQESMKYEQKLVASKGDIEAALKEMNRSNLILVGRMPSVGPLVSRSDCPELGPVGSYMASSDFSTVTSVMVIQQYNPSTDIHPLVMEEFDYPDKLEPNSPRS

SEQ ID NO: 253537 - protein, 87 aa, Glycine max
  Clone ID: PAT_MRT3847_70969C.1.pep
LFSLIHLCTKQLESLARKRSHASFIMFAMLDGVITHSLDNPVISTTVEDQINYLDSRSICWKSPLMLIQYYSSISWPWKLSTLTSSQ

SEQ ID NO: 253538 - protein, 71 aa, Glycine max
  Clone ID: PAT_MRT3847_7096C.1.pep
KSHSNLLRTSYLRRIRDSPTTDENFYSNPFPNSVFNMSHEEMTNHNLDYHRFGIGAPIFCVVSLVLSHILS

SEQ ID NO: 253539 - protein, 207 aa, Glycine max
  unsure (1)..(207): unsure at all Xaa locations
  Clone ID: PAT_MRT3847_70970C.1.pep
MVSGSGICAKRVVVXDARHHMLGRLASIVAKELLNGQKVAVVRCEEICISGGLVRQKMKYLRFLRKRMNTKPSHGPIHFRAPAKIFWRTVRGMIPHKTKRGEAALARLKVYEGIPPPYDKTKRMVVPDALKVLRLQKGHKYCVLGRLSPEVGWSYYDTIRELEKKRKEKAELVYARKKQLNKLRVKAEKVAEERLGSQLDVLAAVKY

SEQ ID NO: 253540 - protein, 43 aa, Glycine max
  Clone ID: PAT_MRT3847_70971C.1.pep
PPVRREKTSNWYVNVYIERGAQHPILWLLSFYLSATAYSNTIS

SEQ ID NO: 253541 - protein, 281 aa, Glycine max
  Clone ID: PAT_MRT3847_70972C.1.pep
MGKKKKRSRVSEDEEIESDTNPFDKNENSLYQVLGVEKTASQQEIKKAYYKLALRLHPDKNPGDEEAKAKFQQLQNVIAILGDEEKRAVYDQTGCVDDAELAGDVVQNLKEYFRAMYKKVTEADIEEFEANYRGSDIEKNDLIDLYKKCNGNMNRLFCSMLCSDPKLDSHRFKDIIDEVIAAGELKETKAYKKWTKKISEIKPPTSPLRRRAKSSKKQPEKELYAIISQRKHERKDHFDSMFSSLISKYGGGQMPEPSEEEFEAAQRKVESGRSSKKLKRK

SEQ ID NO: 253542 - protein, 48 aa, Glycine max
  Clone ID: PAT_MRT3847_70973C.1.pep
QIGHLCTQCIGQCPLYVHRCDVSSPTSGQGSWPRKRQLFPVRFGEERG

SEQ ID NO: 253543 - protein, 511 aa, Glycine max
  unsure (1)..(511): unsure at all Xaa locations
  Clone ID: PAT_MRT3847_70974C.1.pep
MPVDLDNASTASGEAASVSSSGHQTKPAVPKKKRNLPGMPDPEAEVIALSPTALLATNRFVCEICNKGFQRDQNLQLHRRGHNLPWKLRQRSSKEVRKRVYVCPEPTCVHHDPARALGDLTGIKKHFCRKHGEKKWKCDKCSKKYAVQSDWKAHSKVCGTREYKCDCGTVFSRRDSFITHRAFCDVLAEENVRSHAVVKDNSENDSKVLTLTGDSPPLQPVSATVATTTTQTNSAMSCGLQTQNLELPETNPPQVIEEEPQGATAVSGSCGSNSTCSTSNGGATSNSNSSSSVFAGLFASSTASGSLXSQTPAFSDLIRAMGPPEHPADLISAPSSSEAISLCLSTTSASPIFATVGQQYVSSPPQPAMSATALLQKAAQMGAAVTNASLLRGFGIVSSSSLASTSSGQQNGLQWGQQQLESESGSVPAAGLGLGLPCEDGGSGLKELMMGTPSMFGPKHTTLDFLGLGMAAGGTAGGGLSALITSIGGGLDVTAAFGNGDFSGKDIGGSS

SEQ ID NO: 253544 - protein, 431 aa, Glycine max
  Clone ID: PAT_MRT3847_70975C.1.pep
MESAGEWLEKALVELCSKIETGLGLGLDQDIIKGLVSYCDLAEPRDAKEYLDNIIGQDAGKTVIEEYLRRRGYSESSIGSNVPTTKLHAYVKPPSVETSASGTKKSFKTPKVAGRGNHAEPNKNASSSNQENQTPTVVSESKTSQKGNQVNSKKKKAGKVVSLAEAAKGSIVFQQGRPCSCQARRHRLVSNCLSCGKIVCEQEGEGPCHFCGALVLREGSSYAGLEESLPPLSESEAVAEAYAKRLVEYDRNSAARTTVIDDQSDYYEIDGNSWLSKEEKELLKKKQEEMEEAEKAKRNRVVVTFDLVGRKVLVNKDEASELQFENRILRPPDAREVNRIKPNPTLTFQPVFVDLGFGRKSTKDKQSHKGISKGLCLEITGRVQHDRNDQKYVMMENQLATASNENVWQVSSGNGMHIMEDDGQCLLNYDK

SEQ ID NO: 253545 - protein, 64 aa, Glycine max
  Clone ID: PAT_MRT3847_70976C.1.pep
PAMGEGVVQTFLSSGVQIFCFTPVFQSSPPILPMFAVLSFGFMSMMLTCFWNFDAWMLECQTYK

SEQ ID NO: 253546 - protein, 75 aa, Glycine max
  Clone ID: PAT_MRT3847_70977C.1.pep
MAFSMDSSLGDFNYANRIFNHIHHPSLFFYNLMIKAFVKRGSLRSAMSLFQQLLECGVWLDNYTYPYVLNGIGCI

SEQ ID NO: 253547 - protein, 184 aa, Glycine max
  Clone ID: PAT_MRT3847_70978C.1.pep
VNTEGRYLLPSASPEQDKYLETKFIEYSLEWPSLVACRFRSGLFHKFGATLRLGAHLVGEGRLRAESGGCRQGLVSVLLTPGVSRPSAHRFFPRGSPPARSTWRPVAAVLLAKQDIKRLVLGYNDREEEELNGLGTQATNWMQSVGYKGGGRGSSLEGNSGRGSGSRHRHHNYSGSGIYYSRRK

SEQ ID NO: 253548 - protein, 274 aa, Glycine max
  unsure (1)..(274): unsure at all Xaa locations
  Clone ID: PAT_MRT3847_70979C.1.pep
YRPDVLDSALLRPGRFDRQVTVDRPDVAGRVKILQVHSRGKALAKDVDFEKIARRTPGFTGADLQNLMNEAAILAARRDLKEISKDEISDALERIIAGPEKKNAVVSDEKKKLVAYHEAGHALVGALMPEYDPVAKISIIPRGQAGGLTFFAPSEERLESGLYSRSYLENQMAVALXGRVAEEVIFGQENVTTGASNDFMQVSRVARQMVERFGFSXKIGQVAIGGPGXNPFLGQQMSSQKDYSLATADVVDAEVRELVERAYSRATHIISTHI

SEQ ID NO: 253549 - protein, 83 aa, Glycine max
  Clone ID: PAT_MRT3847_7097C.1.pep
FFKNFSSRYKNLKFQCKTVLPAADPSGGYFQAPTRADTGLYRTSKAYCPHGRVKVHPFKSASSTSSFVTLGWPLGKSFLFNSL

SEQ ID NO: 253550 - protein, 161 aa, Glycine max
  Clone ID: PAT_MRT3847_70980C.1.pep
AAWKGSPWPTWDQHYHRNNWSQNDLTNQHLVIDLEIINDLRIDMARLQQRMNNMQRMLEACMDMQLELQRSIRQEVSAALNRSAGSSGIHDCESPEDKSKWECVRKGLCCICCESNIDSLLYRCGHLCTCSKCANELLQSRRKCPMCQAPVVEVIRAYSIQ

SEQ ID NO: 253551 - protein, 237 aa, Glycine max
  Clone ID: PAT_MRT3847_70981C.1.pep
MPALRIHGYALAVSFCLITFIAASLPTDPSEVDALIEIKNSLIDPKNNLKNWNKGDPCAANWTGVWCFDQKGDDGYFHVREIYLMTMNLSGSLSPQLGQLSHLEILNFMWNDLTGTIPKEIGNIKSLKLLLLNGNKLSGSLPDELGNLPNLNRFQVDENQLSGPIPESFANMTNIRHLHLNNNSFSGELPSTLSKLSNLIHLLVDNNNLSGHLPPEYSMLDELAILQLDTTISVGVK

SEQ ID NO: 253552 - protein, 304 aa, Glycine max
  Clone ID: PAT_MRT3847_70982C.1.pep
MVSKNPNPSEAFYLDPSGMSLPGILPFAAAATATADSFEDPAKKTRKPYTITKSRESWTEPEHDKFLEALQLFDRDWKKIEAFVGSKTVIQIRSHAQKYFLKVQKSGTNEHLPPPRPKRKAAHPYPQKASKTAPVLSQVSGSFQSSSALLEPGYILKHDSSAMPKTPIINTAVSSWSNNSLQKTTSVLHGQKQKVNNCCSSSRSPRAQLVGESNGQRNNSHPLRVLPDFAEVYSFIGSVFDPNVTGHVQKLKRMDPIDVETVLLLMRNLSINLASPDFEDHRRLLASYEVEPEVDKYKCRLNHA

SEQ ID NO: 253553 - protein, 65 aa, Glycine max
  Clone ID: PAT_MRT3847_70983C.1.pep
MGMVVVISLPFIIFCLVLGFGCYFFGRARGRREVQTNPQVYGMPAPPPTACASHPHSKPDNTDNV

SEQ ID NO: 253554 - protein, 42 aa, Glycine max
  Clone ID: PAT_MRT3847_70984C.1.pep
RFMYVYIFLFLFFPSHVRYNLSSALFNFIYSMKCIFFVVLFV

SEQ ID NO: 253555 - protein, 51 aa, Glycine max
  Clone ID: PAT_MRT3847_70985C.1.pep
LFFFPNKILNMGSCFNFMNGFFFTLIKQFNFISLIIIIYYYNKYNPIYILL

SEQ ID NO: 253556 - protein, 44 aa, Glycine max
  Clone ID: PAT_MRT3847_70986C.1.pep
RPCFLLISNRLPSVSHILMYRLLGRLFIFLKMKQIIILKSAQVE

SEQ ID NO: 253557 - protein, 106 aa, Glycine max
  Clone ID: PAT_MRT3847_70987C.1.pep
AIMFTSFHMPVKLSKYTTTHPNIKMQQKMLLQFFSSATFKLNNLQNAQQKMGLQQPSATFKMQQKMLLQFSASSLSATFLFLALVMASLFLAIGGTIVAGTINSMS

SEQ ID NO: 253558 - protein, 58 aa, Glycine max
  Clone ID: PAT_MRT3847_70988C.1.pep
VVETCANLYLGTKDLGSTRVLLHSIIPLSVLRSGNRPAGYYYLTSRPAVTVELWLAFS

SEQ ID NO: 253559 - protein, 73 aa, Glycine max
  unsure (1)..(73): unsure at all Xaa locations
  Clone ID: PAT_MRT3847_70989C.1.pep
AIITVAITYLQLAAEDHEXWSGSFLCGGSTGLVIYCYCXXYYYSQSDMHXLIQTSFFYRYIVIICYSFFIMLC

SEQ ID NO: 253560 - protein, 60 aa, Glycine max
  unsure (1)..(60): unsure at all Xaa locations
  Clone ID: PAT_MRT3847_7098C.1.pep
MFGRAPKKSDNTRYYEIHGVSKNASXQDDLKTAYKKAAIKNHPDKGGDPEKFKELAQLMR

SEQ ID NO: 253561 - protein, 127 aa, Glycine max
  unsure (1)..(127): unsure at all Xaa locations
  Clone ID: PAT_MRT3847_70990C.1.pep
SSHAGLQGPSSPARYHGLWVGINFSXDEIPSLSSSLCFPYARCTRPVFVEPPESNARLAAIRGRFYMGPKVHEVGTFRGARSKDGSVRPLLAFKQKVNNGMFYCCIKKKRETSKWRISRLCRKRQLI

SEQ ID NO: 253562 - protein, 61 aa, Glycine max
  Clone ID: PAT_MRT3847_70991C.1.pep
FNLFYYLCIRCIEHKITKLGKLEEHKQEIKLIYANFRPGKTSIHLLIETVYIYIVHSLYFK

SEQ ID NO: 253563 - protein, 239 aa, Glycine max
  Clone ID: PAT_MRT3847_70992C.1.pep
MGFLRRLFGGKKHHNNPPPSSSDASKPNKDNKKTWSFIKHSTRYKPNTLPTTLNNNSNFDSSTSSAPFTESLDANKHAIAVAAATAAVAEAALAAAHAAAEVVRLTSGTGGVSSRPAPAPQPRRVAEETTAAAVKIQSAFRGYLARRALRALKALVKLQALVRGHIVRKQTSDMLRRMQTLVRLQSRARATRGNLSDNMHSFKSPLSHYPVPEDYKHSLRAYSTKLDGSILKRCSSNAN

SEQ ID NO: 253564 - protein, 201 aa, Glycine max
  Clone ID: PAT_MRT3847_70993C.1.pep
MFSAKKAELHPQNTVLQIKQDDKFFSRLLSKEGSMSKPSFRMAVAVPFVWESQPGTPKYTFSEDTLPPLTPPPSYFVNSNKKNKPLKKRSRSNIFLALFPKLNLKKKNILSPSSPSSPSSLWSTSDHSSKVVPMEKHGRRRFLSFGSSFDFRGDEEEESASALLLLQLLQNFALAFLVLQTLWLVLASEVQAGGHEFHCNY

SEQ ID NO: 253565 - protein, 53 aa, Glycine max
  Clone ID: PAT_MRT3847_70994C.1.pep
GTKRRPLYFLNHTKVYDAIMLNAIVCRSIENLNYLTRVLKTLVTMRLHTICST

SEQ ID NO: 253566 - protein, 337 aa, Glycine max
  Clone ID: PAT_MRT3847_70995C.1.pep
MGRPPCCDKGVKKGPWTPEEDIILVSYIQEHGPGNWKAVPANTGLSRCSKSCRLRWTNYLRPGIKRGNFTDQEEKMIIHLQALLGNRWAAIAAYLPQRTDNDIKNYWNTYLKKKLNKKLEAGSDQGSLLGGGHNNIGFSSVSQPMSRGQWERRLQTDIHMAKKALSEALSPNKASSSSSTLLAESNSNLSNENSTFYNSNTNKPTTTQSMCYASSADNIARLLKGWMKNTPKSASCAASAVTQNSCSSSEGITTTKGSTTSTSTVELSETFESLFGYESFDNYSSNSEFSPSLSPEATLFQDEGKPDITTGLIDMPFSLLEKWLLDVDAGSQEKLGF

SEQ ID NO: 253567 - protein, 87 aa, Glycine max
  Clone ID: PAT_MRT3847_70996C.1.pep
MGRPPCCDKGVKKGPWTPEEDIILVSYIQEHGPGNWKAVPANTGLSRCSKSCRLRWTNYLRPGIKRGNFTDQEEKMIIHLQALLGNR

SEQ ID NO: 253568 - protein, 178 aa, Glycine max
  Clone ID: PAT_MRT3847_70997C.1.pep
ARGVRFVTNYKLTKEDIDYIKNNLSVSCEDGFLDYLRGIDCSDVEFYAIPKGSVVFLKVPLLRIEGPIAVVQLLETPFVYLINFASLVSTNAARHRFVAGKPKTLLEFGLRRAQGPDGGVGASKYSYIGGFDATSNVAAGMLFGIPLRDTHSHAFVSSFMRSNSLRGNFAETHQSELA

SEQ ID NO: 253569 - protein, 126 aa, Glycine max
  unsure (1)..(126): unsure at all Xaa locations
  Clone ID: PAT_MRT3847_70998C.1.pep
SYRRSPSNALISSCSRRNEYRLIGSWSLVLSSSCLSAVFFIGTYGLIXSGDMVRALLCVDLIVDAVNINLVALSDFCDSRPFKGNIFSIFVIGTAAAEAAIGLVIVSXIPRNKESARINQSVVLNK

SEQ ID NO: 253570 - protein, 438 aa, Glycine max
  Clone ID: PAT_MRT3847_70999C.1.pep
LPVAALLPRDPPVVLFCLGSRLLGVPGSVLNGCFLRWPSPSGGRSASAPAAGAARFVPAPPSAGVRLLVACAPFRAPIAGLLPRVSTALFAQDGKDETSRSSANETSGPGGPAIITDITVNKSVEFSYEELATATDNFSLANKIGQGGFGSVYYAELRGEKAAIKKMDMQASKEFLAELNVLTRVHHLNLVRLIGYSIEGSLFLVYEYIENGNLSQHLRGSGSREPLPWATRVQIALDSARGLEYIHEHTVPVYIHRDIKSANILIDKNFRGKVADFGLTKLTEVGSSSLPTGRLVGTFGYMPPEYAQYGDVSPKVDVYAFGVVLYELISAKEAIVKTNDSVADSKGLVALFDGVLSQPDPTEELCKLVDPRLGDNYPIDSVRKMAQLAKACTQDNPQLRPSMRSIVVALMTLSSTTDDWDVGSFYENQNLVNLMSGR

SEQ ID NO: 253571 - protein, 84 aa, Glycine max
  Clone ID: PAT_MRT3847_7099C.1.pep
VNLEVTRVSIFLKRLLNVSRGLSSLLTNLFTNTPTKLPSSSGAIFVLCQAMLLTKISLCKLLCRGLHSFIGMFSPCQQLLRLIT

SEQ ID NO: 253572 - protein, 48 aa, Glycine max
  Clone ID: PAT_MRT3847_709C.1.pep
IQQFNYFIISPYLKFQDLDHSCLQTSKLKCMFLESISRSHSDAWADAW

SEQ ID NO: 253573 - protein, 68 aa, Glycine max
  Clone ID: PAT_MRT3847_70C.1.pep
CLAKYNAGTSVLVASLIHRSKNASPILSGTVSLESNLPGWVSVGFYASPGLHLCSVVTHDVTYWSYAS

SEQ ID NO: 253574 - protein, 162 aa, Glycine max
  unsure (1)..(162): unsure at all Xaa locations
  Clone ID: PAT_MRT3847_71000C.1.pep
ESLYIHHNGKXFFALLAALRLWATPQNRRRSVGHLVYSGSRVSTDNEIFIMKWLSKTCDAVLRNLPTSLEEDTLLLNAMDNSQDFSTFMEITKLVSSREETYTFLETHNMKDTHSFTDVILSRKARRSMDRWKLAVQWRLKYKKVIFDCISYCNKILDSLVK

SEQ ID NO: 253575 - protein, 67 aa, Glycine max
  Clone ID: PAT_MRT3847_71001C.1.pep
PSHRGAYSTSITSNSSSMTFSSLSLCCLSFQSLIMTHDQCTGTMFVPMKFKNKFPSCDDFPTLVFLF

SEQ ID NO: 253576 - protein, 46 aa, Glycine max
  Clone ID: PAT_MRT3847_71002C.1.pep
AFSIIRGLNSAMNELPDLPPAPRSYTSTGQPTWSESPGGCSLDAGH

SEQ ID NO: 253577 - protein, 57 aa, Glycine max
  Clone ID: PAT_MRT3847_71003C.1.pep
VSPTPNHWPNGGVFRETGGCYQRACHGALAPADAQVTPTLLGAGRTGFLRTRAAITA

SEQ ID NO: 253578 - protein, 195 aa, Glycine max
  Clone ID: PAT_MRT3847_71004C.1.pep
LCYCCIFTSLDILANLLSISTLFLFSLVALALLVRRYCARGVATQLNVVKFIVCIILIVGSSVASAVYWANTTKWVGYTIMVPLWFVGTVGIWLLVPLTKKPKIWGVPLVPFLPSASIGINIFLLGSLDKASFRRFGVWTAILLVYYLFVGLHASYDMAKIQKKQRLEAKTESKLDEENVAPSVTGSGTNNEDHI

SEQ ID NO: 253579 - protein, 35 aa, Glycine max
  Clone ID: PAT_MRT3847_71005C.1.pep
FTTHHVAAIVLKILTLLTCESDTTSCKSQVSRLEP

SEQ ID NO: 253580 - protein, 537 aa, Glycine max
  Clone ID: PAT_MRT3847_71006C.1.pep
MNMEVVTDAASLDVELLQLPEFSGLALKSNLNFIEKLFNQWLSLPESNRLVTSLLNEAKSGVPLNVPGNCSSPNASSNSLPSMFPAGTAPPLSPRSTSGSPRIVKQRVGPSNLGSPLKVVSEPVKEVIPQFYFQHGRPPPNELKEECLFKIDRLFYDHMDGMQVHEFKSITKEVCKLPSFFSTSLFQKIDNGTGVVTRKAFIDYWINGNMLAKDIATLIFKILKQPQLKYLTQDDFKPVLRELLATHPGLEFLQSTPEFQERYAETVIYRIYYYINRSGNGRLTLRELKRGNIIDAMLHADEEEDINKVLRYFSYEHFYVIYCKFWELDTDHDFLIDKENLIRYGNHALTYRIVDRIFSQVPRRFTSKVEGKMGYEDFVYFILSEEDKSSEPSLEYWFKCIDLDGNGVLTRNELQFFYEEQLHRMTHMAQEPVLFEDILCQIIDMIGPEEESYITLRDLKGGKLSGSVFNILFNLNKFMAFETRDPFLIRQERENPTLTEWDRFAHREYIRLSMEEDVEDASNGSAEVWDESLEAPF

SEQ ID NO: 253581 - protein, 137 aa, Glycine max
  Clone ID: PAT_MRT3847_71007C.1.pep
MRRFLWGGGLDQKKIAWVKWDTICLPKDKGGLEIKDIRIFNRALLGKWRWNLMQQHDDLWAKILHSKYGGWRALDEGTSVTNESIWWQDLRSVIHEQGVQALLQSAIEWKVGCGDEVRFWEDCWLTDQESLPLRPTT

SEQ ID NO: 253582 - protein, 68 aa, Glycine max
  Clone ID: PAT_MRT3847_71008C.1.pep
LTFFFFVFLFFFLFFFFGGEYKTDGAGFFRFSPVARFQPKVLFYIWQKFVLKGKQLVVFYPNEFSTAP

SEQ ID NO: 253583 - protein, 174 aa, Glycine max
  Clone ID: PAT_MRT3847_71009C.1.pep
MAEAESVQIPQVKLGTQGLVVSKLGLGCMTLSGRYNDPLPEEEGISVIKHAFSQGITFFDTSDVYGLDHANEFLLGKALKQLPREKIQVATKFGVAVAKFPNFQIKGTPEYVRSCCEASLKRLDVEYIDLYYQHRIDQTVPIEETVGNPSSNTPFNYLKCIIYLLLFSTYSVIM

SEQ ID NO: 253584 - protein, 236 aa, Glycine max
  Clone ID: PAT_MRT3847_7100C.1.pep
MAKTELEVTVESKNKELKHLGFVRIAAIQTFVIVSNLYEYAKQNSGPLRSAVGTVENTVTTVLGPVCNKFKDFPDDVLVYVDKKVDEASHKFDEHAPSFAKHLADQAKGVIQKVTCEAGKVASEAQSGGSRAAVHFVATESKHFVLINSVKLWNGLTHYPPFHALAEIAVPTAAHWSEKYNHVIKAMTQKGYSFIGYLPLIPVEEIAKAFKQGEANLKGDNAASEEQRLESASDSD

SEQ ID NO: 253585 - protein, 144 aa, Glycine max
  unsure (1)..(144): unsure at all Xaa locations
  Clone ID: PAT_MRT3847_71010C.1.pep
SGKTFKCEGFVSGLHSLHHPPEKEDQEKPKKIDAXLRQRIDPQYIEVQAQMEXTNLFKXTFDDVETPKGSMWDFKISQSXKFALSKNTVGGTISRSELXANFLTRWQFYEPVXLSRTYRIKGMIKMVATGGFSENTCILLGLCY

SEQ ID NO: 253586 - protein, 133 aa, Glycine max
  Clone ID: PAT_MRT3847_71011C.1.pep
GSRPNVRLLFALALFFAGAQSVPFIVLHGIGDACKHSGIRNFIKELSKWSGSPGYCLEIGNGSWDSWTKPLLKQTSIACEKVVNLLGNLLYQQLNHNSLLHEFLLPSYCIGKEDEGSRSGIQHWGTYSRKLDW

SEQ ID NO: 253587 - protein, 49 aa, Glycine max
  Clone ID: PAT_MRT3847_71012C.1.pep
IRFSIIRRRDCTRDFHPRTRSSALFGSSVGHPRGRTQANQHLKLLPLLL

SEQ ID NO: 253588 - protein, 79 aa, Glycine max
  Clone ID: PAT_MRT3847_71013C.1.pep
QRTKSKFVFAGPSKSAETLLRYIAAEQLPVKYGGLSKDGEFGISDAVTEITVRPAAKHTVEFPVTEVGLVFSFVFFCRN

SEQ ID NO: 253589 - protein, 111 aa, Glycine max
  Clone ID: PAT_MRT3847_71014C.1.pep
FVFFGNKLQVSYAPQFESLSDTMDKLEGRRREVLARLNPRRSKETTASSSKPRITSKTNCSQHLDSNARDVELKGGSHSGNFPIRMVSSNEVCCASVSWILTVCPGRVLPP

SEQ ID NO: 253590 - protein, 240 aa, Glycine max
  Clone ID: PAT_MRT3847_71015C.1.pep
LSLAWTTEVMRNVVNITVSRVIALYYLRGMQSSTQFCFLRALTRNLGSACLGSLFVPAIEALRIVARGLNLLEGEDEFMFCCAHCCLRVMESIFRNGNGWAYVQIAAYGKGFVKASQDTWALFEKEDMVSIVDADITSSICFLTGVCSGSLCVIVVAAWTYKVHQTFTATLSLLTFFIGYLLTRIAMAVPHACVSCYYVCYAETPENRLFDKTIKDRQALLKTGRDVVPTPRGIRRYTRT

SEQ ID NO: 253591 - protein, 62 aa, Glycine max
  Clone ID: PAT_MRT3847_71016C.1.pep
TFYIDKEGKKNIALIGVECICFKRRSETMIHITGCLSEEIIVKGRRKIQAFMKKYWWSNEKC

SEQ ID NO: 253592 - protein, 88 aa, Glycine max
  Clone ID: PAT_MRT3847_71017C.1.pep
KGSPRSLNPRGGKRKPPTLFDWLTEKNKTVGLFLYGPPNRPATERNPKTKKALFGKKGGKKNLGSKAFSFFWVLGKAKGAPQKKKFKP

SEQ ID NO: 253593 - protein, 62 aa, Glycine max
  Clone ID: PAT_MRT3847_71018C.1.pep
NGAFDVSNRVRRYWIYGNIKSCDPQRRRRFIRDVRSRNYIVGVFLKVVSWAGSMKKWEFCVE

SEQ ID NO: 253594 - protein, 82 aa, Glycine max
  Clone ID: PAT_MRT3847_71019C.1.pep
RSLRQIHPSPFLPFHLSSPILDQTCVPQAHVSGGLSFSNGRIFFFFFFFLGLSISYQKSQISHQGSAEFAKRFRVRNLSKDI

SEQ ID NO: 253595 - protein, 116 aa, Glycine max
  Clone ID: PAT_MRT3847_7101C.1.pep
KKFSMGANPQPLLFFQKKGLQGGLNLKPNSPIPNQHNPSQKRGFKYTTLHTKMEKSFENLRIKSFFTGHKTYPGNKQTKFTPPGNFFIRGGPTPTLFSYHNSYYKPAPHHIFSTPN

SEQ ID NO: 253596 - protein, 95 aa, Glycine max
  unsure (1)..(95): unsure at all Xaa locations
  Clone ID: PAT_MRT3847_71020C.1.pep
ARVYNSEDTPVAAVSIIDTNSXEDHVDQMPRRFYLAGNHEQEFLKYQQEQGGHHSQNGKRHHEEENARGKILSGFTLEFXEHAFSVHKQIAKNLH

SEQ ID NO: 253597 - protein, 165 aa, Glycine max
  Clone ID: PAT_MRT3847_71021C.1.pep
LEDPQKFADEGVKTITWQEYVSRLHELKDEITRSWLAEDRVTSLKLSIKVAKLLMDTSVFEFYPTLFVLVTDIMDMLGNLVWQRIKRKAEFSEDGALRCNLAENFQARDICADAKETCYNWFNKIGAVQELLPRIYLELAILPCWRFLLEQPLDSLRRLVMMIRG

SEQ ID NO: 253598 - protein, 114 aa, Glycine max
  Clone ID: PAT_MRT3847_71022C.1.pep
FFNRGNLSIARDLLDILAEAKQEVPAWLVDISKERSFGGGGGYGRGRGGGGRGGGRPTGGGRDVRMGGGGGGGGSSGGFGGARSGGGGWGGSGGGFGGSGGAFSTNGGGGGGAS

SEQ ID NO: 253599 - protein, 101 aa, Glycine max
  Clone ID: PAT_MRT3847_71023C.1.pep
QSVHHHHRWLNLCIRRGHKDVYFCQYLMVASREFVCDIVPCTQGSLINGVSGADQVPSIVKHKAILSKSIFHFHNLWVGVSLCSLRLNLCPQPVLLIVLSI

SEQ ID NO: 253600 - protein, 206 aa, Glycine max
  Clone ID: PAT_MRT3847_71024C.1.pep
MSLRRRTLLKVIVLGDSGVGKTSLMNQYVHKKFSQQYKATIGADFVTKELQIDDRLVTLQIWDTAGQERFQSLGVAFYRGADCCVLVYDVNVMKSFDTLENWHEEFLKQANPPDPRAFPFILLGNKIDIDGGNSRVVSEKKAKDWCAAKGNIPYFETSAKEDYNVDAAFLCIAKAALANEHEQDIYFQGIPEAAVPENEQRSGCAC

SEQ ID NO: 253601 - protein, 101 aa, Glycine max
  unsure (1)..(101): unsure at all Xaa locations
  Clone ID: PAT_MRT3847_71025C.1.pep
XHSXXHSIXNLXXSXCSXYAQHNXXHXXXLTSXIXTAXLXXXXXAXXXXXXXXXXLNLXVPHXSKHXQLXHSGXXDPXXXXXDXXLXXFXXXXXXXXXXLH

SEQ ID NO: 253602 - protein, 498 aa, Glycine max
  unsure (1)..(498): unsure at all Xaa locations
  Clone ID: PAT_MRT3847_71026C.1.pep
MVVKMMRWRPWPPLVSKKYEVKLVVKTLTLQGCDLVRASAEKGFMLQIKWKGPKLTLSLLRRNAVARNFTREAHPEQNDDVVLWDEEFHALCTPNAYKDNAFHPWEIAFSLLNGLXGLNQRSKTKVPVVGTAALNLADFASVVDQKDFDLNIPLTVSGGSVESSPSLSISISLVELRAVQESTELVHNKAIVPVPVASANSPLVQSGETTLAEKDELSTIKAGLRKVKILTEFVSVRKAKKACHEEEGSEGNFSARSEDGEYNYPFDSDSLDEFEEGDSDEMKEDSSVRKSFSYGKLAYANAGGASYSSVTVNDEGEDWVYYSNHRSDVGILHKENSLTVSATEPYVLQSSRRSILPWRKRKLSFRSPKSKGEPLLKKAYGEEGGDDIDYDRRQLSSDESLSLGKTEDDSGANRSSVSEFGDDNFAVGSWEQKEVMSRDGHMKLQTQVFFASIDQRSERAAXESACTALVAVMADWFQNIRDLMPIKVQFDSLISGRL

SEQ ID NO: 253603 - protein, 202 aa, Glycine max
  Clone ID: PAT_MRT3847_71027C.1.pep
MVVKMMRWRPWPPLVSKKYEVKLVVKTLTLQGCDLVRTSAEKGFVLQIKWKGPKLTLSSLRRNAVARNFTKEVHPEQNDDVVLWDEEFHALCTLNAYKDNAFHPWEIAFSLFNGLNQRSKTKVPVVGTAALNLADFASVVDQKDFDLNIPLTVSGGSVESSPSLSISISLVELRAVQESTELFHNKAIKAVPLAHLTKEEYL

SEQ ID NO: 253604 - protein, 132 aa, Glycine max
  Clone ID: PAT_MRT3847_71028C.1.pep
KLAYANAGGAFYSSMRVNGEGEDWFYYSNHRSDVGVSHKEDSLTVSVTEPYVLQSSRRSILPWRKRKLSFRSPKSKGEPLLKKAYGEEGGDDIDYDRRQLSSDESLSLGVGIYLLVLADFIYLHVYGTRKKL

SEQ ID NO: 253605 - protein, 96 aa, Glycine max
  Clone ID: PAT_MRT3847_71029C.1.pep
NTERAVTVAVACPLFLLPFLASFYKYFHCHQPVTIFHFYRRFSLFTFNRCFEMKQKTKKISLPFILWTLISRVPRWRDPGIPTTRSSTSVPRLLLS

SEQ ID NO: 253606 - protein, 62 aa, Glycine max
  Clone ID: PAT_MRT3847_7102C.1.pep
RASSCRSLLAAPAASRIALRKTSVVPARPTLYPIRVVTQIATRVARDRTLDSSIDIARRCSV

SEQ ID NO: 253607 - protein, 95 aa, Glycine max
  Clone ID: PAT_MRT3847_71030C.1.pep
KMKNPFWIPQLLGAFFWKMFNGGLQKNSPGLSSFKGVKNLAGLVLLFQKIFKNVFIFVRDFFPQSLGLKFFFYYIPNVTKLQLDSLKIMGPIPIP

SEQ ID NO: 253608 - protein, 85 aa, Glycine max
  Clone ID: PAT_MRT3847_71031C.1.pep
VTVEDENTLVIRSNGKRKRQDGEDEGCKYLRLERRGPQNLQRKFRLPENANVSAITAKCENGVLTVVVEKHPPPQKSKTVEVAIA

SEQ ID NO: 253609 - protein, 227 aa, Glycine max
  Clone ID: PAT_MRT3847_71032C.1.pep
KEIIYKTVQEMPPNPKEPWDLEMDYDDTLTLEIPIEQLPDGDGADIAISPNQVGTHTVQGVASTSSTGVATAEPDLELLAVLLKNPELVFALTSGQGGSIPNQETVKLLDMIKSGGVNLGLSENTNGSYGTSVKSPEKVEVSLPSPTPLSDPRTSGWSSEASKNPFSRRSLAPDRITQNHAAVATTNLLSQIPITGTTVRQQPTVVVPSSRHLTSTSVSPYSLPHAN

SEQ ID NO: 253610 - protein, 54 aa, Glycine max
  unsure (1)..(54): unsure at all Xaa locations
  Clone ID: PAT_MRT3847_71033C.1.pep
QNNIENFDLKKVEEQAAELEKDLIVKELETLDVLEXIGATKDCGGLEHQLQKEA

SEQ ID NO: 253611 - protein, 77 aa, Glycine max
  unsure (1)..(77): unsure at all Xaa locations
  Clone ID: PAT_MRT3847_71034C.1.pep
FHKFPPTPLTAFSFPTPLPIVANRVSPFTVXKLNMANKASFSNHQTIKLLFVNLQFKTIXWYAGKRYLKLLFSTNAF

SEQ ID NO: 253612 - protein, 125 aa, Glycine max
  unsure (1)..(125): unsure at all Xaa locations
  Clone ID: PAT_MRT3847_71035C.1.pep
XITQHHPDXXRNPXPKIXXXLSFIXXTLTLNSTTPXXISXXXXEEHTXXXXXXXISXXKATLLXPCLAPDPDTHTTEPXNXRXLPXXXXSSKTNPTSXXXTFYXTXXKGXKDPPQXKTEKKPTTR

SEQ ID NO: 253613 - protein, 47 aa, Glycine max
  Clone ID: PAT_MRT3847_71036C.1.pep
TLDDSSNLKKVRSTGTVATRIGKRSNKQTYRSTVLLFELIFTNCVGC

SEQ ID NO: 253614 - protein, 44 aa, Glycine max
  Clone ID: PAT_MRT3847_71037C.1.pep
MSEDKYGVLLYYKYAEIPNLDDLLTFYHSNCSSLSLLGRVRLSS

SEQ ID NO: 253615 - protein, 213 aa, Glycine max
  Clone ID: PAT_MRT3847_71038C.1.pep
MKRGNEEEKLGGPMFPRLHVNDAEKGGPRAPPRNKMALYEQFSIPSQKFNPRLLPRKPNSSSNIVPPPTQGNGHERSYVYPVRFSSQTPTHRAESYISRQSDDGSRSNTSLVQLERRKKVDDDIHVYTCSGIDQSNDKTMESVDGKKFTPFGARNFCYSVAVQNDGDKDPTQFSSCSLPVDLRKDVRNGNEANPHVSLSRRKPKMSVKNNSSG

SEQ ID NO: 253616 - protein, 54 aa, Glycine max
  Clone ID: PAT_MRT3847_71039C.1.pep
YYSFSLILILILLFFMSFWKSGSGLIFVQYEQFELLISIIINNCLPDYEIAKSL

SEQ ID NO: 253617 - protein, 69 aa, Glycine max
  Clone ID: PAT_MRT3847_7103C.1.pep
SHHKSSITTHTNKLSITLFSSLLFIYTLTFNHILHLSTKISHSPLTHASTLIPQFTTPTNSYTFQIPPS

SEQ ID NO: 253618 - protein, 57 aa, Glycine max
  Clone ID: PAT_MRT3847_71040C.1.pep
VASSGFRDSDVCKRHISQSTVMMLLLMMTYEGSIEHQSLTETTQCLAFPLLPLSLLF

SEQ ID NO: 253619 - protein, 32 aa, Glycine max
  Clone ID: PAT_MRT3847_71041C.1.pep
ARQGILNSIKRKILDSRGINAYPCIYIDFFGL

SEQ ID NO: 253620 - protein, 81 aa, Glycine max
  unsure (1)..(81): unsure at all Xaa locations
  Clone ID: PAT_MRT3847_71042C.1.pep
MKNLYWFKEISNNVRSGRRLSLGEYKRAVSWSKYLISSGAAIKGEGEEEWSADLSXLFIRSKFASGKHSRNYRGIYKHMDV

SEQ ID NO: 253621 - protein, 44 aa, Glycine max
  Clone ID: PAT_MRT3847_71043C.1.pep
PFKSSATMHNGSVINPPVTIVKQVCQNISTGVETKSLQGNSSSN

SEQ ID NO: 253622 - protein, 43 aa, Glycine max
  Clone ID: PAT_MRT3847_71044C.1.pep
HSFIFTLVTHVFPSYFDLYKIPYLIAILCTSTPNPLTPSVPLT

SEQ ID NO: 253623 - protein, 78 aa, Glycine max
  Clone ID: PAT_MRT3847_71045C.1.pep
SEREEKWTSRRRDIRESVQGSEEDASGDGRGLAKNVPSLGPDGLDLLTKMLKFNPSERISAKAALDHPYFDSLDKSQF

SEQ ID NO: 253624 - protein, 163 aa, Glycine max
  Clone ID: PAT_MRT3847_71046C.1.pep
VASLASSSARPKFPNLTLFLPEPSMVYSSISSSNIKGGEVMSATSDPSYHVSQFGQNQHQAGSGDAHKMNNNLTNSRSKSFNENWLSATRTQPLKYGGRGKLFKGVRQRHWGKWVAEIRLPTNRTRVWLGTFDSAEDAAIAYDTAAYILRGEYAQLNFPELSM

SEQ ID NO: 253625 - protein, 71 aa, Glycine max
  Clone ID: PAT_MRT3847_71047C.1.pep
ASNEVALRSSLSPMPHWSSQPGVVENSKYVDSNGSTGNNVDIGGTQDKESRHHIVSGQFSVMRHHLRCRHG

SEQ ID NO: 253626 - protein, 95 aa, Glycine max
  Clone ID: PAT_MRT3847_71048C.1.pep
ITNFWYIIFVGGSQTPFWDYASHYSNINWSHPDQEEICGLDMGSNFNMGQELYVGMEFDTKSAVKNALQQYVMKMHPLLLSSRSRTRAARAARAE

SEQ ID NO: 253627 - protein, 80 aa, Glycine max
  unsure (1)..(80): unsure at all Xaa locations
  Clone ID: PAT_MRT3847_71049C.1.pep
MDLLFLHSFFFFFFFFTSNDANALDATIPRDALSLLSFKRFVSSDPSNLLAAWSNRTSPNLCRWRAVACGVXXRVTXXNT

SEQ ID NO: 253628 - protein, 68 aa, Glycine max
  Clone ID: PAT_MRT3847_7104C.1.pep
FFTEVNCVKKGHNCVKGLSSMASIHCRHSSICEYESYNFVEIVSVSKSLIVLQNFENASLFCSTTVQV

SEQ ID NO: 253629 - protein, 42 aa, Glycine max
  Clone ID: PAT_MRT3847_71050C.1.pep
SGLLTDHVRVTVPISIHHSVQYVHHSVYLVCVSTAGGPLEQP

SEQ ID NO: 253630 - protein, 56 aa, Glycine max
  Clone ID: PAT_MRT3847_71051C.1.pep
ACALKASIRMVLTPSVSNHCLVDTHGFHHQFVCILCLYHYHLCVFRDWEQNSSWRL

SEQ ID NO: 253631 - protein, 116 aa, Glycine max
  Clone ID: PAT_MRT3847_71052C.1.pep
VREQIIQQLKYYPDLYAGYVPLAYSDYLRNMSKSGEWGDHVTLQAAADWYGVKIFVITSFKDTCYIEILPQIQKSERVIFLSFWAEVHYNSIYPEGDSELPSSHTKKKKKWWNFAG

SEQ ID NO: 253632 - protein, 54 aa, Glycine max
  Clone ID: PAT_MRT3847_71053C.1.pep
MWALVTFVEWWLYYLIVTIGMVRIVKGLMWIFMISLCRTRPTIEVESSQNDDKV

SEQ ID NO: 253633 - protein, 70 aa, Glycine max
  Clone ID: PAT_MRT3847_71054C.1.pep
SQRAPTGAILGFPPQKPAGFSPSSNSPKTKKEVFSFSPQGKNKPCTQNGLTEDSQKEHLIKTKSQNTPKP

SEQ ID NO: 253634 - protein, 144 aa, Glycine max
  Clone ID: PAT_MRT3847_71055C.1.pep
MEDASASKFIPHQIGGVQNDVLRFGLHGVKSDIVGSHPPQSSLQSTRRMDEAMKKQCKVNLYGTAFPLKEELDRQILSRFQRPPGPIPSSMLGLETVTGSVDHFGFEDCLNDPRESETFRPLDMHHGMEVRLGLSKGPVYPSII

SEQ ID NO: 253635 - protein, 144 aa, Glycine max
  Clone ID: PAT_MRT3847_71056C.1.pep
MEDASASKFIPHQIGGVQNDALRFGLHGVKSDIVGSHPLQSSLQSTRRMDEAMKRQCKVNLYGTAFPMKEELDRQILSRFQRPPGPIPSSMLGLETVTGSVDHFGFEDCLNDPRESETFRPLDMHHGMEVRLGLSKGPVYPSII

SEQ ID NO: 253636 - protein, 125 aa, Glycine max
  Clone ID: PAT_MRT3847_71057C.1.pep
IGVVIAWYTSNIGVLLLNKYLLSNYGFRFPVFLTTCHMLVCSLFSYVIVSVTEAVPLQRVRSRSQFWRIVALGVVFCFSVVCGNVSLKYIPVSFNQAIGATTPFFTAVFAYAVSAKREAWVTYAT

SEQ ID NO: 253637 - protein, 355 aa, Glycine max
  Clone ID: PAT_MRT3847_71058C.1.pep
EESPVIIGNPDIFIREILPSLTVLYKGNKDGDARFLCLKILFDVMIILLSEPIEEEQRLTDLKFVSNTHFLPLYPTLIEDEDPIPIYAQKLLVMLMEFSFITIPDILHLKTISQCFEFLLGDLSNANVNNVKLCLALASAPEMESKLLSQLKVVRRIGNFLEFVYAKGMEDLLDPTLGLCKAFLARSVSCTKGFSYTTEPILLGDCPPELSGGAVDPQQCIKDIADFGSNVGVLLELSASAETSIADIASECVVLLLKAAPREATTGILTNLPKVTVILESWSRGIPHLIIQRMLHALGYACKQYLLHAMILSISKPEISRTEVIVSELKSSGGSALAKTAGLAALELQRLPRCI

SEQ ID NO: 253638 - protein, 232 aa, Glycine max
  Clone ID: PAT_MRT3847_71059C.1.pep
MHPSSNVKLPKSPISGSSQNPQIYNQPSTPTNSNTCYRPSLSNIVSLSNEIESPIGVDNIQLDEGDQNLDGKKSRITFSVTEDVILVRSWFNVSKDLIIGANQTSKIYSPVQKFNGCYKQADKHRRNESSEKDILDDAHMIYSQDTSKKFEIKHVWLLLKDQPKFDTEFMSKCLKITKVSTSRNYSSSSNPKTPVEVEKYDTPSPMSYPIGQKVAKKKNKGKESMHASYCII

SEQ ID NO: 253639 - protein, 153 aa, Glycine max
  unsure (1)..(153): unsure at all Xaa locations
  Clone ID: PAT_MRT3847_7105C.1.pep
LXXXXXXSXXXXXXXFXSXXXXXXXXLXXXXXXSXTXXXXXGFXXRXXFXXXXWXFXGXXRXXFXSXXXXXQXXXLPXLXXLXXFXXFXVRXFFFXXFXXXXXEXXXXXXIXXXIXXXPXXXXXAXXXXXXLXXLXXSXXXRXXXXXXQXTSP

SEQ ID NO: 253640 - protein, 162 aa, Glycine max
  unsure (1)..(162): unsure at all Xaa locations
  Clone ID: PAT_MRT3847_71060C.1.pep
MEFKYRAVQDRRTPPPPPPPXLFPPAPTSSTAHYEGMSFHQVKKQILRELEKEEIRREILAREMAQRRELEEEVMREITVERVLGISFREQVSMSLNQNHRMNKPINNNIFGGSQPRLPPQIDIKQSNKDKVIILAGAQCFAYLNLANAQGTYIDDIIILDL

SEQ ID NO: 253641 - protein, 52 aa, Glycine max
  Clone ID: PAT_MRT3847_71061C.1.pep
KYMFVHIKNNFLYMTKGISAYTACLLYKMKMHQCSVYSYLLSYLFYSGESFY

SEQ ID NO: 253642 - protein, 232 aa, Glycine max
  unsure (1)..(232): unsure at all Xaa locations
  Clone ID: PAT_MRT3847_71062C.1.pep
RLERLERLERLEVESGFNAPQENPPPYEDDTSNAESSTQHSESISQLVNLNQTAYENPNLGTLSHEEYFRVLDEMKTKSYSYDTDKDTNIYDGNTSCLATCTTSDIDDDLCKGSFTYEAEEVGGNELGCLTSCVGTRWFQAPXLLYGSTDYGLEGXDFWSWRCVFAELLTLKPLFPGTSDVXSXAELVSVLGNIDEETWPGCHKLPDXGINLIWWRGKILSGLEACMPKMHP

SEQ ID NO: 253643 - protein, 55 aa, Glycine max
  Clone ID: PAT_MRT3847_71063C.1.pep
NREHPGGSFYIRPQRGLDCSTNLINQDGYFLFVNNINARIYTDYHIVLTKSYGID

SEQ ID NO: 253644 - protein, 151 aa, Glycine max
  Clone ID: PAT_MRT3847_71064C.1.pep
MAIGFMEVQLVKAKELCDTDFFGSMDPYVVIQYNGQEQRSSVAKGQGNNPVWNEKFVFKVEYPTLSNSYKIILKIMDKDLLSADDFVGQAIVYVEDLLAIGVEDGAAELQPLKYRVIRADQSYCGEIDLGITFKVEEEFNGEAKRGSKDSK

SEQ ID NO: 253645 - protein, 274 aa, Glycine max
  Clone ID: PAT_MRT3847_71065C.1.pep
MDSFNQSVQNSSFRYNPNLNTRTHADEEAEFSGILDIFVHHARNIHNICIYDNQDVYAKFSLTYNPDETLSTRIINGGGKNPTFNENLRLKITQMNAVLKCEVWMFSRSRIHMEDQLLGFALVPISQVVGKGKVTEDYSLSSTDLFHSPAGTVQLTLSLDPSLAINSSVNLIPESAKNSSISSEVILLDRKISEVMLDPVEYARIEFPDISVVKENQQMVSEYFNLASQGTTSAPSKSNIGGSLPFLHLGASPQLDDYEMTIISSLRICMAIFQ

SEQ ID NO: 253646 - protein, 200 aa, Glycine max
  unsure (1)..(200): unsure at all Xaa locations
  Clone ID: PAT_MRT3847_71066C.1.pep
MADNKKRRRKDPAGDELPFKNKLKPDSAIMETLKQFSASSSSSSASVSQTLTLQDLSLPFRCREVADLSLSSVQSNIESLILRIAHSILSGHGFSFDVPSRSAANQLYVPELDRIVLKDKSSLRPFANISTVRKSAITARILQLIHQLCLKGIHVTKRDLFYTDVKLFQDQXPSDAVLDDVSCMLGGTGSSLNVVAAEKG

SEQ ID NO: 253647 - protein, 111 aa, Glycine max
  Clone ID: PAT_MRT3847_71067C.1.pep
KIPFGMEIPTERDIFIHTNKMGVARYKVRRCISKCLLIGPEINGHVEFYLEHPIIEFRLLVLAKRVCERERLHPFVRTVIPPLVSCNNLQNRKLLYYLVCYSPFSFRCVQT

SEQ ID NO: 253648 - protein, 162 aa, Glycine max
  Clone ID: PAT_MRT3847_71068C.1.pep
GKLVVLDLFAEVKPIWVTSEQFYGVPYIWCMLHNFAGNIEMYGILDAIASGPIDARTSNNSTMVGVGMSMEGIEQNPIVYDLMSEMAFQHKKVDVKAWVDMYSTRRYGQTLPLIQEGWNVLYHTIYNCTDGAYDKNRDVIVAFPDVDPSLISVQHEQSHHND

SEQ ID NO: 253649 - protein, 535 aa, Glycine max
  Clone ID: PAT_MRT3847_71069C.1.pep
MKGRSEREKTKVVIRHLPPSLTQSDLFQHIDSHFASRYNWFSFRPSNNTHKRQTPTLAFISFKCPPEFIGFAEFFDGQVFVNERGAQHKVIVEYAPSQRVPKPSAKKDGREGTIFKDPDYLEFLKLIAKPQEHLPSAEIQLERKESEQVGANKETPIVTPLMEYIRQKRAVDSGMQASSAVAKVCRRSRAALPGKPGSGNIKRGSEKKKYVQKDNAKSATRKESKNMSAFIVVPRRDDQFAESSIKGISDIKTLHGVEGSISGIPLTSESGKKKFLLLKGKQQDIPSATEATVKQQNVQSGNSPISTPAKQNQRREASGRLIRSILLNNEARQSQSTTGTQHKIQILSSENGQRPSRRFGSRSGLNNQVSNHDAAQINSEGDSRRALDEKFIKRDLHGLGSSAKTEKRTRNKDRPDRGVWTPLRRSDVSHAGNDYSSSSLAQPTQSNPESAEGEVKENVPSGNRGGEFSASAGGHGGNPSIENGSQRNFIHHGASYVVKDDGAVSSISKGKPSKKSVGHSAHEKQVWVHKSSSGS

SEQ ID NO: 253650 - protein, 87 aa, Glycine max
  Clone ID: PAT_MRT3847_7106C.1.pep
DLKRILPAARWELRLKASCKAYPAYQGHQPHLPLGGPSPLLVVRKTTGGPLLSSNPDSYLKAFNHYSTHRNFPPIAFQPNPKNNWAN

SEQ ID NO: 253651 - protein, 66 aa, Glycine max
  Clone ID: PAT_MRT3847_71070C.1.pep
LKTTKHYIRPEDNNFFILLYFSFPLIRRRLRRLLIFIINPLIFIISIIIILTIIISLVIISIVFIT

SEQ ID NO: 253652 - protein, 60 aa, Glycine max
  Clone ID: PAT_MRT3847_71071C.1.pep
EPSLLEAGTLGQIWDGRDVRPREGGDLSPPFRAFGGGEGILPASTTLEGIIWSRTPMSIN

SEQ ID NO: 253653 - protein, 50 aa, Glycine max
  Clone ID: PAT_MRT3847_71072C.1.pep
VYKIENKGYCFLILKGYSQQVFAHFMSSECNSSPKDFILLLVISSVVSIF

SEQ ID NO: 253654 - protein, 84 aa, Glycine max
  Clone ID: PAT_MRT3847_71073C.1.pep
ESKFQFVPELTEQIKKILIDDMSLKWRQFKYELKSKGYDEGKTKEEMVAHIPDPRVDPSQYRDLVHYWCSEKGQVYMTMSPTFC

SEQ ID NO: 253655 - protein, 63 aa, Glycine max
  Clone ID: PAT_MRT3847_71074C.1.pep
NSFHKGRVLRILRPNVGKLFFLRCTRFSFCCGEVSLGAALRGNPRNKGVGSYPHCWVWPRKTK

SEQ ID NO: 253656 - protein, 97 aa, Glycine max
  Clone ID: PAT_MRT3847_71075C.1.pep
RARIRPEGPCYHILLLTIHVTKEAAVPAMQLSQILLRRTLWGGDVSTHDNHSFMAEPVNSSRDFIRLAYIPHRQKYPPRRGEHIQASLHGLGRALRC

SEQ ID NO: 253657 - protein, 262 aa, Glycine max
  Clone ID: PAT_MRT3847_71076C.1.pep
DFGIRYGFQWPALIYRLSKQPGGPPKLRITGIELPQPGFRPAERVQETGLRLTRYCDRFNVPFEFNAIAQKWETIKIEDLKIKENELLVANAMFRFQNLLDETVVVNSPRDAVLKLIRKANPAIFLHANVNGSYNAPFFVTRFREALFHYSTLFDVLDTNVACEDPMRLMFEREFFGRQVMNIVACEGCERVERPETYKQWQVRNMRAGFKQLPLDKHLINKLRCKLKDAYHSDFMLLEDDNYMLQGWKGRVVYASSCWVPA

SEQ ID NO: 253658 - protein, 47 aa, Glycine max
  Clone ID: PAT_MRT3847_71077C.1.pep
TRTLRVKHLSSDALFNSILLLLGMLLLIPRTDSQHDAMQFLNEWMTY

SEQ ID NO: 253659 - protein, 54 aa, Glycine max
  Clone ID: PAT_MRT3847_71078C.1.pep
QRGGGELTIVLAASLIRRRATHSECRPPGMGRLLMRRGGICYYALAYVRTPASW

SEQ ID NO: 253660 - protein, 53 aa, Glycine max
  Clone ID: PAT_MRT3847_71079C.1.pep
LVIMSLLYVLLHHLLLKRTPVIFLSLGRAVLSELSYFFYFGEARRGSSLPPSL

SEQ ID NO: 253661 - protein, 69 aa, Glycine max
  Clone ID: PAT_MRT3847_7107C.1.pep
LKDPNKKLKKERKYLLMKFKSTTSPSYSFHTFLTTRSILYIRMAMILGSYIFKILINHYPKRLFIYISD

SEQ ID NO: 253662 - protein, 60 aa, Glycine max
  Clone ID: PAT_MRT3847_71080C.1.pep
LATILNKTNKEGSMWLSAQDRTVERRPKHPIQNFDEETDLKCERGWNGKAKGVKKALRQK

SEQ ID NO: 253663 - protein, 53 aa, Glycine max
  Clone ID: PAT_MRT3847_71081C.1.pep
PLHIKIQTYSLSYPFKFQLPSILSLSAYSNQYVTTKRDNVHKIIQLHTLFESP

SEQ ID NO: 253664 - protein, 105 aa, Glycine max
  unsure (1)..(105): unsure at all Xaa locations
  Clone ID: PAT_MRT3847_71082C.1.pep
MFRSTSTRGGPSKYERLEKELADNGTSNEEFKRSTSLPSRAMGSTFRDINLQRNPTKNANSKPKEKKSHPLFSFFDLXRKKKTTARPEFARYLEYVKEGGMWDLN

SEQ ID NO: 253665 - protein, 70 aa, Glycine max
  Clone ID: PAT_MRT3847_71083C.1.pep
QKGSTISYEVAVRLKDTITLISHSMIMIIIQHHRYHNPVIIMIAHSAPSIREKSSKQTILSPLCVVLAAV

SEQ ID NO: 253666 - protein, 183 aa, Glycine max
  Clone ID: PAT_MRT3847_71084C.1.pep
MGAMMSRFWFMLFPAKEYKIVVVGLDNAGKTTTLYKLHLGEVVTTNPTVGSNVEELVYKNIRFEVWDLGGQERLRTSWATYYRGTHAVIAVIDSSDRARISIIKDELFRLLGHEDLQHSVILVFANKQDIKDAMTPAEITDALSLHSIKDHDWHIQACCALSGEGLYDGLGWIAQRVTGKAPT

SEQ ID NO: 253667 - protein, 188 aa, Glycine max
  Clone ID: PAT_MRT3847_71085C.1.pep
MGAMMSRFWFMLFPAKEYKIVVVGLDNAGKTTTLYKLHLGEVVTTNPTVGSNVDEFVYKNIFFSLGIWFVWDLGGQERLRTSWATYYRGTHAVIAVIDSSDRARISIIKDELFRLLGHEDLQHSVILVFANKQDIKDAMTPAEITDALSLHSIKDHDWHIQACCALSGEGLYDGLGWIAQRVTGKAPT

SEQ ID NO: 253668 - protein, 101 aa, Glycine max
  unsure (1)..(101): unsure at all Xaa locations
  Clone ID: PAT_MRT3847_71086C.1.pep
MANSNFSIVLSVSLAFFLVLLTKAHSTDTVSFNFNKFNPFQPNIMLQXDASISSSGVLQLTIVGSNRVPTSGSLGHALYSAXPIQILDIETRNVSNFSTSH

SEQ ID NO: 253669 - protein, 43 aa, Glycine max
  Clone ID: PAT_MRT3847_71087C.1.pep
FHGLLKLSFIESVIIRRAPFLNLLGLTYICRQDRSSLCIPRLL

SEQ ID NO: 253670 - protein, 85 aa, Glycine max
  Clone ID: PAT_MRT3847_71088C.1.pep
MFSINHFSAPDANSPGSGSGTSRPVPALSDEDYFLAASNPKKRAGRKKFRETRHPVYRGVRRRDSGKWVCEVREPNKKSRIWLGT

SEQ ID NO: 253671 - protein, 96 aa, Glycine max
  Clone ID: PAT_MRT3847_71089C.1.pep
LVTKPKWGVTSKVDQSREKREKGKASKEVKVAPVVGVLSALGGFDSPGGFEAFHNYIPLIQTKMGHFSGGIVAEKNVSHTFVSPTGGTMNPLALGT

SEQ ID NO: 253672 - protein, 116 aa, Glycine max
  Clone ID: PAT_MRT3847_7108C.1.pep
FEMAEVEPISTYVDFGEREYFVADERGYDYLLYKMAEEFLFTSKGRILDNRLKLNKVVRELQYSKSGVTVKTEDGCVYETNYVILSVSIGVLQSDLLAFNPPLPVRLLFFVQLSLA

SEQ ID NO: 253673 - protein, 44 aa, Glycine max
  Clone ID: PAT_MRT3847_71090C.1.pep
LHEHASSLIKIQNCHHVPEFLHHGAFFSIYSTFSHEHQKTFPSK

SEQ ID NO: 253674 - protein, 109 aa, Glycine max
  Clone ID: PAT_MRT3847_71091C.1.pep
RGSPFNNPRQKISLVFGAPKKIFCLKKKKKTFFFFTKKKQPLLSQWENNGANKKNQPRGGGKKLIANCPSFLKKPTNIPLLSQKGKGKFFPGGWEKTQLGETTPFLVNF

SEQ ID NO: 253675 - protein, 180 aa, Glycine max
  Clone ID: PAT_MRT3847_71092C.1.pep
MFMEWSLTLDSSHSSSSTTNHNMFPTLGFPVNLSPSSDHNRTVLGEVDFFSGARNISSSHTNNDHGTPLKCDPHVNTGLQLLTANAGSDQSTVDDGASSDAEDKLVKITELARLKEDLRSMNAENQKLKEMLSHVSSNYANLQMHLAAVLQQQHNQRTENTEQEVVQGKLADERKHGVGG

SEQ ID NO: 253676 - protein, 86 aa, Glycine max
  Clone ID: PAT_MRT3847_71093C.1.pep
ASSRTVRITGERPLQGNKWHKMDQSYPIPDYCEPEALQGKFEIPILTLTMPKKITSQVAPKQQEVGTSQEKGEAKPTENVQDTTPP

SEQ ID NO: 253677 - protein, 75 aa, Glycine max
  Clone ID: PAT_MRT3847_71094C.1.pep
FQGKNFFYFFFLLDILRLKSTINITIKLLTSDNIKKIYYFPYFFSLSLAFSFGLQSPLPLQHHLVSIIAKPFVTA

SEQ ID NO: 253678 - protein, 157 aa, Glycine max
  Clone ID: PAT_MRT3847_71095C.1.pep
GREWRQRQIRKITDRVFDKVKNQMETDKLNFEDLYIAVLLVYNDINKYIPGPHFDPPSKDKVREVKQHQQLQWQQRRLLKVFRVLCYACKLTVFNKIVLQFLFLSVVAPTVAVATKKATEGVPGVGKLVQKIPNSVYASLVTIAAVWFQKKAQSSSL

SEQ ID NO: 253679 - protein, 157 aa, Glycine max
  Clone ID: PAT_MRT3847_71096C.1.pep
GKEWRQRQIRKITDRVFDKVKNQMETDNLSFEDLYIAVLLVYNDINKYIPGPHFDPPSKDKVREVKQSCDINLDGDIDRDEFYDFILIMTADTFTIVSQKLILTLVVAPTVAVATKKATEGVPGVGRLVQKIPNSVYASLVTIAAVWFQKKAQSSPL

SEQ ID NO: 253680 - protein, 753 aa, Glycine max
  unsure (1)..(753): unsure at all Xaa locations
  Clone ID: PAT_MRT3847_71097C.1.pep
KVGVVTTLRNNSSSYEVGQETYSCFLRLKSTVEEDAIRLQPGSSEVHMFFPDSLGDDLIVEVQDSKGKHFGRVLVQVAAIADDPADKLRWWPIYREPDHELVGKLQLYINYSTSADDNSHLKYGSVAETVAYDLVMEVAMKIQGFQQRNLLLQGPWKWLLTQFASYYGVSEIYTKLRYLSYVMDVATPTADCLNLVYNLLAPVIMKGNSKTSLSHQENQILGETNDQIKQILTHVFENYKSLDESSFSGIIEVFRPTTGQAAPALEPAVKLYKLLHDILSPEAQTAFCHYSQVAXAQKMSSRHLSETDEYITQNNENSLMDGMAMSTAYQKMKTLCVNLINEIHTDIQIHNQNILPSFVDLPNISASILEPELCNRLRAFLISCPPTGPSSPVAELVIATSDFQRDLVSWGIGPIKGGVDAKELFHLYILVWIQDKRLSLLESCKLDKVKWSGVRTQHSTTPFVDDMYERLKETLTDYEVIICRWPEKNWQQAIADIEKAIVEALDKQYADVLSPLKESMGPKKFGLNKYVQKLAKRSTCAYVVPDELGILLNSLKRMLDSLRPRIESQFKTWGSCLPHVGNTTPGERLSEVTVMLRAKFRNYVQAVMDNGTFRGMIQSVITIRVNPRQSMETVVDPYMSNKIVPFSXPLKGIESLYKEFTWFEYKNVICASYLDRMGHEILSFMDGRXKTRSXQKGSTLGICILHDIFAALKKQLLCNLFHXIDLEPLSSLMEVRSICCKFAPNHKDNTFYY

SEQ ID NO: 253681 - protein, 69 aa, Glycine max
  Clone ID: PAT_MRT3847_71098C.1.pep
SPLWYGMLSRSFWPEYVNTQAGVNAQDLCNMISFIDGLDSFAAASVRQLVSILFGRSIISLVCYLKKEE

SEQ ID NO: 253682 - protein, 100 aa, Glycine max
  Clone ID: PAT_MRT3847_71099C.1.pep
NTFVVHTFTSKIIFTFYHDTRSADTLMLKIKSSHVDTCKTTNLTEVMMADLSAIICTLAFARKYDDDSSPKSKFNGLFNDSQAMLLLIKKRMTLYSLHVT

SEQ ID NO: 253683 - protein, 54 aa, Glycine max
  Clone ID: PAT_MRT3847_7109C.1.pep
YYALKTVRLYKAAYESTSVYPNPDSFTSSLIPQDAIQSRDERKVAKFHKRTSMR

SEQ ID NO: 253684 - protein, 202 aa, Glycine max
  unsure (1)..(202): unsure at all Xaa locations
  Clone ID: PAT_MRT3847_710C.1.pep
MGDLIELSERVRVYVMGYRSACLVLILFLILGIGTGIASSETPRPKNVQASLGAKWSGTPLLLEAGELLSKEDPRLFWDFIDIWLNAAADDQSHSAKACVIEILHHARPLLRQPLASLFEFSLILRSASPALVLYRQLAHDSLASFPLQDARAHAEITKLDPLRLGISLKSPGGKCCWVHTSQNLXFDVPQLLSWLQTQTPG

SEQ ID NO: 253685 - protein, 47 aa, Glycine max
  Clone ID: PAT_MRT3847_71100C.1.pep
SYHPIFFIIFIQSILTGLYRGLINDNLRQLSFWGAILLPQQIPLRLT

SEQ ID NO: 253686 - protein, 187 aa, Glycine max
  Clone ID: PAT_MRT3847_71101C.1.pep
MIKFVLFLFCFASALTLSVSESKSASVQPHAAESFSVGYIQMKTAANCSYLVVISTSCSSPKFTTDKIGITFGDANGNQVYEPRLDDPISRTFEQCSSDTFQIDGACASPICYVYLYRSGAEEGWEPESVKIYGYNSEPITFDFNTSIPNGTWYGYNLCETPSSSYQLSPQKWFMSLVLGSVLSFWL

SEQ ID NO: 253687 - protein, 45 aa, Glycine max
  unsure (1)..(45): unsure at all Xaa locations
  Clone ID: PAT_MRT3847_71102C.1.pep
XXIXEXDFXLSNXLXXXSXXQXYHHXXYIXTNLEPNSELTYAXES

SEQ ID NO: 253688 - protein, 47 aa, Glycine max
  Clone ID: PAT_MRT3847_71103C.1.pep
SSEFGCRDLCEEICILAKNTSRSGRRYMMLNTSTSLSAVIYRLKESM

SEQ ID NO: 253689 - protein, 98 aa, Glycine max
  Clone ID: PAT_MRT3847_71104C.1.pep
MQHKFEITKQCIKKRGGPPKGSNLTSPCMQFQTPSKVSPIFISRAFVLNLLNWKTPGFPHFNPLAANPPFSIWLKTKKAPPDALSQHLHTLIGKWNPP

SEQ ID NO: 253690 - protein, 120 aa, Glycine max
  unsure (1)..(120): unsure at all Xaa locations
  Clone ID: PAT_MRT3847_71105C.1.pep
NKFPERQPIGTAAQSQDDGKDYQEPAPAPLVDPTEFTSWSFYRAGIAEFGATFLVLYITGLTVMGVARAKFKGSSRGIQGXIAWAFGGMIFALGYXTVGILRGHINPGGAFGLFFGRKFL

SEQ ID NO: 253691 - protein, 66 aa, Glycine max
  Clone ID: PAT_MRT3847_71106C.1.pep
FHESLNFLLLLCVRLLKGKKTTLCAGHRLRESFSFPLLVYLLNTLLFDIGLGARFKLLLSVSQFSV

SEQ ID NO: 253692 - protein, 93 aa, Glycine max
  unsure (1)..(93): unsure at all Xaa locations
  Clone ID: PAT_MRT3847_71107C.1.pep
LDTRKTKKDITSMGRNGGRVQCMQVWGPDGKKKNESLAYLRYLDDERVEKEGEYLLRKGGIPSLFFXEEHGSGXGEINRSPRKDEGRYWRMWK

SEQ ID NO: 253693 - protein, 61 aa, Glycine max
  Clone ID: PAT_MRT3847_71108C.1.pep
MNSIVGKSGVGLRQSSPEAPHFAAQFRPGTSHRKFRVVSGKCSRWLNGRNLRVAAVGGGSV

SEQ ID NO: 253694 - protein, 103 aa, Glycine max
  Clone ID: PAT_MRT3847_71109C.1.pep
TRPQSQRAPHPTPRATGGRLPVDAAARDSDPGEHLSLFVLFLCPRPRAPPAAGRPDRTQLRVTHGHRSPPLAFFFSLPIWQSLISRLFPLPPRCPVTAEYLSF

SEQ ID NO: 253695 - protein, 85 aa, Glycine max
  Clone ID: PAT_MRT3847_7110C.1.pep
LLEKYVLNVFCINIYGFLTLLLIYLFKNGDYQVENSHLEPFVRLQFQVCCIIAVVSSFISIYTTLYRSYINMCYFTMQFLKKKKK

SEQ ID NO: 253696 - protein, 64 aa, Glycine max
  Clone ID: PAT_MRT3847_71110C.1.pep
SPKVEFFIHITLFLSTSFLKYILLGLKSLPYRQSIIEISVCSIGSSYYIFLDSAFFEHSFIDRV

SEQ ID NO: 253697 - protein, 175 aa, Glycine max
  Clone ID: PAT_MRT3847_71111C.1.pep
NCNFVKFLGGVPNLEKLVGLIYFPKYLSIGIDSVHPPMMYHNLESIELYQVNFEDMVEILVILRLITSSPNLKELQISGSSNIPVAVDTPDLDFWEKECLSDSTLNKLKTVKLSEMGGWPHEIEFIKYLLGRSPVLETLSIIPCVFDMENNLKMLIELVKCRRASTRAEVIFTHE

SEQ ID NO: 253698 - protein, 44 aa, Glycine max
  Clone ID: PAT_MRT3847_71112C.1.pep
TDELVKMFSARARRRFQRGLTRKPMALIKKLRKAVLFSASNYAF

SEQ ID NO: 253699 - protein, 55 aa, Glycine max
  Clone ID: PAT_MRT3847_71113C.1.pep
RNKGRSFLLSFNCWGHLLAWGRLKVAHTKRESQDHYACNPSIRSGFFLLGFLFWN

SEQ ID NO: 253700 - protein, 47 aa, Glycine max
  unsure (1)..(47): unsure at all Xaa locations
  Clone ID: PAT_MRT3847_71114C.1.pep
KKQRRYILFXLIPSKLRNKRLASGKMLFTQGMVIFHYIIPPEVLHAC

SEQ ID NO: 253701 - protein, 62 aa, Glycine max
  unsure (1)..(62): unsure at all Xaa locations
  Clone ID: PAT_MRT3847_71115C.1.pep
VSVVLNTELCXCGGYLMYAQKGIRYARGDSQDALVXQTDDVTMSSYNRLRPSKIKWTALDRK

SEQ ID NO: 253702 - protein, 200 aa, Glycine max
  Clone ID: PAT_MRT3847_71116C.1.pep
MAAAATTTTAQDTSSVPPLAYSGRVQLKELLDRSEAAVGQRVVVGGWVKSAKEVEKTAPPPSIATTDDTAREGGKGKDVSCVEILQSRIPLIRSILDVFGGGGYGQRKKRENVTAPNDKVLPPKASTAYLLLTDGSCAPSLQVVVDSSVATPSRLVPTGTCLLVEGQLERAEGKHAIELIAEKVLHIGTVDFDKYPLSKK

SEQ ID NO: 253703 - protein, 71 aa, Glycine max
  Clone ID: PAT_MRT3847_71117C.1.pep
KNSNIKRFNCVQIWMYGILMKDLVIENCVILEKNFKLRFVTVKLQCRIIIDLSLSHFLLSSSCCCSYSQVL

SEQ ID NO: 253704 - protein, 42 aa, Glycine max
  Clone ID: PAT_MRT3847_71118C.1.pep
RKDRRNNECKKSKESSILLPQHIPIPLDCRTIPSFLHSIRTM

SEQ ID NO: 253705 - protein, 73 aa, Glycine max
  unsure (1)..(73): unsure at all Xaa locations
  Clone ID: PAT_MRT3847_71119C.1.pep
FXHMHXXTGRHLEVSRKXXDRXHFRXRPQVLRXXXRSSRWNCLRXGRRRRXXLNAVGDGGEGVAGAGLVVSRS

SEQ ID NO: 253706 - protein, 94 aa, Glycine max
  Clone ID: PAT_MRT3847_7111C.1.pep
ESQCAYAIQIQGFMCRVCVSRVSQSAWHAVVSLFSKRLVRYHYSFTRRMVCQQVCVCPERDIERGRIVNPLTEGASVILVHSPCKVECVWCVAC

SEQ ID NO: 253707 - protein, 234 aa, Glycine max
  Clone ID: PAT_MRT3847_71120C.1.pep
MEEALELSRAKDTKERMAGVERLHQLLEVSRKSLSSSEVTSLVDTCMDLLKDNNFRVSLSALQALASAAVLAGEHFKLHFNALVPAVVDRLGDAKQPVRDAAGRLLLTLMEVSSPTIIVERAGSFAWAHKSWRVREEFTRTVAAAISLFASTELPLQRAMLPPISHLLNDLNPAVRETAILCIEEMYTQAGSQFRDELQRHNLPSSLLKAINANLEGIQPKVHSSDGISSGYNA

SEQ ID NO: 253708 - protein, 208 aa, Glycine max
  Clone ID: PAT_MRT3847_71121C.1.pep
MAFASAIAFLLLHTLSSVRSDFLSPLSPLVAPLYEDVCKKVECGKGTCKPSQNSTLLFECHCHPGWRQTLSAHDEGFKFLPCIVPNCTMDSSCSNAPAPAQQERKANESIFDACHWVDCGGGSCNKTSLFSYSCNCDAGYYNLLNATALPCFRECAIGFGCSNLGISMTNSSTASPPPPLNENASLILKGSSPWLLVLIIFIANMQLQ

SEQ ID NO: 253709 - protein, 82 aa, Glycine max
  Clone ID: PAT_MRT3847_71122C.1.pep
MEVAKDPNSQADSDSELELYTIPSSSRWFAWEEIHETERAAFKEYFDGSSISRSPKIYKEYRDFASKKAPPVGFESPPRPIP

SEQ ID NO: 253710 - protein, 417 aa, Glycine max
  Clone ID: PAT_MRT3847_71123C.1.pep
MASIPVACSTHPRLQASPLFQSHARSRSASFWRVQQRGSMGGGGAASSFACSTSQFRGGFGFRFHRRQGKFSLLSFGGDDDGSAVGGEARERDLSQLLSALLPVVVAATAVAALAKPSTFTWVSKELYAPALGGIMLSIGIRLSVDDFALAFKRPLPLTIGLIAQYVLKPVLGILVAKAFGLSRMFYAGFVLTACVSGAQLSSYANFLSKGDVALGILLTSYTTIASVIVTPLLTGLLIGSVVPVDAVAMSKSILQVVLVPVTLGLLLNTYAKSVVSVLQPVMPFVAMICTSLCIGSPLALNRSQILTGEGLRLVFPVLTFHVVAFTLGYWFSKIPSLRQEEQVSRTISLCTGMQSSTLAGLLATQFLDSSQAVPPACSVIAMAIMGLCLASFWGSGFVIRNLLPLPPLRTNSAVKT

SEQ ID NO: 253711 - protein, 311 aa, Glycine max
  Clone ID: PAT_MRT3847_71124C.1.pep
MEVAKDPNSQADSDSELELYTIPSSSRWFAWEEIHETERAAFKEYFDGSSISRSPKIYKEYRDFIINKYREEPSRRLTFSEVRKSLVGDVTFLHKVFLFLEHWALINYGTAEDVEEDHCKVRFEEGAPSGIRVAATPNSLKPMLLPRNGKSAANATGASLKLPPLASYSDVYGDLIRQKEGNCALCAHKCGSGHYRCTQDNFIICTNCFKSGNYGEKRSTEDFVLSESSENSGKHDTVWTEAETLLLLESVLKHGDDWELVAQSVQTKTKLDCISNLIELPIGELMLGPAHRNVNINDANGIVNNAKQSQS

SEQ ID NO: 253712 - protein, 374 aa, Glycine max
  Clone ID: PAT_MRT3847_71125C.1.pep
MDNDLAGDMLCQNVNYNSAYRKLARSYHPDVNKEPDAEQKFKELSNAYEVLSDDEKRSIYDTYGEAGLKGSGMGMGDFSNPFDLFETLFEGMGGMGGSRGSWNGAVEGEDEYYSLVLNFKEAIFGVEKEIEIRRLESCGTCNGLGAKPGTKSSKCSTCGGQGRVVTSTRTPLGIFQQSMTCSSCSGTGETSTPCSTCAGEGRVRKTKRISLKVPAGVDSGSRLRVRNEGNAGRRGGSPGDLFVVLEVIPDPVLKRDDTNILYTCKVSYIDAILGTTIKVPTVDGMVDLKIPAGTQPSSTLVMAKKGVPLLNKKNMRGDQLVRVQVEIPKKLSKEERKLIEELADLSKGKTAATNSQLGAAAIHFRTVVGLVSIY

SEQ ID NO: 253713 - protein, 62 aa, Glycine max
  Clone ID: PAT_MRT3847_71126C.1.pep
LEIPEDVDPQWTSIIESCWHSDPACRPAFQELLERLKELQRRYTIEFQAARSAVEEGTQKEF

SEQ ID NO: 253714 - protein, 80 aa, Glycine max
  Clone ID: PAT_MRT3847_71127C.1.pep
RDPTSIPSALLACITVTRNATIIIGEMQAYCNNFNLNGRGYTPHVTAHPGPLRPLRPVGLLRWYSCPGCQRCAGSAQVIK

SEQ ID NO: 253715 - protein, 440 aa, Glycine max
  unsure (1)..(440): unsure at all Xaa locations
  Clone ID: PAT_MRT3847_71128C.1.pep
MAIAPFGNTSATQWGIHPQIFAGSTGLGKIASSRNNVTSRIRFMAAPCSSFFSRDSLHALFDKGSSQTLQHRRGSRLIVRADADYYSVLGVSRNSSKSEIKNAYRKLARSYHPDVNKEPDAEQKFKELSNAYEVLSDDEKRSIYDTYGEAGLKGSGMGMGDFSNPFDLFETLFEGMGGMGGSRGSWNGAVEGEDEYYSLVLNFKEAVFGVEKEIXIRRIESCETCIGSGAKPGTKTSKCSTCGGQGRVVSSTRTPXGIFQQSMTCSSCSRDGETSTRCSTCSEEGQVRKSERLSHEIPAGVDSGSRLWVRRECNDGTRGSCTGGLDIVLEVIPDLVSYXGDITSSCPLNVMYPDILFGTQGIVYSCESWGXNKGPLGVDXSSTLVMAKKGVPLLNKKNMRGDQLVRVQVEIPKKLSKEERKLIEELADLSKGKTAATSRR

SEQ ID NO: 253716 - protein, 192 aa, Glycine max
  Clone ID: PAT_MRT3847_71129C.1.pep
MGICFSATKVSGSSSNNAAASNRNRKGLAAPAPAPPAQPELEPVTGKQKKQPSQAKRRQVPEDSQKNPRSKDKAGARRQGTHVPCGKRTDFGYVKDFENRFSLGKLLGHGQFGYTYVGIDKTNGDRVAVKRLEKSKMVLPIAVEDVKREVKILKELTGHENVVQFHNAFDDESYVYIVMELCEGGELLDRIL

SEQ ID NO: 253717 - protein, 58 aa, Glycine max
  Clone ID: PAT_MRT3847_7112C.1.pep
EKVCEVCYIMLKKCAVYNSTFSGGVKIGNNSDIKMLLSSEMKLRHLLPVCNARIQYLI

SEQ ID NO: 253718 - protein, 55 aa, Glycine max
  Clone ID: PAT_MRT3847_71130C.1.pep
SKKFSAFCKYESCDFSALCLKSIFSFLFLIEKNCNIQERRSSIRKKTKLNQVTIF

SEQ ID NO: 253719 - protein, 196 aa, Glycine max
  unsure (1)..(196): unsure at all Xaa locations
  Clone ID: PAT_MRT3847_71131C.1.pep
MAVSLWRSRTASSALNLFTNALRHFSSEATNSSPHSTRESMMYSDINSRIGSCMPLSAMRIGTIIHNIELNPGQGGKLVRAAGTSAKILKEPTSAYCLIQLPSGVKKLIDSRCRATXGVVSNPSHGDRKLRKAGHSRWLGRRPXVRGVAMNPVDHPHGWRERVRXRSGGRFGRGSLTPWGKPTKSGYKTGPLKRRR

SEQ ID NO: 253720 - protein, 72 aa, Glycine max
  Clone ID: PAT_MRT3847_71132C.1.pep
MESSGLGPVDCDVGSIVWVRRRNGSWWPGQILGPDHLSASHLTSPRSGTPVKLLGREDASVDWYNLEKSKRV

SEQ ID NO: 253721 - protein, 125 aa, Glycine max
  unsure (1)..(125): unsure at all Xaa locations
  Clone ID: PAT_MRT3847_71133C.1.pep
YYMVAVIKLNGRGIQFYLTVKEICPIIVVQSPNDLNNEIALVFTSPSHALFIAXSYPLSINFXSFSFLTLFAAMPTILSIVNTYGLTIYILSSLNTXYCCFNIXTFSREYYDYILMFCPQLSENN

SEQ ID NO: 253722 - protein, 49 aa, Glycine max
  Clone ID: PAT_MRT3847_71134C.1.pep
LAEQLSYLILDFVSRFRLLLIVSQECVTFKFKLLKFWMKAPTLLWGIGL

SEQ ID NO: 253723 - protein, 109 aa, Glycine max
  Clone ID: PAT_MRT3847_71135C.1.pep
RLISSNIIFHCREAVESYSLELEKLCMTIIKLMAKTLKIKPNELLELFEDVSQAMRMNCYPPCPQPEHVIGLNPHSDAGALTILLQVNDTEGLEIRKDGMWGSIKTLFY

SEQ ID NO: 253724 - protein, 60 aa, Glycine max
  Clone ID: PAT_MRT3847_71136C.1.pep
FLFSLTQNIKFLHPSFGDVASPSATESHCMIIRSIDDNALVLYCSCSLGINPVQYTLVWI

SEQ ID NO: 253725 - protein, 104 aa, Glycine max
  Clone ID: PAT_MRT3847_71137C.1.pep
RKLNKIQNGTRDRLIAYFIGRWLMRSDNSNKGPFECVDDVEDEASSLSSDEEDEHIESIELSPMDDESLLSSSPSSLITQLVFPSLSPPMILFTSIPRKKLGAL

SEQ ID NO: 253726 - protein, 81 aa, Glycine max
  Clone ID: PAT_MRT3847_71138C.1.pep
ARENMTLLGDLVLSNKLVFYDLENQVIGWTEYNCSSSIKVRDERTGTVHLVGFHYISFACGLNINLVMILSLLALLHKWVY

SEQ ID NO: 253727 - protein, 64 aa, Glycine max
  Clone ID: PAT_MRT3847_71139C.1.pep
GEGLAKRTSSYIRLTIKVNAGHRLASTRFRVIIRVRLHGRAVLLKTTGTWRLRCSRQIWDQGTG

SEQ ID NO: 253728 - protein, 51 aa, Glycine max
  Clone ID: PAT_MRT3847_7113C.1.pep
IKGSETEVKKERHLFLKFLFVVSILCMIEICYIWVFHSSKSSFKKAFFHSH

SEQ ID NO: 253729 - protein, 109 aa, Glycine max
  unsure (1)..(109): unsure at all Xaa locations
  Clone ID: PAT_MRT3847_71140C.1.pep
MASSSSMALSAPSLAGNGVNLSPSAHELWRVXLRTTSSSRPPTGYPWKRPNRVKYMGPISGKPPYYLIGXFPCDYCXDTAGLSVEPETFAINSELELIHSTWAMHGVLG

SEQ ID NO: 253730 - protein, 78 aa, Glycine max
  Clone ID: PAT_MRT3847_71141C.1.pep
LFWVGQQRTLALFDAAAVFYIDNSPKVCVKERASTPQGMEKKFPSKRGGGNPALKPQKQNPPKKRSPGGKELMEPNSL

SEQ ID NO: 253731 - protein, 131 aa, Glycine max
  unsure (1)..(131): unsure at all Xaa locations
  Clone ID: PAT_MRT3847_71142C.1.pep
MLLGILSWLLPHHDQRWAPTTTLWLTGCSTRRLFMKRKGLEDPATTTCITTTLRLMKDEKGGSLNNFLRGCVDYDEKGAYDCSQILLSRVLDMDRWKNTYNVLSCVLYITHCYIVYXYAPLCLYYYTELLI

SEQ ID NO: 253732 - protein, 60 aa, Glycine max
  unsure (1)..(60): unsure at all Xaa locations
  Clone ID: PAT_MRT3847_71143C.1.pep
PXGXXXRGAGAGPTSLPLGALRWXAGGPGPPARGAAGRPGVGGGAPGRPPAPGPAPPPRA

SEQ ID NO: 253733 - protein, 85 aa, Glycine max
  Clone ID: PAT_MRT3847_71144C.1.pep
TRPVALSSLIVANNPVCHGKTKHFNIKVYYLIKMQQSGEVNLIYYKSKDQLADMFTKSLPINKLELKELEFTVSKARRGVKDILL

SEQ ID NO: 253734 - protein, 57 aa, Glycine max
  Clone ID: PAT_MRT3847_71145C.1.pep
WKQYSSRHIYIYIYIYEIMKCSSQLYNYLFFENHLFIFTKSSQNKGKISPLSLGSYP

SEQ ID NO: 253735 - protein, 70 aa, Glycine max
  unsure (1)..(70): unsure at all Xaa locations
  Clone ID: PAT_MRT3847_71146C.1.pep
NYCWIIINGKVYDITPSLDYHPPVYXLLLTSTLNDPTIDFEDVFHNHSDIQMIYKYLINKVDTSTIITQN

SEQ ID NO: 253736 - protein, 69 aa, Glycine max
  Clone ID: PAT_MRT3847_71147C.1.pep
DLMSRRVRQSLSKQYFISGIAMYITRSTTCNSSAAGIADDVYHILIGNRHVNRSSSCHTSAVLTSSFNT

SEQ ID NO: 253737 - protein, 584 aa, Glycine max
  Clone ID: PAT_MRT3847_71148C.1.pep
MSGATTPLPSGVSTPDIRTRELKQPMDVAEYLFRRLHQVGVRSVHGLPGDYNLVALDYLPKCGLDWVGNVNELNAGYAADGYARIKGISAIITTFGVGELSAINAIAGAYSEYVPVVHIVGYPTTAAQKNNLLLHHTLGNGDFNSFADMSRKVSCAVSMLNDPHEAATLIDDAIKKCYVLSRPVYIALPSDMVGKKIEGERLKTPLNLEFSPNHEEKEDYVVDVVLKYLHAAKNPVILVDACAIRHRALKETDEFIKKTGIPTFVAPMGKSAVDETLPNYGGVYAGDGSNAGVRERVESADLIISIGAVKSDFNTAGFTYRTSQLNTIDLHSYGVAVKYSEYPGVRMNGVLTKVTAKLGKLNIESGPVPNNTVPKEHADSSDPTITQAWLWPRVGQWLRENDIVITETGTANFGIWETRFPKGVTAISQVLWGSIGYATGCLQGAALAAKELGRERTILFTGDGSFQLTAQEVSTMIRKNLNPIIFVICNDGYTIERCIHGWDAVYNDIQNWNYKDLPAAFGGKPEQFDTYQVKTKEELNKLFAEESFNTSKKLRFVELYMPRDDAPAALMLTAEAAAKRNLEG

SEQ ID NO: 253738 - protein, 68 aa, Glycine max
  Clone ID: PAT_MRT3847_71149C.1.pep
GGRCDSHEVLPMPHLPPSMSPDHIVVVDAHPSSLCGQSYDLLTMGASESWWMIEMTMDAGDFLVHCSW

SEQ ID NO: 253739 - protein, 60 aa, Glycine max
  unsure (1)..(60): unsure at all Xaa locations
  Clone ID: PAT_MRT3847_7114C.1.pep
RXXQCHXLQYECXXRXXEXPXIXAXXGXIRECXTQXKIRSMXAXTIXRXVXXPARRVIGD

SEQ ID NO: 253740 - protein, 37 aa, Glycine max
  Clone ID: PAT_MRT3847_71150C.1.pep
RTHKFSHQDYLTLLHCIIPGQLKCMLTSPLLCGNTWP

SEQ ID NO: 253741 - protein, 573 aa, Glycine max
  Clone ID: PAT_MRT3847_71151C.1.pep
NKFSGHISAISSYSLESLSLSHNKLQGNIPESIFSLLNLTYLGLSSNNLSGSVKFHRFSKLQNLEELHLSQNDQLSLNFKSNVNYSFSNLKFLNLSSMVLTEFPKLSGKVPILESLSLSNNKLKGRVPNWLHEISLYELDLSHNLLTQSLHLFSWNQQLGYLDLSFNSITGGFSSSICNASAIEILNLSHNKLTGTIPQCLANSSSLQVLDLQLNKLHGTLPSTFSKDCRLITLDLNGNQLLEGLLPESLSNCIHLEVLNLGNNQIKDVFPHWLQTLPELEVLVLRANKLYGPIEGSKTKHGFPSLVIFDVSSNNFSGPIPNAYIKKFQAMMKNIVLDVDRQYMEFISFHEANYADSVTITTKAITVTMGRIRNDFVSIDLSQNRFEGEIPNAIGELHSLRGLNLSHNRLIGPIPQSMGNLTNLESLDLSSNMLTGGIPTELSNLNFLEVLNLSNNHLVGEIPQGKQFNTFSNDSYEGNSGLCGLPLTIKCSKDPEQHSPTSTTLRREGGFGFGWKPVAIGYGCGMVFGVGMGCCVLLIGKPQWLVRMVGGQLNKKVKRKTRMRSNENGSRMN

SEQ ID NO: 253742 - protein, 443 aa, Glycine max
  unsure (1)..(443): unsure at all Xaa locations
  Clone ID: PAT_MRT3847_71152C.1.pep
MKYRYMNWTSPHNLLTQIIAPILVEPTNSVTLILVLTQITGDFSSSICNASAIEILNLSHNXLTGTIPQCLANXSSLEVLDLQLNKLHGPLPSTFTKNCQLRTLDLDGNQLLEGLLPESLSNCIHLEVLDLGNNQIKDVFPHWLQTLPELKVLVLRANKLYGPIAGLKIKHGFPSLVIFDVSSNNFSGPIPKAYIQKFEAMKNVVIDTDLQYMEISFSYGRNKYSDSVIITTKAITMTMDKIPKGFVSIDLSKNGFQGEIPNAIGELHALKGMNLSHNRLIGPIPQSMGNLTNLESLDLSSNMLTGGIPTELTNLNFLEVLNLSNNHLAGEIPGGQQFNTFPNDSYKGNSGLCGLPLTIKCSKDPEQHSPPSTTLRKEGGFGFGWKPVAIGYGCGMVFGVGMGCCVLLIGKPQWLVRMVGGQLNKKVKRKTRMRSNENGSRMN

SEQ ID NO: 253743 - protein, 114 aa, Glycine max
  unsure (1)..(114): unsure at all Xaa locations
  Clone ID: PAT_MRT3847_71153C.1.pep
MGVGDRFPVGMRVLAVDDDETCLSVLENLLRKCQYNVTTTNQAIKALEMLRKNRNKFDLXISDVNMPDMDGFKLLELVGLEMDLPVIMLSXYRDKRAGDERCIXGACDYLTNQE

SEQ ID NO: 253744 - protein, 85 aa, Glycine max
  Clone ID: PAT_MRT3847_71154C.1.pep
VVSPCGKYLCDVEMYGAVSLASNYGLNPYIMVVQIKKGRVRFSNLNENYQFSLSDFKLFKGYPFVKGKFHYMGKISPGCENYFEK

SEQ ID NO: 253745 - protein, 199 aa, Glycine max
  Clone ID: PAT_MRT3847_71155C.1.pep
RHEVQSLYFCWVNPRFEYATRILSVSIAFPPNRTQGLTLYSILIGTLYCCFLVAGIGGGRAIENRTNLSAFFIFLILLSLGWTMQFLKNAMYVTISRVKYMNFAGGVDMDTRVAFCDTIKHLTGSVSMGSILVPVIVLFRGFARTTSLVGGDTDEFMFSCVSCYMGVASFLVVRGNRWGFVHVGVYNKGFVQASTDTWE

SEQ ID NO: 253746 - protein, 54 aa, Glycine max
  Clone ID: PAT_MRT3847_71156C.1.pep
RYDLEFVSPFTLRLERNSLILILDPAIVFVFRGRLVEAKFFVFDNHRFEIVFHV

SEQ ID NO: 253747 - protein, 357 aa, Glycine max
  Clone ID: PAT_MRT3847_71157C.1.pep
MDFGPRGSSMLSPNAQMGGLRGLPTQVRGYGSQDARMEDRQTYEARTLSVPLPQRPLGDESITLGPQGGLARGMSIRGPPAVSSSTGLNGYNNLSERTSYSSREDPASRYTPDRFAGSTAYDQSSVQDRNMNYGNRDLRNANRILDKPVVTSPARTQGTAASQSISAERLQDMSMAAIREYYSARDVNEVVLCIKDLNSPGFHPSMVSLWVTDSFERKDNERDLLAQLLVKVVKSQDGPLGQAQLIKGFESVLSTLEDAVNDAPKAPEFLGRVFAKAITEHVVSLKEIGRLIHEGGEEPGSLLEAGLAADVLGSTLEVIKMEKGDAVLSEICTSSNLRLETFRPPEPLKSRKLEKFI

SEQ ID NO: 253748 - protein, 219 aa, Glycine max
  Clone ID: PAT_MRT3847_71158C.1.pep
FGSREKLPNRIIFFRDGVSETQFYKVLEEELQSIRCACSRFPGYKPTITFAVVQKRHHTRLFPFETDQSSTQKNNFLYENIPPGTVVDSVITHPKEFDFYLCSHWGVKGTSRPTHYHVLWDENQFTSDELQKLVYNLCYTFVRCTKPISLVPPAYYAHLAAYRGRLYLERSESLGLFRSTCTLSRAGPPKTRPLPKLSENIKKAHVLLAGGYFVTLSGH

SEQ ID NO: 253749 - protein, 74 aa, Glycine max
  Clone ID: PAT_MRT3847_71159C.1.pep
VIRILTNNSNQIQPKTISTTNNEKQNVLGNLYQLSVKCLKCSKLDLRKIIKLYPFSHNEIIKIQKLKERIKSNS

SEQ ID NO: 253750 - protein, 50 aa, Glycine max
  Clone ID: PAT_MRT3847_7115C.1.pep
LSISSTERTVSLEHYLHEKWSRSSSFNEPIVQIDASMESNVCFINIFCFS

SEQ ID NO: 253751 - protein, 48 aa, Glycine max
  Clone ID: PAT_MRT3847_71160C.1.pep
SWRGRPRYYMLRSIALTTLLFSQVSMCFYTVQHRRPNKWHSSSLSTTS

SEQ ID NO: 253752 - protein, 122 aa, Glycine max
  unsure (1)..(122): unsure at all Xaa locations
  Clone ID: PAT_MRT3847_71161C.1.pep
SDLLLLSFPVLKIVPVFILFEXPLAESLEIVEFIDVTWXYFPFLPSVPYLRALARFWSXFFDDXFVGAAWYAVFSVDELDREXNVVVTYEALQFLEYEIKDMKFFGRDEVEXVDLASVYIAL

SEQ ID NO: 253753 - protein, 53 aa, Glycine max
  Clone ID: PAT_MRT3847_71162C.1.pep
YTPPHLRRRLAKAYIDFKLWKLIKFLWKGSYNICGDLFSGWSPKGFIKFPQFP

SEQ ID NO: 253754 - protein, 172 aa, Glycine max
  Clone ID: PAT_MRT3847_71163C.1.pep
LELKYLQNLSLNSNHLTGPIPSEIGDCVNLKTLDIFDNNLSGGLPVELGKLTNLEVIRAGGNSGIVGKIPDELGDCRNLSVLGLADTKISGSLPASLGKLSMLQTLSIYSTMLSGEIPPEIGNCSRLVNLFLYENGLSGFLPREIGKLQKLEKMLLWQNSFGGGIPEEIGNC

SEQ ID NO: 253755 - protein, 94 aa, Glycine max
  Clone ID: PAT_MRT3847_71164C.1.pep
GGGFKDKFHIGFLGGVFLLTRPLFFFLWIGLLGRVGVFRYFYPLIVLQANSAKCPSLCFLPFRKLACNLFLDMCVIMNLFLVFTPPLKSLCSCL

SEQ ID NO: 253756 - protein, 37 aa, Glycine max
  Clone ID: PAT_MRT3847_71165C.1.pep
EILESRVTIAFVSGFKDTATCAQGLSQFHPRVRPRDR

SEQ ID NO: 253757 - protein, 155 aa, Glycine max
  unsure (1)..(155): unsure at all Xaa locations
  Clone ID: PAT_MRT3847_71166C.1.pep
KGMILHQTLRLKDRFKQYYFENRKLQTXSRNFQVTTMTPLLXSNQTFFAXMIEGFSKEEDHVVRAGGGLIIKMKVENLWHIVVTKMRSVLKDQFYRMQSDNHLLIIKDDDTLLLMTLMIYGYSIDAQLDVVSKHRDIYNELIMSDSTKLIAEAHI

SEQ ID NO: 253758 - protein, 96 aa, Glycine max
  unsure (1)..(96): unsure at all Xaa locations
  Clone ID: PAT_MRT3847_71167C.1.pep
PRVRPRVRTAARRLQKGRSLGQNPADAELQDMINEVDADGNGTIDFPEFLNLMARKMKDTDSDEELKEAFRVVDKDQNGFISGVVLPLLXTNLGEK

SEQ ID NO: 253759 - protein, 117 aa, Glycine max
  unsure (1)..(117): unsure at all Xaa locations
  Clone ID: PAT_MRT3847_71168C.1.pep
FFTVVNSTYVPCNPPPKTPKHPPIPKPPSPKQTSYPKDTIKFGVCANVLGLINIQLRXPPKTPCYNLIKGLTNLKATVYLYTALKANILNINLNIPVNLSLLLNYYKKDIPKDFIYY

SEQ ID NO: 253760 - protein, 44 aa, Glycine max
  Clone ID: PAT_MRT3847_71169C.1.pep
KGKHHCSLAPIGRSKRGKDPIVLSSRAYKRFLSRELILDHGSSP

SEQ ID NO: 253761 - protein, 298 aa, Glycine max
  Clone ID: PAT_MRT3847_7116C.1.pep
MGKSTSCFKLITCGGDAAEKDDYHQVSEIKESNDKRGWSFRKKSARHRVLSNTVIAEAPSSANKETSECSTFNFQPLPEPNVVEKIYTTNCSDEKPQLSSFESSQVEETNVIETEEKLDVNPPESDVIIIQAAIRGLLAQRELLQLKKVVKLQAAVRGHLVRRHAVGTLRCIQAIIKMQILVRARRAWQSRLENHLNHKDGKRDSSEALGNKNLMTKSNVSYISIEKLLSNNRFASQLVESTPKNKPIHVKCDPSKSDSAWKWLERWMSVSSKDIAECKEISSLIEHSRESKDSTPMF

SEQ ID NO: 253762 - protein, 85 aa, Glycine max
  unsure (1)..(85): unsure at all Xaa locations
  Clone ID: PAT_MRT3847_71170C.1.pep
SWLLLACSFLICFLVITGSRLVVILTQSGVGAPWSLLIIVTISICINQMYVVAVMHISMYITCSMFNEMDLQFFCSXQKNSKSYI

SEQ ID NO: 253763 - protein, 44 aa, Glycine max
  Clone ID: PAT_MRT3847_71171C.1.pep
KATVLAGFISSGNIEYQKVPGKGELMVSPLGLLHFQIADGKRKA

SEQ ID NO: 253764 - protein, 106 aa, Glycine max
  Clone ID: PAT_MRT3847_71172C.1.pep
IAKILFFKLGKYSYFKKPPKGVFIKTPERRLFAAKIFFLGEKKRASPHGIGGGPPQKKRKTPSPLLQFSLAKNPGVEQQKNFSNKIPPSRVFCPQEGSKGPLFFFI

SEQ ID NO: 253765 - protein, 63 aa, Glycine max
  Clone ID: PAT_MRT3847_71173C.1.pep
GLAKTPECSASKKAGHFFLAPCFCATALFWLMPPLGKKLRLWGFVWLSVFGHCCILTLCLLFH

SEQ ID NO: 253766 - protein, 140 aa, Glycine max
  unsure (1)..(140): unsure at all Xaa locations
  Clone ID: PAT_MRT3847_71174C.1.pep
RKTPLSNTVKGKKKKYKKTLWLEKTLTTRISXSHRFPYGLADRVEKXXDGLEELLVDMSSLLYDHRLQDAYLNSSDILQSTMFTEQYVDHVLTSERDNMRCCKIEYKYPVHSSQTYIYGGILIAGFVVYFVVIFFSSPVR

SEQ ID NO: 253767 - protein, 130 aa, Glycine max
  Clone ID: PAT_MRT3847_71175C.1.pep
MKPSVLRLSLLVFVPLLLSLLYVALMPKKETAMKTYEVFGVKIEKNPPQSKLNELGVSTWSKWEGGPAKIPWSFKEEETMYLLEGKVRVTVEGSVGSFEIGGGDLVVFPKGMNITWEVIEAVKKHYSLKK

SEQ ID NO: 253768 - protein, 90 aa, Glycine max
  unsure (1)..(90): unsure at all Xaa locations
  Clone ID: PAT_MRT3847_71176C.1.pep
MRSFSHSWELIFPIWVCSPYNGSEMWSSEXANQTLWHLRYLIDNPKQSTFSDIXSLGISHEHENGVDTIMPXFTVTQATAKSAENAESSE

SEQ ID NO: 253769 - protein, 60 aa, Glycine max
  Clone ID: PAT_MRT3847_71177C.1.pep
HIHCRIAYDSESGLVSYGNLSSIMCGWHMQRCDPCTNDDSSRVMLWRFCGPSNVPILRGT

SEQ ID NO: 253770 - protein, 108 aa, Glycine max
  Clone ID: PAT_MRT3847_71178C.1.pep
MHHICVCCKGLTPLPPPPPPLHQRRNTLVITFASKSGGGFSLNSLLKSCKSCGGKGAIECPGCKGTGKNKKNGNIFERWKCFDCQGFGLKSCPSCGKEGLTPEQRGER

SEQ ID NO: 253771 - protein, 118 aa, Glycine max
  unsure (1)..(118): unsure at all Xaa locations
  Clone ID: PAT_MRT3847_71179C.1.pep
MSEMDDLHKHAPTACSDRPVTTDKIHWKWTSLGTPDSTYPGSDLLNLFRHTPEXPCMNALLHIRTXVVHPPVSSXNGIICIDIAADPSTPRIDNTKSLVLLCSLFTHHNQKIPLLLDL

SEQ ID NO: 253772 - protein, 257 aa, Glycine max
  unsure (1)..(257): unsure at all Xaa locations
  Clone ID: PAT_MRT3847_7117C.1.pep
LLREGNDILCCDYASFDGLITKQVMSKMAEMINRLCGGDEKLMXRERXHLLVAWWSRVAFEERFWRIEWGIPSXFPVTIYLHYLFNEKAIKIVLKNXLRQVKAPSLFYQSFKNFVSWGEYGDDNXIRVHEYVKPYFSGSKWKSFLAGHNITITDGIDKTSATLHFRKLADCDSLXFNWGGMPNVLWVAPEDKASLWSQPSYASCNNLEMQEAYPCHLRNVLREXLYLHSPKEARPLKREALSPIEWLHTLSALPSTD

SEQ ID NO: 253773 - protein, 272 aa, Glycine max
  Clone ID: PAT_MRT3847_71180C.1.pep
SDVDVGGANEVNTNSRLEQDNKTSVDVNGNKDQWKDFLPVKNVSVSKFQLLSDSDDSDVDVDVGGANKANPNRHLEQNKKTSPDDDLWKDFLPVKNVSVPTPAFNEICEEYFRSANCKEGGGDASKSFSERNPGVSSSCQRYQQRWESTDPVHPAHSYFFHEDPRIQQLVRSRLRNFNPLGTINTVNQQPNFSHIDYMGQFGNGGASNMQGVQNGFINCSTRGGNKSSNLNVDGSFNASGGWVDPKIVSPFSHGESSRKKATKRNGSKNSVS

SEQ ID NO: 253774 - protein, 146 aa, Glycine max
  Clone ID: PAT_MRT3847_71181C.1.pep
LHPPGPLLLPRESTQECKIHGYDIPIKSKVIVNAWAIGRDPNYWNEPERFYPERFIDSSIDYKGNNFEYIPFGAGRRICPGSTFGLVNVEMALALFLYHFDWKLPNGIQNEDLDMTEEFKVTIRRKNDLCLIPVSPPCSVVAMYSS

SEQ ID NO: 253775 - protein, 56 aa, Glycine max
  Clone ID: PAT_MRT3847_71182C.1.pep
MNFINLISKTEQIGFGELKKGFGALALMILLVLKMGIVYKCRLGNESNGLSPGLKT

SEQ ID NO: 253776 - protein, 45 aa, Glycine max
  Clone ID: PAT_MRT3847_71183C.1.pep
YARIHSRGWSQSAHYVQFLSHMSVFWINASFCWMALSLVLRSLQS

SEQ ID NO: 253777 - protein, 122 aa, Glycine max
  Clone ID: PAT_MRT3847_71184C.1.pep
MQIFSRKPSKNSSLNLLKVIVNWGKIKTYIYYVFYEKTSKIGEKSDTQTNLASLGKLAWNKEAERRNSYLCFWHMVYDMNSNPNALLGRTRERYYIKIPSAWMLLKCNVVSETSGKYKSDIT

SEQ ID NO: 253778 - protein, 34 aa, Glycine max
  Clone ID: PAT_MRT3847_71185C.1.pep
IEVEYICSVKYIPLKWMYVVEYRCLNNIFNGLNG

SEQ ID NO: 253779 - protein, 237 aa, Glycine max
  Clone ID: PAT_MRT3847_71186C.1.pep
MKRVFGVKKNKDPPPSIQDASDRITKRGDSVDDKIKKLDAELSRYKEQIKKTRPGPAQEAVKARAMRVLKQKRMYEGQRDMLYNQTFNLDQVQFAAEGIKDAQQTMTALKSANKELKGMMKTVKIQDIDNLQDEMMDLMDVSNEIQETLGRSYNVPDDIDEDDLMGELDALELDMGNETEADGVPSYLQPDKEPDLDAELNLPPAPTGQTAVPPGRFNAQTEDELGLPAVPRASIRG

SEQ ID NO: 253780 - protein, 175 aa, Glycine max
  Clone ID: PAT_MRT3847_71187C.1.pep
MKRVFGVKKNKDPPPSIQDASERITKRGDTVDDKIKKLDAELSRYKEQIKKTRPGPAQEAVKARAMRVLKQKRMYEGQRDMLYNQTFNLDQVQFAAEGIKDAQQTMTALKSANKELKGMMKTVKIQDIDNLQDEMMDLMDVSNEIQETLGRSYNVPDDIDEDDLMGELDALDPLI

SEQ ID NO: 253781 - protein, 68 aa, Glycine max
  unsure (1)..(68): unsure at all Xaa locations
  Clone ID: PAT_MRT3847_71188C.1.pep
ELSPGPLPSALQVFTLGSLLPASLPRAPWSKELXAKXFSPGSLXTKTLNAVELPSWEKEEEVWVSDKD

SEQ ID NO: 253782 - protein, 425 aa, Glycine max
  unsure (1)..(425): unsure at all Xaa locations
  Clone ID: PAT_MRT3847_71189C.1.pep
MAAVAARSTGSVGVGAVIFISVALTTYFISKKKKKKKKESRKKKKGLVDAIGNTPLIRINSLSAATGCQILGKCEFLNPGGSVKDRVAVQIIQEALESGQLRPGGIVTEGSAGSTAISIATVAPAYGCRTHVVIPDDAAIEKSQILEALGATVERVRPVSITHKDHFVXIARRRASEANEFALKRTNSQQLNGKEDTEKINGYESDGCSYSSLFPEDCQGGFFADQFENLANFRAHYEGTGPEIWXQTNGKLDAFVAAAGTGGTVAGVSKFLQEKNPNIKCFLLDPPGSGLFNKVTRGVMYTKEEAEGRRLKNPFDTITEGIGINRITRNFAMAKLDGAFRGTDREAVEMSRFLLKNDGLFLGSSSAMNCVGAVRVAQAIGTGHTIVTILCDSGMRHLSKFYDAEYLSQLGLTPKAIGLEFLGVK

SEQ ID NO: 253783 - protein, 67 aa, Glycine max
  Clone ID: PAT_MRT3847_7118C.1.pep
SIMVRQTTHTSCIYIWDANLITQTGTTRIYVYNYYVFIHQQKWVVGALSTSEEGHELAGPLREPGLL

SEQ ID NO: 253784 - protein, 136 aa, Glycine max
  unsure (1)..(136): unsure at all Xaa locations
  Clone ID: PAT_MRT3847_71190C.1.pep
QSAQRSRVRKLQYISELERSGITLQSEVSALSPRVAFLDHQRLILNVPKGAYDHXIEIVGIYXFLQDAHQEALKKEIERLRQIYHQQNLQKMNNNLQQTTPTSQPQQQPMQLHHHQQPIAVSQPLGCKDNKEQLLS

SEQ ID NO: 253785 - protein, 58 aa, Glycine max
  Clone ID: PAT_MRT3847_71191C.1.pep
SPNLSDILNNLFIIFFAMHIYLIYSYSSKNPLIQCLCPKLKFGVNFLPYFLNQKFYFR

SEQ ID NO: 253786 - protein, 250 aa, Glycine max
  unsure (1)..(250): unsure at all Xaa locations
  Clone ID: PAT_MRT3847_71192C.1.pep
MASSSQSRCGSGSAASRLRNAASTFCSDSQPLLADIRKTVLMMKDIAVQLEKDNLPDKAKELEDAVIELVGLSELSVQFSSAVQAFANAYQPKEEFTNFNTLFEDELSRFKANQSSDVPKNPVVRQFKEAVWNVHHAGQPMPGEEQEDIVMTSIQSNILNITCPLSGKPVTELAEPVRSMECRHIYEKKVIMQYLKSKQHQCPISGCPKILQADKLVXDPLXMIEMXENAQMNRETDVEDIPCLMKDSDC

SEQ ID NO: 253787 - protein, 138 aa, Glycine max
  Clone ID: PAT_MRT3847_71193C.1.pep
GPSNQPFRRKFVALEGRHTSALAFRLNNAWQSCPHNNVTGIAFEDVPITSRVFFGEPGPWFNQLDMDGDKTSVFHDVDGSVSEYPGSYLTKNDNWLVRHPDCINVPDWRGAICSGCYAQMYIQAYKTSNLRMKIIKND

SEQ ID NO: 253788 - protein, 51 aa, Glycine max
  Clone ID: PAT_MRT3847_71194C.1.pep
HDTPMDTTHLRCRKTLSTLTRPYPNLYNTGIHILKSKLLHLLQLTILKSST

SEQ ID NO: 253789 - protein, 51 aa, Glycine max
  Clone ID: PAT_MRT3847_71195C.1.pep
LIYSFYRDIWHYLLMLPSSVYSWMTYERRWSGVCLKGVVISKWCIRMVNCV

SEQ ID NO: 253790 - protein, 60 aa, Glycine max
  Clone ID: PAT_MRT3847_71196C.1.pep
GRGGCMLTSGGSPMRALLAEQDQLSPKVTWDNTKMPWATYRRRIILEVFSQRGHYTGWGE

SEQ ID NO: 253791 - protein, 89 aa, Glycine max
  unsure (1)..(89): unsure at all Xaa locations
  Clone ID: PAT_MRT3847_71197C.1.pep
MSYVQNPTQQTSTNNLMVQQLDGTINEXLGANAILAMSPAVCKVGVDVLKVPLYKVFIHELWYLIISNETCSLNPFCVIQVVLKININM

SEQ ID NO: 253792 - protein, 66 aa, Glycine max
  unsure (1)..(66): unsure at all Xaa locations
  Clone ID: PAT_MRT3847_71198C.1.pep
XXXAESSTSSXSXHXXLXXIXVXXXXLLGXXXPECXFXXYESXXXIXXFFTPXARXEXRAXVRVXR

SEQ ID NO: 253793 - protein, 52 aa, Glycine max
  Clone ID: PAT_MRT3847_71199C.1.pep
FKYKHTKWGGGYKCFANFSHLEDCGLVGHEAHALQLSNVVESDDTYEAARVG

SEQ ID NO: 253794 - protein, 112 aa, Glycine max
  unsure (1)..(112): unsure at all Xaa locations
  Clone ID: PAT_MRT3847_7119C.1.pep
LNXIEXXRPKGFNYGXGDSDSNLIXRDLRXRRFIEKXRRTPSRGXPRRXXXXCRAYXXLARHXVHIISTRXTIEKEFXQKANISXXSIIIXTKSPNLNXDSGSXTEXSEGLT

SEQ ID NO: 253795 - protein, 39 aa, Glycine max
  Clone ID: PAT_MRT3847_711C.1.pep
MGFYLLIDCSLHVLLGVDHQFSILKLRLAEMLIIIYTYT

SEQ ID NO: 253796 - protein, 55 aa, Glycine max
  Clone ID: PAT_MRT3847_71200C.1.pep
KSVSVSAETHLNRHHFCLDQASQSTSSHLRSVGLQYGPIPSWFCQNTALGSSYAW

SEQ ID NO: 253797 - protein, 51 aa, Glycine max
  Clone ID: PAT_MRT3847_71201C.1.pep
MHEHAPLSMSNLGLNFHTELILYNEQVCTLGAVLQYLYIESFSYRSWLRQL

SEQ ID NO: 253798 - protein, 170 aa, Glycine max
  Clone ID: PAT_MRT3847_71202C.1.pep
MDQIFNKVGSYWFNQKASSQLNSVGDDINSMTNSIEGGTKWLVNKIKGKMQKALPELLKEYDLPIGIFPRDATNYEFNEETGKLVVFIPQVCEVGYKDSSVLRFFTTVTGYMEKGKLADIEGMKTKVLIWVNVTTILSEGSKLYVTAGMKKRRSREAYEVTRDGVCVDKF

SEQ ID NO: 253799 - protein, 195 aa, Glycine max
  unsure (1)..(195): unsure at all Xaa locations
  Clone ID: PAT_MRT3847_71203C.1.pep
GSQGLKGSISDQISLLSDLXNLSSNLFVGEIPSGLGQKSLIHLDLSNNQLTGPIPDSIASSSLQLVLLNGNLLEGRVPEQLYSIGVHGGAIDLSGNKGLCGVPSLPDCPMFWENGKLSTQGKIAIGLSCLFVFCVILLLVYIYIRRRRNDYDFALPHELTSLAAKRNRYQRQKSLMVLEMESQHAKGLPSHFTTQ

SEQ ID NO: 253800 - protein, 170 aa, Glycine max
  unsure (1)..(170): unsure at all Xaa locations
  Clone ID: PAT_MRT3847_71204C.1.pep
MDQIFNKVGSYWFNQKASSQLNSVGDDINSMTXSIEGGTKWLVNKIKGKMQKALPELLKEYDLPIGIFPRDATNYEFNEETGKLVVYIPQVCEVGYKDSSVLRFFTTVTGYLEKGKLADIEGMKTKVLIWVKVTTILSEGSKLYVTAGMKKTRSREAYEVTRDGVCIDKF

SEQ ID NO: 253801 - protein, 94 aa, Glycine max
  Clone ID: PAT_MRT3847_71205C.1.pep
VRFGLRFGVAVLAWCSARWGPPSSVFFLSPFLCSGFCVGAPLCASSGARFFALPRLSCYAFLLFSRFRPLSPCSCTHLAFLPLSFHVSSPFCLS

SEQ ID NO: 253802 - protein, 63 aa, Glycine max
  Clone ID: PAT_MRT3847_71206C.1.pep
PTYSLTLLLTTIGAVCIIFFTFLYSSTFLNCNSLFLFIRNTFIQKIFLLQFHHNLFLRPFYYL

SEQ ID NO: 253803 - protein, 121 aa, Glycine max
  Clone ID: PAT_MRT3847_71207C.1.pep
RVFSGICIPNRDGQISETPLRISSADKHAPNESFPCNTTSKEVIKNRSAATFSNTGHALRVHHGDDICQPSELLDVKHHFSSEHAATVDLFQLSSHLQRVEQQRNSVLVKWENEDYCFPTV

SEQ ID NO: 253804 - protein, 114 aa, Glycine max
  unsure (1)..(114): unsure at all Xaa locations
  Clone ID: PAT_MRT3847_71208C.1.pep
TKGGEQKNQQSGRPKKKPVSRSVKAGLQFPVGRIGRFLKKGRFSQRVGTGAPVYLGAVLESLSAKVLXLAGNASLDNKKNRIFPRPLLFALRNXKXLGKLLAGVPIAQWWLASN

SEQ ID NO: 253805 - protein, 57 aa, Glycine max
  Clone ID: PAT_MRT3847_71209C.1.pep
AGIYLPLTKQLALCTFRAFNVSHNSKLSYIFACNPLFNTETNNHIIIFLVLATDKNG

SEQ ID NO: 253806 - protein, 46 aa, Glycine max
  unsure (1)..(46): unsure at all Xaa locations
  Clone ID: PAT_MRT3847_7120C.1.pep
SLCYITRHXSXPLLXXHXLPWVLGPAXSXXTCIXLGLSAQHXWHXX

SEQ ID NO: 253807 - protein, 69 aa, Glycine max
  Clone ID: PAT_MRT3847_71210C.1.pep
DGHDHLCTQRISAGIKVAYHQGAVYGKSGILGIAFQTLRQNITLKLFYLLKRIFISLNYVSRPMGLEHL

SEQ ID NO: 253808 - protein, 36 aa, Glycine max
  Clone ID: PAT_MRT3847_71211C.1.pep
DTLQGQRNSYLGRLAIQLNLEPSSHYFFVSEVRYFF

SEQ ID NO: 253809 - protein, 53 aa, Glycine max
  Clone ID: PAT_MRT3847_71212C.1.pep
QSEPLLFCKKKKKKKKKKKPKKKKKKKKKKKKKKKKKKKKKKKKKKKKKKKKK

SEQ ID NO: 253810 - protein, 225 aa, Glycine max
  unsure (1)..(225): unsure at all Xaa locations
  Clone ID: PAT_MRT3847_71213C.1.pep
MGSKGRMPPPPHLRRPHPPGPAAMPHPLAGPFDLLPPPQVMEQKLASQHAEMQRLATENQRLAATHGVLRQELAAAQHELQMLHAHVSALKGEREQQIRVQLEKISKMEAEAKGAESVKMELQQARGEAQNLVVSRDELVSKAQHLTQELQRVHADAVQIPALISELECLRQEYQHCRATFDYEKXLYNDHLESLQVMEKNYVSMSREVEKLRAELTNTANVDRR

SEQ ID NO: 253811 - protein, 189 aa, Glycine max
  Clone ID: PAT_MRT3847_71214C.1.pep
MGSKGRMPPPPHLRRPHPPGPAAMPHPLAGPFDLLPPPQVMEQKLASQHAEMQRLATENQRLAATHGVLRQELAAAQHELQMLHAHVSALKGEREQQIRVQLEKISKMEAEAKGAESVKMELQQARGEAQNLVVSRDELVSKAQHLTQELQRVHADAVQIPALISELECLRQEYQHCRATFDYEKNYTM

SEQ ID NO: 253812 - protein, 79 aa, Glycine max
  Clone ID: PAT_MRT3847_71215C.1.pep
SIPTIGDKKPPTHTYNFKIPWEKKVLKGLDQGHPLLVIYNFSREYTFGQTALGKYAYPKQGNHGIQTVFYQHIYRLGCT

SEQ ID NO: 253813 - protein, 93 aa, Glycine max
  Clone ID: PAT_MRT3847_71216C.1.pep
RFFIPVSLSLFLTLSPVEKKVLNSCLSCINISKCSSYPWKKCDLGGLSDWGIFWGFGLNPKSPFFFSLLLMDGLYYLLISLDPFLVMAILLIL

SEQ ID NO: 253814 - protein, 57 aa, Glycine max
  Clone ID: PAT_MRT3847_71217C.1.pep
AIRSTARDNIPLYGFGEKWDNPMPALFIVPPAGKFVNAAIMSAVVGPCLSRPSHLPK

SEQ ID NO: 253815 - protein, 140 aa, Glycine max
  Clone ID: PAT_MRT3847_71218C.1.pep
GSRCDTKNGPATTQFLETSSADTKDNVYSFGIVLFELITGRIPLAGNNELLADWAAEYVRWGKSLRDVVDPRLKSLQEEEIEEWSEVIRNCVQPDPEKRPTMKEVTSRLKEITAMGPDGANPKASPLWWAEMAITSTDSS

SEQ ID NO: 253816 - protein, 49 aa, Glycine max
  Clone ID: PAT_MRT3847_71219C.1.pep
KRPPCPKPGGPPRGPPDTGGPSPGGTAPPKEPGGTIWKPDSHRTAPEGG

SEQ ID NO: 253817 - protein, 47 aa, Glycine max
  Clone ID: PAT_MRT3847_7121C.1.pep
ILKGSPTSFISPYLSPSYQVDPICAKEVISAISSAAIIFSIYPQKIE

SEQ ID NO: 253818 - protein, 65 aa, Glycine max
  Clone ID: PAT_MRT3847_71220C.1.pep
KWVCDRDFSHLCRNLSPQCMFGGRGWVSGLKGKIKKGGFSVVKLYLRWMFYCIFKALFLCGGLVL

SEQ ID NO: 253819 - protein, 58 aa, Glycine max
  Clone ID: PAT_MRT3847_71221C.1.pep
ESYRRLRRRILQFPWSLSLPRKRSGSCGLVHQGMLVAINVGFFYELLSLLLWVGCFSD

SEQ ID NO: 253820 - protein, 149 aa, Glycine max
  unsure (1)..(149): unsure at all Xaa locations
  Clone ID: PAT_MRT3847_71222C.1.pep
KRHELXWKLDKYNGFFPIKWHIIKDVPNNQFVHIILPSNENKPVTYTRDTQEIGLKEGLEMLNIFRSYTAKTSLLDDFDFYERREKLFRSQRSTKHKHARPEQEVYGNDNYQNTVKAREKKMEMQSSGTKQGTLIKHTKNLSLNNSGFR

SEQ ID NO: 253821 - protein, 96 aa, Glycine max
  Clone ID: PAT_MRT3847_71223C.1.pep
LLSVYLNFTKRESPSFPNTSKRIWLKPEPSSPTSFIYLYFLGAATSGVFLLPRRPRLNLNLHARKRNRKGKRNGLSKENTSKRRNDRSCLCCPLTF

SEQ ID NO: 253822 - protein, 81 aa, Glycine max
  Clone ID: PAT_MRT3847_71224C.1.pep
SCVSPQLPPQPPNTRKHFLMGLLSKSKSTMPGTRRESQFLKLVHPGGFVELHSNPIIASQVMNKNPRHCVTRPDFFHFLGL

SEQ ID NO: 253823 - protein, 25 aa, Glycine max
  Clone ID: PAT_MRT3847_71225C.1.pep
AIHWYKFSIVIDLGPYSPCLPNPGP

SEQ ID NO: 253824 - protein, 105 aa, Glycine max
  Clone ID: PAT_MRT3847_71226C.1.pep
IIFQEKIVYDLPIMNILDGVCDTCEIGKKHRESFPTGKSWRMKKLLKIVHLDLCTVEIPTHGDNNYFITFIDDFSKKMWVYFLKQKSKTCNAFKMFKAFAEKQNG

SEQ ID NO: 253825 - protein, 40 aa, Glycine max
  Clone ID: PAT_MRT3847_71227C.1.pep
PLTTKLFFIPKRKFFKQYTSPHILTYIKHKTELKKKHYFH

SEQ ID NO: 253826 - protein, 30 aa, Glycine max
  Clone ID: PAT_MRT3847_71228C.1.pep
TPHDNRTMTIWHGHWESLEKARRHSRYVAP

SEQ ID NO: 253827 - protein, 66 aa, Glycine max
  Clone ID: PAT_MRT3847_71229C.1.pep
HGIKGLRRSLLNLIHSAVKNQGCFALVKKIRQLMALGDHVHCNHIRREANQVGDFLIVNSGLLRVY

SEQ ID NO: 253828 - protein, 55 aa, Glycine max
  Clone ID: PAT_MRT3847_7122C.1.pep
VRAYASSTIPDIYTTSSHDSEVWNTGCSKTMTMGFNSNPCSDARSLEYFKRTGFH

SEQ ID NO: 253829 - protein, 201 aa, Glycine max
  unsure (1)..(201): unsure at all Xaa locations
  Clone ID: PAT_MRT3847_71230C.1.pep
MQQGDYTSAPSPYYQFPHLQNPNPNPNPNPDPHPNNPYASAPPFTPNYAPSDYTPYPSYPQNPDPSPPTAPSFPPSSSNPNLPPPFNPPFESNPPYQQQQPYFSPYDQHQTPPNPNSTPSSYNPVPSPYSYSGPSSVPPIPTYEPAYEAPVRPDQGGGYFDDRYRAGFTRSHSDLGSDYYGKSGGGAXDGYGDGVYAYERG

SEQ ID NO: 253830 - protein, 59 aa, Glycine max
  Clone ID: PAT_MRT3847_71231C.1.pep
KKKKKNFKKKFKKKKKKKKKKKKKKKKKKKKKKIKKKKKKKKKLGGPDKKETKIKGGGL

SEQ ID NO: 253831 - protein, 137 aa, Glycine max
  Clone ID: PAT_MRT3847_71232C.1.pep
GESQHDDTDAEEQIISAFQNITASTAASDEELLNQLEKLELEKHDDILNIHVKENQEATTSIDVTEGEKKVVLVHAEESAGAVTASYNLEKHPLYPPGRIMHIVPAPSNSSENSNSDDYDPDEKYLYLYETPKQLYG

SEQ ID NO: 253832 - protein, 79 aa, Glycine max
  unsure (1)..(79): unsure at all Xaa locations
  Clone ID: PAT_MRT3847_71233C.1.pep
XAYXSSEFGXSGXXXXGXXXXXXXLIKXAXHXPKARXXFLXSTXLXXXXHXTXXIXKRXXXDXASXXPPXEPXKVXQAX

SEQ ID NO: 253833 - protein, 143 aa, Glycine max
  Clone ID: PAT_MRT3847_71234C.1.pep
FGATDFVNPTKLGNQSVQEKLIEMTDGGCDYTFDCTGNVNVMRAALEACHKGWGESIIIGVAAAGQEIATRPFQLVTGRVWKGCAFGGVKGRTQLPGLVADYMNGDLKVDEFITHRQPLAKINQAFSDMKAGDCIRCVVDMRQ

SEQ ID NO: 253834 - protein, 128 aa, Glycine max
  Clone ID: PAT_MRT3847_71235C.1.pep
GWGNELGLVGVFDPTVTFIWFPKISRVIKALSLRLFICNLCREKVRVPVTKPYVSFIGKRNRTASPIITWNSKSSDKGPNGTALGTYASATVGVDSDYFCATGITFEVRTHTIFGTLDSLHSLFTHST

SEQ ID NO: 253835 - protein, 68 aa, Glycine max
  Clone ID: PAT_MRT3847_71236C.1.pep
NVKIFLCVFRPPTIMCFNANNTFLYRCPQSHGVAAVSNGAFRLRLSVRKRCGPGAVPPVRGCIPSPLS

SEQ ID NO: 253836 - protein, 332 aa, Glycine max
  unsure (1)..(332): unsure at all Xaa locations
  Clone ID: PAT_MRT3847_71237C.1.pep
MGAGEESTAKSSKVSSAAQQETPTALAYPDWSSSMQAYYAPGGTPPPFFASTVASPTPHPYLWGSQHPLMPPYGTPVPYPAIYPXPGSIYAHPSMAVNPSIVQQSTEIEGKGADGKDRDLSKKLKGTSANTGSKAEESGKAGSGSGNDGISQSGESGSEGSSNASDENTNQQESAAKKKGSFDLMLGDGANAKHNSXGAIYQSSVPGKPVCXMPPTNLNIIRDXLKNISSGGCECTKMRXIQSGARGAALGDXRVHEDELQKSKRSHXSNSESGTESXIRQPGIEGXSYRIESQVDENETLRDELQKLSEECEKLTSENNSINSEKEELCGP

SEQ ID NO: 253837 - protein, 80 aa, Glycine max
  Clone ID: PAT_MRT3847_71238C.1.pep
VIGVLNSRVFLNMMGPLPILLLMLVLINHWNRGTGFQATWKLILIGLMIILVNFIGVEILQKLPQDIKILYINQVVIHFT

SEQ ID NO: 253838 - protein, 89 aa, Glycine max
  unsure (1)..(89): unsure at all Xaa locations
  Clone ID: PAT_MRT3847_71239C.1.pep
MGAGEESTAKSSKSSSSAQDTPTAPAYPDWSSSMQAYYAPGATPPPFFATTVASPTPHPYLWGGQHPLMPPYGTSVPYPAIYPXGSIYA

SEQ ID NO: 253839 - protein, 50 aa, Glycine max
  Clone ID: PAT_MRT3847_7123C.1.pep
KRILNLALGSIKIIHDLEKTRFQMKGMEESSFLLLLFRLDTQKYNIISYD

SEQ ID NO: 253840 - protein, 725 aa, Glycine max
  unsure (1)..(725): unsure at all Xaa locations
  Clone ID: PAT_MRT3847_71240C.1.pep
MGSSRGHTLMEVGPDGVAVITIVNPPVNSLSFDVLRSLKESFDQAIQRDDVKAIVVTGAKGKFSGGFDISAFGGIQEAKERPKPGWISVEIITDTIEAARKPSVAAIDGLALGGGLEXAMACNARLSTPTAQLGLPELQLGIIPGFGGTQRLPRLVGLTKGLEMILASKPVKGKEAFSLGLVDGLVSPNDLVNTARQWALDMLGHRRPWITSLYKTEKLEPLGEAREILKFARAQVRKRAPNLQHPLVCIDVIEVXGIVAGPRAGLWKEAEAFEGLVKSDTCKSLVHVFFSQRGTSKVPGVTDCGLAPRHVKKVAIIGGGLMGSGIATALILSSYPIILKEVNEKFLDAGINRIKANLQSRVKKGKLTKENFENTVSLLKGSLDYESFRDVDMVIEAVIENISLKQQIFSDLEKYCPPHCILASNTSTIDLNLIGEKTKSQDRIVGAHFFSPAHVMPLLEIVRTKQTSPQVIVDVLDISKKIKKTPVVVGNCTGFAVNRMFFPYTQAGLLLVERGADVYQIDRIITKFGMPMGPFRLADLVGFGVAIATGTQFIQNFPERTYKSMLIPLLQEDNRAGETTRKGFYLYDDKRKASPDPELKNYIEKARSISGVSVDPKLAKLQEKDIIEMIFFPVVNEACRVLDEGIAVKAADLDISAIMGMGFPPYRGGIIFWADSLGSKYIYSRLEKWSELYGEFFKPCAYLAARAAKGIPLSASLEQQAKSRM

SEQ ID NO: 253841 - protein, 61 aa, Glycine max
  Clone ID: PAT_MRT3847_71241C.1.pep
HKEDLHELLPQSTFSRATHNGSQNFRLCGQRERLHSHLSVAEALPKHLDYPICHLDAVYPS

SEQ ID NO: 253842 - protein, 59 aa, Glycine max
  Clone ID: PAT_MRT3847_71242C.1.pep
IIRQDHKDRLDYFIRIACITIQRLHTFRNSELLDEDRNGQILINLKNTRNLNCPIFNQR

SEQ ID NO: 253843 - protein, 85 aa, Glycine max
  Clone ID: PAT_MRT3847_71243C.1.pep
GSVQIPCSYPMYKVSIVRLWPLKKMAVYIVVLSAASPPVGTSHSLTEDGVYESLGRVWQSTNVVDGIPPLVLSVPLQTRRGRVGR

SEQ ID NO: 253844 - protein, 64 aa, Glycine max
  Clone ID: PAT_MRT3847_71244C.1.pep
KNNALSRVKTRFLHVFKKTTPLQDFYRGSPPPNQTKALKKSISLPRLMKRGVSQLYMFERLDRL

SEQ ID NO: 253845 - protein, 74 aa, Glycine max
  Clone ID: PAT_MRT3847_71245C.1.pep
HPPSKSHLKCLKPNLKVTLEESTYRLFDSHGNPLNFLKLLSEIEFSLEILIITCTIICMFTEILLSKLCDIHDQ

SEQ ID NO: 253846 - protein, 174 aa, Glycine max
  Clone ID: PAT_MRT3847_71246C.1.pep
LKKPYSLDASFLSDIENDPFENLQETHDIFVNQMGIKPTRPELELLRRLAELIGTRAARLSACGVAAICKKKGYKTAHVGADGSVFNKYPHFKARGAQALKEILDWEGGRDGKALGKGHDPIEILPAEDGSGVGAALIAALTLKRVQEGQVAGIRDPEGMLKGTAAAKSSTNQV

SEQ ID NO: 253847 - protein, 59 aa, Glycine max
  unsure (1)..(59): unsure at all Xaa locations
  Clone ID: PAT_MRT3847_71247C.1.pep
ERERTSLEFFFFFFMXXLIYFTKERLTKASVTMDVFRGVNISRRFLHKTYLSLSHTHMI

SEQ ID NO: 253848 - protein, 69 aa, Glycine max
  Clone ID: PAT_MRT3847_71248C.1.pep
HLQIKNYDCISIELYLGLTLFFNSLNLLQANICHTYPTSKTFQQEVHSCLKWHGPWYLVLHILQLLPHE

SEQ ID NO: 253849 - protein, 109 aa, Glycine max
  Clone ID: PAT_MRT3847_71249C.1.pep
TNPPWHHLLQYRQQLPDLAQRSLIKAQLRPRRWWLRRQRKRSLQKSHQRIKTEQVKDEALEPIESTDTDSAAAPPPSATEEENKPACSVETPIEVPVETTATYTHGQCE

SEQ ID NO: 253850 - protein, 130 aa, Glycine max
  unsure (1)..(130): unsure at all Xaa locations
  Clone ID: PAT_MRT3847_7124C.1.pep
KSNVFYTFKFFNWAVPFYIGRAPSPSLSPNLSSDLTTRQVADNLPSPEDTVCLLKSTTIXNVRLYCAVPAIIKALSNSSILIFICPFNCDIVMFAXDSNAVTXLFYTNVLFFYPFSNITSDHPCKPIFFT

SEQ ID NO: 253851 - protein, 174 aa, Glycine max
  unsure (1)..(174): unsure at all Xaa locations
  Clone ID: PAT_MRT3847_71250C.1.pep
LFFSPLVPSVNRPGAGLLVPFLGLKSLVGFPSXKPTINFPSFVVTGGRVHCLRVCPLFGRHRFGTFSYLPNLADPHWTKDLNYLLRKAWFPCSKSQLDPGLLSRELIRYPESSYGRYCSFXNLPMXACPDALQVWKELHKANTVYPTGSFPMIGFDTVRQVRLFSVIASQPPGF

SEQ ID NO: 253852 - protein, 56 aa, Glycine max
  Clone ID: PAT_MRT3847_71251C.1.pep
LSSLQGPTMSKGAPTRPMSIMKQRLHYLDACQHPHHRPYSFSFCFSSLLKSTSLLF

SEQ ID NO: 253853 - protein, 82 aa, Glycine max
  unsure (1)..(82): unsure at all Xaa locations
  Clone ID: PAT_MRT3847_71252C.1.pep
GIINLYSLIGSCLVGRTCYXIGRRYTKDDEGAIXFAGALLMGLSINYTFLMFGRLGAGIGIGYALMIAHVYTVEVYPAYSRG

SEQ ID NO: 253854 - protein, 161 aa, Glycine max
  Clone ID: PAT_MRT3847_71253C.1.pep
MTNTIVGLKPSLSLSLSIPLSHSFPFSSPLSLKPHPLFLSPKPHPFLKFANNNNNNELREQGNTQQQQQQKKPPNGSKEEEEEEKVNDWSNQRRTILGFNWRTLLDPDPDNVLALGLTGILTWASVQVLWQLLFISLAILTAAIKYSFIAALLVFILIVLL

SEQ ID NO: 253855 - protein, 70 aa, Glycine max
  Clone ID: PAT_MRT3847_71254C.1.pep
TIHAGDFMRRYCTHPCMNNQAGKADYEAVHKSEDFDIARSAIQIAVAGLYIITQLYDDENPIKDISLATA

SEQ ID NO: 253856 - protein, 52 aa, Glycine max
  Clone ID: PAT_MRT3847_71255C.1.pep
MKLVWSPESALQAYIDTVKSCEKFKETGVPELLSDMAAGWNTKFIVESWSYG

SEQ ID NO: 253857 - protein, 75 aa, Glycine max
  Clone ID: PAT_MRT3847_71256C.1.pep
LKCEPVKPWARSRLLFSLLNQSSATTIEEDLSAIDAIAAMDNKNIRLLLSGAACTLVHCRQSTTRSLVFFSDIWA

SEQ ID NO: 253858 - protein, 57 aa, Glycine max
  unsure (1)..(57): unsure at all Xaa locations
  Clone ID: PAT_MRT3847_71257C.1.pep
TFDVSLLTIDEGIFYVKATAGXTSLGXXDFENRXXYHFFQEFKRKIKMDISGNPRAL

SEQ ID NO: 253859 - protein, 126 aa, Glycine max
  unsure (1)..(126): unsure at all Xaa locations
  Clone ID: PAT_MRT3847_71258C.1.pep
LNINKLFGQNSAGLYNAITLSSFSEALTNLSGSLPXNGNSLYCTCADGNPLLHSCNEAFLAAPSADQGQADNSRSYTAAPPRXTGKKGGNGFNSIEIASITCALAIVSDILALIVLYIYTRNEESY

SEQ ID NO: 253860 - protein, 100 aa, Glycine max
  Clone ID: PAT_MRT3847_71259C.1.pep
MTTLDSDVTRVPAGEPSIIAGPSSSTKMPKRFQINNWGGVSLRAWDIVVDNCSICRCQIMDLCHECRAKYSTSISHEFSVTCRLCHQALQLYCISLWANT

SEQ ID NO: 253861 - protein, 79 aa, Glycine max
  Clone ID: PAT_MRT3847_7125C.1.pep
KKKNPGRSTLLVPWLVARLHWWRRHWCNIGAGVTSTLGFRRWRRPPRHFSLCGFLFQRPSRGVLHRRQIETSSILYNSL

SEQ ID NO: 253862 - protein, 87 aa, Glycine max
  unsure (1)..(87): unsure at all Xaa locations
  Clone ID: PAT_MRT3847_71260C.1.pep
MVADHYSPPLFSVAPMMDWTDHHYRTLARLISKHAWLYTEMLAAETIVYQKGNLXLAFSPDQHPIVLXIGGSYFLYLAKATELANAF

SEQ ID NO: 253863 - protein, 108 aa, Glycine max
  Clone ID: PAT_MRT3847_71261C.1.pep
RKSTLKHLPTNAARLYDPTTLGANIPHHHRPLTAALHHIMKYHTSTLLLIIKLPFLNMLRYITHHDITALPFQIHAELASHEDAYSYLVGLFYDTNLLAIHSKRVTII

SEQ ID NO: 253864 - protein, 183 aa, Glycine max
  Clone ID: PAT_MRT3847_71262C.1.pep
PDDARQVADYIWANFLGGKSNSRPFGNAILDGVDFNIESGELHYAALAYRLHDHYAGSKKKFYLTASPQCSFQNNLLHGALTAGLFDHVWIQFYNNPQCEFTSKDPTGFKSAWNQWTTSINAGKFFVGLPSSHAAARTGFVSSHALINHLLPIVRSPKYGGVMLWDRYHDLQSRYSGKISGSV

SEQ ID NO: 253865 - protein, 397 aa, Glycine max
  Clone ID: PAT_MRT3847_71263C.1.pep
MCSSMTKVTVGIEAATATSLVARINGRPVLQPTCNRFPNLERRNSIKKLSPKSPSPPSPPLPSKTSLTPPVSPKSKSPRPPPIKRGNENNGLNSSSEKIVTPRNTIKTPTLERKKSKSFKEGSCVSASIEASLSYSSSLITDSPGSIAAVRREQMALQQAQRKMKIAHYGRSKSAKFERVVPLDPSNTSLASKPTEEEKRCSFITANSDPIYIAYHDEEWGVPVHDDKMLFELLVLSGAQVGSDWTSTLKKRLDFRAAFSEFDAETVANLTDKQMMSISSEYGIDISRVRGVVDNANQILEIKKDFGSFDKYIWGFVNHKPISTQYKFGHKIPVKTSKSESISKDMVRRGFRCVGPTVVHSFMQTSGLTNDHLITCHRHLQCTLLAARSLCTIEPSQ

SEQ ID NO: 253866 - protein, 108 aa, Glycine max
  unsure (1)..(108): unsure at all Xaa locations
  Clone ID: PAT_MRT3847_71264C.1.pep
MAPLFISMQMLLLVFTCILLHVTCTTYHDSTPKTVPSTNSSKWVGPIGHRVITVDVNGGAHFRSVKAAVNAVPDHNTMNALXTISAGYYIEXVVVPVTKPYITFQGAG

SEQ ID NO: 253867 - protein, 85 aa, Glycine max
  Clone ID: PAT_MRT3847_71265C.1.pep
LTKDEWKKDQTQQQLSVPDVLHIYKALSFIFCKLTITSTGLSLVFVCLLFCLCDKLVRFYDNAFVHHYKVLPLKTLCMAVVSLFA

SEQ ID NO: 253868 - protein, 102 aa, Glycine max
  Clone ID: PAT_MRT3847_71266C.1.pep
LSVMTTNQRTRGRRQLDLAPGMPQEAENLLCTAPKEPRESHDQPAKKLDNYVNQQSKVSDAAHKNSKTDNGSELAEREPSEDPQSTTRHRLVTKQTPAGTLR

SEQ ID NO: 253869 - protein, 52 aa, Glycine max
  Clone ID: PAT_MRT3847_71267C.1.pep
RDILLFGYSNTTKILVEGGYWKTTGGDLALTKSIDPFILEYGLKPRRGQHES

SEQ ID NO: 253870 - protein, 116 aa, Glycine max
  Clone ID: PAT_MRT3847_71268C.1.pep
MASSMISSPAATTDNRAGAAMGASFTGLKPMAGYPTRKTSSDITYIASNGGRVHCLLVWPPGGLKKYVTLSYLPDLDDAQLAKAVEYLITMGRIPCSAFEMERCFQHREHTREPGY

SEQ ID NO: 253871 - protein, 80 aa, Glycine max
  Clone ID: PAT_MRT3847_71269C.1.pep
CLLYSTVLSINRDSRGPHQHPRHRMYHSYLPVENSPFIIWAAAEINENSHLRSIYTRYPVGGQLLTGRLPEMNRLPSDNR

SEQ ID NO: 253872 - protein, 49 aa, Glycine max
  unsure (1)..(49): unsure at all Xaa locations
  Clone ID: PAT_MRT3847_7126C.1.pep
HSLLTGQTALKQVXEHIRKTEGADEGRTNMLRTQNSASQSIWNGPDRAT

SEQ ID NO: 253873 - protein, 111 aa, Glycine max
  unsure (1)..(111): unsure at all Xaa locations
  Clone ID: PAT_MRT3847_71270C.1.pep
SFRPVARSQGRKQFYMKLEEKMHAXEAVMNQMQAISQEKTEADFKKLRKSLNFKATPMPSFYRTPSPSQTHGNKVHTFRVFSLFLFVISASINMGFIVNELCLLYDIHFSI

SEQ ID NO: 253874 - protein, 114 aa, Glycine max
  unsure (1)..(114): unsure at all Xaa locations
  Clone ID: PAT_MRT3847_71271C.1.pep
QSALDSLTQALSSYIRRTGHGIVMDEEKDSDMVSSLPEFNASLDALWDYIFFVNEAFSISIKDAFEYLITLRQKXPVELIAKFLADKLHAGNKGTSDKELEATPDTILVLFTFS

SEQ ID NO: 253875 - protein, 200 aa, Glycine max
  Clone ID: PAT_MRT3847_71272C.1.pep
MGLYTSVMEEISFYTGLSPAAFFTILAMMVVVYRTVSGMFVSPEDYNKPPVVSARANSRLDESEPPREPVQLGEITDRELRAYDGSDPSKPLLMAIKGQIYDVSNGRNFYGPGGPYAMFAGKECSRALALLSFKPDDINGNLEGLGEEELTILEDWEFKFIEKYPKVGQLIAEQRTRQNEFKEQTQDNLDNPNECKEEEK

SEQ ID NO: 253876 - protein, 145 aa, Glycine max
  unsure (1)..(145): unsure at all Xaa locations
  Clone ID: PAT_MRT3847_71273C.1.pep
LYTETKGKRPKAAGENHKEENGKQHEAYLGKDRQREATEPRGAQGTPQQQTPRGTGPKAELKKPNTPEEPENQKAGKGTAENPTNTEPXPTKRPDQQAHKETAGTTKEGGNKETSSGHGQSKDKQHRHHGNKPAETGQATTQPPK

SEQ ID NO: 253877 - protein, 37 aa, Glycine max
  unsure (1)..(37): unsure at all Xaa locations
  Clone ID: PAT_MRT3847_71274C.1.pep
HVRELWVGYISXNGKIYKGVCVAVNNPSLVESSTEPK

SEQ ID NO: 253878 - protein, 330 aa, Glycine max
  Clone ID: PAT_MRT3847_71275C.1.pep
MATTATASASWEELTLKVKWIGNEYTVRVCADDTVGELKRRICELTNVLPLRQKLLYPKLGSKLNDDSLFLSQLPLNSSLKMTMIGTTEEDLLVDPVESPEILDDLELPKDEAVDIKDMEVNKLKLNRRIHHFKIELQNSCRQGKKLLVLDIDYTLFDHRSTAENPLQLMRPYLHEFLTSVYSEYDIMIWSATSMKWIKVKMEQLGVLDNPNYKITALLDHMAMITVQTSSRGVFDCKPLGLIWAKFPEFYNASNTIMFDDLRRNFVMNPQNGLTIKPFRKAHANRDSDQELVKLTQYLLAIAELDDLSNLEHNNWELFTEDNAKRRRHR

SEQ ID NO: 253879 - protein, 173 aa, Glycine max
  unsure (1)..(173): unsure at all Xaa locations
  Clone ID: PAT_MRT3847_71276C.1.pep
HASENGQMCAIKEVKVVSDDQTSKECLKQLNQEINLLNQLSHPNIVQYHGSELVEESLSVYLEYVSGGSIHKLLQEYGSFKEPVIQNYTRQIVSGLAYLHGRNTVHRDIKGANILVDPNGEIKLADFGMAKHSVTXSWRAGTSHINSSASMLSFKGSPYWMAPEXCMNTNGYS

SEQ ID NO: 253880 - protein, 53 aa, Glycine max
  Clone ID: PAT_MRT3847_71277C.1.pep
KPFRKAHANRDSDQELVKLTQYFLAIAELDDLSNLEHNNWELFTEGNTKRRRH

SEQ ID NO: 253881 - protein, 211 aa, Glycine max
  Clone ID: PAT_MRT3847_71278C.1.pep
MATASASASWEELTLKVKWSGNEYTVRVCCDDTVGELKRRICELTNVLPLRQKLLYPKLASKLSDDSLFLSQLPLNSSLKMTMIGTTEEDLLVDPVESPEILDDLELPKDEAVDIKDMEVNKQKLNRRIHQFNIELQNPCRQGKKLLVLDIDYTLFDHRSTAENPLQLMRPCNFISPLFVFFFFHSIRGWSLLKITKMPFLITQVAEPWQL

SEQ ID NO: 253882 - protein, 51 aa, Glycine max
  unsure (1)..(51): unsure at all Xaa locations
  Clone ID: PAT_MRT3847_71279C.1.pep
MFGCNSLCWDSSVPEFTDPDPLPFSLPSPLPQWPQGGSFASGRICLGEIEX

SEQ ID NO: 253883 - protein, 97 aa, Glycine max
  unsure (1)..(97): unsure at all Xaa locations
  Clone ID: PAT_MRT3847_7127C.1.pep
MVEMSVQHENSDANGVSGSGSCLYDLLCSETPSLNSQVLRDRWMSSGPQKRLDNLMRQAGNKYCADCGSSDPKWXSSNNGVFICIKCSGVHRNLSVH

SEQ ID NO: 253884 - protein, 53 aa, Glycine max
  Clone ID: PAT_MRT3847_71280C.1.pep
AIKNIDGFLEKKPFIFQAVQTIIGRYLEIYFINYFISRCVNFSTLQLTIVKEG

SEQ ID NO: 253885 - protein, 211 aa, Glycine max
  unsure (1)..(211): unsure at all Xaa locations
  Clone ID: PAT_MRT3847_71281C.1.pep
MSRPTTRSKNKRQKQGDDGNGTGEIWRKIHNTGVVTEDDMNQLYMIWKPVCSGCRVNNKDNPNCFCALVPPPXGARKSGLWQKMSDVVESLGHDPTKDLRASADSPAGLTNLGATCYANCILQCLYMNKSFREGMFSVERDVLQQHPVLDQLARLFVQLHISKMAFIDSSPFVKTLELDNGVQQDSHEFLTLLLSLLERCLSHSPFCRLLA

SEQ ID NO: 253886 - protein, 59 aa, Glycine max
  Clone ID: PAT_MRT3847_71282C.1.pep
MVGKVVTGVIDGTFNAGYLLSVKVADTDAFLRGLVFVEDQVSPVNVENDVAPHVKMIER

SEQ ID NO: 253887 - protein, 53 aa, Glycine max
  Clone ID: PAT_MRT3847_71283C.1.pep
HTNSAYGKDLRCTSSTENSSHERRALLPLMGAETNAHTVGLSKWCIGHTRIIA

SEQ ID NO: 253888 - protein, 38 aa, Glycine max
  Clone ID: PAT_MRT3847_71284C.1.pep
KKNPICKKKKLDNLYHNISSKVKLFKPINVHFPRPLPQ

SEQ ID NO: 253889 - protein, 78 aa, Glycine max
  unsure (1)..(78): unsure at all Xaa locations
  Clone ID: PAT_MRT3847_71285C.1.pep
TRDYQSTRNHCTVLKSIRCARSRKSLCHPTQMSSRVSTGRCLSSSNHRSQWRTYVCLRAGGMNSDSIRVXXPATKMLS

SEQ ID NO: 253890 - protein, 93 aa, Glycine max
  Clone ID: PAT_MRT3847_71286C.1.pep
KLYTTMFVSSINICNHSHNNNPTKQKTCPTIVSNLIYIFIDLNMSQLLTLIKTIYFSCSYKFIFVYMYKHVVKMSLQIQKIGKISHITRLRTC

SEQ ID NO: 253891 - protein, 84 aa, Glycine max
  unsure (1)..(84): unsure at all Xaa locations
  Clone ID: PAT_MRT3847_71287C.1.pep
FRNQSDSDLTTWSPAGMLFQVKYTMDAVNQSSTAIGLRSXTHMVLACVNQVNSELSSLQTKIFMVYNHIRFAIGGLSVDGHVLS

SEQ ID NO: 253892 - protein, 70 aa, Glycine max
  Clone ID: PAT_MRT3847_71288C.1.pep
CFRAGIGPLPTVRDLLTLIIGCAKMFRTPSQPRWTYHAQGSPTKSSQVGAYQVTAMLLLSPNYPEGSKLI

SEQ ID NO: 253893 - protein, 50 aa, Glycine max
  Clone ID: PAT_MRT3847_71289C.1.pep
RVPSVNFLKVEIEDHPYLAKSVGVNCIPAFKLYKNGSRIREIPGYNHDVF

SEQ ID NO: 253894 - protein, 210 aa, Glycine max
  Clone ID: PAT_MRT3847_7128C.1.pep
MARFRFRRLRFLAIFVVVVVFASDELESERELSVTDLDWNLFHQDYSPPAPPPPPPHPPSVSCVDDLGGVGTLDTTCKIVNDVNLTRDVYIAGKGNFNILPGVRFLCEIPGCMVTVNVTGNFSLGSNSSIVTGAFEFESENAVFGNESVVNTTGMAGDPPPQTSGTPQGVEGGGGGHGGRGASCLVDTTKLPEDVWGGDAYSWASLQACK

SEQ ID NO: 253895 - protein, 106 aa, Glycine max
  Clone ID: PAT_MRT3847_71290C.1.pep
FEKRGDPKAPQKGGGFPQGGNLILKDPFFFPPKAFLIKSPKKKFLLRKEPKIVEIFGNQGRVLFGAPKGKKRPFKFPNPRGNRKRALPLFKKIKKSWPPSTGKKGG

SEQ ID NO: 253896 - protein, 90 aa, Glycine max
  Clone ID: PAT_MRT3847_71291C.1.pep
MARSIANAKTFSALVLDGFSNTLTRRGYSQSATRGGVASIAPKSGEDKGVSSYKVSWVPDPVTGYYKPENIKEVDVADLRATLLRKKFNN

SEQ ID NO: 253897 - protein, 58 aa, Glycine max
  Clone ID: PAT_MRT3847_71292C.1.pep
MIWKQTYSVCFCWRRRFKLALAKELSEIKTLFEEYSENEFMTPSHLKRLLLPLHFHEK

SEQ ID NO: 253898 - protein, 73 aa, Glycine max
  unsure (1)..(73): unsure at all Xaa locations
  Clone ID: PAT_MRT3847_71293C.1.pep
LIIWFLNRRGYSQSATRGGVASIAPKSGEDKGVSSYKVSWVPDPVTGYYKPENIKEVDVADLRATLLRXKFNN

SEQ ID NO: 253899 - protein, 458 aa, Glycine max
  Clone ID: PAT_MRT3847_71294C.1.pep
LDAWADAWAQMAKAPVQKFADRISKYFVPLVIIISFTTWLAWFLAGKYHAYPKSWIPSSMDSFELALQFGISVMVIACPCALGLATPTAVMVGTGVGASQGVLIKGGQALESAHKVDCIVFDKTGTLTVGKPVIVRTELLTKMVLQEFYELVAAAEVNSEHPLAKAVVEYAKRFRDEENPSWPEARDFVSITGHGVKASVHNKEIIVGNKSLFADHNIAIPDDAEYILAEAEKMAQTGIVVSINGKVAGVLAVSDPLKPGAQEVISILKSMKIKSIMVTGDNFGTASSIAREVGIENVIAEAKPDQKAEKVKDLQASGYTVAMVGDGINDSPALVAADVGMAIGAGTDIAIEAADIVLMKSNLEDVITAIDLSRKTFSRIRLNYFWALGYNLLGIPIAAGALFPSTRFRLPPWIAGAAMAASSVSVVCCSLLLKYYRRPRKLDNLEIRGIRVESSSDI

SEQ ID NO: 253900 - protein, 72 aa, Glycine max
  Clone ID: PAT_MRT3847_71295C.1.pep
NNNKKNIVLYQQPNLTSSYFLLFISSLSPTISNSSSFLLHFLYFIIHSYSNFIFHNYFPLSLVSYYSNNPYL

SEQ ID NO: 253901 - protein, 27 aa, Glycine max
  unsure (1)..(27): unsure at all Xaa locations
  Clone ID: PAT_MRT3847_71296C.1.pep
YLDNIHIXVNNYLHVNIHYYYLYELIG

SEQ ID NO: 253902 - protein, 124 aa, Glycine max
  Clone ID: PAT_MRT3847_71297C.1.pep
LLLYVDDILIASTNKEEIRKLKESLNTQFEMKDLGSARRILGIDIHRDRAKGELFLSQSNYLKKVVERFRMHQSKPVSTPLGHHTKLSVTQAPETAEERSKMNQTPYANGVGSIMYGMVCSRPD

SEQ ID NO: 253903 - protein, 72 aa, Glycine max
  unsure (1)..(72): unsure at all Xaa locations
  Clone ID: PAT_MRT3847_71298C.1.pep
HLSPXDXXXTSCXIPCTSYFXTSTXCTXPLHXHSSPSNPRKLLNXPXPXTLLXXDPIFVLGFLMGXTNANGS

SEQ ID NO: 253904 - protein, 43 aa, Glycine max
  Clone ID: PAT_MRT3847_71299C.1.pep
LEPSDAAEHTMDFAEQLYHWHRSDVQHGMARTPFCGVAERRRS

SEQ ID NO: 253905 - protein, 657 aa, Glycine max
  unsure (1)..(657): unsure at all Xaa locations
  Clone ID: PAT_MRT3847_7129C.1.pep
SPSEVWNHFDRVNNDAFCKYCKKCYKANSSKYGTKNLNKHLASCMKNPLGRLMRNKKTIIVGKKCEGDPNALSVKFVDFNQERTIIELAKMIITNELSFKFVEYERFRKFMEVAQPYFNISSHVTIARYCIQVFNNEKQLECILFANKQXVSLTIDTWTLIQNVNYMCVTTYYIDEVFRLHKKILKFCLIGDHKGETTWIALENCLKEXGIQKICCITVDNASANSVAISYLSRGLSVXNDHTLLNEEFIHMQLTTHILNLIVCDGFKEIDSSISKIKVACKFVRFSPSRLTTLKRCAEDVSVNSKAMLTLNVPTRWNSTYLMLDVAXKFEQAFNRYEYVEAAYVLTLLNSEGGCPKEMDXKRARVFVSFLKVFYDATIFFSGSLHVTAKNFFKKLVTIQKCLNRWRHEDDPVIQKXTTNMQLKFNKYXESDQISYLLFVTAFLDLCYKFDYIEFCFKKMHGVDQTKEMLKKLDDLIRKMFVEYASEHPISIDSSNSSTLASYHASQGNANDVDEDEDWDDQFRLKMNKKCGEXQRSELDMYLKDDNEDDGLGFDILAWWKMKASKYHVISFMARDILVILMSIVSFESAFSTKGXCLIHFCSSLSPITVEALICTQNWLRRRNETGSASDRILAGPVEHGLLPDASHRRHSPAQDQ

SEQ ID NO: 253906 - protein, 123 aa, Glycine max
  Clone ID: PAT_MRT3847_712C.1.pep
WVVLPTAKPHNCAQFHLPEVRAHIKPVVHYGRGTHIRYSMAIAQCYQNMCSQRRNTKGPYIFHQHVFHSYSRINKTSLCAPPFRVVFLDTRTPFVSVFSTAQVPLRVVLLDKHVRDALESTPG

SEQ ID NO: 253907 - protein, 58 aa, Glycine max
  Clone ID: PAT_MRT3847_71300C.1.pep
SLVTSRSLRSYDRRSSALLTILGVKISTLSIRTIMLVLVHVVKRLTQLLDFGSAKKFQ

SEQ ID NO: 253908 - protein, 80 aa, Glycine max
  unsure (1)..(80): unsure at all Xaa locations
  Clone ID: PAT_MRT3847_71301C.1.pep
FSPVIADSAVYYSHHDMLXRGIFSYADSHTRSFILHYLPLRANDPQDAFQITLHQRFLYYVHLNHEVHNLPSRYDPAXHA

SEQ ID NO: 253909 - protein, 70 aa, Glycine max
  Clone ID: PAT_MRT3847_71302C.1.pep
LPNLSSQFYSRNLYYNKKKKKKRQVSKIRLAQQKQQQKNNKKSYQKITKKKKKCPPPPITLSTPQINSYP

SEQ ID NO: 253910 - protein, 79 aa, Glycine max
  Clone ID: PAT_MRT3847_71303C.1.pep
LYLFLPTLTRDVKFKVSSFQPRLSHKAYIIAFFVTKALYPTVCQPSPALPFKLLDSVGIGYAPSLISSASLKFSIKDNN

SEQ ID NO: 253911 - protein, 153 aa, Glycine max
  Clone ID: PAT_MRT3847_71304C.1.pep
TVLAIAFYFGARFGFDKADRKRLFNMINELPTIFEVVTGAAKKQVKEKSSVSNHSGSKSKSSSKQRASESQARQPKPLQSKEEDEELDDQDDDEHGETLCGACGEHYGTDEFWICCDICEKWFHGKCVKITPARAEHIKQYKCPSCSNKRARP

SEQ ID NO: 253912 - protein, 156 aa, Glycine max
  unsure (1)..(156): unsure at all Xaa locations
  Clone ID: PAT_MRT3847_71305C.1.pep
MDSRTYNPRTVEEVFRDFKGRRAGLIKALTTDVEDFYNQCDPEKENLCLYGFPSEQWEVNLPXEVPPELPEPVLGINFARDGMQEKDWLSLVAVHSDAWLLAIAFYFGARFXFDKADRERLINMINELPTXFEVVTGAAKKQVKKNLQFQPTGEQV

SEQ ID NO: 253913 - protein, 228 aa, Glycine max
  unsure (1)..(228): unsure at all Xaa locations
  Clone ID: PAT_MRT3847_71306C.1.pep
MEALSRSVEEIFEDFQGRRAGIIKALTTDVEDFYSQCDPEKENLCLYGFPNEQWEVNLPVEEVPPELPEPVLGINFARDGMLEKDWLSLVAVHSDTWLLALAFYFGARFGFDKTDRKRLFGMINELPTIFEVVTXAKKQVKEKSSVSNNSGSKSKSNSKAIICVLIKLLAGGAAGFRNPGQTIKAITTKILHLHNFCVRDTERRQRHTTPFYFCHFKHRKYMFYYRVH

SEQ ID NO: 253914 - protein, 118 aa, Glycine max
  Clone ID: PAT_MRT3847_71307C.1.pep
MEGCVKKLLCLVGFVVLVSTIGGVESAGECGKSTTPDNEAYKLAPCASAAQDENASVSQSCCAQVKKIGQNPSCLCAVLLSNTAKMAGVNPQVAVTIPKRCNLANRPVGYKCGPYTLP

SEQ ID NO: 253915 - protein, 68 aa, Glycine max
  Clone ID: PAT_MRT3847_71308C.1.pep
IILYFPFLGKIFSKIPIYFSNKIFFFTNISIFQIFLFPFYLISQKKNFYYFLIQPSRPSFIFFSVDYY

SEQ ID NO: 253916 - protein, 211 aa, Glycine max
  unsure (1)..(211): unsure at all Xaa locations
  Clone ID: PAT_MRT3847_71309C.1.pep
GESCLVRKGFLNCKGEYKIASTQATAMHVGSYRKLSLIXYASPDCNILGAMLLDDTYHTNPENAXPNILLAPIRGIKPLQEVTFSNTIVQIEPDMNSXFQLLSTTTNGXYIVQGNKISSMRXKYRCNYVLHVELRHYSYTTDSIEFKLVMQKDTRLIXVEEFGRMSYDAHNSYQPQQKDLSKGNDPLDIKARSRLQRVSSTKAQFVSGKTF

SEQ ID NO: 253917 - protein, 81 aa, Glycine max
  unsure (1)..(81): unsure at all Xaa locations
  Clone ID: PAT_MRT3847_7130C.1.pep
KTLNPVKAIPQLISEQGTYXTKRKKKRYICFFKFAIATTKSIVAIKAHANFAFFFGNYQYPKMKNDVISISNSNRQKKKRN

SEQ ID NO: 253918 - protein, 83 aa, Glycine max
  unsure (1)..(83): unsure at all Xaa locations
  Clone ID: PAT_MRT3847_71310C.1.pep
ASNHIGAKLWXAACAPRCNDYADGYQKHNEYKLDPNDLYCTDSSLGWPVHTAALVELEERTMDMLKTGPYGXIYRICNIIFGQ

SEQ ID NO: 253919 - protein, 76 aa, Glycine max
  Clone ID: PAT_MRT3847_71311C.1.pep
FSRGTEIQNSISVGSPKKKNYFQPDQAGLKNLFFQKKSSSQNDIWGYHTPLWENDKPWAGGNNSHLDTLKAHLIFD

SEQ ID NO: 253920 - protein, 71 aa, Glycine max
  unsure (1)..(71): unsure at all Xaa locations
  Clone ID: PAT_MRT3847_71312C.1.pep
FTLTIXDFRSPLPIILKLDPKLFNWQSMNIRGERETDKGYARNNNIFFHIFHQIITTVVSVFFLCKIKARK

SEQ ID NO: 253921 - protein, 149 aa, Glycine max
  Clone ID: PAT_MRT3847_71313C.1.pep
LARSAIPCERFTDAPPPSPITRRSSGHHRKLQPLLLSTTIHPHMKTKTSLSLSKKPTKPTSYSLSRTFLDPHLFAEPKKKIPSTPLTVPSQRPNQFSRIGKKTGLSSLLNRALKRVAVARNGRAASERKHRRRKWAPAGRQRREREKKN

SEQ ID NO: 253922 - protein, 50 aa, Glycine max
  Clone ID: PAT_MRT3847_71314C.1.pep
LEPNRLERRQKGVSHLELGQYNGMIHGGITLSFAKLYINIVQCSLYMTNS

SEQ ID NO: 253923 - protein, 49 aa, Glycine max
  Clone ID: PAT_MRT3847_71315C.1.pep
IPKTSMVGQPNRQLIQNLVVKTFQGMTRFNKRRIIKGYWERSRTPLVGL

SEQ ID NO: 253924 - protein, 63 aa, Glycine max
  Clone ID: PAT_MRT3847_71316C.1.pep
GEFSQPFLKPPHLDQPVSTLLLSESAMAFGRILMSENDGNYKGPLTLSLKQGYILKNLYYLQS

SEQ ID NO: 253925 - protein, 189 aa, Glycine max
  unsure (1)..(189): unsure at all Xaa locations
  Clone ID: PAT_MRT3847_71317C.1.pep
LLVKDQFHWNEEADRAFSQLKLALCQAPVLGLPDFNSSFVVETDASGIGMGAILSQNHHPLAFFIYAIXSKLLRASTYVRELAAITVAVKKWRQYLLGHHFVILTDHRSLKELMSQAVQTPEQQIYLARLMGFDYTIQYRAGKANLGADALSRLPPPTQGEFYVLTIPNCLFLQELRAALAANPDFLSR

SEQ ID NO: 253926 - protein, 37 aa, Glycine max
  Clone ID: PAT_MRT3847_71318C.1.pep
AGIVPTTEAYSARARALPLALSPRVHPFSRICAGAFQ

SEQ ID NO: 253927 - protein, 92 aa, Glycine max
  unsure (1)..(92): unsure at all Xaa locations
  Clone ID: PAT_MRT3847_71319C.1.pep
GKHLXLDCXQKXXGPSLVQKEDXPPTARMTNAPDSNDNIDLLXSTDSMGLQGAGKAFPNKTVFDDKLAVANTQESFDGNPPVDXSWLPISGN

SEQ ID NO: 253928 - protein, 86 aa, Glycine max
  unsure (1)..(86): unsure at all Xaa locations
  Clone ID: PAT_MRT3847_7131C.1.pep
TSSPLLIVLFLTAAALAAEPAKQAAPAAQETAVHIVYVDRPEEXDPEEFHIRTLNLVLGSEQKARDAVLYHYKNGASGFSAKSPPA

SEQ ID NO: 253929 - protein, 56 aa, Glycine max
  Clone ID: PAT_MRT3847_71320C.1.pep
LDTVSLFLLHIYLKACSTHSSYITDLDSSLNLINHLKYSDCCQFDNTICTDIVALL

SEQ ID NO: 253930 - protein, 217 aa, Glycine max
  Clone ID: PAT_MRT3847_71321C.1.pep
ARVLIEIQDTLKSPPPENVTMKRASTISVIVTTFFYLCCGCFGYAAFGNDTPGNLLTGFALYKKHWLVDFANACIVIHLVGAYQVYSQPLFANVENWLRFKFPDSEFVNRTYSLKLPLLPAFPLNFLRLTFRTAYVASTTGIAMIFPYFNQILGVLAGIIYYPLSIYFPVEMYLSLGNIEAWTAKWVMLRTFSIVGFLVGLFTLVGSIEGIVSAKLS

SEQ ID NO: 253931 - protein, 114 aa, Glycine max
  Clone ID: PAT_MRT3847_71322C.1.pep
KVGEKIQIVAKTAGMHPNEWVENADRWVAGFLEMFEEGCHKMGTAIRDRIQERLRGQQSRDGTLRLQNGEDDKDDDDEEYYYDDEEDSDEEYFEEYYDDDELNPQNNGKDEKKE

SEQ ID NO: 253932 - protein, 127 aa, Glycine max
  Clone ID: PAT_MRT3847_71323C.1.pep
EKRIGILRWNCWVLGRMSIATVHAISAILYALCWIVDLKLHKGTFILLVWSKFYVLNAGIRVFVHMVNFRWEKYHILFIHLILGSTFYFSVASSGKENHKFLVQSNVNFHVPLKSSTLSFASCRHHT

SEQ ID NO: 253933 - protein, 71 aa, Glycine max
  Clone ID: PAT_MRT3847_71324C.1.pep
PRVRPLVLPLFLTDVRRLQRGAQYNTVDQLTHQSCVVLTNYYFIMSSSTVGHVIKCNAVVSWDAGKPLLIE

SEQ ID NO: 253934 - protein, 76 aa, Glycine max
  Clone ID: PAT_MRT3847_71325C.1.pep
VFNGRTKGDLNFPHKKLLLEALARGDTIRESPMHRSVLLKKDGWKPIFFFLPRGRKRLWLFYFGHQKSPHLSCWEK

SEQ ID NO: 253935 - protein, 84 aa, Glycine max
  unsure (1)..(84): unsure at all Xaa locations
  Clone ID: PAT_MRT3847_71326C.1.pep
FVGCVIETIYPANVLIYAQSKTRLWTMKVVVMLNVKGLGAMLLLTLXTKTGSKSFSAIGWICLVLNISVLAVSVCIMKRDIKTR

SEQ ID NO: 253936 - protein, 59 aa, Glycine max
  Clone ID: PAT_MRT3847_71327C.1.pep
MIIIIVNFFSGKMAQVCLLLVGLLTMFSSAYGYGYGGGWVNAHATFYGGSDASGTMGKQ

SEQ ID NO: 253937 - protein, 57 aa, Glycine max
  Clone ID: PAT_MRT3847_71328C.1.pep
MYEEHRCMLCMHSFAYTTGSKAAGTGHLTRHIAKVTCPSLLRSQDQNQLSSYTPPSM

SEQ ID NO: 253938 - protein, 89 aa, Glycine max
  Clone ID: PAT_MRT3847_71329C.1.pep
EKLNFYFHVFRICIGAKEKMEASIMLPLERTSSIEREPRTLNINQIQSARELAIYILNTKTIEEASRIFTEGLQPVVSAAPKMGFGLRS

SEQ ID NO: 253939 - protein, 70 aa, Glycine max
  Clone ID: PAT_MRT3847_7132C.1.pep
SCPPHHRSFLTYKQKTPPKKEKEKPHKSLLEFPQTLACFLEEHPNLRKWRPIKTRFKKKGKKKTPHQKRN

SEQ ID NO: 253940 - protein, 87 aa, Glycine max
  unsure (1)..(87): unsure at all Xaa locations
  Clone ID: PAT_MRT3847_71330C.1.pep
YLSLFSIIWKYKQSHLHLLVMLPLHFPGLRRRHIGVASRFLQNSXXXFFGPFSPLKXKKPKKKGGGGGDGFSSVALDKPTHPFRFVE

SEQ ID NO: 253941 - protein, 55 aa, Glycine max
  Clone ID: PAT_MRT3847_71331C.1.pep
GRNARIPSSRQLRCSLSIRQERCHLWCPLLNLQRRLLLGHSLRPAPTQWTSIHRG

SEQ ID NO: 253942 - protein, 76 aa, Glycine max
  Clone ID: PAT_MRT3847_71332C.1.pep
NQTPLQPPSDTPSSAKAYSFLVFAIHAKLALSAAFFSFFIFHTKTNLDNIGFFARPYMPCLFCHAFVILLSSFSLI

SEQ ID NO: 253943 - protein, 140 aa, Glycine max
  Clone ID: PAT_MRT3847_71333C.1.pep
HRHVPHPSCDGLADIMIIRGRIMMGGRFNSHDQFRDWRLDVDNMSYEQLLELGERIGYVNTGLKEDEMGLNIRKVKPSSSNDTSKHQLDKKCSVCQEEYESDDELGRLKCDHSYHFQCIKHWLEHKNFCPVCKQEVVVRH

SEQ ID NO: 253944 - protein, 207 aa, Glycine max
  Clone ID: PAT_MRT3847_71334C.1.pep
MPVVTEHMKWRRPRNQFRNPISETDDPITQIPSIIQSSHSKSTISSLLSSFSTSGETTHARDQNRTNNNNKSNRKFSAATFRGFGCTAGSSQKVSVPAVIRSSADWEGKRNRKKNHRRKSNSNGNSGNNTCDDDDVSGGTFVDFQDVSCGPGIGFSTDAASVECAVARKNVSSRGKLDVVEERVTHRERSSYFWRRTVKPESFLLSG

SEQ ID NO: 253945 - protein, 294 aa, Glycine max
  Clone ID: PAT_MRT3847_71335C.1.pep
MPVVTEHMKWRRPRNQFRHPISETDDPNPQIPSIIQSSHSKSTFSSLFSSFSTSNETRDQNRNNNNKSNRKFSAATFRGFGCTAGASQKVSVPVPAVIRSSADREGKSSRKKKHRRNSNSGNSTSDDDDDDVWCGPGIGFSTDAAAASVECVVARKNVSARGKLDVVEDRVTHRERSSYFGRRTVKPESFSFLEDEPDIFAARPGLEPFGTARFYRHVPHPSPDGLAEIMILQGRIMMGGRFDSHDQFRDWRLDVDNMSYEQLLELGERIGYANTGLKEDEMVLYIMKVKPSCS

SEQ ID NO: 253946 - protein, 125 aa, Glycine max
  Clone ID: PAT_MRT3847_71336C.1.pep
LWLQQGECTLFVGEALSLQLHVRRSPPFVPALCNIRSLVYHDITHSCVRSPPLIIRGLSSCPSESHWCQSCFSPPHSSRSASSCLWDTAAPGTACVRAHRPSCCSLGLGPPDGRPSGGSPASAIE

SEQ ID NO: 253947 - protein, 108 aa, Glycine max
  unsure (1)..(108): unsure at all Xaa locations
  Clone ID: PAT_MRT3847_71337C.1.pep
LTRSLNGVEGLDYMERIPLATSEGFPHVLSRKNGEKGKRRFVSGDGEEMTLIPGPRVVEVYXKLIDELEKSATTLVGIESTMVEKIPRGKMFDNPKTRWFXILPMELN

SEQ ID NO: 253948 - protein, 46 aa, Glycine max
  Clone ID: PAT_MRT3847_71338C.1.pep
IEWDRQLKKKKKKKKKKKKKKKKKKKKKKKKKKKKQKKKKKKGGPF

SEQ ID NO: 253949 - protein, 68 aa, Glycine max
  Clone ID: PAT_MRT3847_71339C.1.pep
FFLLSFPRASSSSFFSASLFSFFLPPAALSSSSKSPQCLVLSTGSSCIMRTLSKMSRWNTTMNLITIF

SEQ ID NO: 253950 - protein, 59 aa, Glycine max
  Clone ID: PAT_MRT3847_7133C.1.pep
SCYYLSKCHRIKCCCIVTHHVSSLFMIEKYYLTSEVRNHHELRLLVCLLLSLSESSYQF

SEQ ID NO: 253951 - protein, 119 aa, Glycine max
  Clone ID: PAT_MRT3847_71340C.1.pep
ANINLRNPWKALSHCISALATTLSYLSTITKPHKTNTASSIPEPKFTPFNVTYATHLHLNLFSNACTRCLSFLNGVMPIDDTLRSKITTLQKSPASYAIPVTSFIGKLGPLLRERMTDP

SEQ ID NO: 253952 - protein, 112 aa, Glycine max
  unsure (1)..(112): unsure at all Xaa locations
  Clone ID: PAT_MRT3847_71341C.1.pep
PRVRLNVTCAEVVLASRDAPTPLLECGWLQDTGXMVEPYGRMSYDATDTNQPLEMDVLEGNRSFDIEYRSRXEKVASTKAHFVSGRTFRHDILGAGSHSLYDFPDKVQHEKP

SEQ ID NO: 253953 - protein, 53 aa, Glycine max
  Clone ID: PAT_MRT3847_71342C.1.pep
YFSPPRSSLYVGSRILSWFSATTFAFFLAFQFKEVAAITFRSLFPWLNFCSVG

SEQ ID NO: 253954 - protein, 39 aa, Glycine max
  Clone ID: PAT_MRT3847_71343C.1.pep
GIRIEKNTKGLTSSSRVLSVVEGFKLITSLSSVYILLYT

SEQ ID NO: 253955 - protein, 78 aa, Glycine max
  Clone ID: PAT_MRT3847_71344C.1.pep
RTRPNNYTSIQKNNRAPQFPITRPPRSTRTDVLFHDSKKKKKKKKKKQNKQHIKQKKKKKKKKVVASEDLSPSMCVRN

SEQ ID NO: 253956 - protein, 39 aa, Glycine max
  Clone ID: PAT_MRT3847_71345C.1.pep
DGQSITAIAGKDLDERAMEETPAISKTGSWRIISKPFSS

SEQ ID NO: 253957 - protein, 217 aa, Glycine max
  Clone ID: PAT_MRT3847_71346C.1.pep
MQTISSNKFRTGALQVTMEHFNKAKAVKLRSHLGKYLIADEDKLRQSKRGSTKKAIWEIELINGKNHHVRLKSSNGRYLTATDAPFLLGMTGNKVVLANFDKGTDWKFEWEPITEGFHVKLRSWCGKYLRGNGGTVPWRNSVTHDDPASSVTHTWILWASEPVQEFPEKMVSFAESDFSSLDSEMSFWPRSLREVTSPCSRQQVPTPAPPRSVPAWS

SEQ ID NO: 253958 - protein, 114 aa, Glycine max
  unsure (1)..(114): unsure at all Xaa locations
  Clone ID: PAT_MRT3847_71347C.1.pep
TSKGKAQNILPSLSLTLTSLLPLLTINPNSARTTSCSWNKYXANQPNIMLGKTLLIPPQKNXQLNKVNENSAPKTYIVIRALYITPMGMVNKETDILNTCTNCFNLSLYTPNTK

SEQ ID NO: 253959 - protein, 88 aa, Glycine max
  Clone ID: PAT_MRT3847_71348C.1.pep
RSQLLGTVSLRKTLPSTTMYVHRLLFSCHRAPPSSKKTDDMGARARQVQTQDLWTYALTHRGLQGFKLNVLNNYSRPVPCVRYPNRRR

SEQ ID NO: 253960 - protein, 66 aa, Glycine max
  Clone ID: PAT_MRT3847_71349C.1.pep
STDTDTNTGHGHVNTRQTHQTQPRHGRRCRVKHQTRQGTGVSVLQRITITHELTIYILYKNECWII

SEQ ID NO: 253961 - protein, 87 aa, Glycine max
  Clone ID: PAT_MRT3847_7134C.1.pep
GLSFTTANWHCCGSALIISLKPQSQIIGSPPASPPPPSPPRPPPISNALASTSAIKRTRKASLLRSVVHVDHATGKADGPHRKKLRT

SEQ ID NO: 253962 - protein, 70 aa, Glycine max
  Clone ID: PAT_MRT3847_71350C.1.pep
LIHSYICECHGTHICGGGGNTKTTLNTNHRQCSTTDTEKHVSSFISTNFSLFIIIKFIQKTTHLFYLVSY

SEQ ID NO: 253963 - protein, 79 aa, Glycine max
  Clone ID: PAT_MRT3847_71351C.1.pep
TGRRLDGPFCVPAKFSGAVQCALRALSGIDQKMRRGLWVLKKRAMMPVKVAGGASGAFLRIWAAIYLLHTAWGGDSYRF

SEQ ID NO: 253964 - protein, 49 aa, Glycine max
  Clone ID: PAT_MRT3847_71352C.1.pep
VKNTFLAKAAEKAHNVGNWPDLKGNDWPLGLARLAKRWLGLFAQCKKVS

SEQ ID NO: 253965 - protein, 67 aa, Glycine max
  Clone ID: PAT_MRT3847_71353C.1.pep
KYYLSTSLRIHRTHLYLQHVSKRWLNYLITCYTLLFPKQSKYYCIIHLLQLTKSLLTHYPFFTIYKY

SEQ ID NO: 253966 - protein, 75 aa, Glycine max
  Clone ID: PAT_MRT3847_71354C.1.pep
PGTQALGTWFQESLNFFLLLWGPFLKGKKITLWAGHRLWESFSFSLLGYLVDTLLFGIGLCGRFKLFLALSQVFC

SEQ ID NO: 253967 - protein, 63 aa, Glycine max
  unsure (1)..(63): unsure at all Xaa locations
  Clone ID: PAT_MRT3847_71355C.1.pep
LPFLINXQLFLLTYIIYXMXXATESLIIHSMHIIFDHCNTSPLIHFYCKKFYIIHKSXIILKI

SEQ ID NO: 253968 - protein, 57 aa, Glycine max
  Clone ID: PAT_MRT3847_71356C.1.pep
FEPGVILTSAAGRRSWIVKMILGLGLGNAYRLIFNSVLFNEFYVFLIVDTFYFFLFY

SEQ ID NO: 253969 - protein, 59 aa, Glycine max
  Clone ID: PAT_MRT3847_71357C.1.pep
VEIKIKMCLSLWCNCSAAMAVVLFRTDVLPLYGEGEGGRNKNPLRYPPTSSFFSTQQSP

SEQ ID NO: 253970 - protein, 69 aa, Glycine max
  unsure (1)..(69): unsure at all Xaa locations
  Clone ID: PAT_MRT3847_71358C.1.pep
MHNHMLKQQQHQQQQALMHQALLQQQSLYHPFLLAPPHIEPYSSXNLPSGFDPSTFLILYFFNILTHFN

SEQ ID NO: 253971 - protein, 119 aa, Glycine max
  Clone ID: PAT_MRT3847_71359C.1.pep
CRLTCARSSHRNSARGSARVWKVQQWVLCQRGSEGTPTRRRRKEGFAAVGYDVCAGDGNGNGKCESPVFDIHRSTERTARIVGCQLLVVTGVLLFFKKNLSDHISLQFRTEKRDSGRRR

SEQ ID NO: 253972 - protein, 79 aa, Glycine max
  Clone ID: PAT_MRT3847_7135C.1.pep
PPLPRGCLIFFLTIPQRFSPFKFAPCTPPINFGSVPLIGPPPFSPFSSRFIFLGNFLWVNFFPWQTFSPFFSPLFFSPL

SEQ ID NO: 253973 - protein, 92 aa, Glycine max
  Clone ID: PAT_MRT3847_71360C.1.pep
MMNTANGTMMSPSSSSVTAQSPGLKTYFKTPEGRYKLHYEKTHPSGLLHYAHGKTGTQVTLGHLKDKPAPSTPTASSSAIKVRAHRGVRSGV

SEQ ID NO: 253974 - protein, 137 aa, Glycine max
  Clone ID: PAT_MRT3847_71361C.1.pep
MMHNISSESIAFPHRRGNLFTIQYLIYWKEADNDKSSDYVDWIRGFYAAMTPFVSWGPRAAYINYMDFDLGVMEGIGNGANMKDAVEHARVWGEKYFLSNYDRLVRAKTLIDPNNVFTNDQGIPPISLTSPYAKAQS

SEQ ID NO: 253975 - protein, 336 aa, Glycine max
  unsure (1)..(336): unsure at all Xaa locations
  Clone ID: PAT_MRT3847_71362C.1.pep
DAPNISNADASALDTDSTDSDSSEGPEIIQTFPSDDGQEENSSKTTPKENSSPSPMKVPSKQWTNEDFATWQRIIRLDAVRANAEWMPYSPSQAIVPDSRAYRSAEAVGLKDYSHLDASRIFHAARLVAILEAYALYDPXLGYCQGMSDLLSPIVSVIPEDHEAFWCFVGFMKKARQNFRLDEVGIRRQLDIVAKIIKFKDGHLFSHLQKLQAEDCFFVYRMVVVLFRRELTFEQTLCLWEVMWADQAAIRAGIGKSAWSRIRQRAPPTDDLLLYAIAASVLQRRKLIIEKYSSMDEILKECNGMAGHLDVWKLLDDAHNLVVTLHDKMKIETSFR

SEQ ID NO: 253976 - protein, 110 aa, Glycine max
  Clone ID: PAT_MRT3847_71363C.1.pep
ISCNNIFFRSYTSLSHSLLFLCVSLKYHNKLWRNRHTGQKRNANLTANGNPIMPCVTPQSSHLIHLLTLLSISIIAPSNDVRTSSFESLSISDGVEDGGDGEYYHEVLPW

SEQ ID NO: 253977 - protein, 52 aa, Glycine max
  Clone ID: PAT_MRT3847_71364C.1.pep
PYWKYPHPLFFLGKNLTLNSVPPAHEFFFFFSRIRFAKLAPRLFKKRASYFQ

SEQ ID NO: 253978 - protein, 231 aa, Glycine max
  unsure (1)..(231): unsure at all Xaa locations
  Clone ID: PAT_MRT3847_71365C.1.pep
MPADLEQEEFGDTYKKYKQIQGELNRLEEQTIDRFLSPQEANARRQLQQDLWVAALSHESLLRQKSRARWIKGDIIKKFWPTIKSDILRFLDEFFVNGHFPKGSNASFIALIPKVSDPQSLHDYRPISLIGCVYKIVSKLLANRLKKVMPTIIDERQSAFISGRHLLHRVIIANEVVEEAKRSKKSCLVFKVDYEKAYDSVSWEFLKYMMRRMNFCPKWTQWIAXCLSSAS

SEQ ID NO: 253979 - protein, 112 aa, Glycine max
  Clone ID: PAT_MRT3847_71366C.1.pep
MVRLGRLWVSRLPFGWLLFFSSAFIRVPGALAWSKEGHVMTCQIAQALLEPEASEAVYQLVPDYVKGNLSSLCIWADQIRHWYKYRWTNPLHFIDTPDNAWSFQDSKDWHDS

SEQ ID NO: 253980 - protein, 91 aa, Glycine max
  Clone ID: PAT_MRT3847_71367C.1.pep
NFLQGTALSNILPKFKTAPFKENRFGRRDPVRNKTPGKKHTRWRPPPAFYLSLVWFKMNTHVHTSLRLINRGVEIFPIVRAFSAIVVMPNF

SEQ ID NO: 253981 - protein, 123 aa, Glycine max
  Clone ID: PAT_MRT3847_71368C.1.pep
SSLRLDFWPIVLVFLRRTIGSYPTSLDAFPLFIATFSGLNSWSPPKTKHYAKLYRMAATHSGHHCPVSLHTFSSTSESHELRPPLGHNDSPIDRLSAGVCAVHIFTHQQDDLSCMHHYVLASD

SEQ ID NO: 253982 - protein, 76 aa, Glycine max
  Clone ID: PAT_MRT3847_71369C.1.pep
NKNTKWGQYVYQRDGDGDIRRRVNNRKKHHVGAHNTELGDKEASTDNGRTTGATSHMRLKYRCAPRTITVAAGARI

SEQ ID NO: 253983 - protein, 209 aa, Glycine max
  Clone ID: PAT_MRT3847_7136C.1.pep
MAVSLAVNRPLLGLHENVPLAVAHPQFLPFKWPPKSKLPSVVGIRCSSSPFNDKTLISITPNTSHLNPNPLACRFHASQFGEQESNKYVEAYAVGRNIRMSANKARRVIDQIRGRKYDETLMVLELMPYRACEAILKIVFSAGANASNNLGLSKGSLVISKAEVNEGKTMKRVKPVARGRAHPIKKRTCHITITVKGLPSESVVEAKPA

SEQ ID NO: 253984 - protein, 70 aa, Glycine max
  Clone ID: PAT_MRT3847_71370C.1.pep
MGSHNNQLWSSSVWNMVLMRLKNSFTKEGSKNNEFQDFASERSLEAMTGFPGRVPEGELDHNIIKPFRSS

SEQ ID NO: 253985 - protein, 107 aa, Glycine max
  Clone ID: PAT_MRT3847_71371C.1.pep
RSKITHPPTQGESLSVVVRRLRAAGLRTPCLEEENAGPAQLPDATAIQDFVSWPLRERDGQDPPSLHQLARAREKGQRNAALNKLMKLGRPVRKAHRNRWGRDHPPT

SEQ ID NO: 253986 - protein, 144 aa, Glycine max
  Clone ID: PAT_MRT3847_71372C.1.pep
QEGETWGPPPDKERVSTNIANSKGQNFTLKPSNKTTTSGGWVAMEASSGKILWSIANPSNATANGPVTVANGVVFAGSTNQKGPIYAINGKTGKIEWSYETGSTVYGGMSVSDGCIYFGNGYKIGVGLNLGNFTAGTSLFAFCV

SEQ ID NO: 253987 - protein, 82 aa, Glycine max
  Clone ID: PAT_MRT3847_71373C.1.pep
RNASHRIGVRIFNMKKNKIFILWTMYTKYRGPYPKALGPSYEIHQTIYVSIKGELRASLERPYQIEWADGPKKNLAAGLRPS

SEQ ID NO: 253988 - protein, 236 aa, Glycine max
  Clone ID: PAT_MRT3847_71374C.1.pep
KACSHPTKCCESSVNIIEEGNQHMNVDPPLPPSSNNVGGSRGSFECLGSVTGKGNGQGSAQVVVPSVVGSSMPLPPSPHHRASDSFACFLRSSPKFSSNSPTLSPTSSDYASSFTFSPSSTDLSIVSSRQLSPSGLPRVRPAHVKDASSSEFRSLVKKEGETFLANHTLVGAKSSLRRKGTSLSIAERRGNNPPPRMLLPSASESSRASKVRVRSRSFSLPVLDDTLMKDVSCKQI

SEQ ID NO: 253989 - protein, 67 aa, Glycine max
  Clone ID: PAT_MRT3847_71375C.1.pep
MADQLTEEQIAEFKEAFSLFDKDGDGTITTKELGTVMRSLGQNPTEAELQDMINEVDADGNGTIDFP

SEQ ID NO: 253990 - protein, 100 aa, Glycine max
  unsure (1)..(100): unsure at all Xaa locations
  Clone ID: PAT_MRT3847_71376C.1.pep
MNVLVFCVATILGAXHYHAYDMYHLRFSTAHGERTPEVNCSSWRLAVEAHMIFGFDTIPEECVQSTKVYSHQQHYRSASXTVKSKAYFYAIDLEVHPKDT

SEQ ID NO: 253991 - protein, 47 aa, Glycine max
  Clone ID: PAT_MRT3847_71377C.1.pep
LFESPYILKFTTYDKYNKKNKTYISINILIYVKIEFNLIYYILKNKI

SEQ ID NO: 253992 - protein, 43 aa, Glycine max
  Clone ID: PAT_MRT3847_71378C.1.pep
FSYPILWVQLYDQSVHSYSKIICIVNLFYREEPLIYINLSEEK

SEQ ID NO: 253993 - protein, 64 aa, Glycine max
  unsure (1)..(64): unsure at all Xaa locations
  Clone ID: PAT_MRT3847_71379C.1.pep
NRSGSMECVVPQAESSAFFPISVRFIATETFTXVYVNNLVPLNVGNPLKDSHRTQLIAKSYLCV

SEQ ID NO: 253994 - protein, 138 aa, Glycine max
  Clone ID: PAT_MRT3847_7137C.1.pep
MAVNRPVLRVHENLPLALTVAPHQFLPFKFTSVGIRCSPFNDKTLISIKPNTSHLNHDTLACRFHAAQFAEQESNKYVEAYAVGRNIRMSANKARRVIDQIRGSKYDETLMVLELMPYRACEAILKIVFSAGANASNN

SEQ ID NO: 253995 - protein, 51 aa, Glycine max
  Clone ID: PAT_MRT3847_71380C.1.pep
RFQILMEEEKEKGIPNAFLSQIDRTLSLSSKGHFLCQMVLLLVTCLYLQCV

SEQ ID NO: 253996 - protein, 210 aa, Glycine max
  unsure (1)..(210): unsure at all Xaa locations
  Clone ID: PAT_MRT3847_71381C.1.pep
MDLLANVAVENKRRVCLVWEDLTVVASSVNNSPKRELLKGLSGYAEPNRIMALIGPSGSGKSTVLAALAGILPTNVSMTGNVLLNGTTRSTGCRDISYVTQEDYFLGTLTVKETLTYAAHLRLPADMTKNEIDXVVTKILAEMGLQDSADSRLGNWHLRGISSGEKRRLSIXAFEILNSTSCMFLDEPTXWLDSAAAFYVISSLSTLHMM

SEQ ID NO: 253997 - protein, 106 aa, Glycine max
  Clone ID: PAT_MRT3847_71382C.1.pep
ASLPVFYQLIVGFIQCQGRFKYWTKAIFTSSSNLGGNCHTPLAEMMMTTTKTRYKHCGKGNIGQKKFLVENTKRCLQMIPWQTTTRVAFNQMILKKKKRSKRQGKS

SEQ ID NO: 253998 - protein, 359 aa, Glycine max
  Clone ID: PAT_MRT3847_71383C.1.pep
CNVGDQTTSASSIKREHFPAIPGFKGGNSDFAMDMYQKEQLHDNTMSMMQSQHFSQMGRTAGFSLGGLYPSHRTQQQQQHAPSVSSNGVSFSSVNNQDLLHLHGTDIFPSSHSTYHSQTSGPPGIGLRPLNSPNTVSGMGSYDQLIQQYQQHQNQSQFRLQQMSSANQSFRDQGMKSMQTAQSNPDPFGALGLFSVVHISDPNLKYLAHGIDLTTLGLNLNSTENLYKTFRSPWSDEPAKGDPEFSVLQCYYAKQSPSLHQGYFSKFSVETLFYIFYSMPKDEAQLYAANELYKRGWFYHKEHRLWFIRVPNMEPLVKTNTYERGSYHCFDPNTFETVRKDNFVLHYEVVEKRPSVPQH

SEQ ID NO: 253999 - protein, 303 aa, Glycine max
  Clone ID: PAT_MRT3847_71384C.1.pep
MEFEDRFRHQAQRPKYDCLLFDLDDTLYPLKSGLAKSCLQNIKDYMVEKLGIHPSKIDDLSNLLYKNYGTTMAGLRAIGYDFDYDEYHSFVHGRLPYENLKPDQVLRNLLLSLPYRKLIFTNADKVHAAKALNRLGLEDCFEGIICFETLNPIHKSIVSDDEDDIEFVGSRTTNPTTTCNGSGTSQIFDIIGHFAQLNPSAVLPKTPIVCKPSENAIELALNIANLNPQRTLFFEDSTRNIQAGKRVGLHTVLVGTSQRCKGADYALESIHNLREAVPELWEADIKSEVAYPGKLAVETSVTA

SEQ ID NO: 254000 - protein, 198 aa, Glycine max
  unsure (1)..(198): unsure at all Xaa locations
  Clone ID: PAT_MRT3847_71385C.1.pep
MEFEDRFRHQVQRPKYDCLLFDLDDTLYPLKSGLAKSCLQNIKHYMVEKLGIDPSKIDDLSNLLYKNYGTTMAGLRAIGYDFDYDEYHSFVHGRLPYENLKPDPVLRNLLLSLPYRKLIFTNADKVHAAKALSRLGLEDCFEGIICFETLNPIHKSTVSDDEDDIEFGGFKDHQSYHXVMGSGTSQIFDIIGAFLLSP

SEQ ID NO: 254001 - protein, 175 aa, Glycine max
  Clone ID: PAT_MRT3847_71386C.1.pep
MEKNKVDENPEEFNYEMKWVRDSSLDHKGRVPLRASTGSWKASLFIIAIEFSERLSYFGIATSLVIYLTKVLHQDLKTAVKNVNYWSGVTTLIPLLGGFLADAYLGRYTAVIASCIVYLMGLVLLSLSWFLPGFKPCDHPSTCTEPRRIHEVGFFLGIYLISVGTGGHKPSLESF

SEQ ID NO: 254002 - protein, 93 aa, Glycine max
  Clone ID: PAT_MRT3847_71387C.1.pep
VEPTRRGGRKTWFWWWRMMVRKRGTECDEYGDHGEEYRLLIESKPSCSMNPTICDKRMTRILQSHKSSYYEPKASYCEPHTFSCLVLTLDLFI

SEQ ID NO: 254003 - protein, 148 aa, Glycine max
  Clone ID: PAT_MRT3847_71388C.1.pep
ALGLGGASGSVASGSGPGAWASTRGAVLGLGCPLLELFPPHRPAAQIFKEGLSLSKFVSAMDENEVLKVADRSLIVDYEYSTQSSITGDQSSGIGSNTHWIRKAEECIPGVIRVGLCCTAQEPKDRWSMREAITKLQATCALYVGLVK

SEQ ID NO: 254004 - protein, 58 aa, Glycine max
  Clone ID: PAT_MRT3847_71389C.1.pep
TWHILFAPKRLEKLRMLPPSFIIIYWARIWSTTLRNRNIYLPKLFLLQIQTGRKYPSE

SEQ ID NO: 254005 - protein, 76 aa, Glycine max
  Clone ID: PAT_MRT3847_7138C.1.pep
ASLCILRDACDLIGVDLKNTISKVILLRIRCIPGASVRVSLSTESLLLRSMKMTCRPSLCITRVICVYYDVTRMDV

SEQ ID NO: 254006 - protein, 57 aa, Glycine max
  Clone ID: PAT_MRT3847_71390C.1.pep
RTNDRLVGLTFAGGGVPGVTGIMITTTSAAAMMTLAGRARSVLAYPTNRKRAGARCA

SEQ ID NO: 254007 - protein, 465 aa, Glycine max
  unsure (1)..(465): unsure at all Xaa locations
  Clone ID: PAT_MRT3847_71391C.1.pep
GLAMLCMSLFLLGLKPCDHNNMRTEPRKIHEAVFFLGXHKASLQSFGADQFDDNNAKERRQKMSFFNWWSCGLCSGFILGSTVIVYVQDHVNWGVADIILSVVMVVSLLIFLIGRSTYRYRTPIGSPLTPMLQVIVAAISKRKLPYPSNPTQLYEVSKSEGNNERFLAHTKKLKFLDKAAIIENEGNIAEKQSPWRLATVTKVEELKLIINMIPIWVFTLPFGICASQTSTFFIKQGAIMNRKIGNGFVVPPASIFTLAAIGMIVSVIIYDKLLVPVLRKLTGNERGINILQRIGIGMIFSVITMIAAALVEKKRLEAVEMNGPLKGSLSMSALWLAPQFLIIGFGDGFALVGLQEYFYDQVPDSMRSLGIALYLSVIGAASFLSSLLITIVDHVTGKSGKSWIGKDLNSSRLDKFYWLLAAITTLNLFVFVFFARRYNYKNVQKVAVADCYEGKSDDGGPETKV

SEQ ID NO: 254008 - protein, 595 aa, Glycine max
  Clone ID: PAT_MRT3847_71392C.1.pep
MEKNKVDANPEEFNDEMKWVRDSSLDHKGRVPLRASTGSWKASIFIIAIEFSERLSYFGIATSLVIYLTKVLHQDLKTAVKNVNYWSGVTTLMPLLGGFLADAYLGRYTTVITSCIVYLMGLVLLSLSWFIPGFKPCDHTSTCTEPRRIHEVVFFLGIYLISVGTGGHKPSLESSGADQFDDNNAKERSQKMSFFNWWNSGLCSGIILGVTVIVYVQDHVNWGVADIVLTGVMAVSLLIFLIGRSSYRYRTPIGSPLTPMLQVIVAAISKRKLPYPSNPTQLYEVSKSEGNSERFLAHTKKLKFLDKAAILENEGNIAEKQSPWRLATVTKVEELKLIINMIPIWVFTLPFGICASQTSTFFIKQGAIMNRNIGNNGFVVPPASIFTLAAVGMILSVTIYDKLLVPVLRKLTGNDRGISILQRIGIGMVFSVITMIVAALVEKKRLEAVEMNGPLKGSLSMSALWLAPQFMIIGFGDGFALVGLQEYFYDQVPDSMRSLGIALYLSVIGAASFLSSLLITIVDHVTGKIGKSWIGKDLNSSRLDKFYWLLAAITTLNLFMFVIFARKYNYKNVQKVAAADCYEGKSEDDGSETWV

SEQ ID NO: 254009 - protein, 95 aa, Glycine max
  Clone ID: PAT_MRT3847_71393C.1.pep
GEDSCLHSRRRTPTTRFRELLCIATADAKGERNFFCHEFNACYFILYYRGIEAQRTDCLLDQANEPAYWNIYFNLAPSFVSIYLSLSIYIYGVNH

SEQ ID NO: 254010 - protein, 38 aa, Glycine max
  Clone ID: PAT_MRT3847_71394C.1.pep
GLQPRINLQGYLLFNRIGAINEGDDQIPFAHVMGLISY

SEQ ID NO: 254011 - protein, 74 aa, Glycine max
  unsure (1)..(74): unsure at all Xaa locations
  Clone ID: PAT_MRT3847_71395C.1.pep
NCFLLVINASKDRVPNIKFNVVKVLQFFIPILXQFVFESTFCPFLVEPSEDPNVDVRFFASQALQFCYQVKMFS

SEQ ID NO: 254012 - protein, 86 aa, Glycine max
  Clone ID: PAT_MRT3847_71396C.1.pep
RSYRIRGARTEQAGVSCRIRGDAIAWGKEESRPETNNGQNPIQSTKWTNSNHNKSHVNHQLLKGSLPTRNTNSKSEMQQQNNKIVT

SEQ ID NO: 254013 - protein, 101 aa, Glycine max
  Clone ID: PAT_MRT3847_71397C.1.pep
ALGPKKRASQKGVERKLQVQRSLSFQGTFFKPNFYPQEGPAPKALRQILFENKLKSVFRPRFGKPPLVGHQDWSNPKDPAPNIFKVPFSAPSLPLCYWPTL

SEQ ID NO: 254014 - protein, 102 aa, Glycine max
  unsure (1)..(102): unsure at all Xaa locations
  Clone ID: PAT_MRT3847_71398C.1.pep
LCPLLFLGXSHHGLLGRXXEXAPQGXEXAXAQVXTQAXSWGSGXLHAXPIRRGLXSAGRXILGKXSEXAPHTPPHRSVDRHERXFQALVARAEFRAYVRVAT

SEQ ID NO: 254015 - protein, 38 aa, Glycine max
  Clone ID: PAT_MRT3847_71399C.1.pep
VGGGPKIIFFKVLGKTIGNRGEYLEVDLLALRISALKP

SEQ ID NO: 254016 - protein, 57 aa, Glycine max
  Clone ID: PAT_MRT3847_7139C.1.pep
VWVGPTFFLFSRQGLVLEIKYLNGTVNFPFWFFFFFPCFGYPFNLFSFVPSGPYYLH

SEQ ID NO: 254017 - protein, 33 aa, Glycine max
  Clone ID: PAT_MRT3847_713C.1.pep
EHNQSIKRGIMHMAISLRRGALGDSSFHLSTLT

SEQ ID NO: 254018 - protein, 91 aa, Glycine max
  Clone ID: PAT_MRT3847_71400C.1.pep
SPPFIRIIIELGCLTIYPLAKISLVVLFIQNPNEFPLSHQMNRIIPSRRHKNHWLLLTHRGNVSLFRIEPLLFLTLKLLRIPQRKYLRTFF

SEQ ID NO: 254019 - protein, 46 aa, Glycine max
  Clone ID: PAT_MRT3847_71401C.1.pep
AYYDRILLTFKPLLILLRSHISNENVMRITFKICNNLYWCMIYAIN

SEQ ID NO: 254020 - protein, 48 aa, Glycine max
  Clone ID: PAT_MRT3847_71402C.1.pep
FYTTLDIYKALFFLFKYIPQFQLHRKNSLTGGRPLFNLDSITPYTHFK

SEQ ID NO: 254021 - protein, 87 aa, Glycine max
  Clone ID: PAT_MRT3847_71403C.1.pep
GCYIGVCAIASFHPNPQHRRHLLLQHNNQNTLHLFCLLNSHFLFSNFEVSIPALNSHKHALLVQGSNHHSRHSWKQLMKLDLFPSDI

SEQ ID NO: 254022 - protein, 61 aa, Glycine max
  Clone ID: PAT_MRT3847_71404C.1.pep
ERHEKKCFNLFKKKKKKKKRKKKKKKKKKKKKKKKKKKKKKKKKKKKKKKKKWPPFLKNPT

SEQ ID NO: 254023 - protein, 91 aa, Glycine max
  unsure (1)..(91): unsure at all Xaa locations
  Clone ID: PAT_MRT3847_71405C.1.pep
GCFHWYLIGAPEFVCRCSTWYFCGDFSWLSYHTHVVPVTARRMRLAAALAVSNVSLVVIATRYINNFGLRRWPSLHXPPGGRGLPFYIFAR

SEQ ID NO: 254024 - protein, 103 aa, Glycine max
  Clone ID: PAT_MRT3847_71406C.1.pep
MSITQNQEASTCPECFDKKRLHKCKKTKKLPPIISLERCPRHFHGISQHISPIIESLRSMLKSQQKHKIYPIQIKSNDNTQRTSLIYKEEITKLKNKTRTRLC

SEQ ID NO: 254025 - protein, 67 aa, Glycine max
  Clone ID: PAT_MRT3847_71407C.1.pep
SSTFAHVQEIPTQSCAYMNCNYLFSYYAYPHSIGYDIPIPLIIPFSTPSSSPDAQLFICELELFDFL

SEQ ID NO: 254026 - protein, 232 aa, Glycine max
  Clone ID: PAT_MRT3847_71408C.1.pep
MGRGKVVLERIQNKINRQVTFSKRRNGLLKKAFELSVLCDAEIALVIFSSRGKLFQYSSTDINRIIEKYRQCCFNMSQTGDVAEHQSEQCLYQELLVLRVKHESLQRTQRNLLGEELEPLSMKELHSLEKQLDRTLAQARKHLTQKLVSRIDELHGKVHSLEQANKHLESQERGKCTQICEGSPNGHILQDKQVNQFEYGTAGSFRLQQEQTTASKGKEIETIEDWLRPKQS

SEQ ID NO: 254027 - protein, 68 aa, Glycine max
  Clone ID: PAT_MRT3847_71409C.1.pep
LSMRLSRSQLIESIIRIGVPTAASSTMRERTGFSDVRDTSVDSDSAPVRCAVSHPLLHLSRKLSPYAW

SEQ ID NO: 254028 - protein, 379 aa, Glycine max
  Clone ID: PAT_MRT3847_7140C.1.pep
MASSLGFEFLTKKPYSPPSWASHLHPLPSHFFSLAHLPTPIHRWNLPNLPTNTELWIKRDDLSGMQLSGNKVRKLEFLMADAIAQGADSIITIGGIQSNHCRATAVAAKYLNLDCFLILRTSDLLVDQDPGLTGNLLVERMVGAHVHLISKQEYAKIGSVTLTNVLKEKLIKEGRRPYVIPVGGSNSLGTWGYIEAVREIEQQIQKGTGNVKFDDIVVACGSGGTIAGLSLGSSLSALKARVHAFSVCDDPDYFHNFAQGLLDGLKAGVSSRDIVHIQNAKGLGYAMNTSEELNFVKEVAATTGVVLDPVYSGKAAYAMLKDMSENPKKWERRKILFIHTGGLLGLYDKVDQLASFVGNWQRMDVNESVPRQDGIGKMF

SEQ ID NO: 254029 - protein, 77 aa, Glycine max
  Clone ID: PAT_MRT3847_71410C.1.pep
MGRGKVVLERIQNKINRQVTFSKRRNGLLKKAFELSVLCDAEIALVIFSSRGKLFQYSSTEYFSSISHLFYHYNPRF

SEQ ID NO: 254030 - protein, 286 aa, Glycine max
  Clone ID: PAT_MRT3847_71411C.1.pep
MVGLSLGETHFIQGGIAQDLRCDGRKRLTYRPISVETGVIPQTNGSARVRMGATDVIASVKAELGKPSLLQPDKGKVSIYVDCSSTAEPAFEGRGGDELAAELSNALQRCLLGGKSGKGAGIDLSSLIVVQRKICWDLYIDGLVVSSNGNLLDALGAAIKAALSNTGIPRVEVAAGTSNDEHPEVDVSDEEFLQFDTSRVPVIVTLTKVGRHYIVDATSKEESQMSSAVSISVNRQGHICGITKRGGVGLDPSIILDMISVAKHVSEQLINKLDSEIASAEAEEES

SEQ ID NO: 254031 - protein, 84 aa, Glycine max
  Clone ID: PAT_MRT3847_71412C.1.pep
IVTLTKVGRHYIVDATSEEESQMSSGVSISVNRQGHICGITKRGGVGLDPSIILDMISVAKHVSEQLINKLDSEIASAEADEES

SEQ ID NO: 254032 - protein, 83 aa, Glycine max
  unsure (1)..(83): unsure at all Xaa locations
  Clone ID: PAT_MRT3847_71413C.1.pep
YILNPFIVGXHILFAQFHWSYFCRTGRVQSPRFENPSRKIGLLSFGLGWRDRNKGKPNAEESSESLHDNGSPRKESDNQETDR

SEQ ID NO: 254033 - protein, 59 aa, Glycine max
  unsure (1)..(59): unsure at all Xaa locations
  Clone ID: PAT_MRT3847_71414C.1.pep
VNGGNFCLFIEMDEGLVFGGVSIKVGKLVCVWNWGLLYKTCFFGECRCXVIQLKKKKXK

SEQ ID NO: 254034 - protein, 41 aa, Glycine max
  unsure (1)..(41): unsure at all Xaa locations
  Clone ID: PAT_MRT3847_71415C.1.pep
TXXLKSARXNTXQXKVRXNXXXESXGCHXSFXRXGRPCXWX

SEQ ID NO: 254035 - protein, 130 aa, Glycine max
  Clone ID: PAT_MRT3847_71416C.1.pep
MDVGQMQRQWIDYTKSLFLEGFLDGQFLQLQQLQDENNPDFVVEVVFLFFEDSERLLKDLTFALSVLLLSYHSRFPSFHSSCIHYSMVVIKVLNIHRLHCDFVAFVDITPHRRQMQPMRSLLWSRTIKKC

SEQ ID NO: 254036 - protein, 323 aa, Glycine max
  unsure (1)..(323): unsure at all Xaa locations
  Clone ID: PAT_MRT3847_71417C.1.pep
MVGISFGETHFIQGGSAQDRRCDGRKRLTYRPISVETGVIPQTNGSARVRMGATDVIASVKAELGKPSLLQPDKGKVSIYVDCSSTAEPAFEGRGGDELAAELSNALQRCLLGGKXGAGAGIGLSSLIVVEGKICWDLYIDGLLVNSDGNLINWKTPMQLITVVLXAALSNTGIPRVQVAAGTSNDEQPEVDVSNEEFLQFDTSGVPVIVTLAKVGRHYIVDATSEEESQISSAVSISVNRQGHICGITKRGGVGLDPSIILDMISVAKHVSELLINKSDSEIASAELKRRQARAPSWDNQADFNYFVTRLNYGKFVSEIVVF

SEQ ID NO: 254037 - protein, 109 aa, Glycine max
  Clone ID: PAT_MRT3847_71418C.1.pep
MITSISSIINMQEKYDKAMQSIAEMQKRVVMAESMLEATLQYESGQSKALSSPRTGRVQSPRFENPTRKVSLLSFGLGWRDKNKGKPNAEESSESLHDHSSPRKESDNQ

SEQ ID NO: 254038 - protein, 67 aa, Glycine max
  Clone ID: PAT_MRT3847_71419C.1.pep
HCLVKHKWGQVNGHHSWTAKDMPCSSVNWSSHHLLFWEPHLVGICLCEGYNPHSWNKSPPKDLFFNS

SEQ ID NO: 254039 - protein, 51 aa, Glycine max
  Clone ID: PAT_MRT3847_7141C.1.pep
TCHYLLDISIIYSLVYSFDFRCFLTLVSSNSIFEQNFLFCQIPWSIVHIAT

SEQ ID NO: 254040 - protein, 244 aa, Glycine max
  Clone ID: PAT_MRT3847_71420C.1.pep
MFFCVLQILLLNGYDLTFLKTLAVRIGIIYLLSGFGGSVLSSLFIRNNISVGASGALFGLLGAMLSELITNWSIYTNKAAALFTLLFIIVINLAHASAHASVRLREDDRRGGKERHLSQCWSETRTPPPQTLSHTNCGVSRNPRRFSFQHHKTHSTAQHSISKPSLFSPSATLRHGPAPQPPTSPRARHQRKRFPPKTATQQGNRPSRRIAFRRRVAAWRVTELRRASYGVQFRNPRPWCFLIG

SEQ ID NO: 254041 - protein, 79 aa, Glycine max
  unsure (1)..(79): unsure at all Xaa locations
  Clone ID: PAT_MRT3847_71421C.1.pep
NPKYGGGVGRKQEEYFPGPLPLVRLNPRSDWADDERDTGHGLSSEXREHGFPKGEVFWDFDIPRVGGLPHKHEKRGLLR

SEQ ID NO: 254042 - protein, 101 aa, Glycine max
  unsure (1)..(101): unsure at all Xaa locations
  Clone ID: PAT_MRT3847_71422C.1.pep
KPIRPPNAFFVFPEEVKKSFNAENTNAKAASNDAKPGXRNVNPXSSAEKAPYEIIAAKRKSDSEKLIQAYDNKYASSSNDEESYESKSEVNDDHDASGDDE

SEQ ID NO: 254043 - protein, 87 aa, Glycine max
  unsure (1)..(87): unsure at all Xaa locations
  Clone ID: PAT_MRT3847_71423C.1.pep
RLTRMHAWLQKVMKKHDTLFYLSNQEDDRLAKDDQDVGMKGWRPCLEFCXEHGFKYREHDWWPGYXDGIYMTMWNLTMLLCTDTSQV

SEQ ID NO: 254044 - protein, 105 aa, Glycine max
  unsure (1)..(105): unsure at all Xaa locations
  Clone ID: PAT_MRT3847_71424C.1.pep
MAQLPPKIPNMTPNWPDFSSPHQKMPSLKTMSPNQNPSWVDEFLEFSAARRGAHRRSVSDSIIAKVAVXGGGGGSGDNEFERFDDEQIMSMFNDEASXNNYNNNN

SEQ ID NO: 254045 - protein, 59 aa, Glycine max
  Clone ID: PAT_MRT3847_71425C.1.pep
TFRLRIDHEDTGNYGKKHFHIYQNGFIVGKSTNVTYLKPPRSGPIRFPLKPWAKFMGPD

SEQ ID NO: 254046 - protein, 196 aa, Glycine max
  Clone ID: PAT_MRT3847_71426C.1.pep
MAQLPPKIPNMTPNWPDFSSPHQKMPSLKTMSPNQNPSWVDEFLEFSAARRGAHRRSVSDSITFLEAPLLDHHHCKGGSVGGGGGSGDNEFERFDDEQFMSMFSDEASGNNNNNNNNNNNNNNTMMENALSSSNPSTPSDHNSINDEKEMNNKEEEGKKQVKNESEEDEDESQCQDITQLAQHDDSKNNSDAATCS

SEQ ID NO: 254047 - protein, 80 aa, Glycine max
  Clone ID: PAT_MRT3847_71427C.1.pep
AALEALRSTKDPEWELTSQVLRRVRELNRTVVEYAKAYGITLHRTRDDPDHKSTGAMQGYGPADQSTVLELTYNYGLLHT

SEQ ID NO: 254048 - protein, 357 aa, Glycine max
  unsure (1)..(357): unsure at all Xaa locations
  Clone ID: PAT_MRT3847_71428C.1.pep
MKDRQRWRAEEDALLRAYVKQYGPREWNLVSQRMNTPLNRDAKSCLERWKNYLKPGIKKGSLTEEEQRLVINLQATHGNKWKKIAAQVPGRTAKRLGKWWEVFKEKQQRETKGNSCTIDPISDSKYEHILESFAEKLVKERPSPSFVMATSNSSFLHADAPAPPPALLPSWLSNSNGTAPVRPPSPSVTLSLSPSTVAAPPPWLQPPVRGPDNAAPLVLGXWRPHGAVLAFGENMVMSELVECCKELDEVHHALAGHKKEAAWRLSRVELQLESEKAGRRREKMEEIEAKIKALREEQTAALDRIEAEYREQLAGLRRDAESKEQKLAEQWAAKHLRLTKFLEQVGCRSRLTEPNGR

SEQ ID NO: 254049 - protein, 60 aa, Glycine max
  unsure (1)..(60): unsure at all Xaa locations
  Clone ID: PAT_MRT3847_7142C.1.pep
TAARRRQKGTAARIXQKGTAPKRRQKGMTARRLQKGAAARRPQKGPARTTRQKGSVIMVS

SEQ ID NO: 254050 - protein, 104 aa, Glycine max
  Clone ID: PAT_MRT3847_71430C.1.pep
WLALTPLESKLFNRSFALMKAKAHAPPGVPLETSAELSQKDIDIIADVLARWPSLQRFPVVDLLRLLIAYSPNTFEAPQTLQKLIDALFEASEWKESWPSPLPK

SEQ ID NO: 254051 - protein, 98 aa, Glycine max
  Clone ID: PAT_MRT3847_71431C.1.pep
AAPPSMMPGVFWSIPYELLAIIASDVAVVLIFLGAATLVDTCPLLMFMIPPHPFSPRLLHRVLPLLDSATLKLNIVEDPFLSNTLMPFWPAMTSPSRI

SEQ ID NO: 254052 - protein, 63 aa, Glycine max
  unsure (1)..(63): unsure at all Xaa locations
  Clone ID: PAT_MRT3847_71432C.1.pep
MKFNIANPTTXTSEXLLIEDDLKLPAFWEQIISQEDTGQALCDAFNGNVIIITGGYDKQGSPM

SEQ ID NO: 254053 - protein, 41 aa, Glycine max
  Clone ID: PAT_MRT3847_71433C.1.pep
FGSRKTTEGTARGYKQRNFTHSAQMLQIRLLFPQGKICITN

SEQ ID NO: 254054 - protein, 68 aa, Glycine max
  Clone ID: PAT_MRT3847_71434C.1.pep
ISNDQTNIAPYHIFLSRDFLIYPEPFFLVSALKIIRSKTYYTPRNYIWCLTTDDFTQWSILNFIYTFI

SEQ ID NO: 254055 - protein, 67 aa, Glycine max
  Clone ID: PAT_MRT3847_71435C.1.pep
RVRSLSISFSFFLSYQSALFYLLYPNSTAYRMSPTINYSKHLVLCPLTDRCPINSILSTPWCLSLLS

SEQ ID NO: 254056 - protein, 93 aa, Glycine max
  Clone ID: PAT_MRT3847_71436C.1.pep
RQFCWFLTKSSRLQEMDQQVERQKRSKEMKRKSSSKVNKRNKLMICCRCPCRAATCMFRGIGRCMFVTCYPVVQCLGLDEHRHRHHHCKHFDW

SEQ ID NO: 254057 - protein, 113 aa, Glycine max
  Clone ID: PAT_MRT3847_71437C.1.pep
AHTSQPLDSYHRSARQWYSTSEEAGSNWFENRNIRSAREIGSDWPQSIMYVGVIGPACSPTRTRACVLQNLGVTYREGLRSQGFVLVSPTRALVVECLHFLNNLPIILSVLDP

SEQ ID NO: 254058 - protein, 67 aa, Glycine max
  unsure (1)..(67): unsure at all Xaa locations
  Clone ID: PAT_MRT3847_71438C.1.pep
FAKITNNETLVXVNNRKKGSAFDPQEPHQLFEKAEVILNRGEAKSQPFGPILVFSRVRTRVGPTTVF

SEQ ID NO: 254059 - protein, 188 aa, Glycine max
  Clone ID: PAT_MRT3847_71439C.1.pep
MLLGKRPRAPIMKRTTSMSGGLAVETKTSKEEEVLMSDNMKLVDPHVNVVAMGTPNDQFVPNHTKNVSQANGSYVYGDRLMGMGVNMSMPLSPTTSNNHRHHMTHNHTTNTNNIHTTSHFLRTCGLCNCHLAPGRDIYMYRGDTAFCSLECREKQMKQDQRKEKWKAGSNKEHHRASPPGATAKASCN

SEQ ID NO: 254060 - protein, 69 aa, Glycine max
  Clone ID: PAT_MRT3847_7143C.1.pep
TVHPNINTTPNYLLPLNPCSYPGHYSNESEHHPHILTSTNISNQVSCLHKSPKLLDRLSPPYASCISIN

SEQ ID NO: 254061 - protein, 264 aa, Glycine max
  unsure (1)..(264): unsure at all Xaa locations
  Clone ID: PAT_MRT3847_71440C.1.pep
TRRSPDYNLVRFFFTLAAAFLVGTVFWRVGKNRDNTGDLNTIIGALYGSVXFVGVNNCQTVQPVVAVERTVFYRERAAGMYSALPYAIAQVISEIPYLFVQTIFFSFIVYAMVSFEWKVAKVLWFCFVSFFSFMYFTYYGMMTVSITPNHQIASILGAAFYGIFNLFSGFFIPRPKIPKWWVWYYWICPVAWTVYGLIVSQYGDVEIEISVLGASNQTIKHYIEDHYGFKPDFMGPVAAVLVAFPVFFAFVFAFAIKTLNFQTR

SEQ ID NO: 254062 - protein, 60 aa, Glycine max
  Clone ID: PAT_MRT3847_71441C.1.pep
RRQNTTQWGCKTATPCDRTQLRFSISQRITMNHHWCSLSGNRISLKGQQFMEHVQCFRHN

SEQ ID NO: 254063 - protein, 42 aa, Glycine max
  Clone ID: PAT_MRT3847_71442C.1.pep
RIKYVLSIRIKIFFYTFKIRKLFHDSPSLQASANAWRAPAIQ

SEQ ID NO: 254064 - protein, 47 aa, Glycine max
  Clone ID: PAT_MRT3847_71443C.1.pep
KIARPKDSVCWPSQPWFFTWVESYNLRLRRRQRLRLQNWDTKKKRPA

SEQ ID NO: 254065 - protein, 261 aa, Glycine max
  Clone ID: PAT_MRT3847_71444C.1.pep
MGRVIRAQRKGAGSVFKSHTHHRKGPARFRSLDFGERNGYLKGVVTDIIHDPGRGAPLAKVAFRHPFRYKKQMELFVAAEGLYTGQFIYCGKKATLVVGNVLPLRSIPEGAVICNVEHHVGDRGVFARASGDYAIVISHNPDNDTSRIKLPSGSKKIVPSGCRAMIGQVAGGGRTEKPLLKAGNAYHKFRVKRNCWPKVRGVAMNPVEHPHGGGNHQHIGHASTVRRDAPPGQKVGLIAARRTGRLRGQAAAIAAKADKTT

SEQ ID NO: 254066 - protein, 261 aa, Glycine max
  Clone ID: PAT_MRT3847_71445C.1.pep
MGRVIRAQRKGAGSVFKSHTHHRKGPARFRSLDFGERNGYLKGVVTDIIHDPGRGAPLAKVAFRHPFRYKKQTELFVAAEGLYTGQFVYCGKKATLVVGNVLPIRSIPEGAVICNVEHHVGDRGVFARASGDYAIVISHNPDNDTSRIKLPSGAKKIVPSGCRAMIGQVAGGGRTEKPLLKAGNAYHKFRVKRNSWPKVRGVAMNPVEHPHGGGNHQHIGHASTVRRDAPPGQKVGLIAARRTGRLRGQAAATAAKADKTT

SEQ ID NO: 254067 - protein, 114 aa, Glycine max
  Clone ID: PAT_MRT3847_71446C.1.pep
FASALGAAFGRSPPKEQVDVDIATHINISDDGPDRSMLYVETADRPGLLVDLVKIITDINIAVESGEFDTEGLLAKAKFHVSYNGKAISKPLQQVLANSLRYFLRRPTTEESSF

SEQ ID NO: 254068 - protein, 83 aa, Glycine max
  unsure (1)..(83): unsure at all Xaa locations
  Clone ID: PAT_MRT3847_71447C.1.pep
XXALEXXIKXLXXXRNELTEQKXKPLXXXVAXXLHNSLVFLACLETLLRSKKSCLECGTKHTICLGILNHNQLLIFYVKCSLK

SEQ ID NO: 254069 - protein, 187 aa, Glycine max
  Clone ID: PAT_MRT3847_71448C.1.pep
MTLAMAVWSAGLHFSAARSSLRPLEKTICTAPFLKASSGFAATKPFCILNTTRLSYSGTTIIPRAAPVTDVKDGNQGETDTIPTPVVIIDQDSDPDATVVEITFGDRLGALLDTMNALKNLGLNVVKANVFLDSSGKHNKFSITKADTGRKVEEPELLEAIRLTIINNLIQYHPESSSQLALGAACG

SEQ ID NO: 254070 - protein, 294 aa, Glycine max
  Clone ID: PAT_MRT3847_71449C.1.pep
MTVAMAVWSAGLHFSAATKPHSSLRPLEKIICTAPFFKASSGFAATKPFCILNTTRLSYSGTTIIPRAAPVTDVEDGNHGETDTIPTPVVIIDQDSDPDATVVEITFGDRLGALLDTMNALKNLGLNVVKANVFLDSSGKHNKFSITKADTGRKVEEPELLEAIRLTIINNLIQYHPESSSRLALGAAFGLLPPKEQVDVDIATHINISDDCPDRSLLYVETADRPGLLVDLVKIITDINIAVESGEFDTEGLLAKAKFHVSYNGKAISKPLQQVLANSLRYFLRRPTTEESSF

SEQ ID NO: 254071 - protein, 132 aa, Glycine max
  Clone ID: PAT_MRT3847_7144C.1.pep
KKGPSPLSGKTKYFFFWTKVGLCGPGHKGAKRVPQNKKKAPKGPSPGGGGKRGFFKPKIAPKKKGPPFTKNRGFNKFFFWGVPGAPFWVFFFFLKIFPRGTGDLGGGPQGNPGGHFFGAMIFKKKKIGGGFW

SEQ ID NO: 254072 - protein, 111 aa, Glycine max
  Clone ID: PAT_MRT3847_71450C.1.pep
IEVCKKQKKDSDVRDFRLLIAQIKVMEGDYTEALKAYQELVKEEPRDFRPYLCQGIIYTLLRKKDEADKQFNKFRRLVPKDHPYKDYFEDNMFATKFFSQKLEREGAGARG

SEQ ID NO: 254073 - protein, 28 aa, Glycine max
  Clone ID: PAT_MRT3847_71451C.1.pep
KLVREPLFYCTYMLSNIDYATLINCARA

SEQ ID NO: 254074 - protein, 52 aa, Glycine max
  Clone ID: PAT_MRT3847_71452C.1.pep
ILQWSGRFGFIMIHNSSEVQIIDKQRLLILRINPQIERTFCVVLRYFYSIGR

SEQ ID NO: 254075 - protein, 136 aa, Glycine max
  Clone ID: PAT_MRT3847_71453C.1.pep
KKKNFFLFCPKQDMKKQGGGKLGLKNKNGPRTPGGGKLIKRVDFGGTIFGGGSPLKKQKGGAPLGRGTLFFYFFRPQGFFLKTPRGEKKNFGGSFKKWGFLFGGHPFALCSRKFFLSPPTENKGCKGGVSGGKKKQ

SEQ ID NO: 254076 - protein, 181 aa, Glycine max
  Clone ID: PAT_MRT3847_71454C.1.pep
MFVGGTAAPAAVTVWAMSELIKNPKAMEKAQTEVRKVFNVKALLLPRENSEACVVNGYKIPAKSKVIINAWAIGRESKYWNEAERFVPERFVDDSYDFSGTNFEYIPFGAGRRICPGAAFSMPYMLLSLANLLYHFDWKLPNGATIQELDMSESFGLTVKRVHDLCLIPIPYHPTSKLGHL

SEQ ID NO: 254077 - protein, 100 aa, Glycine max
  Clone ID: PAT_MRT3847_71455C.1.pep
LEPIRLEGFWLPFSSFPPGGTPRISFSVPVKGVVTNKGVSTVGALGGPGQWGNNKVWKKQSFFIRLTMEGINLMGVWFVGGGGTPWWNGVLGPKHQKNLL

SEQ ID NO: 254078 - protein, 502 aa, Glycine max
  Clone ID: PAT_MRT3847_71456C.1.pep
MELLIPFSLLFTFACILLALFNTLNRSNSKILPPGPWKLPLLGNIHQFFGPLPHQTLTNLANQHGPLMHLQLGEKPHIIVSSADIAKEIMKTHDAIFANRPHLLASKSFAYDSSDIAFSSYGKAWRQLKKICISELLNAKHVQSLRHIREEEVSKLVSHVYANEGSIINLTKEIESVTIAIIARAANGKICKDQEAFMSTMEQMLVLLGGFSIADFYPSIKVLPLLTGMKSKLERAQRENDKILENMVKDHKENENKNGVTHEDFIDILLKTQKRDDLEIPLTHNNVKALIWDMFVGGTAAPAAVTVWAMSELIKNPKAMEKAQTEVRKVFNVKGYVDETELGQCQYLNSIIKETMRLHPPEALLLPRENSEACVVNGYKIPAKSKVIINAWAIGRESKYWNEAERFVPERFVDDSYDFSGTNFEYIPFGAGRRICPGAAFSMPYMLLSLANLLYHFDWKLPNGATIQELDMSESFGLTVKRVHDLCLIPIPYHPTSKLGHL

SEQ ID NO: 254079 - protein, 52 aa, Glycine max
  Clone ID: PAT_MRT3847_71457C.1.pep
YKALAVGADPKCIMNFRRSPGESSNVHLCPSSFKDFANVSHAFLAAMVARSY

SEQ ID NO: 254080 - protein, 54 aa, Glycine max
  Clone ID: PAT_MRT3847_71458C.1.pep
SFTFFTEIEQSLGFSFFPYIYRLSFFVFSWSRRFEVRMLGYYYALSPLEPSSEP

SEQ ID NO: 254081 - protein, 463 aa, Glycine max
  Clone ID: PAT_MRT3847_71459C.1.pep
MGPNLVTEVPEGEDDRKFSSPQLLHSYSDKRSYDHFHKRDKSYKGKVNQDGFESFDCDMGEHTSVFSNQHGLGIGLSDVTSDPMRQTRFIRMKTTSEEPSTSNRRIKIRQGQSSRGKSDREDSSTRMSDQLHRRIRTARHRNGEYIANDSGTLTRRVSNHHVKKLSWLMLSEPEEGYRYIPQLGDEVVYLRQGHQEYIKSYSLSESGPWRSFTGLGASEICKVEELEYAELPGSGDSCCKLKLRFLDPSSCVHGKSFKLTLPELINFTDFVIEKTWYDTAMKRNWSSRDKCMVWWRNEDGKGGSWWDGRIIQVQAKSDDFPESPWERYRVQYKTDPTENHLHSPWELYDSEMLWEHPHIDHEIRDKLLSYFTKLDRRERFDIQALNQVAEKLEFANRFPAPFYPELIQSRLKNDYYRSVEGVNHDIMIMLSNAEEYFKITKNVQLVGKIRRISEWFRRKLERI

SEQ ID NO: 254082 - protein, 48 aa, Glycine max
  unsure (1)..(48): unsure at all Xaa locations
  Clone ID: PAT_MRT3847_7145C.1.pep
XIFSLHICGVRLQILQQCWVNKTSDLLWKILSSKALINAKHLIQMGGP

SEQ ID NO: 254083 - protein, 111 aa, Glycine max
  Clone ID: PAT_MRT3847_71460C.1.pep
QLTLFKHFVLPPLNHVFSQTTFVLLFLKKTSGVTNSSNYTNFCRLNSFIQPKLKFLSKYYSPVITQHWSSTQLFWTANSYLTWKHLTVLNMARKQGPFWPSQPIFLRIVFL

SEQ ID NO: 254084 - protein, 113 aa, Glycine max
  Clone ID: PAT_MRT3847_71461C.1.pep
MIDLAFSVCRRFRWGTRSQGKKIFCPKILFTKSRPPFSPSPWAPKKRGPRGKIPFPGPPRFEGAAPKNSHTRIAPSRKQIPAPGGDCPRGAFTKKSPSRKTVWGQHPPLGTPP

SEQ ID NO: 254085 - protein, 94 aa, Glycine max
  Clone ID: PAT_MRT3847_71462C.1.pep
KGGPQNSKALGNHGGGAGVKPHPFFNRTGQLVGALLKGGKNKGQPIGLTPLGPGKKRDISKIRGASFKPFGPFGASQNGGTGAFGYGGFKTPGP

SEQ ID NO: 254086 - protein, 66 aa, Glycine max
  Clone ID: PAT_MRT3847_71463C.1.pep
LSCHITGVSFSYHYQKKKGYNLLIPTHYHPPLGGVHSFYTPHFDFNNRPTLQLSPLFNSLIKYQNF

SEQ ID NO: 254087 - protein, 58 aa, Glycine max
  Clone ID: PAT_MRT3847_71464C.1.pep
FHIKNYLITSLNFSCYIYNTHSPTYNFNFFKYIIYPSSIKKKKLISYLSSFIPLIIHT

SEQ ID NO: 254088 - protein, 48 aa, Glycine max
  Clone ID: PAT_MRT3847_71465C.1.pep
KILRQFRDFQQTLLDNTEVNTTVPVQMTCMHKTKVNQNETPFVVFSQP

SEQ ID NO: 254089 - protein, 59 aa, Glycine max
  Clone ID: PAT_MRT3847_71466C.1.pep
SSPSLTIELQQLHRGTDRATAAMTEQLSILFAELAEMHRPKIACSKEEKNFVAKWQNGN

SEQ ID NO: 254090 - protein, 42 aa, Glycine max
  Clone ID: PAT_MRT3847_71467C.1.pep
KVEVPMLILTCERMIHSICIIHFRFNYCFSPRILGVCVFFSP

SEQ ID NO: 254091 - protein, 331 aa, Glycine max
  Clone ID: PAT_MRT3847_71468C.1.pep
LEEILNDVRRKWVERIYDDINASITKRSIDGDFKLSKLAVVITRVTALMGILKETETPELERGAVRAVQDLYDVMRHDFLSINLRENYDTWSLLSKARDEGHLFEKLKWPKNTDLKMQVKRLYSLLTIKESASSIPKNLEARRRLQFFTNSLFMKMPRAKPVREMLSFSVFTPYYSEIVLYSMAELLKKNEDGISILFYLQKIYPDEWKNFLARIGRDENTLESELYDNPSDILELRFWASYRGQTLARTVRGMMYYRKALMLQTYLERTTAGDLEAAIGCEEVTDTHGFELSPEARAQADLKFTYVLTCQIYGEQKEEQKPEAAYIALLM

SEQ ID NO: 254092 - protein, 70 aa, Glycine max
  Clone ID: PAT_MRT3847_71469C.1.pep
PCQYWSIKLVENHVDEFFPVHIHCPSSCSSRGNEGLMHCRKTIHFSVSTPLVSKTYSVMSLVLDSVGRVG

SEQ ID NO: 254093 - protein, 56 aa, Glycine max
  Clone ID: PAT_MRT3847_7146C.1.pep
WQSVFILKSKCYVNTTGVHRALVISDRAKQIERGIVMVCYSMLDCMKESIAGDEGE

SEQ ID NO: 254094 - protein, 118 aa, Glycine max
  Clone ID: PAT_MRT3847_71470C.1.pep
MATVEVAQQTPTTVTENETTTEVTKIEETTPEQPATEVTAPETVNEEAKEEAAVETNEATEVTEEGKAEKTEEEEEVKEETKETESAPVEEEKQEENKPAETVEEPKTEQVSVEKTEV

SEQ ID NO: 254095 - protein, 69 aa, Glycine max
  unsure (1)..(69): unsure at all Xaa locations
  Clone ID: PAT_MRT3847_71471C.1.pep
DGERRKMEESHSKRAFPAEQRECLDSSYALIRSSSDIRFDLHPTQSHAHRHIRERIVXAMDDRKSDLAE

SEQ ID NO: 254096 - protein, 65 aa, Glycine max
  Clone ID: PAT_MRT3847_71472C.1.pep
SSQWKNWDSNLIGNIWGSGSFFLSPPICLKNKLFHNLLSFPNSCIHSSLMMSNLFCCLFTIICHK

SEQ ID NO: 254097 - protein, 95 aa, Glycine max
  Clone ID: PAT_MRT3847_71473C.1.pep
MGSVCCCLSFDDFEDYVNPNSPVYRNCVCLSCLIQNLLIVYSSIFRRGDAHSIPSSIQGAASITSAASLDNSLSDMYRSPPATLPYDAEPRYFRS

SEQ ID NO: 254098 - protein, 62 aa, Glycine max
  Clone ID: PAT_MRT3847_71474C.1.pep
RAGKFCRKLQNPLLVNSINDNLNLLQLILYLSLFFSSPNNNFNQNSLSGWRHRLLLRLRLFA

SEQ ID NO: 254099 - protein, 45 aa, Glycine max
  unsure (1)..(45): unsure at all Xaa locations
  Clone ID: PAT_MRT3847_71475C.1.pep
MGAVCCWFNVDDFEDYMNPNSSVYRNCMCLSCFVQNXLTVYESIF

SEQ ID NO: 254100 - protein, 229 aa, Glycine max
  Clone ID: PAT_MRT3847_71476C.1.pep
MGSVCCCLSFDDFEDYVNPNSPVYRNCVCLSCLIQNLLSVYSSIFRRGDAHSIPSSIQGAASITSAASLDNSLSDMYRSPPRPLPYDAEPRYFRSQRDGLVSRREKGSSHSNEETEPLRSDADVDPESLNSGDKWNESACEAGSKEYHSKSSLRLQSTKYSTGVGLVYASSEEEDVCPTCLEEYTKENPKIMTKCSHHFHLGCIYEWMERSDNCPVCGKVMVFDETTFT

SEQ ID NO: 254101 - protein, 262 aa, Glycine max
  unsure (1)..(262): unsure at all Xaa locations
  Clone ID: PAT_MRT3847_71477C.1.pep
MFYRGKFADGGDGREMAAKRQRTVDPGSSFYGASTGSNFMYNPSPYGYVSQPPPPPPFPVVRLRGLPFDCTETDVAEFFHGLDIVDVLFVHKGGKFTGEGFCVLGYPLQVDFALQRNRQNMGRRYVEVFRSKRQEYYKAIANEVSDARGSXSPRRSASRAKSYDEGKESAEHTGVLRLRGLPFSASKDDIMEFFKDFGLPEDSIHIIMNSEGRPSGEAYAEFESAEDSKAAMIKDRMTLGSRYIELFPSSHGEMEEAISRGR

SEQ ID NO: 254102 - protein, 88 aa, Glycine max
  unsure (1)..(88): unsure at all Xaa locations
  Clone ID: PAT_MRT3847_71478C.1.pep
GATGDGGMVDSDHDRALAGLDXPSFQDVKEITILRSNLAKWLKEPFFEELIDDCFVRGGXGRPKTGPIYRLCMEKNVYASKPDRQYIF

SEQ ID NO: 254103 - protein, 96 aa, Glycine max
  unsure (1)..(96): unsure at all Xaa locations
  Clone ID: PAT_MRT3847_71479C.1.pep
KRVVLRSLKIQKGKVLGASVTNVKAVAITAPEKVVLRRQNVQVKKDGQGXLYNNVIEETATKLVETQKGKVKALIDAFEAVISLEEKRTSAANIVN

SEQ ID NO: 254104 - protein, 138 aa, Glycine max
  Clone ID: PAT_MRT3847_7147C.1.pep
RFSEHAPVFWTSNATFLESPFSPKEESLYDSRVHLRPLQPGNKVLEQFPFSDSEVVNQIQQFQLSDNVVDRILHISSSYDLVVPDLAGTLNPRSAEGRIWQYRNGTFGFGFLSDNFVIDMKHIVPNGCIVDTVNSSAN

SEQ ID NO: 254105 - protein, 61 aa, Glycine max
  unsure (1)..(61): unsure at all Xaa locations
  Clone ID: PAT_MRT3847_71480C.1.pep
YYSLLLYYDAXXRGRSALLISCLLAMLILISSDGSAIELREVTGAGLCGPSWGHLWWLWWW

SEQ ID NO: 254106 - protein, 64 aa, Glycine max
  Clone ID: PAT_MRT3847_71481C.1.pep
EDLLYLEFLEKFERKFVAQGAYDTRNIFQSLDLAWTLLRIFPRELLHRIPAKTLDQFYSRDAGN

SEQ ID NO: 254107 - protein, 98 aa, Glycine max
  Clone ID: PAT_MRT3847_71482C.1.pep
FLTGTNGRVPPPYAGHVNLFIPPLGVLINHRGSKGEFLVCTTVFMWPLLEQLGLFPVRAHIVVFPSGFPPLAPRRFGFLIKPPRLVPPWGGTFPNPFF

SEQ ID NO: 254108 - protein, 47 aa, Glycine max
  Clone ID: PAT_MRT3847_71483C.1.pep
AQGAYDTRNIFQSLDLAWTLLRIFPRELLHRIPAKTLDQFYSRDAGN

SEQ ID NO: 254109 - protein, 49 aa, Glycine max
  unsure (1)..(49): unsure at all Xaa locations
  Clone ID: PAT_MRT3847_71484C.1.pep
RHXLXHXXLXXSXTXXXPXHLXQPIXNQEXXXXXAXXXEXXXXLTXAXX

SEQ ID NO: 254110 - protein, 139 aa, Glycine max
  unsure (1)..(139): unsure at all Xaa locations
  Clone ID: PAT_MRT3847_71485C.1.pep
NGDAGXVKVIRTRPMVVETFSEYPPLGRFAVRDMRQTVAVGVIKNVDKKDPTGAKVTKAAQKKKXIVRFGSSGDVVSYGYNQCWFLALVSSFLGSLFFGHSLKSPPSSRNFCSQNWVLDRRWQDSFYHSVVMCCVCENP

SEQ ID NO: 254111 - protein, 76 aa, Glycine max
  Clone ID: PAT_MRT3847_71486C.1.pep
WGGLTTDFLDPYHNMQGDSSTKKPPPWPPFKGRSFFPKLPEIKPPPRGPRDPKLPAPEGGGPPRWPFPGFSPFWGG

SEQ ID NO: 254112 - protein, 120 aa, Glycine max
  unsure (1)..(120): unsure at all Xaa locations
  Clone ID: PAT_MRT3847_71487C.1.pep
VKMIPTKPMVVKPFSKYPPLGRFAVRNMRQTVAVGVIKNVEKKDPTGAKVPKAAXKKSESCGLVHQGMSFLMVPXMLVSCPCVFSPPSSRNFCSQNWVLDRRWQDPFYHSVLMCGGCENP

SEQ ID NO: 254113 - protein, 106 aa, Glycine max
  Clone ID: PAT_MRT3847_71488C.1.pep
SGRGGSMNLPERARHATRVRIKELLHAYSSVKKKPIHSTIIYLESYWIKEDLVASYWSTLNSGRCSRMHTRYILFKATWHCLLYPSKGYDLTHKPCLEGRAAYSLA

SEQ ID NO: 254114 - protein, 104 aa, Glycine max
  Clone ID: PAT_MRT3847_71489C.1.pep
KANQHRTGKALKLVALNKNVFRGSHNPTPLKQIDKGSFATVDQKPIFGNKSCKMMVETSNYVRKTSYLKTKTQGQEPNFYCNHKKRHPLMNQTARFIFSSGQPW

SEQ ID NO: 254115 - protein, 133 aa, Glycine max
  Clone ID: PAT_MRT3847_7148C.1.pep
APVFWTSNATFLESPFSPEEESLYDSRVHLQPLQLGNEVLEQFPLSDCELVNQIQQFQLSGNVVNRIHHISSSYELVVPGLAGTMNRRSAEGRIWQYRNGTFGFGFLSDNFVIDMKHIVHNGCIVDTVNSSAN

SEQ ID NO: 254116 - protein, 474 aa, Glycine max
  Clone ID: PAT_MRT3847_71490C.1.pep
MMEREEEKEVVGVSVLHGGMIITMDEEQRVYRDGGIVVEHDKIKAIGQSADILAEFSDVADSIVDLSGHILLPGFINTHVHSSQQMARGIADDVDLMTWLHERIWPYESNMSEQDSYLSTLLCGIELIHSGVTCFAEAGGQHVSGMARAVGLLGLRACLTQSTMDSGHGLPPSWATRTTHQCIQSQKDNYHKYHNTAQGRIRIWFAIRQIMNSTPRLLIQTRDAATQLNTGIHMHVAEIPHENQLVMDVHKIDHGTVTYLDKINFLQNNLLAAHSVWIDNNEISLLSRAGVKVSHCPAAAMRMLGFAPVREMLDAGICVSLGTDGAPSNNRMSIVDEMYLASLINKGRGVYANGTTDPTALPAETILRMVTVNGAKSVLWDDELGSLEVGKKADIVVVDPSSWSMVPVHDCISSLVYCMRSENVVSVMCNGLWIMKNKKIIYVDEEEVILKAKQASVELLKRAGIKLPTRMNII

SEQ ID NO: 254117 - protein, 52 aa, Glycine max
  unsure (1)..(52): unsure at all Xaa locations
  Clone ID: PAT_MRT3847_71491C.1.pep
MDYAAKHVTEKMMLNAGDIYPHNTSDANEAYYYXMVFEKVFRXNSAKLTVPG

SEQ ID NO: 254118 - protein, 87 aa, Glycine max
  Clone ID: PAT_MRT3847_71492C.1.pep
HGTAGALGYTWCMVYDLNSARRWRYLGWQCYKMEVRDKIKDCALRKVSRHHCMTSSFFGGGGGRLKFNTGVKDNAKDGKGKTKTGDE

SEQ ID NO: 254119 - protein, 114 aa, Glycine max
  Clone ID: PAT_MRT3847_71493C.1.pep
MRMLGFAPVREMLDAGICVSLGTDGAPSNNRMSIVDEMYLASLINKGRGVYANGTTDPTALPAETILRMVTVNGAKSVLWDDELGSLEVGKKADIVVVDPSSWSMVPVHDCISS

SEQ ID NO: 254120 - protein, 61 aa, Glycine max
  unsure (1)..(61): unsure at all Xaa locations
  Clone ID: PAT_MRT3847_71494C.1.pep
WGPNDLKSIKQVPGVNRPGGYWIYXGPPITCKNSFLAWHRLEDQLEEELRQFEDTAQLLSW

SEQ ID NO: 254121 - protein, 202 aa, Glycine max
  Clone ID: PAT_MRT3847_71495C.1.pep
MEGEEGKQSSQKNPYVELEEVDFDFILAMSMQEQEREFTMLSTIESESDEYLSDSSIDNDDDGDPDFIASQEFETDLRFLEGEGSDDDDEDMEMEEDEIDPDELSYEELMELEEFIGEETRGLSANEISLCLYPYTCQCAESKSGIDRCVICQVEYEEGEALVALQCEHPYHSDCIRKWLQIKKVCPICGNEVSTPNLASNP

SEQ ID NO: 254122 - protein, 170 aa, Glycine max
  unsure (1)..(170): unsure at all Xaa locations
  Clone ID: PAT_MRT3847_71496C.1.pep
TMQIQTLPLASPAPRITRHHFPRPPKCAVTATPPPLKERRNHSMPPEKIEIFKSLEGWASQRVLPLLKPVEQCWQPQKFLPDSTLPFDEFIEAVRSLRHRTKELSDEYFLVLVGDMVTEEALPTYQTIMSGLDGVGDKCGSNPSPWAVWTRALSVEENRHGDVLXTDWGV

SEQ ID NO: 254123 - protein, 135 aa, Glycine max
  Clone ID: PAT_MRT3847_71497C.1.pep
MRGRSLLLKKHLTNTQCHYVYLQSKRIPIHIQSMMAQLLHTPLIPSYYCALRWAVTIPQRKTTSLLMALAKIREIFMPPLSSTMTDGKIVCCTRCGGDTLCKGDSVGGVESDKADMDVETFYDSYLAAIVDEEGG

SEQ ID NO: 254124 - protein, 124 aa, Glycine max
  unsure (1)..(124): unsure at all Xaa locations
  Clone ID: PAT_MRT3847_71498C.1.pep
LSMFRMMNAPDSNDIFALLLSIDLLGLHRAGQAFPNXDGIKRXLVLANTQXAHDGYGPAAYWLPMVVNWLYTVSQFPSQAVVLNVTXGGGRGDXPTTDWISPAVHTXPXDINKKIHTSLGKGTK

SEQ ID NO: 254125 - protein, 83 aa, Glycine max
  Clone ID: PAT_MRT3847_71499C.1.pep
YSSQSDLCIPLTILIRPNPPTLKKKTFLFYLVKKTNFYQDFPPPKNQNPSRTQTCTHARIQIKKNRVWIEKIKEKTTENCDDS

SEQ ID NO: 254126 - protein, 122 aa, Glycine max
  Clone ID: PAT_MRT3847_7149C.1.pep
RYPDIIVHRTLLATIEAEELYMKHQKALQGYKEVKVQKRCFTDISFDKIAAESMEGREALSAAAVKHSVPCAETLADIAGFPSLEDAPASPASPSCRRVGCDNRSLYLGSFNYPNTRTYDQE

SEQ ID NO: 254127 - protein, 498 aa, Glycine max
  Clone ID: PAT_MRT3847_714C.1.pep
MEDGDTTEEAVVVPVSNGDEQSFSHSSSRQRDSEEESPHETLRNTKASIENIVAEILSLKNQAKPKPLLTLRLRELLTQTFLHFVTLRQANRSILLEEERARTETERAKVPLELTTQKLQNLSYEKSQFVKAIKVCNDFKSKYPDIEVVSEEEFFRGAPQDMKDSVLSNHSEHNLVLKRLNFELFQRKELCKLHDKLEQKRKTLLDTIANRKKFLSSLPSHLKSLKKASLPVQNQLGVQHTKKLKRHHTAELLPPPLYVIYSQLLAQKEAFGESIDVEIIGSVKDAQAFSHHLAHKDTGISTTVESPKLENNEPDEDGKGQSKRPRRFQGKESLDQEGIFQIHPLTVNLHVYDDEISDLESAKLTTLKFEYLMQLNIICVGNKASNDGPENDILSDLFPDDTGLELPHQSAKLFVGDAIMFNGDRTSRPYKWAQHLAGIDFLPEVAPLLLASRETSDSDEAAKGEEFITSLSQYRQQSRLQTVLQKIRSGRKAQLALQ

SEQ ID NO: 254128 - protein, 80 aa, Glycine max
  Clone ID: PAT_MRT3847_71500C.1.pep
KERTYHLNHDMRFLNKKKTYSSFFAIYITFPFFLYSRLGQKKNLHVLPGPLNNKSGGLIEFFKTPSETEFPPPSFIHSPA

SEQ ID NO: 254129 - protein, 89 aa, Glycine max
  Clone ID: PAT_MRT3847_71502C.1.pep
MMECNKDEAVRAKEIAERKFSEREYVGAKKFALKAQNLYPELEDITQLLTTIDIYTSAENKVSGEMDWYGILGVSPFADEETVRSNTGS

SEQ ID NO: 254130 - protein, 51 aa, Glycine max
  unsure (1)..(51): unsure at all Xaa locations
  Clone ID: PAT_MRT3847_71503C.1.pep
NRESTCRHTGLDIRRDLNIDSQTSETQMXDENFRDINNTPSGKGSDRTVQT

SEQ ID NO: 254131 - protein, 70 aa, Glycine max
  unsure (1)..(70): unsure at all Xaa locations
  Clone ID: PAT_MRT3847_71504C.1.pep
SARADLPPGXDGXXFPPQEEDAGPVXRSKPAXVXVXPQRGPCWXQXVGCLXAXARSLDSSLVFXELFSGC

SEQ ID NO: 254132 - protein, 101 aa, Glycine max
  unsure (1)..(101): unsure at all Xaa locations
  Clone ID: PAT_MRT3847_71505C.1.pep
PPPPPPSPPPFPTPFPPLRPRARFSIIHYPFPCLVCALSMLLSLXALLLISLPPHANLSGLMMVPRTTGQIKTTVKTDNPTSHKRERTEKTQKKREGLYDV

SEQ ID NO: 254133 - protein, 74 aa, Glycine max
  unsure (1)..(74): unsure at all Xaa locations
  Clone ID: PAT_MRT3847_71506C.1.pep
YKLEHGFVYREQNGSPGFXKRRYWTMCNQPMFGCPNPFQVXKELQXARTAYPDAIIRIIGFDNVRQVQRIKFLA

SEQ ID NO: 254134 - protein, 58 aa, Glycine max
  Clone ID: PAT_MRT3847_71507C.1.pep
TKLAEKKNSSTGSRVGTSVFHCLGNIHIYCYLFKQSILGIHIASFHYIVTRTFHCSFH

SEQ ID NO: 254135 - protein, 51 aa, Glycine max
  Clone ID: PAT_MRT3847_71508C.1.pep
HHVSKHSEDPFPSRETNKILIQQYDISTKLSNTKMEVSLAVHVNFVILNKE

SEQ ID NO: 254136 - protein, 36 aa, Glycine max
  Clone ID: PAT_MRT3847_71509C.1.pep
AAPSNQNGPVKYGSPPPALAGQSDKTSQPPDPAQPL

SEQ ID NO: 254137 - protein, 148 aa, Glycine max
  Clone ID: PAT_MRT3847_7150C.1.pep
HIDLSFLFSVSIFRYGQRICEWLCSSKWHRCHNPQSPQRRFRLHARKLLRTSFYRNTLTSGISFFFPFFFLISNVFKLLFLCLFIKRIAHNPRRFRLHAPKTSFYSTWTSVFSTMAKEFVNGFVHQNGIAVITRNPPKGDSGSMPASC

SEQ ID NO: 254138 - protein, 117 aa, Glycine max
  unsure (1)..(117): unsure at all Xaa locations
  Clone ID: PAT_MRT3847_71510C.1.pep
AGAALSFHSAPFAVLIYHYTRCRGPPDLINLNLSNCTGQIVAGYIWAGGSGVVLTSKARTLAGPKSDPAKPSKWXYDGYSTDQASGDDSEGMPHPHAIGKDPCRRGNNILVICEVYT

SEQ ID NO: 254139 - protein, 69 aa, Glycine max
  Clone ID: PAT_MRT3847_71511C.1.pep
LRPGDLIEIYTAELMLCDHTNNCPKMRLRISFPHARTLKPTHVPDYFFLGNGFSLAPCSEHVQTRPKHY

SEQ ID NO: 254140 - protein, 100 aa, Glycine max
  Clone ID: PAT_MRT3847_71512C.1.pep
SQPSPTLLPPAYQRTKSVVLPLLQGTCQVQCVIQMHQAAKLCMLGPVVPIVPQPTNLRPKFRLITTPEPVVIPEIALTTPQRVIGAMVLFIVLFTRVLQP

SEQ ID NO: 254141 - protein, 66 aa, Glycine max
  unsure (1)..(66): unsure at all Xaa locations
  Clone ID: PAT_MRT3847_71513C.1.pep
XXLCIXQWLXTAALSGXMVSXSFMRXTTYGRPRALETFPNASFXCWXSGXXWSCKLXMAXVKGGSX

SEQ ID NO: 254142 - protein, 145 aa, Glycine max
  unsure (1)..(145): unsure at all Xaa locations
  Clone ID: PAT_MRT3847_71514C.1.pep
MPVLETLGGALFGAVLQVLFDKLDSHQVLDYFRGRKLDGRLLKTLKWKLMSVNAVLDDAEQKQFTDKNVKEWLDEVRDVLLNTEDLLEEIDYEFTKTELKAESQTSASKVCNFESMIKDXLDELDSLLNVKDTLRLKNVGGDGFG

SEQ ID NO: 254143 - protein, 45 aa, Glycine max
  Clone ID: PAT_MRT3847_71515C.1.pep
NQILKSTWPQLCATLSESAVLLPALSPPIICHQKDQIGMRSTNNS

SEQ ID NO: 254144 - protein, 100 aa, Glycine max
  unsure (1)..(100): unsure at all Xaa locations
  Clone ID: PAT_MRT3847_71516C.1.pep
TCSRGRTHGVKYDIIGAGSHSSEDIPEKEDQEKPKKIDARLRHXRHPQYSGVHAQMGTNWXRLTLEDGGTPNGSMLDXLKIHQSKIALSKNTVGGTILRE

SEQ ID NO: 254145 - protein, 100 aa, Glycine max
  Clone ID: PAT_MRT3847_71517C.1.pep
SLRAEPILDLTLLALIIFLTTLFLGHGGHSTFGLTPLGLSNSLNLEIPKPYHLAINERFNFLNGVHQIWGFFTDKPYIPGSNSKPPTENRIAGYHYSFGV

SEQ ID NO: 254146 - protein, 85 aa, Glycine max
  Clone ID: PAT_MRT3847_71518C.1.pep
FGSRVCVGEMAMASWKNLVLLLFIFLGTFNADDEQSSTPLYLEQNCSGGNSIVNSAYQLNLITLLTSLSSNCLRTLFSNNRWGLG

SEQ ID NO: 254147 - protein, 282 aa, Glycine max
  Clone ID: PAT_MRT3847_71519C.1.pep
KDAPAYELLSEDEDWGPGKRKRREKESDAVDSLMTLHESENRHPNNEHNMTSKDSSSIKIKRHCFRIPRDAVERLRQVFAENELPPRSIREGLSKELGLDTEKVSKWFKNARYLALKNRKHQAEGVADQLQSITSTKNRLQKQENVDPLKSKTPKITRTHSQKDVKNVNGRKKMKSSNKKRQPEIPPPPGENGKKDFMEISDDVSLKKLLKKRKKRLINFTFGGDSQLAELEFERLSELKTKVDSMKQKLTAIQNYRVKGSPYSNEPSIVYVPTAVLREKVE

SEQ ID NO: 254148 - protein, 123 aa, Glycine max
  unsure (1)..(123): unsure at all Xaa locations
  Clone ID: PAT_MRT3847_7151C.1.pep
FXIFFSFSFILFVSSFMQAIPAPCTATHSPQVFSSFFLFFSFTTASYLIFFNLPFLCEYFPPRVRNFLFKIFFSFPFILFVSFFMQAIPAPCPQVAEDEFLPQHIDLRYFLLFSFLFLDIYFL

SEQ ID NO: 254149 - protein, 50 aa, Glycine max
  Clone ID: PAT_MRT3847_71520C.1.pep
FALLTLSLISFPSSYLYISCPVSAECYLNSSFSYHLSRAILTIYSVHFLF

SEQ ID NO: 254150 - protein, 51 aa, Glycine max
  Clone ID: PAT_MRT3847_71521C.1.pep
FFNFQLNFQLPANFLINFVKYTLENKYLLQMMLLIGDENKTDQALKGLSLA

SEQ ID NO: 254151 - protein, 38 aa, Glycine max
  Clone ID: PAT_MRT3847_71522C.1.pep
VNTFPFTHTLIFLHAIRFIAILTFYYPPPPPKKEDVIQ

SEQ ID NO: 254152 - protein, 74 aa, Glycine max
  unsure (1)..(74): unsure at all Xaa locations
  Clone ID: PAT_MRT3847_71523C.1.pep
FPFHLTRPRVIALNIANPTRGFLTKXCIYYHLKLRAFWDKRISQEVVGDALGEEFTGYFYKTYLEVRTSPAFHP

SEQ ID NO: 254153 - protein, 61 aa, Glycine max
  Clone ID: PAT_MRT3847_71524C.1.pep
VLFLLMFIKSFYRCEDLSYLCFVIVIYFEFENVGIWLISLSRLVMQCGWICFLTFQVFTHF

SEQ ID NO: 254154 - protein, 52 aa, Glycine max
  Clone ID: PAT_MRT3847_71525C.1.pep
MVLPCPAQILVGLSLDPDDSKELLSWAIRVLANPNDTIVAVHVLVAADKKKR

SEQ ID NO: 254155 - protein, 67 aa, Glycine max
  Clone ID: PAT_MRT3847_71526C.1.pep
SSLFLIHKKTNFLPSFNITKPMATVKKNQSTLHLIPTHTNTYNPSQIISYFGPNFLSSPLIITFSNI

SEQ ID NO: 254156 - protein, 72 aa, Glycine max
  Clone ID: PAT_MRT3847_71527C.1.pep
NSLLYGDLELYAKKTPTGWTVDLARGMLTFPLVNHHHPFLLDLSLQMSVLPYQALKIYTLTLPYHLRVELMA

SEQ ID NO: 254157 - protein, 68 aa, Glycine max
  unsure (1)..(68): unsure at all Xaa locations
  Clone ID: PAT_MRT3847_71528C.1.pep
NRNGSISLDILKEQWSPALTISKELLSICLLXTDSNPDDPLXYVIYHMCKTDTIAYDSTVRNWTHKYA

SEQ ID NO: 254158 - protein, 101 aa, Glycine max
  unsure (1)..(101): unsure at all Xaa locations
  Clone ID: PAT_MRT3847_71529C.1.pep
ALVVNVGDFXQLITNDKLSSVCHRVLSKKTCPRISVASFFGTFFGHSDDPVEGLQKLYGPIKELISEENPPMYRDTTIKDFVAYYYAKALDGKSSLNRFRL

SEQ ID NO: 254159 - protein, 36 aa, Glycine max
  Clone ID: PAT_MRT3847_7152C.1.pep
TELLYVSWLVLCRCPRLRSLFSGCPLRFSGCTHQSG

SEQ ID NO: 254160 - protein, 40 aa, Glycine max
  Clone ID: PAT_MRT3847_71530C.1.pep
SINKLFKNYRLKNILKFFVVPLYFHFTMNTYKLFLLFLLA

SEQ ID NO: 254161 - protein, 156 aa, Glycine max
  unsure (1)..(156): unsure at all Xaa locations
  Clone ID: PAT_MRT3847_71531C.1.pep
ITYWMAGSGPKIPAFDPRVRTLLLHVLVYXGLGLALGATVMDQKAATTLASVLMLCFLLAGGFYVQHVPVFISWVKYISINYYNYQLFIASQYSDGETYPCSTGQCRVAEFPSIKQTGFHFNLQEQVMAASALVIMMIGYRLIAYVALMRIGVTKK

SEQ ID NO: 254162 - protein, 101 aa, Glycine max
  Clone ID: PAT_MRT3847_71532C.1.pep
KLGGSKKRGPPPPKSYPPLGRGKKCPPNGGYLSFLAAPPIFWLVFNVFFIFGAPHMQAPRVYPILPPPPGWRPFFLFTRLKAPPKLFLGPLELPLLRGQFP

SEQ ID NO: 254163 - protein, 65 aa, Glycine max
  Clone ID: PAT_MRT3847_71533C.1.pep
RRGEAKKRLVPNQSMGTRSIMNTCAMGTRSRVIKCGKEKIARKIQPLCEKFLECLLLLSLLLLGL

SEQ ID NO: 254164 - protein, 55 aa, Glycine max
  Clone ID: PAT_MRT3847_71534C.1.pep
EPGQVRNNTMSQPAKKEKNVLGDIEAHMHPHNAYRKPSKGPTGVPTGPIGFYTHQ

SEQ ID NO: 254165 - protein, 73 aa, Glycine max
  unsure (1)..(73): unsure at all Xaa locations
  Clone ID: PAT_MRT3847_71535C.1.pep
IDDSEAAKSSIWATLGIKNDKADSVPGGTLFKAFPSKHDDKNHSMQASPVLQANPAAXSRTRHQKMTRLSQFL

SEQ ID NO: 254166 - protein, 76 aa, Glycine max
  Clone ID: PAT_MRT3847_71536C.1.pep
KRGTPRAAAHPTLLLQPPSEDHEAGDKKRKGRNPHQEATGAEGPRQTRRTAKKTTGTDRNNGRPARREKNPRPRPR

SEQ ID NO: 254167 - protein, 67 aa, Glycine max
  Clone ID: PAT_MRT3847_71537C.1.pep
YWTIRSPYPLKRIPTELMFLLTLNNLFVLHYFKRQVKFPSLIYKVLQCSLLSFNGCSHTSQWCAIAE

SEQ ID NO: 254168 - protein, 67 aa, Glycine max
  Clone ID: PAT_MRT3847_71538C.1.pep
TDGRTPRQSLRAVGHSFICAFIGMVPTLSHGHAFRPITNSISTVPQSAVGDVRFSIQLTAVSVDQLS

SEQ ID NO: 254169 - protein, 99 aa, Glycine max
  Clone ID: PAT_MRT3847_71539C.1.pep
VVLKVCLLLLFLVGVTAAHMELIFFKSDQSSSYDNNNYSKPCCNLYMYTHSMPPQCICKNIKLNSCHSYCKSCMCTHSHPIHYHYLNTNNFYYKPYKSR

SEQ ID NO: 254170 - protein, 61 aa, Glycine max
  Clone ID: PAT_MRT3847_7153C.1.pep
PKYHMRRKIIAVILVHDIHYMSRPQLRQSSMINQNNVILNIFICIFSIKVKQKVPFTFCLC

SEQ ID NO: 254171 - protein, 285 aa, Glycine max
  unsure (1)..(285): unsure at all Xaa locations
  Clone ID: PAT_MRT3847_71540C.1.pep
AXXMGGXXXCXNKFPPPXXXFXMXXXTPRYCSLCXSCVXXHXSHLIFXRSXCXXXXFDXFXXXTSXXALRXILXXXXTXXTXPRXFCXXXXFXXSXSXSXFXLXXXXXXXXXSXFCFXXPYPXXXPXXFVSHXXXIXIXXXXXXARLXLLSXXXXXVXXXVSXXLRXXAXXXXSAYSXXFXXSVXXXXSXXLXSFXRRXXFTFSLXXLFXSXSFLFLXXXXXLIXSFLXXXXRXSXTYCXSXFILXXXLPXLFPPCXXXXSXAXSPXLFSSFSXXPCLSSYSLFF

SEQ ID NO: 254172 - protein, 312 aa, Glycine max
  unsure (1)..(312): unsure at all Xaa locations
  Clone ID: PAT_MRT3847_71541C.1.pep
MKLCGSIWLWLILLLASVQSLGSERTDVAYVTLLYGDEFLLGVRVLGKSIRDTGSNKDMVVLVSDGVSDYANTLLQADGWIVEKISLLANPNQVRPKRFWGVYTKLKIFNMTDYKKVVYLDADTIVVKNIEELFKCGKFCANLXKHSERLNSGVMVVQPSATIFNDMMSKVKTLPSYTGGDQGFLNSYYSGFPNAHLFEPNLSPDMLDTRPVPEMERLSTLYNADVGLYMLANKWMVDENELRVIHYTLGPLKPWDWWTSWLVKPVDVWQNVREQLEESLPGTGGGQNPKDXYLVKFLFLLPICAXLFCCYR

SEQ ID NO: 254173 - protein, 331 aa, Glycine max
  Clone ID: PAT_MRT3847_71542C.1.pep
YDELRLATEEFSQENLLGVGSFGSVYKGHLSHGATVAVKVLDTLRTGSLKSFFAECEAMKNSRHRNLVKLITSCSSVDFKNNDFLALVYEYLCNGSLEDWIKGRRNHANGNGLNLMERLNIAIDVACALDYLHNDSEIPVVHCDLKPSNILLDEDMTAKVGDFGLARSLIQNSTNQVSISSTHVLRGSIGYIPPEYGWGEKPSAAGDVYSFGIVLLELFSGKSPTDECFTGGLSIRRWVQSAMKNKTVQVIDPQLLSLTFHDDPSEGPNLQLNYLDATVGVGISCTADNPDERIGIRDAVRQLKAARDSLLKLSDESPRRDTERYFHVSIK

SEQ ID NO: 254174 - protein, 52 aa, Glycine max
  Clone ID: PAT_MRT3847_71543C.1.pep
RKLSFSLDCVKHPVTQEKRIQWGHIPPCGIPHHEYRPRLVKIQYAPGDFSHP

SEQ ID NO: 254175 - protein, 97 aa, Glycine max
  Clone ID: PAT_MRT3847_71544C.1.pep
LLHNLRKDPHLSVTPFVSCVLAGFVQHSQCNEISLSPILVLILVWCCMYSQRCLHFPSYHSLYDNAMIKLSCWFDTKTSIVVIFFQYLLTVSPHFMG

SEQ ID NO: 254176 - protein, 68 aa, Glycine max
  unsure (1)..(68): unsure at all Xaa locations
  Clone ID: PAT_MRT3847_71545C.1.pep
FRPCKYRTRDDVXKVRHDQDPIEQGRNRLLTAKASEDDLKAIDAQVRDIVNAPADFAQHDPEWDAGEL

SEQ ID NO: 254177 - protein, 78 aa, Glycine max
  Clone ID: PAT_MRT3847_71546C.1.pep
REESHSEVPVCSQGIVVSCVIYDPYLVEAYKHRLAMHASASLTLEPPPDPDLGLFPSRFRFCIRSRACGASHSDLQPN

SEQ ID NO: 254178 - protein, 90 aa, Glycine max
  Clone ID: PAT_MRT3847_71547C.1.pep
KKHDIKGLCIRDKTVSFVINVASVIQVPSSNLRRENERHKWLEPILQYSTSLPLISGGALFLQQVPRRHVSPKASAITNISLLWFFIPKN

SEQ ID NO: 254179 - protein, 45 aa, Glycine max
  Clone ID: PAT_MRT3847_71548C.1.pep
NFAGIENGFSRPYTHLFFFIVNNFISINCHYIVYYSLHFKNQGNY

SEQ ID NO: 254180 - protein, 64 aa, Glycine max
  Clone ID: PAT_MRT3847_71549C.1.pep
SEKSGLTSYFMTPPSTLNPSDDDPITNNIAAQQPQMPKTVPSTETVSERDDSVYGFFRNAVMKV

SEQ ID NO: 254181 - protein, 59 aa, Glycine max
  Clone ID: PAT_MRT3847_7154C.1.pep
GGQAAIMFSPGAEPSGLITSGPAELVPIDENIPIRGKASPYGAPNKTISPDGDKAYSKA

SEQ ID NO: 254182 - protein, 90 aa, Glycine max
  Clone ID: PAT_MRT3847_71550C.1.pep
RLLFVVVFFFFILCFIKFSLNRAGGEPGIKGQELTRKKTFKRGAFIKKPGKPNERAKLRKTRCAHCPIKNRETCGDKCKKGGAQKRRKAK

SEQ ID NO: 254183 - protein, 327 aa, Glycine max
  Clone ID: PAT_MRT3847_71551C.1.pep
MEKIMRTVLMALLMAFTMLISKGEGQLVENFYSSSCPNVESMVKQAVTNKFTETITTGQATLRLFFHDCFVEGCDASVIISSPNGDTEKDAEENISLPGDGFDTVIKAKQAVEASCPGVVSCADILALATRDVIGLLGGPSFNVELGRRDGLISKASSVEGNLPKANFNLDQLNALFAKHGLTQTDVIALSGAHTVGFSHCDQFANRLYSFSSSNPVDPTLDPTYAQDLMAGCPRNPDPAVVLPLDPQSPAAFDNAYYQNLLSGKGLLTSDQVLFEDATSQPTVVRFANSAADFNDAFVAAMRKLGRVGVKTGKDGEIRRDCATFNS

SEQ ID NO: 254184 - protein, 70 aa, Glycine max
  Clone ID: PAT_MRT3847_71552C.1.pep
VRNVLVALDPMSLGRVNVPRVLLGVLSIHTPCSSAIVRSSQMQSQNQRGRRRCLSWWKLRVPWFRHCFEL

SEQ ID NO: 254185 - protein, 70 aa, Glycine max
  Clone ID: PAT_MRT3847_71553C.1.pep
ELAEPSIRDAFESCIEQGVHHIIVCPFILFPGRHWSQDIPSLSAEVVKEHPDVSYNVTAPVGLHELFVVF

SEQ ID NO: 254186 - protein, 48 aa, Glycine max
  Clone ID: PAT_MRT3847_71554C.1.pep
NISLYLKVTILKTPYSLVIPLRYFLTKTRTTNTKDSIYLSNFGTSLIS

SEQ ID NO: 254187 - protein, 36 aa, Glycine max
  unsure (1)..(36): unsure at all Xaa locations
  Clone ID: PAT_MRT3847_71555C.1.pep
SGKSFSERKDLSXRISMSPFIKKPGPNYVFYLEKTK

SEQ ID NO: 254188 - protein, 54 aa, Glycine max
  Clone ID: PAT_MRT3847_71556C.1.pep
DIKMIVGGSINPQNISQFSAALLGGVVQDQAVIGGNNGDDPLIINNLLSDLSRE

SEQ ID NO: 254189 - protein, 32 aa, Glycine max
  Clone ID: PAT_MRT3847_71557C.1.pep
ANDPHIDSSKIKNQRTRGWVRSIPDLADRDLQ

SEQ ID NO: 254190 - protein, 80 aa, Glycine max
  Clone ID: PAT_MRT3847_71558C.1.pep
NVVFMTRFDKVQDITLYQLECFTKLVPPNPKHTIPTIPKDFPAFNATKSLVCCRQKIQFSSPWFCLLRCWQRKNSHVCLQ

SEQ ID NO: 254191 - protein, 112 aa, Glycine max
  Clone ID: PAT_MRT3847_71559C.1.pep
MRSNSMMKFSSYKAVSLLWILLIMAGLVAQVQSSPCTSTFFSALVQLIPCRAAVAPFSPIPPSDSCCNALKALGQPCLCVLVNGPPISGVDRNMASQLPDKCTANFEPCDIM

SEQ ID NO: 254192 - protein, 79 aa, Glycine max
  unsure (1)..(79): unsure at all Xaa locations
  Clone ID: PAT_MRT3847_7155C.1.pep
MISSAAVTTVNRAGADMAASFTGLNVMTGFPTRKTNDDSTFIARTGCRAQCLHVXTPVGQQKSETMAYLSDLADAQLAN

SEQ ID NO: 254193 - protein, 103 aa, Glycine max
  unsure (1)..(103): unsure at all Xaa locations
  Clone ID: PAT_MRT3847_71560C.1.pep
EIPYLPHPPPWKPLYNXWIPRXAGXRHXGGWCNTTTTCVFKKXTXXGSSKYMEKQLXSTGXLXNXXEXNXDFFXWNXVXXRSCDGXXFTGXSQXEAAHLPITP

SEQ ID NO: 254194 - protein, 150 aa, Glycine max
  Clone ID: PAT_MRT3847_71561C.1.pep
QAFFLTPPFSGFKPRNQATAPWKKSSTFSFSTSKPLKFSQTIKAAPTDQTTKAPVGFTPPKLDPNTPSPIFEGSTGGFLRKAQGEEFYVFPWNSPKNQIFEMPTGGAAILRKGPNLLKLARKDHGLVLGTRFRSKYRIRYQFYRAFPMGE

SEQ ID NO: 254195 - protein, 99 aa, Glycine max
  Clone ID: PAT_MRT3847_71562C.1.pep
HAPIHHVNYSFILQTLRCYYLGGSLLCGNTITTFLHVSKPRLPTPTPPIRNTAMCRAITSTVLLTSSRVVEGVGKTPTLLSSVTPRLLAGFDSYPYRLP

SEQ ID NO: 254196 - protein, 56 aa, Glycine max
  unsure (1)..(56): unsure at all Xaa locations
  Clone ID: PAT_MRT3847_71563C.1.pep
PAVIGRWTISFSPKNIIMLHLNYINXESIKRPSGCKCSKKKKKKKGVPPSKRSSKD

SEQ ID NO: 254197 - protein, 69 aa, Glycine max
  Clone ID: PAT_MRT3847_71564C.1.pep
RLREDDRRGLTSPFLFHDAHNLSIYPSLCLLRSLEFVNLLSRILFSRTLRLRLEALRPSPLLVIASELN

SEQ ID NO: 254198 - protein, 91 aa, Glycine max
  Clone ID: PAT_MRT3847_71565C.1.pep
TNYAHFKTHRSRDTSILSVSLCLSMLALKSDILLILVANSIKDVMQLHSPQQQLHTEGEHQYSGQGLITNLRCPMENSKNHTQSKVCAYVR

SEQ ID NO: 254199 - protein, 65 aa, Glycine max
  Clone ID: PAT_MRT3847_71566C.1.pep
CPFIVNNHSFTIFTMWRSKPSRLKEEGASIRLPMVNKFLNVAMVKYRSYVSGFCTTKRSHCYASY

SEQ ID NO: 254200 - protein, 53 aa, Glycine max
  Clone ID: PAT_MRT3847_71567C.1.pep
LTRSTEVSTILSRERMKESKKRAKKIRAVAKTAAYDAAKAGEMKRAVKHPVLI

SEQ ID NO: 254201 - protein, 183 aa, Glycine max
  Clone ID: PAT_MRT3847_71568C.1.pep
ARDEIHHDTVNGTQNMLNAARAAGVKRFIHCSTEAVLAGGSGRIVNADEKTPIPNAPKNYVYSRTKALAEKLVVAANSEEMATITCRPRFIWGRGDTVVLPILAKAFQTGTFKWCNNGDYPTSHVHIENVCEGFVLAATRGRPGGVYFLADGPPTHFRTLSHVMLEHKRFPLPLVMFPSLSLV

SEQ ID NO: 254202 - protein, 94 aa, Glycine max
  unsure (1)..(94): unsure at all Xaa locations
  Clone ID: PAT_MRT3847_71569C.1.pep
HLPTLNFKWKKPFSAPLKKNGETVTQRVILXNLPQALFLFSFGLLPLFFFHFTRFSLKSFKRGAPFMVPIKKLXRFLGPKKLDKKEGSLRGPSP

SEQ ID NO: 254203 - protein, 45 aa, Glycine max
  Clone ID: PAT_MRT3847_7156C.1.pep
NPFYIQFPLNCDFVSKFRHKLDDKPNMLLLVLLLVLSWFKTSWRI

SEQ ID NO: 254204 - protein, 98 aa, Glycine max
  Clone ID: PAT_MRT3847_71570C.1.pep
SFGGRQLGISPFEKEFLGNPFGGKIVLNSRGKIAPDCWKVFSNFPQKGLKLEPDERPPRGEVRGDLGHARPFRGPPDLVTPQGGYPLWAKPFFPRGPF

SEQ ID NO: 254205 - protein, 59 aa, Glycine max
  Clone ID: PAT_MRT3847_71571C.1.pep
EETRLVVTLYENLYCLKTYTNVNITFIHLCRWKLKSYRIVGNYILKFIKGKMDNMQMMM

SEQ ID NO: 254206 - protein, 52 aa, Glycine max
  Clone ID: PAT_MRT3847_71572C.1.pep
QGIKLKSINQNRFGQFKCIFTALAKHRKVGLKCGIPNIFELGFTKNFLTTQT

SEQ ID NO: 254207 - protein, 49 aa, Glycine max
  Clone ID: PAT_MRT3847_71573C.1.pep
ALAKSLILLSVHRLHCTSNYISGNTTNSGYYMFLTGKCYQLAQQGCLLQ

SEQ ID NO: 254208 - protein, 77 aa, Glycine max
  unsure (1)..(77): unsure at all Xaa locations
  Clone ID: PAT_MRT3847_71574C.1.pep
KNLRIISFPGINWPGDLKNKGGSLPNHYLTFEGRKIGLKKLXLILTLPKTLEYQKGTVLEFPSPGPKGTRTWFLPPK

SEQ ID NO: 254209 - protein, 81 aa, Glycine max
  Clone ID: PAT_MRT3847_71575C.1.pep
TLKVIRTATLNSPRCNDNTLPISSSQYCDEVETRESAIAKPLCCVVSFIHHQLLRIFTEIPFHHTTPPSSTTERASFTTLA

SEQ ID NO: 254210 - protein, 81 aa, Glycine max
  unsure (1)..(81): unsure at all Xaa locations
  Clone ID: PAT_MRT3847_71576C.1.pep
LLAAISAIYAIHKIPSINPVLSGNVRWVSRRFAIYYGSGWFEEIVIPWRGPDTQFVXRKHARDLPCPIRINELPGWAAYPQ

SEQ ID NO: 254211 - protein, 42 aa, Glycine max
  Clone ID: PAT_MRT3847_71577C.1.pep
RNKTNYCQFDRHVATVSTKRACMCTLSCKQTRSYKIDLVVKW

SEQ ID NO: 254212 - protein, 115 aa, Glycine max
  unsure (1)..(115): unsure at all Xaa locations
  Clone ID: PAT_MRT3847_71578C.1.pep
KARKSAKTILRENFGHESVTLEPLQFNLVVIEAATNYFSNENRIGKGGFGEVYKGILLDGQQITVKRLSKSSKQGAXSFKNEVLWIAKFNRNLAALIGFCVKDEKKYIFMNVSNK

SEQ ID NO: 254213 - protein, 69 aa, Glycine max
  Clone ID: PAT_MRT3847_71579C.1.pep
RGGRMFFFFVTMLSCSPLPIKIWAKKYAPPKRAFELAFGMAIIAIGSVNGVKEVITRSGMVSAYLLNDP

SEQ ID NO: 254214 - protein, 52 aa, Glycine max
  Clone ID: PAT_MRT3847_7157C.1.pep
LWNVVKHAKQNRAIILTTHSMEEAEALCDRLGIFVNGNLQCVGNAKEVTLLN

SEQ ID NO: 254215 - protein, 59 aa, Glycine max
  unsure (1)..(59): unsure at all Xaa locations
  Clone ID: PAT_MRT3847_71580C.1.pep
ILXXRSXMXXLRXXXDLALKXXRXSFXSHXDXDSEXXGKXXESQXTEGSSXIPTYVRXX

SEQ ID NO: 254216 - protein, 125 aa, Glycine max
  Clone ID: PAT_MRT3847_71581C.1.pep
PNDGFCWGEKKKGWSPTAKVGDPSSSRELNLCTHAPGVQFNSAKYVIGVQEKGGSIYGKRAVLCLSSQGFQDPLNQPDFPTAGVSPGGKHQHTRMFEFSLQIYFLEWHNNGVHILLGILWLRPNK

SEQ ID NO: 254217 - protein, 68 aa, Glycine max
  unsure (1)..(68): unsure at all Xaa locations
  Clone ID: PAT_MRT3847_71582C.1.pep
MPMLRCFFNKAFKASKCATLLQLTIPRIKXIXNRREVHLKQMRRDVAKLLEAGQEAKASLKVEHVMRE

SEQ ID NO: 254218 - protein, 82 aa, Glycine max
  Clone ID: PAT_MRT3847_71583C.1.pep
RYLLLHKAVFMRWDHSELGEVVCSPRVIVVIFNFPLTPVQCPFSKQLSLTECVLAYGFESGINLFAYARVRVRTTSLPLTFA

SEQ ID NO: 254219 - protein, 60 aa, Glycine max
  Clone ID: PAT_MRT3847_71584C.1.pep
TNALHAFKSSTSTVKRENSPREMTRVQPPLLPGLPDDLAVTCLIRVPRIEHRKLHLVCKS

SEQ ID NO: 254220 - protein, 87 aa, Glycine max
  Clone ID: PAT_MRT3847_71585C.1.pep
MRPRPSRTRSSRSSSRRTRPPPLPPRRRTPPSSRPRRRHPLPRRPRLLLRKPPPPRPLPRTPLPPLRSRPPPSRRPPPSPSSACKRL

SEQ ID NO: 254221 - protein, 91 aa, Glycine max
  Clone ID: PAT_MRT3847_71586C.1.pep
RDRFLGLSSVGLYQFFSIEKVVAHVTWLMENVLEGDPAQYLIEKLFFLAVKRNGLDFNEWLDFPNGNRRKFNNNVLVLVVPLEGRIWKSSG

SEQ ID NO: 254222 - protein, 87 aa, Glycine max
  Clone ID: PAT_MRT3847_71587C.1.pep
LLKQYLIILCINQMASSLFRLMAAFGRDVIVANTAGSFALLIVLVLGGFVISRENVHKWFLWGYWSSPLMYGQNAIAVNEFLGHSWR

SEQ ID NO: 254223 - protein, 68 aa, Glycine max
  Clone ID: PAT_MRT3847_71588C.1.pep
IPIYISVCYIKRILQIMSLLYKPKIHSLQFYTLLCTNVSFLLYYYACTYHQISHVISQVFIPRPMNTN

SEQ ID NO: 254224 - protein, 86 aa, Glycine max
  Clone ID: PAT_MRT3847_71589C.1.pep
VGSPLLGVSAGSLGVRPGLCSVVLRAVVGCAVLRVSLARLRASLVSVLWFRFALVGVSGAFSPFRRLLSAVFGLAGAWVGPAVPAR

SEQ ID NO: 254225 - protein, 56 aa, Glycine max
  Clone ID: PAT_MRT3847_7158C.1.pep
MAHSNVCNAHPKKAGPGSGTCRVCGNPHGLISKYALMFPRQCSRSNAKEIGFIKVR

SEQ ID NO: 254226 - protein, 84 aa, Glycine max
  unsure (1)..(84): unsure at all Xaa locations
  Clone ID: PAT_MRT3847_71590C.1.pep
MASLKVTCVSLICMARXSAPMMVQARAXCNDASVNLTPGLYYLMHGGNVSKSCCTRARNILGSARTNFDKQTACQCFQKAGYFY

SEQ ID NO: 254227 - protein, 58 aa, Glycine max
  Clone ID: PAT_MRT3847_71591C.1.pep
RLESRSRAPPFFLFFFEINTNILYYIDLKSSLDSTYLIPIKGAKSFETFFFRKTSILS

SEQ ID NO: 254228 - protein, 40 aa, Glycine max
  Clone ID: PAT_MRT3847_71592C.1.pep
TNTGMGLRYPEDISHSGLSSPSVKLGCQLNDLQGPFQRRH

SEQ ID NO: 254229 - protein, 126 aa, Glycine max
  Clone ID: PAT_MRT3847_71593C.1.pep
LEPIDLAGNEDNRRTCNEGIRLQESAKINQSLFALSNVIYALNNNKTRVPYRESKLTRILQDSLGGTSRALMIACLNPGEYQESVHTVSLAARSRHVSNFVTSGHKQETPKVKVDMEAKLRAWLES

SEQ ID NO: 254230 - protein, 149 aa, Glycine max
  Clone ID: PAT_MRT3847_71594C.1.pep
AYFDIFYSRPLPPGLLPYLRLVALGGTDAFLLESIFRNSIWGHLELPVSRDNEELICRVVRETCKTALAGYHTTIEEDQKLKEAKLDSRHAIAVGIREGEKNLLQQIDEIFKEKELELAQLEYYQERRLKDLGLCGENGDILGDLGKFF

SEQ ID NO: 254231 - protein, 74 aa, Glycine max
  Clone ID: PAT_MRT3847_71595C.1.pep
KEPQEVHTSPVVPIFNRICGAPHDQTFEGKAIRGTLDPKHRQAVTLIIRLHQTRPLIGPPKHNGRGGSTQNTAR

SEQ ID NO: 254232 - protein, 45 aa, Glycine max
  Clone ID: PAT_MRT3847_71596C.1.pep
LVHVYMCVSRPDMTHMTALALRYYRESELALLVCTRVRTHALALV

SEQ ID NO: 254233 - protein, 119 aa, Glycine max
  Clone ID: PAT_MRT3847_71597C.1.pep
HLSLFKHSHAARMDIYWGQNGGEGTLAHAGTTRNYQYVNIALLHTCGNGQTPQLNLVGDCDPDNNGCTVLSRDIKTCQDLGIKVRLCLGGGAGSYSLSSPDDDTQVANYLWQNGLGGQT

SEQ ID NO: 254234 - protein, 225 aa, Glycine max
  Clone ID: PAT_MRT3847_71598C.1.pep
MATVTFSFSAKTLTLPYHPKTPISNFTPVTNLRLPPSIVTRTRNCNRIRAALDGDFSAKRSSSSNNNDQRETIMLPGCDYNHWLIVMEFPKDPAPTREQMIDTYLDTLATVLGSMEEAKKNMYAFSTTTYTGFQCTVDEATSEKFKGLPGVLWVLPDSYIDVKNKDYGGDKYINGEIIPCKYPTYQPKRSAPKNESRRYERRRDGPPPDRRRPRQEAAASDSSST

SEQ ID NO: 254235 - protein, 222 aa, Glycine max
  Clone ID: PAT_MRT3847_71599C.1.pep
MATVTFSFSAKTLTLPYHPKTSISSFAPVTNLRLSHSIVTRTRNCNRIRAALDGDFSAKRSNNNEQRETIMLPGCDYNHWLIVMEFPKDPAPTREQMIDTYLDTLATVLGSMEEAKKNMYAFSTTTYTGFQCTVDEATSEKFKGLPGVLWVLPDSYIDVKNKDYGGDKYINGEIIPCKYPTYQPKRSAPKNESRRYERRRDGPPPDRRRPRQEAAASDSSST

SEQ ID NO: 254236 - protein, 55 aa, Glycine max
  Clone ID: PAT_MRT3847_7159C.1.pep
TVHFNCIARLPSPLRLFATNQLFLTTSQQLASLSQVLIMNSWDHFWDPVMAYGPV

SEQ ID NO: 254237 - protein, 39 aa, Glycine max
  unsure (1)..(39): unsure at all Xaa locations
  Clone ID: PAT_MRT3847_715C.1.pep
YSPLQTLKHSCGCSCLASSYKFWDQCSSGKAFYXHPVTL

SEQ ID NO: 254238 - protein, 134 aa, Glycine max
  unsure (1)..(134): unsure at all Xaa locations
  Clone ID: PAT_MRT3847_71600C.1.pep
ENMYAFSTTTYTGFQCTVDEATSEKFKGLPGVLWVLPDSYIDVKNKDYGGFFLISTLIDFCSISYSTAXLCCSSLDLGDKYINGEIIPCKYPTYQPKRSAPKNESRRYERRRDGPPPDRRRPRQEAAASDSSST

SEQ ID NO: 254239 - protein, 52 aa, Glycine max
  Clone ID: PAT_MRT3847_71601C.1.pep
PRVRKNKKKKKKKKKKKKINKKKKKKKKKIKKLKKKKKSKIKKKKGGAALWV

SEQ ID NO: 254240 - protein, 227 aa, Glycine max
  unsure (1)..(227): unsure at all Xaa locations
  Clone ID: PAT_MRT3847_71602C.1.pep
MAQKKKARVSDDEEMEVQHDQTSLYQVLGVERTASQQEIKKAYYKLALRLHPDKNPGDDEEAKEKFQQLQKVISILGDEEKRALYDQTGCVDDADLAGDVVQNLQEFFRTMYKKVTEADIEEFEANYRGSDSEKNDLIDLYKKCKGNMNRLFCSMLCSDPKLDSHRFKDILDEAIASGELKAKKAYQKWAXGKVSEIKPPTNPLRRREKSNKQSETDLCAIIAQRRN

SEQ ID NO: 254241 - protein, 54 aa, Glycine max
  Clone ID: PAT_MRT3847_71603C.1.pep
GSRDVQRLLEILKDHDADKLVVQYRNDYAHADYVMGENAHRDVYEPLISFFRLQ

SEQ ID NO: 254242 - protein, 489 aa, Glycine max
  unsure (1)..(489): unsure at all Xaa locations
  Clone ID: PAT_MRT3847_71604C.1.pep
MPVDLDNVSTASGEASVSSSGNLTVPPKPTTKKKRNLPGMPDPDAEVIALSPKTLMATNRFVCEICNKGFQRDQNLQLHRRGHNLPWKLRQRSSKEVRKRVYVCPEPTCVHHDPSRALGDLTGIKKHFCRKHGEKKWKCDKCSKKYAVQSDWKAHSKICGTREYKCDCGTLFSRRDSFITHRXFCDALAEESARSQPQTVAKASSESDSKAVTGDSSPPVAVEAPPPLVPPVSSQSNSVVVPSSSLQTQKPELPENSPQIIEEPKVNTAMNGSCSSTSTSTTSSTSNSNSGASSSVFASLFASSSASATASLHSQTPAFTDLIRAMGHPDHPADLSRPSSSEPISLCLATNHGSSIFGTGRQERRQYAPPPQPAMSATALLQKAAQMGAAATNASFLRGLGIVSSSASTSSVQQDNLQWGHQPVEPESASVPAGLGLGLPCDSSSGLKELMMGTXPSMFGPKQXPLRFLGLGEWAAGGTPWVEGLSALI

SEQ ID NO: 254243 - protein, 105 aa, Glycine max
  Clone ID: PAT_MRT3847_71605C.1.pep
EEEDEQRLGDASERKSWKSLKRQRLGGERPPRGVELGRWWRKGECFTTATWRPRGNMEELRKRRRRCSLVPTAGSTRQWQGGFHVFCICLWLGVVLFGLGGGFVI

SEQ ID NO: 254244 - protein, 54 aa, Glycine max
  Clone ID: PAT_MRT3847_71606C.1.pep
HNMSLAFLPHLIFLFSIISKILPFSLCLFIFPIKIRFLSGIPLHFFKMYFHLLF

SEQ ID NO: 254245 - protein, 64 aa, Glycine max
  unsure (1)..(64): unsure at all Xaa locations
  Clone ID: PAT_MRT3847_71607C.1.pep
VPLGLLLNXTPTARGQTQRPVYTNANRVYSLTNNKYHNNIHIIPIRKVPPFGYVCSVIGFHSTL

SEQ ID NO: 254246 - protein, 378 aa, Glycine max
  Clone ID: PAT_MRT3847_71608C.1.pep
VPASSNKIGVPVEVSKENYDLTTDEVGIKSKQRITTDCGGIIESVDKPTTSEVGLESTPFSSDIGQQNPNLLDLGDAYKLAVSNSRGRPGMLVEHWLGKDSTRISEDLKILLSQFSATRGTDLSVNDISPRLSINSDEVKTCDVSNSAGIQILQKMISLERNESGLSLDGSLVSEIEGESAVDRLKRQVDHDRKLMNALYKELEEERNASAVAANQALAMITRLQEEKATLHMEALQYLRMMDEESEYETEALQKANDLLVEKEKEIEELEAKLELYRKKFPDESVLENMVDTNSEMKVKDIGLDHCIEKDESILGKSVSENTNISDKSEFLPTSLEKQNVQSVKNSPLEFQDERLYISQRFEKVEKQVYFFLNIHQS

SEQ ID NO: 254247 - protein, 170 aa, Glycine max
  unsure (1)..(170): unsure at all Xaa locations
  Clone ID: PAT_MRT3847_71609C.1.pep
NRISSHSITLXTICETILCTXNGDSISKNXREMGPXWGNIXXXILILGSDXGYGKXSTHYGSPQRGVEKILXEQGLPGTPYRVKGGDTXETLKMQXRXISRRGVSSLITYDPXCLPXIITLATNMAKILLFGDGRHQGEKKTNPELIKDVFNKIYDFGKANMGPNIKSLI

SEQ ID NO: 254248 - protein, 59 aa, Glycine max
  Clone ID: PAT_MRT3847_7160C.1.pep
CGLHCYKEIEVSAFQVMTCFTRMNAQMMMWPWMIMWNLRYWLVDKSTIFSLTRNSGQDT

SEQ ID NO: 254249 - protein, 41 aa, Glycine max
  Clone ID: PAT_MRT3847_71610C.1.pep
TINYTYFFNTVDFGLKTRQPRIFICFKNFLNRKLVPSPCFG

SEQ ID NO: 254250 - protein, 46 aa, Glycine max
  unsure (1)..(46): unsure at all Xaa locations
  Clone ID: PAT_MRT3847_71611C.1.pep
XVRCPRRXEKSTEPYHLEERDVVGFKHVRVWSGDXGVAAMGIGRRS

SEQ ID NO: 254251 - protein, 75 aa, Glycine max
  Clone ID: PAT_MRT3847_71612C.1.pep
MGMVVVISLPFIIFCFLLGFGCYFFGRARGRKEVQTNPQVYGMPSPPPGAVASNTFFPSPPAPHSHSKPDNTDNV

SEQ ID NO: 254252 - protein, 55 aa, Glycine max
  Clone ID: PAT_MRT3847_71613C.1.pep
AARRLHKGSPKYKKTTSFYYLWGDYKLKPPFVIHQAYLHELKFPDGKCEGLLLIL

SEQ ID NO: 254253 - protein, 66 aa, Glycine max
  Clone ID: PAT_MRT3847_71614C.1.pep
GRLHTLSWPKAYLEGTEREIAIPWLYLSPFQMWQALITTLKTTDKAILLIENATYDFIPLMSTINL

SEQ ID NO: 254254 - protein, 88 aa, Glycine max
  Clone ID: PAT_MRT3847_71615C.1.pep
FTYETSIFVLLAGEAYRFFSLQADPLLSPAQNTQRVSQWVKKKNKTGVKKNITNHYQIQTSVTGRHDGSDDVGHRTARRQRACDGGEC

SEQ ID NO: 254255 - protein, 226 aa, Glycine max
  unsure (1)..(226): unsure at all Xaa locations
  Clone ID: PAT_MRT3847_71616C.1.pep
MGGSVSKSRRMSSEKYVMNLKEKVRLLQEEIKEMMYEREKETRRYERDIMVFTFKEADSKQEGKRLREEVKQLRKXVEEKDEKIREIEVGMMEKNSEKEWELMGTKLLVEQMKEERARRDEAVEKWKQLYLAIKTELDELIQRTYDGDGLYWKAEENGIQMENLKKELQEKEETIKALKTQLLSMEKEKYKKEREFDLLRQSLRIMNGKKNSIQTKEKLLKSKLGK

SEQ ID NO: 254256 - protein, 104 aa, Glycine max
  Clone ID: PAT_MRT3847_71617C.1.pep
KKLLKICWRASLFIKNKYKQKGCFEKDKFEFEEIAGVSRAFSNPIFQEEEGVQLLPGEKSLKILKWSQEWTTPPGVKDVLPPRDTLFALYKSPKESRRAPKKSV

SEQ ID NO: 254257 - protein, 95 aa, Glycine max
  Clone ID: PAT_MRT3847_71618C.1.pep
RKLGTKRFAKSFDQSFESIDRSAGQYPCEHPSGLPPELPRSCIVQGIAGHDTCADTYALPRSLRTVSGSVDGAIPTGIFPVRFRAPRGLTRTRTR

SEQ ID NO: 254258 - protein, 89 aa, Glycine max
  Clone ID: PAT_MRT3847_71619C.1.pep
LGLVGTVVALNQRLGSVREALKSGRFEFAAQGLKELKVALRIGDEDDREPLVYGLLRKEWSQCFEEVLLYFLVAVFCGSVWYIRFVVMC

SEQ ID NO: 254259 - protein, 70 aa, Glycine max
  Clone ID: PAT_MRT3847_7161C.1.pep
WRAHAFGRLGWLNFQAAMGIQESWVWISNVFILMAYICRGNEENLRWIFRFSNPPVCYAFYVSLTFFCLI

SEQ ID NO: 254260 - protein, 90 aa, Glycine max
  Clone ID: PAT_MRT3847_71620C.1.pep
RARRALRALKALVKLQALVRGHIVRKQTSDMLRRMQTLVRLQSRARATRGNLSDNMHSFKSSLSHYPVSKVDIYVYLFCSFNYCHDMILI

SEQ ID NO: 254261 - protein, 59 aa, Glycine max
  Clone ID: PAT_MRT3847_71621C.1.pep
FDSQKNPFFSLKTYGLKQKKNLKTKTLPRPPKILFKKPKTPQLKPPPQKSFWPGKFPGA

SEQ ID NO: 254262 - protein, 56 aa, Glycine max
  Clone ID: PAT_MRT3847_71622C.1.pep
PRVHSPFRFNFNTDIDMLSISVHFNGHGPYNHAVRASTNLTLFDANRLDPMCPFHT

SEQ ID NO: 254263 - protein, 166 aa, Glycine max
  unsure (1)..(166): unsure at all Xaa locations
  Clone ID: PAT_MRT3847_71623C.1.pep
MCRQNSPVHHAGEEEIAADESLLIYCKPVELYNILYRRALQNPSFLRRCLLYKIRARRKRRLRAGIVIFNYRDHYNILRKTEVTEDFSCPFCLMQCGSFKGLRFHLCSSHDLFNFGFWVTEDYQAVNVSVKINIFEXENVADGVIPQSQTFFFCSRPRNRRRKDSV

SEQ ID NO: 254264 - protein, 428 aa, Glycine max
  Clone ID: PAT_MRT3847_71624C.1.pep
MCRQNSPVHHAGEEEIAADESLLIYCKPVELYNILYRRALQNPSFLRRCLRYKIRASRKRRLRAGIVIFNYRDRYNILRKTEVTEDFSCPFCLMQCGNFKGLRFHLCSSHDLFNFEFWVTEDYQAVNVSVKIDILRSENVADGVIPQSQTFFFCSRPRKRRRKDSVQIEKRTNVKFLELDSPEGIHNGFLQKDDDILSCKGENVSRTSRSEKIFPSGRNDGGKFGPDHPGTMDNLEHVESSFNIPGVSIAMPQSSVDPECSKSICKSDPALPAKTKKLSMDRSDSRNRMLLQKRLFFHSHRVQPMALEQVLSDRDSEDEVDDDIADLEDRRMLDDFVDVSKDEKQLMHLWNSFMRKQRVLADGHVPWACEAFSKLHGKELISSPALFWCWRLFMIKLWNHGLLDACTMNNCSIVLDSYRNEGSGTRKN

SEQ ID NO: 254265 - protein, 50 aa, Glycine max
  Clone ID: PAT_MRT3847_71625C.1.pep
VFLSLDDFNFTSPVKFLGNVFTRISPHLPVIYFWFSPKSCKFLFPLGRDF

SEQ ID NO: 254266 - protein, 88 aa, Glycine max
  Clone ID: PAT_MRT3847_71626C.1.pep
KYWDGMDLELQGSKKRFFFLNIMRVLFLMGVVECMCSLQKELDLAAAFCFVEATRSGVESGVKEVVFELHHNPQNAIIADNPTCYISI

SEQ ID NO: 254267 - protein, 161 aa, Glycine max
  Clone ID: PAT_MRT3847_71627C.1.pep
ILCEKALFLLLTSTYQATLQEIKKKAGSFLSSAMKYAFGLAALAALATASDVHDLTKDTFDSFVKENDLVLAEFFAPWCGHCKALAPEYEEAATELKDKDIALAKVDCTEQQELCQSYGVEGYPTLKVFRGVDNHQPYQGPRKANAIIFYMTKQSLPPVSV

SEQ ID NO: 254268 - protein, 66 aa, Glycine max
  Clone ID: PAT_MRT3847_71628C.1.pep
MSVPTIIDPMVISAPETHSISAAACILAAHSEVELAVCDCCGLTEECSPAYMERFTERFFGKWVSG

SEQ ID NO: 254269 - protein, 77 aa, Glycine max
  unsure (1)..(77): unsure at all Xaa locations
  Clone ID: PAT_MRT3847_71629C.1.pep
GFPNFFNPYQVKALGGVFPPKPFFQFQNMGVDECXGTTPPDVPLGGGSWGKPPPAPGAYYGGYYMPGGAQRGQWAPQ

SEQ ID NO: 254270 - protein, 84 aa, Glycine max
  Clone ID: PAT_MRT3847_7162C.1.pep
PMRRAHYAFLGLLKFLNFLRTHITFAAALDCRTGQQAWTGDRRSRFCVWMAGMVNIGCNHQPRIGRYVRCKILTWRLGINDCQL

SEQ ID NO: 254271 - protein, 77 aa, Glycine max
  unsure (1)..(77): unsure at all Xaa locations
  Clone ID: PAT_MRT3847_71630C.1.pep
LVASFKLVDREANTKELVMFVAADCMVAWPFHVACYQRLLIRMTTGYGGRASEVXCTRSRLAEHAHIMRSFTTITAE

SEQ ID NO: 254272 - protein, 96 aa, Glycine max
  Clone ID: PAT_MRT3847_71631C.1.pep
MASTTPSADSASADEVTAKAVHKRYQGLLTVRTKAIKGKGAWYWPHLEPMLLHNTETGLPKAVKLRCSLCDAVFSASNPSRTASEHLKRGTCPNFN

SEQ ID NO: 254273 - protein, 120 aa, Glycine max
  unsure (1)..(120): unsure at all Xaa locations
  Clone ID: PAT_MRT3847_71632C.1.pep
FILTRTRGRTRGSKSRSRLEKVSSTKAHYASAKTFKYNTTGAGSHSPEDSPEKEYQEKPKKRDARLRHRTDPQSTEVQAQMATNLSKLSLDEDETPKGPMSDLNIXNQNLHFPKNTSGGT

SEQ ID NO: 254274 - protein, 89 aa, Glycine max
  Clone ID: PAT_MRT3847_71633C.1.pep
MRAKGPPLGTNGGKKTENFFLNPKKIFPPFYIKNPAKKWNPPATKPPPRVSPPGPGGFLPPVTKPWELPPPEPPSFLKTPKAPLETPRA

SEQ ID NO: 254275 - protein, 331 aa, Glycine max
  unsure (1)..(331): unsure at all Xaa locations
  Clone ID: PAT_MRT3847_71634C.1.pep
MDQALLDDIINRLLEVRSRPGKQVQLSESEIRHLCAXSREIFLQQPNFVGSLKHPLKICGDVHGQYSDLLRLFEYGGLXPEANLLIFXGNYVDRGKQSLETICLLLAXYKIKYPENVFTFXGGIHECPSLNRVYGXHDECIGRFNFSLWQAFTECSNCLPLAALVKEKIMSIPSRTEIGFELSLVKLAALESXTDMAVSVWVGAFQXTKPSNREKRLRVKERDVTGTSSDDMGSDLQQKRDWXIMYHPNNVLEXGSPSFSNRQFETIFSAPNYXGEFDNAGAMMSVDETLMCSFQILKPADKKAKLNFGSTTTTKPGNSPAGIKSFLGTKV

SEQ ID NO: 254276 - protein, 70 aa, Glycine max
  Clone ID: PAT_MRT3847_71635C.1.pep
FLSFFLFQISAEDILGEGVRTHIGSTLTLHDTVQQARFPSVVRSSTSPLVWSTVRKTCSGVMSTACFYLE

SEQ ID NO: 254277 - protein, 326 aa, Glycine max
  Clone ID: PAT_MRT3847_71636C.1.pep
MEQSVLDDIINRLLEVRTRPGKQVQLSESEIRQLCVVSREIFLQQPNLLELEAPIKICGDVHGQYSDLLRLFEYGGLPPEANYLFLGDYVDRGKQSLETICLLLAYKIKYPENFFLLRGNHECASINRIYGFYDECKRRFNVRLWKTFTDCFNCLPVAALIDEKILCMHGGLSPDLLNLDQIRNLQRPTDVPDTGLLCDLLWSDPSKEVQGWGMNDRGVSYTFGADKVSEFLQKHDLDLICRAHQVVEDGYEFFANRQLVTIFSAPNYCGEFDNAGAMMSVDETLMCSFQILKPADKKAKLNFGSTTTAKPGNSPAGVKCFLGAKV

SEQ ID NO: 254278 - protein, 213 aa, Glycine max
  unsure (1)..(213): unsure at all Xaa locations
  Clone ID: PAT_MRT3847_71637C.1.pep
FFLLRGNHECASINRIYGFYDECKRRFNVRLWKTFTDCFNCLPVAARVDEIIXVGRKSSMHTQNLLDQIRNLQRPTDVPDTGLLCDLLWSDPSRDVQGWGMNDRGVSFTFGADKVSEFLQKHDLDLICRAHQVVEDGYEFFANRQLVTIFSAPNYCGEFDNAGAMMSVDETLMCSFQILKPADKKAKLNFGSTTTAKPGNSPAGVKCFLGAKV

SEQ ID NO: 254279 - protein, 73 aa, Glycine max
  Clone ID: PAT_MRT3847_71638C.1.pep
YEFFANRQLVTIFSAPNYCGEFDNAGAMMSVDETLMCSFQILKPADKKAKLNFGSTTTAKPGNSPAGVKVGRY

SEQ ID NO: 254280 - protein, 52 aa, Glycine max
  Clone ID: PAT_MRT3847_71639C.1.pep
MEEVCAEHKIKPTEMFRGDSSNQIERITVYDYEDRNTLFIQHAAVKDLEPRH

SEQ ID NO: 254281 - protein, 58 aa, Glycine max
  unsure (1)..(58): unsure at all Xaa locations
  Clone ID: PAT_MRT3847_7163C.1.pep
GRIQFIRFLLCYFFCNLPYLNLKWAPGKVRHQIKFTNNLFYNVWFVLFVKEFLYYIAX

SEQ ID NO: 254282 - protein, 42 aa, Glycine max
  Clone ID: PAT_MRT3847_71640C.1.pep
ARSNSVINTLYLYKNKFTLDNLLKLSQLDKSILNEKSCLRVF

SEQ ID NO: 254283 - protein, 64 aa, Glycine max
  unsure (1)..(64): unsure at all Xaa locations
  Clone ID: PAT_MRT3847_71641C.1.pep
DSGPIVLVFGIGEAATAGACADPQXYVSWDGIHATEAANSMIAYAVISGSYSYPPFDLSKLCSP

SEQ ID NO: 254284 - protein, 67 aa, Glycine max
  Clone ID: PAT_MRT3847_71642C.1.pep
ASCIRRLSLIDCYLEHIVENHHVHQKVMGGYSDFGKDAGRYTADRELYKAQEDVAACCLDYGHTVTL

SEQ ID NO: 254285 - protein, 142 aa, Glycine max
  Clone ID: PAT_MRT3847_71643C.1.pep
METILRALCWIAFLVLLTCIPRGSAQDSSCLNKLSPCLNYLNGTEDPPDSCCEPLKSVIESDAECLCSLVSNRGTRQAEQAGININEAQQLPGRCGQHVNPLSCLTNSPGPTNSDRNSATKLVHVSSGIVMMILFFSIIAHV

SEQ ID NO: 254286 - protein, 216 aa, Glycine max
  Clone ID: PAT_MRT3847_71644C.1.pep
FARERTLNMLGRAKKVMIDKENTTIVNGAGKKADIEARVSQIKAQIEETTSDYDREKLQERLAKLAGGVAVIRVGGATEVEVKERKDRVDDAMHATRAAVEEGIVPGGGVALLRASEQLKGLRTKNDDQKTGVEIVRKALSAPARQIAINAGEDGSVIVGKILENKTYAYGFDSQTGEYVNLVTKGIIDPTKVVRTAIQNAASVAALLITTEAMVA

SEQ ID NO: 254287 - protein, 222 aa, Glycine max
  unsure (1)..(222): unsure at all Xaa locations
  Clone ID: PAT_MRT3847_71645C.1.pep
PARGPAWADYKKKKKNNKKKKKKKKKKKKKKKKKKKPALWGFSLQTYLGTPFPSGQGLGTFFKKVGGDGGLLKKKRATPTRDILLSPHPPFYGEEKEYLFCKKWGKEEKPKAEGPDLFVASIPNKKKQTPLGNQKASKKAEGGIQGDNQEIGIQKKQGAAPPQGGNXNPTLPFPSPQPSXGPETIRPPFQLFSDNKKXFKVGQAPLFLRGFASERKHMKDPG

SEQ ID NO: 254288 - protein, 59 aa, Glycine max
  Clone ID: PAT_MRT3847_71646C.1.pep
QNKIVLFNKTVETHVKRQERLEINKNICKWLRRSKKGSDYNDLTHYLFLRIGQIKKKGG

SEQ ID NO: 254289 - protein, 32 aa, Glycine max
  Clone ID: PAT_MRT3847_71647C.1.pep
ATNCFGEWKLGVNPGIPVLGQLFKLLLNPLTG

SEQ ID NO: 254290 - protein, 203 aa, Glycine max
  unsure (1)..(203): unsure at all Xaa locations
  Clone ID: PAT_MRT3847_71648C.1.pep
TQRPDLFAKKIRDNSAKVERIERSDAKENLCQACGENENLVSCGTCTYAYHPRCLLPPLKGPLPDNWRCPECVSPLNDIDKILDCEMRPTTAADNEATKLGSKQIFVKQYLGKWKGLSYLHCTWVPEKEFLKAFKTHPXLKTKVNNFHQKMASVNTSDEDFVAIRPEWTTXDRILACRGDDDEREYLVKWKELPYDECYWEFE

SEQ ID NO: 254291 - protein, 52 aa, Glycine max
  Clone ID: PAT_MRT3847_71649C.1.pep
TDATRRQTGTQQDSSYYALSSHCKVCMQEFMVTTSEMKCMEHGEATDPQSDV

SEQ ID NO: 254292 - protein, 95 aa, Glycine max
  Clone ID: PAT_MRT3847_7164C.1.pep
NYTWNSPTQSSSSTNADSSKKSHCLSPSRKRTVDSCSVEHSAPLVEDLAEKLLLLLILFLFLLLFLLLLLLPLLILIVIIIMLVLLAVLAARAAR

SEQ ID NO: 254293 - protein, 62 aa, Glycine max
  Clone ID: PAT_MRT3847_71650C.1.pep
QQMKILMLFYLYYPFLLLLTLVKAFTILEWPDLKLSSISDRYTARKHNIQSPKYLENNLLLA

SEQ ID NO: 254294 - protein, 79 aa, Glycine max
  unsure (1)..(79): unsure at all Xaa locations
  Clone ID: PAT_MRT3847_71651C.1.pep
PSSYKKNHTIYLSFNYLPSFFPKIQPINSVPKWIWLKSGLQMFLLRRSPFKWTQGQYFNRVSLHNKHYKHSRXCIFDGT

SEQ ID NO: 254295 - protein, 70 aa, Glycine max
  Clone ID: PAT_MRT3847_71652C.1.pep
KNFWKENQKNSPRLDRGKTIPVAAGAINPFQVTPPEMSIDPFTCGNMLRKGVILNKCRLLPKKNPSLPKK

SEQ ID NO: 254296 - protein, 159 aa, Glycine max
  Clone ID: PAT_MRT3847_71653C.1.pep
QTQVHHLQAALAHHGHTTTHEWSTTSAATRDSSVSASVAHHCHRMNESLMTIAAAFKEGTSDHKELHQAAQRQAAAATLHIPLIEKHVEIAEQHLTVIQQTRPRHYSQSDVWHLLEESRVTDPFRMNVHDHLCDNEHRTRKLLGLPPDMRGEALIQMMT

SEQ ID NO: 254297 - protein, 61 aa, Glycine max
  unsure (1)..(61): unsure at all Xaa locations
  Clone ID: PAT_MRT3847_71654C.1.pep
GSRYXLXNPINIYFLTLITLSVAVFKPRRFHIFFLSSTESQQSYFQIFIKNILYAFYYYQI

SEQ ID NO: 254298 - protein, 178 aa, Glycine max
  Clone ID: PAT_MRT3847_71655C.1.pep
DYGELDGDSWTDQETLLLLEAMEIYNENWNEIAEHVGTKSKAQCILHFLRLPMEDGKLENINVPSMSLSSNAINRDHSGRLHCYSNGDTAGTVHQTRDSDNRLPFANSGNPVMALVAFLASAVGPRVAASCAHAALAVLSEDNSGSTSQMEAPGHDNRTNSENIHSRWWPSWRNSSFK

SEQ ID NO: 254299 - protein, 366 aa, Glycine max
  Clone ID: PAT_MRT3847_71656C.1.pep
EHVGTKSKAQCILHFLRLPVEDGKLENINVSSLSLLSNVKNHGSRDDSGRLHCYSNGDTAGPVYQTRDSDHRLPFANSGNPVMALVAFLASAVGPRVAASCAHAALAVLSGNNSGSTSHMEAPGHDNRTNSESIHYRDGGPHGETAVSNHNEDMSKVLGSWGLHEGRTTPLSAEKVKDAAKAGLSAAAMKAKLFADHEEREIQRLCANIVNHQLKRLELKLKQFAEIETLLMKECEQLERTKQRIAADRSRMMSARLGTVGATPTMNASGVGTSMASNGNNRQQIISASSSQPSISGYGNNQPVHPHMSFAPRPSMFGLGQRLPLSMIQQSQSASSTAMFNAPSNVQPTTNHPLLRPVSGTNSGLG

SEQ ID NO: 254300 - protein, 155 aa, Glycine max
  Clone ID: PAT_MRT3847_71657C.1.pep
HQLKRLELKLKQFAEIETLLMKECEQLERTKQRCAADRSRIMSARLGTVGATPTMNASGVGPSMASNGNNRQQMISASSSQPSVSGYGNNQPVHPHMSFAPRPSMFGLGQRLPLSMIQQSQPASSTAMFNAPSNVQPTTNHPLLRSVSGTNSGLG

SEQ ID NO: 254301 - protein, 105 aa, Glycine max
  Clone ID: PAT_MRT3847_71658C.1.pep
ENKKMASLYDVLGISVGASCIEIKAAYRKLARTYHPDVVAMNQKESSANQFMMIHSAYSTLSDPEKRAQYDREIYRYRRSANMEARNQTFSYAGSARKWETDQCW

SEQ ID NO: 254302 - protein, 121 aa, Glycine max
  unsure (1)..(121): unsure at all Xaa locations
  Clone ID: PAT_MRT3847_71659C.1.pep
SIMESAGVHIWAFMDATIAVASVNHADDLKRWRDRIIECLXAASSPPPQCRNCDVGNGGQIMTHSISSAEEEKDPYGGLFEDEQRKILDIKEKLRRPHQILFLLISQFMSLLFRLKRVFDF

SEQ ID NO: 254303 - protein, 60 aa, Glycine max
  Clone ID: PAT_MRT3847_7165C.1.pep
LCPSHKNLPKNSGHPQLFCPYYPFFRIQLAAMRTPLKRALSLGLYQTRASNLPRSRRLRK

SEQ ID NO: 254304 - protein, 46 aa, Glycine max
  Clone ID: PAT_MRT3847_71660C.1.pep
NFKVNSLEITEGLIYTCFLNCVLIGKMLSTEVSSMDRKFILKIYSV

SEQ ID NO: 254305 - protein, 60 aa, Glycine max
  Clone ID: PAT_MRT3847_71661C.1.pep
HIWTRYSTADTTLEDSCLPLSNTNCCIRKIVRIGLPDHWYLQVHRSLTDLSGFLHYAYCK

SEQ ID NO: 254306 - protein, 76 aa, Glycine max
  Clone ID: PAT_MRT3847_71662C.1.pep
SGKFVGPPITHDIKLINLWGSGPQVKQKGEFFFFFFKGGHCPKSNKDRAPPAGFHFMGNFCQEKTPTGILKEMKGL

SEQ ID NO: 254307 - protein, 129 aa, Glycine max
  Clone ID: PAT_MRT3847_71663C.1.pep
TFSSDFYPSSSLVVPTFVALCSIFIQSLHIFHLMANTTMVTRVFILALIILSTFFMTLQARNLHGHPSIRENNVADNNHRFLHNYLDLLKHIHVDHQDADDAPHKDGNTHRLTPEGPDPHHNFATPPRN

SEQ ID NO: 254308 - protein, 60 aa, Glycine max
  Clone ID: PAT_MRT3847_71664C.1.pep
MVGIPRSLVAGPLRRMQVQYPLGYKRISSSFYHVVYELLRGGKILCVLVTDCMSELLKHS

SEQ ID NO: 254309 - protein, 95 aa, Glycine max
  unsure (1)..(95): unsure at all Xaa locations
  Clone ID: PAT_MRT3847_71665C.1.pep
YAARRRQKGGVSTPVEIRISQSIILILPYLXLCISLPNTLIKAFGKEISHLMTIYSTNRINHPSIKDGARTQRTQLRPPHLARQSPTTSATARLR

SEQ ID NO: 254310 - protein, 49 aa, Glycine max
  Clone ID: PAT_MRT3847_71666C.1.pep
MATEEGLVDEMTYHTAITTTYPLCLLGHGITGLEIHFIHVKFYSLRVDL

SEQ ID NO: 254311 - protein, 87 aa, Glycine max
  Clone ID: PAT_MRT3847_71667C.1.pep
FTSRAQKILEQILEQYPKFANEVAKSNSVSDQIDQVIKRLETELVTVSKNYDKPALRYFFLMNNWRCVELEAIKLRLNLGCFHKDTT

SEQ ID NO: 254312 - protein, 107 aa, Glycine max
  unsure (1)..(107): unsure at all Xaa locations
  Clone ID: PAT_MRT3847_71668C.1.pep
LREDLFAGKLKXGNVIKEALNRHDAELLTSSGSYADHQLGYRKPALILIVGVNCRRMTTYPAXLSYRLKNERAKISQAADDACRAAASGQVEISSERTGCDIDVAEI

SEQ ID NO: 254313 - protein, 97 aa, Glycine max
  unsure (1)..(97): unsure at all Xaa locations
  Clone ID: PAT_MRT3847_71669C.1.pep
DALQNGDLHYENGAAPVSYSTAGNFLGLPAVTVPVVFYRLGAPIGLQFSGRPWSXSTLIHLAYAMQAICMREHRKPGLYYDLLGRKNSSNGVWWDDK

SEQ ID NO: 254314 - protein, 106 aa, Glycine max
  Clone ID: PAT_MRT3847_7166C.1.pep
VVSYKLHDREENMKLFVFFAAAGVLVAWPCHGAGYQRLPIQMKTGYGERSTPEKCSSFKLAVEAHNMRPFKTIPEECVEPTKDYINGQQLRSDFKTDNQHAFFDAN

SEQ ID NO: 254315 - protein, 64 aa, Glycine max
  Clone ID: PAT_MRT3847_71670C.1.pep
SDNTFLCLVNIQNLGSISNVAAWKRKPIFKSISSLNDPSKIGAARYTGRLSPAPCYIQFSKLVP

SEQ ID NO: 254316 - protein, 202 aa, Glycine max
  Clone ID: PAT_MRT3847_71671C.1.pep
MSSSLKRCTSYTKYEIRKRNPEPKSCALLVIDVQNHFSSMATPILHNLNTTISLCRRASIPVIFTRHCHKSPSDAGMLEEWWSGDLIVDGTAEAELLEALDRKSSDLVVEKSTYSAFRSTGLEEKLVEMGVKEVIVTGVMTNLCCETTSREAFVRGFRVFFSADATATSDVELHEAALKNLAYGFAYLVDCQRLQHALSGAK

SEQ ID NO: 254317 - protein, 67 aa, Glycine max
  Clone ID: PAT_MRT3847_71672C.1.pep
MASSVISAPAGTTVNRAGAGMVAPFTGLKSMAGCPSRRTKNDVSSIASSGGRVQCMQVWPPVGREEV

SEQ ID NO: 254318 - protein, 47 aa, Glycine max
  Clone ID: PAT_MRT3847_71673C.1.pep
DILKMGLGLLCHFMLGSCKVDCLFHYLRVPLKKKNRYIRLRLLIGMV

SEQ ID NO: 254319 - protein, 134 aa, Glycine max
  unsure (1)..(134): unsure at all Xaa locations
  Clone ID: PAT_MRT3847_71674C.1.pep
MALRRLLTSIYWLYTHGLARERHARDXILRHASCPNNCIPRSLQDHLKPDPSSDEIDDHPMLIVETQCCVTCLYKEYRYSXITLNVQFSKTLFQQPWGVGTWLKEINDTTNEGYTFEDLCIKNEALEGERNVSA

SEQ ID NO: 254320 - protein, 77 aa, Glycine max
  unsure (1)..(77): unsure at all Xaa locations
  Clone ID: PAT_MRT3847_71675C.1.pep
ALPRLWQCMDIKVILFIINIIGIITIHASNVVCCVLXVVGISNSLLSIAKIHFAGVDSIICNVLSPMICLLRMHCPQ

SEQ ID NO: 254321 - protein, 95 aa, Glycine max
  unsure (1)..(95): unsure at all Xaa locations
  Clone ID: PAT_MRT3847_71676C.1.pep
TFILSHIFFLLWTGSLYIPSATADDDHVYYTDCDNLXYGVIYYALPVIRRNGGGIQVXNHESXTCPLTVVQSGNELFEGLPNMIAFRSAGVFFIT

SEQ ID NO: 254322 - protein, 48 aa, Glycine max
  Clone ID: PAT_MRT3847_71677C.1.pep
HVYNSGTRSERGRRVFYISSQRSSCSYTFPYVIGDWSSPPNVSQPHSP

SEQ ID NO: 254323 - protein, 70 aa, Glycine max
  Clone ID: PAT_MRT3847_71678C.1.pep
LNCRDLNADATNFLYHQNSNLKLYSLNPAFEQYFKKQQLKLSLYPILAPKTYFLNMIAQNILTFLLEGGS

SEQ ID NO: 254324 - protein, 76 aa, Glycine max
  Clone ID: PAT_MRT3847_71679C.1.pep
HAQMSSRHARGDCQPPIAVSEIHLAGRHVRYDYLDKRTVYKGNKAVYLLTIFRPSNYDRSSRTKCLCEEDVLRHSV

SEQ ID NO: 254325 - protein, 91 aa, Glycine max
  unsure (1)..(91): unsure at all Xaa locations
  Clone ID: PAT_MRT3847_7167C.1.pep
MELHVKNREKLLTSLRQHLSESSRXLQDGEEQTRYDTDHLKLFMYPNPEPRHFNLSIPNSICFALRGQESFFAYFFGVIEPGFYAAIVRSL

SEQ ID NO: 254326 - protein, 48 aa, Glycine max
  Clone ID: PAT_MRT3847_71680C.1.pep
EGVTIFFLHKTCKNNHFLYQPIKNLCSDETHPNTQKTGGNSLSTAGKK

SEQ ID NO: 254327 - protein, 212 aa, Glycine max
  Clone ID: PAT_MRT3847_71681C.1.pep
RLREDDRRGCLEMYNSEHNKGDHQHHHQCAPPMSPRISFSNDFVDVKQAMKQEQRGSSRSDAPVSSDFEFSVANYSMMSADELFFKGRLMSTYNKDNCNNNNKNNHMMMMQQQRATTTTTTTLKEELLINDDDHDHDFSLRPPKPSSTRWKGLLGLRKTHIGSKKPHKSTEGGSSDATRSALVNDSPPTSITSSQEVLNEGGSSCRDLEIGI

SEQ ID NO: 254328 - protein, 75 aa, Glycine max
  unsure (1)..(75): unsure at all Xaa locations
  Clone ID: PAT_MRT3847_71682C.1.pep
VENIWSLIPQCAKXKSRQSKATAPLIGVSQHGYFMVLVKGVVPQNHPFGVKAWLISKIADKXKIKSAGGPVLLTA

SEQ ID NO: 254329 - protein, 89 aa, Glycine max
  unsure (1)..(89): unsure at all Xaa locations
  Clone ID: PAT_MRT3847_71683C.1.pep
XXXPXPHXTPXTPXXXVXLXXXXPTFWXRILXAXCDRXSRIPASSGRRWCHRRXTSRAHSXPIDRXTQPRXXFXTRTTLIPNXKPKVXR

SEQ ID NO: 254330 - protein, 39 aa, Glycine max
  Clone ID: PAT_MRT3847_71684C.1.pep
HTKDQLSCDVSIDSRQIMSASKDRSINLRNPLSECLSTM

SEQ ID NO: 254331 - protein, 110 aa, Glycine max
  Clone ID: PAT_MRT3847_71685C.1.pep
MLAIGGHGTSIRTSSTCTALLRELEILLCVQQIWNDIGETEVEKDRMLMELERECLEVYRRKVDEAVNTKARFHQTVAGKEAELATLMAALGEHDIHSPIKTEKRSVSLK

SEQ ID NO: 254332 - protein, 602 aa, Glycine max
  Clone ID: PAT_MRT3847_71686C.1.pep
MLAIGAHGTSIRTSSTCTALLRELEQIWNDIGETEVEKDRMLMELERECLEVYRRKVDEAANTKARFHQTVAAKEAELATLMAALGEHDIHSPIKMEKRSASLKQKLASITPLVEELKKKKDERLKQFEDVKTQIEKISGEIFGFHSVNNALSSTAVEDEQDLSLRRLNEYQTHLRTLQKEKSDRLQKVLQCVNEVHSLCSVLGLDFGQTVGDVHPSLHGTQVEQSTNISNSTLEGLEQAILKLKIERKTRIQKLKDVVSKLFELWNLMDSSKEERNCFMKITSIVGTSESEITERGVLSTEMIEKASAEVDRLAKLKASRMKELVFKKRSELEEICKLTHTEPDTSTTAEKASALIDSGLVDPSELLANIEAQIIKAKDEALSRKEVTDRIDKWFAACEEENWLDEYNQDDNRYCAGRGAHINLKRAERARITISKIPAMVDNLINKTLAWESAEKKTHFLYDGVRLVSILDDYKLARQQKEEDKRRHRDLKKMQDLLLNQKEAMYGSKPSPRKNNSFRKTNSYRANGNGSMPPTPRRNSLSGGTTSELLTPRSYSGRQNGYFKEMRRLSTAPLNFVAISKEDTMSYASLCGSEPDSPPQV

SEQ ID NO: 254333 - protein, 127 aa, Glycine max
  Clone ID: PAT_MRT3847_71687C.1.pep
GQPRTTLWDQVFGPEGQTLCWKHWGFFPWGGIFFTGFPKEPSIGSLLRAGAHTQQKKLGLPFFKALGPHPLETLVFFLKTKSLRPKEIFSPQKRFNWGGAPFWGPPIKNLHPFLWRKRKIIFWGKEI

SEQ ID NO: 254334 - protein, 49 aa, Glycine max
  Clone ID: PAT_MRT3847_71688C.1.pep
NRMGGFNFKNVPLFGDSIKPTVNPGVLNNVATVFKKLPRPQRRTSHIFG

SEQ ID NO: 254335 - protein, 120 aa, Glycine max
  unsure (1)..(120): unsure at all Xaa locations
  Clone ID: PAT_MRT3847_71689C.1.pep
APKAEKKPVEEKKSTVGDKAPAEKKPXAGMKLLKEGGAGGEGKNMKRIMNSVETYKIYIFNDMKQVHPDIGIXSRAMGVMNMFINNIYLKLVSKSYLLARYVXRLIITCREVETAVKLEL

SEQ ID NO: 254336 - protein, 55 aa, Glycine max
  Clone ID: PAT_MRT3847_7168C.1.pep
MAGVTKEDESGSPSWGASFFTQTTEDVARAVAAAMNSPRPSVVYSSKNDHGGSHL

SEQ ID NO: 254337 - protein, 36 aa, Glycine max
  Clone ID: PAT_MRT3847_71690C.1.pep
ARALIIVNVHRGDFSIVQEHNSYLLYRSCALGLKGK

SEQ ID NO: 254338 - protein, 517 aa, Glycine max
  Clone ID: PAT_MRT3847_71691C.1.pep
MAISDVPAAAGTTATTTSDSDLRQPSLRRRSSAGVLFDAARDSGSDNSLTGKITDDDNIKDHKPNNHAASDDNVGAAANDAGQEHRQPVADFKYAYRPSVPAHRRIKESPLSSDNIFRQSHAGLFNLCIVVLVAVNSRLFIENLMKYGWLIKYGFWFSSKSLRDWPLFMCCLSLAIFPLAAFVVERLAQQKCISEPVVVLLHLIISTVELCYPVLVILRCDSAFVSGVTLMLLTCIVWLKLVSYAHTNYDMRALTVSNEKGETLPNTLIMEYPYTVTFRSLAYFMVAPTLCYQTSYPRTPSVRKGWVFRQLVKLIIFTGVMGFIIEQYMNPIVQNSTHPLKGNLLYAIERILKLSVPNVYVWLCMFYCFFHLWLNILAELVRFGDREFYKDWWNAKTVEEYWRMWNMPVHKWMVRHIYFPCLRRGIPKGAASLIAFLVSAVFHELCIAVPCHMFKLWAFIGIMFQVPLVLITNYLQNKYRNSMVGNMIFWFIFCILGQPMSVLLYYHDLMNRKGEVD

SEQ ID NO: 254339 - protein, 54 aa, Glycine max
  Clone ID: PAT_MRT3847_71692C.1.pep
RSASDKTTHGYSMINNKHEMLQHHRGAIGVVIVSLSWACYSCAHVTGLLQQRTN

SEQ ID NO: 254340 - protein, 158 aa, Glycine max
  Clone ID: PAT_MRT3847_71693C.1.pep
LKPVKCVTIRRIPRVPETMPLYDILNEFQKGHSHMAIVGKHCDKTGYQSSNNNAYDSTRDVKVDIDGEKPPRKKNLKTKMSCHKRKSFPNANNLNKGSPQSRKWSKNMYSDILEIDGNSIPKLPEKEAAVGIITMEDVIEELLQGEIFDETDHDFEVS

SEQ ID NO: 254341 - protein, 62 aa, Glycine max
  Clone ID: PAT_MRT3847_71694C.1.pep
RNSRQIKFDKKEAILCESPIAFENMNEDCSMLVSYVVKHEPSQLGNSVLETNMNDSTERVRY

SEQ ID NO: 254342 - protein, 132 aa, Glycine max
  Clone ID: PAT_MRT3847_71695C.1.pep
MGPRQCQVCNQTQSKYKCPSCYLPYCSLVCFKKHKESPCVKPQPSETKATAVSESFVEKPLVADESSEVLQKFQLEAIASSSEIRDALNDEALQELICRIDGSSNAENELDKAMAEEAFRLFTDEILSTINP

SEQ ID NO: 254343 - protein, 44 aa, Glycine max
  Clone ID: PAT_MRT3847_71696C.1.pep
VVGGPPISCQSYGKWVPVTKMKKRLVKKNNGSLNRVVRDLINGG

SEQ ID NO: 254344 - protein, 88 aa, Glycine max
  Clone ID: PAT_MRT3847_71697C.1.pep
AINIFFFFPLLLVVVLLFLFFENCYVVPFAFSCSLVCFKKHKESPCVKPQPSETKATAVSESFVEKPLVADESSEVLQKFQLEAIASS

SEQ ID NO: 254345 - protein, 62 aa, Glycine max
  Clone ID: PAT_MRT3847_71698C.1.pep
PDTLIQTFHHTLTIFITTFLFFFPFTLFNHPPHFNFDESSEERLGKPWGSFQVSSFGSLQQG

SEQ ID NO: 254346 - protein, 174 aa, Glycine max
  unsure (1)..(174): unsure at all Xaa locations
  Clone ID: PAT_MRT3847_71699C.1.pep
MVPSVISSPAETTVNRAGAGMADPLTALKSMDGCPTXNTLIDFTSFASNGGRAQNMQAWPPVDNKKYETLYYLPDLDPAQPAKDGXYLLRTGWTPRLELELEHGFWCREHNRPPEHYDGRYWTMWKLPIMTYTDAYHASKDLXEANTAYPNGFIRIIRFNTVRQVHHMNLIDYK

SEQ ID NO: 254347 - protein, 38 aa, Glycine max
  Clone ID: PAT_MRT3847_7169C.1.pep
LAKYNVYIQCNDSTCLLHISNNIFFFKKEVACRKILSI

SEQ ID NO: 254348 - protein, 40 aa, Glycine max
  Clone ID: PAT_MRT3847_716C.1.pep
MNLMIYFHFLDRVSVSNKCLIFTLLLVYLIISIDHPEMEI

SEQ ID NO: 254349 - protein, 86 aa, Glycine max
  Clone ID: PAT_MRT3847_71700C.1.pep
PPPPPPPPPPPPPPSSPLPSPSFFFFFFFFFFLGGSFLTYKKKAWDPTSYFNLDLGLFPPWACFNFYFFLAPLFPFTQKFFPFPPC

SEQ ID NO: 254350 - protein, 250 aa, Glycine max
  Clone ID: PAT_MRT3847_71701C.1.pep
MSRRYDSRTTIFSPEGRLYQVEYAMEAIGNAGTAIGILSKDGVVLVGEKKVTSKLLQTSTSTEKMYKIDDHVACAVAGIMSDANILINTARVQAQRYAYAYQEPMPVEQLVQSLCDTKQGYTQFGGLRPFGVSFLFAGWDKNFGFQLYTSDPSGNYGGWKAAAIGANNQAAQSILKQDYKDDITREEAVQLALKVLSKTMDSTSLTSEKLELAEVFLSPAGKVKYQVCSPENLTKLLVKFGVTQPAADTA

SEQ ID NO: 254351 - protein, 36 aa, Glycine max
  Clone ID: PAT_MRT3847_71702C.1.pep
KKSWGDALESQKLLKEVLSPALKIIVGVCQGDQHLH

SEQ ID NO: 254352 - protein, 70 aa, Glycine max
  Clone ID: PAT_MRT3847_71703C.1.pep
YKGCQKSIYRDKKLDIFLLYLPLINYYVILLVNINKEYVTTFTKRGKLSLFTIHCHKQHVSAKKLLHFLS

SEQ ID NO: 254353 - protein, 56 aa, Glycine max
  Clone ID: PAT_MRT3847_71704C.1.pep
IFANMSSIINQFITIDTKYDIISHDNQIIHNSYINTNLQRPPSYHMDKQIDISDNF

SEQ ID NO: 254354 - protein, 48 aa, Glycine max
  Clone ID: PAT_MRT3847_71705C.1.pep
FFFFFFFFFFFFFFFFFFFFFFGGPKSSLFIPKNLTGDFPLGWWEGPF

SEQ ID NO: 254355 - protein, 131 aa, Glycine max
  unsure (1)..(131): unsure at all Xaa locations
  Clone ID: PAT_MRT3847_71706C.1.pep
KLGTRLEESTTGNKQTPQKRPTGGEEKPTPPLRPEPEKQKPKRAATGPKRKQPQPHNGGRGRRHQQXGHQRXTQHQAHTSNKQRTKEQKRAHHNXEHDQRDXAKKAQAPQAKGQAATHEERTKATPPQKKG

SEQ ID NO: 254356 - protein, 89 aa, Glycine max
  Clone ID: PAT_MRT3847_71707C.1.pep
LFLSLSLSHLLQALDWKLEINKTYQSLFLSAAPLVKNLFFSPKPVKGRELASSRSMVLVFLPLVFSFYMQKGGDRMMQNIYNVVTSLTT

SEQ ID NO: 254357 - protein, 111 aa, Glycine max
  Clone ID: PAT_MRT3847_71708C.1.pep
GSSRDLRWTLHRPYSNACAPGRCLLTRQLRRKSLRQLTHRCTDAIRTNEPQAQHHWQDASRGTSYSSILETGLIHAHRGVSSNSTFWVCLTPAHICQQMMAPKSYRGPTLL

SEQ ID NO: 254358 - protein, 52 aa, Glycine max
  unsure (1)..(52): unsure at all Xaa locations
  Clone ID: PAT_MRT3847_71709C.1.pep
GGLATLIMNFXLEPDTWTGLRFWAPVFAIPVDMKPRMVHWFIDGLLARLAVT

SEQ ID NO: 254359 - protein, 34 aa, Glycine max
  Clone ID: PAT_MRT3847_7170C.1.pep
LERLNSLAESHYFQERWTDIVNLYHHLGKPTRRG

SEQ ID NO: 254360 - protein, 120 aa, Glycine max
  Clone ID: PAT_MRT3847_71710C.1.pep
YTSQMVCWSRSLNLNKWRISMSMLLDSLLLNRFNIMICNIVQLLLATIFPACCVKQEKRCQPYRHSRRQYIRCKIPKWQLLSFSFQASQSKPSLGFSCLRPLRRSLPSSPFPFCRLLATE

SEQ ID NO: 254361 - protein, 108 aa, Glycine max
  Clone ID: PAT_MRT3847_71711C.1.pep
LEVAVTAAHMACSLCQRLQDTAIGIARTDHPHAQFNDDNSPVTAANCSVHTIVSWMLTECLRSQNVSIAAEEDARTLYKSYASELSKAVVDTVNQCLAESPLFVVQEP

SEQ ID NO: 254362 - protein, 140 aa, Glycine max
  unsure (1)..(140): unsure at all Xaa locations
  Clone ID: PAT_MRT3847_71712C.1.pep
GDSLGSPTVRASGGPWGATAGRLTDRGRSRSTLRGFPLIGEKPYHATTGCLPPRPFKPHARPKRANQRSLCYWDEVLEPHCHRWGXPSLVNHPLNSREVACCRAHRPALAECCFTTIGRADMERSTRTVAMTARLAQSQG

SEQ ID NO: 254363 - protein, 244 aa, Glycine max
  Clone ID: PAT_MRT3847_71713C.1.pep
MAQAVEEWYKQMPVITRSYLTAAVVTTIGCSLDIISPYHLYLNPILVVKQYQFWRLVTNFLYFRKMDLDFLFHMFFLARYCKLLEENSFRGRTADFFYMLLFGATVLTGIVLLGGMIPYLSESFAKIIFLSNSLTFMMVYVWSKQNPFIHMSFLGLFTFTAAYLPWVLLGFSVLVGASAWVDLLGMIAGHAYYFLEDVYPRMTGRRPLKTPSFIKALFADDPVVVARPANVRFAPPPAEELHQD

SEQ ID NO: 254364 - protein, 63 aa, Glycine max
  Clone ID: PAT_MRT3847_71714C.1.pep
RQTGNRCHREDLKDRSRHESRALSYSGFLFQRCTAAWISSHGTVALGSHSVPDEVTGRKFGLS

SEQ ID NO: 254365 - protein, 56 aa, Glycine max
  unsure (1)..(56): unsure at all Xaa locations
  Clone ID: PAT_MRT3847_71715C.1.pep
DKFSYKDYVSLKEPNLHFFTANISKKDGPIVKFKDNGYLPTDXPMWSIQSSVSRLW

SEQ ID NO: 254366 - protein, 71 aa, Glycine max
  Clone ID: PAT_MRT3847_71716C.1.pep
EIVKENAKGKKNNGWESIGNRRRRKKIGKSLTIHLTIQSLSSLSASFFLLASPHVKHVSIGFGFLLFPHLN

SEQ ID NO: 254367 - protein, 101 aa, Glycine max
  Clone ID: PAT_MRT3847_71717C.1.pep
LINYFALVFFICFFFFFYFVQRKKHAAPPPVEQTGDRPGGSPNKVEGGPTGWRLLPTPRGDAPLSLPPPRKIYLTPGLRKTLLKTVKPPKESLSPVFVLEQ

SEQ ID NO: 254368 - protein, 101 aa, Glycine max
  Clone ID: PAT_MRT3847_71718C.1.pep
MISVDSAALINHGLHPMNSHHLFGTRYDHIHIVLCPLSFIPRLVVTLDTSVIALTGIPVMLVLLLYTSSMPERNYCCDFTGTRIDLSKHGHLTYHAPDDQY

SEQ ID NO: 254369 - protein, 40 aa, Glycine max
  Clone ID: PAT_MRT3847_71719C.1.pep
CRIEFHVLKGSISIGIGNISSSAMSRVLTNHVPRTSRRSC

SEQ ID NO: 254370 - protein, 299 aa, Glycine max
  Clone ID: PAT_MRT3847_7171C.1.pep
SLFSKGFGISPENQEEDGTLNTSGDASGTGMGEGVGLKDVSDQIADEDQLLGTREQQNEKQDDSNEVPSSNNTGIEMEQDFQADAMSLSEDSGEDDDIDGENEELESEMGPTGPDSEAVGEKVCDENEDETPNDTREKFESGPSVKDRDGGNRELRAKDDYTTNEPGDGNCDEDDAREDDTVTPDDVEDGENADDMTMDKEAAHSDPTGLKPDELDQTLDMDLDINEDTDLMEDGELDEQGDLAENENEGNQVEETCSPDEVMEEAHTEVDVNSGKDDQGQEHQENANMNSTESKKDVS

SEQ ID NO: 254371 - protein, 150 aa, Glycine max
  Clone ID: PAT_MRT3847_71720C.1.pep
MRICSNMHRRQRAAYLLKQQAHIQREEGREGHWQVHSFVIWGSYNINASSACQEENVGKTLLSSTPGSKIAYGRLTHTVFKVSHAVLKGYEDHALKMIFDCAEHLHRNNLTTHFSRTGLNNKQDPVIRTMMVCYLLLAHVHCHVHTAIYT

SEQ ID NO: 254372 - protein, 43 aa, Glycine max
  Clone ID: PAT_MRT3847_71721C.1.pep
RIAPMGAGTSQGSTSHISESTTIQMDPVRKSVKDEKLKRRNHR

SEQ ID NO: 254373 - protein, 236 aa, Glycine max
  unsure (1)..(236): unsure at all Xaa locations
  Clone ID: PAT_MRT3847_71722C.1.pep
MGKGSFQDSVKALEADIQYANTLALGYPRDKDGGCFQMRISYSPAAPLFLFLVQWTDYRLAGALGLLRILIYVTYGNGKNTMSIYERKASIRQFYSIIFPALLQLEKGITDLEERKQKEVYALRYQRKSEXNERRQSEIDIERREXVCLVKAKVDCYICPCHYKIRKCQRSQSCPFCRDSLKRTNFGDLWIYPDTSDIVDVGTIFKENCKMLFLYIKKLPLIVPDPRYVFYDPLLK

SEQ ID NO: 254374 - protein, 229 aa, Glycine max
  Clone ID: PAT_MRT3847_71723C.1.pep
MLSFRLFVRALGYPRDKDGGCFQMRISYSPAAPLFLFLVQWTDYRLAGALGLLRILIYVTYGNGKNTMSIYERKASIRQFYSIIFPALLQLEKGITDLEERKQKEVYALRYQRKSEFNERRQSEIDIEREEECGVCLEVKAKVVLPNCCHYMCLKCYRDWCQRSQSCPFCRDSLKRTNSGDLWIYTDTSDIVDVGTIFKENCKMLFLYIEKLPLIVPDPRYVFYDPLLR

SEQ ID NO: 254375 - protein, 535 aa, Glycine max
  unsure (1)..(535): unsure at all Xaa locations
  Clone ID: PAT_MRT3847_71724C.1.pep
MGNCCATPSTDETANKKGKKGKKENPFAIDYGFNATAANGSKLTVLKSPTGREIEARYELGRELGRGEFGITYLCTDKGTGEELACKSISKKKLRTAIDIEDVRREVXEIMRHLPQHANIVTLKDTYEDDNAVHLVMELCEGGELFDRIVARGHYTERAVAVVTKTIVEDVQMCHKQGVMHRDLKPENFLFANKKETAALKAIDFGLSVFFKPGEKFNEIVGSPYYMAPEVLKRNYGAKVDIWSAGVIRYILLNGGPTFWAETXQVIEQEIRRSVKSTXRDPWPKVSDNAKDQLXMSLDPDPKRRLTAQDVLDHPWLQNAKKAPNVSLGETVRARLKQFSVMNKLKKRALRVIAEHLTVEEAAGLKEGFQVMDTNNRGKINIDELRVGLHKLGHQVPESDVQALMDAGDVDGDGHLDYGEFVAISVHLRKMGNDEHLRKAFQFFDQNKSEYIEIEELRSALSDDLDTNSEEVINAIMHDVDTDKDGRISYDEFSTMMKAGTDWRKASRQYSRERFASLSLTLMRDGSLHLNNEKQ

SEQ ID NO: 254376 - protein, 140 aa, Glycine max
  Clone ID: PAT_MRT3847_71725C.1.pep
GTGGKQKEAGANFFNLIWKRGPRGAKGKNNMPGSPDKKFQKKIKPKKGGKFFLGSRGAKGKPAPQKENRPSEKGEYSNSGQNFFPHPKDFNSGSKKKQSWEGAPNGNGQGGEKHLEKLRKGGGHRKTKRKPGVKKATEKL

SEQ ID NO: 254377 - protein, 323 aa, Glycine max
  Clone ID: PAT_MRT3847_71726C.1.pep
MKPNDNMAMLAKTDSEVSSLTQSSPTRSPRRAVYYVQSPSRDSSHDGEKTTNSFHSSPLQSPLGSPPHSHSNSSLGHHSRESASTRFSGSRKSSSSGNNRKGPWRPWKDQFHAIEEEGLIDAHDNARGFPRCCYFPAFVIGFVLLFSAFSLILWGASRPQKPAISLKSLTFDQFGIQAGADMSGVATSLVSMNSSVKMTFRNTATFFGVHVTSTPVDLNYYQLTLATGTMPKFYQSRKSQRSVRVMVIGSHIPLYGGGANLNSVNGKPVEPVPLTLSVMVRSRAYVLGKLVKPKFYKKIECSIVMDPKKMGKAISLVKKCTYQ

SEQ ID NO: 254378 - protein, 46 aa, Glycine max
  Clone ID: PAT_MRT3847_71727C.1.pep
SANNLNYRVAVPPSHRYPYSPTPRALLPPPKHRDPQRFILTQPPIK

SEQ ID NO: 254379 - protein, 120 aa, Glycine max
  Clone ID: PAT_MRT3847_71728C.1.pep
EDRNINSSLNADHPWLQNAKKAPNVSLGETVRARLKQFSVMNKLKKRALRVIAEHLTVEEAAGLKEGFQVMDTNNRGKINIDELRVGLHKLGHQVPESDVQALMDAVSITLLSPFISNLY

SEQ ID NO: 254380 - protein, 55 aa, Glycine max
  Clone ID: PAT_MRT3847_71729C.1.pep
MKLQDGRISYDEFSTMMKAGTDWRKASRQYSRERFASLSLTLMRDGSLHLNNEKQ

SEQ ID NO: 254381 - protein, 99 aa, Glycine max
  Clone ID: PAT_MRT3847_7172C.1.pep
KGPCLPMGAHTTWWHSGHSMPITMCLWVSLSLSVRRIHLFSARIRPSAHRWLESVVSPCTLLVHHRSTRGPTLFLQVLSRLPLPLERVTGHRVWTCALL

SEQ ID NO: 254382 - protein, 116 aa, Glycine max
  Clone ID: PAT_MRT3847_71730C.1.pep
TKATPVGGHWTQTRYVVLIESIVKVGSILALGGVGMWVRLVEVPLRRVNQMEGCTIIKEQGDQDRDRPYHQEGFTLYLRQDIMALFDSCTLSHLVGEGFCSVFFKLDALVLNLMVM

SEQ ID NO: 254383 - protein, 786 aa, Glycine max
  unsure (1)..(786): unsure at all Xaa locations
  Clone ID: PAT_MRT3847_71731C.1.pep
MAASEALNGTTTTSIRHAFGNVLAFFILLMIGVLAFSIRLFSVIKYESVIHEFDPYFNYRVTQFLTKNGIYDFWNWFDDRTWYPLGRVIGGTVYPGLTLTAGTLWWVLNSLNIPLSVETVCVFTAPIFSAFASWATYLLTKEVKGVGAGLTAAVLLAMVPSYISRSVAGSYDNEAVAIFALIFTFYLYIKTLNTGSLFYATLNSIAYFYMVCSWGGYTFIINLIPMHVLLCIVTGRYSSRLYIAYAPLVVLGTLLAALVPVVGFNAVMTSEHFASFLVFIIIHVVALVHYIKGILSPKMFKVAVALVVSVGLAVCCAMVAVLIALVASSPTKGWSASGLSLLDPTYASKYIPIIASVSEHQPPTWPSYFMDINVLAFLVPAGIIACFSPLSDASSFVVLYIVTSVYFSGVMVRLMLVLAPAACILSGIALSQAFDVFTRSIKLQLPSLLGHSHVDAGEASSESVVTNDSMKSDKSEDTSKERTSKKSKKKEKEPVEKPPSKSQIKKRLLVLPLETSIIAIVLLVLLGAFYVVISXTTISVHSVWAAAEAYSAPSIVLTSHSHDGLHVFDDFREAYAWLSHNTEIDDKVASWWDYGYQTTAMANRTVIVDNNTWNNTHIATVGTAMSSPEKAAWEIFHSLDVKYVLVVFGGLVGYPSDDINKFLWMVRIGGGVFPHIKEPDYLRDGQYRIDSMATPTMLNSLMYKLSYYRFVETDGKAFDRVRRTEIGKKHFKLTHFEEVFTTHHWMVRIYKLKPPKNRIRGKIKKSKFKASSKTTSKRKGLKRNPF

SEQ ID NO: 254384 - protein, 103 aa, Glycine max
  Clone ID: PAT_MRT3847_71732C.1.pep
FGGSFWGAGSLGNVSFLPGHVFGSGFPGLGGFGKFFVGPPKWFFLWGALGFLPRHISLFVFHLRIFSFVLGGCPQRGPYKILFFACLGCLGLGVAPGPSIVEL

SEQ ID NO: 254385 - protein, 393 aa, Glycine max
  unsure (1)..(393): unsure at all Xaa locations
  Clone ID: PAT_MRT3847_71733C.1.pep
MPSVYMGDRMDNSNSSLSSNSKESSVVVNGKETYKKLLVASRPKGFAQRNYEHLVSLTHGDFGSSAVGRVTFFLLKLAALETVRRFSRSKCPCVWRGLQGLQILVYPPFKWIQRWAPFRGLVKSMQVLSRPLLVLSIATVFTDQPQCSDGTSDCVASHDSEASAELSPAEANLNTSHCEIDPEVLEYENWLTLLNQELENQGISLPERINDDELHRFYTASNNDSSCFLTSIKKTISWRDSYRFLSGEELETWSNMVFWHGSDFSHRPCLIVRLGIACRSLASEDRLQFAQAVISQVEYGVLHLVDASNPQITVLVDCEGLSLVNTPMKMLGYCSSLLLEHFPNQLGXLFIIRLPAIVRVIAQTVMQVLKPSTRKKLKVRRRGIYEVLYDSMQ

SEQ ID NO: 254386 - protein, 168 aa, Glycine max
  unsure (1)..(168): unsure at all Xaa locations
  Clone ID: PAT_MRT3847_71734C.1.pep
RGSVTWMCSLQLRTNALNSYSVYSAXRAATSTAFQKGXDFFETSLMLMXFILLEKYLEMLAKVKTSDAIAKLMNLTPHTGVLMTLDGDGSVFGEEEIDSTXVQKNHVIKASPVAKGAPDGFDVWGHNHXVNDSMNSGEARPVAKRKGDTVLVGTVNETGVLHVLATRV

SEQ ID NO: 254387 - protein, 108 aa, Glycine max
  unsure (1)..(108): unsure at all Xaa locations
  Clone ID: PAT_MRT3847_71735C.1.pep
XEXTRTRXXXRXLXRRXVXNKMSAPEXCVHXXXXXXXVSXXAQLXXNSSIAYSXHPXMXXRXLXFPVPVEHCLXCEQXXXAXXVXXVXCPXXYXKXSVLXXVXALEXX

SEQ ID NO: 254388 - protein, 384 aa, Glycine max
  unsure (1)..(384): unsure at all Xaa locations
  Clone ID: PAT_MRT3847_71736C.1.pep
MVVDKMASTLLTKMLLGHRLIHPSSFLTHQPQILSSLFSKRLFCIRAVPVSASTSQNIKTTGWAPCMASSSVGRRATYSTQSVSTNEPVVSVDWLYDNLKEPDIKVLDASWYMPDEQRNPIQEYQVAHIPGALFFDVDGIADRTTKLPHMLPSAEAFAAAVSALGIENKDDLVVYDGKGLFSAARVWWMFRVFGHDRVWVLDGGLPRWRASGYDVESSASSDAILIXRPVSEAIEKVYKGQTVGPLTFQTKFQPHLVWNIDQVKKNIEDKTHQHIDARSKPRFDGTVQEPRKGIRSGHVPGSKCIPFAQLLDSSQTLLPADELKKRFEQEGISLESPAVTSCGTGVTACILALGLHRLRKSDVAVYDGSWTEWGAQSNTPVDTL

SEQ ID NO: 254389 - protein, 34 aa, Glycine max
  Clone ID: PAT_MRT3847_71737C.1.pep
IIHKASFFIVQSSDPFLSYVLVRLARGLFKIVYR

SEQ ID NO: 254390 - protein, 147 aa, Glycine max
  unsure (1)..(147): unsure at all Xaa locations
  Clone ID: PAT_MRT3847_71738C.1.pep
MVPHNDSSPTLLLYPIPESFPTCAQGPLIILLLPTTSMATYPPQHHHHHHLLCYSNPNPTYPHPQPALLIFSLGTIFNSITXXLKNFTTRIPHVLPVFDHRXSTDDIVRVLHDPADTYIPSMCLRIADQNTVXALALRNLLGHRLPL

SEQ ID NO: 254391 - protein, 149 aa, Glycine max
  Clone ID: PAT_MRT3847_71739C.1.pep
QFAGVQLYGGPRASNLLNISETHSFHLEYSSLACTVEIVDDVFAAIDHIHHHGSAHTECIVAEDSEVAETFLSQVDSAAVFHNASTRFCDGARFGLGAEVGISTSRIHARGPVGVEGLLTNRWILRGSGHVVDGDQGINYTYKELPLKA

SEQ ID NO: 254392 - protein, 77 aa, Glycine max
  Clone ID: PAT_MRT3847_7173C.1.pep
RPPPRDKMASIKKKVKRAFDFRPPKNFSKNLLSFQGNLKRGKMLLGTGAPKGPMRVMIGPTPGKRVLTKKPKIANKN

SEQ ID NO: 254393 - protein, 61 aa, Glycine max
  Clone ID: PAT_MRT3847_71740C.1.pep
LEFLFNHLPKKLPAWCNKTLCTSEKKTLSNIKLNWTFSLLTFFYSVGPFEAATVTYSFFSA

SEQ ID NO: 254394 - protein, 61 aa, Glycine max
  Clone ID: PAT_MRT3847_71741C.1.pep
WITDDSKICHFPCIALMAGSMIFRLKWMVHPRFCMNSLVSLSGSSSSIIGLSANPFGCSSS

SEQ ID NO: 254395 - protein, 59 aa, Glycine max
  Clone ID: PAT_MRT3847_71742C.1.pep
SFSARLYSLGLSTRMSAEQISRWDILCSSCIDLLHLCFLWFLNSNISFTAIYYISPLLY

SEQ ID NO: 254396 - protein, 138 aa, Glycine max
  Clone ID: PAT_MRT3847_71743C.1.pep
MEDSEKLTALKKAYADIILNTAKEAAARIMVSERKVTRFQQELVSTKEEALRMLLRLKQMFDSKVSEAELMSLNQQKKIEELEAQLQEAEEIVRDLRAELRETHAELENVTKHQMQPLVEQNTKAEVAAQERFLQKNR

SEQ ID NO: 254397 - protein, 172 aa, Glycine max
  unsure (1)..(172): unsure at all Xaa locations
  Clone ID: PAT_MRT3847_71744C.1.pep
SDESTGAEARNPRANPQLYCKGEPPGGRGRAKAMHESGEQKEVSKEQGIETTNEAKEKETGNGKGGITKTTDQRTTLTSRPESPGNPRADKPGTKGKPDEPKREARRKGAEILQQEKEPDERLDILTEEEARQGLKRNPNRTRQPQPXIKGEPNGGAESVGEKQKSGEPRKK

SEQ ID NO: 254398 - protein, 317 aa, Glycine max
  Clone ID: PAT_MRT3847_71745C.1.pep
MKKIQHSEQKATEPTKKDSKGNKQEGTDSESEQYQNEENQLHTLSEPSPSFSLRSRKSPSPPLHSLSDSPISDAHLSPAPQKPPPDSSPDSSISDGHFTIGEQRLSPAPPTVVTAHRLKVEPAVLTRVDPGAEEGFVKDVEQATGSAGSRRLRPDMTGLLRSKKIATWSKLLLGLRVTAFVFCLASFSVLATDKKQGWAIDSFYLYKEFRYSLSVNVIGFVHSALQICDLGRYFATGKHLVEHQLRGYFTFALDQILTYLLMSASSSAATRAYDWVSNWGEDKFPYMANASVALSLVAFVAFALASLVSGSIVVRFT

SEQ ID NO: 254399 - protein, 161 aa, Glycine max
  Clone ID: PAT_MRT3847_71746C.1.pep
KAPFLLGGLKGARFPTGGFFGFYGPNSPPWKGAVSQLGPPLGWPPPPNLFCPFFFFFFRRAQKKRLFFFGRGPFGYIVKVFFFFLGFGGELTLFSKVGFVGLLKNFYREIGGVYQKGFCFFLRVFLGIFFLPEIEREGPGLKIFLGFSSLLKVMAGIWFWA

SEQ ID NO: 254400 - protein, 117 aa, Glycine max
  unsure (1)..(117): unsure at all Xaa locations
  Clone ID: PAT_MRT3847_71747C.1.pep
QIFIKTLTNKTITLXVKSSNTIDNIKAKIQDKEGIPPYQHKLIFAEKQLKDEHTLTNYNIQKESTLHLVLHLRSNIQIFIKTLTNKTITPRIESSDTIDNMKTKIQDEESMPPGPAK

SEQ ID NO: 254401 - protein, 63 aa, Glycine max
  Clone ID: PAT_MRT3847_71748C.1.pep
YAYSAHGSKDKLIQLKLTPTREMGHLDAVVHLHPVIHVRYMDIVKTVSINMSAHVMFLFLLMC

SEQ ID NO: 254402 - protein, 62 aa, Glycine max
  Clone ID: PAT_MRT3847_71749C.1.pep
QRLYPLMRSQLRNCRRMKAKKVEYNLQKHSMNEWLNASYHHHLEKFDTSSCKSGVYAFCNLI

SEQ ID NO: 254403 - protein, 155 aa, Glycine max
  Clone ID: PAT_MRT3847_7174C.1.pep
WGKLGRLAGPGSGFPPRPSRTLKTNSNKTAKGMRLYLFCDKVLCSLTTLDKGLFGPKHDGYEPYVGCQKEYELDFRTLRYENICSEVTHTEAVYSRQAAVRTDKLDYGYLRRSLLRLWRVCTVIHRDLLARPEGPANTVLRTTTERPVLRERPDL

SEQ ID NO: 254404 - protein, 35 aa, Glycine max
  unsure (1)..(35): unsure at all Xaa locations
  Clone ID: PAT_MRT3847_71750C.1.pep
YYTSTLCPFSFILWYCYTKLASXNAIIFIFCGLKS

SEQ ID NO: 254405 - protein, 54 aa, Glycine max
  Clone ID: PAT_MRT3847_71751C.1.pep
PFWHHQNLHDIHSQKYILDQHDEIQFTISKEKYVFDQIHFAHIQDFKNSKFIAS

SEQ ID NO: 254406 - protein, 903 aa, Glycine max
  Clone ID: PAT_MRT3847_71752C.1.pep
MRELLLAGADPNAVDDEGESVLHRAIAKKYTDCALVILENGGCRSMAILNSKNLTPLHHCVAIWNVAVVKRWVEVATSDEIAEAIDIPSPIGTALCMAAASKKDHENEGRELVRILLAAGADPSAQDSQNGRTALHTAAMTNDVDLVKDDDGDNAFHIAAETAKMIRENLDWLIVMLMKPDADIEVRNHSGKTLRDILEALPREWLSEDLMEALVNKGVHLFPTIFKVGDWVKFKRSVTTPTHGWQGAKPKSVGFVQSVPDRDNLIVSFCSGEVHVLANEVIKVVPLDRGQHVHLKEDVKEPRFGWRGQSRDSIGTVLCVDDDGILRVGFPGASRGWKADPAEMERVEEFKVGDWVRIRPTLTSAKHGLGSVTPGSIGIVYCIRPDSSLLIELSYLPNPWHCEPEEVEHVAPFRIGDQVCVKRSVAEPRYAWGGETHHSVGRISEIENDGLLIIEIPNRPIPWQADPSDMEKVEDFKVGDWVRVKASVSSPKYGWEDVTRTSIGVIHSLEEDGDMGVAFCFRSKPFSCSVTDMEKVPPFEVGQEIHVMPSVTQPRLGWSNESPATVGKILKIDMDGALNVRVTGRQNLWKVSPGDAERVPGFEVGDWVRSKPSLGTRPSYDWNSVGRESLAVVHSVQDSGYLELACCFRKGKWITHYTDVEKVPSFKVGQYVRFRTGLVEPRWGWRGAEPESHGVITSIHADGEVRFAFFGLPGLWRGDPSDLEIEQMFEVGEWVRLNYNANNWKSIGPGSVGVVQGIGYEGDELDRSIFVGFCGEQEKWVGPSSHLERFDKLFVGQKVRVKQYVKQPRFGWSGHTHASIGTIQAIDADGKLRIYTPAGSKTWVLDPSEVEVVEEKELCIGDWVRVKASISTPTHHWGAIHVLMLINRRGGRMEAVEIGKLSC

SEQ ID NO: 254407 - protein, 1028 aa, Glycine max
  unsure (1)..(1028): unsure at all Xaa locations
  Clone ID: PAT_MRT3847_71753C.1.pep
MRELLLAGADPNAVDDEGESVLHRAIAKKYTDCALVILENGGCRSMAILNSKNLTPLHHCVAIWNVAVVKRWVEVATSDEIAEAIDIPSPIGTALCMAAASKKDHENEGRELVRILLAAGADPSAQDSQNGRTALHTAAMTNDVDLVKVILGAGVDVNIRNVHNSIPLHLALARGAKACVGLLLDAGADYNLKDDDGDNAFHIAAETAKMIRENLDWLIVMLMKPDADIEVRNHSGKTLRDILEALPREWLSEDLMEALVNKGVHLFPTIFKVGDWVKFKRSVTTPTHGWQGAKPKSVGFVQSVPDRDNLIVSFCSGEVHVLANEVIKVVPLDRGQHVHLKEDVKEPRFGWRGQSRDSIGTVLCVDDDGILRVGFPGASRGWKADPAEMERVEEFKVGDWVRIRPTLTSAKHGLGSVTPGSIGIVYCIRPDSSLLIELSYLPNPWHCEPEEVEHVAPFRIGDQVCVKRSVAEPRYAWGGETHHSVGRISEIENDGLLIIEIPNRPIPWQADPSDMEKVEDFKVGDWVRVKASVSSPKYGWEDVTRTSIGVIHSLEEDGDMGVAFCFRSKPFSCSVTDMEKVPPFEVGQEIHVMPSVTQPRLGWSNESPXAVGKILRIDMDGALNVRVTGRQNLWKVSPGDAERLPGFEVGDWVRSKPSLGTRPSYDWNSVGRESLAVVHSVQDSGYLELACCFRKGKWITHYTDVEKVPSFKVGQYVRFRTGLVEPRWGWRGAEPESHGVITSIHADGEVRVAFFGLPGLWRGDPSDLEIEQMFEVGEWVRLNYNANNWKSIGPGSVGVVQGIGYEGDELDRSIFVGFCGEQEKWVGPSSHLERFDKLFVGQKVRVKQYVKQPRFGWSGHTHASIGTIQAIDADGKLRIYTPAGSKTWVLDPSEVEVVEEKELCIGDWVRVKASISTPTHHWGEVSHSSIGVVHRMEDEDLWVSFCFTERLWLCKAWEMEWVRPFKVGDKVRIRDGLVTPRWGWGMETHASKGQVVGVDANGKLRIKFRWREGRPWIGDPADLALDED

SEQ ID NO: 254408 - protein, 98 aa, Glycine max
  Clone ID: PAT_MRT3847_71754C.1.pep
MAITPFSSTSAAQWGIHPQLLLRSSITGKVASSSHNSTGRVSFMAATSSSFFSQDSTLLNVGAPQTFNHRKGSRLIVRANADYYSVLGGSRNASKSEI

SEQ ID NO: 254409 - protein, 786 aa, Glycine max
  unsure (1)..(786): unsure at all Xaa locations
  Clone ID: PAT_MRT3847_71755C.1.pep
YLQERPALIVTFVDLDWDHPAWLEMRAECEAKINAMRQKIGQRETKLALVLIQPPKATSMDDPIANEKALELCQHCRLNSRLLFVFPRLSDDRALIERVNRLEKAFHNIAQEFYHACFKRIRSRNVPNNDAHFLVRQQYKLAFISELREDRHSALRYICLLSXCHEFDVSDVDVYEQCSVASLLNFKICELNFVLNSAVEAINQFRRHHNFFFKRESAFYPSRELAAIELTWWKAQQCRLFAELFSRAVSNGLAAYPSQNPGRFLGEAATHYKKANSLIRILKSKLAAAPQQRQKSLLAGDPLQSFDFSMTTTYYGQRPWRMTTQLSDSTAQNVTKLPLLSSVNLQLLEHGAKLFLENNIHENYAHSLQLLSAAVAQCKRYGCERFANLSLFDMAEECVASQQFSKALQILHRLCIEDTSVLFYPFLREALVSFANAAFCSLSLNEWTWALLQLLHPQLANKSVTLRVFSVGENDQSIWMENLRRFLLGDLNFLPFPLTSSANDHRSIFSIEQLNSFQSQWRQLVAQSSSPLQFQLEMSNLNYSPIKFNARFLVINSSANNKRQTNEKFAFDEEIADGFQIATADDSLLIEVVLYNISNVPLRFEYCSLTLDEILNSSGAKKSKTLSEWSTAGNSSKNSTLVLVPKRPSRVFFIYKTTFATSLKQLMQLPASKAPTSRCQSPLMDEQNAKEILITVRHFSLRTSSGSLSWDIDHRSTSNRHHQNSIEEMDKNNYAVKVRPQRCNVLLTCPILADSTELELFVDECVQLTLTLCNAERNGTLLKNIW

SEQ ID NO: 254410 - protein, 63 aa, Glycine max
  Clone ID: PAT_MRT3847_71756C.1.pep
LFVISKIQDLYLLLFSVDKTQNNFYLQKKKKKTRLSSTTTLQEALHLCITSPSLPLLAYLLSI

SEQ ID NO: 254411 - protein, 461 aa, Glycine max
  Clone ID: PAT_MRT3847_71757C.1.pep
MGNSSSAVTKIQYHGQGCIIQPQNGSRKETGECFQSYLSLSIARFRGRGRKRKVSFMAATSSSFFSQDSTLLNVGAPQTFNHRKGSRLIVRANADYYSVLGVSRNASKSEIKSAISKLFTFDISAYRKLARNYHPDVNKEPGAEQKFKEISNAYEVLSDDEKRSIYDRFGEAGLKGSAMGMGDFSNPFDLFESLFEGMNRGAGSRGSWNGAIDGEDEYYSLVLNFKEAVFGIEKEIEISRLESCGTCNGSGAKPGTTPSRCSTCGGQGRVVSSTRTPLGIFQQSMTCSSCNGTGEISTPCNTCSGDGRVRKSKRISLKVPAGVDSGSRLRVRNEGNAGRKGGSPGDLFVVIEVIPDPILKRDDTNILYTCKVSYIDAILGTTIKVPTVDGTVDLKIPAGTQPNTTLVMAKKGVPFLNKDNMRGDQLVRVQVEIPKRLSNDERKLIEELADLSKGKTATGRR

SEQ ID NO: 254412 - protein, 62 aa, Glycine max
  Clone ID: PAT_MRT3847_71758C.1.pep
SPKGSISEETKQKLKSAILSAQSAANVRKESLCQPALEVLETSSQESSLESETDEDDDYMDI

SEQ ID NO: 254413 - protein, 162 aa, Glycine max
  unsure (1)..(162): unsure at all Xaa locations
  Clone ID: PAT_MRT3847_71759C.1.pep
ADSRPPKLPKKLYIRMIDYPAFNSIGLIMGPPVTPXNAGESXTAAKNGIQGMGSVNEGWXRSKRGLKPDPPDNENXLVLGEENTPTSLEAAAGLVENLSQPEDEVLIDHKRPQFMELAAXNGTSTDEDYGPLRIDPANGQNACSTRTWWDKRETGPSTLGMV

SEQ ID NO: 254414 - protein, 86 aa, Glycine max
  Clone ID: PAT_MRT3847_7175C.1.pep
VIQNIRIWSLLEHLLVYLKRLTQSFNCLKEPCKRRNLQEGAMNARAWASKSLATVSIGEESSSRGMHLIIFTPSGLVLSGVNYVTE

SEQ ID NO: 254415 - protein, 112 aa, Glycine max
  unsure (1)..(112): unsure at all Xaa locations
  Clone ID: PAT_MRT3847_71760C.1.pep
ILKLIIHHHIITLYQVLETSTDIYIFINYLKSIQLFHYIIXNNLLQHYXSHHFFHHIIPNLEYSHRNILXHTYLYPHNLLFYSKFNINTSYSTFINIIHYFHLLKTNFCNPN

SEQ ID NO: 254416 - protein, 68 aa, Glycine max
  unsure (1)..(68): unsure at all Xaa locations
  Clone ID: PAT_MRT3847_71761C.1.pep
LGKSHLYFPEDGKLCRVKSCNIVCYGCMMGSTTYICKPRSNSHIRCFHWIMTGWSIYIYLCLYVTXKX

SEQ ID NO: 254417 - protein, 48 aa, Glycine max
  Clone ID: PAT_MRT3847_71762C.1.pep
TNPGLKLKVEKKGSLFGCFQVFFMRAYFNRGGGFNFFNFFDPFKGAHP

SEQ ID NO: 254418 - protein, 558 aa, Glycine max
  unsure (1)..(558): unsure at all Xaa locations
  Clone ID: PAT_MRT3847_71763C.1.pep
QDSNFVNAFRFLSAESVLKNEGDPCVPTPWEWVNCSTTTPPRITKINLSRRNMKGEIPRELNNMEALTELWLDGNMLTGQLPDMRNLINLKIMHLENNKLTGPLPSYLGSLPSLQALFIQNNSFSGVIPSGLLSGKIIFNFDDNPALVLKYIKYFQLVLXFLMECXLVLLIFFLSRLVILIILRRKXKLTKKCGEKRGGWRQSLTLIIMVXGMLRNIMNGRTANYITLSELEVQSQNFHEKIYWQAFXELTMGQVKSENXLEVKTMTYSSIFGNQQFVNEVALLSRIHHRNMDPLIGYXDEQYQNILVYGYMHNGTLREYIHECSSQKQLDWLARLRIAEDAAKGLEYLHTGCNPSIIHRDVKTSNILLDINMRAKVSDFGLSRLAEEDLTHISSVARGTVGYLDPEYYANQQLTEKSDVYSFGVVLLELISGKKPVSSEDYGPEMNIVHWARSLIRKGDVISIMDPSLVGNVKTESVWRVAEIAMQCVEQHGACRPRMQEVILAIQDASNIEKGSEIQLKLSSSGGSKPQSSRKTLLASFLEIESPDLSNSCLPSAR

SEQ ID NO: 254419 - protein, 68 aa, Glycine max
  Clone ID: PAT_MRT3847_71764C.1.pep
NCFKKGKKGFKKREKKKKKKRKLNPKKREETRPNKKKKKKKEKLEKKKKEQAKKRGKKKKKWPSGLKI

SEQ ID NO: 254420 - protein, 95 aa, Glycine max
  unsure (1)..(95): unsure at all Xaa locations
  Clone ID: PAT_MRT3847_71765C.1.pep
LVVKREHLLRVQPGPNPVNXLRVHPFHVRLVLWVTPLXHVRXTSLRSRYSXHFLHXLDEPLPPDNXVIGVXXTVHVFSTEXLSSSHILHAWFVNP

SEQ ID NO: 254421 - protein, 319 aa, Glycine max
  Clone ID: PAT_MRT3847_71766C.1.pep
MVEPKSRTVGNTERSWCQAVRGGTGIAVLALLTSKPPDIPKLQTSLRTLQTSHPILSSRLQTNATTFSFLTSPTPSIKILTLTLPTNLTDPLTQILELELNRNSWQDSTTEENVFFTTIYAGPTTNTWVVALRLHVSACDRTTALLLLRELLTLTEENNNTTSEQNNLANQCPKEKEMSLAIEDLVPRGKGKKSMWTRGLDMLAYSLNSFRLTNLKFVDAKNPRFSQVVRLQLNQNDTKEVLAGCKWSGIKLCGALVAAGLMAAHCSKRSSRNYGVVTLTDCRSSLESSLTDNFGFYHSAILNSHEMKGGETLWDLAKR

SEQ ID NO: 254422 - protein, 179 aa, Glycine max
  Clone ID: PAT_MRT3847_71767C.1.pep
MKPSSTTVTYPYHHGHTPQQPTNSPSSAAVSIQSAYRAHRIRVLYRKIAAVDAEADRLQRLIQRQDTVDAVRANHLEKLRMNEALMALLLRLDSVPGIDPTVRDTRRKVTRRIVGLQEILDSVSEAQIDESSWWPMKNWDEVLADMEESICLENGGDEMERFCAQNLGFRCLQRFLREP

SEQ ID NO: 254423 - protein, 49 aa, Glycine max
  unsure (1)..(49): unsure at all Xaa locations
  Clone ID: PAT_MRT3847_71768C.1.pep
FQEQDVVYXPSXRKTYPQCPPKNHICDQLKIKGLSNKSTITLYGFFIHH

SEQ ID NO: 254424 - protein, 46 aa, Glycine max
  Clone ID: PAT_MRT3847_71769C.1.pep
GFLLNFNFCFEDLILVLLIHYVYIILGCPEQNFEWVFCVQKRHMIM
